United States Patent Application Publication US 2025/0333448 A1 - sequence listing, part 7

SEQ ID NO: 126318 - protein, 15 aa, Artificial Sequence
  Description of Artificial Sequence: Synthetic peptide
  Seed: RMCSLMQGSTLPRRS
RMYSLGQSSTMPRRS

SEQ ID NO: 126319 - protein, 15 aa, Artificial Sequence
  Description of Artificial Sequence: Synthetic peptide
  Seed: RMCSLMQGSTLPRRS
RMYSLGQSSTVPRRS

SEQ ID NO: 126320 - protein, 15 aa, Artificial Sequence
  Description of Artificial Sequence: Synthetic peptide
  Seed: RMCSLMQGSTLPRRS
RMYSLGQTSTIPRRS

SEQ ID NO: 126321 - protein, 15 aa, Artificial Sequence
  Description of Artificial Sequence: Synthetic peptide
  Seed: RMCSLMQGSTLPRRS
RMYSLGQTSTLPRRS

SEQ ID NO: 126322 - protein, 15 aa, Artificial Sequence
  Description of Artificial Sequence: Synthetic peptide
  Seed: RMCSLMQGSTLPRRS
RMYSLGQTSTVPRRS

SEQ ID NO: 126323 - protein, 15 aa, Artificial Sequence
  Description of Artificial Sequence: Synthetic peptide
  Seed: RMCSLMQGSTLPRRS
RMYSLGQVSTIPRRS

SEQ ID NO: 126324 - protein, 15 aa, Artificial Sequence
  Description of Artificial Sequence: Synthetic peptide
  Seed: RMCSLMQGSTLPRRS
RMYSLGQVSTLPRRS

SEQ ID NO: 126325 - protein, 15 aa, Artificial Sequence
  Description of Artificial Sequence: Synthetic peptide
  Seed: RMCSLMQGSTLPRRS
RMYSLGQVSTVPRRS

SEQ ID NO: 126326 - protein, 15 aa, Artificial Sequence
  Description of Artificial Sequence: Synthetic peptide
  Seed: RMCSLMQGSTLPRRS
RMYSLHQASTAPRRS

SEQ ID NO: 126327 - protein, 15 aa, Artificial Sequence
  Description of Artificial Sequence: Synthetic peptide
  Seed: RMCSLMQGSTLPRRS
RMYSLHQASTIPRRS

SEQ ID NO: 126328 - protein, 15 aa, Artificial Sequence
  Description of Artificial Sequence: Synthetic peptide
  Seed: RMCSLMQGSTLPRRS
RMYSLHQASTLPRRS

SEQ ID NO: 126329 - protein, 15 aa, Artificial Sequence
  Description of Artificial Sequence: Synthetic peptide
  Seed: RMCSLMQGSTLPRRS
RMYSLHQASTMPRRS

SEQ ID NO: 126330 - protein, 15 aa, Artificial Sequence
  Description of Artificial Sequence: Synthetic peptide
  Seed: RMCSLMQGSTLPRRS
RMYSLHQASTVPRRS

SEQ ID NO: 126331 - protein, 15 aa, Artificial Sequence
  Description of Artificial Sequence: Synthetic peptide
  Seed: RMCSLMQGSTLPRRS
RMYSLHQGSTAPRRS

SEQ ID NO: 126332 - protein, 15 aa, Artificial Sequence
  Description of Artificial Sequence: Synthetic peptide
  Seed: RMCSLMQGSTLPRRS
RMYSLHQGSTIPRRS

SEQ ID NO: 126333 - protein, 15 aa, Artificial Sequence
  Description of Artificial Sequence: Synthetic peptide
  Seed: RMCSLMQGSTLPRRS
RMYSLHQGSTLPRRS

SEQ ID NO: 126334 - protein, 15 aa, Artificial Sequence
  Description of Artificial Sequence: Synthetic peptide
  Seed: RMCSLMQGSTLPRRS
RMYSLHQGSTVPRRS

SEQ ID NO: 126335 - protein, 15 aa, Artificial Sequence
  Description of Artificial Sequence: Synthetic peptide
  Seed: RMCSLMQGSTLPRRS
RMYSLHQPSTLPRRS

SEQ ID NO: 126336 - protein, 15 aa, Artificial Sequence
  Description of Artificial Sequence: Synthetic peptide
  Seed: RMCSLMQGSTLPRRS
RMYSLHQSSTAPRRS

SEQ ID NO: 126337 - protein, 15 aa, Artificial Sequence
  Description of Artificial Sequence: Synthetic peptide
  Seed: RMCSLMQGSTLPRRS
RMYSLHQSSTIPRRS

SEQ ID NO: 126338 - protein, 15 aa, Artificial Sequence
  Description of Artificial Sequence: Synthetic peptide
  Seed: RMCSLMQGSTLPRRS
RMYSLHQSSTLPRRS

SEQ ID NO: 126339 - protein, 15 aa, Artificial Sequence
  Description of Artificial Sequence: Synthetic peptide
  Seed: RMCSLMQGSTLPRRS
RMYSLHQSSTVPRRS

SEQ ID NO: 126340 - protein, 15 aa, Artificial Sequence
  Description of Artificial Sequence: Synthetic peptide
  Seed: RMCSLMQGSTLPRRS
RMYSLIQASTAPRRS

SEQ ID NO: 126341 - protein, 15 aa, Artificial Sequence
  Description of Artificial Sequence: Synthetic peptide
  Seed: RMCSLMQGSTLPRRS
RMYSLIQASTCPRRS

SEQ ID NO: 126342 - protein, 15 aa, Artificial Sequence
  Description of Artificial Sequence: Synthetic peptide
  Seed: RMCSLMQGSTLPRRS
RMYSLIQASTDPRRS

SEQ ID NO: 126343 - protein, 15 aa, Artificial Sequence
  Description of Artificial Sequence: Synthetic peptide
  Seed: RMCSLMQGSTLPRRS
RMYSLIQASTEPRRS

SEQ ID NO: 126344 - protein, 15 aa, Artificial Sequence
  Description of Artificial Sequence: Synthetic peptide
  Seed: RMCSLMQGSTLPRRS
RMYSLIQASTFPRRS

SEQ ID NO: 126345 - protein, 15 aa, Artificial Sequence
  Description of Artificial Sequence: Synthetic peptide
  Seed: RMCSLMQGSTLPRRS
RMYSLIQASTGPRRS

SEQ ID NO: 126346 - protein, 15 aa, Artificial Sequence
  Description of Artificial Sequence: Synthetic peptide
  Seed: RMCSLMQGSTLPRRS
RMYSLIQASTHPRRS

SEQ ID NO: 126347 - protein, 15 aa, Artificial Sequence
  Description of Artificial Sequence: Synthetic peptide
  Seed: RMCSLMQGSTLPRRS
RMYSLIQASTIPRRS

SEQ ID NO: 126348 - protein, 15 aa, Artificial Sequence
  Description of Artificial Sequence: Synthetic peptide
  Seed: RMCSLMQGSTLPRRS
RMYSLIQASTKPRRS

SEQ ID NO: 126349 - protein, 15 aa, Artificial Sequence
  Description of Artificial Sequence: Synthetic peptide
  Seed: RMCSLMQGSTLPRRS
RMYSLIQASTLPRRS

SEQ ID NO: 126350 - protein, 15 aa, Artificial Sequence
  Description of Artificial Sequence: Synthetic peptide
  Seed: RMCSLMQGSTLPRRS
RMYSLIQASTMPRRS

SEQ ID NO: 126351 - protein, 15 aa, Artificial Sequence
  Description of Artificial Sequence: Synthetic peptide
  Seed: RMCSLMQGSTLPRRS
RMYSLIQASTNPRRS

SEQ ID NO: 126352 - protein, 15 aa, Artificial Sequence
  Description of Artificial Sequence: Synthetic peptide
  Seed: RMCSLMQGSTLPRRS
RMYSLIQASTPPRRS

SEQ ID NO: 126353 - protein, 15 aa, Artificial Sequence
  Description of Artificial Sequence: Synthetic peptide
  Seed: RMCSLMQGSTLPRRS
RMYSLIQASTQPRRS

SEQ ID NO: 126354 - protein, 15 aa, Artificial Sequence
  Description of Artificial Sequence: Synthetic peptide
  Seed: RMCSLMQGSTLPRRS
RMYSLIQASTRPRRS

SEQ ID NO: 126355 - protein, 15 aa, Artificial Sequence
  Description of Artificial Sequence: Synthetic peptide
  Seed: RMCSLMQGSTLPRRS
RMYSLIQASTSPRRS

SEQ ID NO: 126356 - protein, 15 aa, Artificial Sequence
  Description of Artificial Sequence: Synthetic peptide
  Seed: RMCSLMQGSTLPRRS
RMYSLIQASTTPRRS

SEQ ID NO: 126357 - protein, 15 aa, Artificial Sequence
  Description of Artificial Sequence: Synthetic peptide
  Seed: RMCSLMQGSTLPRRS
RMYSLIQASTVPRRS

SEQ ID NO: 126358 - protein, 15 aa, Artificial Sequence
  Description of Artificial Sequence: Synthetic peptide
  Seed: RMCSLMQGSTLPRRS
RMYSLIQASTWPRRS

SEQ ID NO: 126359 - protein, 15 aa, Artificial Sequence
  Description of Artificial Sequence: Synthetic peptide
  Seed: RMCSLMQGSTLPRRS
RMYSLIQASTYPRRS

SEQ ID NO: 126360 - protein, 15 aa, Artificial Sequence
  Description of Artificial Sequence: Synthetic peptide
  Seed: RMCSLMQGSTLPRRS
RMYSLIQCSTVPRRS

SEQ ID NO: 126361 - protein, 15 aa, Artificial Sequence
  Description of Artificial Sequence: Synthetic peptide
  Seed: RMCSLMQGSTLPRRS
RMYSLIQESTLPRRS

SEQ ID NO: 126362 - protein, 15 aa, Artificial Sequence
  Description of Artificial Sequence: Synthetic peptide
  Seed: RMCSLMQGSTLPRRS
RMYSLIQGSTAPRRS

SEQ ID NO: 126363 - protein, 15 aa, Artificial Sequence
  Description of Artificial Sequence: Synthetic peptide
  Seed: RMCSLMQGSTLPRRS
RMYSLIQGSTCPRRS

SEQ ID NO: 126364 - protein, 15 aa, Artificial Sequence
  Description of Artificial Sequence: Synthetic peptide
  Seed: RMCSLMQGSTLPRRS
RMYSLIQGSTFPRRS

SEQ ID NO: 126365 - protein, 15 aa, Artificial Sequence
  Description of Artificial Sequence: Synthetic peptide
  Seed: RMCSLMQGSTLPRRS
RMYSLIQGSTGPRRS

SEQ ID NO: 126366 - protein, 15 aa, Artificial Sequence
  Description of Artificial Sequence: Synthetic peptide
  Seed: RMCSLMQGSTLPRRS
RMYSLIQGSTHPRRS

SEQ ID NO: 126367 - protein, 15 aa, Artificial Sequence
  Description of Artificial Sequence: Synthetic peptide
  Seed: RMCSLMQGSTLPRRS
RMYSLIQGSTIPRRS

SEQ ID NO: 126368 - protein, 15 aa, Artificial Sequence
  Description of Artificial Sequence: Synthetic peptide
  Seed: RMCSLMQGSTLPRRS
RMYSLIQGSTLPRRS

SEQ ID NO: 126369 - protein, 15 aa, Artificial Sequence
  Description of Artificial Sequence: Synthetic peptide
  Seed: RMCSLMQGSTLPRRS
RMYSLIQGSTMPRRS

SEQ ID NO: 126370 - protein, 15 aa, Artificial Sequence
  Description of Artificial Sequence: Synthetic peptide
  Seed: RMCSLMQGSTLPRRS
RMYSLIQGSTNPRRS

SEQ ID NO: 126371 - protein, 15 aa, Artificial Sequence
  Description of Artificial Sequence: Synthetic peptide
  Seed: RMCSLMQGSTLPRRS
RMYSLIQGSTPPRRS

SEQ ID NO: 126372 - protein, 15 aa, Artificial Sequence
  Description of Artificial Sequence: Synthetic peptide
  Seed: RMCSLMQGSTLPRRS
RMYSLIQGSTQPRRS

SEQ ID NO: 126373 - protein, 15 aa, Artificial Sequence
  Description of Artificial Sequence: Synthetic peptide
  Seed: RMCSLMQGSTLPRRS
RMYSLIQGSTSPRRS

SEQ ID NO: 126374 - protein, 15 aa, Artificial Sequence
  Description of Artificial Sequence: Synthetic peptide
  Seed: RMCSLMQGSTLPRRS
RMYSLIQGSTTPRRS

SEQ ID NO: 126375 - protein, 15 aa, Artificial Sequence
  Description of Artificial Sequence: Synthetic peptide
  Seed: RMCSLMQGSTLPRRS
RMYSLIQGSTVPRRS

SEQ ID NO: 126376 - protein, 15 aa, Artificial Sequence
  Description of Artificial Sequence: Synthetic peptide
  Seed: RMCSLMQGSTLPRRS
RMYSLIQGSTYPRRS

SEQ ID NO: 126377 - protein, 15 aa, Artificial Sequence
  Description of Artificial Sequence: Synthetic peptide
  Seed: RMCSLMQGSTLPRRS
RMYSLIQHSTAPRRS

SEQ ID NO: 126378 - protein, 15 aa, Artificial Sequence
  Description of Artificial Sequence: Synthetic peptide
  Seed: RMCSLMQGSTLPRRS
RMYSLIQHSTIPRRS

SEQ ID NO: 126379 - protein, 15 aa, Artificial Sequence
  Description of Artificial Sequence: Synthetic peptide
  Seed: RMCSLMQGSTLPRRS
RMYSLIQHSTLPRRS

SEQ ID NO: 126380 - protein, 15 aa, Artificial Sequence
  Description of Artificial Sequence: Synthetic peptide
  Seed: RMCSLMQGSTLPRRS
RMYSLIQHSTVPRRS

SEQ ID NO: 126381 - protein, 15 aa, Artificial Sequence
  Description of Artificial Sequence: Synthetic peptide
  Seed: RMCSLMQGSTLPRRS
RMYSLIQISTAPRRS

SEQ ID NO: 126382 - protein, 15 aa, Artificial Sequence
  Description of Artificial Sequence: Synthetic peptide
  Seed: RMCSLMQGSTLPRRS
RMYSLIQISTGPRRS

SEQ ID NO: 126383 - protein, 15 aa, Artificial Sequence
  Description of Artificial Sequence: Synthetic peptide
  Seed: RMCSLMQGSTLPRRS
RMYSLIQISTHPRRS

SEQ ID NO: 126384 - protein, 15 aa, Artificial Sequence
  Description of Artificial Sequence: Synthetic peptide
  Seed: RMCSLMQGSTLPRRS
RMYSLIQISTIPRRS

SEQ ID NO: 126385 - protein, 15 aa, Artificial Sequence
  Description of Artificial Sequence: Synthetic peptide
  Seed: RMCSLMQGSTLPRRS
RMYSLIQISTLPRRS

SEQ ID NO: 126386 - protein, 15 aa, Artificial Sequence
  Description of Artificial Sequence: Synthetic peptide
  Seed: RMCSLMQGSTLPRRS
RMYSLIQISTMPRRS

SEQ ID NO: 126387 - protein, 15 aa, Artificial Sequence
  Description of Artificial Sequence: Synthetic peptide
  Seed: RMCSLMQGSTLPRRS
RMYSLIQISTNPRRS

SEQ ID NO: 126388 - protein, 15 aa, Artificial Sequence
  Description of Artificial Sequence: Synthetic peptide
  Seed: RMCSLMQGSTLPRRS
RMYSLIQISTPPRRS

SEQ ID NO: 126389 - protein, 15 aa, Artificial Sequence
  Description of Artificial Sequence: Synthetic peptide
  Seed: RMCSLMQGSTLPRRS
RMYSLIQISTQPRRS

SEQ ID NO: 126390 - protein, 15 aa, Artificial Sequence
  Description of Artificial Sequence: Synthetic peptide
  Seed: RMCSLMQGSTLPRRS
RMYSLIQISTSPRRS

SEQ ID NO: 126391 - protein, 15 aa, Artificial Sequence
  Description of Artificial Sequence: Synthetic peptide
  Seed: RMCSLMQGSTLPRRS
RMYSLIQISTTPRRS

SEQ ID NO: 126392 - protein, 15 aa, Artificial Sequence
  Description of Artificial Sequence: Synthetic peptide
  Seed: RMCSLMQGSTLPRRS
RMYSLIQISTVPRRS

SEQ ID NO: 126393 - protein, 15 aa, Artificial Sequence
  Description of Artificial Sequence: Synthetic peptide
  Seed: RMCSLMQGSTLPRRS
RMYSLIQLSTAPRRS

SEQ ID NO: 126394 - protein, 15 aa, Artificial Sequence
  Description of Artificial Sequence: Synthetic peptide
  Seed: RMCSLMQGSTLPRRS
RMYSLIQLSTIPRRS

SEQ ID NO: 126395 - protein, 15 aa, Artificial Sequence
  Description of Artificial Sequence: Synthetic peptide
  Seed: RMCSLMQGSTLPRRS
RMYSLIQLSTLPRRS

SEQ ID NO: 126396 - protein, 15 aa, Artificial Sequence
  Description of Artificial Sequence: Synthetic peptide
  Seed: RMCSLMQGSTLPRRS
RMYSLIQLSTMPRRS

SEQ ID NO: 126397 - protein, 15 aa, Artificial Sequence
  Description of Artificial Sequence: Synthetic peptide
  Seed: RMCSLMQGSTLPRRS
RMYSLIQLSTNPRRS

SEQ ID NO: 126398 - protein, 15 aa, Artificial Sequence
  Description of Artificial Sequence: Synthetic peptide
  Seed: RMCSLMQGSTLPRRS
RMYSLIQLSTSPRRS

SEQ ID NO: 126399 - protein, 15 aa, Artificial Sequence
  Description of Artificial Sequence: Synthetic peptide
  Seed: RMCSLMQGSTLPRRS
RMYSLIQLSTTPRRS

SEQ ID NO: 126400 - protein, 15 aa, Artificial Sequence
  Description of Artificial Sequence: Synthetic peptide
  Seed: RMCSLMQGSTLPRRS
RMYSLIQLSTVPRRS

SEQ ID NO: 126401 - protein, 15 aa, Artificial Sequence
  Description of Artificial Sequence: Synthetic peptide
  Seed: RMCSLMQGSTLPRRS
RMYSLIQMSTAPRRS

SEQ ID NO: 126402 - protein, 15 aa, Artificial Sequence
  Description of Artificial Sequence: Synthetic peptide
  Seed: RMCSLMQGSTLPRRS
RMYSLIQMSTIPRRS

SEQ ID NO: 126403 - protein, 15 aa, Artificial Sequence
  Description of Artificial Sequence: Synthetic peptide
  Seed: RMCSLMQGSTLPRRS
RMYSLIQMSTMPRRS

SEQ ID NO: 126404 - protein, 15 aa, Artificial Sequence
  Description of Artificial Sequence: Synthetic peptide
  Seed: RMCSLMQGSTLPRRS
RMYSLIQMSTNPRRS

SEQ ID NO: 126405 - protein, 15 aa, Artificial Sequence
  Description of Artificial Sequence: Synthetic peptide
  Seed: RMCSLMQGSTLPRRS
RMYSLIQMSTSPRRS

SEQ ID NO: 126406 - protein, 15 aa, Artificial Sequence
  Description of Artificial Sequence: Synthetic peptide
  Seed: RMCSLMQGSTLPRRS
RMYSLIQMSTTPRRS

SEQ ID NO: 126407 - protein, 15 aa, Artificial Sequence
  Description of Artificial Sequence: Synthetic peptide
  Seed: RMCSLMQGSTLPRRS
RMYSLIQMSTVPRRS

SEQ ID NO: 126408 - protein, 15 aa, Artificial Sequence
  Description of Artificial Sequence: Synthetic peptide
  Seed: RMCSLMQGSTLPRRS
RMYSLIQNSTAPRRS

SEQ ID NO: 126409 - protein, 15 aa, Artificial Sequence
  Description of Artificial Sequence: Synthetic peptide
  Seed: RMCSLMQGSTLPRRS
RMYSLIQNSTGPRRS

SEQ ID NO: 126410 - protein, 15 aa, Artificial Sequence
  Description of Artificial Sequence: Synthetic peptide
  Seed: RMCSLMQGSTLPRRS
RMYSLIQNSTIPRRS

SEQ ID NO: 126411 - protein, 15 aa, Artificial Sequence
  Description of Artificial Sequence: Synthetic peptide
  Seed: RMCSLMQGSTLPRRS
RMYSLIQNSTLPRRS

SEQ ID NO: 126412 - protein, 15 aa, Artificial Sequence
  Description of Artificial Sequence: Synthetic peptide
  Seed: RMCSLMQGSTLPRRS
RMYSLIQNSTMPRRS

SEQ ID NO: 126413 - protein, 15 aa, Artificial Sequence
  Description of Artificial Sequence: Synthetic peptide
  Seed: RMCSLMQGSTLPRRS
RMYSLIQNSTNPRRS

SEQ ID NO: 126414 - protein, 15 aa, Artificial Sequence
  Description of Artificial Sequence: Synthetic peptide
  Seed: RMCSLMQGSTLPRRS
RMYSLIQNSTQPRRS

SEQ ID NO: 126415 - protein, 15 aa, Artificial Sequence
  Description of Artificial Sequence: Synthetic peptide
  Seed: RMCSLMQGSTLPRRS
RMYSLIQNSTSPRRS

SEQ ID NO: 126416 - protein, 15 aa, Artificial Sequence
  Description of Artificial Sequence: Synthetic peptide
  Seed: RMCSLMQGSTLPRRS
RMYSLIQNSTTPRRS

SEQ ID NO: 126417 - protein, 15 aa, Artificial Sequence
  Description of Artificial Sequence: Synthetic peptide
  Seed: RMCSLMQGSTLPRRS
RMYSLIQNSTVPRRS

SEQ ID NO: 126418 - protein, 15 aa, Artificial Sequence
  Description of Artificial Sequence: Synthetic peptide
  Seed: RMCSLMQGSTLPRRS
RMYSLIQPSTAPRRS

SEQ ID NO: 126419 - protein, 15 aa, Artificial Sequence
  Description of Artificial Sequence: Synthetic peptide
  Seed: RMCSLMQGSTLPRRS
RMYSLIQPSTCPRRS

SEQ ID NO: 126420 - protein, 15 aa, Artificial Sequence
  Description of Artificial Sequence: Synthetic peptide
  Seed: RMCSLMQGSTLPRRS
RMYSLIQPSTDPRRS

SEQ ID NO: 126421 - protein, 15 aa, Artificial Sequence
  Description of Artificial Sequence: Synthetic peptide
  Seed: RMCSLMQGSTLPRRS
RMYSLIQPSTEPRRS

SEQ ID NO: 126422 - protein, 15 aa, Artificial Sequence
  Description of Artificial Sequence: Synthetic peptide
  Seed: RMCSLMQGSTLPRRS
RMYSLIQPSTFPRRS

SEQ ID NO: 126423 - protein, 15 aa, Artificial Sequence
  Description of Artificial Sequence: Synthetic peptide
  Seed: RMCSLMQGSTLPRRS
RMYSLIQPSTGPRRS

SEQ ID NO: 126424 - protein, 15 aa, Artificial Sequence
  Description of Artificial Sequence: Synthetic peptide
  Seed: RMCSLMQGSTLPRRS
RMYSLIQPSTHPRRS

SEQ ID NO: 126425 - protein, 15 aa, Artificial Sequence
  Description of Artificial Sequence: Synthetic peptide
  Seed: RMCSLMQGSTLPRRS
RMYSLIQPSTIPRRS

SEQ ID NO: 126426 - protein, 15 aa, Artificial Sequence
  Description of Artificial Sequence: Synthetic peptide
  Seed: RMCSLMQGSTLPRRS
RMYSLIQPSTLPRRS

SEQ ID NO: 126427 - protein, 15 aa, Artificial Sequence
  Description of Artificial Sequence: Synthetic peptide
  Seed: RMCSLMQGSTLPRRS
RMYSLIQPSTMPRRS

SEQ ID NO: 126428 - protein, 15 aa, Artificial Sequence
  Description of Artificial Sequence: Synthetic peptide
  Seed: RMCSLMQGSTLPRRS
RMYSLIQPSTNPRRS

SEQ ID NO: 126429 - protein, 15 aa, Artificial Sequence
  Description of Artificial Sequence: Synthetic peptide
  Seed: RMCSLMQGSTLPRRS
RMYSLIQPSTPPRRS

SEQ ID NO: 126430 - protein, 15 aa, Artificial Sequence
  Description of Artificial Sequence: Synthetic peptide
  Seed: RMCSLMQGSTLPRRS
RMYSLIQPSTQPRRS

SEQ ID NO: 126431 - protein, 15 aa, Artificial Sequence
  Description of Artificial Sequence: Synthetic peptide
  Seed: RMCSLMQGSTLPRRS
RMYSLIQPSTSPRRS

SEQ ID NO: 126432 - protein, 15 aa, Artificial Sequence
  Description of Artificial Sequence: Synthetic peptide
  Seed: RMCSLMQGSTLPRRS
RMYSLIQPSTTPRRS

SEQ ID NO: 126433 - protein, 15 aa, Artificial Sequence
  Description of Artificial Sequence: Synthetic peptide
  Seed: RMCSLMQGSTLPRRS
RMYSLIQPSTVPRRS

SEQ ID NO: 126434 - protein, 15 aa, Artificial Sequence
  Description of Artificial Sequence: Synthetic peptide
  Seed: RMCSLMQGSTLPRRS
RMYSLIQQSTAPRRS

SEQ ID NO: 126435 - protein, 15 aa, Artificial Sequence
  Description of Artificial Sequence: Synthetic peptide
  Seed: RMCSLMQGSTLPRRS
RMYSLIQQSTIPRRS

SEQ ID NO: 126436 - protein, 15 aa, Artificial Sequence
  Description of Artificial Sequence: Synthetic peptide
  Seed: RMCSLMQGSTLPRRS
RMYSLIQQSTLPRRS

SEQ ID NO: 126437 - protein, 15 aa, Artificial Sequence
  Description of Artificial Sequence: Synthetic peptide
  Seed: RMCSLMQGSTLPRRS
RMYSLIQQSTVPRRS

SEQ ID NO: 126438 - protein, 15 aa, Artificial Sequence
  Description of Artificial Sequence: Synthetic peptide
  Seed: RMCSLMQGSTLPRRS
RMYSLIQSSTAPRRS

SEQ ID NO: 126439 - protein, 15 aa, Artificial Sequence
  Description of Artificial Sequence: Synthetic peptide
  Seed: RMCSLMQGSTLPRRS
RMYSLIQSSTCPRRS

SEQ ID NO: 126440 - protein, 15 aa, Artificial Sequence
  Description of Artificial Sequence: Synthetic peptide
  Seed: RMCSLMQGSTLPRRS
RMYSLIQSSTDPRRS

SEQ ID NO: 126441 - protein, 15 aa, Artificial Sequence
  Description of Artificial Sequence: Synthetic peptide
  Seed: RMCSLMQGSTLPRRS
RMYSLIQSSTFPRRS

SEQ ID NO: 126442 - protein, 15 aa, Artificial Sequence
  Description of Artificial Sequence: Synthetic peptide
  Seed: RMCSLMQGSTLPRRS
RMYSLIQSSTGPRRS

SEQ ID NO: 126443 - protein, 15 aa, Artificial Sequence
  Description of Artificial Sequence: Synthetic peptide
  Seed: RMCSLMQGSTLPRRS
RMYSLIQSSTHPRRS

SEQ ID NO: 126444 - protein, 15 aa, Artificial Sequence
  Description of Artificial Sequence: Synthetic peptide
  Seed: RMCSLMQGSTLPRRS
RMYSLIQSSTIPRRS

SEQ ID NO: 126445 - protein, 15 aa, Artificial Sequence
  Description of Artificial Sequence: Synthetic peptide
  Seed: RMCSLMQGSTLPRRS
RMYSLIQSSTLPRRS

SEQ ID NO: 126446 - protein, 15 aa, Artificial Sequence
  Description of Artificial Sequence: Synthetic peptide
  Seed: RMCSLMQGSTLPRRS
RMYSLIQSSTMPRRS

SEQ ID NO: 126447 - protein, 15 aa, Artificial Sequence
  Description of Artificial Sequence: Synthetic peptide
  Seed: RMCSLMQGSTLPRRS
RMYSLIQSSTNPRRS

SEQ ID NO: 126448 - protein, 15 aa, Artificial Sequence
  Description of Artificial Sequence: Synthetic peptide
  Seed: RMCSLMQGSTLPRRS
RMYSLIQSSTPPRRS

SEQ ID NO: 126449 - protein, 15 aa, Artificial Sequence
  Description of Artificial Sequence: Synthetic peptide
  Seed: RMCSLMQGSTLPRRS
RMYSLIQSSTQPRRS

SEQ ID NO: 126450 - protein, 15 aa, Artificial Sequence
  Description of Artificial Sequence: Synthetic peptide
  Seed: RMCSLMQGSTLPRRS
RMYSLIQSSTSPRRS

SEQ ID NO: 126451 - protein, 15 aa, Artificial Sequence
  Description of Artificial Sequence: Synthetic peptide
  Seed: RMCSLMQGSTLPRRS
RMYSLIQSSTTPRRS

SEQ ID NO: 126452 - protein, 15 aa, Artificial Sequence
  Description of Artificial Sequence: Synthetic peptide
  Seed: RMCSLMQGSTLPRRS
RMYSLIQSSTVPRRS

SEQ ID NO: 126453 - protein, 15 aa, Artificial Sequence
  Description of Artificial Sequence: Synthetic peptide
  Seed: RMCSLMQGSTLPRRS
RMYSLIQSSTYPRRS

SEQ ID NO: 126454 - protein, 15 aa, Artificial Sequence
  Description of Artificial Sequence: Synthetic peptide
  Seed: RMCSLMQGSTLPRRS
RMYSLIQTSTAPRRS

SEQ ID NO: 126455 - protein, 15 aa, Artificial Sequence
  Description of Artificial Sequence: Synthetic peptide
  Seed: RMCSLMQGSTLPRRS
RMYSLIQTSTCPRRS

SEQ ID NO: 126456 - protein, 15 aa, Artificial Sequence
  Description of Artificial Sequence: Synthetic peptide
  Seed: RMCSLMQGSTLPRRS
RMYSLIQTSTGPRRS

SEQ ID NO: 126457 - protein, 15 aa, Artificial Sequence
  Description of Artificial Sequence: Synthetic peptide
  Seed: RMCSLMQGSTLPRRS
RMYSLIQTSTHPRRS

SEQ ID NO: 126458 - protein, 15 aa, Artificial Sequence
  Description of Artificial Sequence: Synthetic peptide
  Seed: RMCSLMQGSTLPRRS
RMYSLIQTSTIPRRS

SEQ ID NO: 126459 - protein, 15 aa, Artificial Sequence
  Description of Artificial Sequence: Synthetic peptide
  Seed: RMCSLMQGSTLPRRS
RMYSLIQTSTLPRRS

SEQ ID NO: 126460 - protein, 15 aa, Artificial Sequence
  Description of Artificial Sequence: Synthetic peptide
  Seed: RMCSLMQGSTLPRRS
RMYSLIQTSTMPRRS

SEQ ID NO: 126461 - protein, 15 aa, Artificial Sequence
  Description of Artificial Sequence: Synthetic peptide
  Seed: RMCSLMQGSTLPRRS
RMYSLIQTSTNPRRS

SEQ ID NO: 126462 - protein, 15 aa, Artificial Sequence
  Description of Artificial Sequence: Synthetic peptide
  Seed: RMCSLMQGSTLPRRS
RMYSLIQTSTPPRRS

SEQ ID NO: 126463 - protein, 15 aa, Artificial Sequence
  Description of Artificial Sequence: Synthetic peptide
  Seed: RMCSLMQGSTLPRRS
RMYSLIQTSTQPRRS

SEQ ID NO: 126464 - protein, 15 aa, Artificial Sequence
  Description of Artificial Sequence: Synthetic peptide
  Seed: RMCSLMQGSTLPRRS
RMYSLIQTSTSPRRS

SEQ ID NO: 126465 - protein, 15 aa, Artificial Sequence
  Description of Artificial Sequence: Synthetic peptide
  Seed: RMCSLMQGSTLPRRS
RMYSLIQTSTTPRRS

SEQ ID NO: 126466 - protein, 15 aa, Artificial Sequence
  Description of Artificial Sequence: Synthetic peptide
  Seed: RMCSLMQGSTLPRRS
RMYSLIQTSTVPRRS

SEQ ID NO: 126467 - protein, 15 aa, Artificial Sequence
  Description of Artificial Sequence: Synthetic peptide
  Seed: RMCSLMQGSTLPRRS
RMYSLIQVSTAPRRS

SEQ ID NO: 126468 - protein, 15 aa, Artificial Sequence
  Description of Artificial Sequence: Synthetic peptide
  Seed: RMCSLMQGSTLPRRS
RMYSLIQVSTCPRRS

SEQ ID NO: 126469 - protein, 15 aa, Artificial Sequence
  Description of Artificial Sequence: Synthetic peptide
  Seed: RMCSLMQGSTLPRRS
RMYSLIQVSTDPRRS

SEQ ID NO: 126470 - protein, 15 aa, Artificial Sequence
  Description of Artificial Sequence: Synthetic peptide
  Seed: RMCSLMQGSTLPRRS
RMYSLIQVSTEPRRS

SEQ ID NO: 126471 - protein, 15 aa, Artificial Sequence
  Description of Artificial Sequence: Synthetic peptide
  Seed: RMCSLMQGSTLPRRS
RMYSLIQVSTGPRRS

SEQ ID NO: 126472 - protein, 15 aa, Artificial Sequence
  Description of Artificial Sequence: Synthetic peptide
  Seed: RMCSLMQGSTLPRRS
RMYSLIQVSTHPRRS

SEQ ID NO: 126473 - protein, 15 aa, Artificial Sequence
  Description of Artificial Sequence: Synthetic peptide
  Seed: RMCSLMQGSTLPRRS
RMYSLIQVSTIPRRS

SEQ ID NO: 126474 - protein, 15 aa, Artificial Sequence
  Description of Artificial Sequence: Synthetic peptide
  Seed: RMCSLMQGSTLPRRS
RMYSLIQVSTLPRRS

SEQ ID NO: 126475 - protein, 15 aa, Artificial Sequence
  Description of Artificial Sequence: Synthetic peptide
  Seed: RMCSLMQGSTLPRRS
RMYSLIQVSTMPRRS

SEQ ID NO: 126476 - protein, 15 aa, Artificial Sequence
  Description of Artificial Sequence: Synthetic peptide
  Seed: RMCSLMQGSTLPRRS
RMYSLIQVSTNPRRS

SEQ ID NO: 126477 - protein, 15 aa, Artificial Sequence
  Description of Artificial Sequence: Synthetic peptide
  Seed: RMCSLMQGSTLPRRS
RMYSLIQVSTPPRRS

SEQ ID NO: 126478 - protein, 15 aa, Artificial Sequence
  Description of Artificial Sequence: Synthetic peptide
  Seed: RMCSLMQGSTLPRRS
RMYSLIQVSTQPRRS

SEQ ID NO: 126479 - protein, 15 aa, Artificial Sequence
  Description of Artificial Sequence: Synthetic peptide
  Seed: RMCSLMQGSTLPRRS
RMYSLIQVSTSPRRS

SEQ ID NO: 126480 - protein, 15 aa, Artificial Sequence
  Description of Artificial Sequence: Synthetic peptide
  Seed: RMCSLMQGSTLPRRS
RMYSLIQVSTTPRRS

SEQ ID NO: 126481 - protein, 15 aa, Artificial Sequence
  Description of Artificial Sequence: Synthetic peptide
  Seed: RMCSLMQGSTLPRRS
RMYSLIQVSTVPRRS

SEQ ID NO: 126482 - protein, 15 aa, Artificial Sequence
  Description of Artificial Sequence: Synthetic peptide
  Seed: RMCSLMQGSTLPRRS
RMYSLKQASTIPRRS

SEQ ID NO: 126483 - protein, 15 aa, Artificial Sequence
  Description of Artificial Sequence: Synthetic peptide
  Seed: RMCSLMQGSTLPRRS
RMYSLKQASTLPRRS

SEQ ID NO: 126484 - protein, 15 aa, Artificial Sequence
  Description of Artificial Sequence: Synthetic peptide
  Seed: RMCSLMQGSTLPRRS
RMYSLKQASTVPRRS

SEQ ID NO: 126485 - protein, 15 aa, Artificial Sequence
  Description of Artificial Sequence: Synthetic peptide
  Seed: RMCSLMQGSTLPRRS
RMYSLKQGSTLPRRS

SEQ ID NO: 126486 - protein, 15 aa, Artificial Sequence
  Description of Artificial Sequence: Synthetic peptide
  Seed: RMCSLMQGSTLPRRS
RMYSLKQSSTLPRRS

SEQ ID NO: 126487 - protein, 15 aa, Artificial Sequence
  Description of Artificial Sequence: Synthetic peptide
  Seed: RMCSLMQGSTLPRRS
RMYSLLQASTAPRRS

SEQ ID NO: 126488 - protein, 15 aa, Artificial Sequence
  Description of Artificial Sequence: Synthetic peptide
  Seed: RMCSLMQGSTLPRRS
RMYSLLQASTCPRRS

SEQ ID NO: 126489 - protein, 15 aa, Artificial Sequence
  Description of Artificial Sequence: Synthetic peptide
  Seed: RMCSLMQGSTLPRRS
RMYSLLQASTDPRRS

SEQ ID NO: 126490 - protein, 15 aa, Artificial Sequence
  Description of Artificial Sequence: Synthetic peptide
  Seed: RMCSLMQGSTLPRRS
RMYSLLQASTEPRRS

SEQ ID NO: 126491 - protein, 15 aa, Artificial Sequence
  Description of Artificial Sequence: Synthetic peptide
  Seed: RMCSLMQGSTLPRRS
RMYSLLQASTFPRRS

SEQ ID NO: 126492 - protein, 15 aa, Artificial Sequence
  Description of Artificial Sequence: Synthetic peptide
  Seed: RMCSLMQGSTLPRRS
RMYSLLQASTGPRRS

SEQ ID NO: 126493 - protein, 15 aa, Artificial Sequence
  Description of Artificial Sequence: Synthetic peptide
  Seed: RMCSLMQGSTLPRRS
RMYSLLQASTHPRRS

SEQ ID NO: 126494 - protein, 15 aa, Artificial Sequence
  Description of Artificial Sequence: Synthetic peptide
  Seed: RMCSLMQGSTLPRRS
RMYSLLQASTIPRRS

SEQ ID NO: 126495 - protein, 15 aa, Artificial Sequence
  Description of Artificial Sequence: Synthetic peptide
  Seed: RMCSLMQGSTLPRRS
RMYSLLQASTKPRRS

SEQ ID NO: 126496 - protein, 15 aa, Artificial Sequence
  Description of Artificial Sequence: Synthetic peptide
  Seed: RMCSLMQGSTLPRRS
RMYSLLQASTLPRRS

SEQ ID NO: 126497 - protein, 15 aa, Artificial Sequence
  Description of Artificial Sequence: Synthetic peptide
  Seed: RMCSLMQGSTLPRRS
RMYSLLQASTMPRRS

SEQ ID NO: 126498 - protein, 15 aa, Artificial Sequence
  Description of Artificial Sequence: Synthetic peptide
  Seed: RMCSLMQGSTLPRRS
RMYSLLQASTNPRRS

SEQ ID NO: 126499 - protein, 15 aa, Artificial Sequence
  Description of Artificial Sequence: Synthetic peptide
  Seed: RMCSLMQGSTLPRRS
RMYSLLQASTPPRRS

SEQ ID NO: 126500 - protein, 15 aa, Artificial Sequence
  Description of Artificial Sequence: Synthetic peptide
  Seed: RMCSLMQGSTLPRRS
RMYSLLQASTQPRRS

SEQ ID NO: 126501 - protein, 15 aa, Artificial Sequence
  Description of Artificial Sequence: Synthetic peptide
  Seed: RMCSLMQGSTLPRRS
RMYSLLQASTRPRRS

SEQ ID NO: 126502 - protein, 15 aa, Artificial Sequence
  Description of Artificial Sequence: Synthetic peptide
  Seed: RMCSLMQGSTLPRRS
RMYSLLQASTSPRRS

SEQ ID NO: 126503 - protein, 15 aa, Artificial Sequence
  Description of Artificial Sequence: Synthetic peptide
  Seed: RMCSLMQGSTLPRRS
RMYSLLQASTTPRRS

SEQ ID NO: 126504 - protein, 15 aa, Artificial Sequence
  Description of Artificial Sequence: Synthetic peptide
  Seed: RMCSLMQGSTLPRRS
RMYSLLQASTVPRRS

SEQ ID NO: 126505 - protein, 15 aa, Artificial Sequence
  Description of Artificial Sequence: Synthetic peptide
  Seed: RMCSLMQGSTLPRRS
RMYSLLQASTWPRRS

SEQ ID NO: 126506 - protein, 15 aa, Artificial Sequence
  Description of Artificial Sequence: Synthetic peptide
  Seed: RMCSLMQGSTLPRRS
RMYSLLQASTYPRRS

SEQ ID NO: 126507 - protein, 15 aa, Artificial Sequence
  Description of Artificial Sequence: Synthetic peptide
  Seed: RMCSLMQGSTLPRRS
RMYSLLQCSTAPRRS

SEQ ID NO: 126508 - protein, 15 aa, Artificial Sequence
  Description of Artificial Sequence: Synthetic peptide
  Seed: RMCSLMQGSTLPRRS
RMYSLLQCSTIPRRS

SEQ ID NO: 126509 - protein, 15 aa, Artificial Sequence
  Description of Artificial Sequence: Synthetic peptide
  Seed: RMCSLMQGSTLPRRS
RMYSLLQCSTLPRRS

SEQ ID NO: 126510 - protein, 15 aa, Artificial Sequence
  Description of Artificial Sequence: Synthetic peptide
  Seed: RMCSLMQGSTLPRRS
RMYSLLQCSTVPRRS

SEQ ID NO: 126511 - protein, 15 aa, Artificial Sequence
  Description of Artificial Sequence: Synthetic peptide
  Seed: RMCSLMQGSTLPRRS
RMYSLLQDSTIPRRS

SEQ ID NO: 126512 - protein, 15 aa, Artificial Sequence
  Description of Artificial Sequence: Synthetic peptide
  Seed: RMCSLMQGSTLPRRS
RMYSLLQDSTLPRRS

SEQ ID NO: 126513 - protein, 15 aa, Artificial Sequence
  Description of Artificial Sequence: Synthetic peptide
  Seed: RMCSLMQGSTLPRRS
RMYSLLQDSTVPRRS

SEQ ID NO: 126514 - protein, 15 aa, Artificial Sequence
  Description of Artificial Sequence: Synthetic peptide
  Seed: RMCSLMQGSTLPRRS
RMYSLLQESTAPRRS

SEQ ID NO: 126515 - protein, 15 aa, Artificial Sequence
  Description of Artificial Sequence: Synthetic peptide
  Seed: RMCSLMQGSTLPRRS
RMYSLLQESTIPRRS

SEQ ID NO: 126516 - protein, 15 aa, Artificial Sequence
  Description of Artificial Sequence: Synthetic peptide
  Seed: RMCSLMQGSTLPRRS
RMYSLLQESTLPRRS

SEQ ID NO: 126517 - protein, 15 aa, Artificial Sequence
  Description of Artificial Sequence: Synthetic peptide
  Seed: RMCSLMQGSTLPRRS
RMYSLLQESTVPRRS

SEQ ID NO: 126518 - protein, 15 aa, Artificial Sequence
  Description of Artificial Sequence: Synthetic peptide
  Seed: RMCSLMQGSTLPRRS
RMYSLLQFSTAPRRS

SEQ ID NO: 126519 - protein, 15 aa, Artificial Sequence
  Description of Artificial Sequence: Synthetic peptide
  Seed: RMCSLMQGSTLPRRS
RMYSLLQFSTVPRRS

SEQ ID NO: 126520 - protein, 15 aa, Artificial Sequence
  Description of Artificial Sequence: Synthetic peptide
  Seed: RMCSLMQGSTLPRRS
RMYSLLQGSTAPRRS

SEQ ID NO: 126521 - protein, 15 aa, Artificial Sequence
  Description of Artificial Sequence: Synthetic peptide
  Seed: RMCSLMQGSTLPRRS
RMYSLLQGSTCPRRS

SEQ ID NO: 126522 - protein, 15 aa, Artificial Sequence
  Description of Artificial Sequence: Synthetic peptide
  Seed: RMCSLMQGSTLPRRS
RMYSLLQGSTDPRRS

SEQ ID NO: 126523 - protein, 15 aa, Artificial Sequence
  Description of Artificial Sequence: Synthetic peptide
  Seed: RMCSLMQGSTLPRRS
RMYSLLQGSTEPRRS

SEQ ID NO: 126524 - protein, 15 aa, Artificial Sequence
  Description of Artificial Sequence: Synthetic peptide
  Seed: RMCSLMQGSTLPRRS
RMYSLLQGSTFPRRS

SEQ ID NO: 126525 - protein, 15 aa, Artificial Sequence
  Description of Artificial Sequence: Synthetic peptide
  Seed: RMCSLMQGSTLPRRS
RMYSLLQGSTGPRRS

SEQ ID NO: 126526 - protein, 15 aa, Artificial Sequence
  Description of Artificial Sequence: Synthetic peptide
  Seed: RMCSLMQGSTLPRRS
RMYSLLQGSTHPRRS

SEQ ID NO: 126527 - protein, 15 aa, Artificial Sequence
  Description of Artificial Sequence: Synthetic peptide
  Seed: RMCSLMQGSTLPRRS
RMYSLLQGSTIPRRS

SEQ ID NO: 126528 - protein, 15 aa, Artificial Sequence
  Description of Artificial Sequence: Synthetic peptide
  Seed: RMCSLMQGSTLPRRS
RMYSLLQGSTKPRRS

SEQ ID NO: 126529 - protein, 15 aa, Artificial Sequence
  Description of Artificial Sequence: Synthetic peptide
  Seed: RMCSLMQGSTLPRRS
RMYSLLQGSTLPRRS

SEQ ID NO: 126530 - protein, 15 aa, Artificial Sequence
  Description of Artificial Sequence: Synthetic peptide
  Seed: RMCSLMQGSTLPRRS
RMYSLLQGSTMPRRS

SEQ ID NO: 126531 - protein, 15 aa, Artificial Sequence
  Description of Artificial Sequence: Synthetic peptide
  Seed: RMCSLMQGSTLPRRS
RMYSLLQGSTNPRRS

SEQ ID NO: 126532 - protein, 15 aa, Artificial Sequence
  Description of Artificial Sequence: Synthetic peptide
  Seed: RMCSLMQGSTLPRRS
RMYSLLQGSTPPRRS

SEQ ID NO: 126533 - protein, 15 aa, Artificial Sequence
  Description of Artificial Sequence: Synthetic peptide
  Seed: RMCSLMQGSTLPRRS
RMYSLLQGSTQPRRS

SEQ ID NO: 126534 - protein, 15 aa, Artificial Sequence
  Description of Artificial Sequence: Synthetic peptide
  Seed: RMCSLMQGSTLPRRS
RMYSLLQGSTRPRRS

SEQ ID NO: 126535 - protein, 15 aa, Artificial Sequence
  Description of Artificial Sequence: Synthetic peptide
  Seed: RMCSLMQGSTLPRRS
RMYSLLQGSTSPRRS

SEQ ID NO: 126536 - protein, 15 aa, Artificial Sequence
  Description of Artificial Sequence: Synthetic peptide
  Seed: RMCSLMQGSTLPRRS
RMYSLLQGSTTPRRS

SEQ ID NO: 126537 - protein, 15 aa, Artificial Sequence
  Description of Artificial Sequence: Synthetic peptide
  Seed: RMCSLMQGSTLPRRS
RMYSLLQGSTVPRRS

SEQ ID NO: 126538 - protein, 15 aa, Artificial Sequence
  Description of Artificial Sequence: Synthetic peptide
  Seed: RMCSLMQGSTLPRRS
RMYSLLQGSTWPRRS

SEQ ID NO: 126539 - protein, 15 aa, Artificial Sequence
  Description of Artificial Sequence: Synthetic peptide
  Seed: RMCSLMQGSTLPRRS
RMYSLLQGSTYPRRS

SEQ ID NO: 126540 - protein, 15 aa, Artificial Sequence
  Description of Artificial Sequence: Synthetic peptide
  Seed: RMCSLMQGSTLPRRS
RMYSLLQHSTAPRRS

SEQ ID NO: 126541 - protein, 15 aa, Artificial Sequence
  Description of Artificial Sequence: Synthetic peptide
  Seed: RMCSLMQGSTLPRRS
RMYSLLQHSTIPRRS

SEQ ID NO: 126542 - protein, 15 aa, Artificial Sequence
  Description of Artificial Sequence: Synthetic peptide
  Seed: RMCSLMQGSTLPRRS
RMYSLLQHSTLPRRS

SEQ ID NO: 126543 - protein, 15 aa, Artificial Sequence
  Description of Artificial Sequence: Synthetic peptide
  Seed: RMCSLMQGSTLPRRS
RMYSLLQHSTMPRRS

SEQ ID NO: 126544 - protein, 15 aa, Artificial Sequence
  Description of Artificial Sequence: Synthetic peptide
  Seed: RMCSLMQGSTLPRRS
RMYSLLQHSTTPRRS

SEQ ID NO: 126545 - protein, 15 aa, Artificial Sequence
  Description of Artificial Sequence: Synthetic peptide
  Seed: RMCSLMQGSTLPRRS
RMYSLLQHSTVPRRS

SEQ ID NO: 126546 - protein, 15 aa, Artificial Sequence
  Description of Artificial Sequence: Synthetic peptide
  Seed: RMCSLMQGSTLPRRS
RMYSLLQISTAPRRS

SEQ ID NO: 126547 - protein, 15 aa, Artificial Sequence
  Description of Artificial Sequence: Synthetic peptide
  Seed: RMCSLMQGSTLPRRS
RMYSLLQISTCPRRS

SEQ ID NO: 126548 - protein, 15 aa, Artificial Sequence
  Description of Artificial Sequence: Synthetic peptide
  Seed: RMCSLMQGSTLPRRS
RMYSLLQISTDPRRS

SEQ ID NO: 126549 - protein, 15 aa, Artificial Sequence
  Description of Artificial Sequence: Synthetic peptide
  Seed: RMCSLMQGSTLPRRS
RMYSLLQISTEPRRS

SEQ ID NO: 126550 - protein, 15 aa, Artificial Sequence
  Description of Artificial Sequence: Synthetic peptide
  Seed: RMCSLMQGSTLPRRS
RMYSLLQISTGPRRS

SEQ ID NO: 126551 - protein, 15 aa, Artificial Sequence
  Description of Artificial Sequence: Synthetic peptide
  Seed: RMCSLMQGSTLPRRS
RMYSLLQISTHPRRS

SEQ ID NO: 126552 - protein, 15 aa, Artificial Sequence
  Description of Artificial Sequence: Synthetic peptide
  Seed: RMCSLMQGSTLPRRS
RMYSLLQISTIPRRS

SEQ ID NO: 126553 - protein, 15 aa, Artificial Sequence
  Description of Artificial Sequence: Synthetic peptide
  Seed: RMCSLMQGSTLPRRS
RMYSLLQISTLPRRS

SEQ ID NO: 126554 - protein, 15 aa, Artificial Sequence
  Description of Artificial Sequence: Synthetic peptide
  Seed: RMCSLMQGSTLPRRS
RMYSLLQISTMPRRS

SEQ ID NO: 126555 - protein, 15 aa, Artificial Sequence
  Description of Artificial Sequence: Synthetic peptide
  Seed: RMCSLMQGSTLPRRS
RMYSLLQISTNPRRS

SEQ ID NO: 126556 - protein, 15 aa, Artificial Sequence
  Description of Artificial Sequence: Synthetic peptide
  Seed: RMCSLMQGSTLPRRS
RMYSLLQISTPPRRS

SEQ ID NO: 126557 - protein, 15 aa, Artificial Sequence
  Description of Artificial Sequence: Synthetic peptide
  Seed: RMCSLMQGSTLPRRS
RMYSLLQISTQPRRS

SEQ ID NO: 126558 - protein, 15 aa, Artificial Sequence
  Description of Artificial Sequence: Synthetic peptide
  Seed: RMCSLMQGSTLPRRS
RMYSLLQISTSPRRS

SEQ ID NO: 126559 - protein, 15 aa, Artificial Sequence
  Description of Artificial Sequence: Synthetic peptide
  Seed: RMCSLMQGSTLPRRS
RMYSLLQISTTPRRS

SEQ ID NO: 126560 - protein, 15 aa, Artificial Sequence
  Description of Artificial Sequence: Synthetic peptide
  Seed: RMCSLMQGSTLPRRS
RMYSLLQISTVPRRS

SEQ ID NO: 126561 - protein, 15 aa, Artificial Sequence
  Description of Artificial Sequence: Synthetic peptide
  Seed: RMCSLMQGSTLPRRS
RMYSLLQLSTAPRRS

SEQ ID NO: 126562 - protein, 15 aa, Artificial Sequence
  Description of Artificial Sequence: Synthetic peptide
  Seed: RMCSLMQGSTLPRRS
RMYSLLQLSTGPRRS

SEQ ID NO: 126563 - protein, 15 aa, Artificial Sequence
  Description of Artificial Sequence: Synthetic peptide
  Seed: RMCSLMQGSTLPRRS
RMYSLLQLSTHPRRS

SEQ ID NO: 126564 - protein, 15 aa, Artificial Sequence
  Description of Artificial Sequence: Synthetic peptide
  Seed: RMCSLMQGSTLPRRS
RMYSLLQLSTIPRRS

SEQ ID NO: 126565 - protein, 15 aa, Artificial Sequence
  Description of Artificial Sequence: Synthetic peptide
  Seed: RMCSLMQGSTLPRRS
RMYSLLQLSTLPRRS

SEQ ID NO: 126566 - protein, 15 aa, Artificial Sequence
  Description of Artificial Sequence: Synthetic peptide
  Seed: RMCSLMQGSTLPRRS
RMYSLLQLSTMPRRS

SEQ ID NO: 126567 - protein, 15 aa, Artificial Sequence
  Description of Artificial Sequence: Synthetic peptide
  Seed: RMCSLMQGSTLPRRS
RMYSLLQLSTNPRRS

SEQ ID NO: 126568 - protein, 15 aa, Artificial Sequence
  Description of Artificial Sequence: Synthetic peptide
  Seed: RMCSLMQGSTLPRRS
RMYSLLQLSTSPRRS

SEQ ID NO: 126569 - protein, 15 aa, Artificial Sequence
  Description of Artificial Sequence: Synthetic peptide
  Seed: RMCSLMQGSTLPRRS
RMYSLLQLSTTPRRS

SEQ ID NO: 126570 - protein, 15 aa, Artificial Sequence
  Description of Artificial Sequence: Synthetic peptide
  Seed: RMCSLMQGSTLPRRS
RMYSLLQLSTVPRRS

SEQ ID NO: 126571 - protein, 15 aa, Artificial Sequence
  Description of Artificial Sequence: Synthetic peptide
  Seed: RMCSLMQGSTLPRRS
RMYSLLQMSTAPRRS

SEQ ID NO: 126572 - protein, 15 aa, Artificial Sequence
  Description of Artificial Sequence: Synthetic peptide
  Seed: RMCSLMQGSTLPRRS
RMYSLLQMSTGPRRS

SEQ ID NO: 126573 - protein, 15 aa, Artificial Sequence
  Description of Artificial Sequence: Synthetic peptide
  Seed: RMCSLMQGSTLPRRS
RMYSLLQMSTHPRRS

SEQ ID NO: 126574 - protein, 15 aa, Artificial Sequence
  Description of Artificial Sequence: Synthetic peptide
  Seed: RMCSLMQGSTLPRRS
RMYSLLQMSTIPRRS

SEQ ID NO: 126575 - protein, 15 aa, Artificial Sequence
  Description of Artificial Sequence: Synthetic peptide
  Seed: RMCSLMQGSTLPRRS
RMYSLLQMSTLPRRS

SEQ ID NO: 126576 - protein, 15 aa, Artificial Sequence
  Description of Artificial Sequence: Synthetic peptide
  Seed: RMCSLMQGSTLPRRS
RMYSLLQMSTMPRRS

SEQ ID NO: 126577 - protein, 15 aa, Artificial Sequence
  Description of Artificial Sequence: Synthetic peptide
  Seed: RMCSLMQGSTLPRRS
RMYSLLQMSTNPRRS

SEQ ID NO: 126578 - protein, 15 aa, Artificial Sequence
  Description of Artificial Sequence: Synthetic peptide
  Seed: RMCSLMQGSTLPRRS
RMYSLLQMSTSPRRS

SEQ ID NO: 126579 - protein, 15 aa, Artificial Sequence
  Description of Artificial Sequence: Synthetic peptide
  Seed: RMCSLMQGSTLPRRS
RMYSLLQMSTTPRRS

SEQ ID NO: 126580 - protein, 15 aa, Artificial Sequence
  Description of Artificial Sequence: Synthetic peptide
  Seed: RMCSLMQGSTLPRRS
RMYSLLQMSTVPRRS

SEQ ID NO: 126581 - protein, 15 aa, Artificial Sequence
  Description of Artificial Sequence: Synthetic peptide
  Seed: RMCSLMQGSTLPRRS
RMYSLLQNSTAPRRS

SEQ ID NO: 126582 - protein, 15 aa, Artificial Sequence
  Description of Artificial Sequence: Synthetic peptide
  Seed: RMCSLMQGSTLPRRS
RMYSLLQNSTCPRRS

SEQ ID NO: 126583 - protein, 15 aa, Artificial Sequence
  Description of Artificial Sequence: Synthetic peptide
  Seed: RMCSLMQGSTLPRRS
RMYSLLQNSTFPRRS

SEQ ID NO: 126584 - protein, 15 aa, Artificial Sequence
  Description of Artificial Sequence: Synthetic peptide
  Seed: RMCSLMQGSTLPRRS
RMYSLLQNSTGPRRS

SEQ ID NO: 126585 - protein, 15 aa, Artificial Sequence
  Description of Artificial Sequence: Synthetic peptide
  Seed: RMCSLMQGSTLPRRS
RMYSLLQNSTHPRRS

SEQ ID NO: 126586 - protein, 15 aa, Artificial Sequence
  Description of Artificial Sequence: Synthetic peptide
  Seed: RMCSLMQGSTLPRRS
RMYSLLQNSTIPRRS

SEQ ID NO: 126587 - protein, 15 aa, Artificial Sequence
  Description of Artificial Sequence: Synthetic peptide
  Seed: RMCSLMQGSTLPRRS
RMYSLLQNSTLPRRS

SEQ ID NO: 126588 - protein, 15 aa, Artificial Sequence
  Description of Artificial Sequence: Synthetic peptide
  Seed: RMCSLMQGSTLPRRS
RMYSLLQNSTMPRRS

SEQ ID NO: 126589 - protein, 15 aa, Artificial Sequence
  Description of Artificial Sequence: Synthetic peptide
  Seed: RMCSLMQGSTLPRRS
RMYSLLQNSTNPRRS

SEQ ID NO: 126590 - protein, 15 aa, Artificial Sequence
  Description of Artificial Sequence: Synthetic peptide
  Seed: RMCSLMQGSTLPRRS
RMYSLLQNSTPPRRS

SEQ ID NO: 126591 - protein, 15 aa, Artificial Sequence
  Description of Artificial Sequence: Synthetic peptide
  Seed: RMCSLMQGSTLPRRS
RMYSLLQNSTQPRRS

SEQ ID NO: 126592 - protein, 15 aa, Artificial Sequence
  Description of Artificial Sequence: Synthetic peptide
  Seed: RMCSLMQGSTLPRRS
RMYSLLQNSTSPRRS

SEQ ID NO: 126593 - protein, 15 aa, Artificial Sequence
  Description of Artificial Sequence: Synthetic peptide
  Seed: RMCSLMQGSTLPRRS
RMYSLLQNSTTPRRS

SEQ ID NO: 126594 - protein, 15 aa, Artificial Sequence
  Description of Artificial Sequence: Synthetic peptide
  Seed: RMCSLMQGSTLPRRS
RMYSLLQNSTVPRRS

SEQ ID NO: 126595 - protein, 15 aa, Artificial Sequence
  Description of Artificial Sequence: Synthetic peptide
  Seed: RMCSLMQGSTLPRRS
RMYSLLQNSTYPRRS

SEQ ID NO: 126596 - protein, 15 aa, Artificial Sequence
  Description of Artificial Sequence: Synthetic peptide
  Seed: RMCSLMQGSTLPRRS
RMYSLLQPSTAPRRS

SEQ ID NO: 126597 - protein, 15 aa, Artificial Sequence
  Description of Artificial Sequence: Synthetic peptide
  Seed: RMCSLMQGSTLPRRS
RMYSLLQPSTCPRRS

SEQ ID NO: 126598 - protein, 15 aa, Artificial Sequence
  Description of Artificial Sequence: Synthetic peptide
  Seed: RMCSLMQGSTLPRRS
RMYSLLQPSTDPRRS

SEQ ID NO: 126599 - protein, 15 aa, Artificial Sequence
  Description of Artificial Sequence: Synthetic peptide
  Seed: RMCSLMQGSTLPRRS
RMYSLLQPSTEPRRS

SEQ ID NO: 126600 - protein, 15 aa, Artificial Sequence
  Description of Artificial Sequence: Synthetic peptide
  Seed: RMCSLMQGSTLPRRS
RMYSLLQPSTFPRRS

SEQ ID NO: 126601 - protein, 15 aa, Artificial Sequence
  Description of Artificial Sequence: Synthetic peptide
  Seed: RMCSLMQGSTLPRRS
RMYSLLQPSTGPRRS

SEQ ID NO: 126602 - protein, 15 aa, Artificial Sequence
  Description of Artificial Sequence: Synthetic peptide
  Seed: RMCSLMQGSTLPRRS
RMYSLLQPSTHPRRS

SEQ ID NO: 126603 - protein, 15 aa, Artificial Sequence
  Description of Artificial Sequence: Synthetic peptide
  Seed: RMCSLMQGSTLPRRS
RMYSLLQPSTIPRRS

SEQ ID NO: 126604 - protein, 15 aa, Artificial Sequence
  Description of Artificial Sequence: Synthetic peptide
  Seed: RMCSLMQGSTLPRRS
RMYSLLQPSTKPRRS

SEQ ID NO: 126605 - protein, 15 aa, Artificial Sequence
  Description of Artificial Sequence: Synthetic peptide
  Seed: RMCSLMQGSTLPRRS
RMYSLLQPSTLPRRS

SEQ ID NO: 126606 - protein, 15 aa, Artificial Sequence
  Description of Artificial Sequence: Synthetic peptide
  Seed: RMCSLMQGSTLPRRS
RMYSLLQPSTMPRRS

SEQ ID NO: 126607 - protein, 15 aa, Artificial Sequence
  Description of Artificial Sequence: Synthetic peptide
  Seed: RMCSLMQGSTLPRRS
RMYSLLQPSTNPRRS

SEQ ID NO: 126608 - protein, 15 aa, Artificial Sequence
  Description of Artificial Sequence: Synthetic peptide
  Seed: RMCSLMQGSTLPRRS
RMYSLLQPSTPPRRS

SEQ ID NO: 126609 - protein, 15 aa, Artificial Sequence
  Description of Artificial Sequence: Synthetic peptide
  Seed: RMCSLMQGSTLPRRS
RMYSLLQPSTQPRRS

SEQ ID NO: 126610 - protein, 15 aa, Artificial Sequence
  Description of Artificial Sequence: Synthetic peptide
  Seed: RMCSLMQGSTLPRRS
RMYSLLQPSTRPRRS

SEQ ID NO: 126611 - protein, 15 aa, Artificial Sequence
  Description of Artificial Sequence: Synthetic peptide
  Seed: RMCSLMQGSTLPRRS
RMYSLLQPSTSPRRS

SEQ ID NO: 126612 - protein, 15 aa, Artificial Sequence
  Description of Artificial Sequence: Synthetic peptide
  Seed: RMCSLMQGSTLPRRS
RMYSLLQPSTTPRRS

SEQ ID NO: 126613 - protein, 15 aa, Artificial Sequence
  Description of Artificial Sequence: Synthetic peptide
  Seed: RMCSLMQGSTLPRRS
RMYSLLQPSTVPRRS

SEQ ID NO: 126614 - protein, 15 aa, Artificial Sequence
  Description of Artificial Sequence: Synthetic peptide
  Seed: RMCSLMQGSTLPRRS
RMYSLLQPSTWPRRS

SEQ ID NO: 126615 - protein, 15 aa, Artificial Sequence
  Description of Artificial Sequence: Synthetic peptide
  Seed: RMCSLMQGSTLPRRS
RMYSLLQPSTYPRRS

SEQ ID NO: 126616 - protein, 15 aa, Artificial Sequence
  Description of Artificial Sequence: Synthetic peptide
  Seed: RMCSLMQGSTLPRRS
RMYSLLQQSTAPRRS

SEQ ID NO: 126617 - protein, 15 aa, Artificial Sequence
  Description of Artificial Sequence: Synthetic peptide
  Seed: RMCSLMQGSTLPRRS
RMYSLLQQSTIPRRS

SEQ ID NO: 126618 - protein, 15 aa, Artificial Sequence
  Description of Artificial Sequence: Synthetic peptide
  Seed: RMCSLMQGSTLPRRS
RMYSLLQQSTLPRRS

SEQ ID NO: 126619 - protein, 15 aa, Artificial Sequence
  Description of Artificial Sequence: Synthetic peptide
  Seed: RMCSLMQGSTLPRRS
RMYSLLQQSTMPRRS

SEQ ID NO: 126620 - protein, 15 aa, Artificial Sequence
  Description of Artificial Sequence: Synthetic peptide
  Seed: RMCSLMQGSTLPRRS
RMYSLLQQSTSPRRS

SEQ ID NO: 126621 - protein, 15 aa, Artificial Sequence
  Description of Artificial Sequence: Synthetic peptide
  Seed: RMCSLMQGSTLPRRS
RMYSLLQQSTTPRRS

SEQ ID NO: 126622 - protein, 15 aa, Artificial Sequence
  Description of Artificial Sequence: Synthetic peptide
  Seed: RMCSLMQGSTLPRRS
RMYSLLQQSTVPRRS

SEQ ID NO: 126623 - protein, 15 aa, Artificial Sequence
  Description of Artificial Sequence: Synthetic peptide
  Seed: RMCSLMQGSTLPRRS
RMYSLLQSSTAPRRS

SEQ ID NO: 126624 - protein, 15 aa, Artificial Sequence
  Description of Artificial Sequence: Synthetic peptide
  Seed: RMCSLMQGSTLPRRS
RMYSLLQSSTCPRRS

SEQ ID NO: 126625 - protein, 15 aa, Artificial Sequence
  Description of Artificial Sequence: Synthetic peptide
  Seed: RMCSLMQGSTLPRRS
RMYSLLQSSTDPRRS

SEQ ID NO: 126626 - protein, 15 aa, Artificial Sequence
  Description of Artificial Sequence: Synthetic peptide
  Seed: RMCSLMQGSTLPRRS
RMYSLLQSSTEPRRS

SEQ ID NO: 126627 - protein, 15 aa, Artificial Sequence
  Description of Artificial Sequence: Synthetic peptide
  Seed: RMCSLMQGSTLPRRS
RMYSLLQSSTFPRRS

SEQ ID NO: 126628 - protein, 15 aa, Artificial Sequence
  Description of Artificial Sequence: Synthetic peptide
  Seed: RMCSLMQGSTLPRRS
RMYSLLQSSTGPRRS

SEQ ID NO: 126629 - protein, 15 aa, Artificial Sequence
  Description of Artificial Sequence: Synthetic peptide
  Seed: RMCSLMQGSTLPRRS
RMYSLLQSSTHPRRS

SEQ ID NO: 126630 - protein, 15 aa, Artificial Sequence
  Description of Artificial Sequence: Synthetic peptide
  Seed: RMCSLMQGSTLPRRS
RMYSLLQSSTIPRRS

SEQ ID NO: 126631 - protein, 15 aa, Artificial Sequence
  Description of Artificial Sequence: Synthetic peptide
  Seed: RMCSLMQGSTLPRRS
RMYSLLQSSTKPRRS

SEQ ID NO: 126632 - protein, 15 aa, Artificial Sequence
  Description of Artificial Sequence: Synthetic peptide
  Seed: RMCSLMQGSTLPRRS
RMYSLLQSSTLPRRS

SEQ ID NO: 126633 - protein, 15 aa, Artificial Sequence
  Description of Artificial Sequence: Synthetic peptide
  Seed: RMCSLMQGSTLPRRS
RMYSLLQSSTMPRRS

SEQ ID NO: 126634 - protein, 15 aa, Artificial Sequence
  Description of Artificial Sequence: Synthetic peptide
  Seed: RMCSLMQGSTLPRRS
RMYSLLQSSTNPRRS

SEQ ID NO: 126635 - protein, 15 aa, Artificial Sequence
  Description of Artificial Sequence: Synthetic peptide
  Seed: RMCSLMQGSTLPRRS
RMYSLLQSSTPPRRS

SEQ ID NO: 126636 - protein, 15 aa, Artificial Sequence
  Description of Artificial Sequence: Synthetic peptide
  Seed: RMCSLMQGSTLPRRS
RMYSLLQSSTQPRRS

SEQ ID NO: 126637 - protein, 15 aa, Artificial Sequence
  Description of Artificial Sequence: Synthetic peptide
  Seed: RMCSLMQGSTLPRRS
RMYSLLQSSTRPRRS

SEQ ID NO: 126638 - protein, 15 aa, Artificial Sequence
  Description of Artificial Sequence: Synthetic peptide
  Seed: RMCSLMQGSTLPRRS
RMYSLLQSSTSPRRS

SEQ ID NO: 126639 - protein, 15 aa, Artificial Sequence
  Description of Artificial Sequence: Synthetic peptide
  Seed: RMCSLMQGSTLPRRS
RMYSLLQSSTTPRRS

SEQ ID NO: 126640 - protein, 15 aa, Artificial Sequence
  Description of Artificial Sequence: Synthetic peptide
  Seed: RMCSLMQGSTLPRRS
RMYSLLQSSTVPRRS

SEQ ID NO: 126641 - protein, 15 aa, Artificial Sequence
  Description of Artificial Sequence: Synthetic peptide
  Seed: RMCSLMQGSTLPRRS
RMYSLLQSSTWPRRS

SEQ ID NO: 126642 - protein, 15 aa, Artificial Sequence
  Description of Artificial Sequence: Synthetic peptide
  Seed: RMCSLMQGSTLPRRS
RMYSLLQSSTYPRRS

SEQ ID NO: 126643 - protein, 15 aa, Artificial Sequence
  Description of Artificial Sequence: Synthetic peptide
  Seed: RMCSLMQGSTLPRRS
RMYSLLQTSTAPRRS

SEQ ID NO: 126644 - protein, 15 aa, Artificial Sequence
  Description of Artificial Sequence: Synthetic peptide
  Seed: RMCSLMQGSTLPRRS
RMYSLLQTSTCPRRS

SEQ ID NO: 126645 - protein, 15 aa, Artificial Sequence
  Description of Artificial Sequence: Synthetic peptide
  Seed: RMCSLMQGSTLPRRS
RMYSLLQTSTDPRRS

SEQ ID NO: 126646 - protein, 15 aa, Artificial Sequence
  Description of Artificial Sequence: Synthetic peptide
  Seed: RMCSLMQGSTLPRRS
RMYSLLQTSTEPRRS

SEQ ID NO: 126647 - protein, 15 aa, Artificial Sequence
  Description of Artificial Sequence: Synthetic peptide
  Seed: RMCSLMQGSTLPRRS
RMYSLLQTSTFPRRS

SEQ ID NO: 126648 - protein, 15 aa, Artificial Sequence
  Description of Artificial Sequence: Synthetic peptide
  Seed: RMCSLMQGSTLPRRS
RMYSLLQTSTGPRRS

SEQ ID NO: 126649 - protein, 15 aa, Artificial Sequence
  Description of Artificial Sequence: Synthetic peptide
  Seed: RMCSLMQGSTLPRRS
RMYSLLQTSTHPRRS

SEQ ID NO: 126650 - protein, 15 aa, Artificial Sequence
  Description of Artificial Sequence: Synthetic peptide
  Seed: RMCSLMQGSTLPRRS
RMYSLLQTSTIPRRS

SEQ ID NO: 126651 - protein, 15 aa, Artificial Sequence
  Description of Artificial Sequence: Synthetic peptide
  Seed: RMCSLMQGSTLPRRS
RMYSLLQTSTLPRRS

SEQ ID NO: 126652 - protein, 15 aa, Artificial Sequence
  Description of Artificial Sequence: Synthetic peptide
  Seed: RMCSLMQGSTLPRRS
RMYSLLQTSTMPRRS

SEQ ID NO: 126653 - protein, 15 aa, Artificial Sequence
  Description of Artificial Sequence: Synthetic peptide
  Seed: RMCSLMQGSTLPRRS
RMYSLLQTSTNPRRS

SEQ ID NO: 126654 - protein, 15 aa, Artificial Sequence
  Description of Artificial Sequence: Synthetic peptide
  Seed: RMCSLMQGSTLPRRS
RMYSLLQTSTPPRRS

SEQ ID NO: 126655 - protein, 15 aa, Artificial Sequence
  Description of Artificial Sequence: Synthetic peptide
  Seed: RMCSLMQGSTLPRRS
RMYSLLQTSTQPRRS

SEQ ID NO: 126656 - protein, 15 aa, Artificial Sequence
  Description of Artificial Sequence: Synthetic peptide
  Seed: RMCSLMQGSTLPRRS
RMYSLLQTSTSPRRS

SEQ ID NO: 126657 - protein, 15 aa, Artificial Sequence
  Description of Artificial Sequence: Synthetic peptide
  Seed: RMCSLMQGSTLPRRS
RMYSLLQTSTTPRRS

SEQ ID NO: 126658 - protein, 15 aa, Artificial Sequence
  Description of Artificial Sequence: Synthetic peptide
  Seed: RMCSLMQGSTLPRRS
RMYSLLQTSTVPRRS

SEQ ID NO: 126659 - protein, 15 aa, Artificial Sequence
  Description of Artificial Sequence: Synthetic peptide
  Seed: RMCSLMQGSTLPRRS
RMYSLLQTSTYPRRS

SEQ ID NO: 126660 - protein, 15 aa, Artificial Sequence
  Description of Artificial Sequence: Synthetic peptide
  Seed: RMCSLMQGSTLPRRS
RMYSLLQVSTAPRRS

SEQ ID NO: 126661 - protein, 15 aa, Artificial Sequence
  Description of Artificial Sequence: Synthetic peptide
  Seed: RMCSLMQGSTLPRRS
RMYSLLQVSTCPRRS

SEQ ID NO: 126662 - protein, 15 aa, Artificial Sequence
  Description of Artificial Sequence: Synthetic peptide
  Seed: RMCSLMQGSTLPRRS
RMYSLLQVSTDPRRS

SEQ ID NO: 126663 - protein, 15 aa, Artificial Sequence
  Description of Artificial Sequence: Synthetic peptide
  Seed: RMCSLMQGSTLPRRS
RMYSLLQVSTEPRRS

SEQ ID NO: 126664 - protein, 15 aa, Artificial Sequence
  Description of Artificial Sequence: Synthetic peptide
  Seed: RMCSLMQGSTLPRRS
RMYSLLQVSTFPRRS

SEQ ID NO: 126665 - protein, 15 aa, Artificial Sequence
  Description of Artificial Sequence: Synthetic peptide
  Seed: RMCSLMQGSTLPRRS
RMYSLLQVSTGPRRS

SEQ ID NO: 126666 - protein, 15 aa, Artificial Sequence
  Description of Artificial Sequence: Synthetic peptide
  Seed: RMCSLMQGSTLPRRS
RMYSLLQVSTHPRRS

SEQ ID NO: 126667 - protein, 15 aa, Artificial Sequence
  Description of Artificial Sequence: Synthetic peptide
  Seed: RMCSLMQGSTLPRRS
RMYSLLQVSTIPRRS

SEQ ID NO: 126668 - protein, 15 aa, Artificial Sequence
  Description of Artificial Sequence: Synthetic peptide
  Seed: RMCSLMQGSTLPRRS
RMYSLLQVSTLPRRS

SEQ ID NO: 126669 - protein, 15 aa, Artificial Sequence
  Description of Artificial Sequence: Synthetic peptide
  Seed: RMCSLMQGSTLPRRS
RMYSLLQVSTMPRRS

SEQ ID NO: 126670 - protein, 15 aa, Artificial Sequence
  Description of Artificial Sequence: Synthetic peptide
  Seed: RMCSLMQGSTLPRRS
RMYSLLQVSTNPRRS

SEQ ID NO: 126671 - protein, 15 aa, Artificial Sequence
  Description of Artificial Sequence: Synthetic peptide
  Seed: RMCSLMQGSTLPRRS
RMYSLLQVSTPPRRS

SEQ ID NO: 126672 - protein, 15 aa, Artificial Sequence
  Description of Artificial Sequence: Synthetic peptide
  Seed: RMCSLMQGSTLPRRS
RMYSLLQVSTQPRRS

SEQ ID NO: 126673 - protein, 15 aa, Artificial Sequence
  Description of Artificial Sequence: Synthetic peptide
  Seed: RMCSLMQGSTLPRRS
RMYSLLQVSTSPRRS

SEQ ID NO: 126674 - protein, 15 aa, Artificial Sequence
  Description of Artificial Sequence: Synthetic peptide
  Seed: RMCSLMQGSTLPRRS
RMYSLLQVSTTPRRS

SEQ ID NO: 126675 - protein, 15 aa, Artificial Sequence
  Description of Artificial Sequence: Synthetic peptide
  Seed: RMCSLMQGSTLPRRS
RMYSLLQVSTVPRRS

SEQ ID NO: 126676 - protein, 15 aa, Artificial Sequence
  Description of Artificial Sequence: Synthetic peptide
  Seed: RMCSLMQGSTLPRRS
RMYSLLQWSTIPRRS

SEQ ID NO: 126677 - protein, 15 aa, Artificial Sequence
  Description of Artificial Sequence: Synthetic peptide
  Seed: RMCSLMQGSTLPRRS
RMYSLLQWSTLPRRS

SEQ ID NO: 126678 - protein, 15 aa, Artificial Sequence
  Description of Artificial Sequence: Synthetic peptide
  Seed: RMCSLMQGSTLPRRS
RMYSLLQWSTVPRRS

SEQ ID NO: 126679 - protein, 15 aa, Artificial Sequence
  Description of Artificial Sequence: Synthetic peptide
  Seed: RMCSLMQGSTLPRRS
RMYSLMQASTAPRRS

SEQ ID NO: 126680 - protein, 15 aa, Artificial Sequence
  Description of Artificial Sequence: Synthetic peptide
  Seed: RMCSLMQGSTLPRRS
RMYSLMQASTCPRRS

SEQ ID NO: 126681 - protein, 15 aa, Artificial Sequence
  Description of Artificial Sequence: Synthetic peptide
  Seed: RMCSLMQGSTLPRRS
RMYSLMQASTDPRRS

SEQ ID NO: 126682 - protein, 15 aa, Artificial Sequence
  Description of Artificial Sequence: Synthetic peptide
  Seed: RMCSLMQGSTLPRRS
RMYSLMQASTEPRRS

SEQ ID NO: 126683 - protein, 15 aa, Artificial Sequence
  Description of Artificial Sequence: Synthetic peptide
  Seed: RMCSLMQGSTLPRRS
RMYSLMQASTFPRRS

SEQ ID NO: 126684 - protein, 15 aa, Artificial Sequence
  Description of Artificial Sequence: Synthetic peptide
  Seed: RMCSLMQGSTLPRRS
RMYSLMQASTGPRRS

SEQ ID NO: 126685 - protein, 15 aa, Artificial Sequence
  Description of Artificial Sequence: Synthetic peptide
  Seed: RMCSLMQGSTLPRRS
RMYSLMQASTHPRRS

SEQ ID NO: 126686 - protein, 15 aa, Artificial Sequence
  Description of Artificial Sequence: Synthetic peptide
  Seed: RMCSLMQGSTLPRRS
RMYSLMQASTIPRRS

SEQ ID NO: 126687 - protein, 15 aa, Artificial Sequence
  Description of Artificial Sequence: Synthetic peptide
  Seed: RMCSLMQGSTLPRRS
RMYSLMQASTKPRRS

SEQ ID NO: 126688 - protein, 15 aa, Artificial Sequence
  Description of Artificial Sequence: Synthetic peptide
  Seed: RMCSLMQGSTLPRRS
RMYSLMQASTLPRRS

SEQ ID NO: 126689 - protein, 15 aa, Artificial Sequence
  Description of Artificial Sequence: Synthetic peptide
  Seed: RMCSLMQGSTLPRRS
RMYSLMQASTMPRRS

SEQ ID NO: 126690 - protein, 15 aa, Artificial Sequence
  Description of Artificial Sequence: Synthetic peptide
  Seed: RMCSLMQGSTLPRRS
RMYSLMQASTNPRRS

SEQ ID NO: 126691 - protein, 15 aa, Artificial Sequence
  Description of Artificial Sequence: Synthetic peptide
  Seed: RMCSLMQGSTLPRRS
RMYSLMQASTPPRRS

SEQ ID NO: 126692 - protein, 15 aa, Artificial Sequence
  Description of Artificial Sequence: Synthetic peptide
  Seed: RMCSLMQGSTLPRRS
RMYSLMQASTQPRRS

SEQ ID NO: 126693 - protein, 15 aa, Artificial Sequence
  Description of Artificial Sequence: Synthetic peptide
  Seed: RMCSLMQGSTLPRRS
RMYSLMQASTRPRRS

SEQ ID NO: 126694 - protein, 15 aa, Artificial Sequence
  Description of Artificial Sequence: Synthetic peptide
  Seed: RMCSLMQGSTLPRRS
RMYSLMQASTSPRRS

SEQ ID NO: 126695 - protein, 15 aa, Artificial Sequence
  Description of Artificial Sequence: Synthetic peptide
  Seed: RMCSLMQGSTLPRRS
RMYSLMQASTTPRRS

SEQ ID NO: 126696 - protein, 15 aa, Artificial Sequence
  Description of Artificial Sequence: Synthetic peptide
  Seed: RMCSLMQGSTLPRRS
RMYSLMQASTVPRRS

SEQ ID NO: 126697 - protein, 15 aa, Artificial Sequence
  Description of Artificial Sequence: Synthetic peptide
  Seed: RMCSLMQGSTLPRRS
RMYSLMQASTWPRRS

SEQ ID NO: 126698 - protein, 15 aa, Artificial Sequence
  Description of Artificial Sequence: Synthetic peptide
  Seed: RMCSLMQGSTLPRRS
RMYSLMQASTYPRRS

SEQ ID NO: 126699 - protein, 15 aa, Artificial Sequence
  Description of Artificial Sequence: Synthetic peptide
  Seed: RMCSLMQGSTLPRRS
RMYSLMQCSTAPRRS

SEQ ID NO: 126700 - protein, 15 aa, Artificial Sequence
  Description of Artificial Sequence: Synthetic peptide
  Seed: RMCSLMQGSTLPRRS
RMYSLMQCSTIPRRS

SEQ ID NO: 126701 - protein, 15 aa, Artificial Sequence
  Description of Artificial Sequence: Synthetic peptide
  Seed: RMCSLMQGSTLPRRS
RMYSLMQCSTLPRRS

SEQ ID NO: 126702 - protein, 15 aa, Artificial Sequence
  Description of Artificial Sequence: Synthetic peptide
  Seed: RMCSLMQGSTLPRRS
RMYSLMQCSTSPRRS

SEQ ID NO: 126703 - protein, 15 aa, Artificial Sequence
  Description of Artificial Sequence: Synthetic peptide
  Seed: RMCSLMQGSTLPRRS
RMYSLMQCSTVPRRS

SEQ ID NO: 126704 - protein, 15 aa, Artificial Sequence
  Description of Artificial Sequence: Synthetic peptide
  Seed: RMCSLMQGSTLPRRS
RMYSLMQDSTLPRRS

SEQ ID NO: 126705 - protein, 15 aa, Artificial Sequence
  Description of Artificial Sequence: Synthetic peptide
  Seed: RMCSLMQGSTLPRRS
RMYSLMQDSTVPRRS

SEQ ID NO: 126706 - protein, 15 aa, Artificial Sequence
  Description of Artificial Sequence: Synthetic peptide
  Seed: RMCSLMQGSTLPRRS
RMYSLMQESTAPRRS

SEQ ID NO: 126707 - protein, 15 aa, Artificial Sequence
  Description of Artificial Sequence: Synthetic peptide
  Seed: RMCSLMQGSTLPRRS
RMYSLMQESTIPRRS

SEQ ID NO: 126708 - protein, 15 aa, Artificial Sequence
  Description of Artificial Sequence: Synthetic peptide
  Seed: RMCSLMQGSTLPRRS
RMYSLMQESTLPRRS

SEQ ID NO: 126709 - protein, 15 aa, Artificial Sequence
  Description of Artificial Sequence: Synthetic peptide
  Seed: RMCSLMQGSTLPRRS
RMYSLMQESTVPRRS

SEQ ID NO: 126710 - protein, 15 aa, Artificial Sequence
  Description of Artificial Sequence: Synthetic peptide
  Seed: RMCSLMQGSTLPRRS
RMYSLMQFSTAPRRS

SEQ ID NO: 126711 - protein, 15 aa, Artificial Sequence
  Description of Artificial Sequence: Synthetic peptide
  Seed: RMCSLMQGSTLPRRS
RMYSLMQFSTVPRRS

SEQ ID NO: 126712 - protein, 15 aa, Artificial Sequence
  Description of Artificial Sequence: Synthetic peptide
  Seed: RMCSLMQGSTLPRRS
RMYSLMQGSTAPRRS

SEQ ID NO: 126713 - protein, 15 aa, Artificial Sequence
  Description of Artificial Sequence: Synthetic peptide
  Seed: RMCSLMQGSTLPRRS
RMYSLMQGSTCPRRS

SEQ ID NO: 126714 - protein, 15 aa, Artificial Sequence
  Description of Artificial Sequence: Synthetic peptide
  Seed: RMCSLMQGSTLPRRS
RMYSLMQGSTDPRRS

SEQ ID NO: 126715 - protein, 15 aa, Artificial Sequence
  Description of Artificial Sequence: Synthetic peptide
  Seed: RMCSLMQGSTLPRRS
RMYSLMQGSTEPRRS

SEQ ID NO: 126716 - protein, 15 aa, Artificial Sequence
  Description of Artificial Sequence: Synthetic peptide
  Seed: RMCSLMQGSTLPRRS
RMYSLMQGSTFPRRS

SEQ ID NO: 126717 - protein, 15 aa, Artificial Sequence
  Description of Artificial Sequence: Synthetic peptide
  Seed: RMCSLMQGSTLPRRS
RMYSLMQGSTGPRRS

SEQ ID NO: 126718 - protein, 15 aa, Artificial Sequence
  Description of Artificial Sequence: Synthetic peptide
  Seed: RMCSLMQGSTLPRRS
RMYSLMQGSTHPRRS

SEQ ID NO: 126719 - protein, 15 aa, Artificial Sequence
  Description of Artificial Sequence: Synthetic peptide
  Seed: RMCSLMQGSTLPRRS
RMYSLMQGSTIPRRS

SEQ ID NO: 126720 - protein, 15 aa, Artificial Sequence
  Description of Artificial Sequence: Synthetic peptide
  Seed: RMCSLMQGSTLPRRS
RMYSLMQGSTKPRRS

SEQ ID NO: 126721 - protein, 15 aa, Artificial Sequence
  Description of Artificial Sequence: Synthetic peptide
  Seed: RMCSLMQGSTLPRRS
RMYSLMQGSTLPRRS

SEQ ID NO: 126722 - protein, 15 aa, Artificial Sequence
  Description of Artificial Sequence: Synthetic peptide
  Seed: RMCSLMQGSTLPRRS
RMYSLMQGSTMPRRS

SEQ ID NO: 126723 - protein, 15 aa, Artificial Sequence
  Description of Artificial Sequence: Synthetic peptide
  Seed: RMCSLMQGSTLPRRS
RMYSLMQGSTNPRRS

SEQ ID NO: 126724 - protein, 15 aa, Artificial Sequence
  Description of Artificial Sequence: Synthetic peptide
  Seed: RMCSLMQGSTLPRRS
RMYSLMQGSTPPRRS

SEQ ID NO: 126725 - protein, 15 aa, Artificial Sequence
  Description of Artificial Sequence: Synthetic peptide
  Seed: RMCSLMQGSTLPRRS
RMYSLMQGSTQPRRS

SEQ ID NO: 126726 - protein, 15 aa, Artificial Sequence
  Description of Artificial Sequence: Synthetic peptide
  Seed: RMCSLMQGSTLPRRS
RMYSLMQGSTRPRRS

SEQ ID NO: 126727 - protein, 15 aa, Artificial Sequence
  Description of Artificial Sequence: Synthetic peptide
  Seed: RMCSLMQGSTLPRRS
RMYSLMQGSTSPRRS

SEQ ID NO: 126728 - protein, 15 aa, Artificial Sequence
  Description of Artificial Sequence: Synthetic peptide
  Seed: RMCSLMQGSTLPRRS
RMYSLMQGSTTPRRS

SEQ ID NO: 126729 - protein, 15 aa, Artificial Sequence
  Description of Artificial Sequence: Synthetic peptide
  Seed: RMCSLMQGSTLPRRS
RMYSLMQGSTVPRRS

SEQ ID NO: 126730 - protein, 15 aa, Artificial Sequence
  Description of Artificial Sequence: Synthetic peptide
  Seed: RMCSLMQGSTLPRRS
RMYSLMQGSTWPRRS

SEQ ID NO: 126731 - protein, 15 aa, Artificial Sequence
  Description of Artificial Sequence: Synthetic peptide
  Seed: RMCSLMQGSTLPRRS
RMYSLMQGSTYPRRS

SEQ ID NO: 126732 - protein, 15 aa, Artificial Sequence
  Description of Artificial Sequence: Synthetic peptide
  Seed: RMCSLMQGSTLPRRS
RMYSLMQHSTAPRRS

SEQ ID NO: 126733 - protein, 15 aa, Artificial Sequence
  Description of Artificial Sequence: Synthetic peptide
  Seed: RMCSLMQGSTLPRRS
RMYSLMQHSTIPRRS

SEQ ID NO: 126734 - protein, 15 aa, Artificial Sequence
  Description of Artificial Sequence: Synthetic peptide
  Seed: RMCSLMQGSTLPRRS
RMYSLMQHSTLPRRS

SEQ ID NO: 126735 - protein, 15 aa, Artificial Sequence
  Description of Artificial Sequence: Synthetic peptide
  Seed: RMCSLMQGSTLPRRS
RMYSLMQHSTMPRRS

SEQ ID NO: 126736 - protein, 15 aa, Artificial Sequence
  Description of Artificial Sequence: Synthetic peptide
  Seed: RMCSLMQGSTLPRRS
RMYSLMQHSTSPRRS

SEQ ID NO: 126737 - protein, 15 aa, Artificial Sequence
  Description of Artificial Sequence: Synthetic peptide
  Seed: RMCSLMQGSTLPRRS
RMYSLMQHSTTPRRS

SEQ ID NO: 126738 - protein, 15 aa, Artificial Sequence
  Description of Artificial Sequence: Synthetic peptide
  Seed: RMCSLMQGSTLPRRS
RMYSLMQHSTVPRRS

SEQ ID NO: 126739 - protein, 15 aa, Artificial Sequence
  Description of Artificial Sequence: Synthetic peptide
  Seed: RMCSLMQGSTLPRRS
RMYSLMQISTAPRRS

SEQ ID NO: 126740 - protein, 15 aa, Artificial Sequence
  Description of Artificial Sequence: Synthetic peptide
  Seed: RMCSLMQGSTLPRRS
RMYSLMQISTCPRRS

SEQ ID NO: 126741 - protein, 15 aa, Artificial Sequence
  Description of Artificial Sequence: Synthetic peptide
  Seed: RMCSLMQGSTLPRRS
RMYSLMQISTDPRRS

SEQ ID NO: 126742 - protein, 15 aa, Artificial Sequence
  Description of Artificial Sequence: Synthetic peptide
  Seed: RMCSLMQGSTLPRRS
RMYSLMQISTEPRRS

SEQ ID NO: 126743 - protein, 15 aa, Artificial Sequence
  Description of Artificial Sequence: Synthetic peptide
  Seed: RMCSLMQGSTLPRRS
RMYSLMQISTGPRRS

SEQ ID NO: 126744 - protein, 15 aa, Artificial Sequence
  Description of Artificial Sequence: Synthetic peptide
  Seed: RMCSLMQGSTLPRRS
RMYSLMQISTHPRRS

SEQ ID NO: 126745 - protein, 15 aa, Artificial Sequence
  Description of Artificial Sequence: Synthetic peptide
  Seed: RMCSLMQGSTLPRRS
RMYSLMQISTIPRRS

SEQ ID NO: 126746 - protein, 15 aa, Artificial Sequence
  Description of Artificial Sequence: Synthetic peptide
  Seed: RMCSLMQGSTLPRRS
RMYSLMQISTLPRRS

SEQ ID NO: 126747 - protein, 15 aa, Artificial Sequence
  Description of Artificial Sequence: Synthetic peptide
  Seed: RMCSLMQGSTLPRRS
RMYSLMQISTMPRRS

SEQ ID NO: 126748 - protein, 15 aa, Artificial Sequence
  Description of Artificial Sequence: Synthetic peptide
  Seed: RMCSLMQGSTLPRRS
RMYSLMQISTNPRRS

SEQ ID NO: 126749 - protein, 15 aa, Artificial Sequence
  Description of Artificial Sequence: Synthetic peptide
  Seed: RMCSLMQGSTLPRRS
RMYSLMQISTPPRRS

SEQ ID NO: 126750 - protein, 15 aa, Artificial Sequence
  Description of Artificial Sequence: Synthetic peptide
  Seed: RMCSLMQGSTLPRRS
RMYSLMQISTQPRRS

SEQ ID NO: 126751 - protein, 15 aa, Artificial Sequence
  Description of Artificial Sequence: Synthetic peptide
  Seed: RMCSLMQGSTLPRRS
RMYSLMQISTSPRRS

SEQ ID NO: 126752 - protein, 15 aa, Artificial Sequence
  Description of Artificial Sequence: Synthetic peptide
  Seed: RMCSLMQGSTLPRRS
RMYSLMQISTTPRRS

SEQ ID NO: 126753 - protein, 15 aa, Artificial Sequence
  Description of Artificial Sequence: Synthetic peptide
  Seed: RMCSLMQGSTLPRRS
RMYSLMQISTVPRRS

SEQ ID NO: 126754 - protein, 15 aa, Artificial Sequence
  Description of Artificial Sequence: Synthetic peptide
  Seed: RMCSLMQGSTLPRRS
RMYSLMQLSTAPRRS

SEQ ID NO: 126755 - protein, 15 aa, Artificial Sequence
  Description of Artificial Sequence: Synthetic peptide
  Seed: RMCSLMQGSTLPRRS
RMYSLMQLSTGPRRS

SEQ ID NO: 126756 - protein, 15 aa, Artificial Sequence
  Description of Artificial Sequence: Synthetic peptide
  Seed: RMCSLMQGSTLPRRS
RMYSLMQLSTHPRRS

SEQ ID NO: 126757 - protein, 15 aa, Artificial Sequence
  Description of Artificial Sequence: Synthetic peptide
  Seed: RMCSLMQGSTLPRRS
RMYSLMQLSTIPRRS

SEQ ID NO: 126758 - protein, 15 aa, Artificial Sequence
  Description of Artificial Sequence: Synthetic peptide
  Seed: RMCSLMQGSTLPRRS
RMYSLMQLSTLPRRS

SEQ ID NO: 126759 - protein, 15 aa, Artificial Sequence
  Description of Artificial Sequence: Synthetic peptide
  Seed: RMCSLMQGSTLPRRS
RMYSLMQLSTMPRRS

SEQ ID NO: 126760 - protein, 15 aa, Artificial Sequence
  Description of Artificial Sequence: Synthetic peptide
  Seed: RMCSLMQGSTLPRRS
RMYSLMQLSTNPRRS

SEQ ID NO: 126761 - protein, 15 aa, Artificial Sequence
  Description of Artificial Sequence: Synthetic peptide
  Seed: RMCSLMQGSTLPRRS
RMYSLMQLSTQPRRS

SEQ ID NO: 126762 - protein, 15 aa, Artificial Sequence
  Description of Artificial Sequence: Synthetic peptide
  Seed: RMCSLMQGSTLPRRS
RMYSLMQLSTSPRRS

SEQ ID NO: 126763 - protein, 15 aa, Artificial Sequence
  Description of Artificial Sequence: Synthetic peptide
  Seed: RMCSLMQGSTLPRRS
RMYSLMQLSTTPRRS

SEQ ID NO: 126764 - protein, 15 aa, Artificial Sequence
  Description of Artificial Sequence: Synthetic peptide
  Seed: RMCSLMQGSTLPRRS
RMYSLMQLSTVPRRS

SEQ ID NO: 126765 - protein, 15 aa, Artificial Sequence
  Description of Artificial Sequence: Synthetic peptide
  Seed: RMCSLMQGSTLPRRS
RMYSLMQMSTAPRRS

SEQ ID NO: 126766 - protein, 15 aa, Artificial Sequence
  Description of Artificial Sequence: Synthetic peptide
  Seed: RMCSLMQGSTLPRRS
RMYSLMQMSTGPRRS

SEQ ID NO: 126767 - protein, 15 aa, Artificial Sequence
  Description of Artificial Sequence: Synthetic peptide
  Seed: RMCSLMQGSTLPRRS
RMYSLMQMSTHPRRS

SEQ ID NO: 126768 - protein, 15 aa, Artificial Sequence
  Description of Artificial Sequence: Synthetic peptide
  Seed: RMCSLMQGSTLPRRS
RMYSLMQMSTIPRRS

SEQ ID NO: 126769 - protein, 15 aa, Artificial Sequence
  Description of Artificial Sequence: Synthetic peptide
  Seed: RMCSLMQGSTLPRRS
RMYSLMQMSTLPRRS

SEQ ID NO: 126770 - protein, 15 aa, Artificial Sequence
  Description of Artificial Sequence: Synthetic peptide
  Seed: RMCSLMQGSTLPRRS
RMYSLMQMSTMPRRS

SEQ ID NO: 126771 - protein, 15 aa, Artificial Sequence
  Description of Artificial Sequence: Synthetic peptide
  Seed: RMCSLMQGSTLPRRS
RMYSLMQMSTNPRRS

SEQ ID NO: 126772 - protein, 15 aa, Artificial Sequence
  Description of Artificial Sequence: Synthetic peptide
  Seed: RMCSLMQGSTLPRRS
RMYSLMQMSTQPRRS

SEQ ID NO: 126773 - protein, 15 aa, Artificial Sequence
  Description of Artificial Sequence: Synthetic peptide
  Seed: RMCSLMQGSTLPRRS
RMYSLMQMSTSPRRS

SEQ ID NO: 126774 - protein, 15 aa, Artificial Sequence
  Description of Artificial Sequence: Synthetic peptide
  Seed: RMCSLMQGSTLPRRS
RMYSLMQMSTTPRRS

SEQ ID NO: 126775 - protein, 15 aa, Artificial Sequence
  Description of Artificial Sequence: Synthetic peptide
  Seed: RMCSLMQGSTLPRRS
RMYSLMQMSTVPRRS

SEQ ID NO: 126776 - protein, 15 aa, Artificial Sequence
  Description of Artificial Sequence: Synthetic peptide
  Seed: RMCSLMQGSTLPRRS
RMYSLMQNSTAPRRS

SEQ ID NO: 126777 - protein, 15 aa, Artificial Sequence
  Description of Artificial Sequence: Synthetic peptide
  Seed: RMCSLMQGSTLPRRS
RMYSLMQNSTCPRRS

SEQ ID NO: 126778 - protein, 15 aa, Artificial Sequence
  Description of Artificial Sequence: Synthetic peptide
  Seed: RMCSLMQGSTLPRRS
RMYSLMQNSTFPRRS

SEQ ID NO: 126779 - protein, 15 aa, Artificial Sequence
  Description of Artificial Sequence: Synthetic peptide
  Seed: RMCSLMQGSTLPRRS
RMYSLMQNSTGPRRS

SEQ ID NO: 126780 - protein, 15 aa, Artificial Sequence
  Description of Artificial Sequence: Synthetic peptide
  Seed: RMCSLMQGSTLPRRS
RMYSLMQNSTHPRRS

SEQ ID NO: 126781 - protein, 15 aa, Artificial Sequence
  Description of Artificial Sequence: Synthetic peptide
  Seed: RMCSLMQGSTLPRRS
RMYSLMQNSTIPRRS

SEQ ID NO: 126782 - protein, 15 aa, Artificial Sequence
  Description of Artificial Sequence: Synthetic peptide
  Seed: RMCSLMQGSTLPRRS
RMYSLMQNSTLPRRS

SEQ ID NO: 126783 - protein, 15 aa, Artificial Sequence
  Description of Artificial Sequence: Synthetic peptide
  Seed: RMCSLMQGSTLPRRS
RMYSLMQNSTMPRRS

SEQ ID NO: 126784 - protein, 15 aa, Artificial Sequence
  Description of Artificial Sequence: Synthetic peptide
  Seed: RMCSLMQGSTLPRRS
RMYSLMQNSTNPRRS

SEQ ID NO: 126785 - protein, 15 aa, Artificial Sequence
  Description of Artificial Sequence: Synthetic peptide
  Seed: RMCSLMQGSTLPRRS
RMYSLMQNSTQPRRS

SEQ ID NO: 126786 - protein, 15 aa, Artificial Sequence
  Description of Artificial Sequence: Synthetic peptide
  Seed: RMCSLMQGSTLPRRS
RMYSLMQNSTSPRRS

SEQ ID NO: 126787 - protein, 15 aa, Artificial Sequence
  Description of Artificial Sequence: Synthetic peptide
  Seed: RMCSLMQGSTLPRRS
RMYSLMQNSTTPRRS

SEQ ID NO: 126788 - protein, 15 aa, Artificial Sequence
  Description of Artificial Sequence: Synthetic peptide
  Seed: RMCSLMQGSTLPRRS
RMYSLMQNSTVPRRS

SEQ ID NO: 126789 - protein, 15 aa, Artificial Sequence
  Description of Artificial Sequence: Synthetic peptide
  Seed: RMCSLMQGSTLPRRS
RMYSLMQNSTYPRRS

SEQ ID NO: 126790 - protein, 15 aa, Artificial Sequence
  Description of Artificial Sequence: Synthetic peptide
  Seed: RMCSLMQGSTLPRRS
RMYSLMQPSTAPRRS

SEQ ID NO: 126791 - protein, 15 aa, Artificial Sequence
  Description of Artificial Sequence: Synthetic peptide
  Seed: RMCSLMQGSTLPRRS
RMYSLMQPSTCPRRS

SEQ ID NO: 126792 - protein, 15 aa, Artificial Sequence
  Description of Artificial Sequence: Synthetic peptide
  Seed: RMCSLMQGSTLPRRS
RMYSLMQPSTDPRRS

SEQ ID NO: 126793 - protein, 15 aa, Artificial Sequence
  Description of Artificial Sequence: Synthetic peptide
  Seed: RMCSLMQGSTLPRRS
RMYSLMQPSTEPRRS

SEQ ID NO: 126794 - protein, 15 aa, Artificial Sequence
  Description of Artificial Sequence: Synthetic peptide
  Seed: RMCSLMQGSTLPRRS
RMYSLMQPSTFPRRS

SEQ ID NO: 126795 - protein, 15 aa, Artificial Sequence
  Description of Artificial Sequence: Synthetic peptide
  Seed: RMCSLMQGSTLPRRS
RMYSLMQPSTGPRRS

SEQ ID NO: 126796 - protein, 15 aa, Artificial Sequence
  Description of Artificial Sequence: Synthetic peptide
  Seed: RMCSLMQGSTLPRRS
RMYSLMQPSTHPRRS

SEQ ID NO: 126797 - protein, 15 aa, Artificial Sequence
  Description of Artificial Sequence: Synthetic peptide
  Seed: RMCSLMQGSTLPRRS
RMYSLMQPSTIPRRS

SEQ ID NO: 126798 - protein, 15 aa, Artificial Sequence
  Description of Artificial Sequence: Synthetic peptide
  Seed: RMCSLMQGSTLPRRS
RMYSLMQPSTLPRRS

SEQ ID NO: 126799 - protein, 15 aa, Artificial Sequence
  Description of Artificial Sequence: Synthetic peptide
  Seed: RMCSLMQGSTLPRRS
RMYSLMQPSTMPRRS

SEQ ID NO: 126800 - protein, 15 aa, Artificial Sequence
  Description of Artificial Sequence: Synthetic peptide
  Seed: RMCSLMQGSTLPRRS
RMYSLMQPSTNPRRS

SEQ ID NO: 126801 - protein, 15 aa, Artificial Sequence
  Description of Artificial Sequence: Synthetic peptide
  Seed: RMCSLMQGSTLPRRS
RMYSLMQPSTPPRRS

SEQ ID NO: 126802 - protein, 15 aa, Artificial Sequence
  Description of Artificial Sequence: Synthetic peptide
  Seed: RMCSLMQGSTLPRRS
RMYSLMQPSTQPRRS

SEQ ID NO: 126803 - protein, 15 aa, Artificial Sequence
  Description of Artificial Sequence: Synthetic peptide
  Seed: RMCSLMQGSTLPRRS
RMYSLMQPSTRPRRS

SEQ ID NO: 126804 - protein, 15 aa, Artificial Sequence
  Description of Artificial Sequence: Synthetic peptide
  Seed: RMCSLMQGSTLPRRS
RMYSLMQPSTSPRRS

SEQ ID NO: 126805 - protein, 15 aa, Artificial Sequence
  Description of Artificial Sequence: Synthetic peptide
  Seed: RMCSLMQGSTLPRRS
RMYSLMQPSTTPRRS

SEQ ID NO: 126806 - protein, 15 aa, Artificial Sequence
  Description of Artificial Sequence: Synthetic peptide
  Seed: RMCSLMQGSTLPRRS
RMYSLMQPSTVPRRS

SEQ ID NO: 126807 - protein, 15 aa, Artificial Sequence
  Description of Artificial Sequence: Synthetic peptide
  Seed: RMCSLMQGSTLPRRS
RMYSLMQPSTWPRRS

SEQ ID NO: 126808 - protein, 15 aa, Artificial Sequence
  Description of Artificial Sequence: Synthetic peptide
  Seed: RMCSLMQGSTLPRRS
RMYSLMQPSTYPRRS

SEQ ID NO: 126809 - protein, 15 aa, Artificial Sequence
  Description of Artificial Sequence: Synthetic peptide
  Seed: RMCSLMQGSTLPRRS
RMYSLMQQSTAPRRS

SEQ ID NO: 126810 - protein, 15 aa, Artificial Sequence
  Description of Artificial Sequence: Synthetic peptide
  Seed: RMCSLMQGSTLPRRS
RMYSLMQQSTIPRRS

SEQ ID NO: 126811 - protein, 15 aa, Artificial Sequence
  Description of Artificial Sequence: Synthetic peptide
  Seed: RMCSLMQGSTLPRRS
RMYSLMQQSTLPRRS

SEQ ID NO: 126812 - protein, 15 aa, Artificial Sequence
  Description of Artificial Sequence: Synthetic peptide
  Seed: RMCSLMQGSTLPRRS
RMYSLMQQSTMPRRS

SEQ ID NO: 126813 - protein, 15 aa, Artificial Sequence
  Description of Artificial Sequence: Synthetic peptide
  Seed: RMCSLMQGSTLPRRS
RMYSLMQQSTSPRRS

SEQ ID NO: 126814 - protein, 15 aa, Artificial Sequence
  Description of Artificial Sequence: Synthetic peptide
  Seed: RMCSLMQGSTLPRRS
RMYSLMQQSTVPRRS

SEQ ID NO: 126815 - protein, 15 aa, Artificial Sequence
  Description of Artificial Sequence: Synthetic peptide
  Seed: RMCSLMQGSTLPRRS
RMYSLMQSSTAPRRS

SEQ ID NO: 126816 - protein, 15 aa, Artificial Sequence
  Description of Artificial Sequence: Synthetic peptide
  Seed: RMCSLMQGSTLPRRS
RMYSLMQSSTCPRRS

SEQ ID NO: 126817 - protein, 15 aa, Artificial Sequence
  Description of Artificial Sequence: Synthetic peptide
  Seed: RMCSLMQGSTLPRRS
RMYSLMQSSTDPRRS

SEQ ID NO: 126818 - protein, 15 aa, Artificial Sequence
  Description of Artificial Sequence: Synthetic peptide
  Seed: RMCSLMQGSTLPRRS
RMYSLMQSSTEPRRS

SEQ ID NO: 126819 - protein, 15 aa, Artificial Sequence
  Description of Artificial Sequence: Synthetic peptide
  Seed: RMCSLMQGSTLPRRS
RMYSLMQSSTFPRRS

SEQ ID NO: 126820 - protein, 15 aa, Artificial Sequence
  Description of Artificial Sequence: Synthetic peptide
  Seed: RMCSLMQGSTLPRRS
RMYSLMQSSTGPRRS

SEQ ID NO: 126821 - protein, 15 aa, Artificial Sequence
  Description of Artificial Sequence: Synthetic peptide
  Seed: RMCSLMQGSTLPRRS
RMYSLMQSSTHPRRS

SEQ ID NO: 126822 - protein, 15 aa, Artificial Sequence
  Description of Artificial Sequence: Synthetic peptide
  Seed: RMCSLMQGSTLPRRS
RMYSLMQSSTIPRRS

SEQ ID NO: 126823 - protein, 15 aa, Artificial Sequence
  Description of Artificial Sequence: Synthetic peptide
  Seed: RMCSLMQGSTLPRRS
RMYSLMQSSTKPRRS

SEQ ID NO: 126824 - protein, 15 aa, Artificial Sequence
  Description of Artificial Sequence: Synthetic peptide
  Seed: RMCSLMQGSTLPRRS
RMYSLMQSSTLPRRS

SEQ ID NO: 126825 - protein, 15 aa, Artificial Sequence
  Description of Artificial Sequence: Synthetic peptide
  Seed: RMCSLMQGSTLPRRS
RMYSLMQSSTMPRRS

SEQ ID NO: 126826 - protein, 15 aa, Artificial Sequence
  Description of Artificial Sequence: Synthetic peptide
  Seed: RMCSLMQGSTLPRRS
RMYSLMQSSTNPRRS

SEQ ID NO: 126827 - protein, 15 aa, Artificial Sequence
  Description of Artificial Sequence: Synthetic peptide
  Seed: RMCSLMQGSTLPRRS
RMYSLMQSSTPPRRS

SEQ ID NO: 126828 - protein, 15 aa, Artificial Sequence
  Description of Artificial Sequence: Synthetic peptide
  Seed: RMCSLMQGSTLPRRS
RMYSLMQSSTQPRRS

SEQ ID NO: 126829 - protein, 15 aa, Artificial Sequence
  Description of Artificial Sequence: Synthetic peptide
  Seed: RMCSLMQGSTLPRRS
RMYSLMQSSTRPRRS

SEQ ID NO: 126830 - protein, 15 aa, Artificial Sequence
  Description of Artificial Sequence: Synthetic peptide
  Seed: RMCSLMQGSTLPRRS
RMYSLMQSSTSPRRS

SEQ ID NO: 126831 - protein, 15 aa, Artificial Sequence
  Description of Artificial Sequence: Synthetic peptide
  Seed: RMCSLMQGSTLPRRS
RMYSLMQSSTTPRRS

SEQ ID NO: 126832 - protein, 15 aa, Artificial Sequence
  Description of Artificial Sequence: Synthetic peptide
  Seed: RMCSLMQGSTLPRRS
RMYSLMQSSTVPRRS

SEQ ID NO: 126833 - protein, 15 aa, Artificial Sequence
  Description of Artificial Sequence: Synthetic peptide
  Seed: RMCSLMQGSTLPRRS
RMYSLMQSSTWPRRS

SEQ ID NO: 126834 - protein, 15 aa, Artificial Sequence
  Description of Artificial Sequence: Synthetic peptide
  Seed: RMCSLMQGSTLPRRS
RMYSLMQSSTYPRRS

SEQ ID NO: 126835 - protein, 15 aa, Artificial Sequence
  Description of Artificial Sequence: Synthetic peptide
  Seed: RMCSLMQGSTLPRRS
RMYSLMQTSTAPRRS

SEQ ID NO: 126836 - protein, 15 aa, Artificial Sequence
  Description of Artificial Sequence: Synthetic peptide
  Seed: RMCSLMQGSTLPRRS
RMYSLMQTSTCPRRS

SEQ ID NO: 126837 - protein, 15 aa, Artificial Sequence
  Description of Artificial Sequence: Synthetic peptide
  Seed: RMCSLMQGSTLPRRS
RMYSLMQTSTDPRRS

SEQ ID NO: 126838 - protein, 15 aa, Artificial Sequence
  Description of Artificial Sequence: Synthetic peptide
  Seed: RMCSLMQGSTLPRRS
RMYSLMQTSTEPRRS

SEQ ID NO: 126839 - protein, 15 aa, Artificial Sequence
  Description of Artificial Sequence: Synthetic peptide
  Seed: RMCSLMQGSTLPRRS
RMYSLMQTSTFPRRS

SEQ ID NO: 126840 - protein, 15 aa, Artificial Sequence
  Description of Artificial Sequence: Synthetic peptide
  Seed: RMCSLMQGSTLPRRS
RMYSLMQTSTGPRRS

SEQ ID NO: 126841 - protein, 15 aa, Artificial Sequence
  Description of Artificial Sequence: Synthetic peptide
  Seed: RMCSLMQGSTLPRRS
RMYSLMQTSTHPRRS

SEQ ID NO: 126842 - protein, 15 aa, Artificial Sequence
  Description of Artificial Sequence: Synthetic peptide
  Seed: RMCSLMQGSTLPRRS
RMYSLMQTSTIPRRS

SEQ ID NO: 126843 - protein, 15 aa, Artificial Sequence
  Description of Artificial Sequence: Synthetic peptide
  Seed: RMCSLMQGSTLPRRS
RMYSLMQTSTLPRRS

SEQ ID NO: 126844 - protein, 15 aa, Artificial Sequence
  Description of Artificial Sequence: Synthetic peptide
  Seed: RMCSLMQGSTLPRRS
RMYSLMQTSTMPRRS

SEQ ID NO: 126845 - protein, 15 aa, Artificial Sequence
  Description of Artificial Sequence: Synthetic peptide
  Seed: RMCSLMQGSTLPRRS
RMYSLMQTSTNPRRS

SEQ ID NO: 126846 - protein, 15 aa, Artificial Sequence
  Description of Artificial Sequence: Synthetic peptide
  Seed: RMCSLMQGSTLPRRS
RMYSLMQTSTPPRRS

SEQ ID NO: 126847 - protein, 15 aa, Artificial Sequence
  Description of Artificial Sequence: Synthetic peptide
  Seed: RMCSLMQGSTLPRRS
RMYSLMQTSTQPRRS

SEQ ID NO: 126848 - protein, 15 aa, Artificial Sequence
  Description of Artificial Sequence: Synthetic peptide
  Seed: RMCSLMQGSTLPRRS
RMYSLMQTSTSPRRS

SEQ ID NO: 126849 - protein, 15 aa, Artificial Sequence
  Description of Artificial Sequence: Synthetic peptide
  Seed: RMCSLMQGSTLPRRS
RMYSLMQTSTTPRRS

SEQ ID NO: 126850 - protein, 15 aa, Artificial Sequence
  Description of Artificial Sequence: Synthetic peptide
  Seed: RMCSLMQGSTLPRRS
RMYSLMQTSTVPRRS

SEQ ID NO: 126851 - protein, 15 aa, Artificial Sequence
  Description of Artificial Sequence: Synthetic peptide
  Seed: RMCSLMQGSTLPRRS
RMYSLMQTSTYPRRS

SEQ ID NO: 126852 - protein, 15 aa, Artificial Sequence
  Description of Artificial Sequence: Synthetic peptide
  Seed: RMCSLMQGSTLPRRS
RMYSLMQVSTAPRRS

SEQ ID NO: 126853 - protein, 15 aa, Artificial Sequence
  Description of Artificial Sequence: Synthetic peptide
  Seed: RMCSLMQGSTLPRRS
RMYSLMQVSTCPRRS

SEQ ID NO: 126854 - protein, 15 aa, Artificial Sequence
  Description of Artificial Sequence: Synthetic peptide
  Seed: RMCSLMQGSTLPRRS
RMYSLMQVSTDPRRS

SEQ ID NO: 126855 - protein, 15 aa, Artificial Sequence
  Description of Artificial Sequence: Synthetic peptide
  Seed: RMCSLMQGSTLPRRS
RMYSLMQVSTEPRRS

SEQ ID NO: 126856 - protein, 15 aa, Artificial Sequence
  Description of Artificial Sequence: Synthetic peptide
  Seed: RMCSLMQGSTLPRRS
RMYSLMQVSTFPRRS

SEQ ID NO: 126857 - protein, 15 aa, Artificial Sequence
  Description of Artificial Sequence: Synthetic peptide
  Seed: RMCSLMQGSTLPRRS
RMYSLMQVSTGPRRS

SEQ ID NO: 126858 - protein, 15 aa, Artificial Sequence
  Description of Artificial Sequence: Synthetic peptide
  Seed: RMCSLMQGSTLPRRS
RMYSLMQVSTHPRRS

SEQ ID NO: 126859 - protein, 15 aa, Artificial Sequence
  Description of Artificial Sequence: Synthetic peptide
  Seed: RMCSLMQGSTLPRRS
RMYSLMQVSTIPRRS

SEQ ID NO: 126860 - protein, 15 aa, Artificial Sequence
  Description of Artificial Sequence: Synthetic peptide
  Seed: RMCSLMQGSTLPRRS
RMYSLMQVSTKPRRS

SEQ ID NO: 126861 - protein, 15 aa, Artificial Sequence
  Description of Artificial Sequence: Synthetic peptide
  Seed: RMCSLMQGSTLPRRS
RMYSLMQVSTLPRRS

SEQ ID NO: 126862 - protein, 15 aa, Artificial Sequence
  Description of Artificial Sequence: Synthetic peptide
  Seed: RMCSLMQGSTLPRRS
RMYSLMQVSTMPRRS

SEQ ID NO: 126863 - protein, 15 aa, Artificial Sequence
  Description of Artificial Sequence: Synthetic peptide
  Seed: RMCSLMQGSTLPRRS
RMYSLMQVSTNPRRS

SEQ ID NO: 126864 - protein, 15 aa, Artificial Sequence
  Description of Artificial Sequence: Synthetic peptide
  Seed: RMCSLMQGSTLPRRS
RMYSLMQVSTPPRRS

SEQ ID NO: 126865 - protein, 15 aa, Artificial Sequence
  Description of Artificial Sequence: Synthetic peptide
  Seed: RMCSLMQGSTLPRRS
RMYSLMQVSTQPRRS

SEQ ID NO: 126866 - protein, 15 aa, Artificial Sequence
  Description of Artificial Sequence: Synthetic peptide
  Seed: RMCSLMQGSTLPRRS
RMYSLMQVSTSPRRS

SEQ ID NO: 126867 - protein, 15 aa, Artificial Sequence
  Description of Artificial Sequence: Synthetic peptide
  Seed: RMCSLMQGSTLPRRS
RMYSLMQVSTTPRRS

SEQ ID NO: 126868 - protein, 15 aa, Artificial Sequence
  Description of Artificial Sequence: Synthetic peptide
  Seed: RMCSLMQGSTLPRRS
RMYSLMQVSTVPRRS

SEQ ID NO: 126869 - protein, 15 aa, Artificial Sequence
  Description of Artificial Sequence: Synthetic peptide
  Seed: RMCSLMQGSTLPRRS
RMYSLMQWSTIPRRS

SEQ ID NO: 126870 - protein, 15 aa, Artificial Sequence
  Description of Artificial Sequence: Synthetic peptide
  Seed: RMCSLMQGSTLPRRS
RMYSLMQWSTLPRRS

SEQ ID NO: 126871 - protein, 15 aa, Artificial Sequence
  Description of Artificial Sequence: Synthetic peptide
  Seed: RMCSLMQGSTLPRRS
RMYSLMQWSTVPRRS

SEQ ID NO: 126872 - protein, 15 aa, Artificial Sequence
  Description of Artificial Sequence: Synthetic peptide
  Seed: RMCSLMQGSTLPRRS
RMYSLNQASTAPRRS

SEQ ID NO: 126873 - protein, 15 aa, Artificial Sequence
  Description of Artificial Sequence: Synthetic peptide
  Seed: RMCSLMQGSTLPRRS
RMYSLNQASTIPRRS

SEQ ID NO: 126874 - protein, 15 aa, Artificial Sequence
  Description of Artificial Sequence: Synthetic peptide
  Seed: RMCSLMQGSTLPRRS
RMYSLNQASTLPRRS

SEQ ID NO: 126875 - protein, 15 aa, Artificial Sequence
  Description of Artificial Sequence: Synthetic peptide
  Seed: RMCSLMQGSTLPRRS
RMYSLNQASTMPRRS

SEQ ID NO: 126876 - protein, 15 aa, Artificial Sequence
  Description of Artificial Sequence: Synthetic peptide
  Seed: RMCSLMQGSTLPRRS
RMYSLNQASTTPRRS

SEQ ID NO: 126877 - protein, 15 aa, Artificial Sequence
  Description of Artificial Sequence: Synthetic peptide
  Seed: RMCSLMQGSTLPRRS
RMYSLNQASTVPRRS

SEQ ID NO: 126878 - protein, 15 aa, Artificial Sequence
  Description of Artificial Sequence: Synthetic peptide
  Seed: RMCSLMQGSTLPRRS
RMYSLNQGSTAPRRS

SEQ ID NO: 126879 - protein, 15 aa, Artificial Sequence
  Description of Artificial Sequence: Synthetic peptide
  Seed: RMCSLMQGSTLPRRS
RMYSLNQGSTIPRRS

SEQ ID NO: 126880 - protein, 15 aa, Artificial Sequence
  Description of Artificial Sequence: Synthetic peptide
  Seed: RMCSLMQGSTLPRRS
RMYSLNQGSTLPRRS

SEQ ID NO: 126881 - protein, 15 aa, Artificial Sequence
  Description of Artificial Sequence: Synthetic peptide
  Seed: RMCSLMQGSTLPRRS
RMYSLNQGSTVPRRS

SEQ ID NO: 126882 - protein, 15 aa, Artificial Sequence
  Description of Artificial Sequence: Synthetic peptide
  Seed: RMCSLMQGSTLPRRS
RMYSLNQPSTIPRRS

SEQ ID NO: 126883 - protein, 15 aa, Artificial Sequence
  Description of Artificial Sequence: Synthetic peptide
  Seed: RMCSLMQGSTLPRRS
RMYSLNQPSTLPRRS

SEQ ID NO: 126884 - protein, 15 aa, Artificial Sequence
  Description of Artificial Sequence: Synthetic peptide
  Seed: RMCSLMQGSTLPRRS
RMYSLNQPSTVPRRS

SEQ ID NO: 126885 - protein, 15 aa, Artificial Sequence
  Description of Artificial Sequence: Synthetic peptide
  Seed: RMCSLMQGSTLPRRS
RMYSLNQSSTIPRRS

SEQ ID NO: 126886 - protein, 15 aa, Artificial Sequence
  Description of Artificial Sequence: Synthetic peptide
  Seed: RMCSLMQGSTLPRRS
RMYSLNQSSTLPRRS

SEQ ID NO: 126887 - protein, 15 aa, Artificial Sequence
  Description of Artificial Sequence: Synthetic peptide
  Seed: RMCSLMQGSTLPRRS
RMYSLNQSSTVPRRS

SEQ ID NO: 126888 - protein, 15 aa, Artificial Sequence
  Description of Artificial Sequence: Synthetic peptide
  Seed: RMCSLMQGSTLPRRS
RMYSLQQASTAPRRS

SEQ ID NO: 126889 - protein, 15 aa, Artificial Sequence
  Description of Artificial Sequence: Synthetic peptide
  Seed: RMCSLMQGSTLPRRS
RMYSLQQASTCPRRS

SEQ ID NO: 126890 - protein, 15 aa, Artificial Sequence
  Description of Artificial Sequence: Synthetic peptide
  Seed: RMCSLMQGSTLPRRS
RMYSLQQASTFPRRS

SEQ ID NO: 126891 - protein, 15 aa, Artificial Sequence
  Description of Artificial Sequence: Synthetic peptide
  Seed: RMCSLMQGSTLPRRS
RMYSLQQASTGPRRS

SEQ ID NO: 126892 - protein, 15 aa, Artificial Sequence
  Description of Artificial Sequence: Synthetic peptide
  Seed: RMCSLMQGSTLPRRS
RMYSLQQASTIPRRS

SEQ ID NO: 126893 - protein, 15 aa, Artificial Sequence
  Description of Artificial Sequence: Synthetic peptide
  Seed: RMCSLMQGSTLPRRS
RMYSLQQASTLPRRS

SEQ ID NO: 126894 - protein, 15 aa, Artificial Sequence
  Description of Artificial Sequence: Synthetic peptide
  Seed: RMCSLMQGSTLPRRS
RMYSLQQASTMPRRS

SEQ ID NO: 126895 - protein, 15 aa, Artificial Sequence
  Description of Artificial Sequence: Synthetic peptide
  Seed: RMCSLMQGSTLPRRS
RMYSLQQASTNPRRS

SEQ ID NO: 126896 - protein, 15 aa, Artificial Sequence
  Description of Artificial Sequence: Synthetic peptide
  Seed: RMCSLMQGSTLPRRS
RMYSLQQASTSPRRS

SEQ ID NO: 126897 - protein, 15 aa, Artificial Sequence
  Description of Artificial Sequence: Synthetic peptide
  Seed: RMCSLMQGSTLPRRS
RMYSLQQASTTPRRS

SEQ ID NO: 126898 - protein, 15 aa, Artificial Sequence
  Description of Artificial Sequence: Synthetic peptide
  Seed: RMCSLMQGSTLPRRS
RMYSLQQASTVPRRS

SEQ ID NO: 126899 - protein, 15 aa, Artificial Sequence
  Description of Artificial Sequence: Synthetic peptide
  Seed: RMCSLMQGSTLPRRS
RMYSLQQASTWPRRS

SEQ ID NO: 126900 - protein, 15 aa, Artificial Sequence
  Description of Artificial Sequence: Synthetic peptide
  Seed: RMCSLMQGSTLPRRS
RMYSLQQGSTAPRRS

SEQ ID NO: 126901 - protein, 15 aa, Artificial Sequence
  Description of Artificial Sequence: Synthetic peptide
  Seed: RMCSLMQGSTLPRRS
RMYSLQQGSTFPRRS

SEQ ID NO: 126902 - protein, 15 aa, Artificial Sequence
  Description of Artificial Sequence: Synthetic peptide
  Seed: RMCSLMQGSTLPRRS
RMYSLQQGSTGPRRS

SEQ ID NO: 126903 - protein, 15 aa, Artificial Sequence
  Description of Artificial Sequence: Synthetic peptide
  Seed: RMCSLMQGSTLPRRS
RMYSLQQGSTIPRRS

SEQ ID NO: 126904 - protein, 15 aa, Artificial Sequence
  Description of Artificial Sequence: Synthetic peptide
  Seed: RMCSLMQGSTLPRRS
RMYSLQQGSTLPRRS

SEQ ID NO: 126905 - protein, 15 aa, Artificial Sequence
  Description of Artificial Sequence: Synthetic peptide
  Seed: RMCSLMQGSTLPRRS
RMYSLQQGSTMPRRS

SEQ ID NO: 126906 - protein, 15 aa, Artificial Sequence
  Description of Artificial Sequence: Synthetic peptide
  Seed: RMCSLMQGSTLPRRS
RMYSLQQGSTSPRRS

SEQ ID NO: 126907 - protein, 15 aa, Artificial Sequence
  Description of Artificial Sequence: Synthetic peptide
  Seed: RMCSLMQGSTLPRRS
RMYSLQQGSTTPRRS

SEQ ID NO: 126908 - protein, 15 aa, Artificial Sequence
  Description of Artificial Sequence: Synthetic peptide
  Seed: RMCSLMQGSTLPRRS
RMYSLQQGSTVPRRS

SEQ ID NO: 126909 - protein, 15 aa, Artificial Sequence
  Description of Artificial Sequence: Synthetic peptide
  Seed: RMCSLMQGSTLPRRS
RMYSLQQISTAPRRS

SEQ ID NO: 126910 - protein, 15 aa, Artificial Sequence
  Description of Artificial Sequence: Synthetic peptide
  Seed: RMCSLMQGSTLPRRS
RMYSLQQISTIPRRS

SEQ ID NO: 126911 - protein, 15 aa, Artificial Sequence
  Description of Artificial Sequence: Synthetic peptide
  Seed: RMCSLMQGSTLPRRS
RMYSLQQISTLPRRS

SEQ ID NO: 126912 - protein, 15 aa, Artificial Sequence
  Description of Artificial Sequence: Synthetic peptide
  Seed: RMCSLMQGSTLPRRS
RMYSLQQISTNPRRS

SEQ ID NO: 126913 - protein, 15 aa, Artificial Sequence
  Description of Artificial Sequence: Synthetic peptide
  Seed: RMCSLMQGSTLPRRS
RMYSLQQISTSPRRS

SEQ ID NO: 126914 - protein, 15 aa, Artificial Sequence
  Description of Artificial Sequence: Synthetic peptide
  Seed: RMCSLMQGSTLPRRS
RMYSLQQISTVPRRS

SEQ ID NO: 126915 - protein, 15 aa, Artificial Sequence
  Description of Artificial Sequence: Synthetic peptide
  Seed: RMCSLMQGSTLPRRS
RMYSLQQNSTAPRRS

SEQ ID NO: 126916 - protein, 15 aa, Artificial Sequence
  Description of Artificial Sequence: Synthetic peptide
  Seed: RMCSLMQGSTLPRRS
RMYSLQQNSTIPRRS

SEQ ID NO: 126917 - protein, 15 aa, Artificial Sequence
  Description of Artificial Sequence: Synthetic peptide
  Seed: RMCSLMQGSTLPRRS
RMYSLQQNSTLPRRS

SEQ ID NO: 126918 - protein, 15 aa, Artificial Sequence
  Description of Artificial Sequence: Synthetic peptide
  Seed: RMCSLMQGSTLPRRS
RMYSLQQNSTMPRRS

SEQ ID NO: 126919 - protein, 15 aa, Artificial Sequence
  Description of Artificial Sequence: Synthetic peptide
  Seed: RMCSLMQGSTLPRRS
RMYSLQQNSTTPRRS

SEQ ID NO: 126920 - protein, 15 aa, Artificial Sequence
  Description of Artificial Sequence: Synthetic peptide
  Seed: RMCSLMQGSTLPRRS
RMYSLQQNSTVPRRS

SEQ ID NO: 126921 - protein, 15 aa, Artificial Sequence
  Description of Artificial Sequence: Synthetic peptide
  Seed: RMCSLMQGSTLPRRS
RMYSLQQPSTAPRRS

SEQ ID NO: 126922 - protein, 15 aa, Artificial Sequence
  Description of Artificial Sequence: Synthetic peptide
  Seed: RMCSLMQGSTLPRRS
RMYSLQQPSTIPRRS

SEQ ID NO: 126923 - protein, 15 aa, Artificial Sequence
  Description of Artificial Sequence: Synthetic peptide
  Seed: RMCSLMQGSTLPRRS
RMYSLQQPSTLPRRS

SEQ ID NO: 126924 - protein, 15 aa, Artificial Sequence
  Description of Artificial Sequence: Synthetic peptide
  Seed: RMCSLMQGSTLPRRS
RMYSLQQPSTMPRRS

SEQ ID NO: 126925 - protein, 15 aa, Artificial Sequence
  Description of Artificial Sequence: Synthetic peptide
  Seed: RMCSLMQGSTLPRRS
RMYSLQQPSTSPRRS

SEQ ID NO: 126926 - protein, 15 aa, Artificial Sequence
  Description of Artificial Sequence: Synthetic peptide
  Seed: RMCSLMQGSTLPRRS
RMYSLQQPSTTPRRS

SEQ ID NO: 126927 - protein, 15 aa, Artificial Sequence
  Description of Artificial Sequence: Synthetic peptide
  Seed: RMCSLMQGSTLPRRS
RMYSLQQPSTVPRRS

SEQ ID NO: 126928 - protein, 15 aa, Artificial Sequence
  Description of Artificial Sequence: Synthetic peptide
  Seed: RMCSLMQGSTLPRRS
RMYSLQQSSTAPRRS

SEQ ID NO: 126929 - protein, 15 aa, Artificial Sequence
  Description of Artificial Sequence: Synthetic peptide
  Seed: RMCSLMQGSTLPRRS
RMYSLQQSSTGPRRS

SEQ ID NO: 126930 - protein, 15 aa, Artificial Sequence
  Description of Artificial Sequence: Synthetic peptide
  Seed: RMCSLMQGSTLPRRS
RMYSLQQSSTIPRRS

SEQ ID NO: 126931 - protein, 15 aa, Artificial Sequence
  Description of Artificial Sequence: Synthetic peptide
  Seed: RMCSLMQGSTLPRRS
RMYSLQQSSTLPRRS

SEQ ID NO: 126932 - protein, 15 aa, Artificial Sequence
  Description of Artificial Sequence: Synthetic peptide
  Seed: RMCSLMQGSTLPRRS
RMYSLQQSSTMPRRS

SEQ ID NO: 126933 - protein, 15 aa, Artificial Sequence
  Description of Artificial Sequence: Synthetic peptide
  Seed: RMCSLMQGSTLPRRS
RMYSLQQSSTNPRRS

SEQ ID NO: 126934 - protein, 15 aa, Artificial Sequence
  Description of Artificial Sequence: Synthetic peptide
  Seed: RMCSLMQGSTLPRRS
RMYSLQQSSTSPRRS

SEQ ID NO: 126935 - protein, 15 aa, Artificial Sequence
  Description of Artificial Sequence: Synthetic peptide
  Seed: RMCSLMQGSTLPRRS
RMYSLQQSSTTPRRS

SEQ ID NO: 126936 - protein, 15 aa, Artificial Sequence
  Description of Artificial Sequence: Synthetic peptide
  Seed: RMCSLMQGSTLPRRS
RMYSLQQSSTVPRRS

SEQ ID NO: 126937 - protein, 15 aa, Artificial Sequence
  Description of Artificial Sequence: Synthetic peptide
  Seed: RMCSLMQGSTLPRRS
RMYSLQQTSTAPRRS

SEQ ID NO: 126938 - protein, 15 aa, Artificial Sequence
  Description of Artificial Sequence: Synthetic peptide
  Seed: RMCSLMQGSTLPRRS
RMYSLQQTSTIPRRS

SEQ ID NO: 126939 - protein, 15 aa, Artificial Sequence
  Description of Artificial Sequence: Synthetic peptide
  Seed: RMCSLMQGSTLPRRS
RMYSLQQTSTLPRRS

SEQ ID NO: 126940 - protein, 15 aa, Artificial Sequence
  Description of Artificial Sequence: Synthetic peptide
  Seed: RMCSLMQGSTLPRRS
RMYSLQQTSTMPRRS

SEQ ID NO: 126941 - protein, 15 aa, Artificial Sequence
  Description of Artificial Sequence: Synthetic peptide
  Seed: RMCSLMQGSTLPRRS
RMYSLQQTSTNPRRS

SEQ ID NO: 126942 - protein, 15 aa, Artificial Sequence
  Description of Artificial Sequence: Synthetic peptide
  Seed: RMCSLMQGSTLPRRS
RMYSLQQTSTSPRRS

SEQ ID NO: 126943 - protein, 15 aa, Artificial Sequence
  Description of Artificial Sequence: Synthetic peptide
  Seed: RMCSLMQGSTLPRRS
RMYSLQQTSTTPRRS

SEQ ID NO: 126944 - protein, 15 aa, Artificial Sequence
  Description of Artificial Sequence: Synthetic peptide
  Seed: RMCSLMQGSTLPRRS
RMYSLQQTSTVPRRS

SEQ ID NO: 126945 - protein, 15 aa, Artificial Sequence
  Description of Artificial Sequence: Synthetic peptide
  Seed: RMCSLMQGSTLPRRS
RMYSLQQVSTAPRRS

SEQ ID NO: 126946 - protein, 15 aa, Artificial Sequence
  Description of Artificial Sequence: Synthetic peptide
  Seed: RMCSLMQGSTLPRRS
RMYSLQQVSTIPRRS

SEQ ID NO: 126947 - protein, 15 aa, Artificial Sequence
  Description of Artificial Sequence: Synthetic peptide
  Seed: RMCSLMQGSTLPRRS
RMYSLQQVSTLPRRS

SEQ ID NO: 126948 - protein, 15 aa, Artificial Sequence
  Description of Artificial Sequence: Synthetic peptide
  Seed: RMCSLMQGSTLPRRS
RMYSLQQVSTMPRRS

SEQ ID NO: 126949 - protein, 15 aa, Artificial Sequence
  Description of Artificial Sequence: Synthetic peptide
  Seed: RMCSLMQGSTLPRRS
RMYSLQQVSTNPRRS

SEQ ID NO: 126950 - protein, 15 aa, Artificial Sequence
  Description of Artificial Sequence: Synthetic peptide
  Seed: RMCSLMQGSTLPRRS
RMYSLQQVSTSPRRS

SEQ ID NO: 126951 - protein, 15 aa, Artificial Sequence
  Description of Artificial Sequence: Synthetic peptide
  Seed: RMCSLMQGSTLPRRS
RMYSLQQVSTTPRRS

SEQ ID NO: 126952 - protein, 15 aa, Artificial Sequence
  Description of Artificial Sequence: Synthetic peptide
  Seed: RMCSLMQGSTLPRRS
RMYSLQQVSTVPRRS

SEQ ID NO: 126953 - protein, 15 aa, Artificial Sequence
  Description of Artificial Sequence: Synthetic peptide
  Seed: RMCSLMQGSTLPRRS
RMYSLRQASTLPRRS

SEQ ID NO: 126954 - protein, 15 aa, Artificial Sequence
  Description of Artificial Sequence: Synthetic peptide
  Seed: RMCSLMQGSTLPRRS
RMYSLSQASTAPRRS

SEQ ID NO: 126955 - protein, 15 aa, Artificial Sequence
  Description of Artificial Sequence: Synthetic peptide
  Seed: RMCSLMQGSTLPRRS
RMYSLSQASTFPRRS

SEQ ID NO: 126956 - protein, 15 aa, Artificial Sequence
  Description of Artificial Sequence: Synthetic peptide
  Seed: RMCSLMQGSTLPRRS
RMYSLSQASTGPRRS

SEQ ID NO: 126957 - protein, 15 aa, Artificial Sequence
  Description of Artificial Sequence: Synthetic peptide
  Seed: RMCSLMQGSTLPRRS
RMYSLSQASTIPRRS

SEQ ID NO: 126958 - protein, 15 aa, Artificial Sequence
  Description of Artificial Sequence: Synthetic peptide
  Seed: RMCSLMQGSTLPRRS
RMYSLSQASTLPRRS

SEQ ID NO: 126959 - protein, 15 aa, Artificial Sequence
  Description of Artificial Sequence: Synthetic peptide
  Seed: RMCSLMQGSTLPRRS
RMYSLSQASTMPRRS

SEQ ID NO: 126960 - protein, 15 aa, Artificial Sequence
  Description of Artificial Sequence: Synthetic peptide
  Seed: RMCSLMQGSTLPRRS
RMYSLSQASTNPRRS

SEQ ID NO: 126961 - protein, 15 aa, Artificial Sequence
  Description of Artificial Sequence: Synthetic peptide
  Seed: RMCSLMQGSTLPRRS
RMYSLSQASTSPRRS

SEQ ID NO: 126962 - protein, 15 aa, Artificial Sequence
  Description of Artificial Sequence: Synthetic peptide
  Seed: RMCSLMQGSTLPRRS
RMYSLSQASTTPRRS

SEQ ID NO: 126963 - protein, 15 aa, Artificial Sequence
  Description of Artificial Sequence: Synthetic peptide
  Seed: RMCSLMQGSTLPRRS
RMYSLSQASTVPRRS

SEQ ID NO: 126964 - protein, 15 aa, Artificial Sequence
  Description of Artificial Sequence: Synthetic peptide
  Seed: RMCSLMQGSTLPRRS
RMYSLSQGSTAPRRS

SEQ ID NO: 126965 - protein, 15 aa, Artificial Sequence
  Description of Artificial Sequence: Synthetic peptide
  Seed: RMCSLMQGSTLPRRS
RMYSLSQGSTIPRRS

SEQ ID NO: 126966 - protein, 15 aa, Artificial Sequence
  Description of Artificial Sequence: Synthetic peptide
  Seed: RMCSLMQGSTLPRRS
RMYSLSQGSTLPRRS

SEQ ID NO: 126967 - protein, 15 aa, Artificial Sequence
  Description of Artificial Sequence: Synthetic peptide
  Seed: RMCSLMQGSTLPRRS
RMYSLSQGSTMPRRS

SEQ ID NO: 126968 - protein, 15 aa, Artificial Sequence
  Description of Artificial Sequence: Synthetic peptide
  Seed: RMCSLMQGSTLPRRS
RMYSLSQGSTSPRRS

SEQ ID NO: 126969 - protein, 15 aa, Artificial Sequence
  Description of Artificial Sequence: Synthetic peptide
  Seed: RMCSLMQGSTLPRRS
RMYSLSQGSTTPRRS

SEQ ID NO: 126970 - protein, 15 aa, Artificial Sequence
  Description of Artificial Sequence: Synthetic peptide
  Seed: RMCSLMQGSTLPRRS
RMYSLSQGSTVPRRS

SEQ ID NO: 126971 - protein, 15 aa, Artificial Sequence
  Description of Artificial Sequence: Synthetic peptide
  Seed: RMCSLMQGSTLPRRS
RMYSLSQISTAPRRS

SEQ ID NO: 126972 - protein, 15 aa, Artificial Sequence
  Description of Artificial Sequence: Synthetic peptide
  Seed: RMCSLMQGSTLPRRS
RMYSLSQNSTAPRRS

SEQ ID NO: 126973 - protein, 15 aa, Artificial Sequence
  Description of Artificial Sequence: Synthetic peptide
  Seed: RMCSLMQGSTLPRRS
RMYSLSQNSTIPRRS

SEQ ID NO: 126974 - protein, 15 aa, Artificial Sequence
  Description of Artificial Sequence: Synthetic peptide
  Seed: RMCSLMQGSTLPRRS
RMYSLSQNSTLPRRS

SEQ ID NO: 126975 - protein, 15 aa, Artificial Sequence
  Description of Artificial Sequence: Synthetic peptide
  Seed: RMCSLMQGSTLPRRS
RMYSLSQNSTVPRRS

SEQ ID NO: 126976 - protein, 15 aa, Artificial Sequence
  Description of Artificial Sequence: Synthetic peptide
  Seed: RMCSLMQGSTLPRRS
RMYSLSQPSTAPRRS

SEQ ID NO: 126977 - protein, 15 aa, Artificial Sequence
  Description of Artificial Sequence: Synthetic peptide
  Seed: RMCSLMQGSTLPRRS
RMYSLSQPSTIPRRS

SEQ ID NO: 126978 - protein, 15 aa, Artificial Sequence
  Description of Artificial Sequence: Synthetic peptide
  Seed: RMCSLMQGSTLPRRS
RMYSLSQPSTLPRRS

SEQ ID NO: 126979 - protein, 15 aa, Artificial Sequence
  Description of Artificial Sequence: Synthetic peptide
  Seed: RMCSLMQGSTLPRRS
RMYSLSQPSTMPRRS

SEQ ID NO: 126980 - protein, 15 aa, Artificial Sequence
  Description of Artificial Sequence: Synthetic peptide
  Seed: RMCSLMQGSTLPRRS
RMYSLSQPSTSPRRS

SEQ ID NO: 126981 - protein, 15 aa, Artificial Sequence
  Description of Artificial Sequence: Synthetic peptide
  Seed: RMCSLMQGSTLPRRS
RMYSLSQPSTVPRRS

SEQ ID NO: 126982 - protein, 15 aa, Artificial Sequence
  Description of Artificial Sequence: Synthetic peptide
  Seed: RMCSLMQGSTLPRRS
RMYSLSQSSTAPRRS

SEQ ID NO: 126983 - protein, 15 aa, Artificial Sequence
  Description of Artificial Sequence: Synthetic peptide
  Seed: RMCSLMQGSTLPRRS
RMYSLSQSSTFPRRS

SEQ ID NO: 126984 - protein, 15 aa, Artificial Sequence
  Description of Artificial Sequence: Synthetic peptide
  Seed: RMCSLMQGSTLPRRS
RMYSLSQSSTIPRRS

SEQ ID NO: 126985 - protein, 15 aa, Artificial Sequence
  Description of Artificial Sequence: Synthetic peptide
  Seed: RMCSLMQGSTLPRRS
RMYSLSQSSTLPRRS

SEQ ID NO: 126986 - protein, 15 aa, Artificial Sequence
  Description of Artificial Sequence: Synthetic peptide
  Seed: RMCSLMQGSTLPRRS
RMYSLSQSSTMPRRS

SEQ ID NO: 126987 - protein, 15 aa, Artificial Sequence
  Description of Artificial Sequence: Synthetic peptide
  Seed: RMCSLMQGSTLPRRS
RMYSLSQSSTSPRRS

SEQ ID NO: 126988 - protein, 15 aa, Artificial Sequence
  Description of Artificial Sequence: Synthetic peptide
  Seed: RMCSLMQGSTLPRRS
RMYSLSQSSTTPRRS

SEQ ID NO: 126989 - protein, 15 aa, Artificial Sequence
  Description of Artificial Sequence: Synthetic peptide
  Seed: RMCSLMQGSTLPRRS
RMYSLSQSSTVPRRS

SEQ ID NO: 126990 - protein, 15 aa, Artificial Sequence
  Description of Artificial Sequence: Synthetic peptide
  Seed: RMCSLMQGSTLPRRS
RMYSLSQTSTAPRRS

SEQ ID NO: 126991 - protein, 15 aa, Artificial Sequence
  Description of Artificial Sequence: Synthetic peptide
  Seed: RMCSLMQGSTLPRRS
RMYSLSQTSTIPRRS

SEQ ID NO: 126992 - protein, 15 aa, Artificial Sequence
  Description of Artificial Sequence: Synthetic peptide
  Seed: RMCSLMQGSTLPRRS
RMYSLSQTSTLPRRS

SEQ ID NO: 126993 - protein, 15 aa, Artificial Sequence
  Description of Artificial Sequence: Synthetic peptide
  Seed: RMCSLMQGSTLPRRS
RMYSLSQTSTVPRRS

SEQ ID NO: 126994 - protein, 15 aa, Artificial Sequence
  Description of Artificial Sequence: Synthetic peptide
  Seed: RMCSLMQGSTLPRRS
RMYSLSQVSTAPRRS

SEQ ID NO: 126995 - protein, 15 aa, Artificial Sequence
  Description of Artificial Sequence: Synthetic peptide
  Seed: RMCSLMQGSTLPRRS
RMYSLSQVSTIPRRS

SEQ ID NO: 126996 - protein, 15 aa, Artificial Sequence
  Description of Artificial Sequence: Synthetic peptide
  Seed: RMCSLMQGSTLPRRS
RMYSLSQVSTLPRRS

SEQ ID NO: 126997 - protein, 15 aa, Artificial Sequence
  Description of Artificial Sequence: Synthetic peptide
  Seed: RMCSLMQGSTLPRRS
RMYSLSQVSTNPRRS

SEQ ID NO: 126998 - protein, 15 aa, Artificial Sequence
  Description of Artificial Sequence: Synthetic peptide
  Seed: RMCSLMQGSTLPRRS
RMYSLSQVSTSPRRS

SEQ ID NO: 126999 - protein, 15 aa, Artificial Sequence
  Description of Artificial Sequence: Synthetic peptide
  Seed: RMCSLMQGSTLPRRS
RMYSLSQVSTVPRRS

SEQ ID NO: 127000 - protein, 15 aa, Artificial Sequence
  Description of Artificial Sequence: Synthetic peptide
  Seed: RMCSLMQGSTLPRRS
RMYSLTQASTAPRRS

SEQ ID NO: 127001 - protein, 15 aa, Artificial Sequence
  Description of Artificial Sequence: Synthetic peptide
  Seed: RMCSLMQGSTLPRRS
RMYSLTQASTFPRRS

SEQ ID NO: 127002 - protein, 15 aa, Artificial Sequence
  Description of Artificial Sequence: Synthetic peptide
  Seed: RMCSLMQGSTLPRRS
RMYSLTQASTIPRRS

SEQ ID NO: 127003 - protein, 15 aa, Artificial Sequence
  Description of Artificial Sequence: Synthetic peptide
  Seed: RMCSLMQGSTLPRRS
RMYSLTQASTLPRRS

SEQ ID NO: 127004 - protein, 15 aa, Artificial Sequence
  Description of Artificial Sequence: Synthetic peptide
  Seed: RMCSLMQGSTLPRRS
RMYSLTQASTMPRRS

SEQ ID NO: 127005 - protein, 15 aa, Artificial Sequence
  Description of Artificial Sequence: Synthetic peptide
  Seed: RMCSLMQGSTLPRRS
RMYSLTQASTNPRRS

SEQ ID NO: 127006 - protein, 15 aa, Artificial Sequence
  Description of Artificial Sequence: Synthetic peptide
  Seed: RMCSLMQGSTLPRRS
RMYSLTQASTSPRRS

SEQ ID NO: 127007 - protein, 15 aa, Artificial Sequence
  Description of Artificial Sequence: Synthetic peptide
  Seed: RMCSLMQGSTLPRRS
RMYSLTQASTTPRRS

SEQ ID NO: 127008 - protein, 15 aa, Artificial Sequence
  Description of Artificial Sequence: Synthetic peptide
  Seed: RMCSLMQGSTLPRRS
RMYSLTQASTVPRRS

SEQ ID NO: 127009 - protein, 15 aa, Artificial Sequence
  Description of Artificial Sequence: Synthetic peptide
  Seed: RMCSLMQGSTLPRRS
RMYSLTQGSTAPRRS

SEQ ID NO: 127010 - protein, 15 aa, Artificial Sequence
  Description of Artificial Sequence: Synthetic peptide
  Seed: RMCSLMQGSTLPRRS
RMYSLTQGSTFPRRS

SEQ ID NO: 127011 - protein, 15 aa, Artificial Sequence
  Description of Artificial Sequence: Synthetic peptide
  Seed: RMCSLMQGSTLPRRS
RMYSLTQGSTIPRRS

SEQ ID NO: 127012 - protein, 15 aa, Artificial Sequence
  Description of Artificial Sequence: Synthetic peptide
  Seed: RMCSLMQGSTLPRRS
RMYSLTQGSTLPRRS

SEQ ID NO: 127013 - protein, 15 aa, Artificial Sequence
  Description of Artificial Sequence: Synthetic peptide
  Seed: RMCSLMQGSTLPRRS
RMYSLTQGSTMPRRS

SEQ ID NO: 127014 - protein, 15 aa, Artificial Sequence
  Description of Artificial Sequence: Synthetic peptide
  Seed: RMCSLMQGSTLPRRS
RMYSLTQGSTTPRRS

SEQ ID NO: 127015 - protein, 15 aa, Artificial Sequence
  Description of Artificial Sequence: Synthetic peptide
  Seed: RMCSLMQGSTLPRRS
RMYSLTQGSTVPRRS

SEQ ID NO: 127016 - protein, 15 aa, Artificial Sequence
  Description of Artificial Sequence: Synthetic peptide
  Seed: RMCSLMQGSTLPRRS
RMYSLTQISTIPRRS

SEQ ID NO: 127017 - protein, 15 aa, Artificial Sequence
  Description of Artificial Sequence: Synthetic peptide
  Seed: RMCSLMQGSTLPRRS
RMYSLTQISTLPRRS

SEQ ID NO: 127018 - protein, 15 aa, Artificial Sequence
  Description of Artificial Sequence: Synthetic peptide
  Seed: RMCSLMQGSTLPRRS
RMYSLTQNSTIPRRS

SEQ ID NO: 127019 - protein, 15 aa, Artificial Sequence
  Description of Artificial Sequence: Synthetic peptide
  Seed: RMCSLMQGSTLPRRS
RMYSLTQNSTLPRRS

SEQ ID NO: 127020 - protein, 15 aa, Artificial Sequence
  Description of Artificial Sequence: Synthetic peptide
  Seed: RMCSLMQGSTLPRRS
RMYSLTQNSTVPRRS

SEQ ID NO: 127021 - protein, 15 aa, Artificial Sequence
  Description of Artificial Sequence: Synthetic peptide
  Seed: RMCSLMQGSTLPRRS
RMYSLTQPSTAPRRS

SEQ ID NO: 127022 - protein, 15 aa, Artificial Sequence
  Description of Artificial Sequence: Synthetic peptide
  Seed: RMCSLMQGSTLPRRS
RMYSLTQPSTIPRRS

SEQ ID NO: 127023 - protein, 15 aa, Artificial Sequence
  Description of Artificial Sequence: Synthetic peptide
  Seed: RMCSLMQGSTLPRRS
RMYSLTQPSTLPRRS

SEQ ID NO: 127024 - protein, 15 aa, Artificial Sequence
  Description of Artificial Sequence: Synthetic peptide
  Seed: RMCSLMQGSTLPRRS
RMYSLTQPSTSPRRS

SEQ ID NO: 127025 - protein, 15 aa, Artificial Sequence
  Description of Artificial Sequence: Synthetic peptide
  Seed: RMCSLMQGSTLPRRS
RMYSLTQPSTVPRRS

SEQ ID NO: 127026 - protein, 15 aa, Artificial Sequence
  Description of Artificial Sequence: Synthetic peptide
  Seed: RMCSLMQGSTLPRRS
RMYSLTQSSTAPRRS

SEQ ID NO: 127027 - protein, 15 aa, Artificial Sequence
  Description of Artificial Sequence: Synthetic peptide
  Seed: RMCSLMQGSTLPRRS
RMYSLTQSSTFPRRS

SEQ ID NO: 127028 - protein, 15 aa, Artificial Sequence
  Description of Artificial Sequence: Synthetic peptide
  Seed: RMCSLMQGSTLPRRS
RMYSLTQSSTIPRRS

SEQ ID NO: 127029 - protein, 15 aa, Artificial Sequence
  Description of Artificial Sequence: Synthetic peptide
  Seed: RMCSLMQGSTLPRRS
RMYSLTQSSTLPRRS

SEQ ID NO: 127030 - protein, 15 aa, Artificial Sequence
  Description of Artificial Sequence: Synthetic peptide
  Seed: RMCSLMQGSTLPRRS
RMYSLTQSSTMPRRS

SEQ ID NO: 127031 - protein, 15 aa, Artificial Sequence
  Description of Artificial Sequence: Synthetic peptide
  Seed: RMCSLMQGSTLPRRS
RMYSLTQSSTSPRRS

SEQ ID NO: 127032 - protein, 15 aa, Artificial Sequence
  Description of Artificial Sequence: Synthetic peptide
  Seed: RMCSLMQGSTLPRRS
RMYSLTQSSTTPRRS

SEQ ID NO: 127033 - protein, 15 aa, Artificial Sequence
  Description of Artificial Sequence: Synthetic peptide
  Seed: RMCSLMQGSTLPRRS
RMYSLTQSSTVPRRS

SEQ ID NO: 127034 - protein, 15 aa, Artificial Sequence
  Description of Artificial Sequence: Synthetic peptide
  Seed: RMCSLMQGSTLPRRS
RMYSLTQTSTAPRRS

SEQ ID NO: 127035 - protein, 15 aa, Artificial Sequence
  Description of Artificial Sequence: Synthetic peptide
  Seed: RMCSLMQGSTLPRRS
RMYSLTQTSTIPRRS

SEQ ID NO: 127036 - protein, 15 aa, Artificial Sequence
  Description of Artificial Sequence: Synthetic peptide
  Seed: RMCSLMQGSTLPRRS
RMYSLTQTSTLPRRS

SEQ ID NO: 127037 - protein, 15 aa, Artificial Sequence
  Description of Artificial Sequence: Synthetic peptide
  Seed: RMCSLMQGSTLPRRS
RMYSLTQTSTVPRRS

SEQ ID NO: 127038 - protein, 15 aa, Artificial Sequence
  Description of Artificial Sequence: Synthetic peptide
  Seed: RMCSLMQGSTLPRRS
RMYSLTQVSTAPRRS

SEQ ID NO: 127039 - protein, 15 aa, Artificial Sequence
  Description of Artificial Sequence: Synthetic peptide
  Seed: RMCSLMQGSTLPRRS
RMYSLTQVSTIPRRS

SEQ ID NO: 127040 - protein, 15 aa, Artificial Sequence
  Description of Artificial Sequence: Synthetic peptide
  Seed: RMCSLMQGSTLPRRS
RMYSLTQVSTLPRRS

SEQ ID NO: 127041 - protein, 15 aa, Artificial Sequence
  Description of Artificial Sequence: Synthetic peptide
  Seed: RMCSLMQGSTLPRRS
RMYSLTQVSTNPRRS

SEQ ID NO: 127042 - protein, 15 aa, Artificial Sequence
  Description of Artificial Sequence: Synthetic peptide
  Seed: RMCSLMQGSTLPRRS
RMYSLTQVSTVPRRS

SEQ ID NO: 127043 - protein, 15 aa, Artificial Sequence
  Description of Artificial Sequence: Synthetic peptide
  Seed: RMCSLMQGSTLPRRS
RMYSLVQASTAPRRS

SEQ ID NO: 127044 - protein, 15 aa, Artificial Sequence
  Description of Artificial Sequence: Synthetic peptide
  Seed: RMCSLMQGSTLPRRS
RMYSLVQASTCPRRS

SEQ ID NO: 127045 - protein, 15 aa, Artificial Sequence
  Description of Artificial Sequence: Synthetic peptide
  Seed: RMCSLMQGSTLPRRS
RMYSLVQASTFPRRS

SEQ ID NO: 127046 - protein, 15 aa, Artificial Sequence
  Description of Artificial Sequence: Synthetic peptide
  Seed: RMCSLMQGSTLPRRS
RMYSLVQASTGPRRS

SEQ ID NO: 127047 - protein, 15 aa, Artificial Sequence
  Description of Artificial Sequence: Synthetic peptide
  Seed: RMCSLMQGSTLPRRS
RMYSLVQASTHPRRS

SEQ ID NO: 127048 - protein, 15 aa, Artificial Sequence
  Description of Artificial Sequence: Synthetic peptide
  Seed: RMCSLMQGSTLPRRS
RMYSLVQASTIPRRS

SEQ ID NO: 127049 - protein, 15 aa, Artificial Sequence
  Description of Artificial Sequence: Synthetic peptide
  Seed: RMCSLMQGSTLPRRS
RMYSLVQASTLPRRS

SEQ ID NO: 127050 - protein, 15 aa, Artificial Sequence
  Description of Artificial Sequence: Synthetic peptide
  Seed: RMCSLMQGSTLPRRS
RMYSLVQASTMPRRS

SEQ ID NO: 127051 - protein, 15 aa, Artificial Sequence
  Description of Artificial Sequence: Synthetic peptide
  Seed: RMCSLMQGSTLPRRS
RMYSLVQASTNPRRS

SEQ ID NO: 127052 - protein, 15 aa, Artificial Sequence
  Description of Artificial Sequence: Synthetic peptide
  Seed: RMCSLMQGSTLPRRS
RMYSLVQASTPPRRS

SEQ ID NO: 127053 - protein, 15 aa, Artificial Sequence
  Description of Artificial Sequence: Synthetic peptide
  Seed: RMCSLMQGSTLPRRS
RMYSLVQASTQPRRS

SEQ ID NO: 127054 - protein, 15 aa, Artificial Sequence
  Description of Artificial Sequence: Synthetic peptide
  Seed: RMCSLMQGSTLPRRS
RMYSLVQASTRPRRS

SEQ ID NO: 127055 - protein, 15 aa, Artificial Sequence
  Description of Artificial Sequence: Synthetic peptide
  Seed: RMCSLMQGSTLPRRS
RMYSLVQASTSPRRS

SEQ ID NO: 127056 - protein, 15 aa, Artificial Sequence
  Description of Artificial Sequence: Synthetic peptide
  Seed: RMCSLMQGSTLPRRS
RMYSLVQASTTPRRS

SEQ ID NO: 127057 - protein, 15 aa, Artificial Sequence
  Description of Artificial Sequence: Synthetic peptide
  Seed: RMCSLMQGSTLPRRS
RMYSLVQASTVPRRS

SEQ ID NO: 127058 - protein, 15 aa, Artificial Sequence
  Description of Artificial Sequence: Synthetic peptide
  Seed: RMCSLMQGSTLPRRS
RMYSLVQASTYPRRS

SEQ ID NO: 127059 - protein, 15 aa, Artificial Sequence
  Description of Artificial Sequence: Synthetic peptide
  Seed: RMCSLMQGSTLPRRS
RMYSLVQGSTAPRRS

SEQ ID NO: 127060 - protein, 15 aa, Artificial Sequence
  Description of Artificial Sequence: Synthetic peptide
  Seed: RMCSLMQGSTLPRRS
RMYSLVQGSTCPRRS

SEQ ID NO: 127061 - protein, 15 aa, Artificial Sequence
  Description of Artificial Sequence: Synthetic peptide
  Seed: RMCSLMQGSTLPRRS
RMYSLVQGSTFPRRS

SEQ ID NO: 127062 - protein, 15 aa, Artificial Sequence
  Description of Artificial Sequence: Synthetic peptide
  Seed: RMCSLMQGSTLPRRS
RMYSLVQGSTGPRRS

SEQ ID NO: 127063 - protein, 15 aa, Artificial Sequence
  Description of Artificial Sequence: Synthetic peptide
  Seed: RMCSLMQGSTLPRRS
RMYSLVQGSTIPRRS

SEQ ID NO: 127064 - protein, 15 aa, Artificial Sequence
  Description of Artificial Sequence: Synthetic peptide
  Seed: RMCSLMQGSTLPRRS
RMYSLVQGSTLPRRS

SEQ ID NO: 127065 - protein, 15 aa, Artificial Sequence
  Description of Artificial Sequence: Synthetic peptide
  Seed: RMCSLMQGSTLPRRS
RMYSLVQGSTMPRRS

SEQ ID NO: 127066 - protein, 15 aa, Artificial Sequence
  Description of Artificial Sequence: Synthetic peptide
  Seed: RMCSLMQGSTLPRRS
RMYSLVQGSTNPRRS

SEQ ID NO: 127067 - protein, 15 aa, Artificial Sequence
  Description of Artificial Sequence: Synthetic peptide
  Seed: RMCSLMQGSTLPRRS
RMYSLVQGSTSPRRS

SEQ ID NO: 127068 - protein, 15 aa, Artificial Sequence
  Description of Artificial Sequence: Synthetic peptide
  Seed: RMCSLMQGSTLPRRS
RMYSLVQGSTTPRRS

SEQ ID NO: 127069 - protein, 15 aa, Artificial Sequence
  Description of Artificial Sequence: Synthetic peptide
  Seed: RMCSLMQGSTLPRRS
RMYSLVQGSTVPRRS

SEQ ID NO: 127070 - protein, 15 aa, Artificial Sequence
  Description of Artificial Sequence: Synthetic peptide
  Seed: RMCSLMQGSTLPRRS
RMYSLVQISTAPRRS

SEQ ID NO: 127071 - protein, 15 aa, Artificial Sequence
  Description of Artificial Sequence: Synthetic peptide
  Seed: RMCSLMQGSTLPRRS
RMYSLVQISTGPRRS

SEQ ID NO: 127072 - protein, 15 aa, Artificial Sequence
  Description of Artificial Sequence: Synthetic peptide
  Seed: RMCSLMQGSTLPRRS
RMYSLVQISTIPRRS

SEQ ID NO: 127073 - protein, 15 aa, Artificial Sequence
  Description of Artificial Sequence: Synthetic peptide
  Seed: RMCSLMQGSTLPRRS
RMYSLVQISTLPRRS

SEQ ID NO: 127074 - protein, 15 aa, Artificial Sequence
  Description of Artificial Sequence: Synthetic peptide
  Seed: RMCSLMQGSTLPRRS
RMYSLVQISTMPRRS

SEQ ID NO: 127075 - protein, 15 aa, Artificial Sequence
  Description of Artificial Sequence: Synthetic peptide
  Seed: RMCSLMQGSTLPRRS
RMYSLVQISTNPRRS

SEQ ID NO: 127076 - protein, 15 aa, Artificial Sequence
  Description of Artificial Sequence: Synthetic peptide
  Seed: RMCSLMQGSTLPRRS
RMYSLVQISTSPRRS

SEQ ID NO: 127077 - protein, 15 aa, Artificial Sequence
  Description of Artificial Sequence: Synthetic peptide
  Seed: RMCSLMQGSTLPRRS
RMYSLVQISTTPRRS

SEQ ID NO: 127078 - protein, 15 aa, Artificial Sequence
  Description of Artificial Sequence: Synthetic peptide
  Seed: RMCSLMQGSTLPRRS
RMYSLVQISTVPRRS

SEQ ID NO: 127079 - protein, 15 aa, Artificial Sequence
  Description of Artificial Sequence: Synthetic peptide
  Seed: RMCSLMQGSTLPRRS
RMYSLVQLSTAPRRS

SEQ ID NO: 127080 - protein, 15 aa, Artificial Sequence
  Description of Artificial Sequence: Synthetic peptide
  Seed: RMCSLMQGSTLPRRS
RMYSLVQLSTNPRRS

SEQ ID NO: 127081 - protein, 15 aa, Artificial Sequence
  Description of Artificial Sequence: Synthetic peptide
  Seed: RMCSLMQGSTLPRRS
RMYSLVQLSTSPRRS

SEQ ID NO: 127082 - protein, 15 aa, Artificial Sequence
  Description of Artificial Sequence: Synthetic peptide
  Seed: RMCSLMQGSTLPRRS
RMYSLVQMSTAPRRS

SEQ ID NO: 127083 - protein, 15 aa, Artificial Sequence
  Description of Artificial Sequence: Synthetic peptide
  Seed: RMCSLMQGSTLPRRS
RMYSLVQMSTNPRRS

SEQ ID NO: 127084 - protein, 15 aa, Artificial Sequence
  Description of Artificial Sequence: Synthetic peptide
  Seed: RMCSLMQGSTLPRRS
RMYSLVQMSTSPRRS

SEQ ID NO: 127085 - protein, 15 aa, Artificial Sequence
  Description of Artificial Sequence: Synthetic peptide
  Seed: RMCSLMQGSTLPRRS
RMYSLVQNSTAPRRS

SEQ ID NO: 127086 - protein, 15 aa, Artificial Sequence
  Description of Artificial Sequence: Synthetic peptide
  Seed: RMCSLMQGSTLPRRS
RMYSLVQNSTIPRRS

SEQ ID NO: 127087 - protein, 15 aa, Artificial Sequence
  Description of Artificial Sequence: Synthetic peptide
  Seed: RMCSLMQGSTLPRRS
RMYSLVQNSTLPRRS

SEQ ID NO: 127088 - protein, 15 aa, Artificial Sequence
  Description of Artificial Sequence: Synthetic peptide
  Seed: RMCSLMQGSTLPRRS
RMYSLVQNSTMPRRS

SEQ ID NO: 127089 - protein, 15 aa, Artificial Sequence
  Description of Artificial Sequence: Synthetic peptide
  Seed: RMCSLMQGSTLPRRS
RMYSLVQNSTNPRRS

SEQ ID NO: 127090 - protein, 15 aa, Artificial Sequence
  Description of Artificial Sequence: Synthetic peptide
  Seed: RMCSLMQGSTLPRRS
RMYSLVQNSTSPRRS

SEQ ID NO: 127091 - protein, 15 aa, Artificial Sequence
  Description of Artificial Sequence: Synthetic peptide
  Seed: RMCSLMQGSTLPRRS
RMYSLVQNSTTPRRS

SEQ ID NO: 127092 - protein, 15 aa, Artificial Sequence
  Description of Artificial Sequence: Synthetic peptide
  Seed: RMCSLMQGSTLPRRS
RMYSLVQNSTVPRRS

SEQ ID NO: 127093 - protein, 15 aa, Artificial Sequence
  Description of Artificial Sequence: Synthetic peptide
  Seed: RMCSLMQGSTLPRRS
RMYSLVQPSTAPRRS

SEQ ID NO: 127094 - protein, 15 aa, Artificial Sequence
  Description of Artificial Sequence: Synthetic peptide
  Seed: RMCSLMQGSTLPRRS
RMYSLVQPSTGPRRS

SEQ ID NO: 127095 - protein, 15 aa, Artificial Sequence
  Description of Artificial Sequence: Synthetic peptide
  Seed: RMCSLMQGSTLPRRS
RMYSLVQPSTHPRRS

SEQ ID NO: 127096 - protein, 15 aa, Artificial Sequence
  Description of Artificial Sequence: Synthetic peptide
  Seed: RMCSLMQGSTLPRRS
RMYSLVQPSTIPRRS

SEQ ID NO: 127097 - protein, 15 aa, Artificial Sequence
  Description of Artificial Sequence: Synthetic peptide
  Seed: RMCSLMQGSTLPRRS
RMYSLVQPSTLPRRS

SEQ ID NO: 127098 - protein, 15 aa, Artificial Sequence
  Description of Artificial Sequence: Synthetic peptide
  Seed: RMCSLMQGSTLPRRS
RMYSLVQPSTMPRRS

SEQ ID NO: 127099 - protein, 15 aa, Artificial Sequence
  Description of Artificial Sequence: Synthetic peptide
  Seed: RMCSLMQGSTLPRRS
RMYSLVQPSTNPRRS

SEQ ID NO: 127100 - protein, 15 aa, Artificial Sequence
  Description of Artificial Sequence: Synthetic peptide
  Seed: RMCSLMQGSTLPRRS
RMYSLVQPSTQPRRS

SEQ ID NO: 127101 - protein, 15 aa, Artificial Sequence
  Description of Artificial Sequence: Synthetic peptide
  Seed: RMCSLMQGSTLPRRS
RMYSLVQPSTSPRRS

SEQ ID NO: 127102 - protein, 15 aa, Artificial Sequence
  Description of Artificial Sequence: Synthetic peptide
  Seed: RMCSLMQGSTLPRRS
RMYSLVQPSTTPRRS

SEQ ID NO: 127103 - protein, 15 aa, Artificial Sequence
  Description of Artificial Sequence: Synthetic peptide
  Seed: RMCSLMQGSTLPRRS
RMYSLVQPSTVPRRS

SEQ ID NO: 127104 - protein, 15 aa, Artificial Sequence
  Description of Artificial Sequence: Synthetic peptide
  Seed: RMCSLMQGSTLPRRS
RMYSLVQSSTAPRRS

SEQ ID NO: 127105 - protein, 15 aa, Artificial Sequence
  Description of Artificial Sequence: Synthetic peptide
  Seed: RMCSLMQGSTLPRRS
RMYSLVQSSTCPRRS

SEQ ID NO: 127106 - protein, 15 aa, Artificial Sequence
  Description of Artificial Sequence: Synthetic peptide
  Seed: RMCSLMQGSTLPRRS
RMYSLVQSSTFPRRS

SEQ ID NO: 127107 - protein, 15 aa, Artificial Sequence
  Description of Artificial Sequence: Synthetic peptide
  Seed: RMCSLMQGSTLPRRS
RMYSLVQSSTGPRRS

SEQ ID NO: 127108 - protein, 15 aa, Artificial Sequence
  Description of Artificial Sequence: Synthetic peptide
  Seed: RMCSLMQGSTLPRRS
RMYSLVQSSTHPRRS

SEQ ID NO: 127109 - protein, 15 aa, Artificial Sequence
  Description of Artificial Sequence: Synthetic peptide
  Seed: RMCSLMQGSTLPRRS
RMYSLVQSSTIPRRS

SEQ ID NO: 127110 - protein, 15 aa, Artificial Sequence
  Description of Artificial Sequence: Synthetic peptide
  Seed: RMCSLMQGSTLPRRS
RMYSLVQSSTLPRRS

SEQ ID NO: 127111 - protein, 15 aa, Artificial Sequence
  Description of Artificial Sequence: Synthetic peptide
  Seed: RMCSLMQGSTLPRRS
RMYSLVQSSTMPRRS

SEQ ID NO: 127112 - protein, 15 aa, Artificial Sequence
  Description of Artificial Sequence: Synthetic peptide
  Seed: RMCSLMQGSTLPRRS
RMYSLVQSSTNPRRS

SEQ ID NO: 127113 - protein, 15 aa, Artificial Sequence
  Description of Artificial Sequence: Synthetic peptide
  Seed: RMCSLMQGSTLPRRS
RMYSLVQSSTQPRRS

SEQ ID NO: 127114 - protein, 15 aa, Artificial Sequence
  Description of Artificial Sequence: Synthetic peptide
  Seed: RMCSLMQGSTLPRRS
RMYSLVQSSTSPRRS

SEQ ID NO: 127115 - protein, 15 aa, Artificial Sequence
  Description of Artificial Sequence: Synthetic peptide
  Seed: RMCSLMQGSTLPRRS
RMYSLVQSSTTPRRS

SEQ ID NO: 127116 - protein, 15 aa, Artificial Sequence
  Description of Artificial Sequence: Synthetic peptide
  Seed: RMCSLMQGSTLPRRS
RMYSLVQSSTVPRRS

SEQ ID NO: 127117 - protein, 15 aa, Artificial Sequence
  Description of Artificial Sequence: Synthetic peptide
  Seed: RMCSLMQGSTLPRRS
RMYSLVQTSTAPRRS

SEQ ID NO: 127118 - protein, 15 aa, Artificial Sequence
  Description of Artificial Sequence: Synthetic peptide
  Seed: RMCSLMQGSTLPRRS
RMYSLVQTSTGPRRS

SEQ ID NO: 127119 - protein, 15 aa, Artificial Sequence
  Description of Artificial Sequence: Synthetic peptide
  Seed: RMCSLMQGSTLPRRS
RMYSLVQTSTHPRRS

SEQ ID NO: 127120 - protein, 15 aa, Artificial Sequence
  Description of Artificial Sequence: Synthetic peptide
  Seed: RMCSLMQGSTLPRRS
RMYSLVQTSTIPRRS

SEQ ID NO: 127121 - protein, 15 aa, Artificial Sequence
  Description of Artificial Sequence: Synthetic peptide
  Seed: RMCSLMQGSTLPRRS
RMYSLVQTSTLPRRS

SEQ ID NO: 127122 - protein, 15 aa, Artificial Sequence
  Description of Artificial Sequence: Synthetic peptide
  Seed: RMCSLMQGSTLPRRS
RMYSLVQTSTMPRRS

SEQ ID NO: 127123 - protein, 15 aa, Artificial Sequence
  Description of Artificial Sequence: Synthetic peptide
  Seed: RMCSLMQGSTLPRRS
RMYSLVQTSTNPRRS

SEQ ID NO: 127124 - protein, 15 aa, Artificial Sequence
  Description of Artificial Sequence: Synthetic peptide
  Seed: RMCSLMQGSTLPRRS
RMYSLVQTSTSPRRS

SEQ ID NO: 127125 - protein, 15 aa, Artificial Sequence
  Description of Artificial Sequence: Synthetic peptide
  Seed: RMCSLMQGSTLPRRS
RMYSLVQTSTTPRRS

SEQ ID NO: 127126 - protein, 15 aa, Artificial Sequence
  Description of Artificial Sequence: Synthetic peptide
  Seed: RMCSLMQGSTLPRRS
RMYSLVQTSTVPRRS

SEQ ID NO: 127127 - protein, 15 aa, Artificial Sequence
  Description of Artificial Sequence: Synthetic peptide
  Seed: RMCSLMQGSTLPRRS
RMYSLVQVSTAPRRS

SEQ ID NO: 127128 - protein, 15 aa, Artificial Sequence
  Description of Artificial Sequence: Synthetic peptide
  Seed: RMCSLMQGSTLPRRS
RMYSLVQVSTGPRRS

SEQ ID NO: 127129 - protein, 15 aa, Artificial Sequence
  Description of Artificial Sequence: Synthetic peptide
  Seed: RMCSLMQGSTLPRRS
RMYSLVQVSTHPRRS

SEQ ID NO: 127130 - protein, 15 aa, Artificial Sequence
  Description of Artificial Sequence: Synthetic peptide
  Seed: RMCSLMQGSTLPRRS
RMYSLVQVSTIPRRS

SEQ ID NO: 127131 - protein, 15 aa, Artificial Sequence
  Description of Artificial Sequence: Synthetic peptide
  Seed: RMCSLMQGSTLPRRS
RMYSLVQVSTLPRRS

SEQ ID NO: 127132 - protein, 15 aa, Artificial Sequence
  Description of Artificial Sequence: Synthetic peptide
  Seed: RMCSLMQGSTLPRRS
RMYSLVQVSTMPRRS

SEQ ID NO: 127133 - protein, 15 aa, Artificial Sequence
  Description of Artificial Sequence: Synthetic peptide
  Seed: RMCSLMQGSTLPRRS
RMYSLVQVSTNPRRS

SEQ ID NO: 127134 - protein, 15 aa, Artificial Sequence
  Description of Artificial Sequence: Synthetic peptide
  Seed: RMCSLMQGSTLPRRS
RMYSLVQVSTQPRRS

SEQ ID NO: 127135 - protein, 15 aa, Artificial Sequence
  Description of Artificial Sequence: Synthetic peptide
  Seed: RMCSLMQGSTLPRRS
RMYSLVQVSTSPRRS

SEQ ID NO: 127136 - protein, 15 aa, Artificial Sequence
  Description of Artificial Sequence: Synthetic peptide
  Seed: RMCSLMQGSTLPRRS
RMYSLVQVSTTPRRS

SEQ ID NO: 127137 - protein, 15 aa, Artificial Sequence
  Description of Artificial Sequence: Synthetic peptide
  Seed: RMCSLMQGSTLPRRS
RMYSLVQVSTVPRRS

SEQ ID NO: 127138 - protein, 15 aa, Artificial Sequence
  Description of Artificial Sequence: Synthetic peptide
  Seed: RMCSLMQGSTLPRRS
RMYSLWQASTAPRRS

SEQ ID NO: 127139 - protein, 15 aa, Artificial Sequence
  Description of Artificial Sequence: Synthetic peptide
  Seed: RMCSLMQGSTLPRRS
RMYSLWQASTIPRRS

SEQ ID NO: 127140 - protein, 15 aa, Artificial Sequence
  Description of Artificial Sequence: Synthetic peptide
  Seed: RMCSLMQGSTLPRRS
RMYSLWQASTLPRRS

SEQ ID NO: 127141 - protein, 15 aa, Artificial Sequence
  Description of Artificial Sequence: Synthetic peptide
  Seed: RMCSLMQGSTLPRRS
RMYSLWQASTVPRRS

SEQ ID NO: 127142 - protein, 15 aa, Artificial Sequence
  Description of Artificial Sequence: Synthetic peptide
  Seed: RMCSLMQGSTLPRRS
RMYSLYQASTAPRRS

SEQ ID NO: 127143 - protein, 15 aa, Artificial Sequence
  Description of Artificial Sequence: Synthetic peptide
  Seed: RMCSLMQGSTLPRRS
RMYSLYQASTLPRRS

SEQ ID NO: 127144 - protein, 15 aa, Artificial Sequence
  Description of Artificial Sequence: Synthetic peptide
  Seed: RMCSLMQGSTLPRRS
RMYSLYQASTVPRRS

SEQ ID NO: 127145 - protein, 15 aa, Artificial Sequence
  Description of Artificial Sequence: Synthetic peptide
  Seed: RMCSLMQGSTLPRRS
RMYSLYQSSTAPRRS

SEQ ID NO: 127146 - protein, 15 aa, Artificial Sequence
  Description of Artificial Sequence: Synthetic peptide
  Seed: RMCSLMQGSTLPRRS
RMCSFMQASRLPSRS

SEQ ID NO: 127147 - protein, 15 aa, Artificial Sequence
  Description of Artificial Sequence: Synthetic peptide
  Seed: RMCSLMQGSTLPRRS
RMCSFMQFSALPLRS

SEQ ID NO: 127148 - protein, 15 aa, Artificial Sequence
  Description of Artificial Sequence: Synthetic peptide
  Seed: RMCSLMQGSTLPRRS
RMCSFMQFSNLPIRS

SEQ ID NO: 127149 - protein, 15 aa, Artificial Sequence
  Description of Artificial Sequence: Synthetic peptide
  Seed: RMCSLMQGSTLPRRS
RMCSFMQFSNLPLRS

SEQ ID NO: 127150 - protein, 15 aa, Artificial Sequence
  Description of Artificial Sequence: Synthetic peptide
  Seed: RMCSLMQGSTLPRRS
RMCSFMQFSNLPVRS

SEQ ID NO: 127151 - protein, 15 aa, Artificial Sequence
  Description of Artificial Sequence: Synthetic peptide
  Seed: RMCSLMQGSTLPRRS
RMCSFMQFSRLPSRS

SEQ ID NO: 127152 - protein, 15 aa, Artificial Sequence
  Description of Artificial Sequence: Synthetic peptide
  Seed: RMCSLMQGSTLPRRS
RMCSFMQFSSLPARS

SEQ ID NO: 127153 - protein, 15 aa, Artificial Sequence
  Description of Artificial Sequence: Synthetic peptide
  Seed: RMCSLMQGSTLPRRS
RMCSFMQFSSLPIRS

SEQ ID NO: 127154 - protein, 15 aa, Artificial Sequence
  Description of Artificial Sequence: Synthetic peptide
  Seed: RMCSLMQGSTLPRRS
RMCSFMQFSSLPLRS

SEQ ID NO: 127155 - protein, 15 aa, Artificial Sequence
  Description of Artificial Sequence: Synthetic peptide
  Seed: RMCSLMQGSTLPRRS
RMCSFMQFSSLPMRS

SEQ ID NO: 127156 - protein, 15 aa, Artificial Sequence
  Description of Artificial Sequence: Synthetic peptide
  Seed: RMCSLMQGSTLPRRS
RMCSFMQFSSLPVRS

SEQ ID NO: 127157 - protein, 15 aa, Artificial Sequence
  Description of Artificial Sequence: Synthetic peptide
  Seed: RMCSLMQGSTLPRRS
RMCSFMQFSTLPLRS

SEQ ID NO: 127158 - protein, 15 aa, Artificial Sequence
  Description of Artificial Sequence: Synthetic peptide
  Seed: RMCSLMQGSTLPRRS
RMCSFMQISKLPARS

SEQ ID NO: 127159 - protein, 15 aa, Artificial Sequence
  Description of Artificial Sequence: Synthetic peptide
  Seed: RMCSLMQGSTLPRRS
RMCSFMQISKLPGRS

SEQ ID NO: 127160 - protein, 15 aa, Artificial Sequence
  Description of Artificial Sequence: Synthetic peptide
  Seed: RMCSLMQGSTLPRRS
RMCSFMQISKLPHRS

SEQ ID NO: 127161 - protein, 15 aa, Artificial Sequence
  Description of Artificial Sequence: Synthetic peptide
  Seed: RMCSLMQGSTLPRRS
RMCSFMQISKLPQRS

SEQ ID NO: 127162 - protein, 15 aa, Artificial Sequence
  Description of Artificial Sequence: Synthetic peptide
  Seed: RMCSLMQGSTLPRRS
RMCSFMQISKLPRRS

SEQ ID NO: 127163 - protein, 15 aa, Artificial Sequence
  Description of Artificial Sequence: Synthetic peptide
  Seed: RMCSLMQGSTLPRRS
RMCSFMQISKLPSRS

SEQ ID NO: 127164 - protein, 15 aa, Artificial Sequence
  Description of Artificial Sequence: Synthetic peptide
  Seed: RMCSLMQGSTLPRRS
RMCSFMQISKLPTRS

SEQ ID NO: 127165 - protein, 15 aa, Artificial Sequence
  Description of Artificial Sequence: Synthetic peptide
  Seed: RMCSLMQGSTLPRRS
RMCSFMQISRLPARS

SEQ ID NO: 127166 - protein, 15 aa, Artificial Sequence
  Description of Artificial Sequence: Synthetic peptide
  Seed: RMCSLMQGSTLPRRS
RMCSFMQISRLPGRS

SEQ ID NO: 127167 - protein, 15 aa, Artificial Sequence
  Description of Artificial Sequence: Synthetic peptide
  Seed: RMCSLMQGSTLPRRS
RMCSFMQISRLPHRS

SEQ ID NO: 127168 - protein, 15 aa, Artificial Sequence
  Description of Artificial Sequence: Synthetic peptide
  Seed: RMCSLMQGSTLPRRS
RMCSFMQISRLPKRS

SEQ ID NO: 127169 - protein, 15 aa, Artificial Sequence
  Description of Artificial Sequence: Synthetic peptide
  Seed: RMCSLMQGSTLPRRS
RMCSFMQISRLPMRS

SEQ ID NO: 127170 - protein, 15 aa, Artificial Sequence
  Description of Artificial Sequence: Synthetic peptide
  Seed: RMCSLMQGSTLPRRS
RMCSFMQISRLPQRS

SEQ ID NO: 127171 - protein, 15 aa, Artificial Sequence
  Description of Artificial Sequence: Synthetic peptide
  Seed: RMCSLMQGSTLPRRS
RMCSFMQISRLPRRS

SEQ ID NO: 127172 - protein, 15 aa, Artificial Sequence
  Description of Artificial Sequence: Synthetic peptide
  Seed: RMCSLMQGSTLPRRS
RMCSFMQISRLPSRS

SEQ ID NO: 127173 - protein, 15 aa, Artificial Sequence
  Description of Artificial Sequence: Synthetic peptide
  Seed: RMCSLMQGSTLPRRS
RMCSFMQISRLPTRS

SEQ ID NO: 127174 - protein, 15 aa, Artificial Sequence
  Description of Artificial Sequence: Synthetic peptide
  Seed: RMCSLMQGSTLPRRS
RMCSFMQISRLPVRS

SEQ ID NO: 127175 - protein, 15 aa, Artificial Sequence
  Description of Artificial Sequence: Synthetic peptide
  Seed: RMCSLMQGSTLPRRS
RMCSFMQISRLPYRS

SEQ ID NO: 127176 - protein, 15 aa, Artificial Sequence
  Description of Artificial Sequence: Synthetic peptide
  Seed: RMCSLMQGSTLPRRS
RMCSFMQLSKLPARS

SEQ ID NO: 127177 - protein, 15 aa, Artificial Sequence
  Description of Artificial Sequence: Synthetic peptide
  Seed: RMCSLMQGSTLPRRS
RMCSFMQLSKLPGRS

SEQ ID NO: 127178 - protein, 15 aa, Artificial Sequence
  Description of Artificial Sequence: Synthetic peptide
  Seed: RMCSLMQGSTLPRRS
RMCSFMQLSKLPHRS

SEQ ID NO: 127179 - protein, 15 aa, Artificial Sequence
  Description of Artificial Sequence: Synthetic peptide
  Seed: RMCSLMQGSTLPRRS
RMCSFMQLSKLPQRS

SEQ ID NO: 127180 - protein, 15 aa, Artificial Sequence
  Description of Artificial Sequence: Synthetic peptide
  Seed: RMCSLMQGSTLPRRS
RMCSFMQLSKLPRRS

SEQ ID NO: 127181 - protein, 15 aa, Artificial Sequence
  Description of Artificial Sequence: Synthetic peptide
  Seed: RMCSLMQGSTLPRRS
RMCSFMQLSKLPSRS

SEQ ID NO: 127182 - protein, 15 aa, Artificial Sequence
  Description of Artificial Sequence: Synthetic peptide
  Seed: RMCSLMQGSTLPRRS
RMCSFMQLSKLPTRS

SEQ ID NO: 127183 - protein, 15 aa, Artificial Sequence
  Description of Artificial Sequence: Synthetic peptide
  Seed: RMCSLMQGSTLPRRS
RMCSFMQLSRLPARS

SEQ ID NO: 127184 - protein, 15 aa, Artificial Sequence
  Description of Artificial Sequence: Synthetic peptide
  Seed: RMCSLMQGSTLPRRS
RMCSFMQLSRLPGRS

SEQ ID NO: 127185 - protein, 15 aa, Artificial Sequence
  Description of Artificial Sequence: Synthetic peptide
  Seed: RMCSLMQGSTLPRRS
RMCSFMQLSRLPHRS

SEQ ID NO: 127186 - protein, 15 aa, Artificial Sequence
  Description of Artificial Sequence: Synthetic peptide
  Seed: RMCSLMQGSTLPRRS
RMCSFMQLSRLPKRS

SEQ ID NO: 127187 - protein, 15 aa, Artificial Sequence
  Description of Artificial Sequence: Synthetic peptide
  Seed: RMCSLMQGSTLPRRS
RMCSFMQLSRLPLRS

SEQ ID NO: 127188 - protein, 15 aa, Artificial Sequence
  Description of Artificial Sequence: Synthetic peptide
  Seed: RMCSLMQGSTLPRRS
RMCSFMQLSRLPMRS

SEQ ID NO: 127189 - protein, 15 aa, Artificial Sequence
  Description of Artificial Sequence: Synthetic peptide
  Seed: RMCSLMQGSTLPRRS
RMCSFMQLSRLPQRS

SEQ ID NO: 127190 - protein, 15 aa, Artificial Sequence
  Description of Artificial Sequence: Synthetic peptide
  Seed: RMCSLMQGSTLPRRS
RMCSFMQLSRLPRRS

SEQ ID NO: 127191 - protein, 15 aa, Artificial Sequence
  Description of Artificial Sequence: Synthetic peptide
  Seed: RMCSLMQGSTLPRRS
RMCSFMQLSRLPSRS

SEQ ID NO: 127192 - protein, 15 aa, Artificial Sequence
  Description of Artificial Sequence: Synthetic peptide
  Seed: RMCSLMQGSTLPRRS
RMCSFMQLSRLPTRS

SEQ ID NO: 127193 - protein, 15 aa, Artificial Sequence
  Description of Artificial Sequence: Synthetic peptide
  Seed: RMCSLMQGSTLPRRS
RMCSFMQLSRLPVRS

SEQ ID NO: 127194 - protein, 15 aa, Artificial Sequence
  Description of Artificial Sequence: Synthetic peptide
  Seed: RMCSLMQGSTLPRRS
RMCSFMQLSRLPYRS

SEQ ID NO: 127195 - protein, 15 aa, Artificial Sequence
  Description of Artificial Sequence: Synthetic peptide
  Seed: RMCSLMQGSTLPRRS
RMCSFMQMSKLPARS

SEQ ID NO: 127196 - protein, 15 aa, Artificial Sequence
  Description of Artificial Sequence: Synthetic peptide
  Seed: RMCSLMQGSTLPRRS
RMCSFMQMSKLPGRS

SEQ ID NO: 127197 - protein, 15 aa, Artificial Sequence
  Description of Artificial Sequence: Synthetic peptide
  Seed: RMCSLMQGSTLPRRS
RMCSFMQMSKLPHRS

SEQ ID NO: 127198 - protein, 15 aa, Artificial Sequence
  Description of Artificial Sequence: Synthetic peptide
  Seed: RMCSLMQGSTLPRRS
RMCSFMQMSKLPKRS

SEQ ID NO: 127199 - protein, 15 aa, Artificial Sequence
  Description of Artificial Sequence: Synthetic peptide
  Seed: RMCSLMQGSTLPRRS
RMCSFMQMSKLPMRS

SEQ ID NO: 127200 - protein, 15 aa, Artificial Sequence
  Description of Artificial Sequence: Synthetic peptide
  Seed: RMCSLMQGSTLPRRS
RMCSFMQMSKLPQRS

SEQ ID NO: 127201 - protein, 15 aa, Artificial Sequence
  Description of Artificial Sequence: Synthetic peptide
  Seed: RMCSLMQGSTLPRRS
RMCSFMQMSKLPRRS

SEQ ID NO: 127202 - protein, 15 aa, Artificial Sequence
  Description of Artificial Sequence: Synthetic peptide
  Seed: RMCSLMQGSTLPRRS
RMCSFMQMSKLPSRS

SEQ ID NO: 127203 - protein, 15 aa, Artificial Sequence
  Description of Artificial Sequence: Synthetic peptide
  Seed: RMCSLMQGSTLPRRS
RMCSFMQMSKLPTRS

SEQ ID NO: 127204 - protein, 15 aa, Artificial Sequence
  Description of Artificial Sequence: Synthetic peptide
  Seed: RMCSLMQGSTLPRRS
RMCSFMQMSKLPVRS

SEQ ID NO: 127205 - protein, 15 aa, Artificial Sequence
  Description of Artificial Sequence: Synthetic peptide
  Seed: RMCSLMQGSTLPRRS
RMCSFMQMSRLPARS

SEQ ID NO: 127206 - protein, 15 aa, Artificial Sequence
  Description of Artificial Sequence: Synthetic peptide
  Seed: RMCSLMQGSTLPRRS
RMCSFMQMSRLPGRS

SEQ ID NO: 127207 - protein, 15 aa, Artificial Sequence
  Description of Artificial Sequence: Synthetic peptide
  Seed: RMCSLMQGSTLPRRS
RMCSFMQMSRLPHRS

SEQ ID NO: 127208 - protein, 15 aa, Artificial Sequence
  Description of Artificial Sequence: Synthetic peptide
  Seed: RMCSLMQGSTLPRRS
RMCSFMQMSRLPIRS

SEQ ID NO: 127209 - protein, 15 aa, Artificial Sequence
  Description of Artificial Sequence: Synthetic peptide
  Seed: RMCSLMQGSTLPRRS
RMCSFMQMSRLPKRS

SEQ ID NO: 127210 - protein, 15 aa, Artificial Sequence
  Description of Artificial Sequence: Synthetic peptide
  Seed: RMCSLMQGSTLPRRS
RMCSFMQMSRLPLRS

SEQ ID NO: 127211 - protein, 15 aa, Artificial Sequence
  Description of Artificial Sequence: Synthetic peptide
  Seed: RMCSLMQGSTLPRRS
RMCSFMQMSRLPMRS

SEQ ID NO: 127212 - protein, 15 aa, Artificial Sequence
  Description of Artificial Sequence: Synthetic peptide
  Seed: RMCSLMQGSTLPRRS
RMCSFMQMSRLPQRS

SEQ ID NO: 127213 - protein, 15 aa, Artificial Sequence
  Description of Artificial Sequence: Synthetic peptide
  Seed: RMCSLMQGSTLPRRS
RMCSFMQMSRLPRRS

SEQ ID NO: 127214 - protein, 15 aa, Artificial Sequence
  Description of Artificial Sequence: Synthetic peptide
  Seed: RMCSLMQGSTLPRRS
RMCSFMQMSRLPSRS

SEQ ID NO: 127215 - protein, 15 aa, Artificial Sequence
  Description of Artificial Sequence: Synthetic peptide
  Seed: RMCSLMQGSTLPRRS
RMCSFMQMSRLPTRS

SEQ ID NO: 127216 - protein, 15 aa, Artificial Sequence
  Description of Artificial Sequence: Synthetic peptide
  Seed: RMCSLMQGSTLPRRS
RMCSFMQMSRLPVRS

SEQ ID NO: 127217 - protein, 15 aa, Artificial Sequence
  Description of Artificial Sequence: Synthetic peptide
  Seed: RMCSLMQGSTLPRRS
RMCSFMQMSRLPYRS

SEQ ID NO: 127218 - protein, 15 aa, Artificial Sequence
  Description of Artificial Sequence: Synthetic peptide
  Seed: RMCSLMQGSTLPRRS
RMCSFMQVSKLPARS

SEQ ID NO: 127219 - protein, 15 aa, Artificial Sequence
  Description of Artificial Sequence: Synthetic peptide
  Seed: RMCSLMQGSTLPRRS
RMCSFMQVSKLPSRS

SEQ ID NO: 127220 - protein, 15 aa, Artificial Sequence
  Description of Artificial Sequence: Synthetic peptide
  Seed: RMCSLMQGSTLPRRS
RMCSFMQVSRLPARS

SEQ ID NO: 127221 - protein, 15 aa, Artificial Sequence
  Description of Artificial Sequence: Synthetic peptide
  Seed: RMCSLMQGSTLPRRS
RMCSFMQVSRLPGRS

SEQ ID NO: 127222 - protein, 15 aa, Artificial Sequence
  Description of Artificial Sequence: Synthetic peptide
  Seed: RMCSLMQGSTLPRRS
RMCSFMQVSRLPHRS

SEQ ID NO: 127223 - protein, 15 aa, Artificial Sequence
  Description of Artificial Sequence: Synthetic peptide
  Seed: RMCSLMQGSTLPRRS
RMCSFMQVSRLPQRS

SEQ ID NO: 127224 - protein, 15 aa, Artificial Sequence
  Description of Artificial Sequence: Synthetic peptide
  Seed: RMCSLMQGSTLPRRS
RMCSFMQVSRLPRRS

SEQ ID NO: 127225 - protein, 15 aa, Artificial Sequence
  Description of Artificial Sequence: Synthetic peptide
  Seed: RMCSLMQGSTLPRRS
RMCSFMQVSRLPSRS

SEQ ID NO: 127226 - protein, 15 aa, Artificial Sequence
  Description of Artificial Sequence: Synthetic peptide
  Seed: RMCSLMQGSTLPRRS
RMCSFMQVSRLPTRS

SEQ ID NO: 127227 - protein, 15 aa, Artificial Sequence
  Description of Artificial Sequence: Synthetic peptide
  Seed: RMCSLMQGSTLPRRS
RMCSFMQWSNLPIRS

SEQ ID NO: 127228 - protein, 15 aa, Artificial Sequence
  Description of Artificial Sequence: Synthetic peptide
  Seed: RMCSLMQGSTLPRRS
RMCSFMQWSNLPLRS

SEQ ID NO: 127229 - protein, 15 aa, Artificial Sequence
  Description of Artificial Sequence: Synthetic peptide
  Seed: RMCSLMQGSTLPRRS
RMCSFMQWSNLPVRS

SEQ ID NO: 127230 - protein, 15 aa, Artificial Sequence
  Description of Artificial Sequence: Synthetic peptide
  Seed: RMCSLMQGSTLPRRS
RMCSFMQWSSLPIRS

SEQ ID NO: 127231 - protein, 15 aa, Artificial Sequence
  Description of Artificial Sequence: Synthetic peptide
  Seed: RMCSLMQGSTLPRRS
RMCSFMQWSSLPLRS

SEQ ID NO: 127232 - protein, 15 aa, Artificial Sequence
  Description of Artificial Sequence: Synthetic peptide
  Seed: RMCSLMQGSTLPRRS
RMCSFMQWSSLPVRS

SEQ ID NO: 127233 - protein, 15 aa, Artificial Sequence
  Description of Artificial Sequence: Synthetic peptide
  Seed: RMCSLMQGSTLPRRS
RMCSFMQYSALPLRS

SEQ ID NO: 127234 - protein, 15 aa, Artificial Sequence
  Description of Artificial Sequence: Synthetic peptide
  Seed: RMCSLMQGSTLPRRS
RMCSFMQYSALPVRS

SEQ ID NO: 127235 - protein, 15 aa, Artificial Sequence
  Description of Artificial Sequence: Synthetic peptide
  Seed: RMCSLMQGSTLPRRS
RMCSFMQYSGLPLRS

SEQ ID NO: 127236 - protein, 15 aa, Artificial Sequence
  Description of Artificial Sequence: Synthetic peptide
  Seed: RMCSLMQGSTLPRRS
RMCSFMQYSNLPARS

SEQ ID NO: 127237 - protein, 15 aa, Artificial Sequence
  Description of Artificial Sequence: Synthetic peptide
  Seed: RMCSLMQGSTLPRRS
RMCSFMQYSNLPIRS

SEQ ID NO: 127238 - protein, 15 aa, Artificial Sequence
  Description of Artificial Sequence: Synthetic peptide
  Seed: RMCSLMQGSTLPRRS
RMCSFMQYSNLPLRS

SEQ ID NO: 127239 - protein, 15 aa, Artificial Sequence
  Description of Artificial Sequence: Synthetic peptide
  Seed: RMCSLMQGSTLPRRS
RMCSFMQYSNLPMRS

SEQ ID NO: 127240 - protein, 15 aa, Artificial Sequence
  Description of Artificial Sequence: Synthetic peptide
  Seed: RMCSLMQGSTLPRRS
RMCSFMQYSNLPVRS

SEQ ID NO: 127241 - protein, 15 aa, Artificial Sequence
  Description of Artificial Sequence: Synthetic peptide
  Seed: RMCSLMQGSTLPRRS
RMCSFMQYSSLPARS

SEQ ID NO: 127242 - protein, 15 aa, Artificial Sequence
  Description of Artificial Sequence: Synthetic peptide
  Seed: RMCSLMQGSTLPRRS
RMCSFMQYSSLPIRS

SEQ ID NO: 127243 - protein, 15 aa, Artificial Sequence
  Description of Artificial Sequence: Synthetic peptide
  Seed: RMCSLMQGSTLPRRS
RMCSFMQYSSLPLRS

SEQ ID NO: 127244 - protein, 15 aa, Artificial Sequence
  Description of Artificial Sequence: Synthetic peptide
  Seed: RMCSLMQGSTLPRRS
RMCSFMQYSSLPMRS

SEQ ID NO: 127245 - protein, 15 aa, Artificial Sequence
  Description of Artificial Sequence: Synthetic peptide
  Seed: RMCSLMQGSTLPRRS
RMCSFMQYSSLPVRS

SEQ ID NO: 127246 - protein, 15 aa, Artificial Sequence
  Description of Artificial Sequence: Synthetic peptide
  Seed: RMCSLMQGSTLPRRS
RMCSFMQYSTLPIRS

SEQ ID NO: 127247 - protein, 15 aa, Artificial Sequence
  Description of Artificial Sequence: Synthetic peptide
  Seed: RMCSLMQGSTLPRRS
RMCSFMQYSTLPLRS

SEQ ID NO: 127248 - protein, 15 aa, Artificial Sequence
  Description of Artificial Sequence: Synthetic peptide
  Seed: RMCSLMQGSTLPRRS
RMCSFMQYSTLPVRS

SEQ ID NO: 127249 - protein, 15 aa, Artificial Sequence
  Description of Artificial Sequence: Synthetic peptide
  Seed: RMCSLMQGSTLPRRS
RMCSIMQASKLPARS

SEQ ID NO: 127250 - protein, 15 aa, Artificial Sequence
  Description of Artificial Sequence: Synthetic peptide
  Seed: RMCSLMQGSTLPRRS
RMCSIMQASKLPHRS

SEQ ID NO: 127251 - protein, 15 aa, Artificial Sequence
  Description of Artificial Sequence: Synthetic peptide
  Seed: RMCSLMQGSTLPRRS
RMCSIMQASKLPQRS

SEQ ID NO: 127252 - protein, 15 aa, Artificial Sequence
  Description of Artificial Sequence: Synthetic peptide
  Seed: RMCSLMQGSTLPRRS
RMCSIMQASKLPSRS

SEQ ID NO: 127253 - protein, 15 aa, Artificial Sequence
  Description of Artificial Sequence: Synthetic peptide
  Seed: RMCSLMQGSTLPRRS
RMCSIMQASKLPYRS

SEQ ID NO: 127254 - protein, 15 aa, Artificial Sequence
  Description of Artificial Sequence: Synthetic peptide
  Seed: RMCSLMQGSTLPRRS
RMCSIMQASNLPARS

SEQ ID NO: 127255 - protein, 15 aa, Artificial Sequence
  Description of Artificial Sequence: Synthetic peptide
  Seed: RMCSLMQGSTLPRRS
RMCSIMQASNLPSRS

SEQ ID NO: 127256 - protein, 15 aa, Artificial Sequence
  Description of Artificial Sequence: Synthetic peptide
  Seed: RMCSLMQGSTLPRRS
RMCSIMQASRLPARS

SEQ ID NO: 127257 - protein, 15 aa, Artificial Sequence
  Description of Artificial Sequence: Synthetic peptide
  Seed: RMCSLMQGSTLPRRS
RMCSIMQASRLPFRS

SEQ ID NO: 127258 - protein, 15 aa, Artificial Sequence
  Description of Artificial Sequence: Synthetic peptide
  Seed: RMCSLMQGSTLPRRS
RMCSIMQASRLPGRS

SEQ ID NO: 127259 - protein, 15 aa, Artificial Sequence
  Description of Artificial Sequence: Synthetic peptide
  Seed: RMCSLMQGSTLPRRS
RMCSIMQASRLPHRS

SEQ ID NO: 127260 - protein, 15 aa, Artificial Sequence
  Description of Artificial Sequence: Synthetic peptide
  Seed: RMCSLMQGSTLPRRS
RMCSIMQASRLPIRS

SEQ ID NO: 127261 - protein, 15 aa, Artificial Sequence
  Description of Artificial Sequence: Synthetic peptide
  Seed: RMCSLMQGSTLPRRS
RMCSIMQASRLPLRS

SEQ ID NO: 127262 - protein, 15 aa, Artificial Sequence
  Description of Artificial Sequence: Synthetic peptide
  Seed: RMCSLMQGSTLPRRS
RMCSIMQASRLPMRS

SEQ ID NO: 127263 - protein, 15 aa, Artificial Sequence
  Description of Artificial Sequence: Synthetic peptide
  Seed: RMCSLMQGSTLPRRS
RMCSIMQASRLPQRS

SEQ ID NO: 127264 - protein, 15 aa, Artificial Sequence
  Description of Artificial Sequence: Synthetic peptide
  Seed: RMCSLMQGSTLPRRS
RMCSIMQASRLPRRS

SEQ ID NO: 127265 - protein, 15 aa, Artificial Sequence
  Description of Artificial Sequence: Synthetic peptide
  Seed: RMCSLMQGSTLPRRS
RMCSIMQASRLPSRS

SEQ ID NO: 127266 - protein, 15 aa, Artificial Sequence
  Description of Artificial Sequence: Synthetic peptide
  Seed: RMCSLMQGSTLPRRS
RMCSIMQASRLPTRS

SEQ ID NO: 127267 - protein, 15 aa, Artificial Sequence
  Description of Artificial Sequence: Synthetic peptide
  Seed: RMCSLMQGSTLPRRS
RMCSIMQASRLPVRS

SEQ ID NO: 127268 - protein, 15 aa, Artificial Sequence
  Description of Artificial Sequence: Synthetic peptide
  Seed: RMCSLMQGSTLPRRS
RMCSIMQASRLPYRS

SEQ ID NO: 127269 - protein, 15 aa, Artificial Sequence
  Description of Artificial Sequence: Synthetic peptide
  Seed: RMCSLMQGSTLPRRS
RMCSIMQASTLPARS

SEQ ID NO: 127270 - protein, 15 aa, Artificial Sequence
  Description of Artificial Sequence: Synthetic peptide
  Seed: RMCSLMQGSTLPRRS
RMCSIMQCSRLPARS

SEQ ID NO: 127271 - protein, 15 aa, Artificial Sequence
  Description of Artificial Sequence: Synthetic peptide
  Seed: RMCSLMQGSTLPRRS
RMCSIMQCSRLPSRS

SEQ ID NO: 127272 - protein, 15 aa, Artificial Sequence
  Description of Artificial Sequence: Synthetic peptide
  Seed: RMCSLMQGSTLPRRS
RMCSIMQFSALPARS

SEQ ID NO: 127273 - protein, 15 aa, Artificial Sequence
  Description of Artificial Sequence: Synthetic peptide
  Seed: RMCSLMQGSTLPRRS
RMCSIMQFSALPFRS

SEQ ID NO: 127274 - protein, 15 aa, Artificial Sequence
  Description of Artificial Sequence: Synthetic peptide
  Seed: RMCSLMQGSTLPRRS
RMCSIMQFSALPIRS

SEQ ID NO: 127275 - protein, 15 aa, Artificial Sequence
  Description of Artificial Sequence: Synthetic peptide
  Seed: RMCSLMQGSTLPRRS
RMCSIMQFSALPLRS

SEQ ID NO: 127276 - protein, 15 aa, Artificial Sequence
  Description of Artificial Sequence: Synthetic peptide
  Seed: RMCSLMQGSTLPRRS
RMCSIMQFSALPMRS

SEQ ID NO: 127277 - protein, 15 aa, Artificial Sequence
  Description of Artificial Sequence: Synthetic peptide
  Seed: RMCSLMQGSTLPRRS
RMCSIMQFSALPSRS

SEQ ID NO: 127278 - protein, 15 aa, Artificial Sequence
  Description of Artificial Sequence: Synthetic peptide
  Seed: RMCSLMQGSTLPRRS
RMCSIMQFSALPTRS

SEQ ID NO: 127279 - protein, 15 aa, Artificial Sequence
  Description of Artificial Sequence: Synthetic peptide
  Seed: RMCSLMQGSTLPRRS
RMCSIMQFSALPVRS

SEQ ID NO: 127280 - protein, 15 aa, Artificial Sequence
  Description of Artificial Sequence: Synthetic peptide
  Seed: RMCSLMQGSTLPRRS
RMCSIMQFSDLPIRS

SEQ ID NO: 127281 - protein, 15 aa, Artificial Sequence
  Description of Artificial Sequence: Synthetic peptide
  Seed: RMCSLMQGSTLPRRS
RMCSIMQFSDLPLRS

SEQ ID NO: 127282 - protein, 15 aa, Artificial Sequence
  Description of Artificial Sequence: Synthetic peptide
  Seed: RMCSLMQGSTLPRRS
RMCSIMQFSDLPVRS

SEQ ID NO: 127283 - protein, 15 aa, Artificial Sequence
  Description of Artificial Sequence: Synthetic peptide
  Seed: RMCSLMQGSTLPRRS
RMCSIMQFSGLPARS

SEQ ID NO: 127284 - protein, 15 aa, Artificial Sequence
  Description of Artificial Sequence: Synthetic peptide
  Seed: RMCSLMQGSTLPRRS
RMCSIMQFSGLPFRS

SEQ ID NO: 127285 - protein, 15 aa, Artificial Sequence
  Description of Artificial Sequence: Synthetic peptide
  Seed: RMCSLMQGSTLPRRS
RMCSIMQFSGLPIRS

SEQ ID NO: 127286 - protein, 15 aa, Artificial Sequence
  Description of Artificial Sequence: Synthetic peptide
  Seed: RMCSLMQGSTLPRRS
RMCSIMQFSGLPLRS

SEQ ID NO: 127287 - protein, 15 aa, Artificial Sequence
  Description of Artificial Sequence: Synthetic peptide
  Seed: RMCSLMQGSTLPRRS
RMCSIMQFSGLPMRS

SEQ ID NO: 127288 - protein, 15 aa, Artificial Sequence
  Description of Artificial Sequence: Synthetic peptide
  Seed: RMCSLMQGSTLPRRS
RMCSIMQFSGLPSRS

SEQ ID NO: 127289 - protein, 15 aa, Artificial Sequence
  Description of Artificial Sequence: Synthetic peptide
  Seed: RMCSLMQGSTLPRRS
RMCSIMQFSGLPTRS

SEQ ID NO: 127290 - protein, 15 aa, Artificial Sequence
  Description of Artificial Sequence: Synthetic peptide
  Seed: RMCSLMQGSTLPRRS
RMCSIMQFSGLPVRS

SEQ ID NO: 127291 - protein, 15 aa, Artificial Sequence
  Description of Artificial Sequence: Synthetic peptide
  Seed: RMCSLMQGSTLPRRS
RMCSIMQFSKLPARS

SEQ ID NO: 127292 - protein, 15 aa, Artificial Sequence
  Description of Artificial Sequence: Synthetic peptide
  Seed: RMCSLMQGSTLPRRS
RMCSIMQFSKLPFRS

SEQ ID NO: 127293 - protein, 15 aa, Artificial Sequence
  Description of Artificial Sequence: Synthetic peptide
  Seed: RMCSLMQGSTLPRRS
RMCSIMQFSKLPHRS

SEQ ID NO: 127294 - protein, 15 aa, Artificial Sequence
  Description of Artificial Sequence: Synthetic peptide
  Seed: RMCSLMQGSTLPRRS
RMCSIMQFSKLPKRS

SEQ ID NO: 127295 - protein, 15 aa, Artificial Sequence
  Description of Artificial Sequence: Synthetic peptide
  Seed: RMCSLMQGSTLPRRS
RMCSIMQFSKLPLRS

SEQ ID NO: 127296 - protein, 15 aa, Artificial Sequence
  Description of Artificial Sequence: Synthetic peptide
  Seed: RMCSLMQGSTLPRRS
RMCSIMQFSKLPMRS

SEQ ID NO: 127297 - protein, 15 aa, Artificial Sequence
  Description of Artificial Sequence: Synthetic peptide
  Seed: RMCSLMQGSTLPRRS
RMCSIMQFSKLPRRS

SEQ ID NO: 127298 - protein, 15 aa, Artificial Sequence
  Description of Artificial Sequence: Synthetic peptide
  Seed: RMCSLMQGSTLPRRS
RMCSIMQFSKLPSRS

SEQ ID NO: 127299 - protein, 15 aa, Artificial Sequence
  Description of Artificial Sequence: Synthetic peptide
  Seed: RMCSLMQGSTLPRRS
RMCSIMQFSKLPYRS

SEQ ID NO: 127300 - protein, 15 aa, Artificial Sequence
  Description of Artificial Sequence: Synthetic peptide
  Seed: RMCSLMQGSTLPRRS
RMCSIMQFSNLPARS

SEQ ID NO: 127301 - protein, 15 aa, Artificial Sequence
  Description of Artificial Sequence: Synthetic peptide
  Seed: RMCSLMQGSTLPRRS
RMCSIMQFSNLPFRS

SEQ ID NO: 127302 - protein, 15 aa, Artificial Sequence
  Description of Artificial Sequence: Synthetic peptide
  Seed: RMCSLMQGSTLPRRS
RMCSIMQFSNLPIRS

SEQ ID NO: 127303 - protein, 15 aa, Artificial Sequence
  Description of Artificial Sequence: Synthetic peptide
  Seed: RMCSLMQGSTLPRRS
RMCSIMQFSNLPLRS

SEQ ID NO: 127304 - protein, 15 aa, Artificial Sequence
  Description of Artificial Sequence: Synthetic peptide
  Seed: RMCSLMQGSTLPRRS
RMCSIMQFSNLPMRS

SEQ ID NO: 127305 - protein, 15 aa, Artificial Sequence
  Description of Artificial Sequence: Synthetic peptide
  Seed: RMCSLMQGSTLPRRS
RMCSIMQFSNLPSRS

SEQ ID NO: 127306 - protein, 15 aa, Artificial Sequence
  Description of Artificial Sequence: Synthetic peptide
  Seed: RMCSLMQGSTLPRRS
RMCSIMQFSNLPTRS

SEQ ID NO: 127307 - protein, 15 aa, Artificial Sequence
  Description of Artificial Sequence: Synthetic peptide
  Seed: RMCSLMQGSTLPRRS
RMCSIMQFSNLPVRS

SEQ ID NO: 127308 - protein, 15 aa, Artificial Sequence
  Description of Artificial Sequence: Synthetic peptide
  Seed: RMCSLMQGSTLPRRS
RMCSIMQFSNLPYRS

SEQ ID NO: 127309 - protein, 15 aa, Artificial Sequence
  Description of Artificial Sequence: Synthetic peptide
  Seed: RMCSLMQGSTLPRRS
RMCSIMQFSPLPIRS

SEQ ID NO: 127310 - protein, 15 aa, Artificial Sequence
  Description of Artificial Sequence: Synthetic peptide
  Seed: RMCSLMQGSTLPRRS
RMCSIMQFSPLPLRS

SEQ ID NO: 127311 - protein, 15 aa, Artificial Sequence
  Description of Artificial Sequence: Synthetic peptide
  Seed: RMCSLMQGSTLPRRS
RMCSIMQFSPLPVRS

SEQ ID NO: 127312 - protein, 15 aa, Artificial Sequence
  Description of Artificial Sequence: Synthetic peptide
  Seed: RMCSLMQGSTLPRRS
RMCSIMQFSRLPARS

SEQ ID NO: 127313 - protein, 15 aa, Artificial Sequence
  Description of Artificial Sequence: Synthetic peptide
  Seed: RMCSLMQGSTLPRRS
RMCSIMQFSRLPFRS

SEQ ID NO: 127314 - protein, 15 aa, Artificial Sequence
  Description of Artificial Sequence: Synthetic peptide
  Seed: RMCSLMQGSTLPRRS
RMCSIMQFSRLPGRS

SEQ ID NO: 127315 - protein, 15 aa, Artificial Sequence
  Description of Artificial Sequence: Synthetic peptide
  Seed: RMCSLMQGSTLPRRS
RMCSIMQFSRLPHRS

SEQ ID NO: 127316 - protein, 15 aa, Artificial Sequence
  Description of Artificial Sequence: Synthetic peptide
  Seed: RMCSLMQGSTLPRRS
RMCSIMQFSRLPIRS

SEQ ID NO: 127317 - protein, 15 aa, Artificial Sequence
  Description of Artificial Sequence: Synthetic peptide
  Seed: RMCSLMQGSTLPRRS
RMCSIMQFSRLPKRS

SEQ ID NO: 127318 - protein, 15 aa, Artificial Sequence
  Description of Artificial Sequence: Synthetic peptide
  Seed: RMCSLMQGSTLPRRS
RMCSIMQFSRLPLRS

SEQ ID NO: 127319 - protein, 15 aa, Artificial Sequence
  Description of Artificial Sequence: Synthetic peptide
  Seed: RMCSLMQGSTLPRRS
RMCSIMQFSRLPMRS

SEQ ID NO: 127320 - protein, 15 aa, Artificial Sequence
  Description of Artificial Sequence: Synthetic peptide
  Seed: RMCSLMQGSTLPRRS
RMCSIMQFSRLPQRS

SEQ ID NO: 127321 - protein, 15 aa, Artificial Sequence
  Description of Artificial Sequence: Synthetic peptide
  Seed: RMCSLMQGSTLPRRS
RMCSIMQFSRLPRRS

SEQ ID NO: 127322 - protein, 15 aa, Artificial Sequence
  Description of Artificial Sequence: Synthetic peptide
  Seed: RMCSLMQGSTLPRRS
RMCSIMQFSRLPSRS

SEQ ID NO: 127323 - protein, 15 aa, Artificial Sequence
  Description of Artificial Sequence: Synthetic peptide
  Seed: RMCSLMQGSTLPRRS
RMCSIMQFSRLPVRS

SEQ ID NO: 127324 - protein, 15 aa, Artificial Sequence
  Description of Artificial Sequence: Synthetic peptide
  Seed: RMCSLMQGSTLPRRS
RMCSIMQFSRLPYRS

SEQ ID NO: 127325 - protein, 15 aa, Artificial Sequence
  Description of Artificial Sequence: Synthetic peptide
  Seed: RMCSLMQGSTLPRRS
RMCSIMQFSSLPARS

SEQ ID NO: 127326 - protein, 15 aa, Artificial Sequence
  Description of Artificial Sequence: Synthetic peptide
  Seed: RMCSLMQGSTLPRRS
RMCSIMQFSSLPFRS

SEQ ID NO: 127327 - protein, 15 aa, Artificial Sequence
  Description of Artificial Sequence: Synthetic peptide
  Seed: RMCSLMQGSTLPRRS
RMCSIMQFSSLPGRS

SEQ ID NO: 127328 - protein, 15 aa, Artificial Sequence
  Description of Artificial Sequence: Synthetic peptide
  Seed: RMCSLMQGSTLPRRS
RMCSIMQFSSLPIRS

SEQ ID NO: 127329 - protein, 15 aa, Artificial Sequence
  Description of Artificial Sequence: Synthetic peptide
  Seed: RMCSLMQGSTLPRRS
RMCSIMQFSSLPLRS

SEQ ID NO: 127330 - protein, 15 aa, Artificial Sequence
  Description of Artificial Sequence: Synthetic peptide
  Seed: RMCSLMQGSTLPRRS
RMCSIMQFSSLPMRS

SEQ ID NO: 127331 - protein, 15 aa, Artificial Sequence
  Description of Artificial Sequence: Synthetic peptide
  Seed: RMCSLMQGSTLPRRS
RMCSIMQFSSLPSRS

SEQ ID NO: 127332 - protein, 15 aa, Artificial Sequence
  Description of Artificial Sequence: Synthetic peptide
  Seed: RMCSLMQGSTLPRRS
RMCSIMQFSSLPTRS

SEQ ID NO: 127333 - protein, 15 aa, Artificial Sequence
  Description of Artificial Sequence: Synthetic peptide
  Seed: RMCSLMQGSTLPRRS
RMCSIMQFSSLPVRS

SEQ ID NO: 127334 - protein, 15 aa, Artificial Sequence
  Description of Artificial Sequence: Synthetic peptide
  Seed: RMCSLMQGSTLPRRS
RMCSIMQFSSLPYRS

SEQ ID NO: 127335 - protein, 15 aa, Artificial Sequence
  Description of Artificial Sequence: Synthetic peptide
  Seed: RMCSLMQGSTLPRRS
RMCSIMQFSTLPARS

SEQ ID NO: 127336 - protein, 15 aa, Artificial Sequence
  Description of Artificial Sequence: Synthetic peptide
  Seed: RMCSLMQGSTLPRRS
RMCSIMQFSTLPIRS

SEQ ID NO: 127337 - protein, 15 aa, Artificial Sequence
  Description of Artificial Sequence: Synthetic peptide
  Seed: RMCSLMQGSTLPRRS
RMCSIMQFSTLPLRS

SEQ ID NO: 127338 - protein, 15 aa, Artificial Sequence
  Description of Artificial Sequence: Synthetic peptide
  Seed: RMCSLMQGSTLPRRS
RMCSIMQFSTLPMRS

SEQ ID NO: 127339 - protein, 15 aa, Artificial Sequence
  Description of Artificial Sequence: Synthetic peptide
  Seed: RMCSLMQGSTLPRRS
RMCSIMQFSTLPSRS

SEQ ID NO: 127340 - protein, 15 aa, Artificial Sequence
  Description of Artificial Sequence: Synthetic peptide
  Seed: RMCSLMQGSTLPRRS
RMCSIMQFSTLPTRS

SEQ ID NO: 127341 - protein, 15 aa, Artificial Sequence
  Description of Artificial Sequence: Synthetic peptide
  Seed: RMCSLMQGSTLPRRS
RMCSIMQFSTLPVRS

SEQ ID NO: 127342 - protein, 15 aa, Artificial Sequence
  Description of Artificial Sequence: Synthetic peptide
  Seed: RMCSLMQGSTLPRRS
RMCSIMQHSALPRRS

SEQ ID NO: 127343 - protein, 15 aa, Artificial Sequence
  Description of Artificial Sequence: Synthetic peptide
  Seed: RMCSLMQGSTLPRRS
RMCSIMQHSALPYRS

SEQ ID NO: 127344 - protein, 15 aa, Artificial Sequence
  Description of Artificial Sequence: Synthetic peptide
  Seed: RMCSLMQGSTLPRRS
RMCSIMQHSILPRRS

SEQ ID NO: 127345 - protein, 15 aa, Artificial Sequence
  Description of Artificial Sequence: Synthetic peptide
  Seed: RMCSLMQGSTLPRRS
RMCSIMQHSRLPFRS

SEQ ID NO: 127346 - protein, 15 aa, Artificial Sequence
  Description of Artificial Sequence: Synthetic peptide
  Seed: RMCSLMQGSTLPRRS
RMCSIMQHSRLPLRS

SEQ ID NO: 127347 - protein, 15 aa, Artificial Sequence
  Description of Artificial Sequence: Synthetic peptide
  Seed: RMCSLMQGSTLPRRS
RMCSIMQHSRLPMRS

SEQ ID NO: 127348 - protein, 15 aa, Artificial Sequence
  Description of Artificial Sequence: Synthetic peptide
  Seed: RMCSLMQGSTLPRRS
RMCSIMQHSRLPRRS

SEQ ID NO: 127349 - protein, 15 aa, Artificial Sequence
  Description of Artificial Sequence: Synthetic peptide
  Seed: RMCSLMQGSTLPRRS
RMCSIMQHSRLPYRS

SEQ ID NO: 127350 - protein, 15 aa, Artificial Sequence
  Description of Artificial Sequence: Synthetic peptide
  Seed: RMCSLMQGSTLPRRS
RMCSIMQHSSLPLRS

SEQ ID NO: 127351 - protein, 15 aa, Artificial Sequence
  Description of Artificial Sequence: Synthetic peptide
  Seed: RMCSLMQGSTLPRRS
RMCSIMQHSSLPRRS

SEQ ID NO: 127352 - protein, 15 aa, Artificial Sequence
  Description of Artificial Sequence: Synthetic peptide
  Seed: RMCSLMQGSTLPRRS
RMCSIMQHSTLPRRS

SEQ ID NO: 127353 - protein, 15 aa, Artificial Sequence
  Description of Artificial Sequence: Synthetic peptide
  Seed: RMCSLMQGSTLPRRS
RMCSIMQHSVLPRRS

SEQ ID NO: 127354 - protein, 15 aa, Artificial Sequence
  Description of Artificial Sequence: Synthetic peptide
  Seed: RMCSLMQGSTLPRRS
RMCSIMQISALPLRS

SEQ ID NO: 127355 - protein, 15 aa, Artificial Sequence
  Description of Artificial Sequence: Synthetic peptide
  Seed: RMCSLMQGSTLPRRS
RMCSIMQISGLPIRS

SEQ ID NO: 127356 - protein, 15 aa, Artificial Sequence
  Description of Artificial Sequence: Synthetic peptide
  Seed: RMCSLMQGSTLPRRS
RMCSIMQISGLPLRS

SEQ ID NO: 127357 - protein, 15 aa, Artificial Sequence
  Description of Artificial Sequence: Synthetic peptide
  Seed: RMCSLMQGSTLPRRS
RMCSIMQISGLPVRS

SEQ ID NO: 127358 - protein, 15 aa, Artificial Sequence
  Description of Artificial Sequence: Synthetic peptide
  Seed: RMCSLMQGSTLPRRS
RMCSIMQISKLPARS

SEQ ID NO: 127359 - protein, 15 aa, Artificial Sequence
  Description of Artificial Sequence: Synthetic peptide
  Seed: RMCSLMQGSTLPRRS
RMCSIMQISKLPFRS

SEQ ID NO: 127360 - protein, 15 aa, Artificial Sequence
  Description of Artificial Sequence: Synthetic peptide
  Seed: RMCSLMQGSTLPRRS
RMCSIMQISKLPGRS

SEQ ID NO: 127361 - protein, 15 aa, Artificial Sequence
  Description of Artificial Sequence: Synthetic peptide
  Seed: RMCSLMQGSTLPRRS
RMCSIMQISKLPHRS

SEQ ID NO: 127362 - protein, 15 aa, Artificial Sequence
  Description of Artificial Sequence: Synthetic peptide
  Seed: RMCSLMQGSTLPRRS
RMCSIMQISKLPIRS

SEQ ID NO: 127363 - protein, 15 aa, Artificial Sequence
  Description of Artificial Sequence: Synthetic peptide
  Seed: RMCSLMQGSTLPRRS
RMCSIMQISKLPKRS

SEQ ID NO: 127364 - protein, 15 aa, Artificial Sequence
  Description of Artificial Sequence: Synthetic peptide
  Seed: RMCSLMQGSTLPRRS
RMCSIMQISKLPLRS

SEQ ID NO: 127365 - protein, 15 aa, Artificial Sequence
  Description of Artificial Sequence: Synthetic peptide
  Seed: RMCSLMQGSTLPRRS
RMCSIMQISKLPMRS

SEQ ID NO: 127366 - protein, 15 aa, Artificial Sequence
  Description of Artificial Sequence: Synthetic peptide
  Seed: RMCSLMQGSTLPRRS
RMCSIMQISKLPNRS

SEQ ID NO: 127367 - protein, 15 aa, Artificial Sequence
  Description of Artificial Sequence: Synthetic peptide
  Seed: RMCSLMQGSTLPRRS
RMCSIMQISKLPQRS

SEQ ID NO: 127368 - protein, 15 aa, Artificial Sequence
  Description of Artificial Sequence: Synthetic peptide
  Seed: RMCSLMQGSTLPRRS
RMCSIMQISKLPRRS

SEQ ID NO: 127369 - protein, 15 aa, Artificial Sequence
  Description of Artificial Sequence: Synthetic peptide
  Seed: RMCSLMQGSTLPRRS
RMCSIMQISKLPSRS

SEQ ID NO: 127370 - protein, 15 aa, Artificial Sequence
  Description of Artificial Sequence: Synthetic peptide
  Seed: RMCSLMQGSTLPRRS
RMCSIMQISKLPTRS

SEQ ID NO: 127371 - protein, 15 aa, Artificial Sequence
  Description of Artificial Sequence: Synthetic peptide
  Seed: RMCSLMQGSTLPRRS
RMCSIMQISKLPVRS

SEQ ID NO: 127372 - protein, 15 aa, Artificial Sequence
  Description of Artificial Sequence: Synthetic peptide
  Seed: RMCSLMQGSTLPRRS
RMCSIMQISKLPYRS

SEQ ID NO: 127373 - protein, 15 aa, Artificial Sequence
  Description of Artificial Sequence: Synthetic peptide
  Seed: RMCSLMQGSTLPRRS
RMCSIMQISNLPARS

SEQ ID NO: 127374 - protein, 15 aa, Artificial Sequence
  Description of Artificial Sequence: Synthetic peptide
  Seed: RMCSLMQGSTLPRRS
RMCSIMQISNLPGRS

SEQ ID NO: 127375 - protein, 15 aa, Artificial Sequence
  Description of Artificial Sequence: Synthetic peptide
  Seed: RMCSLMQGSTLPRRS
RMCSIMQISNLPIRS

SEQ ID NO: 127376 - protein, 15 aa, Artificial Sequence
  Description of Artificial Sequence: Synthetic peptide
  Seed: RMCSLMQGSTLPRRS
RMCSIMQISNLPLRS

SEQ ID NO: 127377 - protein, 15 aa, Artificial Sequence
  Description of Artificial Sequence: Synthetic peptide
  Seed: RMCSLMQGSTLPRRS
RMCSIMQISNLPQRS

SEQ ID NO: 127378 - protein, 15 aa, Artificial Sequence
  Description of Artificial Sequence: Synthetic peptide
  Seed: RMCSLMQGSTLPRRS
RMCSIMQISNLPSRS

SEQ ID NO: 127379 - protein, 15 aa, Artificial Sequence
  Description of Artificial Sequence: Synthetic peptide
  Seed: RMCSLMQGSTLPRRS
RMCSIMQISNLPVRS

SEQ ID NO: 127380 - protein, 15 aa, Artificial Sequence
  Description of Artificial Sequence: Synthetic peptide
  Seed: RMCSLMQGSTLPRRS
RMCSIMQISRLPARS

SEQ ID NO: 127381 - protein, 15 aa, Artificial Sequence
  Description of Artificial Sequence: Synthetic peptide
  Seed: RMCSLMQGSTLPRRS
RMCSIMQISRLPFRS

SEQ ID NO: 127382 - protein, 15 aa, Artificial Sequence
  Description of Artificial Sequence: Synthetic peptide
  Seed: RMCSLMQGSTLPRRS
RMCSIMQISRLPGRS

SEQ ID NO: 127383 - protein, 15 aa, Artificial Sequence
  Description of Artificial Sequence: Synthetic peptide
  Seed: RMCSLMQGSTLPRRS
RMCSIMQISRLPHRS

SEQ ID NO: 127384 - protein, 15 aa, Artificial Sequence
  Description of Artificial Sequence: Synthetic peptide
  Seed: RMCSLMQGSTLPRRS
RMCSIMQISRLPIRS

SEQ ID NO: 127385 - protein, 15 aa, Artificial Sequence
  Description of Artificial Sequence: Synthetic peptide
  Seed: RMCSLMQGSTLPRRS
RMCSIMQISRLPKRS

SEQ ID NO: 127386 - protein, 15 aa, Artificial Sequence
  Description of Artificial Sequence: Synthetic peptide
  Seed: RMCSLMQGSTLPRRS
RMCSIMQISRLPLRS

SEQ ID NO: 127387 - protein, 15 aa, Artificial Sequence
  Description of Artificial Sequence: Synthetic peptide
  Seed: RMCSLMQGSTLPRRS
RMCSIMQISRLPMRS

SEQ ID NO: 127388 - protein, 15 aa, Artificial Sequence
  Description of Artificial Sequence: Synthetic peptide
  Seed: RMCSLMQGSTLPRRS
RMCSIMQISRLPNRS

SEQ ID NO: 127389 - protein, 15 aa, Artificial Sequence
  Description of Artificial Sequence: Synthetic peptide
  Seed: RMCSLMQGSTLPRRS
RMCSIMQISRLPPRS

SEQ ID NO: 127390 - protein, 15 aa, Artificial Sequence
  Description of Artificial Sequence: Synthetic peptide
  Seed: RMCSLMQGSTLPRRS
RMCSIMQISRLPQRS

SEQ ID NO: 127391 - protein, 15 aa, Artificial Sequence
  Description of Artificial Sequence: Synthetic peptide
  Seed: RMCSLMQGSTLPRRS
RMCSIMQISRLPRRS

SEQ ID NO: 127392 - protein, 15 aa, Artificial Sequence
  Description of Artificial Sequence: Synthetic peptide
  Seed: RMCSLMQGSTLPRRS
RMCSIMQISRLPSRS

SEQ ID NO: 127393 - protein, 15 aa, Artificial Sequence
  Description of Artificial Sequence: Synthetic peptide
  Seed: RMCSLMQGSTLPRRS
RMCSIMQISRLPTRS

SEQ ID NO: 127394 - protein, 15 aa, Artificial Sequence
  Description of Artificial Sequence: Synthetic peptide
  Seed: RMCSLMQGSTLPRRS
RMCSIMQISRLPVRS

SEQ ID NO: 127395 - protein, 15 aa, Artificial Sequence
  Description of Artificial Sequence: Synthetic peptide
  Seed: RMCSLMQGSTLPRRS
RMCSIMQISRLPYRS

SEQ ID NO: 127396 - protein, 15 aa, Artificial Sequence
  Description of Artificial Sequence: Synthetic peptide
  Seed: RMCSLMQGSTLPRRS
RMCSIMQISSLPARS

SEQ ID NO: 127397 - protein, 15 aa, Artificial Sequence
  Description of Artificial Sequence: Synthetic peptide
  Seed: RMCSLMQGSTLPRRS
RMCSIMQISSLPGRS

SEQ ID NO: 127398 - protein, 15 aa, Artificial Sequence
  Description of Artificial Sequence: Synthetic peptide
  Seed: RMCSLMQGSTLPRRS
RMCSIMQISSLPIRS

SEQ ID NO: 127399 - protein, 15 aa, Artificial Sequence
  Description of Artificial Sequence: Synthetic peptide
  Seed: RMCSLMQGSTLPRRS
RMCSIMQISSLPLRS

SEQ ID NO: 127400 - protein, 15 aa, Artificial Sequence
  Description of Artificial Sequence: Synthetic peptide
  Seed: RMCSLMQGSTLPRRS
RMCSIMQISSLPSRS

SEQ ID NO: 127401 - protein, 15 aa, Artificial Sequence
  Description of Artificial Sequence: Synthetic peptide
  Seed: RMCSLMQGSTLPRRS
RMCSIMQISSLPVRS

SEQ ID NO: 127402 - protein, 15 aa, Artificial Sequence
  Description of Artificial Sequence: Synthetic peptide
  Seed: RMCSLMQGSTLPRRS
RMCSIMQISTLPARS

SEQ ID NO: 127403 - protein, 15 aa, Artificial Sequence
  Description of Artificial Sequence: Synthetic peptide
  Seed: RMCSLMQGSTLPRRS
RMCSIMQISTLPGRS

SEQ ID NO: 127404 - protein, 15 aa, Artificial Sequence
  Description of Artificial Sequence: Synthetic peptide
  Seed: RMCSLMQGSTLPRRS
RMCSIMQISTLPHRS

SEQ ID NO: 127405 - protein, 15 aa, Artificial Sequence
  Description of Artificial Sequence: Synthetic peptide
  Seed: RMCSLMQGSTLPRRS
RMCSIMQISTLPQRS

SEQ ID NO: 127406 - protein, 15 aa, Artificial Sequence
  Description of Artificial Sequence: Synthetic peptide
  Seed: RMCSLMQGSTLPRRS
RMCSIMQISTLPSRS

SEQ ID NO: 127407 - protein, 15 aa, Artificial Sequence
  Description of Artificial Sequence: Synthetic peptide
  Seed: RMCSLMQGSTLPRRS
RMCSIMQISTLPTRS

SEQ ID NO: 127408 - protein, 15 aa, Artificial Sequence
  Description of Artificial Sequence: Synthetic peptide
  Seed: RMCSLMQGSTLPRRS
RMCSIMQKSRLPARS

SEQ ID NO: 127409 - protein, 15 aa, Artificial Sequence
  Description of Artificial Sequence: Synthetic peptide
  Seed: RMCSLMQGSTLPRRS
RMCSIMQKSRLPFRS

SEQ ID NO: 127410 - protein, 15 aa, Artificial Sequence
  Description of Artificial Sequence: Synthetic peptide
  Seed: RMCSLMQGSTLPRRS
RMCSIMQKSRLPIRS

SEQ ID NO: 127411 - protein, 15 aa, Artificial Sequence
  Description of Artificial Sequence: Synthetic peptide
  Seed: RMCSLMQGSTLPRRS
RMCSIMQKSRLPLRS

SEQ ID NO: 127412 - protein, 15 aa, Artificial Sequence
  Description of Artificial Sequence: Synthetic peptide
  Seed: RMCSLMQGSTLPRRS
RMCSIMQKSRLPMRS

SEQ ID NO: 127413 - protein, 15 aa, Artificial Sequence
  Description of Artificial Sequence: Synthetic peptide
  Seed: RMCSLMQGSTLPRRS
RMCSIMQKSRLPVRS

SEQ ID NO: 127414 - protein, 15 aa, Artificial Sequence
  Description of Artificial Sequence: Synthetic peptide
  Seed: RMCSLMQGSTLPRRS
RMCSIMQLSKLPARS

SEQ ID NO: 127415 - protein, 15 aa, Artificial Sequence
  Description of Artificial Sequence: Synthetic peptide
  Seed: RMCSLMQGSTLPRRS
RMCSIMQLSKLPGRS

SEQ ID NO: 127416 - protein, 15 aa, Artificial Sequence
  Description of Artificial Sequence: Synthetic peptide
  Seed: RMCSLMQGSTLPRRS
RMCSIMQLSKLPHRS

SEQ ID NO: 127417 - protein, 15 aa, Artificial Sequence
  Description of Artificial Sequence: Synthetic peptide
  Seed: RMCSLMQGSTLPRRS
RMCSIMQLSKLPIRS

SEQ ID NO: 127418 - protein, 15 aa, Artificial Sequence
  Description of Artificial Sequence: Synthetic peptide
  Seed: RMCSLMQGSTLPRRS
RMCSIMQLSKLPKRS

SEQ ID NO: 127419 - protein, 15 aa, Artificial Sequence
  Description of Artificial Sequence: Synthetic peptide
  Seed: RMCSLMQGSTLPRRS
RMCSIMQLSKLPLRS

SEQ ID NO: 127420 - protein, 15 aa, Artificial Sequence
  Description of Artificial Sequence: Synthetic peptide
  Seed: RMCSLMQGSTLPRRS
RMCSIMQLSKLPMRS

SEQ ID NO: 127421 - protein, 15 aa, Artificial Sequence
  Description of Artificial Sequence: Synthetic peptide
  Seed: RMCSLMQGSTLPRRS
RMCSIMQLSKLPNRS

SEQ ID NO: 127422 - protein, 15 aa, Artificial Sequence
  Description of Artificial Sequence: Synthetic peptide
  Seed: RMCSLMQGSTLPRRS
RMCSIMQLSKLPQRS

SEQ ID NO: 127423 - protein, 15 aa, Artificial Sequence
  Description of Artificial Sequence: Synthetic peptide
  Seed: RMCSLMQGSTLPRRS
RMCSIMQLSKLPRRS

SEQ ID NO: 127424 - protein, 15 aa, Artificial Sequence
  Description of Artificial Sequence: Synthetic peptide
  Seed: RMCSLMQGSTLPRRS
RMCSIMQLSKLPSRS

SEQ ID NO: 127425 - protein, 15 aa, Artificial Sequence
  Description of Artificial Sequence: Synthetic peptide
  Seed: RMCSLMQGSTLPRRS
RMCSIMQLSKLPTRS

SEQ ID NO: 127426 - protein, 15 aa, Artificial Sequence
  Description of Artificial Sequence: Synthetic peptide
  Seed: RMCSLMQGSTLPRRS
RMCSIMQLSKLPVRS

SEQ ID NO: 127427 - protein, 15 aa, Artificial Sequence
  Description of Artificial Sequence: Synthetic peptide
  Seed: RMCSLMQGSTLPRRS
RMCSIMQLSKLPYRS

SEQ ID NO: 127428 - protein, 15 aa, Artificial Sequence
  Description of Artificial Sequence: Synthetic peptide
  Seed: RMCSLMQGSTLPRRS
RMCSIMQLSNLPARS

SEQ ID NO: 127429 - protein, 15 aa, Artificial Sequence
  Description of Artificial Sequence: Synthetic peptide
  Seed: RMCSLMQGSTLPRRS
RMCSIMQLSNLPGRS

SEQ ID NO: 127430 - protein, 15 aa, Artificial Sequence
  Description of Artificial Sequence: Synthetic peptide
  Seed: RMCSLMQGSTLPRRS
RMCSIMQLSNLPIRS

SEQ ID NO: 127431 - protein, 15 aa, Artificial Sequence
  Description of Artificial Sequence: Synthetic peptide
  Seed: RMCSLMQGSTLPRRS
RMCSIMQLSNLPLRS

SEQ ID NO: 127432 - protein, 15 aa, Artificial Sequence
  Description of Artificial Sequence: Synthetic peptide
  Seed: RMCSLMQGSTLPRRS
RMCSIMQLSNLPSRS

SEQ ID NO: 127433 - protein, 15 aa, Artificial Sequence
  Description of Artificial Sequence: Synthetic peptide
  Seed: RMCSLMQGSTLPRRS
RMCSIMQLSNLPVRS

SEQ ID NO: 127434 - protein, 15 aa, Artificial Sequence
  Description of Artificial Sequence: Synthetic peptide
  Seed: RMCSLMQGSTLPRRS
RMCSIMQLSRLPARS

SEQ ID NO: 127435 - protein, 15 aa, Artificial Sequence
  Description of Artificial Sequence: Synthetic peptide
  Seed: RMCSLMQGSTLPRRS
RMCSIMQLSRLPFRS

SEQ ID NO: 127436 - protein, 15 aa, Artificial Sequence
  Description of Artificial Sequence: Synthetic peptide
  Seed: RMCSLMQGSTLPRRS
RMCSIMQLSRLPGRS

SEQ ID NO: 127437 - protein, 15 aa, Artificial Sequence
  Description of Artificial Sequence: Synthetic peptide
  Seed: RMCSLMQGSTLPRRS
RMCSIMQLSRLPHRS

SEQ ID NO: 127438 - protein, 15 aa, Artificial Sequence
  Description of Artificial Sequence: Synthetic peptide
  Seed: RMCSLMQGSTLPRRS
RMCSIMQLSRLPIRS

SEQ ID NO: 127439 - protein, 15 aa, Artificial Sequence
  Description of Artificial Sequence: Synthetic peptide
  Seed: RMCSLMQGSTLPRRS
RMCSIMQLSRLPKRS

SEQ ID NO: 127440 - protein, 15 aa, Artificial Sequence
  Description of Artificial Sequence: Synthetic peptide
  Seed: RMCSLMQGSTLPRRS
RMCSIMQLSRLPLRS

SEQ ID NO: 127441 - protein, 15 aa, Artificial Sequence
  Description of Artificial Sequence: Synthetic peptide
  Seed: RMCSLMQGSTLPRRS
RMCSIMQLSRLPMRS

SEQ ID NO: 127442 - protein, 15 aa, Artificial Sequence
  Description of Artificial Sequence: Synthetic peptide
  Seed: RMCSLMQGSTLPRRS
RMCSIMQLSRLPNRS

SEQ ID NO: 127443 - protein, 15 aa, Artificial Sequence
  Description of Artificial Sequence: Synthetic peptide
  Seed: RMCSLMQGSTLPRRS
RMCSIMQLSRLPPRS

SEQ ID NO: 127444 - protein, 15 aa, Artificial Sequence
  Description of Artificial Sequence: Synthetic peptide
  Seed: RMCSLMQGSTLPRRS
RMCSIMQLSRLPQRS

SEQ ID NO: 127445 - protein, 15 aa, Artificial Sequence
  Description of Artificial Sequence: Synthetic peptide
  Seed: RMCSLMQGSTLPRRS
RMCSIMQLSRLPRRS

SEQ ID NO: 127446 - protein, 15 aa, Artificial Sequence
  Description of Artificial Sequence: Synthetic peptide
  Seed: RMCSLMQGSTLPRRS
RMCSIMQLSRLPSRS

SEQ ID NO: 127447 - protein, 15 aa, Artificial Sequence
  Description of Artificial Sequence: Synthetic peptide
  Seed: RMCSLMQGSTLPRRS
RMCSIMQLSRLPTRS

SEQ ID NO: 127448 - protein, 15 aa, Artificial Sequence
  Description of Artificial Sequence: Synthetic peptide
  Seed: RMCSLMQGSTLPRRS
RMCSIMQLSRLPVRS

SEQ ID NO: 127449 - protein, 15 aa, Artificial Sequence
  Description of Artificial Sequence: Synthetic peptide
  Seed: RMCSLMQGSTLPRRS
RMCSIMQLSRLPYRS

SEQ ID NO: 127450 - protein, 15 aa, Artificial Sequence
  Description of Artificial Sequence: Synthetic peptide
  Seed: RMCSLMQGSTLPRRS
RMCSIMQLSSLPARS

SEQ ID NO: 127451 - protein, 15 aa, Artificial Sequence
  Description of Artificial Sequence: Synthetic peptide
  Seed: RMCSLMQGSTLPRRS
RMCSIMQLSSLPGRS

SEQ ID NO: 127452 - protein, 15 aa, Artificial Sequence
  Description of Artificial Sequence: Synthetic peptide
  Seed: RMCSLMQGSTLPRRS
RMCSIMQLSSLPIRS

SEQ ID NO: 127453 - protein, 15 aa, Artificial Sequence
  Description of Artificial Sequence: Synthetic peptide
  Seed: RMCSLMQGSTLPRRS
RMCSIMQLSSLPLRS

SEQ ID NO: 127454 - protein, 15 aa, Artificial Sequence
  Description of Artificial Sequence: Synthetic peptide
  Seed: RMCSLMQGSTLPRRS
RMCSIMQLSSLPSRS

SEQ ID NO: 127455 - protein, 15 aa, Artificial Sequence
  Description of Artificial Sequence: Synthetic peptide
  Seed: RMCSLMQGSTLPRRS
RMCSIMQLSSLPVRS

SEQ ID NO: 127456 - protein, 15 aa, Artificial Sequence
  Description of Artificial Sequence: Synthetic peptide
  Seed: RMCSLMQGSTLPRRS
RMCSIMQLSTLPARS

SEQ ID NO: 127457 - protein, 15 aa, Artificial Sequence
  Description of Artificial Sequence: Synthetic peptide
  Seed: RMCSLMQGSTLPRRS
RMCSIMQLSTLPGRS

SEQ ID NO: 127458 - protein, 15 aa, Artificial Sequence
  Description of Artificial Sequence: Synthetic peptide
  Seed: RMCSLMQGSTLPRRS
RMCSIMQLSTLPQRS

SEQ ID NO: 127459 - protein, 15 aa, Artificial Sequence
  Description of Artificial Sequence: Synthetic peptide
  Seed: RMCSLMQGSTLPRRS
RMCSIMQLSTLPSRS

SEQ ID NO: 127460 - protein, 15 aa, Artificial Sequence
  Description of Artificial Sequence: Synthetic peptide
  Seed: RMCSLMQGSTLPRRS
RMCSIMQLSTLPTRS

SEQ ID NO: 127461 - protein, 15 aa, Artificial Sequence
  Description of Artificial Sequence: Synthetic peptide
  Seed: RMCSLMQGSTLPRRS
RMCSIMQMSALPLRS

SEQ ID NO: 127462 - protein, 15 aa, Artificial Sequence
  Description of Artificial Sequence: Synthetic peptide
  Seed: RMCSLMQGSTLPRRS
RMCSIMQMSGLPLRS

SEQ ID NO: 127463 - protein, 15 aa, Artificial Sequence
  Description of Artificial Sequence: Synthetic peptide
  Seed: RMCSLMQGSTLPRRS
RMCSIMQMSKLPARS

SEQ ID NO: 127464 - protein, 15 aa, Artificial Sequence
  Description of Artificial Sequence: Synthetic peptide
  Seed: RMCSLMQGSTLPRRS
RMCSIMQMSKLPFRS

SEQ ID NO: 127465 - protein, 15 aa, Artificial Sequence
  Description of Artificial Sequence: Synthetic peptide
  Seed: RMCSLMQGSTLPRRS
RMCSIMQMSKLPGRS

SEQ ID NO: 127466 - protein, 15 aa, Artificial Sequence
  Description of Artificial Sequence: Synthetic peptide
  Seed: RMCSLMQGSTLPRRS
RMCSIMQMSKLPHRS

SEQ ID NO: 127467 - protein, 15 aa, Artificial Sequence
  Description of Artificial Sequence: Synthetic peptide
  Seed: RMCSLMQGSTLPRRS
RMCSIMQMSKLPIRS

SEQ ID NO: 127468 - protein, 15 aa, Artificial Sequence
  Description of Artificial Sequence: Synthetic peptide
  Seed: RMCSLMQGSTLPRRS
RMCSIMQMSKLPKRS

SEQ ID NO: 127469 - protein, 15 aa, Artificial Sequence
  Description of Artificial Sequence: Synthetic peptide
  Seed: RMCSLMQGSTLPRRS
RMCSIMQMSKLPLRS

SEQ ID NO: 127470 - protein, 15 aa, Artificial Sequence
  Description of Artificial Sequence: Synthetic peptide
  Seed: RMCSLMQGSTLPRRS
RMCSIMQMSKLPMRS

SEQ ID NO: 127471 - protein, 15 aa, Artificial Sequence
  Description of Artificial Sequence: Synthetic peptide
  Seed: RMCSLMQGSTLPRRS
RMCSIMQMSKLPNRS

SEQ ID NO: 127472 - protein, 15 aa, Artificial Sequence
  Description of Artificial Sequence: Synthetic peptide
  Seed: RMCSLMQGSTLPRRS
RMCSIMQMSKLPPRS

SEQ ID NO: 127473 - protein, 15 aa, Artificial Sequence
  Description of Artificial Sequence: Synthetic peptide
  Seed: RMCSLMQGSTLPRRS
RMCSIMQMSKLPQRS

SEQ ID NO: 127474 - protein, 15 aa, Artificial Sequence
  Description of Artificial Sequence: Synthetic peptide
  Seed: RMCSLMQGSTLPRRS
RMCSIMQMSKLPRRS

SEQ ID NO: 127475 - protein, 15 aa, Artificial Sequence
  Description of Artificial Sequence: Synthetic peptide
  Seed: RMCSLMQGSTLPRRS
RMCSIMQMSKLPSRS

SEQ ID NO: 127476 - protein, 15 aa, Artificial Sequence
  Description of Artificial Sequence: Synthetic peptide
  Seed: RMCSLMQGSTLPRRS
RMCSIMQMSKLPTRS

SEQ ID NO: 127477 - protein, 15 aa, Artificial Sequence
  Description of Artificial Sequence: Synthetic peptide
  Seed: RMCSLMQGSTLPRRS
RMCSIMQMSKLPVRS

SEQ ID NO: 127478 - protein, 15 aa, Artificial Sequence
  Description of Artificial Sequence: Synthetic peptide
  Seed: RMCSLMQGSTLPRRS
RMCSIMQMSKLPYRS

SEQ ID NO: 127479 - protein, 15 aa, Artificial Sequence
  Description of Artificial Sequence: Synthetic peptide
  Seed: RMCSLMQGSTLPRRS
RMCSIMQMSNLPARS

SEQ ID NO: 127480 - protein, 15 aa, Artificial Sequence
  Description of Artificial Sequence: Synthetic peptide
  Seed: RMCSLMQGSTLPRRS
RMCSIMQMSNLPGRS

SEQ ID NO: 127481 - protein, 15 aa, Artificial Sequence
  Description of Artificial Sequence: Synthetic peptide
  Seed: RMCSLMQGSTLPRRS
RMCSIMQMSNLPHRS

SEQ ID NO: 127482 - protein, 15 aa, Artificial Sequence
  Description of Artificial Sequence: Synthetic peptide
  Seed: RMCSLMQGSTLPRRS
RMCSIMQMSNLPIRS

SEQ ID NO: 127483 - protein, 15 aa, Artificial Sequence
  Description of Artificial Sequence: Synthetic peptide
  Seed: RMCSLMQGSTLPRRS
RMCSIMQMSNLPLRS

SEQ ID NO: 127484 - protein, 15 aa, Artificial Sequence
  Description of Artificial Sequence: Synthetic peptide
  Seed: RMCSLMQGSTLPRRS
RMCSIMQMSNLPMRS

SEQ ID NO: 127485 - protein, 15 aa, Artificial Sequence
  Description of Artificial Sequence: Synthetic peptide
  Seed: RMCSLMQGSTLPRRS
RMCSIMQMSNLPQRS

SEQ ID NO: 127486 - protein, 15 aa, Artificial Sequence
  Description of Artificial Sequence: Synthetic peptide
  Seed: RMCSLMQGSTLPRRS
RMCSIMQMSNLPSRS

SEQ ID NO: 127487 - protein, 15 aa, Artificial Sequence
  Description of Artificial Sequence: Synthetic peptide
  Seed: RMCSLMQGSTLPRRS
RMCSIMQMSNLPTRS

SEQ ID NO: 127488 - protein, 15 aa, Artificial Sequence
  Description of Artificial Sequence: Synthetic peptide
  Seed: RMCSLMQGSTLPRRS
RMCSIMQMSNLPVRS

SEQ ID NO: 127489 - protein, 15 aa, Artificial Sequence
  Description of Artificial Sequence: Synthetic peptide
  Seed: RMCSLMQGSTLPRRS
RMCSIMQMSRLPARS

SEQ ID NO: 127490 - protein, 15 aa, Artificial Sequence
  Description of Artificial Sequence: Synthetic peptide
  Seed: RMCSLMQGSTLPRRS
RMCSIMQMSRLPFRS

SEQ ID NO: 127491 - protein, 15 aa, Artificial Sequence
  Description of Artificial Sequence: Synthetic peptide
  Seed: RMCSLMQGSTLPRRS
RMCSIMQMSRLPGRS

SEQ ID NO: 127492 - protein, 15 aa, Artificial Sequence
  Description of Artificial Sequence: Synthetic peptide
  Seed: RMCSLMQGSTLPRRS
RMCSIMQMSRLPHRS

SEQ ID NO: 127493 - protein, 15 aa, Artificial Sequence
  Description of Artificial Sequence: Synthetic peptide
  Seed: RMCSLMQGSTLPRRS
RMCSIMQMSRLPIRS

SEQ ID NO: 127494 - protein, 15 aa, Artificial Sequence
  Description of Artificial Sequence: Synthetic peptide
  Seed: RMCSLMQGSTLPRRS
RMCSIMQMSRLPKRS

SEQ ID NO: 127495 - protein, 15 aa, Artificial Sequence
  Description of Artificial Sequence: Synthetic peptide
  Seed: RMCSLMQGSTLPRRS
RMCSIMQMSRLPLRS

SEQ ID NO: 127496 - protein, 15 aa, Artificial Sequence
  Description of Artificial Sequence: Synthetic peptide
  Seed: RMCSLMQGSTLPRRS
RMCSIMQMSRLPMRS

SEQ ID NO: 127497 - protein, 15 aa, Artificial Sequence
  Description of Artificial Sequence: Synthetic peptide
  Seed: RMCSLMQGSTLPRRS
RMCSIMQMSRLPNRS

SEQ ID NO: 127498 - protein, 15 aa, Artificial Sequence
  Description of Artificial Sequence: Synthetic peptide
  Seed: RMCSLMQGSTLPRRS
RMCSIMQMSRLPPRS

SEQ ID NO: 127499 - protein, 15 aa, Artificial Sequence
  Description of Artificial Sequence: Synthetic peptide
  Seed: RMCSLMQGSTLPRRS
RMCSIMQMSRLPQRS

SEQ ID NO: 127500 - protein, 15 aa, Artificial Sequence
  Description of Artificial Sequence: Synthetic peptide
  Seed: RMCSLMQGSTLPRRS
RMCSIMQMSRLPRRS

SEQ ID NO: 127501 - protein, 15 aa, Artificial Sequence
  Description of Artificial Sequence: Synthetic peptide
  Seed: RMCSLMQGSTLPRRS
RMCSIMQMSRLPSRS

SEQ ID NO: 127502 - protein, 15 aa, Artificial Sequence
  Description of Artificial Sequence: Synthetic peptide
  Seed: RMCSLMQGSTLPRRS
RMCSIMQMSRLPTRS

SEQ ID NO: 127503 - protein, 15 aa, Artificial Sequence
  Description of Artificial Sequence: Synthetic peptide
  Seed: RMCSLMQGSTLPRRS
RMCSIMQMSRLPVRS

SEQ ID NO: 127504 - protein, 15 aa, Artificial Sequence
  Description of Artificial Sequence: Synthetic peptide
  Seed: RMCSLMQGSTLPRRS
RMCSIMQMSRLPYRS

SEQ ID NO: 127505 - protein, 15 aa, Artificial Sequence
  Description of Artificial Sequence: Synthetic peptide
  Seed: RMCSLMQGSTLPRRS
RMCSIMQMSSLPARS

SEQ ID NO: 127506 - protein, 15 aa, Artificial Sequence
  Description of Artificial Sequence: Synthetic peptide
  Seed: RMCSLMQGSTLPRRS
RMCSIMQMSSLPGRS

SEQ ID NO: 127507 - protein, 15 aa, Artificial Sequence
  Description of Artificial Sequence: Synthetic peptide
  Seed: RMCSLMQGSTLPRRS
RMCSIMQMSSLPHRS

SEQ ID NO: 127508 - protein, 15 aa, Artificial Sequence
  Description of Artificial Sequence: Synthetic peptide
  Seed: RMCSLMQGSTLPRRS
RMCSIMQMSSLPIRS

SEQ ID NO: 127509 - protein, 15 aa, Artificial Sequence
  Description of Artificial Sequence: Synthetic peptide
  Seed: RMCSLMQGSTLPRRS
RMCSIMQMSSLPLRS

SEQ ID NO: 127510 - protein, 15 aa, Artificial Sequence
  Description of Artificial Sequence: Synthetic peptide
  Seed: RMCSLMQGSTLPRRS
RMCSIMQMSSLPQRS

SEQ ID NO: 127511 - protein, 15 aa, Artificial Sequence
  Description of Artificial Sequence: Synthetic peptide
  Seed: RMCSLMQGSTLPRRS
RMCSIMQMSSLPSRS

SEQ ID NO: 127512 - protein, 15 aa, Artificial Sequence
  Description of Artificial Sequence: Synthetic peptide
  Seed: RMCSLMQGSTLPRRS
RMCSIMQMSSLPTRS

SEQ ID NO: 127513 - protein, 15 aa, Artificial Sequence
  Description of Artificial Sequence: Synthetic peptide
  Seed: RMCSLMQGSTLPRRS
RMCSIMQMSSLPVRS

SEQ ID NO: 127514 - protein, 15 aa, Artificial Sequence
  Description of Artificial Sequence: Synthetic peptide
  Seed: RMCSLMQGSTLPRRS
RMCSIMQMSTLPARS

SEQ ID NO: 127515 - protein, 15 aa, Artificial Sequence
  Description of Artificial Sequence: Synthetic peptide
  Seed: RMCSLMQGSTLPRRS
RMCSIMQMSTLPGRS

SEQ ID NO: 127516 - protein, 15 aa, Artificial Sequence
  Description of Artificial Sequence: Synthetic peptide
  Seed: RMCSLMQGSTLPRRS
RMCSIMQMSTLPHRS

SEQ ID NO: 127517 - protein, 15 aa, Artificial Sequence
  Description of Artificial Sequence: Synthetic peptide
  Seed: RMCSLMQGSTLPRRS
RMCSIMQMSTLPMRS

SEQ ID NO: 127518 - protein, 15 aa, Artificial Sequence
  Description of Artificial Sequence: Synthetic peptide
  Seed: RMCSLMQGSTLPRRS
RMCSIMQMSTLPQRS

SEQ ID NO: 127519 - protein, 15 aa, Artificial Sequence
  Description of Artificial Sequence: Synthetic peptide
  Seed: RMCSLMQGSTLPRRS
RMCSIMQMSTLPSRS

SEQ ID NO: 127520 - protein, 15 aa, Artificial Sequence
  Description of Artificial Sequence: Synthetic peptide
  Seed: RMCSLMQGSTLPRRS
RMCSIMQMSTLPTRS

SEQ ID NO: 127521 - protein, 15 aa, Artificial Sequence
  Description of Artificial Sequence: Synthetic peptide
  Seed: RMCSLMQGSTLPRRS
RMCSIMQMSTLPVRS

SEQ ID NO: 127522 - protein, 15 aa, Artificial Sequence
  Description of Artificial Sequence: Synthetic peptide
  Seed: RMCSLMQGSTLPRRS
RMCSIMQMSVLPARS

SEQ ID NO: 127523 - protein, 15 aa, Artificial Sequence
  Description of Artificial Sequence: Synthetic peptide
  Seed: RMCSLMQGSTLPRRS
RMCSIMQMSVLPSRS

SEQ ID NO: 127524 - protein, 15 aa, Artificial Sequence
  Description of Artificial Sequence: Synthetic peptide
  Seed: RMCSLMQGSTLPRRS
RMCSIMQQSRLPARS

SEQ ID NO: 127525 - protein, 15 aa, Artificial Sequence
  Description of Artificial Sequence: Synthetic peptide
  Seed: RMCSLMQGSTLPRRS
RMCSIMQQSRLPSRS

SEQ ID NO: 127526 - protein, 15 aa, Artificial Sequence
  Description of Artificial Sequence: Synthetic peptide
  Seed: RMCSLMQGSTLPRRS
RMCSIMQRSALPRRS

SEQ ID NO: 127527 - protein, 15 aa, Artificial Sequence
  Description of Artificial Sequence: Synthetic peptide
  Seed: RMCSLMQGSTLPRRS
RMCSIMQRSALPYRS

SEQ ID NO: 127528 - protein, 15 aa, Artificial Sequence
  Description of Artificial Sequence: Synthetic peptide
  Seed: RMCSLMQGSTLPRRS
RMCSIMQRSKLPFRS

SEQ ID NO: 127529 - protein, 15 aa, Artificial Sequence
  Description of Artificial Sequence: Synthetic peptide
  Seed: RMCSLMQGSTLPRRS
RMCSIMQRSKLPLRS

SEQ ID NO: 127530 - protein, 15 aa, Artificial Sequence
  Description of Artificial Sequence: Synthetic peptide
  Seed: RMCSLMQGSTLPRRS
RMCSIMQRSKLPMRS

SEQ ID NO: 127531 - protein, 15 aa, Artificial Sequence
  Description of Artificial Sequence: Synthetic peptide
  Seed: RMCSLMQGSTLPRRS
RMCSIMQRSKLPYRS

SEQ ID NO: 127532 - protein, 15 aa, Artificial Sequence
  Description of Artificial Sequence: Synthetic peptide
  Seed: RMCSLMQGSTLPRRS
RMCSIMQRSRLPARS

SEQ ID NO: 127533 - protein, 15 aa, Artificial Sequence
  Description of Artificial Sequence: Synthetic peptide
  Seed: RMCSLMQGSTLPRRS
RMCSIMQRSRLPFRS

SEQ ID NO: 127534 - protein, 15 aa, Artificial Sequence
  Description of Artificial Sequence: Synthetic peptide
  Seed: RMCSLMQGSTLPRRS
RMCSIMQRSRLPIRS

SEQ ID NO: 127535 - protein, 15 aa, Artificial Sequence
  Description of Artificial Sequence: Synthetic peptide
  Seed: RMCSLMQGSTLPRRS
RMCSIMQRSRLPLRS

SEQ ID NO: 127536 - protein, 15 aa, Artificial Sequence
  Description of Artificial Sequence: Synthetic peptide
  Seed: RMCSLMQGSTLPRRS
RMCSIMQRSRLPMRS

SEQ ID NO: 127537 - protein, 15 aa, Artificial Sequence
  Description of Artificial Sequence: Synthetic peptide
  Seed: RMCSLMQGSTLPRRS
RMCSIMQRSRLPRRS

SEQ ID NO: 127538 - protein, 15 aa, Artificial Sequence
  Description of Artificial Sequence: Synthetic peptide
  Seed: RMCSLMQGSTLPRRS
RMCSIMQRSRLPSRS

SEQ ID NO: 127539 - protein, 15 aa, Artificial Sequence
  Description of Artificial Sequence: Synthetic peptide
  Seed: RMCSLMQGSTLPRRS
RMCSIMQRSRLPVRS

SEQ ID NO: 127540 - protein, 15 aa, Artificial Sequence
  Description of Artificial Sequence: Synthetic peptide
  Seed: RMCSLMQGSTLPRRS
RMCSIMQRSRLPYRS

SEQ ID NO: 127541 - protein, 15 aa, Artificial Sequence
  Description of Artificial Sequence: Synthetic peptide
  Seed: RMCSLMQGSTLPRRS
RMCSIMQSSRLPFRS

SEQ ID NO: 127542 - protein, 15 aa, Artificial Sequence
  Description of Artificial Sequence: Synthetic peptide
  Seed: RMCSLMQGSTLPRRS
RMCSIMQSSRLPLRS

SEQ ID NO: 127543 - protein, 15 aa, Artificial Sequence
  Description of Artificial Sequence: Synthetic peptide
  Seed: RMCSLMQGSTLPRRS
RMCSIMQSSRLPRRS

SEQ ID NO: 127544 - protein, 15 aa, Artificial Sequence
  Description of Artificial Sequence: Synthetic peptide
  Seed: RMCSLMQGSTLPRRS
RMCSIMQSSRLPSRS

SEQ ID NO: 127545 - protein, 15 aa, Artificial Sequence
  Description of Artificial Sequence: Synthetic peptide
  Seed: RMCSLMQGSTLPRRS
RMCSIMQSSRLPYRS

SEQ ID NO: 127546 - protein, 15 aa, Artificial Sequence
  Description of Artificial Sequence: Synthetic peptide
  Seed: RMCSLMQGSTLPRRS
RMCSIMQTSRLPARS

SEQ ID NO: 127547 - protein, 15 aa, Artificial Sequence
  Description of Artificial Sequence: Synthetic peptide
  Seed: RMCSLMQGSTLPRRS
RMCSIMQTSRLPSRS

SEQ ID NO: 127548 - protein, 15 aa, Artificial Sequence
  Description of Artificial Sequence: Synthetic peptide
  Seed: RMCSLMQGSTLPRRS
RMCSIMQTSRLPYRS

SEQ ID NO: 127549 - protein, 15 aa, Artificial Sequence
  Description of Artificial Sequence: Synthetic peptide
  Seed: RMCSLMQGSTLPRRS
RMCSIMQVSKLPARS

SEQ ID NO: 127550 - protein, 15 aa, Artificial Sequence
  Description of Artificial Sequence: Synthetic peptide
  Seed: RMCSLMQGSTLPRRS
RMCSIMQVSKLPFRS

SEQ ID NO: 127551 - protein, 15 aa, Artificial Sequence
  Description of Artificial Sequence: Synthetic peptide
  Seed: RMCSLMQGSTLPRRS
RMCSIMQVSKLPGRS

SEQ ID NO: 127552 - protein, 15 aa, Artificial Sequence
  Description of Artificial Sequence: Synthetic peptide
  Seed: RMCSLMQGSTLPRRS
RMCSIMQVSKLPHRS

SEQ ID NO: 127553 - protein, 15 aa, Artificial Sequence
  Description of Artificial Sequence: Synthetic peptide
  Seed: RMCSLMQGSTLPRRS
RMCSIMQVSKLPKRS

SEQ ID NO: 127554 - protein, 15 aa, Artificial Sequence
  Description of Artificial Sequence: Synthetic peptide
  Seed: RMCSLMQGSTLPRRS
RMCSIMQVSKLPMRS

SEQ ID NO: 127555 - protein, 15 aa, Artificial Sequence
  Description of Artificial Sequence: Synthetic peptide
  Seed: RMCSLMQGSTLPRRS
RMCSIMQVSKLPQRS

SEQ ID NO: 127556 - protein, 15 aa, Artificial Sequence
  Description of Artificial Sequence: Synthetic peptide
  Seed: RMCSLMQGSTLPRRS
RMCSIMQVSKLPRRS

SEQ ID NO: 127557 - protein, 15 aa, Artificial Sequence
  Description of Artificial Sequence: Synthetic peptide
  Seed: RMCSLMQGSTLPRRS
RMCSIMQVSKLPSRS

SEQ ID NO: 127558 - protein, 15 aa, Artificial Sequence
  Description of Artificial Sequence: Synthetic peptide
  Seed: RMCSLMQGSTLPRRS
RMCSIMQVSKLPTRS

SEQ ID NO: 127559 - protein, 15 aa, Artificial Sequence
  Description of Artificial Sequence: Synthetic peptide
  Seed: RMCSLMQGSTLPRRS
RMCSIMQVSKLPYRS

SEQ ID NO: 127560 - protein, 15 aa, Artificial Sequence
  Description of Artificial Sequence: Synthetic peptide
  Seed: RMCSLMQGSTLPRRS
RMCSIMQVSNLPARS

SEQ ID NO: 127561 - protein, 15 aa, Artificial Sequence
  Description of Artificial Sequence: Synthetic peptide
  Seed: RMCSLMQGSTLPRRS
RMCSIMQVSNLPIRS

SEQ ID NO: 127562 - protein, 15 aa, Artificial Sequence
  Description of Artificial Sequence: Synthetic peptide
  Seed: RMCSLMQGSTLPRRS
RMCSIMQVSNLPLRS

SEQ ID NO: 127563 - protein, 15 aa, Artificial Sequence
  Description of Artificial Sequence: Synthetic peptide
  Seed: RMCSLMQGSTLPRRS
RMCSIMQVSNLPSRS

SEQ ID NO: 127564 - protein, 15 aa, Artificial Sequence
  Description of Artificial Sequence: Synthetic peptide
  Seed: RMCSLMQGSTLPRRS
RMCSIMQVSNLPVRS

SEQ ID NO: 127565 - protein, 15 aa, Artificial Sequence
  Description of Artificial Sequence: Synthetic peptide
  Seed: RMCSLMQGSTLPRRS
RMCSIMQVSRLPARS

SEQ ID NO: 127566 - protein, 15 aa, Artificial Sequence
  Description of Artificial Sequence: Synthetic peptide
  Seed: RMCSLMQGSTLPRRS
RMCSIMQVSRLPFRS

SEQ ID NO: 127567 - protein, 15 aa, Artificial Sequence
  Description of Artificial Sequence: Synthetic peptide
  Seed: RMCSLMQGSTLPRRS
RMCSIMQVSRLPGRS

SEQ ID NO: 127568 - protein, 15 aa, Artificial Sequence
  Description of Artificial Sequence: Synthetic peptide
  Seed: RMCSLMQGSTLPRRS
RMCSIMQVSRLPHRS

SEQ ID NO: 127569 - protein, 15 aa, Artificial Sequence
  Description of Artificial Sequence: Synthetic peptide
  Seed: RMCSLMQGSTLPRRS
RMCSIMQVSRLPIRS

SEQ ID NO: 127570 - protein, 15 aa, Artificial Sequence
  Description of Artificial Sequence: Synthetic peptide
  Seed: RMCSLMQGSTLPRRS
RMCSIMQVSRLPKRS

SEQ ID NO: 127571 - protein, 15 aa, Artificial Sequence
  Description of Artificial Sequence: Synthetic peptide
  Seed: RMCSLMQGSTLPRRS
RMCSIMQVSRLPLRS

SEQ ID NO: 127572 - protein, 15 aa, Artificial Sequence
  Description of Artificial Sequence: Synthetic peptide
  Seed: RMCSLMQGSTLPRRS
RMCSIMQVSRLPMRS

SEQ ID NO: 127573 - protein, 15 aa, Artificial Sequence
  Description of Artificial Sequence: Synthetic peptide
  Seed: RMCSLMQGSTLPRRS
RMCSIMQVSRLPNRS

SEQ ID NO: 127574 - protein, 15 aa, Artificial Sequence
  Description of Artificial Sequence: Synthetic peptide
  Seed: RMCSLMQGSTLPRRS
RMCSIMQVSRLPQRS

SEQ ID NO: 127575 - protein, 15 aa, Artificial Sequence
  Description of Artificial Sequence: Synthetic peptide
  Seed: RMCSLMQGSTLPRRS
RMCSIMQVSRLPRRS

SEQ ID NO: 127576 - protein, 15 aa, Artificial Sequence
  Description of Artificial Sequence: Synthetic peptide
  Seed: RMCSLMQGSTLPRRS
RMCSIMQVSRLPSRS

SEQ ID NO: 127577 - protein, 15 aa, Artificial Sequence
  Description of Artificial Sequence: Synthetic peptide
  Seed: RMCSLMQGSTLPRRS
RMCSIMQVSRLPTRS

SEQ ID NO: 127578 - protein, 15 aa, Artificial Sequence
  Description of Artificial Sequence: Synthetic peptide
  Seed: RMCSLMQGSTLPRRS
RMCSIMQVSRLPVRS

SEQ ID NO: 127579 - protein, 15 aa, Artificial Sequence
  Description of Artificial Sequence: Synthetic peptide
  Seed: RMCSLMQGSTLPRRS
RMCSIMQVSRLPYRS

SEQ ID NO: 127580 - protein, 15 aa, Artificial Sequence
  Description of Artificial Sequence: Synthetic peptide
  Seed: RMCSLMQGSTLPRRS
RMCSIMQVSSLPARS

SEQ ID NO: 127581 - protein, 15 aa, Artificial Sequence
  Description of Artificial Sequence: Synthetic peptide
  Seed: RMCSLMQGSTLPRRS
RMCSIMQVSSLPIRS

SEQ ID NO: 127582 - protein, 15 aa, Artificial Sequence
  Description of Artificial Sequence: Synthetic peptide
  Seed: RMCSLMQGSTLPRRS
RMCSIMQVSSLPLRS

SEQ ID NO: 127583 - protein, 15 aa, Artificial Sequence
  Description of Artificial Sequence: Synthetic peptide
  Seed: RMCSLMQGSTLPRRS
RMCSIMQVSSLPSRS

SEQ ID NO: 127584 - protein, 15 aa, Artificial Sequence
  Description of Artificial Sequence: Synthetic peptide
  Seed: RMCSLMQGSTLPRRS
RMCSIMQVSSLPVRS

SEQ ID NO: 127585 - protein, 15 aa, Artificial Sequence
  Description of Artificial Sequence: Synthetic peptide
  Seed: RMCSLMQGSTLPRRS
RMCSIMQVSTLPARS

SEQ ID NO: 127586 - protein, 15 aa, Artificial Sequence
  Description of Artificial Sequence: Synthetic peptide
  Seed: RMCSLMQGSTLPRRS
RMCSIMQVSTLPGRS

SEQ ID NO: 127587 - protein, 15 aa, Artificial Sequence
  Description of Artificial Sequence: Synthetic peptide
  Seed: RMCSLMQGSTLPRRS
RMCSIMQVSTLPSRS

SEQ ID NO: 127588 - protein, 15 aa, Artificial Sequence
  Description of Artificial Sequence: Synthetic peptide
  Seed: RMCSLMQGSTLPRRS
RMCSIMQWSALPARS

SEQ ID NO: 127589 - protein, 15 aa, Artificial Sequence
  Description of Artificial Sequence: Synthetic peptide
  Seed: RMCSLMQGSTLPRRS
RMCSIMQWSALPIRS

SEQ ID NO: 127590 - protein, 15 aa, Artificial Sequence
  Description of Artificial Sequence: Synthetic peptide
  Seed: RMCSLMQGSTLPRRS
RMCSIMQWSALPLRS

SEQ ID NO: 127591 - protein, 15 aa, Artificial Sequence
  Description of Artificial Sequence: Synthetic peptide
  Seed: RMCSLMQGSTLPRRS
RMCSIMQWSALPMRS

SEQ ID NO: 127592 - protein, 15 aa, Artificial Sequence
  Description of Artificial Sequence: Synthetic peptide
  Seed: RMCSLMQGSTLPRRS
RMCSIMQWSALPVRS

SEQ ID NO: 127593 - protein, 15 aa, Artificial Sequence
  Description of Artificial Sequence: Synthetic peptide
  Seed: RMCSLMQGSTLPRRS
RMCSIMQWSGLPIRS

SEQ ID NO: 127594 - protein, 15 aa, Artificial Sequence
  Description of Artificial Sequence: Synthetic peptide
  Seed: RMCSLMQGSTLPRRS
RMCSIMQWSGLPLRS

SEQ ID NO: 127595 - protein, 15 aa, Artificial Sequence
  Description of Artificial Sequence: Synthetic peptide
  Seed: RMCSLMQGSTLPRRS
RMCSIMQWSGLPVRS

SEQ ID NO: 127596 - protein, 15 aa, Artificial Sequence
  Description of Artificial Sequence: Synthetic peptide
  Seed: RMCSLMQGSTLPRRS
RMCSIMQWSKLPFRS

SEQ ID NO: 127597 - protein, 15 aa, Artificial Sequence
  Description of Artificial Sequence: Synthetic peptide
  Seed: RMCSLMQGSTLPRRS
RMCSIMQWSKLPLRS

SEQ ID NO: 127598 - protein, 15 aa, Artificial Sequence
  Description of Artificial Sequence: Synthetic peptide
  Seed: RMCSLMQGSTLPRRS
RMCSIMQWSKLPYRS

SEQ ID NO: 127599 - protein, 15 aa, Artificial Sequence
  Description of Artificial Sequence: Synthetic peptide
  Seed: RMCSLMQGSTLPRRS
RMCSIMQWSNLPARS

SEQ ID NO: 127600 - protein, 15 aa, Artificial Sequence
  Description of Artificial Sequence: Synthetic peptide
  Seed: RMCSLMQGSTLPRRS
RMCSIMQWSNLPFRS

SEQ ID NO: 127601 - protein, 15 aa, Artificial Sequence
  Description of Artificial Sequence: Synthetic peptide
  Seed: RMCSLMQGSTLPRRS
RMCSIMQWSNLPIRS

SEQ ID NO: 127602 - protein, 15 aa, Artificial Sequence
  Description of Artificial Sequence: Synthetic peptide
  Seed: RMCSLMQGSTLPRRS
RMCSIMQWSNLPLRS

SEQ ID NO: 127603 - protein, 15 aa, Artificial Sequence
  Description of Artificial Sequence: Synthetic peptide
  Seed: RMCSLMQGSTLPRRS
RMCSIMQWSNLPMRS

SEQ ID NO: 127604 - protein, 15 aa, Artificial Sequence
  Description of Artificial Sequence: Synthetic peptide
  Seed: RMCSLMQGSTLPRRS
RMCSIMQWSNLPVRS

SEQ ID NO: 127605 - protein, 15 aa, Artificial Sequence
  Description of Artificial Sequence: Synthetic peptide
  Seed: RMCSLMQGSTLPRRS
RMCSIMQWSRLPFRS

SEQ ID NO: 127606 - protein, 15 aa, Artificial Sequence
  Description of Artificial Sequence: Synthetic peptide
  Seed: RMCSLMQGSTLPRRS
RMCSIMQWSRLPIRS

SEQ ID NO: 127607 - protein, 15 aa, Artificial Sequence
  Description of Artificial Sequence: Synthetic peptide
  Seed: RMCSLMQGSTLPRRS
RMCSIMQWSRLPLRS

SEQ ID NO: 127608 - protein, 15 aa, Artificial Sequence
  Description of Artificial Sequence: Synthetic peptide
  Seed: RMCSLMQGSTLPRRS
RMCSIMQWSRLPMRS

SEQ ID NO: 127609 - protein, 15 aa, Artificial Sequence
  Description of Artificial Sequence: Synthetic peptide
  Seed: RMCSLMQGSTLPRRS
RMCSIMQWSRLPRRS

SEQ ID NO: 127610 - protein, 15 aa, Artificial Sequence
  Description of Artificial Sequence: Synthetic peptide
  Seed: RMCSLMQGSTLPRRS
RMCSIMQWSRLPVRS

SEQ ID NO: 127611 - protein, 15 aa, Artificial Sequence
  Description of Artificial Sequence: Synthetic peptide
  Seed: RMCSLMQGSTLPRRS
RMCSIMQWSRLPYRS

SEQ ID NO: 127612 - protein, 15 aa, Artificial Sequence
  Description of Artificial Sequence: Synthetic peptide
  Seed: RMCSLMQGSTLPRRS
RMCSIMQWSSLPARS

SEQ ID NO: 127613 - protein, 15 aa, Artificial Sequence
  Description of Artificial Sequence: Synthetic peptide
  Seed: RMCSLMQGSTLPRRS
RMCSIMQWSSLPFRS

SEQ ID NO: 127614 - protein, 15 aa, Artificial Sequence
  Description of Artificial Sequence: Synthetic peptide
  Seed: RMCSLMQGSTLPRRS
RMCSIMQWSSLPIRS

SEQ ID NO: 127615 - protein, 15 aa, Artificial Sequence
  Description of Artificial Sequence: Synthetic peptide
  Seed: RMCSLMQGSTLPRRS
RMCSIMQWSSLPLRS

SEQ ID NO: 127616 - protein, 15 aa, Artificial Sequence
  Description of Artificial Sequence: Synthetic peptide
  Seed: RMCSLMQGSTLPRRS
RMCSIMQWSSLPMRS

SEQ ID NO: 127617 - protein, 15 aa, Artificial Sequence
  Description of Artificial Sequence: Synthetic peptide
  Seed: RMCSLMQGSTLPRRS
RMCSIMQWSSLPTRS

SEQ ID NO: 127618 - protein, 15 aa, Artificial Sequence
  Description of Artificial Sequence: Synthetic peptide
  Seed: RMCSLMQGSTLPRRS
RMCSIMQWSSLPVRS

SEQ ID NO: 127619 - protein, 15 aa, Artificial Sequence
  Description of Artificial Sequence: Synthetic peptide
  Seed: RMCSLMQGSTLPRRS
RMCSIMQWSTLPIRS

SEQ ID NO: 127620 - protein, 15 aa, Artificial Sequence
  Description of Artificial Sequence: Synthetic peptide
  Seed: RMCSLMQGSTLPRRS
RMCSIMQWSTLPLRS

SEQ ID NO: 127621 - protein, 15 aa, Artificial Sequence
  Description of Artificial Sequence: Synthetic peptide
  Seed: RMCSLMQGSTLPRRS
RMCSIMQWSTLPVRS

SEQ ID NO: 127622 - protein, 15 aa, Artificial Sequence
  Description of Artificial Sequence: Synthetic peptide
  Seed: RMCSLMQGSTLPRRS
RMCSIMQYSALPARS

SEQ ID NO: 127623 - protein, 15 aa, Artificial Sequence
  Description of Artificial Sequence: Synthetic peptide
  Seed: RMCSLMQGSTLPRRS
RMCSIMQYSALPFRS

SEQ ID NO: 127624 - protein, 15 aa, Artificial Sequence
  Description of Artificial Sequence: Synthetic peptide
  Seed: RMCSLMQGSTLPRRS
RMCSIMQYSALPIRS

SEQ ID NO: 127625 - protein, 15 aa, Artificial Sequence
  Description of Artificial Sequence: Synthetic peptide
  Seed: RMCSLMQGSTLPRRS
RMCSIMQYSALPLRS

SEQ ID NO: 127626 - protein, 15 aa, Artificial Sequence
  Description of Artificial Sequence: Synthetic peptide
  Seed: RMCSLMQGSTLPRRS
RMCSIMQYSALPMRS

SEQ ID NO: 127627 - protein, 15 aa, Artificial Sequence
  Description of Artificial Sequence: Synthetic peptide
  Seed: RMCSLMQGSTLPRRS
RMCSIMQYSALPSRS

SEQ ID NO: 127628 - protein, 15 aa, Artificial Sequence
  Description of Artificial Sequence: Synthetic peptide
  Seed: RMCSLMQGSTLPRRS
RMCSIMQYSALPTRS

SEQ ID NO: 127629 - protein, 15 aa, Artificial Sequence
  Description of Artificial Sequence: Synthetic peptide
  Seed: RMCSLMQGSTLPRRS
RMCSIMQYSALPVRS

SEQ ID NO: 127630 - protein, 15 aa, Artificial Sequence
  Description of Artificial Sequence: Synthetic peptide
  Seed: RMCSLMQGSTLPRRS
RMCSIMQYSDLPIRS

SEQ ID NO: 127631 - protein, 15 aa, Artificial Sequence
  Description of Artificial Sequence: Synthetic peptide
  Seed: RMCSLMQGSTLPRRS
RMCSIMQYSDLPLRS

SEQ ID NO: 127632 - protein, 15 aa, Artificial Sequence
  Description of Artificial Sequence: Synthetic peptide
  Seed: RMCSLMQGSTLPRRS
RMCSIMQYSDLPVRS

SEQ ID NO: 127633 - protein, 15 aa, Artificial Sequence
  Description of Artificial Sequence: Synthetic peptide
  Seed: RMCSLMQGSTLPRRS
RMCSIMQYSGLPARS

SEQ ID NO: 127634 - protein, 15 aa, Artificial Sequence
  Description of Artificial Sequence: Synthetic peptide
  Seed: RMCSLMQGSTLPRRS
RMCSIMQYSGLPFRS

SEQ ID NO: 127635 - protein, 15 aa, Artificial Sequence
  Description of Artificial Sequence: Synthetic peptide
  Seed: RMCSLMQGSTLPRRS
RMCSIMQYSGLPIRS

SEQ ID NO: 127636 - protein, 15 aa, Artificial Sequence
  Description of Artificial Sequence: Synthetic peptide
  Seed: RMCSLMQGSTLPRRS
RMCSIMQYSGLPLRS

SEQ ID NO: 127637 - protein, 15 aa, Artificial Sequence
  Description of Artificial Sequence: Synthetic peptide
  Seed: RMCSLMQGSTLPRRS
RMCSIMQYSGLPMRS

SEQ ID NO: 127638 - protein, 15 aa, Artificial Sequence
  Description of Artificial Sequence: Synthetic peptide
  Seed: RMCSLMQGSTLPRRS
RMCSIMQYSGLPSRS

SEQ ID NO: 127639 - protein, 15 aa, Artificial Sequence
  Description of Artificial Sequence: Synthetic peptide
  Seed: RMCSLMQGSTLPRRS
RMCSIMQYSGLPTRS

SEQ ID NO: 127640 - protein, 15 aa, Artificial Sequence
  Description of Artificial Sequence: Synthetic peptide
  Seed: RMCSLMQGSTLPRRS
RMCSIMQYSGLPVRS

SEQ ID NO: 127641 - protein, 15 aa, Artificial Sequence
  Description of Artificial Sequence: Synthetic peptide
  Seed: RMCSLMQGSTLPRRS
RMCSIMQYSNLPARS

SEQ ID NO: 127642 - protein, 15 aa, Artificial Sequence
  Description of Artificial Sequence: Synthetic peptide
  Seed: RMCSLMQGSTLPRRS
RMCSIMQYSNLPFRS

SEQ ID NO: 127643 - protein, 15 aa, Artificial Sequence
  Description of Artificial Sequence: Synthetic peptide
  Seed: RMCSLMQGSTLPRRS
RMCSIMQYSNLPGRS

SEQ ID NO: 127644 - protein, 15 aa, Artificial Sequence
  Description of Artificial Sequence: Synthetic peptide
  Seed: RMCSLMQGSTLPRRS
RMCSIMQYSNLPIRS

SEQ ID NO: 127645 - protein, 15 aa, Artificial Sequence
  Description of Artificial Sequence: Synthetic peptide
  Seed: RMCSLMQGSTLPRRS
RMCSIMQYSNLPLRS

SEQ ID NO: 127646 - protein, 15 aa, Artificial Sequence
  Description of Artificial Sequence: Synthetic peptide
  Seed: RMCSLMQGSTLPRRS
RMCSIMQYSNLPMRS

SEQ ID NO: 127647 - protein, 15 aa, Artificial Sequence
  Description of Artificial Sequence: Synthetic peptide
  Seed: RMCSLMQGSTLPRRS
RMCSIMQYSNLPSRS

SEQ ID NO: 127648 - protein, 15 aa, Artificial Sequence
  Description of Artificial Sequence: Synthetic peptide
  Seed: RMCSLMQGSTLPRRS
RMCSIMQYSNLPTRS

SEQ ID NO: 127649 - protein, 15 aa, Artificial Sequence
  Description of Artificial Sequence: Synthetic peptide
  Seed: RMCSLMQGSTLPRRS
RMCSIMQYSNLPVRS

SEQ ID NO: 127650 - protein, 15 aa, Artificial Sequence
  Description of Artificial Sequence: Synthetic peptide
  Seed: RMCSLMQGSTLPRRS
RMCSIMQYSNLPYRS

SEQ ID NO: 127651 - protein, 15 aa, Artificial Sequence
  Description of Artificial Sequence: Synthetic peptide
  Seed: RMCSLMQGSTLPRRS
RMCSIMQYSPLPARS

SEQ ID NO: 127652 - protein, 15 aa, Artificial Sequence
  Description of Artificial Sequence: Synthetic peptide
  Seed: RMCSLMQGSTLPRRS
RMCSIMQYSPLPIRS

SEQ ID NO: 127653 - protein, 15 aa, Artificial Sequence
  Description of Artificial Sequence: Synthetic peptide
  Seed: RMCSLMQGSTLPRRS
RMCSIMQYSPLPLRS

SEQ ID NO: 127654 - protein, 15 aa, Artificial Sequence
  Description of Artificial Sequence: Synthetic peptide
  Seed: RMCSLMQGSTLPRRS
RMCSIMQYSPLPVRS

SEQ ID NO: 127655 - protein, 15 aa, Artificial Sequence
  Description of Artificial Sequence: Synthetic peptide
  Seed: RMCSLMQGSTLPRRS
RMCSIMQYSSLPARS

SEQ ID NO: 127656 - protein, 15 aa, Artificial Sequence
  Description of Artificial Sequence: Synthetic peptide
  Seed: RMCSLMQGSTLPRRS
RMCSIMQYSSLPFRS

SEQ ID NO: 127657 - protein, 15 aa, Artificial Sequence
  Description of Artificial Sequence: Synthetic peptide
  Seed: RMCSLMQGSTLPRRS
RMCSIMQYSSLPGRS

SEQ ID NO: 127658 - protein, 15 aa, Artificial Sequence
  Description of Artificial Sequence: Synthetic peptide
  Seed: RMCSLMQGSTLPRRS
RMCSIMQYSSLPHRS

SEQ ID NO: 127659 - protein, 15 aa, Artificial Sequence
  Description of Artificial Sequence: Synthetic peptide
  Seed: RMCSLMQGSTLPRRS
RMCSIMQYSSLPIRS

SEQ ID NO: 127660 - protein, 15 aa, Artificial Sequence
  Description of Artificial Sequence: Synthetic peptide
  Seed: RMCSLMQGSTLPRRS
RMCSIMQYSSLPLRS

SEQ ID NO: 127661 - protein, 15 aa, Artificial Sequence
  Description of Artificial Sequence: Synthetic peptide
  Seed: RMCSLMQGSTLPRRS
RMCSIMQYSSLPMRS

SEQ ID NO: 127662 - protein, 15 aa, Artificial Sequence
  Description of Artificial Sequence: Synthetic peptide
  Seed: RMCSLMQGSTLPRRS
RMCSIMQYSSLPSRS

SEQ ID NO: 127663 - protein, 15 aa, Artificial Sequence
  Description of Artificial Sequence: Synthetic peptide
  Seed: RMCSLMQGSTLPRRS
RMCSIMQYSSLPTRS

SEQ ID NO: 127664 - protein, 15 aa, Artificial Sequence
  Description of Artificial Sequence: Synthetic peptide
  Seed: RMCSLMQGSTLPRRS
RMCSIMQYSSLPVRS

SEQ ID NO: 127665 - protein, 15 aa, Artificial Sequence
  Description of Artificial Sequence: Synthetic peptide
  Seed: RMCSLMQGSTLPRRS
RMCSIMQYSSLPYRS

SEQ ID NO: 127666 - protein, 15 aa, Artificial Sequence
  Description of Artificial Sequence: Synthetic peptide
  Seed: RMCSLMQGSTLPRRS
RMCSIMQYSTLPARS

SEQ ID NO: 127667 - protein, 15 aa, Artificial Sequence
  Description of Artificial Sequence: Synthetic peptide
  Seed: RMCSLMQGSTLPRRS
RMCSIMQYSTLPIRS

SEQ ID NO: 127668 - protein, 15 aa, Artificial Sequence
  Description of Artificial Sequence: Synthetic peptide
  Seed: RMCSLMQGSTLPRRS
RMCSIMQYSTLPLRS

SEQ ID NO: 127669 - protein, 15 aa, Artificial Sequence
  Description of Artificial Sequence: Synthetic peptide
  Seed: RMCSLMQGSTLPRRS
RMCSIMQYSTLPMRS

SEQ ID NO: 127670 - protein, 15 aa, Artificial Sequence
  Description of Artificial Sequence: Synthetic peptide
  Seed: RMCSLMQGSTLPRRS
RMCSIMQYSTLPTRS

SEQ ID NO: 127671 - protein, 15 aa, Artificial Sequence
  Description of Artificial Sequence: Synthetic peptide
  Seed: RMCSLMQGSTLPRRS
RMCSIMQYSTLPVRS

SEQ ID NO: 127672 - protein, 15 aa, Artificial Sequence
  Description of Artificial Sequence: Synthetic peptide
  Seed: RMCSLMQGSTLPRRS
RMCSIMQYSVLPIRS

SEQ ID NO: 127673 - protein, 15 aa, Artificial Sequence
  Description of Artificial Sequence: Synthetic peptide
  Seed: RMCSLMQGSTLPRRS
RMCSIMQYSVLPLRS

SEQ ID NO: 127674 - protein, 15 aa, Artificial Sequence
  Description of Artificial Sequence: Synthetic peptide
  Seed: RMCSLMQGSTLPRRS
RMCSIMQYSVLPVRS

SEQ ID NO: 127675 - protein, 15 aa, Artificial Sequence
  Description of Artificial Sequence: Synthetic peptide
  Seed: RMCSLMQGSTLPRRS
RMCSLMQASKLPSRS

SEQ ID NO: 127676 - protein, 15 aa, Artificial Sequence
  Description of Artificial Sequence: Synthetic peptide
  Seed: RMCSLMQGSTLPRRS
RMCSLMQASRLPARS

SEQ ID NO: 127677 - protein, 15 aa, Artificial Sequence
  Description of Artificial Sequence: Synthetic peptide
  Seed: RMCSLMQGSTLPRRS
RMCSLMQASRLPGRS

SEQ ID NO: 127678 - protein, 15 aa, Artificial Sequence
  Description of Artificial Sequence: Synthetic peptide
  Seed: RMCSLMQGSTLPRRS
RMCSLMQASRLPQRS

SEQ ID NO: 127679 - protein, 15 aa, Artificial Sequence
  Description of Artificial Sequence: Synthetic peptide
  Seed: RMCSLMQGSTLPRRS
RMCSLMQASRLPRRS

SEQ ID NO: 127680 - protein, 15 aa, Artificial Sequence
  Description of Artificial Sequence: Synthetic peptide
  Seed: RMCSLMQGSTLPRRS
RMCSLMQASRLPSRS

SEQ ID NO: 127681 - protein, 15 aa, Artificial Sequence
  Description of Artificial Sequence: Synthetic peptide
  Seed: RMCSLMQGSTLPRRS
RMCSLMQASRLPYRS

SEQ ID NO: 127682 - protein, 15 aa, Artificial Sequence
  Description of Artificial Sequence: Synthetic peptide
  Seed: RMCSLMQGSTLPRRS
RMCSLMQFSALPIRS

SEQ ID NO: 127683 - protein, 15 aa, Artificial Sequence
  Description of Artificial Sequence: Synthetic peptide
  Seed: RMCSLMQGSTLPRRS
RMCSLMQFSALPLRS

SEQ ID NO: 127684 - protein, 15 aa, Artificial Sequence
  Description of Artificial Sequence: Synthetic peptide
  Seed: RMCSLMQGSTLPRRS
RMCSLMQFSALPVRS

SEQ ID NO: 127685 - protein, 15 aa, Artificial Sequence
  Description of Artificial Sequence: Synthetic peptide
  Seed: RMCSLMQGSTLPRRS
RMCSLMQFSGLPIRS

SEQ ID NO: 127686 - protein, 15 aa, Artificial Sequence
  Description of Artificial Sequence: Synthetic peptide
  Seed: RMCSLMQGSTLPRRS
RMCSLMQFSGLPLRS

SEQ ID NO: 127687 - protein, 15 aa, Artificial Sequence
  Description of Artificial Sequence: Synthetic peptide
  Seed: RMCSLMQGSTLPRRS
RMCSLMQFSGLPVRS

SEQ ID NO: 127688 - protein, 15 aa, Artificial Sequence
  Description of Artificial Sequence: Synthetic peptide
  Seed: RMCSLMQGSTLPRRS
RMCSLMQFSKLPFRS

SEQ ID NO: 127689 - protein, 15 aa, Artificial Sequence
  Description of Artificial Sequence: Synthetic peptide
  Seed: RMCSLMQGSTLPRRS
RMCSLMQFSKLPYRS

SEQ ID NO: 127690 - protein, 15 aa, Artificial Sequence
  Description of Artificial Sequence: Synthetic peptide
  Seed: RMCSLMQGSTLPRRS
RMCSLMQFSNLPARS

SEQ ID NO: 127691 - protein, 15 aa, Artificial Sequence
  Description of Artificial Sequence: Synthetic peptide
  Seed: RMCSLMQGSTLPRRS
RMCSLMQFSNLPIRS

SEQ ID NO: 127692 - protein, 15 aa, Artificial Sequence
  Description of Artificial Sequence: Synthetic peptide
  Seed: RMCSLMQGSTLPRRS
RMCSLMQFSNLPLRS

SEQ ID NO: 127693 - protein, 15 aa, Artificial Sequence
  Description of Artificial Sequence: Synthetic peptide
  Seed: RMCSLMQGSTLPRRS
RMCSLMQFSNLPMRS

SEQ ID NO: 127694 - protein, 15 aa, Artificial Sequence
  Description of Artificial Sequence: Synthetic peptide
  Seed: RMCSLMQGSTLPRRS
RMCSLMQFSNLPTRS

SEQ ID NO: 127695 - protein, 15 aa, Artificial Sequence
  Description of Artificial Sequence: Synthetic peptide
  Seed: RMCSLMQGSTLPRRS
RMCSLMQFSNLPVRS

SEQ ID NO: 127696 - protein, 15 aa, Artificial Sequence
  Description of Artificial Sequence: Synthetic peptide
  Seed: RMCSLMQGSTLPRRS
RMCSLMQFSRLPARS

SEQ ID NO: 127697 - protein, 15 aa, Artificial Sequence
  Description of Artificial Sequence: Synthetic peptide
  Seed: RMCSLMQGSTLPRRS
RMCSLMQFSRLPFRS

SEQ ID NO: 127698 - protein, 15 aa, Artificial Sequence
  Description of Artificial Sequence: Synthetic peptide
  Seed: RMCSLMQGSTLPRRS
RMCSLMQFSRLPKRS

SEQ ID NO: 127699 - protein, 15 aa, Artificial Sequence
  Description of Artificial Sequence: Synthetic peptide
  Seed: RMCSLMQGSTLPRRS
RMCSLMQFSRLPLRS

SEQ ID NO: 127700 - protein, 15 aa, Artificial Sequence
  Description of Artificial Sequence: Synthetic peptide
  Seed: RMCSLMQGSTLPRRS
RMCSLMQFSRLPMRS

SEQ ID NO: 127701 - protein, 15 aa, Artificial Sequence
  Description of Artificial Sequence: Synthetic peptide
  Seed: RMCSLMQGSTLPRRS
RMCSLMQFSRLPRRS

SEQ ID NO: 127702 - protein, 15 aa, Artificial Sequence
  Description of Artificial Sequence: Synthetic peptide
  Seed: RMCSLMQGSTLPRRS
RMCSLMQFSRLPSRS

SEQ ID NO: 127703 - protein, 15 aa, Artificial Sequence
  Description of Artificial Sequence: Synthetic peptide
  Seed: RMCSLMQGSTLPRRS
RMCSLMQFSRLPYRS

SEQ ID NO: 127704 - protein, 15 aa, Artificial Sequence
  Description of Artificial Sequence: Synthetic peptide
  Seed: RMCSLMQGSTLPRRS
RMCSLMQFSSLPARS

SEQ ID NO: 127705 - protein, 15 aa, Artificial Sequence
  Description of Artificial Sequence: Synthetic peptide
  Seed: RMCSLMQGSTLPRRS
RMCSLMQFSSLPIRS

SEQ ID NO: 127706 - protein, 15 aa, Artificial Sequence
  Description of Artificial Sequence: Synthetic peptide
  Seed: RMCSLMQGSTLPRRS
RMCSLMQFSSLPLRS

SEQ ID NO: 127707 - protein, 15 aa, Artificial Sequence
  Description of Artificial Sequence: Synthetic peptide
  Seed: RMCSLMQGSTLPRRS
RMCSLMQFSSLPMRS

SEQ ID NO: 127708 - protein, 15 aa, Artificial Sequence
  Description of Artificial Sequence: Synthetic peptide
  Seed: RMCSLMQGSTLPRRS
RMCSLMQFSSLPTRS

SEQ ID NO: 127709 - protein, 15 aa, Artificial Sequence
  Description of Artificial Sequence: Synthetic peptide
  Seed: RMCSLMQGSTLPRRS
RMCSLMQFSSLPVRS

SEQ ID NO: 127710 - protein, 15 aa, Artificial Sequence
  Description of Artificial Sequence: Synthetic peptide
  Seed: RMCSLMQGSTLPRRS
RMCSLMQFSTLPIRS

SEQ ID NO: 127711 - protein, 15 aa, Artificial Sequence
  Description of Artificial Sequence: Synthetic peptide
  Seed: RMCSLMQGSTLPRRS
RMCSLMQFSTLPLRS

SEQ ID NO: 127712 - protein, 15 aa, Artificial Sequence
  Description of Artificial Sequence: Synthetic peptide
  Seed: RMCSLMQGSTLPRRS
RMCSLMQFSTLPVRS

SEQ ID NO: 127713 - protein, 15 aa, Artificial Sequence
  Description of Artificial Sequence: Synthetic peptide
  Seed: RMCSLMQGSTLPRRS
RMCSLMQISKLPARS

SEQ ID NO: 127714 - protein, 15 aa, Artificial Sequence
  Description of Artificial Sequence: Synthetic peptide
  Seed: RMCSLMQGSTLPRRS
RMCSLMQISKLPFRS

SEQ ID NO: 127715 - protein, 15 aa, Artificial Sequence
  Description of Artificial Sequence: Synthetic peptide
  Seed: RMCSLMQGSTLPRRS
RMCSLMQISKLPGRS

SEQ ID NO: 127716 - protein, 15 aa, Artificial Sequence
  Description of Artificial Sequence: Synthetic peptide
  Seed: RMCSLMQGSTLPRRS
RMCSLMQISKLPHRS

SEQ ID NO: 127717 - protein, 15 aa, Artificial Sequence
  Description of Artificial Sequence: Synthetic peptide
  Seed: RMCSLMQGSTLPRRS
RMCSLMQISKLPKRS

SEQ ID NO: 127718 - protein, 15 aa, Artificial Sequence
  Description of Artificial Sequence: Synthetic peptide
  Seed: RMCSLMQGSTLPRRS
RMCSLMQISKLPQRS

SEQ ID NO: 127719 - protein, 15 aa, Artificial Sequence
  Description of Artificial Sequence: Synthetic peptide
  Seed: RMCSLMQGSTLPRRS
RMCSLMQISKLPRRS

SEQ ID NO: 127720 - protein, 15 aa, Artificial Sequence
  Description of Artificial Sequence: Synthetic peptide
  Seed: RMCSLMQGSTLPRRS
RMCSLMQISKLPSRS

SEQ ID NO: 127721 - protein, 15 aa, Artificial Sequence
  Description of Artificial Sequence: Synthetic peptide
  Seed: RMCSLMQGSTLPRRS
RMCSLMQISKLPTRS

SEQ ID NO: 127722 - protein, 15 aa, Artificial Sequence
  Description of Artificial Sequence: Synthetic peptide
  Seed: RMCSLMQGSTLPRRS
RMCSLMQISKLPVRS

SEQ ID NO: 127723 - protein, 15 aa, Artificial Sequence
  Description of Artificial Sequence: Synthetic peptide
  Seed: RMCSLMQGSTLPRRS
RMCSLMQISKLPYRS

SEQ ID NO: 127724 - protein, 15 aa, Artificial Sequence
  Description of Artificial Sequence: Synthetic peptide
  Seed: RMCSLMQGSTLPRRS
RMCSLMQISNLPARS

SEQ ID NO: 127725 - protein, 15 aa, Artificial Sequence
  Description of Artificial Sequence: Synthetic peptide
  Seed: RMCSLMQGSTLPRRS
RMCSLMQISNLPSRS

SEQ ID NO: 127726 - protein, 15 aa, Artificial Sequence
  Description of Artificial Sequence: Synthetic peptide
  Seed: RMCSLMQGSTLPRRS
RMCSLMQISRLPARS

SEQ ID NO: 127727 - protein, 15 aa, Artificial Sequence
  Description of Artificial Sequence: Synthetic peptide
  Seed: RMCSLMQGSTLPRRS
RMCSLMQISRLPFRS

SEQ ID NO: 127728 - protein, 15 aa, Artificial Sequence
  Description of Artificial Sequence: Synthetic peptide
  Seed: RMCSLMQGSTLPRRS
RMCSLMQISRLPGRS

SEQ ID NO: 127729 - protein, 15 aa, Artificial Sequence
  Description of Artificial Sequence: Synthetic peptide
  Seed: RMCSLMQGSTLPRRS
RMCSLMQISRLPHRS

SEQ ID NO: 127730 - protein, 15 aa, Artificial Sequence
  Description of Artificial Sequence: Synthetic peptide
  Seed: RMCSLMQGSTLPRRS
RMCSLMQISRLPIRS

SEQ ID NO: 127731 - protein, 15 aa, Artificial Sequence
  Description of Artificial Sequence: Synthetic peptide
  Seed: RMCSLMQGSTLPRRS
RMCSLMQISRLPKRS

SEQ ID NO: 127732 - protein, 15 aa, Artificial Sequence
  Description of Artificial Sequence: Synthetic peptide
  Seed: RMCSLMQGSTLPRRS
RMCSLMQISRLPLRS

SEQ ID NO: 127733 - protein, 15 aa, Artificial Sequence
  Description of Artificial Sequence: Synthetic peptide
  Seed: RMCSLMQGSTLPRRS
RMCSLMQISRLPMRS

SEQ ID NO: 127734 - protein, 15 aa, Artificial Sequence
  Description of Artificial Sequence: Synthetic peptide
  Seed: RMCSLMQGSTLPRRS
RMCSLMQISRLPNRS

SEQ ID NO: 127735 - protein, 15 aa, Artificial Sequence
  Description of Artificial Sequence: Synthetic peptide
  Seed: RMCSLMQGSTLPRRS
RMCSLMQISRLPQRS

SEQ ID NO: 127736 - protein, 15 aa, Artificial Sequence
  Description of Artificial Sequence: Synthetic peptide
  Seed: RMCSLMQGSTLPRRS
RMCSLMQISRLPRRS

SEQ ID NO: 127737 - protein, 15 aa, Artificial Sequence
  Description of Artificial Sequence: Synthetic peptide
  Seed: RMCSLMQGSTLPRRS
RMCSLMQISRLPSRS

SEQ ID NO: 127738 - protein, 15 aa, Artificial Sequence
  Description of Artificial Sequence: Synthetic peptide
  Seed: RMCSLMQGSTLPRRS
RMCSLMQISRLPTRS

SEQ ID NO: 127739 - protein, 15 aa, Artificial Sequence
  Description of Artificial Sequence: Synthetic peptide
  Seed: RMCSLMQGSTLPRRS
RMCSLMQISRLPVRS

SEQ ID NO: 127740 - protein, 15 aa, Artificial Sequence
  Description of Artificial Sequence: Synthetic peptide
  Seed: RMCSLMQGSTLPRRS
RMCSLMQISRLPYRS

SEQ ID NO: 127741 - protein, 15 aa, Artificial Sequence
  Description of Artificial Sequence: Synthetic peptide
  Seed: RMCSLMQGSTLPRRS
RMCSLMQISSLPARS

SEQ ID NO: 127742 - protein, 15 aa, Artificial Sequence
  Description of Artificial Sequence: Synthetic peptide
  Seed: RMCSLMQGSTLPRRS
RMCSLMQISSLPSRS

SEQ ID NO: 127743 - protein, 15 aa, Artificial Sequence
  Description of Artificial Sequence: Synthetic peptide
  Seed: RMCSLMQGSTLPRRS
RMCSLMQISTLPARS

SEQ ID NO: 127744 - protein, 15 aa, Artificial Sequence
  Description of Artificial Sequence: Synthetic peptide
  Seed: RMCSLMQGSTLPRRS
RMCSLMQISTLPSRS

SEQ ID NO: 127745 - protein, 15 aa, Artificial Sequence
  Description of Artificial Sequence: Synthetic peptide
  Seed: RMCSLMQGSTLPRRS
RMCSLMQLSKLPARS

SEQ ID NO: 127746 - protein, 15 aa, Artificial Sequence
  Description of Artificial Sequence: Synthetic peptide
  Seed: RMCSLMQGSTLPRRS
RMCSLMQLSKLPGRS

SEQ ID NO: 127747 - protein, 15 aa, Artificial Sequence
  Description of Artificial Sequence: Synthetic peptide
  Seed: RMCSLMQGSTLPRRS
RMCSLMQLSKLPHRS

SEQ ID NO: 127748 - protein, 15 aa, Artificial Sequence
  Description of Artificial Sequence: Synthetic peptide
  Seed: RMCSLMQGSTLPRRS
RMCSLMQLSKLPKRS

SEQ ID NO: 127749 - protein, 15 aa, Artificial Sequence
  Description of Artificial Sequence: Synthetic peptide
  Seed: RMCSLMQGSTLPRRS
RMCSLMQLSKLPMRS

SEQ ID NO: 127750 - protein, 15 aa, Artificial Sequence
  Description of Artificial Sequence: Synthetic peptide
  Seed: RMCSLMQGSTLPRRS
RMCSLMQLSKLPQRS

SEQ ID NO: 127751 - protein, 15 aa, Artificial Sequence
  Description of Artificial Sequence: Synthetic peptide
  Seed: RMCSLMQGSTLPRRS
RMCSLMQLSKLPRRS

SEQ ID NO: 127752 - protein, 15 aa, Artificial Sequence
  Description of Artificial Sequence: Synthetic peptide
  Seed: RMCSLMQGSTLPRRS
RMCSLMQLSKLPSRS

SEQ ID NO: 127753 - protein, 15 aa, Artificial Sequence
  Description of Artificial Sequence: Synthetic peptide
  Seed: RMCSLMQGSTLPRRS
RMCSLMQLSKLPTRS

SEQ ID NO: 127754 - protein, 15 aa, Artificial Sequence
  Description of Artificial Sequence: Synthetic peptide
  Seed: RMCSLMQGSTLPRRS
RMCSLMQLSKLPVRS

SEQ ID NO: 127755 - protein, 15 aa, Artificial Sequence
  Description of Artificial Sequence: Synthetic peptide
  Seed: RMCSLMQGSTLPRRS
RMCSLMQLSNLPARS

SEQ ID NO: 127756 - protein, 15 aa, Artificial Sequence
  Description of Artificial Sequence: Synthetic peptide
  Seed: RMCSLMQGSTLPRRS
RMCSLMQLSNLPSRS

SEQ ID NO: 127757 - protein, 15 aa, Artificial Sequence
  Description of Artificial Sequence: Synthetic peptide
  Seed: RMCSLMQGSTLPRRS
RMCSLMQLSRLPARS

SEQ ID NO: 127758 - protein, 15 aa, Artificial Sequence
  Description of Artificial Sequence: Synthetic peptide
  Seed: RMCSLMQGSTLPRRS
RMCSLMQLSRLPGRS

SEQ ID NO: 127759 - protein, 15 aa, Artificial Sequence
  Description of Artificial Sequence: Synthetic peptide
  Seed: RMCSLMQGSTLPRRS
RMCSLMQLSRLPHRS

SEQ ID NO: 127760 - protein, 15 aa, Artificial Sequence
  Description of Artificial Sequence: Synthetic peptide
  Seed: RMCSLMQGSTLPRRS
RMCSLMQLSRLPIRS

SEQ ID NO: 127761 - protein, 15 aa, Artificial Sequence
  Description of Artificial Sequence: Synthetic peptide
  Seed: RMCSLMQGSTLPRRS
RMCSLMQLSRLPKRS

SEQ ID NO: 127762 - protein, 15 aa, Artificial Sequence
  Description of Artificial Sequence: Synthetic peptide
  Seed: RMCSLMQGSTLPRRS
RMCSLMQLSRLPLRS

SEQ ID NO: 127763 - protein, 15 aa, Artificial Sequence
  Description of Artificial Sequence: Synthetic peptide
  Seed: RMCSLMQGSTLPRRS
RMCSLMQLSRLPMRS

SEQ ID NO: 127764 - protein, 15 aa, Artificial Sequence
  Description of Artificial Sequence: Synthetic peptide
  Seed: RMCSLMQGSTLPRRS
RMCSLMQLSRLPNRS

SEQ ID NO: 127765 - protein, 15 aa, Artificial Sequence
  Description of Artificial Sequence: Synthetic peptide
  Seed: RMCSLMQGSTLPRRS
RMCSLMQLSRLPQRS

SEQ ID NO: 127766 - protein, 15 aa, Artificial Sequence
  Description of Artificial Sequence: Synthetic peptide
  Seed: RMCSLMQGSTLPRRS
RMCSLMQLSRLPRRS

SEQ ID NO: 127767 - protein, 15 aa, Artificial Sequence
  Description of Artificial Sequence: Synthetic peptide
  Seed: RMCSLMQGSTLPRRS
RMCSLMQLSRLPSRS

SEQ ID NO: 127768 - protein, 15 aa, Artificial Sequence
  Description of Artificial Sequence: Synthetic peptide
  Seed: RMCSLMQGSTLPRRS
RMCSLMQLSRLPTRS

SEQ ID NO: 127769 - protein, 15 aa, Artificial Sequence
  Description of Artificial Sequence: Synthetic peptide
  Seed: RMCSLMQGSTLPRRS
RMCSLMQLSRLPVRS

SEQ ID NO: 127770 - protein, 15 aa, Artificial Sequence
  Description of Artificial Sequence: Synthetic peptide
  Seed: RMCSLMQGSTLPRRS
RMCSLMQLSRLPYRS

SEQ ID NO: 127771 - protein, 15 aa, Artificial Sequence
  Description of Artificial Sequence: Synthetic peptide
  Seed: RMCSLMQGSTLPRRS
RMCSLMQLSTLPARS

SEQ ID NO: 127772 - protein, 15 aa, Artificial Sequence
  Description of Artificial Sequence: Synthetic peptide
  Seed: RMCSLMQGSTLPRRS
RMCSLMQLSTLPSRS

SEQ ID NO: 127773 - protein, 15 aa, Artificial Sequence
  Description of Artificial Sequence: Synthetic peptide
  Seed: RMCSLMQGSTLPRRS
RMCSLMQMSKLPARS

SEQ ID NO: 127774 - protein, 15 aa, Artificial Sequence
  Description of Artificial Sequence: Synthetic peptide
  Seed: RMCSLMQGSTLPRRS
RMCSLMQMSKLPGRS

SEQ ID NO: 127775 - protein, 15 aa, Artificial Sequence
  Description of Artificial Sequence: Synthetic peptide
  Seed: RMCSLMQGSTLPRRS
RMCSLMQMSKLPHRS

SEQ ID NO: 127776 - protein, 15 aa, Artificial Sequence
  Description of Artificial Sequence: Synthetic peptide
  Seed: RMCSLMQGSTLPRRS
RMCSLMQMSKLPIRS

SEQ ID NO: 127777 - protein, 15 aa, Artificial Sequence
  Description of Artificial Sequence: Synthetic peptide
  Seed: RMCSLMQGSTLPRRS
RMCSLMQMSKLPKRS

SEQ ID NO: 127778 - protein, 15 aa, Artificial Sequence
  Description of Artificial Sequence: Synthetic peptide
  Seed: RMCSLMQGSTLPRRS
RMCSLMQMSKLPLRS

SEQ ID NO: 127779 - protein, 15 aa, Artificial Sequence
  Description of Artificial Sequence: Synthetic peptide
  Seed: RMCSLMQGSTLPRRS
RMCSLMQMSKLPMRS

SEQ ID NO: 127780 - protein, 15 aa, Artificial Sequence
  Description of Artificial Sequence: Synthetic peptide
  Seed: RMCSLMQGSTLPRRS
RMCSLMQMSKLPNRS

SEQ ID NO: 127781 - protein, 15 aa, Artificial Sequence
  Description of Artificial Sequence: Synthetic peptide
  Seed: RMCSLMQGSTLPRRS
RMCSLMQMSKLPQRS

SEQ ID NO: 127782 - protein, 15 aa, Artificial Sequence
  Description of Artificial Sequence: Synthetic peptide
  Seed: RMCSLMQGSTLPRRS
RMCSLMQMSKLPRRS

SEQ ID NO: 127783 - protein, 15 aa, Artificial Sequence
  Description of Artificial Sequence: Synthetic peptide
  Seed: RMCSLMQGSTLPRRS
RMCSLMQMSKLPSRS

SEQ ID NO: 127784 - protein, 15 aa, Artificial Sequence
  Description of Artificial Sequence: Synthetic peptide
  Seed: RMCSLMQGSTLPRRS
RMCSLMQMSKLPTRS

SEQ ID NO: 127785 - protein, 15 aa, Artificial Sequence
  Description of Artificial Sequence: Synthetic peptide
  Seed: RMCSLMQGSTLPRRS
RMCSLMQMSKLPVRS

SEQ ID NO: 127786 - protein, 15 aa, Artificial Sequence
  Description of Artificial Sequence: Synthetic peptide
  Seed: RMCSLMQGSTLPRRS
RMCSLMQMSNLPARS

SEQ ID NO: 127787 - protein, 15 aa, Artificial Sequence
  Description of Artificial Sequence: Synthetic peptide
  Seed: RMCSLMQGSTLPRRS
RMCSLMQMSNLPSRS

SEQ ID NO: 127788 - protein, 15 aa, Artificial Sequence
  Description of Artificial Sequence: Synthetic peptide
  Seed: RMCSLMQGSTLPRRS
RMCSLMQMSRLPARS

SEQ ID NO: 127789 - protein, 15 aa, Artificial Sequence
  Description of Artificial Sequence: Synthetic peptide
  Seed: RMCSLMQGSTLPRRS
RMCSLMQMSRLPFRS

SEQ ID NO: 127790 - protein, 15 aa, Artificial Sequence
  Description of Artificial Sequence: Synthetic peptide
  Seed: RMCSLMQGSTLPRRS
RMCSLMQMSRLPGRS

SEQ ID NO: 127791 - protein, 15 aa, Artificial Sequence
  Description of Artificial Sequence: Synthetic peptide
  Seed: RMCSLMQGSTLPRRS
RMCSLMQMSRLPHRS

SEQ ID NO: 127792 - protein, 15 aa, Artificial Sequence
  Description of Artificial Sequence: Synthetic peptide
  Seed: RMCSLMQGSTLPRRS
RMCSLMQMSRLPIRS

SEQ ID NO: 127793 - protein, 15 aa, Artificial Sequence
  Description of Artificial Sequence: Synthetic peptide
  Seed: RMCSLMQGSTLPRRS
RMCSLMQMSRLPKRS

SEQ ID NO: 127794 - protein, 15 aa, Artificial Sequence
  Description of Artificial Sequence: Synthetic peptide
  Seed: RMCSLMQGSTLPRRS
RMCSLMQMSRLPLRS

SEQ ID NO: 127795 - protein, 15 aa, Artificial Sequence
  Description of Artificial Sequence: Synthetic peptide
  Seed: RMCSLMQGSTLPRRS
RMCSLMQMSRLPMRS

SEQ ID NO: 127796 - protein, 15 aa, Artificial Sequence
  Description of Artificial Sequence: Synthetic peptide
  Seed: RMCSLMQGSTLPRRS
RMCSLMQMSRLPNRS

SEQ ID NO: 127797 - protein, 15 aa, Artificial Sequence
  Description of Artificial Sequence: Synthetic peptide
  Seed: RMCSLMQGSTLPRRS
RMCSLMQMSRLPPRS

SEQ ID NO: 127798 - protein, 15 aa, Artificial Sequence
  Description of Artificial Sequence: Synthetic peptide
  Seed: RMCSLMQGSTLPRRS
RMCSLMQMSRLPQRS

SEQ ID NO: 127799 - protein, 15 aa, Artificial Sequence
  Description of Artificial Sequence: Synthetic peptide
  Seed: RMCSLMQGSTLPRRS
RMCSLMQMSRLPRRS

SEQ ID NO: 127800 - protein, 15 aa, Artificial Sequence
  Description of Artificial Sequence: Synthetic peptide
  Seed: RMCSLMQGSTLPRRS
RMCSLMQMSRLPSRS

SEQ ID NO: 127801 - protein, 15 aa, Artificial Sequence
  Description of Artificial Sequence: Synthetic peptide
  Seed: RMCSLMQGSTLPRRS
RMCSLMQMSRLPTRS

SEQ ID NO: 127802 - protein, 15 aa, Artificial Sequence
  Description of Artificial Sequence: Synthetic peptide
  Seed: RMCSLMQGSTLPRRS
RMCSLMQMSRLPVRS

SEQ ID NO: 127803 - protein, 15 aa, Artificial Sequence
  Description of Artificial Sequence: Synthetic peptide
  Seed: RMCSLMQGSTLPRRS
RMCSLMQMSRLPYRS

SEQ ID NO: 127804 - protein, 15 aa, Artificial Sequence
  Description of Artificial Sequence: Synthetic peptide
  Seed: RMCSLMQGSTLPRRS
RMCSLMQMSSLPARS

SEQ ID NO: 127805 - protein, 15 aa, Artificial Sequence
  Description of Artificial Sequence: Synthetic peptide
  Seed: RMCSLMQGSTLPRRS
RMCSLMQMSSLPSRS

SEQ ID NO: 127806 - protein, 15 aa, Artificial Sequence
  Description of Artificial Sequence: Synthetic peptide
  Seed: RMCSLMQGSTLPRRS
RMCSLMQMSTLPARS

SEQ ID NO: 127807 - protein, 15 aa, Artificial Sequence
  Description of Artificial Sequence: Synthetic peptide
  Seed: RMCSLMQGSTLPRRS
RMCSLMQMSTLPSRS

SEQ ID NO: 127808 - protein, 15 aa, Artificial Sequence
  Description of Artificial Sequence: Synthetic peptide
  Seed: RMCSLMQGSTLPRRS
RMCSLMQRSRLPFRS

SEQ ID NO: 127809 - protein, 15 aa, Artificial Sequence
  Description of Artificial Sequence: Synthetic peptide
  Seed: RMCSLMQGSTLPRRS
RMCSLMQRSRLPLRS

SEQ ID NO: 127810 - protein, 15 aa, Artificial Sequence
  Description of Artificial Sequence: Synthetic peptide
  Seed: RMCSLMQGSTLPRRS
RMCSLMQRSRLPMRS

SEQ ID NO: 127811 - protein, 15 aa, Artificial Sequence
  Description of Artificial Sequence: Synthetic peptide
  Seed: RMCSLMQGSTLPRRS
RMCSLMQRSRLPRRS

SEQ ID NO: 127812 - protein, 15 aa, Artificial Sequence
  Description of Artificial Sequence: Synthetic peptide
  Seed: RMCSLMQGSTLPRRS
RMCSLMQRSRLPYRS

SEQ ID NO: 127813 - protein, 15 aa, Artificial Sequence
  Description of Artificial Sequence: Synthetic peptide
  Seed: RMCSLMQGSTLPRRS
RMCSLMQSSRLPYRS

SEQ ID NO: 127814 - protein, 15 aa, Artificial Sequence
  Description of Artificial Sequence: Synthetic peptide
  Seed: RMCSLMQGSTLPRRS
RMCSLMQVSKLPARS

SEQ ID NO: 127815 - protein, 15 aa, Artificial Sequence
  Description of Artificial Sequence: Synthetic peptide
  Seed: RMCSLMQGSTLPRRS
RMCSLMQVSKLPGRS

SEQ ID NO: 127816 - protein, 15 aa, Artificial Sequence
  Description of Artificial Sequence: Synthetic peptide
  Seed: RMCSLMQGSTLPRRS
RMCSLMQVSKLPHRS

SEQ ID NO: 127817 - protein, 15 aa, Artificial Sequence
  Description of Artificial Sequence: Synthetic peptide
  Seed: RMCSLMQGSTLPRRS
RMCSLMQVSKLPQRS

SEQ ID NO: 127818 - protein, 15 aa, Artificial Sequence
  Description of Artificial Sequence: Synthetic peptide
  Seed: RMCSLMQGSTLPRRS
RMCSLMQVSKLPSRS

SEQ ID NO: 127819 - protein, 15 aa, Artificial Sequence
  Description of Artificial Sequence: Synthetic peptide
  Seed: RMCSLMQGSTLPRRS
RMCSLMQVSRLPARS

SEQ ID NO: 127820 - protein, 15 aa, Artificial Sequence
  Description of Artificial Sequence: Synthetic peptide
  Seed: RMCSLMQGSTLPRRS
RMCSLMQVSRLPFRS

SEQ ID NO: 127821 - protein, 15 aa, Artificial Sequence
  Description of Artificial Sequence: Synthetic peptide
  Seed: RMCSLMQGSTLPRRS
RMCSLMQVSRLPGRS

SEQ ID NO: 127822 - protein, 15 aa, Artificial Sequence
  Description of Artificial Sequence: Synthetic peptide
  Seed: RMCSLMQGSTLPRRS
RMCSLMQVSRLPHRS

SEQ ID NO: 127823 - protein, 15 aa, Artificial Sequence
  Description of Artificial Sequence: Synthetic peptide
  Seed: RMCSLMQGSTLPRRS
RMCSLMQVSRLPKRS

SEQ ID NO: 127824 - protein, 15 aa, Artificial Sequence
  Description of Artificial Sequence: Synthetic peptide
  Seed: RMCSLMQGSTLPRRS
RMCSLMQVSRLPQRS

SEQ ID NO: 127825 - protein, 15 aa, Artificial Sequence
  Description of Artificial Sequence: Synthetic peptide
  Seed: RMCSLMQGSTLPRRS
RMCSLMQVSRLPRRS

SEQ ID NO: 127826 - protein, 15 aa, Artificial Sequence
  Description of Artificial Sequence: Synthetic peptide
  Seed: RMCSLMQGSTLPRRS
RMCSLMQVSRLPSRS

SEQ ID NO: 127827 - protein, 15 aa, Artificial Sequence
  Description of Artificial Sequence: Synthetic peptide
  Seed: RMCSLMQGSTLPRRS
RMCSLMQVSRLPTRS

SEQ ID NO: 127828 - protein, 15 aa, Artificial Sequence
  Description of Artificial Sequence: Synthetic peptide
  Seed: RMCSLMQGSTLPRRS
RMCSLMQVSRLPVRS

SEQ ID NO: 127829 - protein, 15 aa, Artificial Sequence
  Description of Artificial Sequence: Synthetic peptide
  Seed: RMCSLMQGSTLPRRS
RMCSLMQVSRLPYRS

SEQ ID NO: 127830 - protein, 15 aa, Artificial Sequence
  Description of Artificial Sequence: Synthetic peptide
  Seed: RMCSLMQGSTLPRRS
RMCSLMQVSTLPARS

SEQ ID NO: 127831 - protein, 15 aa, Artificial Sequence
  Description of Artificial Sequence: Synthetic peptide
  Seed: RMCSLMQGSTLPRRS
RMCSLMQVSTLPSRS

SEQ ID NO: 127832 - protein, 15 aa, Artificial Sequence
  Description of Artificial Sequence: Synthetic peptide
  Seed: RMCSLMQGSTLPRRS
RMCSLMQWSALPLRS

SEQ ID NO: 127833 - protein, 15 aa, Artificial Sequence
  Description of Artificial Sequence: Synthetic peptide
  Seed: RMCSLMQGSTLPRRS
RMCSLMQWSNLPIRS

SEQ ID NO: 127834 - protein, 15 aa, Artificial Sequence
  Description of Artificial Sequence: Synthetic peptide
  Seed: RMCSLMQGSTLPRRS
RMCSLMQWSNLPLRS

SEQ ID NO: 127835 - protein, 15 aa, Artificial Sequence
  Description of Artificial Sequence: Synthetic peptide
  Seed: RMCSLMQGSTLPRRS
RMCSLMQWSNLPVRS

SEQ ID NO: 127836 - protein, 15 aa, Artificial Sequence
  Description of Artificial Sequence: Synthetic peptide
  Seed: RMCSLMQGSTLPRRS
RMCSLMQWSRLPFRS

SEQ ID NO: 127837 - protein, 15 aa, Artificial Sequence
  Description of Artificial Sequence: Synthetic peptide
  Seed: RMCSLMQGSTLPRRS
RMCSLMQWSRLPYRS

SEQ ID NO: 127838 - protein, 15 aa, Artificial Sequence
  Description of Artificial Sequence: Synthetic peptide
  Seed: RMCSLMQGSTLPRRS
RMCSLMQWSSLPIRS

SEQ ID NO: 127839 - protein, 15 aa, Artificial Sequence
  Description of Artificial Sequence: Synthetic peptide
  Seed: RMCSLMQGSTLPRRS
RMCSLMQWSSLPLRS

SEQ ID NO: 127840 - protein, 15 aa, Artificial Sequence
  Description of Artificial Sequence: Synthetic peptide
  Seed: RMCSLMQGSTLPRRS
RMCSLMQWSSLPVRS

SEQ ID NO: 127841 - protein, 15 aa, Artificial Sequence
  Description of Artificial Sequence: Synthetic peptide
  Seed: RMCSLMQGSTLPRRS
RMCSLMQYSALPARS

SEQ ID NO: 127842 - protein, 15 aa, Artificial Sequence
  Description of Artificial Sequence: Synthetic peptide
  Seed: RMCSLMQGSTLPRRS
RMCSLMQYSALPIRS

SEQ ID NO: 127843 - protein, 15 aa, Artificial Sequence
  Description of Artificial Sequence: Synthetic peptide
  Seed: RMCSLMQGSTLPRRS
RMCSLMQYSALPLRS

SEQ ID NO: 127844 - protein, 15 aa, Artificial Sequence
  Description of Artificial Sequence: Synthetic peptide
  Seed: RMCSLMQGSTLPRRS
RMCSLMQYSALPMRS

SEQ ID NO: 127845 - protein, 15 aa, Artificial Sequence
  Description of Artificial Sequence: Synthetic peptide
  Seed: RMCSLMQGSTLPRRS
RMCSLMQYSALPVRS

SEQ ID NO: 127846 - protein, 15 aa, Artificial Sequence
  Description of Artificial Sequence: Synthetic peptide
  Seed: RMCSLMQGSTLPRRS
RMCSLMQYSGLPARS

SEQ ID NO: 127847 - protein, 15 aa, Artificial Sequence
  Description of Artificial Sequence: Synthetic peptide
  Seed: RMCSLMQGSTLPRRS
RMCSLMQYSGLPIRS

SEQ ID NO: 127848 - protein, 15 aa, Artificial Sequence
  Description of Artificial Sequence: Synthetic peptide
  Seed: RMCSLMQGSTLPRRS
RMCSLMQYSGLPLRS

SEQ ID NO: 127849 - protein, 15 aa, Artificial Sequence
  Description of Artificial Sequence: Synthetic peptide
  Seed: RMCSLMQGSTLPRRS
RMCSLMQYSGLPMRS

SEQ ID NO: 127850 - protein, 15 aa, Artificial Sequence
  Description of Artificial Sequence: Synthetic peptide
  Seed: RMCSLMQGSTLPRRS
RMCSLMQYSGLPVRS

SEQ ID NO: 127851 - protein, 15 aa, Artificial Sequence
  Description of Artificial Sequence: Synthetic peptide
  Seed: RMCSLMQGSTLPRRS
RMCSLMQYSNLPARS

SEQ ID NO: 127852 - protein, 15 aa, Artificial Sequence
  Description of Artificial Sequence: Synthetic peptide
  Seed: RMCSLMQGSTLPRRS
RMCSLMQYSNLPFRS

SEQ ID NO: 127853 - protein, 15 aa, Artificial Sequence
  Description of Artificial Sequence: Synthetic peptide
  Seed: RMCSLMQGSTLPRRS
RMCSLMQYSNLPIRS

SEQ ID NO: 127854 - protein, 15 aa, Artificial Sequence
  Description of Artificial Sequence: Synthetic peptide
  Seed: RMCSLMQGSTLPRRS
RMCSLMQYSNLPLRS

SEQ ID NO: 127855 - protein, 15 aa, Artificial Sequence
  Description of Artificial Sequence: Synthetic peptide
  Seed: RMCSLMQGSTLPRRS
RMCSLMQYSNLPMRS

SEQ ID NO: 127856 - protein, 15 aa, Artificial Sequence
  Description of Artificial Sequence: Synthetic peptide
  Seed: RMCSLMQGSTLPRRS
RMCSLMQYSNLPSRS

SEQ ID NO: 127857 - protein, 15 aa, Artificial Sequence
  Description of Artificial Sequence: Synthetic peptide
  Seed: RMCSLMQGSTLPRRS
RMCSLMQYSNLPTRS

SEQ ID NO: 127858 - protein, 15 aa, Artificial Sequence
  Description of Artificial Sequence: Synthetic peptide
  Seed: RMCSLMQGSTLPRRS
RMCSLMQYSNLPVRS

SEQ ID NO: 127859 - protein, 15 aa, Artificial Sequence
  Description of Artificial Sequence: Synthetic peptide
  Seed: RMCSLMQGSTLPRRS
RMCSLMQYSSLPARS

SEQ ID NO: 127860 - protein, 15 aa, Artificial Sequence
  Description of Artificial Sequence: Synthetic peptide
  Seed: RMCSLMQGSTLPRRS
RMCSLMQYSSLPFRS

SEQ ID NO: 127861 - protein, 15 aa, Artificial Sequence
  Description of Artificial Sequence: Synthetic peptide
  Seed: RMCSLMQGSTLPRRS
RMCSLMQYSSLPIRS

SEQ ID NO: 127862 - protein, 15 aa, Artificial Sequence
  Description of Artificial Sequence: Synthetic peptide
  Seed: RMCSLMQGSTLPRRS
RMCSLMQYSSLPLRS

SEQ ID NO: 127863 - protein, 15 aa, Artificial Sequence
  Description of Artificial Sequence: Synthetic peptide
  Seed: RMCSLMQGSTLPRRS
RMCSLMQYSSLPMRS

SEQ ID NO: 127864 - protein, 15 aa, Artificial Sequence
  Description of Artificial Sequence: Synthetic peptide
  Seed: RMCSLMQGSTLPRRS
RMCSLMQYSSLPSRS

SEQ ID NO: 127865 - protein, 15 aa, Artificial Sequence
  Description of Artificial Sequence: Synthetic peptide
  Seed: RMCSLMQGSTLPRRS
RMCSLMQYSSLPTRS

SEQ ID NO: 127866 - protein, 15 aa, Artificial Sequence
  Description of Artificial Sequence: Synthetic peptide
  Seed: RMCSLMQGSTLPRRS
RMCSLMQYSSLPVRS

SEQ ID NO: 127867 - protein, 15 aa, Artificial Sequence
  Description of Artificial Sequence: Synthetic peptide
  Seed: RMCSLMQGSTLPRRS
RMCSLMQYSTLPARS

SEQ ID NO: 127868 - protein, 15 aa, Artificial Sequence
  Description of Artificial Sequence: Synthetic peptide
  Seed: RMCSLMQGSTLPRRS
RMCSLMQYSTLPIRS

SEQ ID NO: 127869 - protein, 15 aa, Artificial Sequence
  Description of Artificial Sequence: Synthetic peptide
  Seed: RMCSLMQGSTLPRRS
RMCSLMQYSTLPLRS

SEQ ID NO: 127870 - protein, 15 aa, Artificial Sequence
  Description of Artificial Sequence: Synthetic peptide
  Seed: RMCSLMQGSTLPRRS
RMCSLMQYSTLPVRS

SEQ ID NO: 127871 - protein, 15 aa, Artificial Sequence
  Description of Artificial Sequence: Synthetic peptide
  Seed: RMCSLMQGSTLPRRS
RMCSMMQFSNLPIRS

SEQ ID NO: 127872 - protein, 15 aa, Artificial Sequence
  Description of Artificial Sequence: Synthetic peptide
  Seed: RMCSLMQGSTLPRRS
RMCSMMQFSNLPLRS

SEQ ID NO: 127873 - protein, 15 aa, Artificial Sequence
  Description of Artificial Sequence: Synthetic peptide
  Seed: RMCSLMQGSTLPRRS
RMCSMMQFSNLPVRS

SEQ ID NO: 127874 - protein, 15 aa, Artificial Sequence
  Description of Artificial Sequence: Synthetic peptide
  Seed: RMCSLMQGSTLPRRS
RMCSMMQFSRLPYRS

SEQ ID NO: 127875 - protein, 15 aa, Artificial Sequence
  Description of Artificial Sequence: Synthetic peptide
  Seed: RMCSLMQGSTLPRRS
RMCSMMQFSSLPIRS

SEQ ID NO: 127876 - protein, 15 aa, Artificial Sequence
  Description of Artificial Sequence: Synthetic peptide
  Seed: RMCSLMQGSTLPRRS
RMCSMMQFSSLPLRS

SEQ ID NO: 127877 - protein, 15 aa, Artificial Sequence
  Description of Artificial Sequence: Synthetic peptide
  Seed: RMCSLMQGSTLPRRS
RMCSMMQFSSLPVRS

SEQ ID NO: 127878 - protein, 15 aa, Artificial Sequence
  Description of Artificial Sequence: Synthetic peptide
  Seed: RMCSLMQGSTLPRRS
RMCSMMQISKLPARS

SEQ ID NO: 127879 - protein, 15 aa, Artificial Sequence
  Description of Artificial Sequence: Synthetic peptide
  Seed: RMCSLMQGSTLPRRS
RMCSMMQISKLPGRS

SEQ ID NO: 127880 - protein, 15 aa, Artificial Sequence
  Description of Artificial Sequence: Synthetic peptide
  Seed: RMCSLMQGSTLPRRS
RMCSMMQISKLPSRS

SEQ ID NO: 127881 - protein, 15 aa, Artificial Sequence
  Description of Artificial Sequence: Synthetic peptide
  Seed: RMCSLMQGSTLPRRS
RMCSMMQISRLPARS

SEQ ID NO: 127882 - protein, 15 aa, Artificial Sequence
  Description of Artificial Sequence: Synthetic peptide
  Seed: RMCSLMQGSTLPRRS
RMCSMMQISRLPFRS

SEQ ID NO: 127883 - protein, 15 aa, Artificial Sequence
  Description of Artificial Sequence: Synthetic peptide
  Seed: RMCSLMQGSTLPRRS
RMCSMMQISRLPGRS

SEQ ID NO: 127884 - protein, 15 aa, Artificial Sequence
  Description of Artificial Sequence: Synthetic peptide
  Seed: RMCSLMQGSTLPRRS
RMCSMMQISRLPHRS

SEQ ID NO: 127885 - protein, 15 aa, Artificial Sequence
  Description of Artificial Sequence: Synthetic peptide
  Seed: RMCSLMQGSTLPRRS
RMCSMMQISRLPKRS

SEQ ID NO: 127886 - protein, 15 aa, Artificial Sequence
  Description of Artificial Sequence: Synthetic peptide
  Seed: RMCSLMQGSTLPRRS
RMCSMMQISRLPQRS

SEQ ID NO: 127887 - protein, 15 aa, Artificial Sequence
  Description of Artificial Sequence: Synthetic peptide
  Seed: RMCSLMQGSTLPRRS
RMCSMMQISRLPRRS

SEQ ID NO: 127888 - protein, 15 aa, Artificial Sequence
  Description of Artificial Sequence: Synthetic peptide
  Seed: RMCSLMQGSTLPRRS
RMCSMMQISRLPSRS

SEQ ID NO: 127889 - protein, 15 aa, Artificial Sequence
  Description of Artificial Sequence: Synthetic peptide
  Seed: RMCSLMQGSTLPRRS
RMCSMMQISRLPTRS

SEQ ID NO: 127890 - protein, 15 aa, Artificial Sequence
  Description of Artificial Sequence: Synthetic peptide
  Seed: RMCSLMQGSTLPRRS
RMCSMMQISRLPVRS

SEQ ID NO: 127891 - protein, 15 aa, Artificial Sequence
  Description of Artificial Sequence: Synthetic peptide
  Seed: RMCSLMQGSTLPRRS
RMCSMMQISRLPYRS

SEQ ID NO: 127892 - protein, 15 aa, Artificial Sequence
  Description of Artificial Sequence: Synthetic peptide
  Seed: RMCSLMQGSTLPRRS
RMCSMMQLSKLPARS

SEQ ID NO: 127893 - protein, 15 aa, Artificial Sequence
  Description of Artificial Sequence: Synthetic peptide
  Seed: RMCSLMQGSTLPRRS
RMCSMMQLSKLPGRS

SEQ ID NO: 127894 - protein, 15 aa, Artificial Sequence
  Description of Artificial Sequence: Synthetic peptide
  Seed: RMCSLMQGSTLPRRS
RMCSMMQLSKLPQRS

SEQ ID NO: 127895 - protein, 15 aa, Artificial Sequence
  Description of Artificial Sequence: Synthetic peptide
  Seed: RMCSLMQGSTLPRRS
RMCSMMQLSKLPSRS

SEQ ID NO: 127896 - protein, 15 aa, Artificial Sequence
  Description of Artificial Sequence: Synthetic peptide
  Seed: RMCSLMQGSTLPRRS
RMCSMMQLSKLPTRS

SEQ ID NO: 127897 - protein, 15 aa, Artificial Sequence
  Description of Artificial Sequence: Synthetic peptide
  Seed: RMCSLMQGSTLPRRS
RMCSMMQLSRLPARS

SEQ ID NO: 127898 - protein, 15 aa, Artificial Sequence
  Description of Artificial Sequence: Synthetic peptide
  Seed: RMCSLMQGSTLPRRS
RMCSMMQLSRLPGRS

SEQ ID NO: 127899 - protein, 15 aa, Artificial Sequence
  Description of Artificial Sequence: Synthetic peptide
  Seed: RMCSLMQGSTLPRRS
RMCSMMQLSRLPHRS

SEQ ID NO: 127900 - protein, 15 aa, Artificial Sequence
  Description of Artificial Sequence: Synthetic peptide
  Seed: RMCSLMQGSTLPRRS
RMCSMMQLSRLPIRS

SEQ ID NO: 127901 - protein, 15 aa, Artificial Sequence
  Description of Artificial Sequence: Synthetic peptide
  Seed: RMCSLMQGSTLPRRS
RMCSMMQLSRLPKRS

SEQ ID NO: 127902 - protein, 15 aa, Artificial Sequence
  Description of Artificial Sequence: Synthetic peptide
  Seed: RMCSLMQGSTLPRRS
RMCSMMQLSRLPLRS

SEQ ID NO: 127903 - protein, 15 aa, Artificial Sequence
  Description of Artificial Sequence: Synthetic peptide
  Seed: RMCSLMQGSTLPRRS
RMCSMMQLSRLPMRS

SEQ ID NO: 127904 - protein, 15 aa, Artificial Sequence
  Description of Artificial Sequence: Synthetic peptide
  Seed: RMCSLMQGSTLPRRS
RMCSMMQLSRLPQRS

SEQ ID NO: 127905 - protein, 15 aa, Artificial Sequence
  Description of Artificial Sequence: Synthetic peptide
  Seed: RMCSLMQGSTLPRRS
RMCSMMQLSRLPRRS

SEQ ID NO: 127906 - protein, 15 aa, Artificial Sequence
  Description of Artificial Sequence: Synthetic peptide
  Seed: RMCSLMQGSTLPRRS
RMCSMMQLSRLPSRS

SEQ ID NO: 127907 - protein, 15 aa, Artificial Sequence
  Description of Artificial Sequence: Synthetic peptide
  Seed: RMCSLMQGSTLPRRS
RMCSMMQLSRLPTRS

SEQ ID NO: 127908 - protein, 15 aa, Artificial Sequence
  Description of Artificial Sequence: Synthetic peptide
  Seed: RMCSLMQGSTLPRRS
RMCSMMQLSRLPVRS

SEQ ID NO: 127909 - protein, 15 aa, Artificial Sequence
  Description of Artificial Sequence: Synthetic peptide
  Seed: RMCSLMQGSTLPRRS
RMCSMMQLSRLPYRS

SEQ ID NO: 127910 - protein, 15 aa, Artificial Sequence
  Description of Artificial Sequence: Synthetic peptide
  Seed: RMCSLMQGSTLPRRS
RMCSMMQMSKLPARS

SEQ ID NO: 127911 - protein, 15 aa, Artificial Sequence
  Description of Artificial Sequence: Synthetic peptide
  Seed: RMCSLMQGSTLPRRS
RMCSMMQMSKLPGRS

SEQ ID NO: 127912 - protein, 15 aa, Artificial Sequence
  Description of Artificial Sequence: Synthetic peptide
  Seed: RMCSLMQGSTLPRRS
RMCSMMQMSKLPHRS

SEQ ID NO: 127913 - protein, 15 aa, Artificial Sequence
  Description of Artificial Sequence: Synthetic peptide
  Seed: RMCSLMQGSTLPRRS
RMCSMMQMSKLPQRS

SEQ ID NO: 127914 - protein, 15 aa, Artificial Sequence
  Description of Artificial Sequence: Synthetic peptide
  Seed: RMCSLMQGSTLPRRS
RMCSMMQMSKLPRRS

SEQ ID NO: 127915 - protein, 15 aa, Artificial Sequence
  Description of Artificial Sequence: Synthetic peptide
  Seed: RMCSLMQGSTLPRRS
RMCSMMQMSKLPSRS

SEQ ID NO: 127916 - protein, 15 aa, Artificial Sequence
  Description of Artificial Sequence: Synthetic peptide
  Seed: RMCSLMQGSTLPRRS
RMCSMMQMSKLPTRS

SEQ ID NO: 127917 - protein, 15 aa, Artificial Sequence
  Description of Artificial Sequence: Synthetic peptide
  Seed: RMCSLMQGSTLPRRS
RMCSMMQMSRLPARS

SEQ ID NO: 127918 - protein, 15 aa, Artificial Sequence
  Description of Artificial Sequence: Synthetic peptide
  Seed: RMCSLMQGSTLPRRS
RMCSMMQMSRLPGRS

SEQ ID NO: 127919 - protein, 15 aa, Artificial Sequence
  Description of Artificial Sequence: Synthetic peptide
  Seed: RMCSLMQGSTLPRRS
RMCSMMQMSRLPHRS

SEQ ID NO: 127920 - protein, 15 aa, Artificial Sequence
  Description of Artificial Sequence: Synthetic peptide
  Seed: RMCSLMQGSTLPRRS
RMCSMMQMSRLPIRS

SEQ ID NO: 127921 - protein, 15 aa, Artificial Sequence
  Description of Artificial Sequence: Synthetic peptide
  Seed: RMCSLMQGSTLPRRS
RMCSMMQMSRLPKRS

SEQ ID NO: 127922 - protein, 15 aa, Artificial Sequence
  Description of Artificial Sequence: Synthetic peptide
  Seed: RMCSLMQGSTLPRRS
RMCSMMQMSRLPLRS

SEQ ID NO: 127923 - protein, 15 aa, Artificial Sequence
  Description of Artificial Sequence: Synthetic peptide
  Seed: RMCSLMQGSTLPRRS
RMCSMMQMSRLPMRS

SEQ ID NO: 127924 - protein, 15 aa, Artificial Sequence
  Description of Artificial Sequence: Synthetic peptide
  Seed: RMCSLMQGSTLPRRS
RMCSMMQMSRLPQRS

SEQ ID NO: 127925 - protein, 15 aa, Artificial Sequence
  Description of Artificial Sequence: Synthetic peptide
  Seed: RMCSLMQGSTLPRRS
RMCSMMQMSRLPRRS

SEQ ID NO: 127926 - protein, 15 aa, Artificial Sequence
  Description of Artificial Sequence: Synthetic peptide
  Seed: RMCSLMQGSTLPRRS
RMCSMMQMSRLPSRS

SEQ ID NO: 127927 - protein, 15 aa, Artificial Sequence
  Description of Artificial Sequence: Synthetic peptide
  Seed: RMCSLMQGSTLPRRS
RMCSMMQMSRLPTRS

SEQ ID NO: 127928 - protein, 15 aa, Artificial Sequence
  Description of Artificial Sequence: Synthetic peptide
  Seed: RMCSLMQGSTLPRRS
RMCSMMQMSRLPVRS

SEQ ID NO: 127929 - protein, 15 aa, Artificial Sequence
  Description of Artificial Sequence: Synthetic peptide
  Seed: RMCSLMQGSTLPRRS
RMCSMMQMSRLPYRS

SEQ ID NO: 127930 - protein, 15 aa, Artificial Sequence
  Description of Artificial Sequence: Synthetic peptide
  Seed: RMCSLMQGSTLPRRS
RMCSMMQVSKLPARS

SEQ ID NO: 127931 - protein, 15 aa, Artificial Sequence
  Description of Artificial Sequence: Synthetic peptide
  Seed: RMCSLMQGSTLPRRS
RMCSMMQVSKLPSRS

SEQ ID NO: 127932 - protein, 15 aa, Artificial Sequence
  Description of Artificial Sequence: Synthetic peptide
  Seed: RMCSLMQGSTLPRRS
RMCSMMQVSRLPARS

SEQ ID NO: 127933 - protein, 15 aa, Artificial Sequence
  Description of Artificial Sequence: Synthetic peptide
  Seed: RMCSLMQGSTLPRRS
RMCSMMQVSRLPGRS

SEQ ID NO: 127934 - protein, 15 aa, Artificial Sequence
  Description of Artificial Sequence: Synthetic peptide
  Seed: RMCSLMQGSTLPRRS
RMCSMMQVSRLPQRS

SEQ ID NO: 127935 - protein, 15 aa, Artificial Sequence
  Description of Artificial Sequence: Synthetic peptide
  Seed: RMCSLMQGSTLPRRS
RMCSMMQVSRLPSRS

SEQ ID NO: 127936 - protein, 15 aa, Artificial Sequence
  Description of Artificial Sequence: Synthetic peptide
  Seed: RMCSLMQGSTLPRRS
RMCSMMQVSRLPYRS

SEQ ID NO: 127937 - protein, 15 aa, Artificial Sequence
  Description of Artificial Sequence: Synthetic peptide
  Seed: RMCSLMQGSTLPRRS
RMCSMMQYSALPLRS

SEQ ID NO: 127938 - protein, 15 aa, Artificial Sequence
  Description of Artificial Sequence: Synthetic peptide
  Seed: RMCSLMQGSTLPRRS
RMCSMMQYSGLPLRS

SEQ ID NO: 127939 - protein, 15 aa, Artificial Sequence
  Description of Artificial Sequence: Synthetic peptide
  Seed: RMCSLMQGSTLPRRS
RMCSMMQYSNLPIRS

SEQ ID NO: 127940 - protein, 15 aa, Artificial Sequence
  Description of Artificial Sequence: Synthetic peptide
  Seed: RMCSLMQGSTLPRRS
RMCSMMQYSNLPLRS

SEQ ID NO: 127941 - protein, 15 aa, Artificial Sequence
  Description of Artificial Sequence: Synthetic peptide
  Seed: RMCSLMQGSTLPRRS
RMCSMMQYSNLPVRS

SEQ ID NO: 127942 - protein, 15 aa, Artificial Sequence
  Description of Artificial Sequence: Synthetic peptide
  Seed: RMCSLMQGSTLPRRS
RMCSMMQYSSLPARS

SEQ ID NO: 127943 - protein, 15 aa, Artificial Sequence
  Description of Artificial Sequence: Synthetic peptide
  Seed: RMCSLMQGSTLPRRS
RMCSMMQYSSLPIRS

SEQ ID NO: 127944 - protein, 15 aa, Artificial Sequence
  Description of Artificial Sequence: Synthetic peptide
  Seed: RMCSLMQGSTLPRRS
RMCSMMQYSSLPLRS

SEQ ID NO: 127945 - protein, 15 aa, Artificial Sequence
  Description of Artificial Sequence: Synthetic peptide
  Seed: RMCSLMQGSTLPRRS
RMCSMMQYSSLPMRS

SEQ ID NO: 127946 - protein, 15 aa, Artificial Sequence
  Description of Artificial Sequence: Synthetic peptide
  Seed: RMCSLMQGSTLPRRS
RMCSMMQYSSLPVRS

SEQ ID NO: 127947 - protein, 15 aa, Artificial Sequence
  Description of Artificial Sequence: Synthetic peptide
  Seed: RMCSLMQGSTLPRRS
RMCSVMQASRLPSRS

SEQ ID NO: 127948 - protein, 15 aa, Artificial Sequence
  Description of Artificial Sequence: Synthetic peptide
  Seed: RMCSLMQGSTLPRRS
RMCSVMQFSALPIRS

SEQ ID NO: 127949 - protein, 15 aa, Artificial Sequence
  Description of Artificial Sequence: Synthetic peptide
  Seed: RMCSLMQGSTLPRRS
RMCSVMQFSALPLRS

SEQ ID NO: 127950 - protein, 15 aa, Artificial Sequence
  Description of Artificial Sequence: Synthetic peptide
  Seed: RMCSLMQGSTLPRRS
RMCSVMQFSALPVRS

SEQ ID NO: 127951 - protein, 15 aa, Artificial Sequence
  Description of Artificial Sequence: Synthetic peptide
  Seed: RMCSLMQGSTLPRRS
RMCSVMQFSGLPIRS

SEQ ID NO: 127952 - protein, 15 aa, Artificial Sequence
  Description of Artificial Sequence: Synthetic peptide
  Seed: RMCSLMQGSTLPRRS
RMCSVMQFSGLPLRS

SEQ ID NO: 127953 - protein, 15 aa, Artificial Sequence
  Description of Artificial Sequence: Synthetic peptide
  Seed: RMCSLMQGSTLPRRS
RMCSVMQFSGLPVRS

SEQ ID NO: 127954 - protein, 15 aa, Artificial Sequence
  Description of Artificial Sequence: Synthetic peptide
  Seed: RMCSLMQGSTLPRRS
RMCSVMQFSNLPARS

SEQ ID NO: 127955 - protein, 15 aa, Artificial Sequence
  Description of Artificial Sequence: Synthetic peptide
  Seed: RMCSLMQGSTLPRRS
RMCSVMQFSNLPIRS

SEQ ID NO: 127956 - protein, 15 aa, Artificial Sequence
  Description of Artificial Sequence: Synthetic peptide
  Seed: RMCSLMQGSTLPRRS
RMCSVMQFSNLPLRS

SEQ ID NO: 127957 - protein, 15 aa, Artificial Sequence
  Description of Artificial Sequence: Synthetic peptide
  Seed: RMCSLMQGSTLPRRS
RMCSVMQFSNLPMRS

SEQ ID NO: 127958 - protein, 15 aa, Artificial Sequence
  Description of Artificial Sequence: Synthetic peptide
  Seed: RMCSLMQGSTLPRRS
RMCSVMQFSNLPVRS

SEQ ID NO: 127959 - protein, 15 aa, Artificial Sequence
  Description of Artificial Sequence: Synthetic peptide
  Seed: RMCSLMQGSTLPRRS
RMCSVMQFSSLPARS

SEQ ID NO: 127960 - protein, 15 aa, Artificial Sequence
  Description of Artificial Sequence: Synthetic peptide
  Seed: RMCSLMQGSTLPRRS
RMCSVMQFSSLPIRS

SEQ ID NO: 127961 - protein, 15 aa, Artificial Sequence
  Description of Artificial Sequence: Synthetic peptide
  Seed: RMCSLMQGSTLPRRS
RMCSVMQFSSLPLRS

SEQ ID NO: 127962 - protein, 15 aa, Artificial Sequence
  Description of Artificial Sequence: Synthetic peptide
  Seed: RMCSLMQGSTLPRRS
RMCSVMQFSSLPMRS

SEQ ID NO: 127963 - protein, 15 aa, Artificial Sequence
  Description of Artificial Sequence: Synthetic peptide
  Seed: RMCSLMQGSTLPRRS
RMCSVMQFSSLPTRS

SEQ ID NO: 127964 - protein, 15 aa, Artificial Sequence
  Description of Artificial Sequence: Synthetic peptide
  Seed: RMCSLMQGSTLPRRS
RMCSVMQFSSLPVRS

SEQ ID NO: 127965 - protein, 15 aa, Artificial Sequence
  Description of Artificial Sequence: Synthetic peptide
  Seed: RMCSLMQGSTLPRRS
RMCSVMQFSTLPIRS

SEQ ID NO: 127966 - protein, 15 aa, Artificial Sequence
  Description of Artificial Sequence: Synthetic peptide
  Seed: RMCSLMQGSTLPRRS
RMCSVMQFSTLPLRS

SEQ ID NO: 127967 - protein, 15 aa, Artificial Sequence
  Description of Artificial Sequence: Synthetic peptide
  Seed: RMCSLMQGSTLPRRS
RMCSVMQFSTLPVRS

SEQ ID NO: 127968 - protein, 15 aa, Artificial Sequence
  Description of Artificial Sequence: Synthetic peptide
  Seed: RMCSLMQGSTLPRRS
RMCSVMQISKLPARS

SEQ ID NO: 127969 - protein, 15 aa, Artificial Sequence
  Description of Artificial Sequence: Synthetic peptide
  Seed: RMCSLMQGSTLPRRS
RMCSVMQISKLPGRS

SEQ ID NO: 127970 - protein, 15 aa, Artificial Sequence
  Description of Artificial Sequence: Synthetic peptide
  Seed: RMCSLMQGSTLPRRS
RMCSVMQISKLPQRS

SEQ ID NO: 127971 - protein, 15 aa, Artificial Sequence
  Description of Artificial Sequence: Synthetic peptide
  Seed: RMCSLMQGSTLPRRS
RMCSVMQISKLPSRS

SEQ ID NO: 127972 - protein, 15 aa, Artificial Sequence
  Description of Artificial Sequence: Synthetic peptide
  Seed: RMCSLMQGSTLPRRS
RMCSVMQISNLPARS

SEQ ID NO: 127973 - protein, 15 aa, Artificial Sequence
  Description of Artificial Sequence: Synthetic peptide
  Seed: RMCSLMQGSTLPRRS
RMCSVMQISRLPARS

SEQ ID NO: 127974 - protein, 15 aa, Artificial Sequence
  Description of Artificial Sequence: Synthetic peptide
  Seed: RMCSLMQGSTLPRRS
RMCSVMQISRLPGRS

SEQ ID NO: 127975 - protein, 15 aa, Artificial Sequence
  Description of Artificial Sequence: Synthetic peptide
  Seed: RMCSLMQGSTLPRRS
RMCSVMQISRLPHRS

SEQ ID NO: 127976 - protein, 15 aa, Artificial Sequence
  Description of Artificial Sequence: Synthetic peptide
  Seed: RMCSLMQGSTLPRRS
RMCSVMQISRLPKRS

SEQ ID NO: 127977 - protein, 15 aa, Artificial Sequence
  Description of Artificial Sequence: Synthetic peptide
  Seed: RMCSLMQGSTLPRRS
RMCSVMQISRLPQRS

SEQ ID NO: 127978 - protein, 15 aa, Artificial Sequence
  Description of Artificial Sequence: Synthetic peptide
  Seed: RMCSLMQGSTLPRRS
RMCSVMQISRLPRRS

SEQ ID NO: 127979 - protein, 15 aa, Artificial Sequence
  Description of Artificial Sequence: Synthetic peptide
  Seed: RMCSLMQGSTLPRRS
RMCSVMQISRLPSRS

SEQ ID NO: 127980 - protein, 15 aa, Artificial Sequence
  Description of Artificial Sequence: Synthetic peptide
  Seed: RMCSLMQGSTLPRRS
RMCSVMQISRLPTRS

SEQ ID NO: 127981 - protein, 15 aa, Artificial Sequence
  Description of Artificial Sequence: Synthetic peptide
  Seed: RMCSLMQGSTLPRRS
RMCSVMQISRLPYRS

SEQ ID NO: 127982 - protein, 15 aa, Artificial Sequence
  Description of Artificial Sequence: Synthetic peptide
  Seed: RMCSLMQGSTLPRRS
RMCSVMQISTLPARS

SEQ ID NO: 127983 - protein, 15 aa, Artificial Sequence
  Description of Artificial Sequence: Synthetic peptide
  Seed: RMCSLMQGSTLPRRS
RMCSVMQISTLPSRS

SEQ ID NO: 127984 - protein, 15 aa, Artificial Sequence
  Description of Artificial Sequence: Synthetic peptide
  Seed: RMCSLMQGSTLPRRS
RMCSVMQLSKLPARS

SEQ ID NO: 127985 - protein, 15 aa, Artificial Sequence
  Description of Artificial Sequence: Synthetic peptide
  Seed: RMCSLMQGSTLPRRS
RMCSVMQLSKLPGRS

SEQ ID NO: 127986 - protein, 15 aa, Artificial Sequence
  Description of Artificial Sequence: Synthetic peptide
  Seed: RMCSLMQGSTLPRRS
RMCSVMQLSKLPHRS

SEQ ID NO: 127987 - protein, 15 aa, Artificial Sequence
  Description of Artificial Sequence: Synthetic peptide
  Seed: RMCSLMQGSTLPRRS
RMCSVMQLSKLPQRS

SEQ ID NO: 127988 - protein, 15 aa, Artificial Sequence
  Description of Artificial Sequence: Synthetic peptide
  Seed: RMCSLMQGSTLPRRS
RMCSVMQLSKLPSRS

SEQ ID NO: 127989 - protein, 15 aa, Artificial Sequence
  Description of Artificial Sequence: Synthetic peptide
  Seed: RMCSLMQGSTLPRRS
RMCSVMQLSKLPTRS

SEQ ID NO: 127990 - protein, 15 aa, Artificial Sequence
  Description of Artificial Sequence: Synthetic peptide
  Seed: RMCSLMQGSTLPRRS
RMCSVMQLSRLPARS

SEQ ID NO: 127991 - protein, 15 aa, Artificial Sequence
  Description of Artificial Sequence: Synthetic peptide
  Seed: RMCSLMQGSTLPRRS
RMCSVMQLSRLPGRS

SEQ ID NO: 127992 - protein, 15 aa, Artificial Sequence
  Description of Artificial Sequence: Synthetic peptide
  Seed: RMCSLMQGSTLPRRS
RMCSVMQLSRLPHRS

SEQ ID NO: 127993 - protein, 15 aa, Artificial Sequence
  Description of Artificial Sequence: Synthetic peptide
  Seed: RMCSLMQGSTLPRRS
RMCSVMQLSRLPKRS

SEQ ID NO: 127994 - protein, 15 aa, Artificial Sequence
  Description of Artificial Sequence: Synthetic peptide
  Seed: RMCSLMQGSTLPRRS
RMCSVMQLSRLPLRS

SEQ ID NO: 127995 - protein, 15 aa, Artificial Sequence
  Description of Artificial Sequence: Synthetic peptide
  Seed: RMCSLMQGSTLPRRS
RMCSVMQLSRLPMRS

SEQ ID NO: 127996 - protein, 15 aa, Artificial Sequence
  Description of Artificial Sequence: Synthetic peptide
  Seed: RMCSLMQGSTLPRRS
RMCSVMQLSRLPQRS

SEQ ID NO: 127997 - protein, 15 aa, Artificial Sequence
  Description of Artificial Sequence: Synthetic peptide
  Seed: RMCSLMQGSTLPRRS
RMCSVMQLSRLPRRS

SEQ ID NO: 127998 - protein, 15 aa, Artificial Sequence
  Description of Artificial Sequence: Synthetic peptide
  Seed: RMCSLMQGSTLPRRS
RMCSVMQLSRLPSRS

SEQ ID NO: 127999 - protein, 15 aa, Artificial Sequence
  Description of Artificial Sequence: Synthetic peptide
  Seed: RMCSLMQGSTLPRRS
RMCSVMQLSRLPTRS

SEQ ID NO: 128000 - protein, 15 aa, Artificial Sequence
  Description of Artificial Sequence: Synthetic peptide
  Seed: RMCSLMQGSTLPRRS
RMCSVMQLSRLPVRS

SEQ ID NO: 128001 - protein, 15 aa, Artificial Sequence
  Description of Artificial Sequence: Synthetic peptide
  Seed: RMCSLMQGSTLPRRS
RMCSVMQLSTLPARS

SEQ ID NO: 128002 - protein, 15 aa, Artificial Sequence
  Description of Artificial Sequence: Synthetic peptide
  Seed: RMCSLMQGSTLPRRS
RMCSVMQMSKLPARS

SEQ ID NO: 128003 - protein, 15 aa, Artificial Sequence
  Description of Artificial Sequence: Synthetic peptide
  Seed: RMCSLMQGSTLPRRS
RMCSVMQMSKLPGRS

SEQ ID NO: 128004 - protein, 15 aa, Artificial Sequence
  Description of Artificial Sequence: Synthetic peptide
  Seed: RMCSLMQGSTLPRRS
RMCSVMQMSKLPHRS

SEQ ID NO: 128005 - protein, 15 aa, Artificial Sequence
  Description of Artificial Sequence: Synthetic peptide
  Seed: RMCSLMQGSTLPRRS
RMCSVMQMSKLPMRS

SEQ ID NO: 128006 - protein, 15 aa, Artificial Sequence
  Description of Artificial Sequence: Synthetic peptide
  Seed: RMCSLMQGSTLPRRS
RMCSVMQMSKLPQRS

SEQ ID NO: 128007 - protein, 15 aa, Artificial Sequence
  Description of Artificial Sequence: Synthetic peptide
  Seed: RMCSLMQGSTLPRRS
RMCSVMQMSKLPSRS

SEQ ID NO: 128008 - protein, 15 aa, Artificial Sequence
  Description of Artificial Sequence: Synthetic peptide
  Seed: RMCSLMQGSTLPRRS
RMCSVMQMSKLPTRS

SEQ ID NO: 128009 - protein, 15 aa, Artificial Sequence
  Description of Artificial Sequence: Synthetic peptide
  Seed: RMCSLMQGSTLPRRS
RMCSVMQMSNLPARS

SEQ ID NO: 128010 - protein, 15 aa, Artificial Sequence
  Description of Artificial Sequence: Synthetic peptide
  Seed: RMCSLMQGSTLPRRS
RMCSVMQMSNLPSRS

SEQ ID NO: 128011 - protein, 15 aa, Artificial Sequence
  Description of Artificial Sequence: Synthetic peptide
  Seed: RMCSLMQGSTLPRRS
RMCSVMQMSRLPARS

SEQ ID NO: 128012 - protein, 15 aa, Artificial Sequence
  Description of Artificial Sequence: Synthetic peptide
  Seed: RMCSLMQGSTLPRRS
RMCSVMQMSRLPGRS

SEQ ID NO: 128013 - protein, 15 aa, Artificial Sequence
  Description of Artificial Sequence: Synthetic peptide
  Seed: RMCSLMQGSTLPRRS
RMCSVMQMSRLPHRS

SEQ ID NO: 128014 - protein, 15 aa, Artificial Sequence
  Description of Artificial Sequence: Synthetic peptide
  Seed: RMCSLMQGSTLPRRS
RMCSVMQMSRLPIRS

SEQ ID NO: 128015 - protein, 15 aa, Artificial Sequence
  Description of Artificial Sequence: Synthetic peptide
  Seed: RMCSLMQGSTLPRRS
RMCSVMQMSRLPKRS

SEQ ID NO: 128016 - protein, 15 aa, Artificial Sequence
  Description of Artificial Sequence: Synthetic peptide
  Seed: RMCSLMQGSTLPRRS
RMCSVMQMSRLPLRS

SEQ ID NO: 128017 - protein, 15 aa, Artificial Sequence
  Description of Artificial Sequence: Synthetic peptide
  Seed: RMCSLMQGSTLPRRS
RMCSVMQMSRLPMRS

SEQ ID NO: 128018 - protein, 15 aa, Artificial Sequence
  Description of Artificial Sequence: Synthetic peptide
  Seed: RMCSLMQGSTLPRRS
RMCSVMQMSRLPNRS

SEQ ID NO: 128019 - protein, 15 aa, Artificial Sequence
  Description of Artificial Sequence: Synthetic peptide
  Seed: RMCSLMQGSTLPRRS
RMCSVMQMSRLPQRS

SEQ ID NO: 128020 - protein, 15 aa, Artificial Sequence
  Description of Artificial Sequence: Synthetic peptide
  Seed: RMCSLMQGSTLPRRS
RMCSVMQMSRLPRRS

SEQ ID NO: 128021 - protein, 15 aa, Artificial Sequence
  Description of Artificial Sequence: Synthetic peptide
  Seed: RMCSLMQGSTLPRRS
RMCSVMQMSRLPSRS

SEQ ID NO: 128022 - protein, 15 aa, Artificial Sequence
  Description of Artificial Sequence: Synthetic peptide
  Seed: RMCSLMQGSTLPRRS
RMCSVMQMSRLPTRS

SEQ ID NO: 128023 - protein, 15 aa, Artificial Sequence
  Description of Artificial Sequence: Synthetic peptide
  Seed: RMCSLMQGSTLPRRS
RMCSVMQMSRLPVRS

SEQ ID NO: 128024 - protein, 15 aa, Artificial Sequence
  Description of Artificial Sequence: Synthetic peptide
  Seed: RMCSLMQGSTLPRRS
RMCSVMQMSSLPARS

SEQ ID NO: 128025 - protein, 15 aa, Artificial Sequence
  Description of Artificial Sequence: Synthetic peptide
  Seed: RMCSLMQGSTLPRRS
RMCSVMQMSSLPSRS

SEQ ID NO: 128026 - protein, 15 aa, Artificial Sequence
  Description of Artificial Sequence: Synthetic peptide
  Seed: RMCSLMQGSTLPRRS
RMCSVMQMSTLPARS

SEQ ID NO: 128027 - protein, 15 aa, Artificial Sequence
  Description of Artificial Sequence: Synthetic peptide
  Seed: RMCSLMQGSTLPRRS
RMCSVMQMSTLPSRS

SEQ ID NO: 128028 - protein, 15 aa, Artificial Sequence
  Description of Artificial Sequence: Synthetic peptide
  Seed: RMCSLMQGSTLPRRS
RMCSVMQVSKLPARS

SEQ ID NO: 128029 - protein, 15 aa, Artificial Sequence
  Description of Artificial Sequence: Synthetic peptide
  Seed: RMCSLMQGSTLPRRS
RMCSVMQVSKLPSRS

SEQ ID NO: 128030 - protein, 15 aa, Artificial Sequence
  Description of Artificial Sequence: Synthetic peptide
  Seed: RMCSLMQGSTLPRRS
RMCSVMQVSRLPARS

SEQ ID NO: 128031 - protein, 15 aa, Artificial Sequence
  Description of Artificial Sequence: Synthetic peptide
  Seed: RMCSLMQGSTLPRRS
RMCSVMQVSRLPGRS

SEQ ID NO: 128032 - protein, 15 aa, Artificial Sequence
  Description of Artificial Sequence: Synthetic peptide
  Seed: RMCSLMQGSTLPRRS
RMCSVMQVSRLPQRS

SEQ ID NO: 128033 - protein, 15 aa, Artificial Sequence
  Description of Artificial Sequence: Synthetic peptide
  Seed: RMCSLMQGSTLPRRS
RMCSVMQVSRLPSRS

SEQ ID NO: 128034 - protein, 15 aa, Artificial Sequence
  Description of Artificial Sequence: Synthetic peptide
  Seed: RMCSLMQGSTLPRRS
RMCSVMQWSNLPIRS

SEQ ID NO: 128035 - protein, 15 aa, Artificial Sequence
  Description of Artificial Sequence: Synthetic peptide
  Seed: RMCSLMQGSTLPRRS
RMCSVMQWSNLPLRS

SEQ ID NO: 128036 - protein, 15 aa, Artificial Sequence
  Description of Artificial Sequence: Synthetic peptide
  Seed: RMCSLMQGSTLPRRS
RMCSVMQWSNLPVRS

SEQ ID NO: 128037 - protein, 15 aa, Artificial Sequence
  Description of Artificial Sequence: Synthetic peptide
  Seed: RMCSLMQGSTLPRRS
RMCSVMQWSSLPIRS

SEQ ID NO: 128038 - protein, 15 aa, Artificial Sequence
  Description of Artificial Sequence: Synthetic peptide
  Seed: RMCSLMQGSTLPRRS
RMCSVMQWSSLPLRS

SEQ ID NO: 128039 - protein, 15 aa, Artificial Sequence
  Description of Artificial Sequence: Synthetic peptide
  Seed: RMCSLMQGSTLPRRS
RMCSVMQWSSLPVRS

SEQ ID NO: 128040 - protein, 15 aa, Artificial Sequence
  Description of Artificial Sequence: Synthetic peptide
  Seed: RMCSLMQGSTLPRRS
RMCSVMQYSALPARS

SEQ ID NO: 128041 - protein, 15 aa, Artificial Sequence
  Description of Artificial Sequence: Synthetic peptide
  Seed: RMCSLMQGSTLPRRS
RMCSVMQYSALPIRS

SEQ ID NO: 128042 - protein, 15 aa, Artificial Sequence
  Description of Artificial Sequence: Synthetic peptide
  Seed: RMCSLMQGSTLPRRS
RMCSVMQYSALPLRS

SEQ ID NO: 128043 - protein, 15 aa, Artificial Sequence
  Description of Artificial Sequence: Synthetic peptide
  Seed: RMCSLMQGSTLPRRS
RMCSVMQYSALPMRS

SEQ ID NO: 128044 - protein, 15 aa, Artificial Sequence
  Description of Artificial Sequence: Synthetic peptide
  Seed: RMCSLMQGSTLPRRS
RMCSVMQYSALPVRS

SEQ ID NO: 128045 - protein, 15 aa, Artificial Sequence
  Description of Artificial Sequence: Synthetic peptide
  Seed: RMCSLMQGSTLPRRS
RMCSVMQYSGLPARS

SEQ ID NO: 128046 - protein, 15 aa, Artificial Sequence
  Description of Artificial Sequence: Synthetic peptide
  Seed: RMCSLMQGSTLPRRS
RMCSVMQYSGLPIRS

SEQ ID NO: 128047 - protein, 15 aa, Artificial Sequence
  Description of Artificial Sequence: Synthetic peptide
  Seed: RMCSLMQGSTLPRRS
RMCSVMQYSGLPLRS

SEQ ID NO: 128048 - protein, 15 aa, Artificial Sequence
  Description of Artificial Sequence: Synthetic peptide
  Seed: RMCSLMQGSTLPRRS
RMCSVMQYSGLPMRS

SEQ ID NO: 128049 - protein, 15 aa, Artificial Sequence
  Description of Artificial Sequence: Synthetic peptide
  Seed: RMCSLMQGSTLPRRS
RMCSVMQYSGLPVRS

SEQ ID NO: 128050 - protein, 15 aa, Artificial Sequence
  Description of Artificial Sequence: Synthetic peptide
  Seed: RMCSLMQGSTLPRRS
RMCSVMQYSNLPARS

SEQ ID NO: 128051 - protein, 15 aa, Artificial Sequence
  Description of Artificial Sequence: Synthetic peptide
  Seed: RMCSLMQGSTLPRRS
RMCSVMQYSNLPIRS

SEQ ID NO: 128052 - protein, 15 aa, Artificial Sequence
  Description of Artificial Sequence: Synthetic peptide
  Seed: RMCSLMQGSTLPRRS
RMCSVMQYSNLPLRS

SEQ ID NO: 128053 - protein, 15 aa, Artificial Sequence
  Description of Artificial Sequence: Synthetic peptide
  Seed: RMCSLMQGSTLPRRS
RMCSVMQYSNLPMRS

SEQ ID NO: 128054 - protein, 15 aa, Artificial Sequence
  Description of Artificial Sequence: Synthetic peptide
  Seed: RMCSLMQGSTLPRRS
RMCSVMQYSNLPTRS

SEQ ID NO: 128055 - protein, 15 aa, Artificial Sequence
  Description of Artificial Sequence: Synthetic peptide
  Seed: RMCSLMQGSTLPRRS
RMCSVMQYSNLPVRS

SEQ ID NO: 128056 - protein, 15 aa, Artificial Sequence
  Description of Artificial Sequence: Synthetic peptide
  Seed: RMCSLMQGSTLPRRS
RMCSVMQYSSLPARS

SEQ ID NO: 128057 - protein, 15 aa, Artificial Sequence
  Description of Artificial Sequence: Synthetic peptide
  Seed: RMCSLMQGSTLPRRS
RMCSVMQYSSLPIRS

SEQ ID NO: 128058 - protein, 15 aa, Artificial Sequence
  Description of Artificial Sequence: Synthetic peptide
  Seed: RMCSLMQGSTLPRRS
RMCSVMQYSSLPLRS

SEQ ID NO: 128059 - protein, 15 aa, Artificial Sequence
  Description of Artificial Sequence: Synthetic peptide
  Seed: RMCSLMQGSTLPRRS
RMCSVMQYSSLPMRS

SEQ ID NO: 128060 - protein, 15 aa, Artificial Sequence
  Description of Artificial Sequence: Synthetic peptide
  Seed: RMCSLMQGSTLPRRS
RMCSVMQYSSLPSRS

SEQ ID NO: 128061 - protein, 15 aa, Artificial Sequence
  Description of Artificial Sequence: Synthetic peptide
  Seed: RMCSLMQGSTLPRRS
RMCSVMQYSSLPTRS

SEQ ID NO: 128062 - protein, 15 aa, Artificial Sequence
  Description of Artificial Sequence: Synthetic peptide
  Seed: RMCSLMQGSTLPRRS
RMCSVMQYSSLPVRS

SEQ ID NO: 128063 - protein, 15 aa, Artificial Sequence
  Description of Artificial Sequence: Synthetic peptide
  Seed: RMCSLMQGSTLPRRS
RMCSVMQYSTLPIRS

SEQ ID NO: 128064 - protein, 15 aa, Artificial Sequence
  Description of Artificial Sequence: Synthetic peptide
  Seed: RMCSLMQGSTLPRRS
RMCSVMQYSTLPLRS

SEQ ID NO: 128065 - protein, 15 aa, Artificial Sequence
  Description of Artificial Sequence: Synthetic peptide
  Seed: RMCSLMQGSTLPRRS
RMCSVMQYSTLPVRS

SEQ ID NO: 128066 - protein, 15 aa, Artificial Sequence
  Description of Artificial Sequence: Synthetic peptide
  Seed: RMCSLMQGSTLPRRS
RMCSYMQISRLPARS

SEQ ID NO: 128067 - protein, 15 aa, Artificial Sequence
  Description of Artificial Sequence: Synthetic peptide
  Seed: RMCSLMQGSTLPRRS
RMCSYMQISRLPSRS

SEQ ID NO: 128068 - protein, 15 aa, Artificial Sequence
  Description of Artificial Sequence: Synthetic peptide
  Seed: RMCSLMQGSTLPRRS
RMCSYMQLSRLPARS

SEQ ID NO: 128069 - protein, 15 aa, Artificial Sequence
  Description of Artificial Sequence: Synthetic peptide
  Seed: RMCSLMQGSTLPRRS
RMCSYMQLSRLPSRS

SEQ ID NO: 128070 - protein, 15 aa, Artificial Sequence
  Description of Artificial Sequence: Synthetic peptide
  Seed: RMCSLMQGSTLPRRS
RMCSYMQMSRLPARS

SEQ ID NO: 128071 - protein, 15 aa, Artificial Sequence
  Description of Artificial Sequence: Synthetic peptide
  Seed: RMCSLMQGSTLPRRS
RMCSYMQMSRLPSRS

SEQ ID NO: 128072 - protein, 15 aa, Artificial Sequence
  Description of Artificial Sequence: Synthetic peptide
  Seed: RMCSLMQGSTLPRRS
RMCSLMAGSALARRA

SEQ ID NO: 128073 - protein, 15 aa, Artificial Sequence
  Description of Artificial Sequence: Synthetic peptide
  Seed: RMCSLMQGSTLPRRS
RMCSLMAGSALARRV

SEQ ID NO: 128074 - protein, 15 aa, Artificial Sequence
  Description of Artificial Sequence: Synthetic peptide
  Seed: RMCSLMQGSTLPRRS
RMCSLMFGSALARRA

SEQ ID NO: 128075 - protein, 15 aa, Artificial Sequence
  Description of Artificial Sequence: Synthetic peptide
  Seed: RMCSLMQGSTLPRRS
RMCSLMFGSALARRV

SEQ ID NO: 128076 - protein, 15 aa, Artificial Sequence
  Description of Artificial Sequence: Synthetic peptide
  Seed: RMCSLMQGSTLPRRS
RMCSLMFGSGLARRA

SEQ ID NO: 128077 - protein, 15 aa, Artificial Sequence
  Description of Artificial Sequence: Synthetic peptide
  Seed: RMCSLMQGSTLPRRS
RMCSLMFGSGLARRV

SEQ ID NO: 128078 - protein, 15 aa, Artificial Sequence
  Description of Artificial Sequence: Synthetic peptide
  Seed: RMCSLMQGSTLPRRS
RMCSLMIGSALARRA

SEQ ID NO: 128079 - protein, 15 aa, Artificial Sequence
  Description of Artificial Sequence: Synthetic peptide
  Seed: RMCSLMQGSTLPRRS
RMCSLMIGSALARRI

SEQ ID NO: 128080 - protein, 15 aa, Artificial Sequence
  Description of Artificial Sequence: Synthetic peptide
  Seed: RMCSLMQGSTLPRRS
RMCSLMIGSALARRS

SEQ ID NO: 128081 - protein, 15 aa, Artificial Sequence
  Description of Artificial Sequence: Synthetic peptide
  Seed: RMCSLMQGSTLPRRS
RMCSLMIGSALARRT

SEQ ID NO: 128082 - protein, 15 aa, Artificial Sequence
  Description of Artificial Sequence: Synthetic peptide
  Seed: RMCSLMQGSTLPRRS
RMCSLMIGSALARRV

SEQ ID NO: 128083 - protein, 15 aa, Artificial Sequence
  Description of Artificial Sequence: Synthetic peptide
  Seed: RMCSLMQGSTLPRRS
RMCSLMIGSALVRRA

SEQ ID NO: 128084 - protein, 15 aa, Artificial Sequence
  Description of Artificial Sequence: Synthetic peptide
  Seed: RMCSLMQGSTLPRRS
RMCSLMIGSGLARRA

SEQ ID NO: 128085 - protein, 15 aa, Artificial Sequence
  Description of Artificial Sequence: Synthetic peptide
  Seed: RMCSLMQGSTLPRRS
RMCSLMIGSGLARRI

SEQ ID NO: 128086 - protein, 15 aa, Artificial Sequence
  Description of Artificial Sequence: Synthetic peptide
  Seed: RMCSLMQGSTLPRRS
RMCSLMIGSGLARRS

SEQ ID NO: 128087 - protein, 15 aa, Artificial Sequence
  Description of Artificial Sequence: Synthetic peptide
  Seed: RMCSLMQGSTLPRRS
RMCSLMIGSGLARRT

SEQ ID NO: 128088 - protein, 15 aa, Artificial Sequence
  Description of Artificial Sequence: Synthetic peptide
  Seed: RMCSLMQGSTLPRRS
RMCSLMIGSGLARRV

SEQ ID NO: 128089 - protein, 15 aa, Artificial Sequence
  Description of Artificial Sequence: Synthetic peptide
  Seed: RMCSLMQGSTLPRRS
RMCSLMIGSGLVRRA

SEQ ID NO: 128090 - protein, 15 aa, Artificial Sequence
  Description of Artificial Sequence: Synthetic peptide
  Seed: RMCSLMQGSTLPRRS
RMCSLMIGSGLVRRS

SEQ ID NO: 128091 - protein, 15 aa, Artificial Sequence
  Description of Artificial Sequence: Synthetic peptide
  Seed: RMCSLMQGSTLPRRS
RMCSLMIGSGLVRRV

SEQ ID NO: 128092 - protein, 15 aa, Artificial Sequence
  Description of Artificial Sequence: Synthetic peptide
  Seed: RMCSLMQGSTLPRRS
RMCSLMMGSALARRA

SEQ ID NO: 128093 - protein, 15 aa, Artificial Sequence
  Description of Artificial Sequence: Synthetic peptide
  Seed: RMCSLMQGSTLPRRS
RMCSLMMGSALARRV

SEQ ID NO: 128094 - protein, 15 aa, Artificial Sequence
  Description of Artificial Sequence: Synthetic peptide
  Seed: RMCSLMQGSTLPRRS
RMCSLMMGSGLARRV

SEQ ID NO: 128095 - protein, 15 aa, Artificial Sequence
  Description of Artificial Sequence: Synthetic peptide
  Seed: RMCSLMQGSTLPRRS
RMCSLMPGSALARRA

SEQ ID NO: 128096 - protein, 15 aa, Artificial Sequence
  Description of Artificial Sequence: Synthetic peptide
  Seed: RMCSLMQGSTLPRRS
RMCSLMPGSGLARRA

SEQ ID NO: 128097 - protein, 15 aa, Artificial Sequence
  Description of Artificial Sequence: Synthetic peptide
  Seed: RMCSLMQGSTLPRRS
RMCSLMVGSALARRA

SEQ ID NO: 128098 - protein, 15 aa, Artificial Sequence
  Description of Artificial Sequence: Synthetic peptide
  Seed: RMCSLMQGSTLPRRS
RMCSLMVGSALARRI

SEQ ID NO: 128099 - protein, 15 aa, Artificial Sequence
  Description of Artificial Sequence: Synthetic peptide
  Seed: RMCSLMQGSTLPRRS
RMCSLMVGSALARRS

SEQ ID NO: 128100 - protein, 15 aa, Artificial Sequence
  Description of Artificial Sequence: Synthetic peptide
  Seed: RMCSLMQGSTLPRRS
RMCSLMVGSALARRT

SEQ ID NO: 128101 - protein, 15 aa, Artificial Sequence
  Description of Artificial Sequence: Synthetic peptide
  Seed: RMCSLMQGSTLPRRS
RMCSLMVGSALARRV

SEQ ID NO: 128102 - protein, 15 aa, Artificial Sequence
  Description of Artificial Sequence: Synthetic peptide
  Seed: RMCSLMQGSTLPRRS
RMCSLMVGSGLARRA

SEQ ID NO: 128103 - protein, 15 aa, Artificial Sequence
  Description of Artificial Sequence: Synthetic peptide
  Seed: RMCSLMQGSTLPRRS
RMCSLMVGSGLARRI

SEQ ID NO: 128104 - protein, 15 aa, Artificial Sequence
  Description of Artificial Sequence: Synthetic peptide
  Seed: RMCSLMQGSTLPRRS
RMCSLMVGSGLARRS

SEQ ID NO: 128105 - protein, 15 aa, Artificial Sequence
  Description of Artificial Sequence: Synthetic peptide
  Seed: RMCSLMQGSTLPRRS
RMCSLMVGSGLARRT

SEQ ID NO: 128106 - protein, 15 aa, Artificial Sequence
  Description of Artificial Sequence: Synthetic peptide
  Seed: RMCSLMQGSTLPRRS
RMCSLMVGSGLARRV

SEQ ID NO: 128107 - protein, 16 aa, Artificial Sequence
  Description of Artificial Sequence: Synthetic peptide
  Seed: RMCSLMQGSTLPRRSG
RMFSLAQASTAPRRSG

SEQ ID NO: 128108 - protein, 16 aa, Artificial Sequence
  Description of Artificial Sequence: Synthetic peptide
  Seed: RMCSLMQGSTLPRRSG
RMFSLAQASTFPRRSG

SEQ ID NO: 128109 - protein, 16 aa, Artificial Sequence
  Description of Artificial Sequence: Synthetic peptide
  Seed: RMCSLMQGSTLPRRSG
RMFSLAQASTGPRRSG

SEQ ID NO: 128110 - protein, 16 aa, Artificial Sequence
  Description of Artificial Sequence: Synthetic peptide
  Seed: RMCSLMQGSTLPRRSG
RMFSLAQASTHPRRSG

SEQ ID NO: 128111 - protein, 16 aa, Artificial Sequence
  Description of Artificial Sequence: Synthetic peptide
  Seed: RMCSLMQGSTLPRRSG
RMFSLAQASTIPRRSG

SEQ ID NO: 128112 - protein, 16 aa, Artificial Sequence
  Description of Artificial Sequence: Synthetic peptide
  Seed: RMCSLMQGSTLPRRSG
RMFSLAQASTLPRRSG

SEQ ID NO: 128113 - protein, 16 aa, Artificial Sequence
  Description of Artificial Sequence: Synthetic peptide
  Seed: RMCSLMQGSTLPRRSG
RMFSLAQASTMPRRSG

SEQ ID NO: 128114 - protein, 16 aa, Artificial Sequence
  Description of Artificial Sequence: Synthetic peptide
  Seed: RMCSLMQGSTLPRRSG
RMFSLAQASTNPRRSG

SEQ ID NO: 128115 - protein, 16 aa, Artificial Sequence
  Description of Artificial Sequence: Synthetic peptide
  Seed: RMCSLMQGSTLPRRSG
RMFSLAQASTQPRRSG

SEQ ID NO: 128116 - protein, 16 aa, Artificial Sequence
  Description of Artificial Sequence: Synthetic peptide
  Seed: RMCSLMQGSTLPRRSG
RMFSLAQASTSPRRSG

SEQ ID NO: 128117 - protein, 16 aa, Artificial Sequence
  Description of Artificial Sequence: Synthetic peptide
  Seed: RMCSLMQGSTLPRRSG
RMFSLAQASTTPRRSG

SEQ ID NO: 128118 - protein, 16 aa, Artificial Sequence
  Description of Artificial Sequence: Synthetic peptide
  Seed: RMCSLMQGSTLPRRSG
RMFSLAQASTVPRRSG

SEQ ID NO: 128119 - protein, 16 aa, Artificial Sequence
  Description of Artificial Sequence: Synthetic peptide
  Seed: RMCSLMQGSTLPRRSG
RMFSLAQGSTAPRRSG

SEQ ID NO: 128120 - protein, 16 aa, Artificial Sequence
  Description of Artificial Sequence: Synthetic peptide
  Seed: RMCSLMQGSTLPRRSG
RMFSLAQGSTIPRRSG

SEQ ID NO: 128121 - protein, 16 aa, Artificial Sequence
  Description of Artificial Sequence: Synthetic peptide
  Seed: RMCSLMQGSTLPRRSG
RMFSLAQGSTLPRRSG

SEQ ID NO: 128122 - protein, 16 aa, Artificial Sequence
  Description of Artificial Sequence: Synthetic peptide
  Seed: RMCSLMQGSTLPRRSG
RMFSLAQGSTMPRRSG

SEQ ID NO: 128123 - protein, 16 aa, Artificial Sequence
  Description of Artificial Sequence: Synthetic peptide
  Seed: RMCSLMQGSTLPRRSG
RMFSLAQGSTNPRRSG

SEQ ID NO: 128124 - protein, 16 aa, Artificial Sequence
  Description of Artificial Sequence: Synthetic peptide
  Seed: RMCSLMQGSTLPRRSG
RMFSLAQGSTSPRRSG

SEQ ID NO: 128125 - protein, 16 aa, Artificial Sequence
  Description of Artificial Sequence: Synthetic peptide
  Seed: RMCSLMQGSTLPRRSG
RMFSLAQGSTTPRRSG

SEQ ID NO: 128126 - protein, 16 aa, Artificial Sequence
  Description of Artificial Sequence: Synthetic peptide
  Seed: RMCSLMQGSTLPRRSG
RMFSLAQGSTVPRRSG

SEQ ID NO: 128127 - protein, 16 aa, Artificial Sequence
  Description of Artificial Sequence: Synthetic peptide
  Seed: RMCSLMQGSTLPRRSG
RMFSLAQISTAPRRSG

SEQ ID NO: 128128 - protein, 16 aa, Artificial Sequence
  Description of Artificial Sequence: Synthetic peptide
  Seed: RMCSLMQGSTLPRRSG
RMFSLAQISTNPRRSG

SEQ ID NO: 128129 - protein, 16 aa, Artificial Sequence
  Description of Artificial Sequence: Synthetic peptide
  Seed: RMCSLMQGSTLPRRSG
RMFSLAQISTSPRRSG

SEQ ID NO: 128130 - protein, 16 aa, Artificial Sequence
  Description of Artificial Sequence: Synthetic peptide
  Seed: RMCSLMQGSTLPRRSG
RMFSLAQISTTPRRSG

SEQ ID NO: 128131 - protein, 16 aa, Artificial Sequence
  Description of Artificial Sequence: Synthetic peptide
  Seed: RMCSLMQGSTLPRRSG
RMFSLAQISTVPRRSG

SEQ ID NO: 128132 - protein, 16 aa, Artificial Sequence
  Description of Artificial Sequence: Synthetic peptide
  Seed: RMCSLMQGSTLPRRSG
RMFSLAQNSTAPRRSG

SEQ ID NO: 128133 - protein, 16 aa, Artificial Sequence
  Description of Artificial Sequence: Synthetic peptide
  Seed: RMCSLMQGSTLPRRSG
RMFSLAQNSTIPRRSG

SEQ ID NO: 128134 - protein, 16 aa, Artificial Sequence
  Description of Artificial Sequence: Synthetic peptide
  Seed: RMCSLMQGSTLPRRSG
RMFSLAQNSTLPRRSG

SEQ ID NO: 128135 - protein, 16 aa, Artificial Sequence
  Description of Artificial Sequence: Synthetic peptide
  Seed: RMCSLMQGSTLPRRSG
RMFSLAQNSTNPRRSG

SEQ ID NO: 128136 - protein, 16 aa, Artificial Sequence
  Description of Artificial Sequence: Synthetic peptide
  Seed: RMCSLMQGSTLPRRSG
RMFSLAQNSTSPRRSG

SEQ ID NO: 128137 - protein, 16 aa, Artificial Sequence
  Description of Artificial Sequence: Synthetic peptide
  Seed: RMCSLMQGSTLPRRSG
RMFSLAQNSTVPRRSG

SEQ ID NO: 128138 - protein, 16 aa, Artificial Sequence
  Description of Artificial Sequence: Synthetic peptide
  Seed: RMCSLMQGSTLPRRSG
RMFSLAQPSTAPRRSG

SEQ ID NO: 128139 - protein, 16 aa, Artificial Sequence
  Description of Artificial Sequence: Synthetic peptide
  Seed: RMCSLMQGSTLPRRSG
RMFSLAQPSTIPRRSG

SEQ ID NO: 128140 - protein, 16 aa, Artificial Sequence
  Description of Artificial Sequence: Synthetic peptide
  Seed: RMCSLMQGSTLPRRSG
RMFSLAQPSTLPRRSG

SEQ ID NO: 128141 - protein, 16 aa, Artificial Sequence
  Description of Artificial Sequence: Synthetic peptide
  Seed: RMCSLMQGSTLPRRSG
RMFSLAQPSTMPRRSG

SEQ ID NO: 128142 - protein, 16 aa, Artificial Sequence
  Description of Artificial Sequence: Synthetic peptide
  Seed: RMCSLMQGSTLPRRSG
RMFSLAQPSTNPRRSG

SEQ ID NO: 128143 - protein, 16 aa, Artificial Sequence
  Description of Artificial Sequence: Synthetic peptide
  Seed: RMCSLMQGSTLPRRSG
RMFSLAQPSTSPRRSG

SEQ ID NO: 128144 - protein, 16 aa, Artificial Sequence
  Description of Artificial Sequence: Synthetic peptide
  Seed: RMCSLMQGSTLPRRSG
RMFSLAQPSTTPRRSG

SEQ ID NO: 128145 - protein, 16 aa, Artificial Sequence
  Description of Artificial Sequence: Synthetic peptide
  Seed: RMCSLMQGSTLPRRSG
RMFSLAQPSTVPRRSG

SEQ ID NO: 128146 - protein, 16 aa, Artificial Sequence
  Description of Artificial Sequence: Synthetic peptide
  Seed: RMCSLMQGSTLPRRSG
RMFSLAQSSTAPRRSG

SEQ ID NO: 128147 - protein, 16 aa, Artificial Sequence
  Description of Artificial Sequence: Synthetic peptide
  Seed: RMCSLMQGSTLPRRSG
RMFSLAQSSTIPRRSG

SEQ ID NO: 128148 - protein, 16 aa, Artificial Sequence
  Description of Artificial Sequence: Synthetic peptide
  Seed: RMCSLMQGSTLPRRSG
RMFSLAQSSTLPRRSG

SEQ ID NO: 128149 - protein, 16 aa, Artificial Sequence
  Description of Artificial Sequence: Synthetic peptide
  Seed: RMCSLMQGSTLPRRSG
RMFSLAQSSTMPRRSG

SEQ ID NO: 128150 - protein, 16 aa, Artificial Sequence
  Description of Artificial Sequence: Synthetic peptide
  Seed: RMCSLMQGSTLPRRSG
RMFSLAQSSTNPRRSG

SEQ ID NO: 128151 - protein, 16 aa, Artificial Sequence
  Description of Artificial Sequence: Synthetic peptide
  Seed: RMCSLMQGSTLPRRSG
RMFSLAQSSTSPRRSG

SEQ ID NO: 128152 - protein, 16 aa, Artificial Sequence
  Description of Artificial Sequence: Synthetic peptide
  Seed: RMCSLMQGSTLPRRSG
RMFSLAQSSTTPRRSG

SEQ ID NO: 128153 - protein, 16 aa, Artificial Sequence
  Description of Artificial Sequence: Synthetic peptide
  Seed: RMCSLMQGSTLPRRSG
RMFSLAQSSTVPRRSG

SEQ ID NO: 128154 - protein, 16 aa, Artificial Sequence
  Description of Artificial Sequence: Synthetic peptide
  Seed: RMCSLMQGSTLPRRSG
RMFSLAQTSTAPRRSG

SEQ ID NO: 128155 - protein, 16 aa, Artificial Sequence
  Description of Artificial Sequence: Synthetic peptide
  Seed: RMCSLMQGSTLPRRSG
RMFSLAQTSTIPRRSG

SEQ ID NO: 128156 - protein, 16 aa, Artificial Sequence
  Description of Artificial Sequence: Synthetic peptide
  Seed: RMCSLMQGSTLPRRSG
RMFSLAQTSTLPRRSG

SEQ ID NO: 128157 - protein, 16 aa, Artificial Sequence
  Description of Artificial Sequence: Synthetic peptide
  Seed: RMCSLMQGSTLPRRSG
RMFSLAQTSTMPRRSG

SEQ ID NO: 128158 - protein, 16 aa, Artificial Sequence
  Description of Artificial Sequence: Synthetic peptide
  Seed: RMCSLMQGSTLPRRSG
RMFSLAQTSTNPRRSG

SEQ ID NO: 128159 - protein, 16 aa, Artificial Sequence
  Description of Artificial Sequence: Synthetic peptide
  Seed: RMCSLMQGSTLPRRSG
RMFSLAQTSTSPRRSG

SEQ ID NO: 128160 - protein, 16 aa, Artificial Sequence
  Description of Artificial Sequence: Synthetic peptide
  Seed: RMCSLMQGSTLPRRSG
RMFSLAQTSTTPRRSG

SEQ ID NO: 128161 - protein, 16 aa, Artificial Sequence
  Description of Artificial Sequence: Synthetic peptide
  Seed: RMCSLMQGSTLPRRSG
RMFSLAQTSTVPRRSG

SEQ ID NO: 128162 - protein, 16 aa, Artificial Sequence
  Description of Artificial Sequence: Synthetic peptide
  Seed: RMCSLMQGSTLPRRSG
RMFSLAQVSTAPRRSG

SEQ ID NO: 128163 - protein, 16 aa, Artificial Sequence
  Description of Artificial Sequence: Synthetic peptide
  Seed: RMCSLMQGSTLPRRSG
RMFSLAQVSTIPRRSG

SEQ ID NO: 128164 - protein, 16 aa, Artificial Sequence
  Description of Artificial Sequence: Synthetic peptide
  Seed: RMCSLMQGSTLPRRSG
RMFSLAQVSTLPRRSG

SEQ ID NO: 128165 - protein, 16 aa, Artificial Sequence
  Description of Artificial Sequence: Synthetic peptide
  Seed: RMCSLMQGSTLPRRSG
RMFSLAQVSTMPRRSG

SEQ ID NO: 128166 - protein, 16 aa, Artificial Sequence
  Description of Artificial Sequence: Synthetic peptide
  Seed: RMCSLMQGSTLPRRSG
RMFSLAQVSTNPRRSG

SEQ ID NO: 128167 - protein, 16 aa, Artificial Sequence
  Description of Artificial Sequence: Synthetic peptide
  Seed: RMCSLMQGSTLPRRSG
RMFSLAQVSTSPRRSG

SEQ ID NO: 128168 - protein, 16 aa, Artificial Sequence
  Description of Artificial Sequence: Synthetic peptide
  Seed: RMCSLMQGSTLPRRSG
RMFSLAQVSTTPRRSG

SEQ ID NO: 128169 - protein, 16 aa, Artificial Sequence
  Description of Artificial Sequence: Synthetic peptide
  Seed: RMCSLMQGSTLPRRSG
RMFSLAQVSTVPRRSG

SEQ ID NO: 128170 - protein, 16 aa, Artificial Sequence
  Description of Artificial Sequence: Synthetic peptide
  Seed: RMCSLMQGSTLPRRSG
RMFSLCQASTLPRRSG

SEQ ID NO: 128171 - protein, 16 aa, Artificial Sequence
  Description of Artificial Sequence: Synthetic peptide
  Seed: RMCSLMQGSTLPRRSG
RMFSLCQASTVPRRSG

SEQ ID NO: 128172 - protein, 16 aa, Artificial Sequence
  Description of Artificial Sequence: Synthetic peptide
  Seed: RMCSLMQGSTLPRRSG
RMFSLEQASTAPRRSG

SEQ ID NO: 128173 - protein, 16 aa, Artificial Sequence
  Description of Artificial Sequence: Synthetic peptide
  Seed: RMCSLMQGSTLPRRSG
RMFSLEQASTIPRRSG

SEQ ID NO: 128174 - protein, 16 aa, Artificial Sequence
  Description of Artificial Sequence: Synthetic peptide
  Seed: RMCSLMQGSTLPRRSG
RMFSLEQASTLPRRSG

SEQ ID NO: 128175 - protein, 16 aa, Artificial Sequence
  Description of Artificial Sequence: Synthetic peptide
  Seed: RMCSLMQGSTLPRRSG
RMFSLEQASTVPRRSG

SEQ ID NO: 128176 - protein, 16 aa, Artificial Sequence
  Description of Artificial Sequence: Synthetic peptide
  Seed: RMCSLMQGSTLPRRSG
RMFSLEQGSTAPRRSG

SEQ ID NO: 128177 - protein, 16 aa, Artificial Sequence
  Description of Artificial Sequence: Synthetic peptide
  Seed: RMCSLMQGSTLPRRSG
RMFSLEQGSTIPRRSG

SEQ ID NO: 128178 - protein, 16 aa, Artificial Sequence
  Description of Artificial Sequence: Synthetic peptide
  Seed: RMCSLMQGSTLPRRSG
RMFSLEQGSTLPRRSG

SEQ ID NO: 128179 - protein, 16 aa, Artificial Sequence
  Description of Artificial Sequence: Synthetic peptide
  Seed: RMCSLMQGSTLPRRSG
RMFSLEQGSTVPRRSG

SEQ ID NO: 128180 - protein, 16 aa, Artificial Sequence
  Description of Artificial Sequence: Synthetic peptide
  Seed: RMCSLMQGSTLPRRSG
RMFSLEQSSTLPRRSG

SEQ ID NO: 128181 - protein, 16 aa, Artificial Sequence
  Description of Artificial Sequence: Synthetic peptide
  Seed: RMCSLMQGSTLPRRSG
RMFSLEQSSTVPRRSG

SEQ ID NO: 128182 - protein, 16 aa, Artificial Sequence
  Description of Artificial Sequence: Synthetic peptide
  Seed: RMCSLMQGSTLPRRSG
RMFSLFQASTAPRRSG

SEQ ID NO: 128183 - protein, 16 aa, Artificial Sequence
  Description of Artificial Sequence: Synthetic peptide
  Seed: RMCSLMQGSTLPRRSG
RMFSLFQASTIPRRSG

SEQ ID NO: 128184 - protein, 16 aa, Artificial Sequence
  Description of Artificial Sequence: Synthetic peptide
  Seed: RMCSLMQGSTLPRRSG
RMFSLFQASTLPRRSG

SEQ ID NO: 128185 - protein, 16 aa, Artificial Sequence
  Description of Artificial Sequence: Synthetic peptide
  Seed: RMCSLMQGSTLPRRSG
RMFSLFQASTNPRRSG

SEQ ID NO: 128186 - protein, 16 aa, Artificial Sequence
  Description of Artificial Sequence: Synthetic peptide
  Seed: RMCSLMQGSTLPRRSG
RMFSLFQASTSPRRSG

SEQ ID NO: 128187 - protein, 16 aa, Artificial Sequence
  Description of Artificial Sequence: Synthetic peptide
  Seed: RMCSLMQGSTLPRRSG
RMFSLFQASTVPRRSG

SEQ ID NO: 128188 - protein, 16 aa, Artificial Sequence
  Description of Artificial Sequence: Synthetic peptide
  Seed: RMCSLMQGSTLPRRSG
RMFSLFQGSTAPRRSG

SEQ ID NO: 128189 - protein, 16 aa, Artificial Sequence
  Description of Artificial Sequence: Synthetic peptide
  Seed: RMCSLMQGSTLPRRSG
RMFSLFQGSTIPRRSG

SEQ ID NO: 128190 - protein, 16 aa, Artificial Sequence
  Description of Artificial Sequence: Synthetic peptide
  Seed: RMCSLMQGSTLPRRSG
RMFSLFQGSTLPRRSG

SEQ ID NO: 128191 - protein, 16 aa, Artificial Sequence
  Description of Artificial Sequence: Synthetic peptide
  Seed: RMCSLMQGSTLPRRSG
RMFSLFQGSTVPRRSG

SEQ ID NO: 128192 - protein, 16 aa, Artificial Sequence
  Description of Artificial Sequence: Synthetic peptide
  Seed: RMCSLMQGSTLPRRSG
RMFSLFQPSTAPRRSG

SEQ ID NO: 128193 - protein, 16 aa, Artificial Sequence
  Description of Artificial Sequence: Synthetic peptide
  Seed: RMCSLMQGSTLPRRSG
RMFSLFQPSTNPRRSG

SEQ ID NO: 128194 - protein, 16 aa, Artificial Sequence
  Description of Artificial Sequence: Synthetic peptide
  Seed: RMCSLMQGSTLPRRSG
RMFSLFQPSTSPRRSG

SEQ ID NO: 128195 - protein, 16 aa, Artificial Sequence
  Description of Artificial Sequence: Synthetic peptide
  Seed: RMCSLMQGSTLPRRSG
RMFSLFQSSTAPRRSG

SEQ ID NO: 128196 - protein, 16 aa, Artificial Sequence
  Description of Artificial Sequence: Synthetic peptide
  Seed: RMCSLMQGSTLPRRSG
RMFSLFQSSTVPRRSG

SEQ ID NO: 128197 - protein, 16 aa, Artificial Sequence
  Description of Artificial Sequence: Synthetic peptide
  Seed: RMCSLMQGSTLPRRSG
RMFSLFQTSTAPRRSG

SEQ ID NO: 128198 - protein, 16 aa, Artificial Sequence
  Description of Artificial Sequence: Synthetic peptide
  Seed: RMCSLMQGSTLPRRSG
RMFSLFQVSTAPRRSG

SEQ ID NO: 128199 - protein, 16 aa, Artificial Sequence
  Description of Artificial Sequence: Synthetic peptide
  Seed: RMCSLMQGSTLPRRSG
RMFSLGQASTAPRRSG

SEQ ID NO: 128200 - protein, 16 aa, Artificial Sequence
  Description of Artificial Sequence: Synthetic peptide
  Seed: RMCSLMQGSTLPRRSG
RMFSLGQASTIPRRSG

SEQ ID NO: 128201 - protein, 16 aa, Artificial Sequence
  Description of Artificial Sequence: Synthetic peptide
  Seed: RMCSLMQGSTLPRRSG
RMFSLGQASTLPRRSG

SEQ ID NO: 128202 - protein, 16 aa, Artificial Sequence
  Description of Artificial Sequence: Synthetic peptide
  Seed: RMCSLMQGSTLPRRSG
RMFSLGQASTVPRRSG

SEQ ID NO: 128203 - protein, 16 aa, Artificial Sequence
  Description of Artificial Sequence: Synthetic peptide
  Seed: RMCSLMQGSTLPRRSG
RMFSLGQGSTLPRRSG

SEQ ID NO: 128204 - protein, 16 aa, Artificial Sequence
  Description of Artificial Sequence: Synthetic peptide
  Seed: RMCSLMQGSTLPRRSG
RMFSLGQSSTIPRRSG

SEQ ID NO: 128205 - protein, 16 aa, Artificial Sequence
  Description of Artificial Sequence: Synthetic peptide
  Seed: RMCSLMQGSTLPRRSG
RMFSLGQSSTLPRRSG

SEQ ID NO: 128206 - protein, 16 aa, Artificial Sequence
  Description of Artificial Sequence: Synthetic peptide
  Seed: RMCSLMQGSTLPRRSG
RMFSLGQSSTVPRRSG

SEQ ID NO: 128207 - protein, 16 aa, Artificial Sequence
  Description of Artificial Sequence: Synthetic peptide
  Seed: RMCSLMQGSTLPRRSG
RMFSLIQASTAPRRSG

SEQ ID NO: 128208 - protein, 16 aa, Artificial Sequence
  Description of Artificial Sequence: Synthetic peptide
  Seed: RMCSLMQGSTLPRRSG
RMFSLIQASTCPRRSG

SEQ ID NO: 128209 - protein, 16 aa, Artificial Sequence
  Description of Artificial Sequence: Synthetic peptide
  Seed: RMCSLMQGSTLPRRSG
RMFSLIQASTDPRRSG

SEQ ID NO: 128210 - protein, 16 aa, Artificial Sequence
  Description of Artificial Sequence: Synthetic peptide
  Seed: RMCSLMQGSTLPRRSG
RMFSLIQASTFPRRSG

SEQ ID NO: 128211 - protein, 16 aa, Artificial Sequence
  Description of Artificial Sequence: Synthetic peptide
  Seed: RMCSLMQGSTLPRRSG
RMFSLIQASTGPRRSG

SEQ ID NO: 128212 - protein, 16 aa, Artificial Sequence
  Description of Artificial Sequence: Synthetic peptide
  Seed: RMCSLMQGSTLPRRSG
RMFSLIQASTHPRRSG

SEQ ID NO: 128213 - protein, 16 aa, Artificial Sequence
  Description of Artificial Sequence: Synthetic peptide
  Seed: RMCSLMQGSTLPRRSG
RMFSLIQASTIPRRSG

SEQ ID NO: 128214 - protein, 16 aa, Artificial Sequence
  Description of Artificial Sequence: Synthetic peptide
  Seed: RMCSLMQGSTLPRRSG
RMFSLIQASTLPRRSG

SEQ ID NO: 128215 - protein, 16 aa, Artificial Sequence
  Description of Artificial Sequence: Synthetic peptide
  Seed: RMCSLMQGSTLPRRSG
RMFSLIQASTMPRRSG

SEQ ID NO: 128216 - protein, 16 aa, Artificial Sequence
  Description of Artificial Sequence: Synthetic peptide
  Seed: RMCSLMQGSTLPRRSG
RMFSLIQASTNPRRSG

SEQ ID NO: 128217 - protein, 16 aa, Artificial Sequence
  Description of Artificial Sequence: Synthetic peptide
  Seed: RMCSLMQGSTLPRRSG
RMFSLIQASTPPRRSG

SEQ ID NO: 128218 - protein, 16 aa, Artificial Sequence
  Description of Artificial Sequence: Synthetic peptide
  Seed: RMCSLMQGSTLPRRSG
RMFSLIQASTQPRRSG

SEQ ID NO: 128219 - protein, 16 aa, Artificial Sequence
  Description of Artificial Sequence: Synthetic peptide
  Seed: RMCSLMQGSTLPRRSG
RMFSLIQASTSPRRSG

SEQ ID NO: 128220 - protein, 16 aa, Artificial Sequence
  Description of Artificial Sequence: Synthetic peptide
  Seed: RMCSLMQGSTLPRRSG
RMFSLIQASTTPRRSG

SEQ ID NO: 128221 - protein, 16 aa, Artificial Sequence
  Description of Artificial Sequence: Synthetic peptide
  Seed: RMCSLMQGSTLPRRSG
RMFSLIQASTVPRRSG

SEQ ID NO: 128222 - protein, 16 aa, Artificial Sequence
  Description of Artificial Sequence: Synthetic peptide
  Seed: RMCSLMQGSTLPRRSG
RMFSLIQGSTAPRRSG

SEQ ID NO: 128223 - protein, 16 aa, Artificial Sequence
  Description of Artificial Sequence: Synthetic peptide
  Seed: RMCSLMQGSTLPRRSG
RMFSLIQGSTCPRRSG

SEQ ID NO: 128224 - protein, 16 aa, Artificial Sequence
  Description of Artificial Sequence: Synthetic peptide
  Seed: RMCSLMQGSTLPRRSG
RMFSLIQGSTGPRRSG

SEQ ID NO: 128225 - protein, 16 aa, Artificial Sequence
  Description of Artificial Sequence: Synthetic peptide
  Seed: RMCSLMQGSTLPRRSG
RMFSLIQGSTIPRRSG

SEQ ID NO: 128226 - protein, 16 aa, Artificial Sequence
  Description of Artificial Sequence: Synthetic peptide
  Seed: RMCSLMQGSTLPRRSG
RMFSLIQGSTLPRRSG

SEQ ID NO: 128227 - protein, 16 aa, Artificial Sequence
  Description of Artificial Sequence: Synthetic peptide
  Seed: RMCSLMQGSTLPRRSG
RMFSLIQGSTMPRRSG

SEQ ID NO: 128228 - protein, 16 aa, Artificial Sequence
  Description of Artificial Sequence: Synthetic peptide
  Seed: RMCSLMQGSTLPRRSG
RMFSLIQGSTNPRRSG

SEQ ID NO: 128229 - protein, 16 aa, Artificial Sequence
  Description of Artificial Sequence: Synthetic peptide
  Seed: RMCSLMQGSTLPRRSG
RMFSLIQGSTSPRRSG

SEQ ID NO: 128230 - protein, 16 aa, Artificial Sequence
  Description of Artificial Sequence: Synthetic peptide
  Seed: RMCSLMQGSTLPRRSG
RMFSLIQGSTTPRRSG

SEQ ID NO: 128231 - protein, 16 aa, Artificial Sequence
  Description of Artificial Sequence: Synthetic peptide
  Seed: RMCSLMQGSTLPRRSG
RMFSLIQGSTVPRRSG

SEQ ID NO: 128232 - protein, 16 aa, Artificial Sequence
  Description of Artificial Sequence: Synthetic peptide
  Seed: RMCSLMQGSTLPRRSG
RMFSLIQISTAPRRSG

SEQ ID NO: 128233 - protein, 16 aa, Artificial Sequence
  Description of Artificial Sequence: Synthetic peptide
  Seed: RMCSLMQGSTLPRRSG
RMFSLIQISTGPRRSG

SEQ ID NO: 128234 - protein, 16 aa, Artificial Sequence
  Description of Artificial Sequence: Synthetic peptide
  Seed: RMCSLMQGSTLPRRSG
RMFSLIQISTIPRRSG

SEQ ID NO: 128235 - protein, 16 aa, Artificial Sequence
  Description of Artificial Sequence: Synthetic peptide
  Seed: RMCSLMQGSTLPRRSG
RMFSLIQISTLPRRSG

SEQ ID NO: 128236 - protein, 16 aa, Artificial Sequence
  Description of Artificial Sequence: Synthetic peptide
  Seed: RMCSLMQGSTLPRRSG
RMFSLIQISTMPRRSG

SEQ ID NO: 128237 - protein, 16 aa, Artificial Sequence
  Description of Artificial Sequence: Synthetic peptide
  Seed: RMCSLMQGSTLPRRSG
RMFSLIQISTNPRRSG

SEQ ID NO: 128238 - protein, 16 aa, Artificial Sequence
  Description of Artificial Sequence: Synthetic peptide
  Seed: RMCSLMQGSTLPRRSG
RMFSLIQISTSPRRSG

SEQ ID NO: 128239 - protein, 16 aa, Artificial Sequence
  Description of Artificial Sequence: Synthetic peptide
  Seed: RMCSLMQGSTLPRRSG
RMFSLIQISTTPRRSG

SEQ ID NO: 128240 - protein, 16 aa, Artificial Sequence
  Description of Artificial Sequence: Synthetic peptide
  Seed: RMCSLMQGSTLPRRSG
RMFSLIQISTVPRRSG

SEQ ID NO: 128241 - protein, 16 aa, Artificial Sequence
  Description of Artificial Sequence: Synthetic peptide
  Seed: RMCSLMQGSTLPRRSG
RMFSLIQLSTAPRRSG

SEQ ID NO: 128242 - protein, 16 aa, Artificial Sequence
  Description of Artificial Sequence: Synthetic peptide
  Seed: RMCSLMQGSTLPRRSG
RMFSLIQLSTNPRRSG

SEQ ID NO: 128243 - protein, 16 aa, Artificial Sequence
  Description of Artificial Sequence: Synthetic peptide
  Seed: RMCSLMQGSTLPRRSG
RMFSLIQMSTSPRRSG

SEQ ID NO: 128244 - protein, 16 aa, Artificial Sequence
  Description of Artificial Sequence: Synthetic peptide
  Seed: RMCSLMQGSTLPRRSG
RMFSLIQNSTAPRRSG

SEQ ID NO: 128245 - protein, 16 aa, Artificial Sequence
  Description of Artificial Sequence: Synthetic peptide
  Seed: RMCSLMQGSTLPRRSG
RMFSLIQNSTIPRRSG

SEQ ID NO: 128246 - protein, 16 aa, Artificial Sequence
  Description of Artificial Sequence: Synthetic peptide
  Seed: RMCSLMQGSTLPRRSG
RMFSLIQNSTLPRRSG

SEQ ID NO: 128247 - protein, 16 aa, Artificial Sequence
  Description of Artificial Sequence: Synthetic peptide
  Seed: RMCSLMQGSTLPRRSG
RMFSLIQNSTNPRRSG

SEQ ID NO: 128248 - protein, 16 aa, Artificial Sequence
  Description of Artificial Sequence: Synthetic peptide
  Seed: RMCSLMQGSTLPRRSG
RMFSLIQNSTSPRRSG

SEQ ID NO: 128249 - protein, 16 aa, Artificial Sequence
  Description of Artificial Sequence: Synthetic peptide
  Seed: RMCSLMQGSTLPRRSG
RMFSLIQNSTTPRRSG

SEQ ID NO: 128250 - protein, 16 aa, Artificial Sequence
  Description of Artificial Sequence: Synthetic peptide
  Seed: RMCSLMQGSTLPRRSG
RMFSLIQNSTVPRRSG

SEQ ID NO: 128251 - protein, 16 aa, Artificial Sequence
  Description of Artificial Sequence: Synthetic peptide
  Seed: RMCSLMQGSTLPRRSG
RMFSLIQPSTAPRRSG

SEQ ID NO: 128252 - protein, 16 aa, Artificial Sequence
  Description of Artificial Sequence: Synthetic peptide
  Seed: RMCSLMQGSTLPRRSG
RMFSLIQPSTGPRRSG

SEQ ID NO: 128253 - protein, 16 aa, Artificial Sequence
  Description of Artificial Sequence: Synthetic peptide
  Seed: RMCSLMQGSTLPRRSG
RMFSLIQPSTHPRRSG

SEQ ID NO: 128254 - protein, 16 aa, Artificial Sequence
  Description of Artificial Sequence: Synthetic peptide
  Seed: RMCSLMQGSTLPRRSG
RMFSLIQPSTIPRRSG

SEQ ID NO: 128255 - protein, 16 aa, Artificial Sequence
  Description of Artificial Sequence: Synthetic peptide
  Seed: RMCSLMQGSTLPRRSG
RMFSLIQPSTLPRRSG

SEQ ID NO: 128256 - protein, 16 aa, Artificial Sequence
  Description of Artificial Sequence: Synthetic peptide
  Seed: RMCSLMQGSTLPRRSG
RMFSLIQPSTMPRRSG

SEQ ID NO: 128257 - protein, 16 aa, Artificial Sequence
  Description of Artificial Sequence: Synthetic peptide
  Seed: RMCSLMQGSTLPRRSG
RMFSLIQPSTNPRRSG

SEQ ID NO: 128258 - protein, 16 aa, Artificial Sequence
  Description of Artificial Sequence: Synthetic peptide
  Seed: RMCSLMQGSTLPRRSG
RMFSLIQPSTPPRRSG

SEQ ID NO: 128259 - protein, 16 aa, Artificial Sequence
  Description of Artificial Sequence: Synthetic peptide
  Seed: RMCSLMQGSTLPRRSG
RMFSLIQPSTQPRRSG

SEQ ID NO: 128260 - protein, 16 aa, Artificial Sequence
  Description of Artificial Sequence: Synthetic peptide
  Seed: RMCSLMQGSTLPRRSG
RMFSLIQPSTSPRRSG

SEQ ID NO: 128261 - protein, 16 aa, Artificial Sequence
  Description of Artificial Sequence: Synthetic peptide
  Seed: RMCSLMQGSTLPRRSG
RMFSLIQPSTTPRRSG

SEQ ID NO: 128262 - protein, 16 aa, Artificial Sequence
  Description of Artificial Sequence: Synthetic peptide
  Seed: RMCSLMQGSTLPRRSG
RMFSLIQPSTVPRRSG

SEQ ID NO: 128263 - protein, 16 aa, Artificial Sequence
  Description of Artificial Sequence: Synthetic peptide
  Seed: RMCSLMQGSTLPRRSG
RMFSLIQSSTAPRRSG

SEQ ID NO: 128264 - protein, 16 aa, Artificial Sequence
  Description of Artificial Sequence: Synthetic peptide
  Seed: RMCSLMQGSTLPRRSG
RMFSLIQSSTGPRRSG

SEQ ID NO: 128265 - protein, 16 aa, Artificial Sequence
  Description of Artificial Sequence: Synthetic peptide
  Seed: RMCSLMQGSTLPRRSG
RMFSLIQSSTHPRRSG

SEQ ID NO: 128266 - protein, 16 aa, Artificial Sequence
  Description of Artificial Sequence: Synthetic peptide
  Seed: RMCSLMQGSTLPRRSG
RMFSLIQSSTIPRRSG

SEQ ID NO: 128267 - protein, 16 aa, Artificial Sequence
  Description of Artificial Sequence: Synthetic peptide
  Seed: RMCSLMQGSTLPRRSG
RMFSLIQSSTLPRRSG

SEQ ID NO: 128268 - protein, 16 aa, Artificial Sequence
  Description of Artificial Sequence: Synthetic peptide
  Seed: RMCSLMQGSTLPRRSG
RMFSLIQSSTMPRRSG

SEQ ID NO: 128269 - protein, 16 aa, Artificial Sequence
  Description of Artificial Sequence: Synthetic peptide
  Seed: RMCSLMQGSTLPRRSG
RMFSLIQSSTNPRRSG

SEQ ID NO: 128270 - protein, 16 aa, Artificial Sequence
  Description of Artificial Sequence: Synthetic peptide
  Seed: RMCSLMQGSTLPRRSG
RMFSLIQSSTQPRRSG

SEQ ID NO: 128271 - protein, 16 aa, Artificial Sequence
  Description of Artificial Sequence: Synthetic peptide
  Seed: RMCSLMQGSTLPRRSG
RMFSLIQSSTSPRRSG

SEQ ID NO: 128272 - protein, 16 aa, Artificial Sequence
  Description of Artificial Sequence: Synthetic peptide
  Seed: RMCSLMQGSTLPRRSG
RMFSLIQSSTTPRRSG

SEQ ID NO: 128273 - protein, 16 aa, Artificial Sequence
  Description of Artificial Sequence: Synthetic peptide
  Seed: RMCSLMQGSTLPRRSG
RMFSLIQSSTVPRRSG

SEQ ID NO: 128274 - protein, 16 aa, Artificial Sequence
  Description of Artificial Sequence: Synthetic peptide
  Seed: RMCSLMQGSTLPRRSG
RMFSLIQTSTAPRRSG

SEQ ID NO: 128275 - protein, 16 aa, Artificial Sequence
  Description of Artificial Sequence: Synthetic peptide
  Seed: RMCSLMQGSTLPRRSG
RMFSLIQTSTGPRRSG

SEQ ID NO: 128276 - protein, 16 aa, Artificial Sequence
  Description of Artificial Sequence: Synthetic peptide
  Seed: RMCSLMQGSTLPRRSG
RMFSLIQTSTHPRRSG

SEQ ID NO: 128277 - protein, 16 aa, Artificial Sequence
  Description of Artificial Sequence: Synthetic peptide
  Seed: RMCSLMQGSTLPRRSG
RMFSLIQTSTIPRRSG

SEQ ID NO: 128278 - protein, 16 aa, Artificial Sequence
  Description of Artificial Sequence: Synthetic peptide
  Seed: RMCSLMQGSTLPRRSG
RMFSLIQTSTLPRRSG

SEQ ID NO: 128279 - protein, 16 aa, Artificial Sequence
  Description of Artificial Sequence: Synthetic peptide
  Seed: RMCSLMQGSTLPRRSG
RMFSLIQTSTMPRRSG

SEQ ID NO: 128280 - protein, 16 aa, Artificial Sequence
  Description of Artificial Sequence: Synthetic peptide
  Seed: RMCSLMQGSTLPRRSG
RMFSLIQTSTNPRRSG

SEQ ID NO: 128281 - protein, 16 aa, Artificial Sequence
  Description of Artificial Sequence: Synthetic peptide
  Seed: RMCSLMQGSTLPRRSG
RMFSLIQTSTSPRRSG

SEQ ID NO: 128282 - protein, 16 aa, Artificial Sequence
  Description of Artificial Sequence: Synthetic peptide
  Seed: RMCSLMQGSTLPRRSG
RMFSLIQTSTTPRRSG

SEQ ID NO: 128283 - protein, 16 aa, Artificial Sequence
  Description of Artificial Sequence: Synthetic peptide
  Seed: RMCSLMQGSTLPRRSG
RMFSLIQTSTVPRRSG

SEQ ID NO: 128284 - protein, 16 aa, Artificial Sequence
  Description of Artificial Sequence: Synthetic peptide
  Seed: RMCSLMQGSTLPRRSG
RMFSLIQVSTAPRRSG

SEQ ID NO: 128285 - protein, 16 aa, Artificial Sequence
  Description of Artificial Sequence: Synthetic peptide
  Seed: RMCSLMQGSTLPRRSG
RMFSLIQVSTGPRRSG

SEQ ID NO: 128286 - protein, 16 aa, Artificial Sequence
  Description of Artificial Sequence: Synthetic peptide
  Seed: RMCSLMQGSTLPRRSG
RMFSLIQVSTHPRRSG

SEQ ID NO: 128287 - protein, 16 aa, Artificial Sequence
  Description of Artificial Sequence: Synthetic peptide
  Seed: RMCSLMQGSTLPRRSG
RMFSLIQVSTIPRRSG

SEQ ID NO: 128288 - protein, 16 aa, Artificial Sequence
  Description of Artificial Sequence: Synthetic peptide
  Seed: RMCSLMQGSTLPRRSG
RMFSLIQVSTLPRRSG

SEQ ID NO: 128289 - protein, 16 aa, Artificial Sequence
  Description of Artificial Sequence: Synthetic peptide
  Seed: RMCSLMQGSTLPRRSG
RMFSLIQVSTMPRRSG

SEQ ID NO: 128290 - protein, 16 aa, Artificial Sequence
  Description of Artificial Sequence: Synthetic peptide
  Seed: RMCSLMQGSTLPRRSG
RMFSLIQVSTNPRRSG

SEQ ID NO: 128291 - protein, 16 aa, Artificial Sequence
  Description of Artificial Sequence: Synthetic peptide
  Seed: RMCSLMQGSTLPRRSG
RMFSLIQVSTSPRRSG

SEQ ID NO: 128292 - protein, 16 aa, Artificial Sequence
  Description of Artificial Sequence: Synthetic peptide
  Seed: RMCSLMQGSTLPRRSG
RMFSLIQVSTTPRRSG

SEQ ID NO: 128293 - protein, 16 aa, Artificial Sequence
  Description of Artificial Sequence: Synthetic peptide
  Seed: RMCSLMQGSTLPRRSG
RMFSLIQVSTVPRRSG

SEQ ID NO: 128294 - protein, 16 aa, Artificial Sequence
  Description of Artificial Sequence: Synthetic peptide
  Seed: RMCSLMQGSTLPRRSG
RMFSLLQASTAPRRSG

SEQ ID NO: 128295 - protein, 16 aa, Artificial Sequence
  Description of Artificial Sequence: Synthetic peptide
  Seed: RMCSLMQGSTLPRRSG
RMFSLLQASTCPRRSG

SEQ ID NO: 128296 - protein, 16 aa, Artificial Sequence
  Description of Artificial Sequence: Synthetic peptide
  Seed: RMCSLMQGSTLPRRSG
RMFSLLQASTDPRRSG

SEQ ID NO: 128297 - protein, 16 aa, Artificial Sequence
  Description of Artificial Sequence: Synthetic peptide
  Seed: RMCSLMQGSTLPRRSG
RMFSLLQASTEPRRSG

SEQ ID NO: 128298 - protein, 16 aa, Artificial Sequence
  Description of Artificial Sequence: Synthetic peptide
  Seed: RMCSLMQGSTLPRRSG
RMFSLLQASTFPRRSG

SEQ ID NO: 128299 - protein, 16 aa, Artificial Sequence
  Description of Artificial Sequence: Synthetic peptide
  Seed: RMCSLMQGSTLPRRSG
RMFSLLQASTGPRRSG

SEQ ID NO: 128300 - protein, 16 aa, Artificial Sequence
  Description of Artificial Sequence: Synthetic peptide
  Seed: RMCSLMQGSTLPRRSG
RMFSLLQASTHPRRSG

SEQ ID NO: 128301 - protein, 16 aa, Artificial Sequence
  Description of Artificial Sequence: Synthetic peptide
  Seed: RMCSLMQGSTLPRRSG
RMFSLLQASTIPRRSG

SEQ ID NO: 128302 - protein, 16 aa, Artificial Sequence
  Description of Artificial Sequence: Synthetic peptide
  Seed: RMCSLMQGSTLPRRSG
RMFSLLQASTLPRRSG

SEQ ID NO: 128303 - protein, 16 aa, Artificial Sequence
  Description of Artificial Sequence: Synthetic peptide
  Seed: RMCSLMQGSTLPRRSG
RMFSLLQASTMPRRSG

SEQ ID NO: 128304 - protein, 16 aa, Artificial Sequence
  Description of Artificial Sequence: Synthetic peptide
  Seed: RMCSLMQGSTLPRRSG
RMFSLLQASTNPRRSG

SEQ ID NO: 128305 - protein, 16 aa, Artificial Sequence
  Description of Artificial Sequence: Synthetic peptide
  Seed: RMCSLMQGSTLPRRSG
RMFSLLQASTPPRRSG

SEQ ID NO: 128306 - protein, 16 aa, Artificial Sequence
  Description of Artificial Sequence: Synthetic peptide
  Seed: RMCSLMQGSTLPRRSG
RMFSLLQASTQPRRSG

SEQ ID NO: 128307 - protein, 16 aa, Artificial Sequence
  Description of Artificial Sequence: Synthetic peptide
  Seed: RMCSLMQGSTLPRRSG
RMFSLLQASTSPRRSG

SEQ ID NO: 128308 - protein, 16 aa, Artificial Sequence
  Description of Artificial Sequence: Synthetic peptide
  Seed: RMCSLMQGSTLPRRSG
RMFSLLQASTTPRRSG

SEQ ID NO: 128309 - protein, 16 aa, Artificial Sequence
  Description of Artificial Sequence: Synthetic peptide
  Seed: RMCSLMQGSTLPRRSG
RMFSLLQASTVPRRSG

SEQ ID NO: 128310 - protein, 16 aa, Artificial Sequence
  Description of Artificial Sequence: Synthetic peptide
  Seed: RMCSLMQGSTLPRRSG
RMFSLLQASTYPRRSG

SEQ ID NO: 128311 - protein, 16 aa, Artificial Sequence
  Description of Artificial Sequence: Synthetic peptide
  Seed: RMCSLMQGSTLPRRSG
RMFSLLQGSTAPRRSG

SEQ ID NO: 128312 - protein, 16 aa, Artificial Sequence
  Description of Artificial Sequence: Synthetic peptide
  Seed: RMCSLMQGSTLPRRSG
RMFSLLQGSTCPRRSG

SEQ ID NO: 128313 - protein, 16 aa, Artificial Sequence
  Description of Artificial Sequence: Synthetic peptide
  Seed: RMCSLMQGSTLPRRSG
RMFSLLQGSTFPRRSG

SEQ ID NO: 128314 - protein, 16 aa, Artificial Sequence
  Description of Artificial Sequence: Synthetic peptide
  Seed: RMCSLMQGSTLPRRSG
RMFSLLQGSTGPRRSG

SEQ ID NO: 128315 - protein, 16 aa, Artificial Sequence
  Description of Artificial Sequence: Synthetic peptide
  Seed: RMCSLMQGSTLPRRSG
RMFSLLQGSTHPRRSG

SEQ ID NO: 128316 - protein, 16 aa, Artificial Sequence
  Description of Artificial Sequence: Synthetic peptide
  Seed: RMCSLMQGSTLPRRSG
RMFSLLQGSTIPRRSG

SEQ ID NO: 128317 - protein, 16 aa, Artificial Sequence
  Description of Artificial Sequence: Synthetic peptide
  Seed: RMCSLMQGSTLPRRSG
RMFSLLQGSTLPRRSG

SEQ ID NO: 128318 - protein, 16 aa, Artificial Sequence
  Description of Artificial Sequence: Synthetic peptide
  Seed: RMCSLMQGSTLPRRSG
RMFSLLQGSTMPRRSG

SEQ ID NO: 128319 - protein, 16 aa, Artificial Sequence
  Description of Artificial Sequence: Synthetic peptide
  Seed: RMCSLMQGSTLPRRSG
RMFSLLQGSTNPRRSG

SEQ ID NO: 128320 - protein, 16 aa, Artificial Sequence
  Description of Artificial Sequence: Synthetic peptide
  Seed: RMCSLMQGSTLPRRSG
RMFSLLQGSTPPRRSG

SEQ ID NO: 128321 - protein, 16 aa, Artificial Sequence
  Description of Artificial Sequence: Synthetic peptide
  Seed: RMCSLMQGSTLPRRSG
RMFSLLQGSTSPRRSG

SEQ ID NO: 128322 - protein, 16 aa, Artificial Sequence
  Description of Artificial Sequence: Synthetic peptide
  Seed: RMCSLMQGSTLPRRSG
RMFSLLQGSTTPRRSG

SEQ ID NO: 128323 - protein, 16 aa, Artificial Sequence
  Description of Artificial Sequence: Synthetic peptide
  Seed: RMCSLMQGSTLPRRSG
RMFSLLQGSTVPRRSG

SEQ ID NO: 128324 - protein, 16 aa, Artificial Sequence
  Description of Artificial Sequence: Synthetic peptide
  Seed: RMCSLMQGSTLPRRSG
RMFSLLQISTAPRRSG

SEQ ID NO: 128325 - protein, 16 aa, Artificial Sequence
  Description of Artificial Sequence: Synthetic peptide
  Seed: RMCSLMQGSTLPRRSG
RMFSLLQISTGPRRSG

SEQ ID NO: 128326 - protein, 16 aa, Artificial Sequence
  Description of Artificial Sequence: Synthetic peptide
  Seed: RMCSLMQGSTLPRRSG
RMFSLLQISTHPRRSG

SEQ ID NO: 128327 - protein, 16 aa, Artificial Sequence
  Description of Artificial Sequence: Synthetic peptide
  Seed: RMCSLMQGSTLPRRSG
RMFSLLQISTIPRRSG

SEQ ID NO: 128328 - protein, 16 aa, Artificial Sequence
  Description of Artificial Sequence: Synthetic peptide
  Seed: RMCSLMQGSTLPRRSG
RMFSLLQISTLPRRSG

SEQ ID NO: 128329 - protein, 16 aa, Artificial Sequence
  Description of Artificial Sequence: Synthetic peptide
  Seed: RMCSLMQGSTLPRRSG
RMFSLLQISTMPRRSG

SEQ ID NO: 128330 - protein, 16 aa, Artificial Sequence
  Description of Artificial Sequence: Synthetic peptide
  Seed: RMCSLMQGSTLPRRSG
RMFSLLQISTNPRRSG

SEQ ID NO: 128331 - protein, 16 aa, Artificial Sequence
  Description of Artificial Sequence: Synthetic peptide
  Seed: RMCSLMQGSTLPRRSG
RMFSLLQISTSPRRSG

SEQ ID NO: 128332 - protein, 16 aa, Artificial Sequence
  Description of Artificial Sequence: Synthetic peptide
  Seed: RMCSLMQGSTLPRRSG
RMFSLLQISTTPRRSG

SEQ ID NO: 128333 - protein, 16 aa, Artificial Sequence
  Description of Artificial Sequence: Synthetic peptide
  Seed: RMCSLMQGSTLPRRSG
RMFSLLQISTVPRRSG

SEQ ID NO: 128334 - protein, 16 aa, Artificial Sequence
  Description of Artificial Sequence: Synthetic peptide
  Seed: RMCSLMQGSTLPRRSG
RMFSLLQLSTAPRRSG

SEQ ID NO: 128335 - protein, 16 aa, Artificial Sequence
  Description of Artificial Sequence: Synthetic peptide
  Seed: RMCSLMQGSTLPRRSG
RMFSLLQLSTNPRRSG

SEQ ID NO: 128336 - protein, 16 aa, Artificial Sequence
  Description of Artificial Sequence: Synthetic peptide
  Seed: RMCSLMQGSTLPRRSG
RMFSLLQLSTSPRRSG

SEQ ID NO: 128337 - protein, 16 aa, Artificial Sequence
  Description of Artificial Sequence: Synthetic peptide
  Seed: RMCSLMQGSTLPRRSG
RMFSLLQMSTAPRRSG

SEQ ID NO: 128338 - protein, 16 aa, Artificial Sequence
  Description of Artificial Sequence: Synthetic peptide
  Seed: RMCSLMQGSTLPRRSG
RMFSLLQMSTNPRRSG

SEQ ID NO: 128339 - protein, 16 aa, Artificial Sequence
  Description of Artificial Sequence: Synthetic peptide
  Seed: RMCSLMQGSTLPRRSG
RMFSLLQMSTSPRRSG

SEQ ID NO: 128340 - protein, 16 aa, Artificial Sequence
  Description of Artificial Sequence: Synthetic peptide
  Seed: RMCSLMQGSTLPRRSG
RMFSLLQNSTAPRRSG

SEQ ID NO: 128341 - protein, 16 aa, Artificial Sequence
  Description of Artificial Sequence: Synthetic peptide
  Seed: RMCSLMQGSTLPRRSG
RMFSLLQNSTGPRRSG

SEQ ID NO: 128342 - protein, 16 aa, Artificial Sequence
  Description of Artificial Sequence: Synthetic peptide
  Seed: RMCSLMQGSTLPRRSG
RMFSLLQNSTIPRRSG

SEQ ID NO: 128343 - protein, 16 aa, Artificial Sequence
  Description of Artificial Sequence: Synthetic peptide
  Seed: RMCSLMQGSTLPRRSG
RMFSLLQNSTLPRRSG

SEQ ID NO: 128344 - protein, 16 aa, Artificial Sequence
  Description of Artificial Sequence: Synthetic peptide
  Seed: RMCSLMQGSTLPRRSG
RMFSLLQNSTMPRRSG

SEQ ID NO: 128345 - protein, 16 aa, Artificial Sequence
  Description of Artificial Sequence: Synthetic peptide
  Seed: RMCSLMQGSTLPRRSG
RMFSLLQNSTNPRRSG

SEQ ID NO: 128346 - protein, 16 aa, Artificial Sequence
  Description of Artificial Sequence: Synthetic peptide
  Seed: RMCSLMQGSTLPRRSG
RMFSLLQNSTSPRRSG

SEQ ID NO: 128347 - protein, 16 aa, Artificial Sequence
  Description of Artificial Sequence: Synthetic peptide
  Seed: RMCSLMQGSTLPRRSG
RMFSLLQNSTTPRRSG

SEQ ID NO: 128348 - protein, 16 aa, Artificial Sequence
  Description of Artificial Sequence: Synthetic peptide
  Seed: RMCSLMQGSTLPRRSG
RMFSLLQNSTVPRRSG

SEQ ID NO: 128349 - protein, 16 aa, Artificial Sequence
  Description of Artificial Sequence: Synthetic peptide
  Seed: RMCSLMQGSTLPRRSG
RMFSLLQPSTAPRRSG

SEQ ID NO: 128350 - protein, 16 aa, Artificial Sequence
  Description of Artificial Sequence: Synthetic peptide
  Seed: RMCSLMQGSTLPRRSG
RMFSLLQPSTCPRRSG

SEQ ID NO: 128351 - protein, 16 aa, Artificial Sequence
  Description of Artificial Sequence: Synthetic peptide
  Seed: RMCSLMQGSTLPRRSG
RMFSLLQPSTDPRRSG

SEQ ID NO: 128352 - protein, 16 aa, Artificial Sequence
  Description of Artificial Sequence: Synthetic peptide
  Seed: RMCSLMQGSTLPRRSG
RMFSLLQPSTEPRRSG

SEQ ID NO: 128353 - protein, 16 aa, Artificial Sequence
  Description of Artificial Sequence: Synthetic peptide
  Seed: RMCSLMQGSTLPRRSG
RMFSLLQPSTFPRRSG

SEQ ID NO: 128354 - protein, 16 aa, Artificial Sequence
  Description of Artificial Sequence: Synthetic peptide
  Seed: RMCSLMQGSTLPRRSG
RMFSLLQPSTGPRRSG

SEQ ID NO: 128355 - protein, 16 aa, Artificial Sequence
  Description of Artificial Sequence: Synthetic peptide
  Seed: RMCSLMQGSTLPRRSG
RMFSLLQPSTHPRRSG

SEQ ID NO: 128356 - protein, 16 aa, Artificial Sequence
  Description of Artificial Sequence: Synthetic peptide
  Seed: RMCSLMQGSTLPRRSG
RMFSLLQPSTIPRRSG

SEQ ID NO: 128357 - protein, 16 aa, Artificial Sequence
  Description of Artificial Sequence: Synthetic peptide
  Seed: RMCSLMQGSTLPRRSG
RMFSLLQPSTLPRRSG

SEQ ID NO: 128358 - protein, 16 aa, Artificial Sequence
  Description of Artificial Sequence: Synthetic peptide
  Seed: RMCSLMQGSTLPRRSG
RMFSLLQPSTMPRRSG

SEQ ID NO: 128359 - protein, 16 aa, Artificial Sequence
  Description of Artificial Sequence: Synthetic peptide
  Seed: RMCSLMQGSTLPRRSG
RMFSLLQPSTNPRRSG

SEQ ID NO: 128360 - protein, 16 aa, Artificial Sequence
  Description of Artificial Sequence: Synthetic peptide
  Seed: RMCSLMQGSTLPRRSG
RMFSLLQPSTPPRRSG

SEQ ID NO: 128361 - protein, 16 aa, Artificial Sequence
  Description of Artificial Sequence: Synthetic peptide
  Seed: RMCSLMQGSTLPRRSG
RMFSLLQPSTQPRRSG

SEQ ID NO: 128362 - protein, 16 aa, Artificial Sequence
  Description of Artificial Sequence: Synthetic peptide
  Seed: RMCSLMQGSTLPRRSG
RMFSLLQPSTSPRRSG

SEQ ID NO: 128363 - protein, 16 aa, Artificial Sequence
  Description of Artificial Sequence: Synthetic peptide
  Seed: RMCSLMQGSTLPRRSG
RMFSLLQPSTTPRRSG

SEQ ID NO: 128364 - protein, 16 aa, Artificial Sequence
  Description of Artificial Sequence: Synthetic peptide
  Seed: RMCSLMQGSTLPRRSG
RMFSLLQPSTVPRRSG

SEQ ID NO: 128365 - protein, 16 aa, Artificial Sequence
  Description of Artificial Sequence: Synthetic peptide
  Seed: RMCSLMQGSTLPRRSG
RMFSLLQSSTAPRRSG

SEQ ID NO: 128366 - protein, 16 aa, Artificial Sequence
  Description of Artificial Sequence: Synthetic peptide
  Seed: RMCSLMQGSTLPRRSG
RMFSLLQSSTCPRRSG

SEQ ID NO: 128367 - protein, 16 aa, Artificial Sequence
  Description of Artificial Sequence: Synthetic peptide
  Seed: RMCSLMQGSTLPRRSG
RMFSLLQSSTFPRRSG

SEQ ID NO: 128368 - protein, 16 aa, Artificial Sequence
  Description of Artificial Sequence: Synthetic peptide
  Seed: RMCSLMQGSTLPRRSG
RMFSLLQSSTGPRRSG

SEQ ID NO: 128369 - protein, 16 aa, Artificial Sequence
  Description of Artificial Sequence: Synthetic peptide
  Seed: RMCSLMQGSTLPRRSG
RMFSLLQSSTHPRRSG

SEQ ID NO: 128370 - protein, 16 aa, Artificial Sequence
  Description of Artificial Sequence: Synthetic peptide
  Seed: RMCSLMQGSTLPRRSG
RMFSLLQSSTIPRRSG

SEQ ID NO: 128371 - protein, 16 aa, Artificial Sequence
  Description of Artificial Sequence: Synthetic peptide
  Seed: RMCSLMQGSTLPRRSG
RMFSLLQSSTLPRRSG

SEQ ID NO: 128372 - protein, 16 aa, Artificial Sequence
  Description of Artificial Sequence: Synthetic peptide
  Seed: RMCSLMQGSTLPRRSG
RMFSLLQSSTMPRRSG

SEQ ID NO: 128373 - protein, 16 aa, Artificial Sequence
  Description of Artificial Sequence: Synthetic peptide
  Seed: RMCSLMQGSTLPRRSG
RMFSLLQSSTNPRRSG

SEQ ID NO: 128374 - protein, 16 aa, Artificial Sequence
  Description of Artificial Sequence: Synthetic peptide
  Seed: RMCSLMQGSTLPRRSG
RMFSLLQSSTPPRRSG

SEQ ID NO: 128375 - protein, 16 aa, Artificial Sequence
  Description of Artificial Sequence: Synthetic peptide
  Seed: RMCSLMQGSTLPRRSG
RMFSLLQSSTQPRRSG

SEQ ID NO: 128376 - protein, 16 aa, Artificial Sequence
  Description of Artificial Sequence: Synthetic peptide
  Seed: RMCSLMQGSTLPRRSG
RMFSLLQSSTSPRRSG

SEQ ID NO: 128377 - protein, 16 aa, Artificial Sequence
  Description of Artificial Sequence: Synthetic peptide
  Seed: RMCSLMQGSTLPRRSG
RMFSLLQSSTTPRRSG

SEQ ID NO: 128378 - protein, 16 aa, Artificial Sequence
  Description of Artificial Sequence: Synthetic peptide
  Seed: RMCSLMQGSTLPRRSG
RMFSLLQSSTVPRRSG

SEQ ID NO: 128379 - protein, 16 aa, Artificial Sequence
  Description of Artificial Sequence: Synthetic peptide
  Seed: RMCSLMQGSTLPRRSG
RMFSLLQTSTAPRRSG

SEQ ID NO: 128380 - protein, 16 aa, Artificial Sequence
  Description of Artificial Sequence: Synthetic peptide
  Seed: RMCSLMQGSTLPRRSG
RMFSLLQTSTGPRRSG

SEQ ID NO: 128381 - protein, 16 aa, Artificial Sequence
  Description of Artificial Sequence: Synthetic peptide
  Seed: RMCSLMQGSTLPRRSG
RMFSLLQTSTHPRRSG

SEQ ID NO: 128382 - protein, 16 aa, Artificial Sequence
  Description of Artificial Sequence: Synthetic peptide
  Seed: RMCSLMQGSTLPRRSG
RMFSLLQTSTIPRRSG

SEQ ID NO: 128383 - protein, 16 aa, Artificial Sequence
  Description of Artificial Sequence: Synthetic peptide
  Seed: RMCSLMQGSTLPRRSG
RMFSLLQTSTLPRRSG

SEQ ID NO: 128384 - protein, 16 aa, Artificial Sequence
  Description of Artificial Sequence: Synthetic peptide
  Seed: RMCSLMQGSTLPRRSG
RMFSLLQTSTMPRRSG

SEQ ID NO: 128385 - protein, 16 aa, Artificial Sequence
  Description of Artificial Sequence: Synthetic peptide
  Seed: RMCSLMQGSTLPRRSG
RMFSLLQTSTNPRRSG

SEQ ID NO: 128386 - protein, 16 aa, Artificial Sequence
  Description of Artificial Sequence: Synthetic peptide
  Seed: RMCSLMQGSTLPRRSG
RMFSLLQTSTPPRRSG

SEQ ID NO: 128387 - protein, 16 aa, Artificial Sequence
  Description of Artificial Sequence: Synthetic peptide
  Seed: RMCSLMQGSTLPRRSG
RMFSLLQTSTQPRRSG

SEQ ID NO: 128388 - protein, 16 aa, Artificial Sequence
  Description of Artificial Sequence: Synthetic peptide
  Seed: RMCSLMQGSTLPRRSG
RMFSLLQTSTSPRRSG

SEQ ID NO: 128389 - protein, 16 aa, Artificial Sequence
  Description of Artificial Sequence: Synthetic peptide
  Seed: RMCSLMQGSTLPRRSG
RMFSLLQTSTTPRRSG

SEQ ID NO: 128390 - protein, 16 aa, Artificial Sequence
  Description of Artificial Sequence: Synthetic peptide
  Seed: RMCSLMQGSTLPRRSG
RMFSLLQTSTVPRRSG

SEQ ID NO: 128391 - protein, 16 aa, Artificial Sequence
  Description of Artificial Sequence: Synthetic peptide
  Seed: RMCSLMQGSTLPRRSG
RMFSLLQVSTAPRRSG

SEQ ID NO: 128392 - protein, 16 aa, Artificial Sequence
  Description of Artificial Sequence: Synthetic peptide
  Seed: RMCSLMQGSTLPRRSG
RMFSLLQVSTDPRRSG

SEQ ID NO: 128393 - protein, 16 aa, Artificial Sequence
  Description of Artificial Sequence: Synthetic peptide
  Seed: RMCSLMQGSTLPRRSG
RMFSLLQVSTGPRRSG

SEQ ID NO: 128394 - protein, 16 aa, Artificial Sequence
  Description of Artificial Sequence: Synthetic peptide
  Seed: RMCSLMQGSTLPRRSG
RMFSLLQVSTHPRRSG

SEQ ID NO: 128395 - protein, 16 aa, Artificial Sequence
  Description of Artificial Sequence: Synthetic peptide
  Seed: RMCSLMQGSTLPRRSG
RMFSLLQVSTIPRRSG

SEQ ID NO: 128396 - protein, 16 aa, Artificial Sequence
  Description of Artificial Sequence: Synthetic peptide
  Seed: RMCSLMQGSTLPRRSG
RMFSLLQVSTLPRRSG

SEQ ID NO: 128397 - protein, 16 aa, Artificial Sequence
  Description of Artificial Sequence: Synthetic peptide
  Seed: RMCSLMQGSTLPRRSG
RMFSLLQVSTMPRRSG

SEQ ID NO: 128398 - protein, 16 aa, Artificial Sequence
  Description of Artificial Sequence: Synthetic peptide
  Seed: RMCSLMQGSTLPRRSG
RMFSLLQVSTNPRRSG

SEQ ID NO: 128399 - protein, 16 aa, Artificial Sequence
  Description of Artificial Sequence: Synthetic peptide
  Seed: RMCSLMQGSTLPRRSG
RMFSLLQVSTPPRRSG

SEQ ID NO: 128400 - protein, 16 aa, Artificial Sequence
  Description of Artificial Sequence: Synthetic peptide
  Seed: RMCSLMQGSTLPRRSG
RMFSLLQVSTQPRRSG

SEQ ID NO: 128401 - protein, 16 aa, Artificial Sequence
  Description of Artificial Sequence: Synthetic peptide
  Seed: RMCSLMQGSTLPRRSG
RMFSLLQVSTSPRRSG

SEQ ID NO: 128402 - protein, 16 aa, Artificial Sequence
  Description of Artificial Sequence: Synthetic peptide
  Seed: RMCSLMQGSTLPRRSG
RMFSLLQVSTTPRRSG

SEQ ID NO: 128403 - protein, 16 aa, Artificial Sequence
  Description of Artificial Sequence: Synthetic peptide
  Seed: RMCSLMQGSTLPRRSG
RMFSLLQVSTVPRRSG

SEQ ID NO: 128404 - protein, 16 aa, Artificial Sequence
  Description of Artificial Sequence: Synthetic peptide
  Seed: RMCSLMQGSTLPRRSG
RMFSLMQASTAPRRSG

SEQ ID NO: 128405 - protein, 16 aa, Artificial Sequence
  Description of Artificial Sequence: Synthetic peptide
  Seed: RMCSLMQGSTLPRRSG
RMFSLMQASTCPRRSG

SEQ ID NO: 128406 - protein, 16 aa, Artificial Sequence
  Description of Artificial Sequence: Synthetic peptide
  Seed: RMCSLMQGSTLPRRSG
RMFSLMQASTDPRRSG

SEQ ID NO: 128407 - protein, 16 aa, Artificial Sequence
  Description of Artificial Sequence: Synthetic peptide
  Seed: RMCSLMQGSTLPRRSG
RMFSLMQASTEPRRSG

SEQ ID NO: 128408 - protein, 16 aa, Artificial Sequence
  Description of Artificial Sequence: Synthetic peptide
  Seed: RMCSLMQGSTLPRRSG
RMFSLMQASTFPRRSG

SEQ ID NO: 128409 - protein, 16 aa, Artificial Sequence
  Description of Artificial Sequence: Synthetic peptide
  Seed: RMCSLMQGSTLPRRSG
RMFSLMQASTGPRRSG

SEQ ID NO: 128410 - protein, 16 aa, Artificial Sequence
  Description of Artificial Sequence: Synthetic peptide
  Seed: RMCSLMQGSTLPRRSG
RMFSLMQASTHPRRSG

SEQ ID NO: 128411 - protein, 16 aa, Artificial Sequence
  Description of Artificial Sequence: Synthetic peptide
  Seed: RMCSLMQGSTLPRRSG
RMFSLMQASTIPRRSG

SEQ ID NO: 128412 - protein, 16 aa, Artificial Sequence
  Description of Artificial Sequence: Synthetic peptide
  Seed: RMCSLMQGSTLPRRSG
RMFSLMQASTLPRRSG

SEQ ID NO: 128413 - protein, 16 aa, Artificial Sequence
  Description of Artificial Sequence: Synthetic peptide
  Seed: RMCSLMQGSTLPRRSG
RMFSLMQASTMPRRSG

SEQ ID NO: 128414 - protein, 16 aa, Artificial Sequence
  Description of Artificial Sequence: Synthetic peptide
  Seed: RMCSLMQGSTLPRRSG
RMFSLMQASTNPRRSG

SEQ ID NO: 128415 - protein, 16 aa, Artificial Sequence
  Description of Artificial Sequence: Synthetic peptide
  Seed: RMCSLMQGSTLPRRSG
RMFSLMQASTPPRRSG

SEQ ID NO: 128416 - protein, 16 aa, Artificial Sequence
  Description of Artificial Sequence: Synthetic peptide
  Seed: RMCSLMQGSTLPRRSG
RMFSLMQASTQPRRSG

SEQ ID NO: 128417 - protein, 16 aa, Artificial Sequence
  Description of Artificial Sequence: Synthetic peptide
  Seed: RMCSLMQGSTLPRRSG
RMFSLMQASTSPRRSG

SEQ ID NO: 128418 - protein, 16 aa, Artificial Sequence
  Description of Artificial Sequence: Synthetic peptide
  Seed: RMCSLMQGSTLPRRSG
RMFSLMQASTTPRRSG

SEQ ID NO: 128419 - protein, 16 aa, Artificial Sequence
  Description of Artificial Sequence: Synthetic peptide
  Seed: RMCSLMQGSTLPRRSG
RMFSLMQASTVPRRSG

SEQ ID NO: 128420 - protein, 16 aa, Artificial Sequence
  Description of Artificial Sequence: Synthetic peptide
  Seed: RMCSLMQGSTLPRRSG
RMFSLMQASTYPRRSG

SEQ ID NO: 128421 - protein, 16 aa, Artificial Sequence
  Description of Artificial Sequence: Synthetic peptide
  Seed: RMCSLMQGSTLPRRSG
RMFSLMQGSTAPRRSG

SEQ ID NO: 128422 - protein, 16 aa, Artificial Sequence
  Description of Artificial Sequence: Synthetic peptide
  Seed: RMCSLMQGSTLPRRSG
RMFSLMQGSTCPRRSG

SEQ ID NO: 128423 - protein, 16 aa, Artificial Sequence
  Description of Artificial Sequence: Synthetic peptide
  Seed: RMCSLMQGSTLPRRSG
RMFSLMQGSTFPRRSG

SEQ ID NO: 128424 - protein, 16 aa, Artificial Sequence
  Description of Artificial Sequence: Synthetic peptide
  Seed: RMCSLMQGSTLPRRSG
RMFSLMQGSTGPRRSG

SEQ ID NO: 128425 - protein, 16 aa, Artificial Sequence
  Description of Artificial Sequence: Synthetic peptide
  Seed: RMCSLMQGSTLPRRSG
RMFSLMQGSTHPRRSG

SEQ ID NO: 128426 - protein, 16 aa, Artificial Sequence
  Description of Artificial Sequence: Synthetic peptide
  Seed: RMCSLMQGSTLPRRSG
RMFSLMQGSTIPRRSG

SEQ ID NO: 128427 - protein, 16 aa, Artificial Sequence
  Description of Artificial Sequence: Synthetic peptide
  Seed: RMCSLMQGSTLPRRSG
RMFSLMQGSTLPRRSG

SEQ ID NO: 128428 - protein, 16 aa, Artificial Sequence
  Description of Artificial Sequence: Synthetic peptide
  Seed: RMCSLMQGSTLPRRSG
RMFSLMQGSTMPRRSG

SEQ ID NO: 128429 - protein, 16 aa, Artificial Sequence
  Description of Artificial Sequence: Synthetic peptide
  Seed: RMCSLMQGSTLPRRSG
RMFSLMQGSTNPRRSG

SEQ ID NO: 128430 - protein, 16 aa, Artificial Sequence
  Description of Artificial Sequence: Synthetic peptide
  Seed: RMCSLMQGSTLPRRSG
RMFSLMQGSTQPRRSG

SEQ ID NO: 128431 - protein, 16 aa, Artificial Sequence
  Description of Artificial Sequence: Synthetic peptide
  Seed: RMCSLMQGSTLPRRSG
RMFSLMQGSTSPRRSG

SEQ ID NO: 128432 - protein, 16 aa, Artificial Sequence
  Description of Artificial Sequence: Synthetic peptide
  Seed: RMCSLMQGSTLPRRSG
RMFSLMQGSTTPRRSG

SEQ ID NO: 128433 - protein, 16 aa, Artificial Sequence
  Description of Artificial Sequence: Synthetic peptide
  Seed: RMCSLMQGSTLPRRSG
RMFSLMQGSTVPRRSG

SEQ ID NO: 128434 - protein, 16 aa, Artificial Sequence
  Description of Artificial Sequence: Synthetic peptide
  Seed: RMCSLMQGSTLPRRSG
RMFSLMQHSTIPRRSG

SEQ ID NO: 128435 - protein, 16 aa, Artificial Sequence
  Description of Artificial Sequence: Synthetic peptide
  Seed: RMCSLMQGSTLPRRSG
RMFSLMQHSTLPRRSG

SEQ ID NO: 128436 - protein, 16 aa, Artificial Sequence
  Description of Artificial Sequence: Synthetic peptide
  Seed: RMCSLMQGSTLPRRSG
RMFSLMQHSTVPRRSG

SEQ ID NO: 128437 - protein, 16 aa, Artificial Sequence
  Description of Artificial Sequence: Synthetic peptide
  Seed: RMCSLMQGSTLPRRSG
RMFSLMQISTAPRRSG

SEQ ID NO: 128438 - protein, 16 aa, Artificial Sequence
  Description of Artificial Sequence: Synthetic peptide
  Seed: RMCSLMQGSTLPRRSG
RMFSLMQISTGPRRSG

SEQ ID NO: 128439 - protein, 16 aa, Artificial Sequence
  Description of Artificial Sequence: Synthetic peptide
  Seed: RMCSLMQGSTLPRRSG
RMFSLMQISTHPRRSG

SEQ ID NO: 128440 - protein, 16 aa, Artificial Sequence
  Description of Artificial Sequence: Synthetic peptide
  Seed: RMCSLMQGSTLPRRSG
RMFSLMQISTIPRRSG

SEQ ID NO: 128441 - protein, 16 aa, Artificial Sequence
  Description of Artificial Sequence: Synthetic peptide
  Seed: RMCSLMQGSTLPRRSG
RMFSLMQISTLPRRSG

SEQ ID NO: 128442 - protein, 16 aa, Artificial Sequence
  Description of Artificial Sequence: Synthetic peptide
  Seed: RMCSLMQGSTLPRRSG
RMFSLMQISTMPRRSG

SEQ ID NO: 128443 - protein, 16 aa, Artificial Sequence
  Description of Artificial Sequence: Synthetic peptide
  Seed: RMCSLMQGSTLPRRSG
RMFSLMQISTNPRRSG

SEQ ID NO: 128444 - protein, 16 aa, Artificial Sequence
  Description of Artificial Sequence: Synthetic peptide
  Seed: RMCSLMQGSTLPRRSG
RMFSLMQISTQPRRSG

SEQ ID NO: 128445 - protein, 16 aa, Artificial Sequence
  Description of Artificial Sequence: Synthetic peptide
  Seed: RMCSLMQGSTLPRRSG
RMFSLMQISTSPRRSG

SEQ ID NO: 128446 - protein, 16 aa, Artificial Sequence
  Description of Artificial Sequence: Synthetic peptide
  Seed: RMCSLMQGSTLPRRSG
RMFSLMQISTTPRRSG

SEQ ID NO: 128447 - protein, 16 aa, Artificial Sequence
  Description of Artificial Sequence: Synthetic peptide
  Seed: RMCSLMQGSTLPRRSG
RMFSLMQISTVPRRSG

SEQ ID NO: 128448 - protein, 16 aa, Artificial Sequence
  Description of Artificial Sequence: Synthetic peptide
  Seed: RMCSLMQGSTLPRRSG
RMFSLMQLSTAPRRSG

SEQ ID NO: 128449 - protein, 16 aa, Artificial Sequence
  Description of Artificial Sequence: Synthetic peptide
  Seed: RMCSLMQGSTLPRRSG
RMFSLMQLSTIPRRSG

SEQ ID NO: 128450 - protein, 16 aa, Artificial Sequence
  Description of Artificial Sequence: Synthetic peptide
  Seed: RMCSLMQGSTLPRRSG
RMFSLMQLSTLPRRSG

SEQ ID NO: 128451 - protein, 16 aa, Artificial Sequence
  Description of Artificial Sequence: Synthetic peptide
  Seed: RMCSLMQGSTLPRRSG
RMFSLMQLSTNPRRSG

SEQ ID NO: 128452 - protein, 16 aa, Artificial Sequence
  Description of Artificial Sequence: Synthetic peptide
  Seed: RMCSLMQGSTLPRRSG
RMFSLMQLSTSPRRSG

SEQ ID NO: 128453 - protein, 16 aa, Artificial Sequence
  Description of Artificial Sequence: Synthetic peptide
  Seed: RMCSLMQGSTLPRRSG
RMFSLMQLSTTPRRSG

SEQ ID NO: 128454 - protein, 16 aa, Artificial Sequence
  Description of Artificial Sequence: Synthetic peptide
  Seed: RMCSLMQGSTLPRRSG
RMFSLMQLSTVPRRSG

SEQ ID NO: 128455 - protein, 16 aa, Artificial Sequence
  Description of Artificial Sequence: Synthetic peptide
  Seed: RMCSLMQGSTLPRRSG
RMFSLMQMSTAPRRSG

SEQ ID NO: 128456 - protein, 16 aa, Artificial Sequence
  Description of Artificial Sequence: Synthetic peptide
  Seed: RMCSLMQGSTLPRRSG
RMFSLMQMSTIPRRSG

SEQ ID NO: 128457 - protein, 16 aa, Artificial Sequence
  Description of Artificial Sequence: Synthetic peptide
  Seed: RMCSLMQGSTLPRRSG
RMFSLMQMSTNPRRSG

SEQ ID NO: 128458 - protein, 16 aa, Artificial Sequence
  Description of Artificial Sequence: Synthetic peptide
  Seed: RMCSLMQGSTLPRRSG
RMFSLMQMSTSPRRSG

SEQ ID NO: 128459 - protein, 16 aa, Artificial Sequence
  Description of Artificial Sequence: Synthetic peptide
  Seed: RMCSLMQGSTLPRRSG
RMFSLMQMSTTPRRSG

SEQ ID NO: 128460 - protein, 16 aa, Artificial Sequence
  Description of Artificial Sequence: Synthetic peptide
  Seed: RMCSLMQGSTLPRRSG
RMFSLMQMSTVPRRSG

SEQ ID NO: 128461 - protein, 16 aa, Artificial Sequence
  Description of Artificial Sequence: Synthetic peptide
  Seed: RMCSLMQGSTLPRRSG
RMFSLMQNSTAPRRSG

SEQ ID NO: 128462 - protein, 16 aa, Artificial Sequence
  Description of Artificial Sequence: Synthetic peptide
  Seed: RMCSLMQGSTLPRRSG
RMFSLMQNSTGPRRSG

SEQ ID NO: 128463 - protein, 16 aa, Artificial Sequence
  Description of Artificial Sequence: Synthetic peptide
  Seed: RMCSLMQGSTLPRRSG
RMFSLMQNSTHPRRSG

SEQ ID NO: 128464 - protein, 16 aa, Artificial Sequence
  Description of Artificial Sequence: Synthetic peptide
  Seed: RMCSLMQGSTLPRRSG
RMFSLMQNSTIPRRSG

SEQ ID NO: 128465 - protein, 16 aa, Artificial Sequence
  Description of Artificial Sequence: Synthetic peptide
  Seed: RMCSLMQGSTLPRRSG
RMFSLMQNSTLPRRSG

SEQ ID NO: 128466 - protein, 16 aa, Artificial Sequence
  Description of Artificial Sequence: Synthetic peptide
  Seed: RMCSLMQGSTLPRRSG
RMFSLMQNSTMPRRSG

SEQ ID NO: 128467 - protein, 16 aa, Artificial Sequence
  Description of Artificial Sequence: Synthetic peptide
  Seed: RMCSLMQGSTLPRRSG
RMFSLMQNSTNPRRSG

SEQ ID NO: 128468 - protein, 16 aa, Artificial Sequence
  Description of Artificial Sequence: Synthetic peptide
  Seed: RMCSLMQGSTLPRRSG
RMFSLMQNSTSPRRSG

SEQ ID NO: 128469 - protein, 16 aa, Artificial Sequence
  Description of Artificial Sequence: Synthetic peptide
  Seed: RMCSLMQGSTLPRRSG
RMFSLMQNSTTPRRSG

SEQ ID NO: 128470 - protein, 16 aa, Artificial Sequence
  Description of Artificial Sequence: Synthetic peptide
  Seed: RMCSLMQGSTLPRRSG
RMFSLMQNSTVPRRSG

SEQ ID NO: 128471 - protein, 16 aa, Artificial Sequence
  Description of Artificial Sequence: Synthetic peptide
  Seed: RMCSLMQGSTLPRRSG
RMFSLMQPSTAPRRSG

SEQ ID NO: 128472 - protein, 16 aa, Artificial Sequence
  Description of Artificial Sequence: Synthetic peptide
  Seed: RMCSLMQGSTLPRRSG
RMFSLMQPSTCPRRSG

SEQ ID NO: 128473 - protein, 16 aa, Artificial Sequence
  Description of Artificial Sequence: Synthetic peptide
  Seed: RMCSLMQGSTLPRRSG
RMFSLMQPSTDPRRSG

SEQ ID NO: 128474 - protein, 16 aa, Artificial Sequence
  Description of Artificial Sequence: Synthetic peptide
  Seed: RMCSLMQGSTLPRRSG
RMFSLMQPSTEPRRSG

SEQ ID NO: 128475 - protein, 16 aa, Artificial Sequence
  Description of Artificial Sequence: Synthetic peptide
  Seed: RMCSLMQGSTLPRRSG
RMFSLMQPSTFPRRSG

SEQ ID NO: 128476 - protein, 16 aa, Artificial Sequence
  Description of Artificial Sequence: Synthetic peptide
  Seed: RMCSLMQGSTLPRRSG
RMFSLMQPSTGPRRSG

SEQ ID NO: 128477 - protein, 16 aa, Artificial Sequence
  Description of Artificial Sequence: Synthetic peptide
  Seed: RMCSLMQGSTLPRRSG
RMFSLMQPSTHPRRSG

SEQ ID NO: 128478 - protein, 16 aa, Artificial Sequence
  Description of Artificial Sequence: Synthetic peptide
  Seed: RMCSLMQGSTLPRRSG
RMFSLMQPSTIPRRSG

SEQ ID NO: 128479 - protein, 16 aa, Artificial Sequence
  Description of Artificial Sequence: Synthetic peptide
  Seed: RMCSLMQGSTLPRRSG
RMFSLMQPSTLPRRSG

SEQ ID NO: 128480 - protein, 16 aa, Artificial Sequence
  Description of Artificial Sequence: Synthetic peptide
  Seed: RMCSLMQGSTLPRRSG
RMFSLMQPSTMPRRSG

SEQ ID NO: 128481 - protein, 16 aa, Artificial Sequence
  Description of Artificial Sequence: Synthetic peptide
  Seed: RMCSLMQGSTLPRRSG
RMFSLMQPSTNPRRSG

SEQ ID NO: 128482 - protein, 16 aa, Artificial Sequence
  Description of Artificial Sequence: Synthetic peptide
  Seed: RMCSLMQGSTLPRRSG
RMFSLMQPSTPPRRSG

SEQ ID NO: 128483 - protein, 16 aa, Artificial Sequence
  Description of Artificial Sequence: Synthetic peptide
  Seed: RMCSLMQGSTLPRRSG
RMFSLMQPSTQPRRSG

SEQ ID NO: 128484 - protein, 16 aa, Artificial Sequence
  Description of Artificial Sequence: Synthetic peptide
  Seed: RMCSLMQGSTLPRRSG
RMFSLMQPSTSPRRSG

SEQ ID NO: 128485 - protein, 16 aa, Artificial Sequence
  Description of Artificial Sequence: Synthetic peptide
  Seed: RMCSLMQGSTLPRRSG
RMFSLMQPSTTPRRSG

SEQ ID NO: 128486 - protein, 16 aa, Artificial Sequence
  Description of Artificial Sequence: Synthetic peptide
  Seed: RMCSLMQGSTLPRRSG
RMFSLMQPSTVPRRSG

SEQ ID NO: 128487 - protein, 16 aa, Artificial Sequence
  Description of Artificial Sequence: Synthetic peptide
  Seed: RMCSLMQGSTLPRRSG
RMFSLMQSSTAPRRSG

SEQ ID NO: 128488 - protein, 16 aa, Artificial Sequence
  Description of Artificial Sequence: Synthetic peptide
  Seed: RMCSLMQGSTLPRRSG
RMFSLMQSSTCPRRSG

SEQ ID NO: 128489 - protein, 16 aa, Artificial Sequence
  Description of Artificial Sequence: Synthetic peptide
  Seed: RMCSLMQGSTLPRRSG
RMFSLMQSSTFPRRSG

SEQ ID NO: 128490 - protein, 16 aa, Artificial Sequence
  Description of Artificial Sequence: Synthetic peptide
  Seed: RMCSLMQGSTLPRRSG
RMFSLMQSSTGPRRSG

SEQ ID NO: 128491 - protein, 16 aa, Artificial Sequence
  Description of Artificial Sequence: Synthetic peptide
  Seed: RMCSLMQGSTLPRRSG
RMFSLMQSSTHPRRSG

SEQ ID NO: 128492 - protein, 16 aa, Artificial Sequence
  Description of Artificial Sequence: Synthetic peptide
  Seed: RMCSLMQGSTLPRRSG
RMFSLMQSSTIPRRSG

SEQ ID NO: 128493 - protein, 16 aa, Artificial Sequence
  Description of Artificial Sequence: Synthetic peptide
  Seed: RMCSLMQGSTLPRRSG
RMFSLMQSSTLPRRSG

SEQ ID NO: 128494 - protein, 16 aa, Artificial Sequence
  Description of Artificial Sequence: Synthetic peptide
  Seed: RMCSLMQGSTLPRRSG
RMFSLMQSSTMPRRSG

SEQ ID NO: 128495 - protein, 16 aa, Artificial Sequence
  Description of Artificial Sequence: Synthetic peptide
  Seed: RMCSLMQGSTLPRRSG
RMFSLMQSSTNPRRSG

SEQ ID NO: 128496 - protein, 16 aa, Artificial Sequence
  Description of Artificial Sequence: Synthetic peptide
  Seed: RMCSLMQGSTLPRRSG
RMFSLMQSSTPPRRSG

SEQ ID NO: 128497 - protein, 16 aa, Artificial Sequence
  Description of Artificial Sequence: Synthetic peptide
  Seed: RMCSLMQGSTLPRRSG
RMFSLMQSSTQPRRSG

SEQ ID NO: 128498 - protein, 16 aa, Artificial Sequence
  Description of Artificial Sequence: Synthetic peptide
  Seed: RMCSLMQGSTLPRRSG
RMFSLMQSSTSPRRSG

SEQ ID NO: 128499 - protein, 16 aa, Artificial Sequence
  Description of Artificial Sequence: Synthetic peptide
  Seed: RMCSLMQGSTLPRRSG
RMFSLMQSSTTPRRSG

SEQ ID NO: 128500 - protein, 16 aa, Artificial Sequence
  Description of Artificial Sequence: Synthetic peptide
  Seed: RMCSLMQGSTLPRRSG
RMFSLMQSSTVPRRSG

SEQ ID NO: 128501 - protein, 16 aa, Artificial Sequence
  Description of Artificial Sequence: Synthetic peptide
  Seed: RMCSLMQGSTLPRRSG
RMFSLMQTSTAPRRSG

SEQ ID NO: 128502 - protein, 16 aa, Artificial Sequence
  Description of Artificial Sequence: Synthetic peptide
  Seed: RMCSLMQGSTLPRRSG
RMFSLMQTSTGPRRSG

SEQ ID NO: 128503 - protein, 16 aa, Artificial Sequence
  Description of Artificial Sequence: Synthetic peptide
  Seed: RMCSLMQGSTLPRRSG
RMFSLMQTSTHPRRSG

SEQ ID NO: 128504 - protein, 16 aa, Artificial Sequence
  Description of Artificial Sequence: Synthetic peptide
  Seed: RMCSLMQGSTLPRRSG
RMFSLMQTSTIPRRSG

SEQ ID NO: 128505 - protein, 16 aa, Artificial Sequence
  Description of Artificial Sequence: Synthetic peptide
  Seed: RMCSLMQGSTLPRRSG
RMFSLMQTSTLPRRSG

SEQ ID NO: 128506 - protein, 16 aa, Artificial Sequence
  Description of Artificial Sequence: Synthetic peptide
  Seed: RMCSLMQGSTLPRRSG
RMFSLMQTSTMPRRSG

SEQ ID NO: 128507 - protein, 16 aa, Artificial Sequence
  Description of Artificial Sequence: Synthetic peptide
  Seed: RMCSLMQGSTLPRRSG
RMFSLMQTSTNPRRSG

SEQ ID NO: 128508 - protein, 16 aa, Artificial Sequence
  Description of Artificial Sequence: Synthetic peptide
  Seed: RMCSLMQGSTLPRRSG
RMFSLMQTSTPPRRSG

SEQ ID NO: 128509 - protein, 16 aa, Artificial Sequence
  Description of Artificial Sequence: Synthetic peptide
  Seed: RMCSLMQGSTLPRRSG
RMFSLMQTSTQPRRSG

SEQ ID NO: 128510 - protein, 16 aa, Artificial Sequence
  Description of Artificial Sequence: Synthetic peptide
  Seed: RMCSLMQGSTLPRRSG
RMFSLMQTSTSPRRSG

SEQ ID NO: 128511 - protein, 16 aa, Artificial Sequence
  Description of Artificial Sequence: Synthetic peptide
  Seed: RMCSLMQGSTLPRRSG
RMFSLMQTSTTPRRSG

SEQ ID NO: 128512 - protein, 16 aa, Artificial Sequence
  Description of Artificial Sequence: Synthetic peptide
  Seed: RMCSLMQGSTLPRRSG
RMFSLMQTSTVPRRSG

SEQ ID NO: 128513 - protein, 16 aa, Artificial Sequence
  Description of Artificial Sequence: Synthetic peptide
  Seed: RMCSLMQGSTLPRRSG
RMFSLMQVSTAPRRSG

SEQ ID NO: 128514 - protein, 16 aa, Artificial Sequence
  Description of Artificial Sequence: Synthetic peptide
  Seed: RMCSLMQGSTLPRRSG
RMFSLMQVSTDPRRSG

SEQ ID NO: 128515 - protein, 16 aa, Artificial Sequence
  Description of Artificial Sequence: Synthetic peptide
  Seed: RMCSLMQGSTLPRRSG
RMFSLMQVSTGPRRSG

SEQ ID NO: 128516 - protein, 16 aa, Artificial Sequence
  Description of Artificial Sequence: Synthetic peptide
  Seed: RMCSLMQGSTLPRRSG
RMFSLMQVSTHPRRSG

SEQ ID NO: 128517 - protein, 16 aa, Artificial Sequence
  Description of Artificial Sequence: Synthetic peptide
  Seed: RMCSLMQGSTLPRRSG
RMFSLMQVSTIPRRSG

SEQ ID NO: 128518 - protein, 16 aa, Artificial Sequence
  Description of Artificial Sequence: Synthetic peptide
  Seed: RMCSLMQGSTLPRRSG
RMFSLMQVSTLPRRSG

SEQ ID NO: 128519 - protein, 16 aa, Artificial Sequence
  Description of Artificial Sequence: Synthetic peptide
  Seed: RMCSLMQGSTLPRRSG
RMFSLMQVSTMPRRSG

SEQ ID NO: 128520 - protein, 16 aa, Artificial Sequence
  Description of Artificial Sequence: Synthetic peptide
  Seed: RMCSLMQGSTLPRRSG
RMFSLMQVSTNPRRSG

SEQ ID NO: 128521 - protein, 16 aa, Artificial Sequence
  Description of Artificial Sequence: Synthetic peptide
  Seed: RMCSLMQGSTLPRRSG
RMFSLMQVSTPPRRSG

SEQ ID NO: 128522 - protein, 16 aa, Artificial Sequence
  Description of Artificial Sequence: Synthetic peptide
  Seed: RMCSLMQGSTLPRRSG
RMFSLMQVSTQPRRSG

SEQ ID NO: 128523 - protein, 16 aa, Artificial Sequence
  Description of Artificial Sequence: Synthetic peptide
  Seed: RMCSLMQGSTLPRRSG
RMFSLMQVSTSPRRSG

SEQ ID NO: 128524 - protein, 16 aa, Artificial Sequence
  Description of Artificial Sequence: Synthetic peptide
  Seed: RMCSLMQGSTLPRRSG
RMFSLMQVSTTPRRSG

SEQ ID NO: 128525 - protein, 16 aa, Artificial Sequence
  Description of Artificial Sequence: Synthetic peptide
  Seed: RMCSLMQGSTLPRRSG
RMFSLMQVSTVPRRSG

SEQ ID NO: 128526 - protein, 16 aa, Artificial Sequence
  Description of Artificial Sequence: Synthetic peptide
  Seed: RMCSLMQGSTLPRRSG
RMFSLNQASTIPRRSG

SEQ ID NO: 128527 - protein, 16 aa, Artificial Sequence
  Description of Artificial Sequence: Synthetic peptide
  Seed: RMCSLMQGSTLPRRSG
RMFSLNQASTLPRRSG

SEQ ID NO: 128528 - protein, 16 aa, Artificial Sequence
  Description of Artificial Sequence: Synthetic peptide
  Seed: RMCSLMQGSTLPRRSG
RMFSLNQASTVPRRSG

SEQ ID NO: 128529 - protein, 16 aa, Artificial Sequence
  Description of Artificial Sequence: Synthetic peptide
  Seed: RMCSLMQGSTLPRRSG
RMFSLQQASTAPRRSG

SEQ ID NO: 128530 - protein, 16 aa, Artificial Sequence
  Description of Artificial Sequence: Synthetic peptide
  Seed: RMCSLMQGSTLPRRSG
RMFSLQQASTIPRRSG

SEQ ID NO: 128531 - protein, 16 aa, Artificial Sequence
  Description of Artificial Sequence: Synthetic peptide
  Seed: RMCSLMQGSTLPRRSG
RMFSLQQASTLPRRSG

SEQ ID NO: 128532 - protein, 16 aa, Artificial Sequence
  Description of Artificial Sequence: Synthetic peptide
  Seed: RMCSLMQGSTLPRRSG
RMFSLQQASTMPRRSG

SEQ ID NO: 128533 - protein, 16 aa, Artificial Sequence
  Description of Artificial Sequence: Synthetic peptide
  Seed: RMCSLMQGSTLPRRSG
RMFSLQQASTNPRRSG

SEQ ID NO: 128534 - protein, 16 aa, Artificial Sequence
  Description of Artificial Sequence: Synthetic peptide
  Seed: RMCSLMQGSTLPRRSG
RMFSLQQASTSPRRSG

SEQ ID NO: 128535 - protein, 16 aa, Artificial Sequence
  Description of Artificial Sequence: Synthetic peptide
  Seed: RMCSLMQGSTLPRRSG
RMFSLQQASTTPRRSG

SEQ ID NO: 128536 - protein, 16 aa, Artificial Sequence
  Description of Artificial Sequence: Synthetic peptide
  Seed: RMCSLMQGSTLPRRSG
RMFSLQQASTVPRRSG

SEQ ID NO: 128537 - protein, 16 aa, Artificial Sequence
  Description of Artificial Sequence: Synthetic peptide
  Seed: RMCSLMQGSTLPRRSG
RMFSLQQGSTAPRRSG

SEQ ID NO: 128538 - protein, 16 aa, Artificial Sequence
  Description of Artificial Sequence: Synthetic peptide
  Seed: RMCSLMQGSTLPRRSG
RMFSLQQGSTIPRRSG

SEQ ID NO: 128539 - protein, 16 aa, Artificial Sequence
  Description of Artificial Sequence: Synthetic peptide
  Seed: RMCSLMQGSTLPRRSG
RMFSLQQGSTLPRRSG

SEQ ID NO: 128540 - protein, 16 aa, Artificial Sequence
  Description of Artificial Sequence: Synthetic peptide
  Seed: RMCSLMQGSTLPRRSG
RMFSLQQGSTMPRRSG

SEQ ID NO: 128541 - protein, 16 aa, Artificial Sequence
  Description of Artificial Sequence: Synthetic peptide
  Seed: RMCSLMQGSTLPRRSG
RMFSLQQGSTTPRRSG

SEQ ID NO: 128542 - protein, 16 aa, Artificial Sequence
  Description of Artificial Sequence: Synthetic peptide
  Seed: RMCSLMQGSTLPRRSG
RMFSLQQGSTVPRRSG

SEQ ID NO: 128543 - protein, 16 aa, Artificial Sequence
  Description of Artificial Sequence: Synthetic peptide
  Seed: RMCSLMQGSTLPRRSG
RMFSLQQISTAPRRSG

SEQ ID NO: 128544 - protein, 16 aa, Artificial Sequence
  Description of Artificial Sequence: Synthetic peptide
  Seed: RMCSLMQGSTLPRRSG
RMFSLQQNSTIPRRSG

SEQ ID NO: 128545 - protein, 16 aa, Artificial Sequence
  Description of Artificial Sequence: Synthetic peptide
  Seed: RMCSLMQGSTLPRRSG
RMFSLQQNSTLPRRSG

SEQ ID NO: 128546 - protein, 16 aa, Artificial Sequence
  Description of Artificial Sequence: Synthetic peptide
  Seed: RMCSLMQGSTLPRRSG
RMFSLQQNSTVPRRSG

SEQ ID NO: 128547 - protein, 16 aa, Artificial Sequence
  Description of Artificial Sequence: Synthetic peptide
  Seed: RMCSLMQGSTLPRRSG
RMFSLQQPSTAPRRSG

SEQ ID NO: 128548 - protein, 16 aa, Artificial Sequence
  Description of Artificial Sequence: Synthetic peptide
  Seed: RMCSLMQGSTLPRRSG
RMFSLQQPSTIPRRSG

SEQ ID NO: 128549 - protein, 16 aa, Artificial Sequence
  Description of Artificial Sequence: Synthetic peptide
  Seed: RMCSLMQGSTLPRRSG
RMFSLQQPSTLPRRSG

SEQ ID NO: 128550 - protein, 16 aa, Artificial Sequence
  Description of Artificial Sequence: Synthetic peptide
  Seed: RMCSLMQGSTLPRRSG
RMFSLQQPSTSPRRSG

SEQ ID NO: 128551 - protein, 16 aa, Artificial Sequence
  Description of Artificial Sequence: Synthetic peptide
  Seed: RMCSLMQGSTLPRRSG
RMFSLQQPSTVPRRSG

SEQ ID NO: 128552 - protein, 16 aa, Artificial Sequence
  Description of Artificial Sequence: Synthetic peptide
  Seed: RMCSLMQGSTLPRRSG
RMFSLQQSSTAPRRSG

SEQ ID NO: 128553 - protein, 16 aa, Artificial Sequence
  Description of Artificial Sequence: Synthetic peptide
  Seed: RMCSLMQGSTLPRRSG
RMFSLQQSSTIPRRSG

SEQ ID NO: 128554 - protein, 16 aa, Artificial Sequence
  Description of Artificial Sequence: Synthetic peptide
  Seed: RMCSLMQGSTLPRRSG
RMFSLQQSSTLPRRSG

SEQ ID NO: 128555 - protein, 16 aa, Artificial Sequence
  Description of Artificial Sequence: Synthetic peptide
  Seed: RMCSLMQGSTLPRRSG
RMFSLQQSSTMPRRSG

SEQ ID NO: 128556 - protein, 16 aa, Artificial Sequence
  Description of Artificial Sequence: Synthetic peptide
  Seed: RMCSLMQGSTLPRRSG
RMFSLQQSSTNPRRSG

SEQ ID NO: 128557 - protein, 16 aa, Artificial Sequence
  Description of Artificial Sequence: Synthetic peptide
  Seed: RMCSLMQGSTLPRRSG
RMFSLQQSSTSPRRSG

SEQ ID NO: 128558 - protein, 16 aa, Artificial Sequence
  Description of Artificial Sequence: Synthetic peptide
  Seed: RMCSLMQGSTLPRRSG
RMFSLQQSSTTPRRSG

SEQ ID NO: 128559 - protein, 16 aa, Artificial Sequence
  Description of Artificial Sequence: Synthetic peptide
  Seed: RMCSLMQGSTLPRRSG
RMFSLQQSSTVPRRSG

SEQ ID NO: 128560 - protein, 16 aa, Artificial Sequence
  Description of Artificial Sequence: Synthetic peptide
  Seed: RMCSLMQGSTLPRRSG
RMFSLQQTSTAPRRSG

SEQ ID NO: 128561 - protein, 16 aa, Artificial Sequence
  Description of Artificial Sequence: Synthetic peptide
  Seed: RMCSLMQGSTLPRRSG
RMFSLQQTSTIPRRSG

SEQ ID NO: 128562 - protein, 16 aa, Artificial Sequence
  Description of Artificial Sequence: Synthetic peptide
  Seed: RMCSLMQGSTLPRRSG
RMFSLQQTSTLPRRSG

SEQ ID NO: 128563 - protein, 16 aa, Artificial Sequence
  Description of Artificial Sequence: Synthetic peptide
  Seed: RMCSLMQGSTLPRRSG
RMFSLQQTSTNPRRSG

SEQ ID NO: 128564 - protein, 16 aa, Artificial Sequence
  Description of Artificial Sequence: Synthetic peptide
  Seed: RMCSLMQGSTLPRRSG
RMFSLQQTSTSPRRSG

SEQ ID NO: 128565 - protein, 16 aa, Artificial Sequence
  Description of Artificial Sequence: Synthetic peptide
  Seed: RMCSLMQGSTLPRRSG
RMFSLQQTSTVPRRSG

SEQ ID NO: 128566 - protein, 16 aa, Artificial Sequence
  Description of Artificial Sequence: Synthetic peptide
  Seed: RMCSLMQGSTLPRRSG
RMFSLQQVSTAPRRSG

SEQ ID NO: 128567 - protein, 16 aa, Artificial Sequence
  Description of Artificial Sequence: Synthetic peptide
  Seed: RMCSLMQGSTLPRRSG
RMFSLQQVSTNPRRSG

SEQ ID NO: 128568 - protein, 16 aa, Artificial Sequence
  Description of Artificial Sequence: Synthetic peptide
  Seed: RMCSLMQGSTLPRRSG
RMFSLQQVSTSPRRSG

SEQ ID NO: 128569 - protein, 16 aa, Artificial Sequence
  Description of Artificial Sequence: Synthetic peptide
  Seed: RMCSLMQGSTLPRRSG
RMFSLSQASTAPRRSG

SEQ ID NO: 128570 - protein, 16 aa, Artificial Sequence
  Description of Artificial Sequence: Synthetic peptide
  Seed: RMCSLMQGSTLPRRSG
RMFSLSQASTIPRRSG

SEQ ID NO: 128571 - protein, 16 aa, Artificial Sequence
  Description of Artificial Sequence: Synthetic peptide
  Seed: RMCSLMQGSTLPRRSG
RMFSLSQASTLPRRSG

SEQ ID NO: 128572 - protein, 16 aa, Artificial Sequence
  Description of Artificial Sequence: Synthetic peptide
  Seed: RMCSLMQGSTLPRRSG
RMFSLSQASTMPRRSG

SEQ ID NO: 128573 - protein, 16 aa, Artificial Sequence
  Description of Artificial Sequence: Synthetic peptide
  Seed: RMCSLMQGSTLPRRSG
RMFSLSQASTNPRRSG

SEQ ID NO: 128574 - protein, 16 aa, Artificial Sequence
  Description of Artificial Sequence: Synthetic peptide
  Seed: RMCSLMQGSTLPRRSG
RMFSLSQASTSPRRSG

SEQ ID NO: 128575 - protein, 16 aa, Artificial Sequence
  Description of Artificial Sequence: Synthetic peptide
  Seed: RMCSLMQGSTLPRRSG
RMFSLSQASTVPRRSG

SEQ ID NO: 128576 - protein, 16 aa, Artificial Sequence
  Description of Artificial Sequence: Synthetic peptide
  Seed: RMCSLMQGSTLPRRSG
RMFSLSQGSTAPRRSG

SEQ ID NO: 128577 - protein, 16 aa, Artificial Sequence
  Description of Artificial Sequence: Synthetic peptide
  Seed: RMCSLMQGSTLPRRSG
RMFSLSQGSTIPRRSG

SEQ ID NO: 128578 - protein, 16 aa, Artificial Sequence
  Description of Artificial Sequence: Synthetic peptide
  Seed: RMCSLMQGSTLPRRSG
RMFSLSQGSTLPRRSG

SEQ ID NO: 128579 - protein, 16 aa, Artificial Sequence
  Description of Artificial Sequence: Synthetic peptide
  Seed: RMCSLMQGSTLPRRSG
RMFSLSQGSTVPRRSG

SEQ ID NO: 128580 - protein, 16 aa, Artificial Sequence
  Description of Artificial Sequence: Synthetic peptide
  Seed: RMCSLMQGSTLPRRSG
RMFSLSQPSTIPRRSG

SEQ ID NO: 128581 - protein, 16 aa, Artificial Sequence
  Description of Artificial Sequence: Synthetic peptide
  Seed: RMCSLMQGSTLPRRSG
RMFSLSQPSTLPRRSG

SEQ ID NO: 128582 - protein, 16 aa, Artificial Sequence
  Description of Artificial Sequence: Synthetic peptide
  Seed: RMCSLMQGSTLPRRSG
RMFSLSQPSTVPRRSG

SEQ ID NO: 128583 - protein, 16 aa, Artificial Sequence
  Description of Artificial Sequence: Synthetic peptide
  Seed: RMCSLMQGSTLPRRSG
RMFSLSQSSTIPRRSG

SEQ ID NO: 128584 - protein, 16 aa, Artificial Sequence
  Description of Artificial Sequence: Synthetic peptide
  Seed: RMCSLMQGSTLPRRSG
RMFSLSQSSTLPRRSG

SEQ ID NO: 128585 - protein, 16 aa, Artificial Sequence
  Description of Artificial Sequence: Synthetic peptide
  Seed: RMCSLMQGSTLPRRSG
RMFSLSQSSTVPRRSG

SEQ ID NO: 128586 - protein, 16 aa, Artificial Sequence
  Description of Artificial Sequence: Synthetic peptide
  Seed: RMCSLMQGSTLPRRSG
RMFSLTQASTAPRRSG

SEQ ID NO: 128587 - protein, 16 aa, Artificial Sequence
  Description of Artificial Sequence: Synthetic peptide
  Seed: RMCSLMQGSTLPRRSG
RMFSLTQASTIPRRSG

SEQ ID NO: 128588 - protein, 16 aa, Artificial Sequence
  Description of Artificial Sequence: Synthetic peptide
  Seed: RMCSLMQGSTLPRRSG
RMFSLTQASTLPRRSG

SEQ ID NO: 128589 - protein, 16 aa, Artificial Sequence
  Description of Artificial Sequence: Synthetic peptide
  Seed: RMCSLMQGSTLPRRSG
RMFSLTQASTSPRRSG

SEQ ID NO: 128590 - protein, 16 aa, Artificial Sequence
  Description of Artificial Sequence: Synthetic peptide
  Seed: RMCSLMQGSTLPRRSG
RMFSLTQASTVPRRSG

SEQ ID NO: 128591 - protein, 16 aa, Artificial Sequence
  Description of Artificial Sequence: Synthetic peptide
  Seed: RMCSLMQGSTLPRRSG
RMFSLTQGSTLPRRSG

SEQ ID NO: 128592 - protein, 16 aa, Artificial Sequence
  Description of Artificial Sequence: Synthetic peptide
  Seed: RMCSLMQGSTLPRRSG
RMFSLVQASTAPRRSG

SEQ ID NO: 128593 - protein, 16 aa, Artificial Sequence
  Description of Artificial Sequence: Synthetic peptide
  Seed: RMCSLMQGSTLPRRSG
RMFSLVQASTGPRRSG

SEQ ID NO: 128594 - protein, 16 aa, Artificial Sequence
  Description of Artificial Sequence: Synthetic peptide
  Seed: RMCSLMQGSTLPRRSG
RMFSLVQASTHPRRSG

SEQ ID NO: 128595 - protein, 16 aa, Artificial Sequence
  Description of Artificial Sequence: Synthetic peptide
  Seed: RMCSLMQGSTLPRRSG
RMFSLVQASTIPRRSG

SEQ ID NO: 128596 - protein, 16 aa, Artificial Sequence
  Description of Artificial Sequence: Synthetic peptide
  Seed: RMCSLMQGSTLPRRSG
RMFSLVQASTLPRRSG

SEQ ID NO: 128597 - protein, 16 aa, Artificial Sequence
  Description of Artificial Sequence: Synthetic peptide
  Seed: RMCSLMQGSTLPRRSG
RMFSLVQASTMPRRSG

SEQ ID NO: 128598 - protein, 16 aa, Artificial Sequence
  Description of Artificial Sequence: Synthetic peptide
  Seed: RMCSLMQGSTLPRRSG
RMFSLVQASTNPRRSG

SEQ ID NO: 128599 - protein, 16 aa, Artificial Sequence
  Description of Artificial Sequence: Synthetic peptide
  Seed: RMCSLMQGSTLPRRSG
RMFSLVQASTSPRRSG

SEQ ID NO: 128600 - protein, 16 aa, Artificial Sequence
  Description of Artificial Sequence: Synthetic peptide
  Seed: RMCSLMQGSTLPRRSG
RMFSLVQASTTPRRSG

SEQ ID NO: 128601 - protein, 16 aa, Artificial Sequence
  Description of Artificial Sequence: Synthetic peptide
  Seed: RMCSLMQGSTLPRRSG
RMFSLVQASTVPRRSG

SEQ ID NO: 128602 - protein, 16 aa, Artificial Sequence
  Description of Artificial Sequence: Synthetic peptide
  Seed: RMCSLMQGSTLPRRSG
RMFSLVQGSTAPRRSG

SEQ ID NO: 128603 - protein, 16 aa, Artificial Sequence
  Description of Artificial Sequence: Synthetic peptide
  Seed: RMCSLMQGSTLPRRSG
RMFSLVQGSTIPRRSG

SEQ ID NO: 128604 - protein, 16 aa, Artificial Sequence
  Description of Artificial Sequence: Synthetic peptide
  Seed: RMCSLMQGSTLPRRSG
RMFSLVQGSTLPRRSG

SEQ ID NO: 128605 - protein, 16 aa, Artificial Sequence
  Description of Artificial Sequence: Synthetic peptide
  Seed: RMCSLMQGSTLPRRSG
RMFSLVQGSTMPRRSG

SEQ ID NO: 128606 - protein, 16 aa, Artificial Sequence
  Description of Artificial Sequence: Synthetic peptide
  Seed: RMCSLMQGSTLPRRSG
RMFSLVQGSTNPRRSG

SEQ ID NO: 128607 - protein, 16 aa, Artificial Sequence
  Description of Artificial Sequence: Synthetic peptide
  Seed: RMCSLMQGSTLPRRSG
RMFSLVQGSTSPRRSG

SEQ ID NO: 128608 - protein, 16 aa, Artificial Sequence
  Description of Artificial Sequence: Synthetic peptide
  Seed: RMCSLMQGSTLPRRSG
RMFSLVQGSTTPRRSG

SEQ ID NO: 128609 - protein, 16 aa, Artificial Sequence
  Description of Artificial Sequence: Synthetic peptide
  Seed: RMCSLMQGSTLPRRSG
RMFSLVQGSTVPRRSG

SEQ ID NO: 128610 - protein, 16 aa, Artificial Sequence
  Description of Artificial Sequence: Synthetic peptide
  Seed: RMCSLMQGSTLPRRSG
RMFSLVQISTAPRRSG

SEQ ID NO: 128611 - protein, 16 aa, Artificial Sequence
  Description of Artificial Sequence: Synthetic peptide
  Seed: RMCSLMQGSTLPRRSG
RMFSLVQISTNPRRSG

SEQ ID NO: 128612 - protein, 16 aa, Artificial Sequence
  Description of Artificial Sequence: Synthetic peptide
  Seed: RMCSLMQGSTLPRRSG
RMFSLVQISTSPRRSG

SEQ ID NO: 128613 - protein, 16 aa, Artificial Sequence
  Description of Artificial Sequence: Synthetic peptide
  Seed: RMCSLMQGSTLPRRSG
RMFSLVQNSTAPRRSG

SEQ ID NO: 128614 - protein, 16 aa, Artificial Sequence
  Description of Artificial Sequence: Synthetic peptide
  Seed: RMCSLMQGSTLPRRSG
RMFSLVQNSTIPRRSG

SEQ ID NO: 128615 - protein, 16 aa, Artificial Sequence
  Description of Artificial Sequence: Synthetic peptide
  Seed: RMCSLMQGSTLPRRSG
RMFSLVQNSTLPRRSG

SEQ ID NO: 128616 - protein, 16 aa, Artificial Sequence
  Description of Artificial Sequence: Synthetic peptide
  Seed: RMCSLMQGSTLPRRSG
RMFSLVQNSTSPRRSG

SEQ ID NO: 128617 - protein, 16 aa, Artificial Sequence
  Description of Artificial Sequence: Synthetic peptide
  Seed: RMCSLMQGSTLPRRSG
RMFSLVQNSTVPRRSG

SEQ ID NO: 128618 - protein, 16 aa, Artificial Sequence
  Description of Artificial Sequence: Synthetic peptide
  Seed: RMCSLMQGSTLPRRSG
RMFSLVQPSTAPRRSG

SEQ ID NO: 128619 - protein, 16 aa, Artificial Sequence
  Description of Artificial Sequence: Synthetic peptide
  Seed: RMCSLMQGSTLPRRSG
RMFSLVQPSTGPRRSG

SEQ ID NO: 128620 - protein, 16 aa, Artificial Sequence
  Description of Artificial Sequence: Synthetic peptide
  Seed: RMCSLMQGSTLPRRSG
RMFSLVQPSTIPRRSG

SEQ ID NO: 128621 - protein, 16 aa, Artificial Sequence
  Description of Artificial Sequence: Synthetic peptide
  Seed: RMCSLMQGSTLPRRSG
RMFSLVQPSTLPRRSG

SEQ ID NO: 128622 - protein, 16 aa, Artificial Sequence
  Description of Artificial Sequence: Synthetic peptide
  Seed: RMCSLMQGSTLPRRSG
RMFSLVQPSTMPRRSG

SEQ ID NO: 128623 - protein, 16 aa, Artificial Sequence
  Description of Artificial Sequence: Synthetic peptide
  Seed: RMCSLMQGSTLPRRSG
RMFSLVQPSTNPRRSG

SEQ ID NO: 128624 - protein, 16 aa, Artificial Sequence
  Description of Artificial Sequence: Synthetic peptide
  Seed: RMCSLMQGSTLPRRSG
RMFSLVQPSTSPRRSG

SEQ ID NO: 128625 - protein, 16 aa, Artificial Sequence
  Description of Artificial Sequence: Synthetic peptide
  Seed: RMCSLMQGSTLPRRSG
RMFSLVQPSTTPRRSG

SEQ ID NO: 128626 - protein, 16 aa, Artificial Sequence
  Description of Artificial Sequence: Synthetic peptide
  Seed: RMCSLMQGSTLPRRSG
RMFSLVQPSTVPRRSG

SEQ ID NO: 128627 - protein, 16 aa, Artificial Sequence
  Description of Artificial Sequence: Synthetic peptide
  Seed: RMCSLMQGSTLPRRSG
RMFSLVQSSTAPRRSG

SEQ ID NO: 128628 - protein, 16 aa, Artificial Sequence
  Description of Artificial Sequence: Synthetic peptide
  Seed: RMCSLMQGSTLPRRSG
RMFSLVQSSTIPRRSG

SEQ ID NO: 128629 - protein, 16 aa, Artificial Sequence
  Description of Artificial Sequence: Synthetic peptide
  Seed: RMCSLMQGSTLPRRSG
RMFSLVQSSTLPRRSG

SEQ ID NO: 128630 - protein, 16 aa, Artificial Sequence
  Description of Artificial Sequence: Synthetic peptide
  Seed: RMCSLMQGSTLPRRSG
RMFSLVQSSTMPRRSG

SEQ ID NO: 128631 - protein, 16 aa, Artificial Sequence
  Description of Artificial Sequence: Synthetic peptide
  Seed: RMCSLMQGSTLPRRSG
RMFSLVQSSTNPRRSG

SEQ ID NO: 128632 - protein, 16 aa, Artificial Sequence
  Description of Artificial Sequence: Synthetic peptide
  Seed: RMCSLMQGSTLPRRSG
RMFSLVQSSTSPRRSG

SEQ ID NO: 128633 - protein, 16 aa, Artificial Sequence
  Description of Artificial Sequence: Synthetic peptide
  Seed: RMCSLMQGSTLPRRSG
RMFSLVQSSTTPRRSG

SEQ ID NO: 128634 - protein, 16 aa, Artificial Sequence
  Description of Artificial Sequence: Synthetic peptide
  Seed: RMCSLMQGSTLPRRSG
RMFSLVQSSTVPRRSG

SEQ ID NO: 128635 - protein, 16 aa, Artificial Sequence
  Description of Artificial Sequence: Synthetic peptide
  Seed: RMCSLMQGSTLPRRSG
RMFSLVQTSTAPRRSG

SEQ ID NO: 128636 - protein, 16 aa, Artificial Sequence
  Description of Artificial Sequence: Synthetic peptide
  Seed: RMCSLMQGSTLPRRSG
RMFSLVQTSTIPRRSG

SEQ ID NO: 128637 - protein, 16 aa, Artificial Sequence
  Description of Artificial Sequence: Synthetic peptide
  Seed: RMCSLMQGSTLPRRSG
RMFSLVQTSTLPRRSG

SEQ ID NO: 128638 - protein, 16 aa, Artificial Sequence
  Description of Artificial Sequence: Synthetic peptide
  Seed: RMCSLMQGSTLPRRSG
RMFSLVQTSTNPRRSG

SEQ ID NO: 128639 - protein, 16 aa, Artificial Sequence
  Description of Artificial Sequence: Synthetic peptide
  Seed: RMCSLMQGSTLPRRSG
RMFSLVQTSTSPRRSG

SEQ ID NO: 128640 - protein, 16 aa, Artificial Sequence
  Description of Artificial Sequence: Synthetic peptide
  Seed: RMCSLMQGSTLPRRSG
RMFSLVQTSTTPRRSG

SEQ ID NO: 128641 - protein, 16 aa, Artificial Sequence
  Description of Artificial Sequence: Synthetic peptide
  Seed: RMCSLMQGSTLPRRSG
RMFSLVQTSTVPRRSG

SEQ ID NO: 128642 - protein, 16 aa, Artificial Sequence
  Description of Artificial Sequence: Synthetic peptide
  Seed: RMCSLMQGSTLPRRSG
RMFSLVQVSTAPRRSG

SEQ ID NO: 128643 - protein, 16 aa, Artificial Sequence
  Description of Artificial Sequence: Synthetic peptide
  Seed: RMCSLMQGSTLPRRSG
RMFSLVQVSTNPRRSG

SEQ ID NO: 128644 - protein, 16 aa, Artificial Sequence
  Description of Artificial Sequence: Synthetic peptide
  Seed: RMCSLMQGSTLPRRSG
RMFSLVQVSTSPRRSG

SEQ ID NO: 128645 - protein, 16 aa, Artificial Sequence
  Description of Artificial Sequence: Synthetic peptide
  Seed: RMCSLMQGSTLPRRSG
RMFSLVQVSTTPRRSG

SEQ ID NO: 128646 - protein, 16 aa, Artificial Sequence
  Description of Artificial Sequence: Synthetic peptide
  Seed: RMCSLMQGSTLPRRSG
RMFSLVQVSTVPRRSG

SEQ ID NO: 128647 - protein, 16 aa, Artificial Sequence
  Description of Artificial Sequence: Synthetic peptide
  Seed: RMCSLMQGSTLPRRSG
RMISLAQASTAPRRSG

SEQ ID NO: 128648 - protein, 16 aa, Artificial Sequence
  Description of Artificial Sequence: Synthetic peptide
  Seed: RMCSLMQGSTLPRRSG
RMISLAQASTIPRRSG

SEQ ID NO: 128649 - protein, 16 aa, Artificial Sequence
  Description of Artificial Sequence: Synthetic peptide
  Seed: RMCSLMQGSTLPRRSG
RMISLAQASTLPRRSG

SEQ ID NO: 128650 - protein, 16 aa, Artificial Sequence
  Description of Artificial Sequence: Synthetic peptide
  Seed: RMCSLMQGSTLPRRSG
RMISLAQASTVPRRSG

SEQ ID NO: 128651 - protein, 16 aa, Artificial Sequence
  Description of Artificial Sequence: Synthetic peptide
  Seed: RMCSLMQGSTLPRRSG
RMISLAQGSTIPRRSG

SEQ ID NO: 128652 - protein, 16 aa, Artificial Sequence
  Description of Artificial Sequence: Synthetic peptide
  Seed: RMCSLMQGSTLPRRSG
RMISLAQGSTLPRRSG

SEQ ID NO: 128653 - protein, 16 aa, Artificial Sequence
  Description of Artificial Sequence: Synthetic peptide
  Seed: RMCSLMQGSTLPRRSG
RMISLAQGSTVPRRSG

SEQ ID NO: 128654 - protein, 16 aa, Artificial Sequence
  Description of Artificial Sequence: Synthetic peptide
  Seed: RMCSLMQGSTLPRRSG
RMISLIQASTAPRRSG

SEQ ID NO: 128655 - protein, 16 aa, Artificial Sequence
  Description of Artificial Sequence: Synthetic peptide
  Seed: RMCSLMQGSTLPRRSG
RMISLIQASTIPRRSG

SEQ ID NO: 128656 - protein, 16 aa, Artificial Sequence
  Description of Artificial Sequence: Synthetic peptide
  Seed: RMCSLMQGSTLPRRSG
RMISLIQASTLPRRSG

SEQ ID NO: 128657 - protein, 16 aa, Artificial Sequence
  Description of Artificial Sequence: Synthetic peptide
  Seed: RMCSLMQGSTLPRRSG
RMISLIQASTVPRRSG

SEQ ID NO: 128658 - protein, 16 aa, Artificial Sequence
  Description of Artificial Sequence: Synthetic peptide
  Seed: RMCSLMQGSTLPRRSG
RMISLIQGSTAPRRSG

SEQ ID NO: 128659 - protein, 16 aa, Artificial Sequence
  Description of Artificial Sequence: Synthetic peptide
  Seed: RMCSLMQGSTLPRRSG
RMISLIQGSTIPRRSG

SEQ ID NO: 128660 - protein, 16 aa, Artificial Sequence
  Description of Artificial Sequence: Synthetic peptide
  Seed: RMCSLMQGSTLPRRSG
RMISLIQGSTLPRRSG

SEQ ID NO: 128661 - protein, 16 aa, Artificial Sequence
  Description of Artificial Sequence: Synthetic peptide
  Seed: RMCSLMQGSTLPRRSG
RMISLIQGSTVPRRSG

SEQ ID NO: 128662 - protein, 16 aa, Artificial Sequence
  Description of Artificial Sequence: Synthetic peptide
  Seed: RMCSLMQGSTLPRRSG
RMISLIQSSTAPRRSG

SEQ ID NO: 128663 - protein, 16 aa, Artificial Sequence
  Description of Artificial Sequence: Synthetic peptide
  Seed: RMCSLMQGSTLPRRSG
RMISLIQSSTIPRRSG

SEQ ID NO: 128664 - protein, 16 aa, Artificial Sequence
  Description of Artificial Sequence: Synthetic peptide
  Seed: RMCSLMQGSTLPRRSG
RMISLIQSSTLPRRSG

SEQ ID NO: 128665 - protein, 16 aa, Artificial Sequence
  Description of Artificial Sequence: Synthetic peptide
  Seed: RMCSLMQGSTLPRRSG
RMISLIQSSTVPRRSG

SEQ ID NO: 128666 - protein, 16 aa, Artificial Sequence
  Description of Artificial Sequence: Synthetic peptide
  Seed: RMCSLMQGSTLPRRSG
RMISLLQASTAPRRSG

SEQ ID NO: 128667 - protein, 16 aa, Artificial Sequence
  Description of Artificial Sequence: Synthetic peptide
  Seed: RMCSLMQGSTLPRRSG
RMISLLQASTGPRRSG

SEQ ID NO: 128668 - protein, 16 aa, Artificial Sequence
  Description of Artificial Sequence: Synthetic peptide
  Seed: RMCSLMQGSTLPRRSG
RMISLLQASTIPRRSG

SEQ ID NO: 128669 - protein, 16 aa, Artificial Sequence
  Description of Artificial Sequence: Synthetic peptide
  Seed: RMCSLMQGSTLPRRSG
RMISLLQASTLPRRSG

SEQ ID NO: 128670 - protein, 16 aa, Artificial Sequence
  Description of Artificial Sequence: Synthetic peptide
  Seed: RMCSLMQGSTLPRRSG
RMISLLQASTMPRRSG

SEQ ID NO: 128671 - protein, 16 aa, Artificial Sequence
  Description of Artificial Sequence: Synthetic peptide
  Seed: RMCSLMQGSTLPRRSG
RMISLLQASTNPRRSG

SEQ ID NO: 128672 - protein, 16 aa, Artificial Sequence
  Description of Artificial Sequence: Synthetic peptide
  Seed: RMCSLMQGSTLPRRSG
RMISLLQASTSPRRSG

SEQ ID NO: 128673 - protein, 16 aa, Artificial Sequence
  Description of Artificial Sequence: Synthetic peptide
  Seed: RMCSLMQGSTLPRRSG
RMISLLQASTTPRRSG

SEQ ID NO: 128674 - protein, 16 aa, Artificial Sequence
  Description of Artificial Sequence: Synthetic peptide
  Seed: RMCSLMQGSTLPRRSG
RMISLLQASTVPRRSG

SEQ ID NO: 128675 - protein, 16 aa, Artificial Sequence
  Description of Artificial Sequence: Synthetic peptide
  Seed: RMCSLMQGSTLPRRSG
RMISLLQGSTAPRRSG

SEQ ID NO: 128676 - protein, 16 aa, Artificial Sequence
  Description of Artificial Sequence: Synthetic peptide
  Seed: RMCSLMQGSTLPRRSG
RMISLLQGSTIPRRSG

SEQ ID NO: 128677 - protein, 16 aa, Artificial Sequence
  Description of Artificial Sequence: Synthetic peptide
  Seed: RMCSLMQGSTLPRRSG
RMISLLQGSTLPRRSG

SEQ ID NO: 128678 - protein, 16 aa, Artificial Sequence
  Description of Artificial Sequence: Synthetic peptide
  Seed: RMCSLMQGSTLPRRSG
RMISLLQGSTMPRRSG

SEQ ID NO: 128679 - protein, 16 aa, Artificial Sequence
  Description of Artificial Sequence: Synthetic peptide
  Seed: RMCSLMQGSTLPRRSG
RMISLLQGSTSPRRSG

SEQ ID NO: 128680 - protein, 16 aa, Artificial Sequence
  Description of Artificial Sequence: Synthetic peptide
  Seed: RMCSLMQGSTLPRRSG
RMISLLQGSTTPRRSG

SEQ ID NO: 128681 - protein, 16 aa, Artificial Sequence
  Description of Artificial Sequence: Synthetic peptide
  Seed: RMCSLMQGSTLPRRSG
RMISLLQGSTVPRRSG

SEQ ID NO: 128682 - protein, 16 aa, Artificial Sequence
  Description of Artificial Sequence: Synthetic peptide
  Seed: RMCSLMQGSTLPRRSG
RMISLLQNSTAPRRSG

SEQ ID NO: 128683 - protein, 16 aa, Artificial Sequence
  Description of Artificial Sequence: Synthetic peptide
  Seed: RMCSLMQGSTLPRRSG
RMISLLQNSTIPRRSG

SEQ ID NO: 128684 - protein, 16 aa, Artificial Sequence
  Description of Artificial Sequence: Synthetic peptide
  Seed: RMCSLMQGSTLPRRSG
RMISLLQNSTLPRRSG

SEQ ID NO: 128685 - protein, 16 aa, Artificial Sequence
  Description of Artificial Sequence: Synthetic peptide
  Seed: RMCSLMQGSTLPRRSG
RMISLLQNSTVPRRSG

SEQ ID NO: 128686 - protein, 16 aa, Artificial Sequence
  Description of Artificial Sequence: Synthetic peptide
  Seed: RMCSLMQGSTLPRRSG
RMISLLQPSTAPRRSG

SEQ ID NO: 128687 - protein, 16 aa, Artificial Sequence
  Description of Artificial Sequence: Synthetic peptide
  Seed: RMCSLMQGSTLPRRSG
RMISLLQPSTIPRRSG

SEQ ID NO: 128688 - protein, 16 aa, Artificial Sequence
  Description of Artificial Sequence: Synthetic peptide
  Seed: RMCSLMQGSTLPRRSG
RMISLLQPSTLPRRSG

SEQ ID NO: 128689 - protein, 16 aa, Artificial Sequence
  Description of Artificial Sequence: Synthetic peptide
  Seed: RMCSLMQGSTLPRRSG
RMISLLQPSTMPRRSG

SEQ ID NO: 128690 - protein, 16 aa, Artificial Sequence
  Description of Artificial Sequence: Synthetic peptide
  Seed: RMCSLMQGSTLPRRSG
RMISLLQPSTNPRRSG

SEQ ID NO: 128691 - protein, 16 aa, Artificial Sequence
  Description of Artificial Sequence: Synthetic peptide
  Seed: RMCSLMQGSTLPRRSG
RMISLLQPSTSPRRSG

SEQ ID NO: 128692 - protein, 16 aa, Artificial Sequence
  Description of Artificial Sequence: Synthetic peptide
  Seed: RMCSLMQGSTLPRRSG
RMISLLQPSTTPRRSG

SEQ ID NO: 128693 - protein, 16 aa, Artificial Sequence
  Description of Artificial Sequence: Synthetic peptide
  Seed: RMCSLMQGSTLPRRSG
RMISLLQPSTVPRRSG

SEQ ID NO: 128694 - protein, 16 aa, Artificial Sequence
  Description of Artificial Sequence: Synthetic peptide
  Seed: RMCSLMQGSTLPRRSG
RMISLLQSSTAPRRSG

SEQ ID NO: 128695 - protein, 16 aa, Artificial Sequence
  Description of Artificial Sequence: Synthetic peptide
  Seed: RMCSLMQGSTLPRRSG
RMISLLQSSTIPRRSG

SEQ ID NO: 128696 - protein, 16 aa, Artificial Sequence
  Description of Artificial Sequence: Synthetic peptide
  Seed: RMCSLMQGSTLPRRSG
RMISLLQSSTLPRRSG

SEQ ID NO: 128697 - protein, 16 aa, Artificial Sequence
  Description of Artificial Sequence: Synthetic peptide
  Seed: RMCSLMQGSTLPRRSG
RMISLLQSSTMPRRSG

SEQ ID NO: 128698 - protein, 16 aa, Artificial Sequence
  Description of Artificial Sequence: Synthetic peptide
  Seed: RMCSLMQGSTLPRRSG
RMISLLQSSTNPRRSG

SEQ ID NO: 128699 - protein, 16 aa, Artificial Sequence
  Description of Artificial Sequence: Synthetic peptide
  Seed: RMCSLMQGSTLPRRSG
RMISLLQSSTSPRRSG

SEQ ID NO: 128700 - protein, 16 aa, Artificial Sequence
  Description of Artificial Sequence: Synthetic peptide
  Seed: RMCSLMQGSTLPRRSG
RMISLLQSSTTPRRSG

SEQ ID NO: 128701 - protein, 16 aa, Artificial Sequence
  Description of Artificial Sequence: Synthetic peptide
  Seed: RMCSLMQGSTLPRRSG
RMISLLQSSTVPRRSG

SEQ ID NO: 128702 - protein, 16 aa, Artificial Sequence
  Description of Artificial Sequence: Synthetic peptide
  Seed: RMCSLMQGSTLPRRSG
RMISLLQTSTAPRRSG

SEQ ID NO: 128703 - protein, 16 aa, Artificial Sequence
  Description of Artificial Sequence: Synthetic peptide
  Seed: RMCSLMQGSTLPRRSG
RMISLLQTSTIPRRSG

SEQ ID NO: 128704 - protein, 16 aa, Artificial Sequence
  Description of Artificial Sequence: Synthetic peptide
  Seed: RMCSLMQGSTLPRRSG
RMISLLQTSTLPRRSG

SEQ ID NO: 128705 - protein, 16 aa, Artificial Sequence
  Description of Artificial Sequence: Synthetic peptide
  Seed: RMCSLMQGSTLPRRSG
RMISLLQTSTVPRRSG

SEQ ID NO: 128706 - protein, 16 aa, Artificial Sequence
  Description of Artificial Sequence: Synthetic peptide
  Seed: RMCSLMQGSTLPRRSG
RMISLLQVSTAPRRSG

SEQ ID NO: 128707 - protein, 16 aa, Artificial Sequence
  Description of Artificial Sequence: Synthetic peptide
  Seed: RMCSLMQGSTLPRRSG
RMISLLQVSTSPRRSG

SEQ ID NO: 128708 - protein, 16 aa, Artificial Sequence
  Description of Artificial Sequence: Synthetic peptide
  Seed: RMCSLMQGSTLPRRSG
RMISLMQASTAPRRSG

SEQ ID NO: 128709 - protein, 16 aa, Artificial Sequence
  Description of Artificial Sequence: Synthetic peptide
  Seed: RMCSLMQGSTLPRRSG
RMISLMQASTIPRRSG

SEQ ID NO: 128710 - protein, 16 aa, Artificial Sequence
  Description of Artificial Sequence: Synthetic peptide
  Seed: RMCSLMQGSTLPRRSG
RMISLMQASTLPRRSG

SEQ ID NO: 128711 - protein, 16 aa, Artificial Sequence
  Description of Artificial Sequence: Synthetic peptide
  Seed: RMCSLMQGSTLPRRSG
RMISLMQASTMPRRSG

SEQ ID NO: 128712 - protein, 16 aa, Artificial Sequence
  Description of Artificial Sequence: Synthetic peptide
  Seed: RMCSLMQGSTLPRRSG
RMISLMQASTNPRRSG

SEQ ID NO: 128713 - protein, 16 aa, Artificial Sequence
  Description of Artificial Sequence: Synthetic peptide
  Seed: RMCSLMQGSTLPRRSG
RMISLMQASTSPRRSG

SEQ ID NO: 128714 - protein, 16 aa, Artificial Sequence
  Description of Artificial Sequence: Synthetic peptide
  Seed: RMCSLMQGSTLPRRSG
RMISLMQASTTPRRSG

SEQ ID NO: 128715 - protein, 16 aa, Artificial Sequence
  Description of Artificial Sequence: Synthetic peptide
  Seed: RMCSLMQGSTLPRRSG
RMISLMQASTVPRRSG

SEQ ID NO: 128716 - protein, 16 aa, Artificial Sequence
  Description of Artificial Sequence: Synthetic peptide
  Seed: RMCSLMQGSTLPRRSG
RMISLMQGSTAPRRSG

SEQ ID NO: 128717 - protein, 16 aa, Artificial Sequence
  Description of Artificial Sequence: Synthetic peptide
  Seed: RMCSLMQGSTLPRRSG
RMISLMQGSTIPRRSG

SEQ ID NO: 128718 - protein, 16 aa, Artificial Sequence
  Description of Artificial Sequence: Synthetic peptide
  Seed: RMCSLMQGSTLPRRSG
RMISLMQGSTLPRRSG

SEQ ID NO: 128719 - protein, 16 aa, Artificial Sequence
  Description of Artificial Sequence: Synthetic peptide
  Seed: RMCSLMQGSTLPRRSG
RMISLMQGSTMPRRSG

SEQ ID NO: 128720 - protein, 16 aa, Artificial Sequence
  Description of Artificial Sequence: Synthetic peptide
  Seed: RMCSLMQGSTLPRRSG
RMISLMQGSTSPRRSG

SEQ ID NO: 128721 - protein, 16 aa, Artificial Sequence
  Description of Artificial Sequence: Synthetic peptide
  Seed: RMCSLMQGSTLPRRSG
RMISLMQGSTTPRRSG

SEQ ID NO: 128722 - protein, 16 aa, Artificial Sequence
  Description of Artificial Sequence: Synthetic peptide
  Seed: RMCSLMQGSTLPRRSG
RMISLMQGSTVPRRSG

SEQ ID NO: 128723 - protein, 16 aa, Artificial Sequence
  Description of Artificial Sequence: Synthetic peptide
  Seed: RMCSLMQGSTLPRRSG
RMISLMQISTAPRRSG

SEQ ID NO: 128724 - protein, 16 aa, Artificial Sequence
  Description of Artificial Sequence: Synthetic peptide
  Seed: RMCSLMQGSTLPRRSG
RMISLMQISTSPRRSG

SEQ ID NO: 128725 - protein, 16 aa, Artificial Sequence
  Description of Artificial Sequence: Synthetic peptide
  Seed: RMCSLMQGSTLPRRSG
RMISLMQNSTAPRRSG

SEQ ID NO: 128726 - protein, 16 aa, Artificial Sequence
  Description of Artificial Sequence: Synthetic peptide
  Seed: RMCSLMQGSTLPRRSG
RMISLMQNSTIPRRSG

SEQ ID NO: 128727 - protein, 16 aa, Artificial Sequence
  Description of Artificial Sequence: Synthetic peptide
  Seed: RMCSLMQGSTLPRRSG
RMISLMQNSTLPRRSG

SEQ ID NO: 128728 - protein, 16 aa, Artificial Sequence
  Description of Artificial Sequence: Synthetic peptide
  Seed: RMCSLMQGSTLPRRSG
RMISLMQNSTVPRRSG

SEQ ID NO: 128729 - protein, 16 aa, Artificial Sequence
  Description of Artificial Sequence: Synthetic peptide
  Seed: RMCSLMQGSTLPRRSG
RMISLMQPSTAPRRSG

SEQ ID NO: 128730 - protein, 16 aa, Artificial Sequence
  Description of Artificial Sequence: Synthetic peptide
  Seed: RMCSLMQGSTLPRRSG
RMISLMQPSTIPRRSG

SEQ ID NO: 128731 - protein, 16 aa, Artificial Sequence
  Description of Artificial Sequence: Synthetic peptide
  Seed: RMCSLMQGSTLPRRSG
RMISLMQPSTLPRRSG

SEQ ID NO: 128732 - protein, 16 aa, Artificial Sequence
  Description of Artificial Sequence: Synthetic peptide
  Seed: RMCSLMQGSTLPRRSG
RMISLMQPSTMPRRSG

SEQ ID NO: 128733 - protein, 16 aa, Artificial Sequence
  Description of Artificial Sequence: Synthetic peptide
  Seed: RMCSLMQGSTLPRRSG
RMISLMQPSTNPRRSG

SEQ ID NO: 128734 - protein, 16 aa, Artificial Sequence
  Description of Artificial Sequence: Synthetic peptide
  Seed: RMCSLMQGSTLPRRSG
RMISLMQPSTSPRRSG

SEQ ID NO: 128735 - protein, 16 aa, Artificial Sequence
  Description of Artificial Sequence: Synthetic peptide
  Seed: RMCSLMQGSTLPRRSG
RMISLMQPSTVPRRSG

SEQ ID NO: 128736 - protein, 16 aa, Artificial Sequence
  Description of Artificial Sequence: Synthetic peptide
  Seed: RMCSLMQGSTLPRRSG
RMISLMQSSTAPRRSG

SEQ ID NO: 128737 - protein, 16 aa, Artificial Sequence
  Description of Artificial Sequence: Synthetic peptide
  Seed: RMCSLMQGSTLPRRSG
RMISLMQSSTIPRRSG

SEQ ID NO: 128738 - protein, 16 aa, Artificial Sequence
  Description of Artificial Sequence: Synthetic peptide
  Seed: RMCSLMQGSTLPRRSG
RMISLMQSSTLPRRSG

SEQ ID NO: 128739 - protein, 16 aa, Artificial Sequence
  Description of Artificial Sequence: Synthetic peptide
  Seed: RMCSLMQGSTLPRRSG
RMISLMQSSTMPRRSG

SEQ ID NO: 128740 - protein, 16 aa, Artificial Sequence
  Description of Artificial Sequence: Synthetic peptide
  Seed: RMCSLMQGSTLPRRSG
RMISLMQSSTNPRRSG

SEQ ID NO: 128741 - protein, 16 aa, Artificial Sequence
  Description of Artificial Sequence: Synthetic peptide
  Seed: RMCSLMQGSTLPRRSG
RMISLMQSSTSPRRSG

SEQ ID NO: 128742 - protein, 16 aa, Artificial Sequence
  Description of Artificial Sequence: Synthetic peptide
  Seed: RMCSLMQGSTLPRRSG
RMISLMQSSTTPRRSG

SEQ ID NO: 128743 - protein, 16 aa, Artificial Sequence
  Description of Artificial Sequence: Synthetic peptide
  Seed: RMCSLMQGSTLPRRSG
RMISLMQSSTVPRRSG

SEQ ID NO: 128744 - protein, 16 aa, Artificial Sequence
  Description of Artificial Sequence: Synthetic peptide
  Seed: RMCSLMQGSTLPRRSG
RMISLMQTSTAPRRSG

SEQ ID NO: 128745 - protein, 16 aa, Artificial Sequence
  Description of Artificial Sequence: Synthetic peptide
  Seed: RMCSLMQGSTLPRRSG
RMISLMQTSTIPRRSG

SEQ ID NO: 128746 - protein, 16 aa, Artificial Sequence
  Description of Artificial Sequence: Synthetic peptide
  Seed: RMCSLMQGSTLPRRSG
RMISLMQTSTLPRRSG

SEQ ID NO: 128747 - protein, 16 aa, Artificial Sequence
  Description of Artificial Sequence: Synthetic peptide
  Seed: RMCSLMQGSTLPRRSG
RMISLMQTSTVPRRSG

SEQ ID NO: 128748 - protein, 16 aa, Artificial Sequence
  Description of Artificial Sequence: Synthetic peptide
  Seed: RMCSLMQGSTLPRRSG
RMISLMQVSTAPRRSG

SEQ ID NO: 128749 - protein, 16 aa, Artificial Sequence
  Description of Artificial Sequence: Synthetic peptide
  Seed: RMCSLMQGSTLPRRSG
RMISLMQVSTNPRRSG

SEQ ID NO: 128750 - protein, 16 aa, Artificial Sequence
  Description of Artificial Sequence: Synthetic peptide
  Seed: RMCSLMQGSTLPRRSG
RMISLMQVSTSPRRSG

SEQ ID NO: 128751 - protein, 16 aa, Artificial Sequence
  Description of Artificial Sequence: Synthetic peptide
  Seed: RMCSLMQGSTLPRRSG
RMISLQQASTIPRRSG

SEQ ID NO: 128752 - protein, 16 aa, Artificial Sequence
  Description of Artificial Sequence: Synthetic peptide
  Seed: RMCSLMQGSTLPRRSG
RMISLQQASTLPRRSG

SEQ ID NO: 128753 - protein, 16 aa, Artificial Sequence
  Description of Artificial Sequence: Synthetic peptide
  Seed: RMCSLMQGSTLPRRSG
RMISLQQASTVPRRSG

SEQ ID NO: 128754 - protein, 16 aa, Artificial Sequence
  Description of Artificial Sequence: Synthetic peptide
  Seed: RMCSLMQGSTLPRRSG
RMISLQQGSTLPRRSG

SEQ ID NO: 128755 - protein, 16 aa, Artificial Sequence
  Description of Artificial Sequence: Synthetic peptide
  Seed: RMCSLMQGSTLPRRSG
RMISLQQGSTVPRRSG

SEQ ID NO: 128756 - protein, 16 aa, Artificial Sequence
  Description of Artificial Sequence: Synthetic peptide
  Seed: RMCSLMQGSTLPRRSG
RMISLVQASTLPRRSG

SEQ ID NO: 128757 - protein, 16 aa, Artificial Sequence
  Description of Artificial Sequence: Synthetic peptide
  Seed: RMCSLMQGSTLPRRSG
RMISLVQASTVPRRSG

SEQ ID NO: 128758 - protein, 16 aa, Artificial Sequence
  Description of Artificial Sequence: Synthetic peptide
  Seed: RMCSLMQGSTLPRRSG
RMLSLAQASTIPRRSG

SEQ ID NO: 128759 - protein, 16 aa, Artificial Sequence
  Description of Artificial Sequence: Synthetic peptide
  Seed: RMCSLMQGSTLPRRSG
RMLSLAQASTLPRRSG

SEQ ID NO: 128760 - protein, 16 aa, Artificial Sequence
  Description of Artificial Sequence: Synthetic peptide
  Seed: RMCSLMQGSTLPRRSG
RMLSLAQASTVPRRSG

SEQ ID NO: 128761 - protein, 16 aa, Artificial Sequence
  Description of Artificial Sequence: Synthetic peptide
  Seed: RMCSLMQGSTLPRRSG
RMLSLIQASTAPRRSG

SEQ ID NO: 128762 - protein, 16 aa, Artificial Sequence
  Description of Artificial Sequence: Synthetic peptide
  Seed: RMCSLMQGSTLPRRSG
RMLSLIQASTIPRRSG

SEQ ID NO: 128763 - protein, 16 aa, Artificial Sequence
  Description of Artificial Sequence: Synthetic peptide
  Seed: RMCSLMQGSTLPRRSG
RMLSLIQASTLPRRSG

SEQ ID NO: 128764 - protein, 16 aa, Artificial Sequence
  Description of Artificial Sequence: Synthetic peptide
  Seed: RMCSLMQGSTLPRRSG
RMLSLIQASTVPRRSG

SEQ ID NO: 128765 - protein, 16 aa, Artificial Sequence
  Description of Artificial Sequence: Synthetic peptide
  Seed: RMCSLMQGSTLPRRSG
RMLSLIQGSTAPRRSG

SEQ ID NO: 128766 - protein, 16 aa, Artificial Sequence
  Description of Artificial Sequence: Synthetic peptide
  Seed: RMCSLMQGSTLPRRSG
RMLSLIQGSTIPRRSG

SEQ ID NO: 128767 - protein, 16 aa, Artificial Sequence
  Description of Artificial Sequence: Synthetic peptide
  Seed: RMCSLMQGSTLPRRSG
RMLSLIQGSTLPRRSG

SEQ ID NO: 128768 - protein, 16 aa, Artificial Sequence
  Description of Artificial Sequence: Synthetic peptide
  Seed: RMCSLMQGSTLPRRSG
RMLSLIQGSTVPRRSG

SEQ ID NO: 128769 - protein, 16 aa, Artificial Sequence
  Description of Artificial Sequence: Synthetic peptide
  Seed: RMCSLMQGSTLPRRSG
RMLSLIQSSTVPRRSG

SEQ ID NO: 128770 - protein, 16 aa, Artificial Sequence
  Description of Artificial Sequence: Synthetic peptide
  Seed: RMCSLMQGSTLPRRSG
RMLSLLQASTAPRRSG

SEQ ID NO: 128771 - protein, 16 aa, Artificial Sequence
  Description of Artificial Sequence: Synthetic peptide
  Seed: RMCSLMQGSTLPRRSG
RMLSLLQASTIPRRSG

SEQ ID NO: 128772 - protein, 16 aa, Artificial Sequence
  Description of Artificial Sequence: Synthetic peptide
  Seed: RMCSLMQGSTLPRRSG
RMLSLLQASTLPRRSG

SEQ ID NO: 128773 - protein, 16 aa, Artificial Sequence
  Description of Artificial Sequence: Synthetic peptide
  Seed: RMCSLMQGSTLPRRSG
RMLSLLQASTMPRRSG

SEQ ID NO: 128774 - protein, 16 aa, Artificial Sequence
  Description of Artificial Sequence: Synthetic peptide
  Seed: RMCSLMQGSTLPRRSG
RMLSLLQASTNPRRSG

SEQ ID NO: 128775 - protein, 16 aa, Artificial Sequence
  Description of Artificial Sequence: Synthetic peptide
  Seed: RMCSLMQGSTLPRRSG
RMLSLLQASTSPRRSG

SEQ ID NO: 128776 - protein, 16 aa, Artificial Sequence
  Description of Artificial Sequence: Synthetic peptide
  Seed: RMCSLMQGSTLPRRSG
RMLSLLQASTTPRRSG

SEQ ID NO: 128777 - protein, 16 aa, Artificial Sequence
  Description of Artificial Sequence: Synthetic peptide
  Seed: RMCSLMQGSTLPRRSG
RMLSLLQASTVPRRSG

SEQ ID NO: 128778 - protein, 16 aa, Artificial Sequence
  Description of Artificial Sequence: Synthetic peptide
  Seed: RMCSLMQGSTLPRRSG
RMLSLLQGSTAPRRSG

SEQ ID NO: 128779 - protein, 16 aa, Artificial Sequence
  Description of Artificial Sequence: Synthetic peptide
  Seed: RMCSLMQGSTLPRRSG
RMLSLLQGSTIPRRSG

SEQ ID NO: 128780 - protein, 16 aa, Artificial Sequence
  Description of Artificial Sequence: Synthetic peptide
  Seed: RMCSLMQGSTLPRRSG
RMLSLLQGSTLPRRSG

SEQ ID NO: 128781 - protein, 16 aa, Artificial Sequence
  Description of Artificial Sequence: Synthetic peptide
  Seed: RMCSLMQGSTLPRRSG
RMLSLLQGSTMPRRSG

SEQ ID NO: 128782 - protein, 16 aa, Artificial Sequence
  Description of Artificial Sequence: Synthetic peptide
  Seed: RMCSLMQGSTLPRRSG
RMLSLLQGSTSPRRSG

SEQ ID NO: 128783 - protein, 16 aa, Artificial Sequence
  Description of Artificial Sequence: Synthetic peptide
  Seed: RMCSLMQGSTLPRRSG
RMLSLLQGSTTPRRSG

SEQ ID NO: 128784 - protein, 16 aa, Artificial Sequence
  Description of Artificial Sequence: Synthetic peptide
  Seed: RMCSLMQGSTLPRRSG
RMLSLLQGSTVPRRSG

SEQ ID NO: 128785 - protein, 16 aa, Artificial Sequence
  Description of Artificial Sequence: Synthetic peptide
  Seed: RMCSLMQGSTLPRRSG
RMLSLLQNSTVPRRSG

SEQ ID NO: 128786 - protein, 16 aa, Artificial Sequence
  Description of Artificial Sequence: Synthetic peptide
  Seed: RMCSLMQGSTLPRRSG
RMLSLLQPSTAPRRSG

SEQ ID NO: 128787 - protein, 16 aa, Artificial Sequence
  Description of Artificial Sequence: Synthetic peptide
  Seed: RMCSLMQGSTLPRRSG
RMLSLLQPSTIPRRSG

SEQ ID NO: 128788 - protein, 16 aa, Artificial Sequence
  Description of Artificial Sequence: Synthetic peptide
  Seed: RMCSLMQGSTLPRRSG
RMLSLLQPSTLPRRSG

SEQ ID NO: 128789 - protein, 16 aa, Artificial Sequence
  Description of Artificial Sequence: Synthetic peptide
  Seed: RMCSLMQGSTLPRRSG
RMLSLLQPSTNPRRSG

SEQ ID NO: 128790 - protein, 16 aa, Artificial Sequence
  Description of Artificial Sequence: Synthetic peptide
  Seed: RMCSLMQGSTLPRRSG
RMLSLLQPSTSPRRSG

SEQ ID NO: 128791 - protein, 16 aa, Artificial Sequence
  Description of Artificial Sequence: Synthetic peptide
  Seed: RMCSLMQGSTLPRRSG
RMLSLLQPSTVPRRSG

SEQ ID NO: 128792 - protein, 16 aa, Artificial Sequence
  Description of Artificial Sequence: Synthetic peptide
  Seed: RMCSLMQGSTLPRRSG
RMLSLLQSSTAPRRSG

SEQ ID NO: 128793 - protein, 16 aa, Artificial Sequence
  Description of Artificial Sequence: Synthetic peptide
  Seed: RMCSLMQGSTLPRRSG
RMLSLLQSSTIPRRSG

SEQ ID NO: 128794 - protein, 16 aa, Artificial Sequence
  Description of Artificial Sequence: Synthetic peptide
  Seed: RMCSLMQGSTLPRRSG
RMLSLLQSSTLPRRSG

SEQ ID NO: 128795 - protein, 16 aa, Artificial Sequence
  Description of Artificial Sequence: Synthetic peptide
  Seed: RMCSLMQGSTLPRRSG
RMLSLLQSSTMPRRSG

SEQ ID NO: 128796 - protein, 16 aa, Artificial Sequence
  Description of Artificial Sequence: Synthetic peptide
  Seed: RMCSLMQGSTLPRRSG
RMLSLLQSSTNPRRSG

SEQ ID NO: 128797 - protein, 16 aa, Artificial Sequence
  Description of Artificial Sequence: Synthetic peptide
  Seed: RMCSLMQGSTLPRRSG
RMLSLLQSSTSPRRSG

SEQ ID NO: 128798 - protein, 16 aa, Artificial Sequence
  Description of Artificial Sequence: Synthetic peptide
  Seed: RMCSLMQGSTLPRRSG
RMLSLLQSSTTPRRSG

SEQ ID NO: 128799 - protein, 16 aa, Artificial Sequence
  Description of Artificial Sequence: Synthetic peptide
  Seed: RMCSLMQGSTLPRRSG
RMLSLLQSSTVPRRSG

SEQ ID NO: 128800 - protein, 16 aa, Artificial Sequence
  Description of Artificial Sequence: Synthetic peptide
  Seed: RMCSLMQGSTLPRRSG
RMLSLLQTSTAPRRSG

SEQ ID NO: 128801 - protein, 16 aa, Artificial Sequence
  Description of Artificial Sequence: Synthetic peptide
  Seed: RMCSLMQGSTLPRRSG
RMLSLLQTSTNPRRSG

SEQ ID NO: 128802 - protein, 16 aa, Artificial Sequence
  Description of Artificial Sequence: Synthetic peptide
  Seed: RMCSLMQGSTLPRRSG
RMLSLLQTSTVPRRSG

SEQ ID NO: 128803 - protein, 16 aa, Artificial Sequence
  Description of Artificial Sequence: Synthetic peptide
  Seed: RMCSLMQGSTLPRRSG
RMLSLLQVSTAPRRSG

SEQ ID NO: 128804 - protein, 16 aa, Artificial Sequence
  Description of Artificial Sequence: Synthetic peptide
  Seed: RMCSLMQGSTLPRRSG
RMLSLLQVSTSPRRSG

SEQ ID NO: 128805 - protein, 16 aa, Artificial Sequence
  Description of Artificial Sequence: Synthetic peptide
  Seed: RMCSLMQGSTLPRRSG
RMLSLMQASTAPRRSG

SEQ ID NO: 128806 - protein, 16 aa, Artificial Sequence
  Description of Artificial Sequence: Synthetic peptide
  Seed: RMCSLMQGSTLPRRSG
RMLSLMQASTIPRRSG

SEQ ID NO: 128807 - protein, 16 aa, Artificial Sequence
  Description of Artificial Sequence: Synthetic peptide
  Seed: RMCSLMQGSTLPRRSG
RMLSLMQASTLPRRSG

SEQ ID NO: 128808 - protein, 16 aa, Artificial Sequence
  Description of Artificial Sequence: Synthetic peptide
  Seed: RMCSLMQGSTLPRRSG
RMLSLMQASTMPRRSG

SEQ ID NO: 128809 - protein, 16 aa, Artificial Sequence
  Description of Artificial Sequence: Synthetic peptide
  Seed: RMCSLMQGSTLPRRSG
RMLSLMQASTNPRRSG

SEQ ID NO: 128810 - protein, 16 aa, Artificial Sequence
  Description of Artificial Sequence: Synthetic peptide
  Seed: RMCSLMQGSTLPRRSG
RMLSLMQASTSPRRSG

SEQ ID NO: 128811 - protein, 16 aa, Artificial Sequence
  Description of Artificial Sequence: Synthetic peptide
  Seed: RMCSLMQGSTLPRRSG
RMLSLMQASTTPRRSG

SEQ ID NO: 128812 - protein, 16 aa, Artificial Sequence
  Description of Artificial Sequence: Synthetic peptide
  Seed: RMCSLMQGSTLPRRSG
RMLSLMQASTVPRRSG

SEQ ID NO: 128813 - protein, 16 aa, Artificial Sequence
  Description of Artificial Sequence: Synthetic peptide
  Seed: RMCSLMQGSTLPRRSG
RMLSLMQGSTAPRRSG

SEQ ID NO: 128814 - protein, 16 aa, Artificial Sequence
  Description of Artificial Sequence: Synthetic peptide
  Seed: RMCSLMQGSTLPRRSG
RMLSLMQGSTIPRRSG

SEQ ID NO: 128815 - protein, 16 aa, Artificial Sequence
  Description of Artificial Sequence: Synthetic peptide
  Seed: RMCSLMQGSTLPRRSG
RMLSLMQGSTLPRRSG

SEQ ID NO: 128816 - protein, 16 aa, Artificial Sequence
  Description of Artificial Sequence: Synthetic peptide
  Seed: RMCSLMQGSTLPRRSG
RMLSLMQGSTMPRRSG

SEQ ID NO: 128817 - protein, 16 aa, Artificial Sequence
  Description of Artificial Sequence: Synthetic peptide
  Seed: RMCSLMQGSTLPRRSG
RMLSLMQGSTSPRRSG

SEQ ID NO: 128818 - protein, 16 aa, Artificial Sequence
  Description of Artificial Sequence: Synthetic peptide
  Seed: RMCSLMQGSTLPRRSG
RMLSLMQGSTTPRRSG

SEQ ID NO: 128819 - protein, 16 aa, Artificial Sequence
  Description of Artificial Sequence: Synthetic peptide
  Seed: RMCSLMQGSTLPRRSG
RMLSLMQGSTVPRRSG

SEQ ID NO: 128820 - protein, 16 aa, Artificial Sequence
  Description of Artificial Sequence: Synthetic peptide
  Seed: RMCSLMQGSTLPRRSG
RMLSLMQISTAPRRSG

SEQ ID NO: 128821 - protein, 16 aa, Artificial Sequence
  Description of Artificial Sequence: Synthetic peptide
  Seed: RMCSLMQGSTLPRRSG
RMLSLMQISTSPRRSG

SEQ ID NO: 128822 - protein, 16 aa, Artificial Sequence
  Description of Artificial Sequence: Synthetic peptide
  Seed: RMCSLMQGSTLPRRSG
RMLSLMQNSTVPRRSG

SEQ ID NO: 128823 - protein, 16 aa, Artificial Sequence
  Description of Artificial Sequence: Synthetic peptide
  Seed: RMCSLMQGSTLPRRSG
RMLSLMQPSTAPRRSG

SEQ ID NO: 128824 - protein, 16 aa, Artificial Sequence
  Description of Artificial Sequence: Synthetic peptide
  Seed: RMCSLMQGSTLPRRSG
RMLSLMQPSTIPRRSG

SEQ ID NO: 128825 - protein, 16 aa, Artificial Sequence
  Description of Artificial Sequence: Synthetic peptide
  Seed: RMCSLMQGSTLPRRSG
RMLSLMQPSTLPRRSG

SEQ ID NO: 128826 - protein, 16 aa, Artificial Sequence
  Description of Artificial Sequence: Synthetic peptide
  Seed: RMCSLMQGSTLPRRSG
RMLSLMQPSTNPRRSG

SEQ ID NO: 128827 - protein, 16 aa, Artificial Sequence
  Description of Artificial Sequence: Synthetic peptide
  Seed: RMCSLMQGSTLPRRSG
RMLSLMQPSTSPRRSG

SEQ ID NO: 128828 - protein, 16 aa, Artificial Sequence
  Description of Artificial Sequence: Synthetic peptide
  Seed: RMCSLMQGSTLPRRSG
RMLSLMQPSTVPRRSG

SEQ ID NO: 128829 - protein, 16 aa, Artificial Sequence
  Description of Artificial Sequence: Synthetic peptide
  Seed: RMCSLMQGSTLPRRSG
RMLSLMQSSTAPRRSG

SEQ ID NO: 128830 - protein, 16 aa, Artificial Sequence
  Description of Artificial Sequence: Synthetic peptide
  Seed: RMCSLMQGSTLPRRSG
RMLSLMQSSTIPRRSG

SEQ ID NO: 128831 - protein, 16 aa, Artificial Sequence
  Description of Artificial Sequence: Synthetic peptide
  Seed: RMCSLMQGSTLPRRSG
RMLSLMQSSTLPRRSG

SEQ ID NO: 128832 - protein, 16 aa, Artificial Sequence
  Description of Artificial Sequence: Synthetic peptide
  Seed: RMCSLMQGSTLPRRSG
RMLSLMQSSTMPRRSG

SEQ ID NO: 128833 - protein, 16 aa, Artificial Sequence
  Description of Artificial Sequence: Synthetic peptide
  Seed: RMCSLMQGSTLPRRSG
RMLSLMQSSTNPRRSG

SEQ ID NO: 128834 - protein, 16 aa, Artificial Sequence
  Description of Artificial Sequence: Synthetic peptide
  Seed: RMCSLMQGSTLPRRSG
RMLSLMQSSTSPRRSG

SEQ ID NO: 128835 - protein, 16 aa, Artificial Sequence
  Description of Artificial Sequence: Synthetic peptide
  Seed: RMCSLMQGSTLPRRSG
RMLSLMQSSTTPRRSG

SEQ ID NO: 128836 - protein, 16 aa, Artificial Sequence
  Description of Artificial Sequence: Synthetic peptide
  Seed: RMCSLMQGSTLPRRSG
RMLSLMQSSTVPRRSG

SEQ ID NO: 128837 - protein, 16 aa, Artificial Sequence
  Description of Artificial Sequence: Synthetic peptide
  Seed: RMCSLMQGSTLPRRSG
RMLSLMQTSTAPRRSG

SEQ ID NO: 128838 - protein, 16 aa, Artificial Sequence
  Description of Artificial Sequence: Synthetic peptide
  Seed: RMCSLMQGSTLPRRSG
RMLSLMQTSTVPRRSG

SEQ ID NO: 128839 - protein, 16 aa, Artificial Sequence
  Description of Artificial Sequence: Synthetic peptide
  Seed: RMCSLMQGSTLPRRSG
RMLSLMQVSTAPRRSG

SEQ ID NO: 128840 - protein, 16 aa, Artificial Sequence
  Description of Artificial Sequence: Synthetic peptide
  Seed: RMCSLMQGSTLPRRSG
RMLSLMQVSTNPRRSG

SEQ ID NO: 128841 - protein, 16 aa, Artificial Sequence
  Description of Artificial Sequence: Synthetic peptide
  Seed: RMCSLMQGSTLPRRSG
RMLSLMQVSTSPRRSG

SEQ ID NO: 128842 - protein, 16 aa, Artificial Sequence
  Description of Artificial Sequence: Synthetic peptide
  Seed: RMCSLMQGSTLPRRSG
RMLSLQQASTLPRRSG

SEQ ID NO: 128843 - protein, 16 aa, Artificial Sequence
  Description of Artificial Sequence: Synthetic peptide
  Seed: RMCSLMQGSTLPRRSG
RMMSLLQASTAPRRSG

SEQ ID NO: 128844 - protein, 16 aa, Artificial Sequence
  Description of Artificial Sequence: Synthetic peptide
  Seed: RMCSLMQGSTLPRRSG
RMMSLLQASTIPRRSG

SEQ ID NO: 128845 - protein, 16 aa, Artificial Sequence
  Description of Artificial Sequence: Synthetic peptide
  Seed: RMCSLMQGSTLPRRSG
RMMSLLQASTLPRRSG

SEQ ID NO: 128846 - protein, 16 aa, Artificial Sequence
  Description of Artificial Sequence: Synthetic peptide
  Seed: RMCSLMQGSTLPRRSG
RMMSLLQASTMPRRSG

SEQ ID NO: 128847 - protein, 16 aa, Artificial Sequence
  Description of Artificial Sequence: Synthetic peptide
  Seed: RMCSLMQGSTLPRRSG
RMMSLLQASTSPRRSG

SEQ ID NO: 128848 - protein, 16 aa, Artificial Sequence
  Description of Artificial Sequence: Synthetic peptide
  Seed: RMCSLMQGSTLPRRSG
RMMSLLQASTTPRRSG

SEQ ID NO: 128849 - protein, 16 aa, Artificial Sequence
  Description of Artificial Sequence: Synthetic peptide
  Seed: RMCSLMQGSTLPRRSG
RMMSLLQASTVPRRSG

SEQ ID NO: 128850 - protein, 16 aa, Artificial Sequence
  Description of Artificial Sequence: Synthetic peptide
  Seed: RMCSLMQGSTLPRRSG
RMMSLLQGSTAPRRSG

SEQ ID NO: 128851 - protein, 16 aa, Artificial Sequence
  Description of Artificial Sequence: Synthetic peptide
  Seed: RMCSLMQGSTLPRRSG
RMMSLLQGSTIPRRSG

SEQ ID NO: 128852 - protein, 16 aa, Artificial Sequence
  Description of Artificial Sequence: Synthetic peptide
  Seed: RMCSLMQGSTLPRRSG
RMMSLLQGSTLPRRSG

SEQ ID NO: 128853 - protein, 16 aa, Artificial Sequence
  Description of Artificial Sequence: Synthetic peptide
  Seed: RMCSLMQGSTLPRRSG
RMMSLLQGSTVPRRSG

SEQ ID NO: 128854 - protein, 16 aa, Artificial Sequence
  Description of Artificial Sequence: Synthetic peptide
  Seed: RMCSLMQGSTLPRRSG
RMMSLLQPSTLPRRSG

SEQ ID NO: 128855 - protein, 16 aa, Artificial Sequence
  Description of Artificial Sequence: Synthetic peptide
  Seed: RMCSLMQGSTLPRRSG
RMMSLLQPSTVPRRSG

SEQ ID NO: 128856 - protein, 16 aa, Artificial Sequence
  Description of Artificial Sequence: Synthetic peptide
  Seed: RMCSLMQGSTLPRRSG
RMMSLLQSSTAPRRSG

SEQ ID NO: 128857 - protein, 16 aa, Artificial Sequence
  Description of Artificial Sequence: Synthetic peptide
  Seed: RMCSLMQGSTLPRRSG
RMMSLLQSSTIPRRSG

SEQ ID NO: 128858 - protein, 16 aa, Artificial Sequence
  Description of Artificial Sequence: Synthetic peptide
  Seed: RMCSLMQGSTLPRRSG
RMMSLLQSSTLPRRSG

SEQ ID NO: 128859 - protein, 16 aa, Artificial Sequence
  Description of Artificial Sequence: Synthetic peptide
  Seed: RMCSLMQGSTLPRRSG
RMMSLLQSSTVPRRSG

SEQ ID NO: 128860 - protein, 16 aa, Artificial Sequence
  Description of Artificial Sequence: Synthetic peptide
  Seed: RMCSLMQGSTLPRRSG
RMMSLMQASTAPRRSG

SEQ ID NO: 128861 - protein, 16 aa, Artificial Sequence
  Description of Artificial Sequence: Synthetic peptide
  Seed: RMCSLMQGSTLPRRSG
RMMSLMQASTIPRRSG

SEQ ID NO: 128862 - protein, 16 aa, Artificial Sequence
  Description of Artificial Sequence: Synthetic peptide
  Seed: RMCSLMQGSTLPRRSG
RMMSLMQASTLPRRSG

SEQ ID NO: 128863 - protein, 16 aa, Artificial Sequence
  Description of Artificial Sequence: Synthetic peptide
  Seed: RMCSLMQGSTLPRRSG
RMMSLMQASTMPRRSG

SEQ ID NO: 128864 - protein, 16 aa, Artificial Sequence
  Description of Artificial Sequence: Synthetic peptide
  Seed: RMCSLMQGSTLPRRSG
RMMSLMQASTNPRRSG

SEQ ID NO: 128865 - protein, 16 aa, Artificial Sequence
  Description of Artificial Sequence: Synthetic peptide
  Seed: RMCSLMQGSTLPRRSG
RMMSLMQASTSPRRSG

SEQ ID NO: 128866 - protein, 16 aa, Artificial Sequence
  Description of Artificial Sequence: Synthetic peptide
  Seed: RMCSLMQGSTLPRRSG
RMMSLMQASTVPRRSG

SEQ ID NO: 128867 - protein, 16 aa, Artificial Sequence
  Description of Artificial Sequence: Synthetic peptide
  Seed: RMCSLMQGSTLPRRSG
RMMSLMQGSTAPRRSG

SEQ ID NO: 128868 - protein, 16 aa, Artificial Sequence
  Description of Artificial Sequence: Synthetic peptide
  Seed: RMCSLMQGSTLPRRSG
RMMSLMQGSTIPRRSG

SEQ ID NO: 128869 - protein, 16 aa, Artificial Sequence
  Description of Artificial Sequence: Synthetic peptide
  Seed: RMCSLMQGSTLPRRSG
RMMSLMQGSTLPRRSG

SEQ ID NO: 128870 - protein, 16 aa, Artificial Sequence
  Description of Artificial Sequence: Synthetic peptide
  Seed: RMCSLMQGSTLPRRSG
RMMSLMQGSTVPRRSG

SEQ ID NO: 128871 - protein, 16 aa, Artificial Sequence
  Description of Artificial Sequence: Synthetic peptide
  Seed: RMCSLMQGSTLPRRSG
RMMSLMQPSTAPRRSG

SEQ ID NO: 128872 - protein, 16 aa, Artificial Sequence
  Description of Artificial Sequence: Synthetic peptide
  Seed: RMCSLMQGSTLPRRSG
RMMSLMQPSTVPRRSG

SEQ ID NO: 128873 - protein, 16 aa, Artificial Sequence
  Description of Artificial Sequence: Synthetic peptide
  Seed: RMCSLMQGSTLPRRSG
RMMSLMQSSTAPRRSG

SEQ ID NO: 128874 - protein, 16 aa, Artificial Sequence
  Description of Artificial Sequence: Synthetic peptide
  Seed: RMCSLMQGSTLPRRSG
RMMSLMQSSTIPRRSG

SEQ ID NO: 128875 - protein, 16 aa, Artificial Sequence
  Description of Artificial Sequence: Synthetic peptide
  Seed: RMCSLMQGSTLPRRSG
RMMSLMQSSTLPRRSG

SEQ ID NO: 128876 - protein, 16 aa, Artificial Sequence
  Description of Artificial Sequence: Synthetic peptide
  Seed: RMCSLMQGSTLPRRSG
RMMSLMQSSTVPRRSG

SEQ ID NO: 128877 - protein, 16 aa, Artificial Sequence
  Description of Artificial Sequence: Synthetic peptide
  Seed: RMCSLMQGSTLPRRSG
RMMSLMQVSTAPRRSG

SEQ ID NO: 128878 - protein, 16 aa, Artificial Sequence
  Description of Artificial Sequence: Synthetic peptide
  Seed: RMCSLMQGSTLPRRSG
RMVSLLQASTAPRRSG

SEQ ID NO: 128879 - protein, 16 aa, Artificial Sequence
  Description of Artificial Sequence: Synthetic peptide
  Seed: RMCSLMQGSTLPRRSG
RMVSLLQASTIPRRSG

SEQ ID NO: 128880 - protein, 16 aa, Artificial Sequence
  Description of Artificial Sequence: Synthetic peptide
  Seed: RMCSLMQGSTLPRRSG
RMVSLLQASTLPRRSG

SEQ ID NO: 128881 - protein, 16 aa, Artificial Sequence
  Description of Artificial Sequence: Synthetic peptide
  Seed: RMCSLMQGSTLPRRSG
RMVSLLQASTVPRRSG

SEQ ID NO: 128882 - protein, 16 aa, Artificial Sequence
  Description of Artificial Sequence: Synthetic peptide
  Seed: RMCSLMQGSTLPRRSG
RMVSLLQGSTAPRRSG

SEQ ID NO: 128883 - protein, 16 aa, Artificial Sequence
  Description of Artificial Sequence: Synthetic peptide
  Seed: RMCSLMQGSTLPRRSG
RMVSLLQGSTIPRRSG

SEQ ID NO: 128884 - protein, 16 aa, Artificial Sequence
  Description of Artificial Sequence: Synthetic peptide
  Seed: RMCSLMQGSTLPRRSG
RMVSLLQGSTLPRRSG

SEQ ID NO: 128885 - protein, 16 aa, Artificial Sequence
  Description of Artificial Sequence: Synthetic peptide
  Seed: RMCSLMQGSTLPRRSG
RMVSLLQGSTVPRRSG

SEQ ID NO: 128886 - protein, 16 aa, Artificial Sequence
  Description of Artificial Sequence: Synthetic peptide
  Seed: RMCSLMQGSTLPRRSG
RMVSLLQPSTLPRRSG

SEQ ID NO: 128887 - protein, 16 aa, Artificial Sequence
  Description of Artificial Sequence: Synthetic peptide
  Seed: RMCSLMQGSTLPRRSG
RMVSLLQPSTVPRRSG

SEQ ID NO: 128888 - protein, 16 aa, Artificial Sequence
  Description of Artificial Sequence: Synthetic peptide
  Seed: RMCSLMQGSTLPRRSG
RMVSLLQSSTAPRRSG

SEQ ID NO: 128889 - protein, 16 aa, Artificial Sequence
  Description of Artificial Sequence: Synthetic peptide
  Seed: RMCSLMQGSTLPRRSG
RMVSLLQSSTIPRRSG

SEQ ID NO: 128890 - protein, 16 aa, Artificial Sequence
  Description of Artificial Sequence: Synthetic peptide
  Seed: RMCSLMQGSTLPRRSG
RMVSLLQSSTLPRRSG

SEQ ID NO: 128891 - protein, 16 aa, Artificial Sequence
  Description of Artificial Sequence: Synthetic peptide
  Seed: RMCSLMQGSTLPRRSG
RMVSLLQSSTVPRRSG

SEQ ID NO: 128892 - protein, 16 aa, Artificial Sequence
  Description of Artificial Sequence: Synthetic peptide
  Seed: RMCSLMQGSTLPRRSG
RMVSLMQASTAPRRSG

SEQ ID NO: 128893 - protein, 16 aa, Artificial Sequence
  Description of Artificial Sequence: Synthetic peptide
  Seed: RMCSLMQGSTLPRRSG
RMVSLMQASTIPRRSG

SEQ ID NO: 128894 - protein, 16 aa, Artificial Sequence
  Description of Artificial Sequence: Synthetic peptide
  Seed: RMCSLMQGSTLPRRSG
RMVSLMQASTLPRRSG

SEQ ID NO: 128895 - protein, 16 aa, Artificial Sequence
  Description of Artificial Sequence: Synthetic peptide
  Seed: RMCSLMQGSTLPRRSG
RMVSLMQASTVPRRSG

SEQ ID NO: 128896 - protein, 16 aa, Artificial Sequence
  Description of Artificial Sequence: Synthetic peptide
  Seed: RMCSLMQGSTLPRRSG
RMVSLMQGSTAPRRSG

SEQ ID NO: 128897 - protein, 16 aa, Artificial Sequence
  Description of Artificial Sequence: Synthetic peptide
  Seed: RMCSLMQGSTLPRRSG
RMVSLMQGSTIPRRSG

SEQ ID NO: 128898 - protein, 16 aa, Artificial Sequence
  Description of Artificial Sequence: Synthetic peptide
  Seed: RMCSLMQGSTLPRRSG
RMVSLMQGSTLPRRSG

SEQ ID NO: 128899 - protein, 16 aa, Artificial Sequence
  Description of Artificial Sequence: Synthetic peptide
  Seed: RMCSLMQGSTLPRRSG
RMVSLMQGSTVPRRSG

SEQ ID NO: 128900 - protein, 16 aa, Artificial Sequence
  Description of Artificial Sequence: Synthetic peptide
  Seed: RMCSLMQGSTLPRRSG
RMVSLMQSSTIPRRSG

SEQ ID NO: 128901 - protein, 16 aa, Artificial Sequence
  Description of Artificial Sequence: Synthetic peptide
  Seed: RMCSLMQGSTLPRRSG
RMVSLMQSSTLPRRSG

SEQ ID NO: 128902 - protein, 16 aa, Artificial Sequence
  Description of Artificial Sequence: Synthetic peptide
  Seed: RMCSLMQGSTLPRRSG
RMVSLMQSSTVPRRSG

SEQ ID NO: 128903 - protein, 16 aa, Artificial Sequence
  Description of Artificial Sequence: Synthetic peptide
  Seed: RMCSLMQGSTLPRRSG
RMWSLAQASTAPRRSG

SEQ ID NO: 128904 - protein, 16 aa, Artificial Sequence
  Description of Artificial Sequence: Synthetic peptide
  Seed: RMCSLMQGSTLPRRSG
RMWSLAQASTIPRRSG

SEQ ID NO: 128905 - protein, 16 aa, Artificial Sequence
  Description of Artificial Sequence: Synthetic peptide
  Seed: RMCSLMQGSTLPRRSG
RMWSLAQASTLPRRSG

SEQ ID NO: 128906 - protein, 16 aa, Artificial Sequence
  Description of Artificial Sequence: Synthetic peptide
  Seed: RMCSLMQGSTLPRRSG
RMWSLAQASTMPRRSG

SEQ ID NO: 128907 - protein, 16 aa, Artificial Sequence
  Description of Artificial Sequence: Synthetic peptide
  Seed: RMCSLMQGSTLPRRSG
RMWSLAQASTSPRRSG

SEQ ID NO: 128908 - protein, 16 aa, Artificial Sequence
  Description of Artificial Sequence: Synthetic peptide
  Seed: RMCSLMQGSTLPRRSG
RMWSLAQASTVPRRSG

SEQ ID NO: 128909 - protein, 16 aa, Artificial Sequence
  Description of Artificial Sequence: Synthetic peptide
  Seed: RMCSLMQGSTLPRRSG
RMWSLAQGSTAPRRSG

SEQ ID NO: 128910 - protein, 16 aa, Artificial Sequence
  Description of Artificial Sequence: Synthetic peptide
  Seed: RMCSLMQGSTLPRRSG
RMWSLAQGSTIPRRSG

SEQ ID NO: 128911 - protein, 16 aa, Artificial Sequence
  Description of Artificial Sequence: Synthetic peptide
  Seed: RMCSLMQGSTLPRRSG
RMWSLAQGSTLPRRSG

SEQ ID NO: 128912 - protein, 16 aa, Artificial Sequence
  Description of Artificial Sequence: Synthetic peptide
  Seed: RMCSLMQGSTLPRRSG
RMWSLAQGSTVPRRSG

SEQ ID NO: 128913 - protein, 16 aa, Artificial Sequence
  Description of Artificial Sequence: Synthetic peptide
  Seed: RMCSLMQGSTLPRRSG
RMWSLAQSSTIPRRSG

SEQ ID NO: 128914 - protein, 16 aa, Artificial Sequence
  Description of Artificial Sequence: Synthetic peptide
  Seed: RMCSLMQGSTLPRRSG
RMWSLAQSSTLPRRSG

SEQ ID NO: 128915 - protein, 16 aa, Artificial Sequence
  Description of Artificial Sequence: Synthetic peptide
  Seed: RMCSLMQGSTLPRRSG
RMWSLAQSSTVPRRSG

SEQ ID NO: 128916 - protein, 16 aa, Artificial Sequence
  Description of Artificial Sequence: Synthetic peptide
  Seed: RMCSLMQGSTLPRRSG
RMWSLIQASTAPRRSG

SEQ ID NO: 128917 - protein, 16 aa, Artificial Sequence
  Description of Artificial Sequence: Synthetic peptide
  Seed: RMCSLMQGSTLPRRSG
RMWSLIQASTIPRRSG

SEQ ID NO: 128918 - protein, 16 aa, Artificial Sequence
  Description of Artificial Sequence: Synthetic peptide
  Seed: RMCSLMQGSTLPRRSG
RMWSLIQASTLPRRSG

SEQ ID NO: 128919 - protein, 16 aa, Artificial Sequence
  Description of Artificial Sequence: Synthetic peptide
  Seed: RMCSLMQGSTLPRRSG
RMWSLIQASTMPRRSG

SEQ ID NO: 128920 - protein, 16 aa, Artificial Sequence
  Description of Artificial Sequence: Synthetic peptide
  Seed: RMCSLMQGSTLPRRSG
RMWSLIQASTNPRRSG

SEQ ID NO: 128921 - protein, 16 aa, Artificial Sequence
  Description of Artificial Sequence: Synthetic peptide
  Seed: RMCSLMQGSTLPRRSG
RMWSLIQASTSPRRSG

SEQ ID NO: 128922 - protein, 16 aa, Artificial Sequence
  Description of Artificial Sequence: Synthetic peptide
  Seed: RMCSLMQGSTLPRRSG
RMWSLIQASTTPRRSG

SEQ ID NO: 128923 - protein, 16 aa, Artificial Sequence
  Description of Artificial Sequence: Synthetic peptide
  Seed: RMCSLMQGSTLPRRSG
RMWSLIQASTVPRRSG

SEQ ID NO: 128924 - protein, 16 aa, Artificial Sequence
  Description of Artificial Sequence: Synthetic peptide
  Seed: RMCSLMQGSTLPRRSG
RMWSLIQGSTAPRRSG

SEQ ID NO: 128925 - protein, 16 aa, Artificial Sequence
  Description of Artificial Sequence: Synthetic peptide
  Seed: RMCSLMQGSTLPRRSG
RMWSLIQGSTIPRRSG

SEQ ID NO: 128926 - protein, 16 aa, Artificial Sequence
  Description of Artificial Sequence: Synthetic peptide
  Seed: RMCSLMQGSTLPRRSG
RMWSLIQGSTLPRRSG

SEQ ID NO: 128927 - protein, 16 aa, Artificial Sequence
  Description of Artificial Sequence: Synthetic peptide
  Seed: RMCSLMQGSTLPRRSG
RMWSLIQGSTMPRRSG

SEQ ID NO: 128928 - protein, 16 aa, Artificial Sequence
  Description of Artificial Sequence: Synthetic peptide
  Seed: RMCSLMQGSTLPRRSG
RMWSLIQGSTTPRRSG

SEQ ID NO: 128929 - protein, 16 aa, Artificial Sequence
  Description of Artificial Sequence: Synthetic peptide
  Seed: RMCSLMQGSTLPRRSG
RMWSLIQGSTVPRRSG

SEQ ID NO: 128930 - protein, 16 aa, Artificial Sequence
  Description of Artificial Sequence: Synthetic peptide
  Seed: RMCSLMQGSTLPRRSG
RMWSLIQPSTAPRRSG

SEQ ID NO: 128931 - protein, 16 aa, Artificial Sequence
  Description of Artificial Sequence: Synthetic peptide
  Seed: RMCSLMQGSTLPRRSG
RMWSLIQPSTIPRRSG

SEQ ID NO: 128932 - protein, 16 aa, Artificial Sequence
  Description of Artificial Sequence: Synthetic peptide
  Seed: RMCSLMQGSTLPRRSG
RMWSLIQPSTLPRRSG

SEQ ID NO: 128933 - protein, 16 aa, Artificial Sequence
  Description of Artificial Sequence: Synthetic peptide
  Seed: RMCSLMQGSTLPRRSG
RMWSLIQPSTNPRRSG

SEQ ID NO: 128934 - protein, 16 aa, Artificial Sequence
  Description of Artificial Sequence: Synthetic peptide
  Seed: RMCSLMQGSTLPRRSG
RMWSLIQPSTSPRRSG

SEQ ID NO: 128935 - protein, 16 aa, Artificial Sequence
  Description of Artificial Sequence: Synthetic peptide
  Seed: RMCSLMQGSTLPRRSG
RMWSLIQPSTVPRRSG

SEQ ID NO: 128936 - protein, 16 aa, Artificial Sequence
  Description of Artificial Sequence: Synthetic peptide
  Seed: RMCSLMQGSTLPRRSG
RMWSLIQSSTAPRRSG

SEQ ID NO: 128937 - protein, 16 aa, Artificial Sequence
  Description of Artificial Sequence: Synthetic peptide
  Seed: RMCSLMQGSTLPRRSG
RMWSLIQSSTIPRRSG

SEQ ID NO: 128938 - protein, 16 aa, Artificial Sequence
  Description of Artificial Sequence: Synthetic peptide
  Seed: RMCSLMQGSTLPRRSG
RMWSLIQSSTLPRRSG

SEQ ID NO: 128939 - protein, 16 aa, Artificial Sequence
  Description of Artificial Sequence: Synthetic peptide
  Seed: RMCSLMQGSTLPRRSG
RMWSLIQSSTNPRRSG

SEQ ID NO: 128940 - protein, 16 aa, Artificial Sequence
  Description of Artificial Sequence: Synthetic peptide
  Seed: RMCSLMQGSTLPRRSG
RMWSLIQSSTSPRRSG

SEQ ID NO: 128941 - protein, 16 aa, Artificial Sequence
  Description of Artificial Sequence: Synthetic peptide
  Seed: RMCSLMQGSTLPRRSG
RMWSLIQSSTVPRRSG

SEQ ID NO: 128942 - protein, 16 aa, Artificial Sequence
  Description of Artificial Sequence: Synthetic peptide
  Seed: RMCSLMQGSTLPRRSG
RMWSLIQTSTAPRRSG

SEQ ID NO: 128943 - protein, 16 aa, Artificial Sequence
  Description of Artificial Sequence: Synthetic peptide
  Seed: RMCSLMQGSTLPRRSG
RMWSLIQTSTNPRRSG

SEQ ID NO: 128944 - protein, 16 aa, Artificial Sequence
  Description of Artificial Sequence: Synthetic peptide
  Seed: RMCSLMQGSTLPRRSG
RMWSLIQTSTSPRRSG

SEQ ID NO: 128945 - protein, 16 aa, Artificial Sequence
  Description of Artificial Sequence: Synthetic peptide
  Seed: RMCSLMQGSTLPRRSG
RMWSLIQVSTAPRRSG

SEQ ID NO: 128946 - protein, 16 aa, Artificial Sequence
  Description of Artificial Sequence: Synthetic peptide
  Seed: RMCSLMQGSTLPRRSG
RMWSLIQVSTNPRRSG

SEQ ID NO: 128947 - protein, 16 aa, Artificial Sequence
  Description of Artificial Sequence: Synthetic peptide
  Seed: RMCSLMQGSTLPRRSG
RMWSLIQVSTSPRRSG

SEQ ID NO: 128948 - protein, 16 aa, Artificial Sequence
  Description of Artificial Sequence: Synthetic peptide
  Seed: RMCSLMQGSTLPRRSG
RMWSLLQASTAPRRSG

SEQ ID NO: 128949 - protein, 16 aa, Artificial Sequence
  Description of Artificial Sequence: Synthetic peptide
  Seed: RMCSLMQGSTLPRRSG
RMWSLLQASTGPRRSG

SEQ ID NO: 128950 - protein, 16 aa, Artificial Sequence
  Description of Artificial Sequence: Synthetic peptide
  Seed: RMCSLMQGSTLPRRSG
RMWSLLQASTIPRRSG

SEQ ID NO: 128951 - protein, 16 aa, Artificial Sequence
  Description of Artificial Sequence: Synthetic peptide
  Seed: RMCSLMQGSTLPRRSG
RMWSLLQASTLPRRSG

SEQ ID NO: 128952 - protein, 16 aa, Artificial Sequence
  Description of Artificial Sequence: Synthetic peptide
  Seed: RMCSLMQGSTLPRRSG
RMWSLLQASTMPRRSG

SEQ ID NO: 128953 - protein, 16 aa, Artificial Sequence
  Description of Artificial Sequence: Synthetic peptide
  Seed: RMCSLMQGSTLPRRSG
RMWSLLQASTNPRRSG

SEQ ID NO: 128954 - protein, 16 aa, Artificial Sequence
  Description of Artificial Sequence: Synthetic peptide
  Seed: RMCSLMQGSTLPRRSG
RMWSLLQASTSPRRSG

SEQ ID NO: 128955 - protein, 16 aa, Artificial Sequence
  Description of Artificial Sequence: Synthetic peptide
  Seed: RMCSLMQGSTLPRRSG
RMWSLLQASTTPRRSG

SEQ ID NO: 128956 - protein, 16 aa, Artificial Sequence
  Description of Artificial Sequence: Synthetic peptide
  Seed: RMCSLMQGSTLPRRSG
RMWSLLQASTVPRRSG

SEQ ID NO: 128957 - protein, 16 aa, Artificial Sequence
  Description of Artificial Sequence: Synthetic peptide
  Seed: RMCSLMQGSTLPRRSG
RMWSLLQGSTAPRRSG

SEQ ID NO: 128958 - protein, 16 aa, Artificial Sequence
  Description of Artificial Sequence: Synthetic peptide
  Seed: RMCSLMQGSTLPRRSG
RMWSLLQGSTGPRRSG

SEQ ID NO: 128959 - protein, 16 aa, Artificial Sequence
  Description of Artificial Sequence: Synthetic peptide
  Seed: RMCSLMQGSTLPRRSG
RMWSLLQGSTIPRRSG

SEQ ID NO: 128960 - protein, 16 aa, Artificial Sequence
  Description of Artificial Sequence: Synthetic peptide
  Seed: RMCSLMQGSTLPRRSG
RMWSLLQGSTLPRRSG

SEQ ID NO: 128961 - protein, 16 aa, Artificial Sequence
  Description of Artificial Sequence: Synthetic peptide
  Seed: RMCSLMQGSTLPRRSG
RMWSLLQGSTMPRRSG

SEQ ID NO: 128962 - protein, 16 aa, Artificial Sequence
  Description of Artificial Sequence: Synthetic peptide
  Seed: RMCSLMQGSTLPRRSG
RMWSLLQGSTSPRRSG

SEQ ID NO: 128963 - protein, 16 aa, Artificial Sequence
  Description of Artificial Sequence: Synthetic peptide
  Seed: RMCSLMQGSTLPRRSG
RMWSLLQGSTTPRRSG

SEQ ID NO: 128964 - protein, 16 aa, Artificial Sequence
  Description of Artificial Sequence: Synthetic peptide
  Seed: RMCSLMQGSTLPRRSG
RMWSLLQGSTVPRRSG

SEQ ID NO: 128965 - protein, 16 aa, Artificial Sequence
  Description of Artificial Sequence: Synthetic peptide
  Seed: RMCSLMQGSTLPRRSG
RMWSLLQISTAPRRSG

SEQ ID NO: 128966 - protein, 16 aa, Artificial Sequence
  Description of Artificial Sequence: Synthetic peptide
  Seed: RMCSLMQGSTLPRRSG
RMWSLLQISTNPRRSG

SEQ ID NO: 128967 - protein, 16 aa, Artificial Sequence
  Description of Artificial Sequence: Synthetic peptide
  Seed: RMCSLMQGSTLPRRSG
RMWSLLQISTSPRRSG

SEQ ID NO: 128968 - protein, 16 aa, Artificial Sequence
  Description of Artificial Sequence: Synthetic peptide
  Seed: RMCSLMQGSTLPRRSG
RMWSLLQNSTAPRRSG

SEQ ID NO: 128969 - protein, 16 aa, Artificial Sequence
  Description of Artificial Sequence: Synthetic peptide
  Seed: RMCSLMQGSTLPRRSG
RMWSLLQNSTIPRRSG

SEQ ID NO: 128970 - protein, 16 aa, Artificial Sequence
  Description of Artificial Sequence: Synthetic peptide
  Seed: RMCSLMQGSTLPRRSG
RMWSLLQNSTLPRRSG

SEQ ID NO: 128971 - protein, 16 aa, Artificial Sequence
  Description of Artificial Sequence: Synthetic peptide
  Seed: RMCSLMQGSTLPRRSG
RMWSLLQNSTVPRRSG

SEQ ID NO: 128972 - protein, 16 aa, Artificial Sequence
  Description of Artificial Sequence: Synthetic peptide
  Seed: RMCSLMQGSTLPRRSG
RMWSLLQPSTAPRRSG

SEQ ID NO: 128973 - protein, 16 aa, Artificial Sequence
  Description of Artificial Sequence: Synthetic peptide
  Seed: RMCSLMQGSTLPRRSG
RMWSLLQPSTIPRRSG

SEQ ID NO: 128974 - protein, 16 aa, Artificial Sequence
  Description of Artificial Sequence: Synthetic peptide
  Seed: RMCSLMQGSTLPRRSG
RMWSLLQPSTLPRRSG

SEQ ID NO: 128975 - protein, 16 aa, Artificial Sequence
  Description of Artificial Sequence: Synthetic peptide
  Seed: RMCSLMQGSTLPRRSG
RMWSLLQPSTMPRRSG

SEQ ID NO: 128976 - protein, 16 aa, Artificial Sequence
  Description of Artificial Sequence: Synthetic peptide
  Seed: RMCSLMQGSTLPRRSG
RMWSLLQPSTNPRRSG

SEQ ID NO: 128977 - protein, 16 aa, Artificial Sequence
  Description of Artificial Sequence: Synthetic peptide
  Seed: RMCSLMQGSTLPRRSG
RMWSLLQPSTSPRRSG

SEQ ID NO: 128978 - protein, 16 aa, Artificial Sequence
  Description of Artificial Sequence: Synthetic peptide
  Seed: RMCSLMQGSTLPRRSG
RMWSLLQPSTTPRRSG

SEQ ID NO: 128979 - protein, 16 aa, Artificial Sequence
  Description of Artificial Sequence: Synthetic peptide
  Seed: RMCSLMQGSTLPRRSG
RMWSLLQPSTVPRRSG

SEQ ID NO: 128980 - protein, 16 aa, Artificial Sequence
  Description of Artificial Sequence: Synthetic peptide
  Seed: RMCSLMQGSTLPRRSG
RMWSLLQSSTAPRRSG

SEQ ID NO: 128981 - protein, 16 aa, Artificial Sequence
  Description of Artificial Sequence: Synthetic peptide
  Seed: RMCSLMQGSTLPRRSG
RMWSLLQSSTIPRRSG

SEQ ID NO: 128982 - protein, 16 aa, Artificial Sequence
  Description of Artificial Sequence: Synthetic peptide
  Seed: RMCSLMQGSTLPRRSG
RMWSLLQSSTLPRRSG

SEQ ID NO: 128983 - protein, 16 aa, Artificial Sequence
  Description of Artificial Sequence: Synthetic peptide
  Seed: RMCSLMQGSTLPRRSG
RMWSLLQSSTMPRRSG

SEQ ID NO: 128984 - protein, 16 aa, Artificial Sequence
  Description of Artificial Sequence: Synthetic peptide
  Seed: RMCSLMQGSTLPRRSG
RMWSLLQSSTNPRRSG

SEQ ID NO: 128985 - protein, 16 aa, Artificial Sequence
  Description of Artificial Sequence: Synthetic peptide
  Seed: RMCSLMQGSTLPRRSG
RMWSLLQSSTSPRRSG

SEQ ID NO: 128986 - protein, 16 aa, Artificial Sequence
  Description of Artificial Sequence: Synthetic peptide
  Seed: RMCSLMQGSTLPRRSG
RMWSLLQSSTTPRRSG

SEQ ID NO: 128987 - protein, 16 aa, Artificial Sequence
  Description of Artificial Sequence: Synthetic peptide
  Seed: RMCSLMQGSTLPRRSG
RMWSLLQSSTVPRRSG

SEQ ID NO: 128988 - protein, 16 aa, Artificial Sequence
  Description of Artificial Sequence: Synthetic peptide
  Seed: RMCSLMQGSTLPRRSG
RMWSLLQTSTAPRRSG

SEQ ID NO: 128989 - protein, 16 aa, Artificial Sequence
  Description of Artificial Sequence: Synthetic peptide
  Seed: RMCSLMQGSTLPRRSG
RMWSLLQTSTIPRRSG

SEQ ID NO: 128990 - protein, 16 aa, Artificial Sequence
  Description of Artificial Sequence: Synthetic peptide
  Seed: RMCSLMQGSTLPRRSG
RMWSLLQTSTLPRRSG

SEQ ID NO: 128991 - protein, 16 aa, Artificial Sequence
  Description of Artificial Sequence: Synthetic peptide
  Seed: RMCSLMQGSTLPRRSG
RMWSLLQTSTNPRRSG

SEQ ID NO: 128992 - protein, 16 aa, Artificial Sequence
  Description of Artificial Sequence: Synthetic peptide
  Seed: RMCSLMQGSTLPRRSG
RMWSLLQTSTSPRRSG

SEQ ID NO: 128993 - protein, 16 aa, Artificial Sequence
  Description of Artificial Sequence: Synthetic peptide
  Seed: RMCSLMQGSTLPRRSG
RMWSLLQTSTTPRRSG

SEQ ID NO: 128994 - protein, 16 aa, Artificial Sequence
  Description of Artificial Sequence: Synthetic peptide
  Seed: RMCSLMQGSTLPRRSG
RMWSLLQTSTVPRRSG

SEQ ID NO: 128995 - protein, 16 aa, Artificial Sequence
  Description of Artificial Sequence: Synthetic peptide
  Seed: RMCSLMQGSTLPRRSG
RMWSLLQVSTAPRRSG

SEQ ID NO: 128996 - protein, 16 aa, Artificial Sequence
  Description of Artificial Sequence: Synthetic peptide
  Seed: RMCSLMQGSTLPRRSG
RMWSLLQVSTNPRRSG

SEQ ID NO: 128997 - protein, 16 aa, Artificial Sequence
  Description of Artificial Sequence: Synthetic peptide
  Seed: RMCSLMQGSTLPRRSG
RMWSLLQVSTSPRRSG

SEQ ID NO: 128998 - protein, 16 aa, Artificial Sequence
  Description of Artificial Sequence: Synthetic peptide
  Seed: RMCSLMQGSTLPRRSG
RMWSLLQVSTTPRRSG

SEQ ID NO: 128999 - protein, 16 aa, Artificial Sequence
  Description of Artificial Sequence: Synthetic peptide
  Seed: RMCSLMQGSTLPRRSG
RMWSLMQASTAPRRSG

SEQ ID NO: 129000 - protein, 16 aa, Artificial Sequence
  Description of Artificial Sequence: Synthetic peptide
  Seed: RMCSLMQGSTLPRRSG
RMWSLMQASTGPRRSG

SEQ ID NO: 129001 - protein, 16 aa, Artificial Sequence
  Description of Artificial Sequence: Synthetic peptide
  Seed: RMCSLMQGSTLPRRSG
RMWSLMQASTIPRRSG

SEQ ID NO: 129002 - protein, 16 aa, Artificial Sequence
  Description of Artificial Sequence: Synthetic peptide
  Seed: RMCSLMQGSTLPRRSG
RMWSLMQASTLPRRSG

SEQ ID NO: 129003 - protein, 16 aa, Artificial Sequence
  Description of Artificial Sequence: Synthetic peptide
  Seed: RMCSLMQGSTLPRRSG
RMWSLMQASTMPRRSG

SEQ ID NO: 129004 - protein, 16 aa, Artificial Sequence
  Description of Artificial Sequence: Synthetic peptide
  Seed: RMCSLMQGSTLPRRSG
RMWSLMQASTNPRRSG

SEQ ID NO: 129005 - protein, 16 aa, Artificial Sequence
  Description of Artificial Sequence: Synthetic peptide
  Seed: RMCSLMQGSTLPRRSG
RMWSLMQASTSPRRSG

SEQ ID NO: 129006 - protein, 16 aa, Artificial Sequence
  Description of Artificial Sequence: Synthetic peptide
  Seed: RMCSLMQGSTLPRRSG
RMWSLMQASTTPRRSG

SEQ ID NO: 129007 - protein, 16 aa, Artificial Sequence
  Description of Artificial Sequence: Synthetic peptide
  Seed: RMCSLMQGSTLPRRSG
RMWSLMQASTVPRRSG

SEQ ID NO: 129008 - protein, 16 aa, Artificial Sequence
  Description of Artificial Sequence: Synthetic peptide
  Seed: RMCSLMQGSTLPRRSG
RMWSLMQGSTAPRRSG

SEQ ID NO: 129009 - protein, 16 aa, Artificial Sequence
  Description of Artificial Sequence: Synthetic peptide
  Seed: RMCSLMQGSTLPRRSG
RMWSLMQGSTIPRRSG

SEQ ID NO: 129010 - protein, 16 aa, Artificial Sequence
  Description of Artificial Sequence: Synthetic peptide
  Seed: RMCSLMQGSTLPRRSG
RMWSLMQGSTLPRRSG

SEQ ID NO: 129011 - protein, 16 aa, Artificial Sequence
  Description of Artificial Sequence: Synthetic peptide
  Seed: RMCSLMQGSTLPRRSG
RMWSLMQGSTMPRRSG

SEQ ID NO: 129012 - protein, 16 aa, Artificial Sequence
  Description of Artificial Sequence: Synthetic peptide
  Seed: RMCSLMQGSTLPRRSG
RMWSLMQGSTSPRRSG

SEQ ID NO: 129013 - protein, 16 aa, Artificial Sequence
  Description of Artificial Sequence: Synthetic peptide
  Seed: RMCSLMQGSTLPRRSG
RMWSLMQGSTTPRRSG

SEQ ID NO: 129014 - protein, 16 aa, Artificial Sequence
  Description of Artificial Sequence: Synthetic peptide
  Seed: RMCSLMQGSTLPRRSG
RMWSLMQGSTVPRRSG

SEQ ID NO: 129015 - protein, 16 aa, Artificial Sequence
  Description of Artificial Sequence: Synthetic peptide
  Seed: RMCSLMQGSTLPRRSG
RMWSLMQISTAPRRSG

SEQ ID NO: 129016 - protein, 16 aa, Artificial Sequence
  Description of Artificial Sequence: Synthetic peptide
  Seed: RMCSLMQGSTLPRRSG
RMWSLMQISTNPRRSG

SEQ ID NO: 129017 - protein, 16 aa, Artificial Sequence
  Description of Artificial Sequence: Synthetic peptide
  Seed: RMCSLMQGSTLPRRSG
RMWSLMQISTSPRRSG

SEQ ID NO: 129018 - protein, 16 aa, Artificial Sequence
  Description of Artificial Sequence: Synthetic peptide
  Seed: RMCSLMQGSTLPRRSG
RMWSLMQNSTAPRRSG

SEQ ID NO: 129019 - protein, 16 aa, Artificial Sequence
  Description of Artificial Sequence: Synthetic peptide
  Seed: RMCSLMQGSTLPRRSG
RMWSLMQNSTIPRRSG

SEQ ID NO: 129020 - protein, 16 aa, Artificial Sequence
  Description of Artificial Sequence: Synthetic peptide
  Seed: RMCSLMQGSTLPRRSG
RMWSLMQNSTLPRRSG

SEQ ID NO: 129021 - protein, 16 aa, Artificial Sequence
  Description of Artificial Sequence: Synthetic peptide
  Seed: RMCSLMQGSTLPRRSG
RMWSLMQNSTVPRRSG

SEQ ID NO: 129022 - protein, 16 aa, Artificial Sequence
  Description of Artificial Sequence: Synthetic peptide
  Seed: RMCSLMQGSTLPRRSG
RMWSLMQPSTAPRRSG

SEQ ID NO: 129023 - protein, 16 aa, Artificial Sequence
  Description of Artificial Sequence: Synthetic peptide
  Seed: RMCSLMQGSTLPRRSG
RMWSLMQPSTIPRRSG

SEQ ID NO: 129024 - protein, 16 aa, Artificial Sequence
  Description of Artificial Sequence: Synthetic peptide
  Seed: RMCSLMQGSTLPRRSG
RMWSLMQPSTLPRRSG

SEQ ID NO: 129025 - protein, 16 aa, Artificial Sequence
  Description of Artificial Sequence: Synthetic peptide
  Seed: RMCSLMQGSTLPRRSG
RMWSLMQPSTMPRRSG

SEQ ID NO: 129026 - protein, 16 aa, Artificial Sequence
  Description of Artificial Sequence: Synthetic peptide
  Seed: RMCSLMQGSTLPRRSG
RMWSLMQPSTNPRRSG

SEQ ID NO: 129027 - protein, 16 aa, Artificial Sequence
  Description of Artificial Sequence: Synthetic peptide
  Seed: RMCSLMQGSTLPRRSG
RMWSLMQPSTSPRRSG

SEQ ID NO: 129028 - protein, 16 aa, Artificial Sequence
  Description of Artificial Sequence: Synthetic peptide
  Seed: RMCSLMQGSTLPRRSG
RMWSLMQPSTTPRRSG

SEQ ID NO: 129029 - protein, 16 aa, Artificial Sequence
  Description of Artificial Sequence: Synthetic peptide
  Seed: RMCSLMQGSTLPRRSG
RMWSLMQPSTVPRRSG

SEQ ID NO: 129030 - protein, 16 aa, Artificial Sequence
  Description of Artificial Sequence: Synthetic peptide
  Seed: RMCSLMQGSTLPRRSG
RMWSLMQSSTAPRRSG

SEQ ID NO: 129031 - protein, 16 aa, Artificial Sequence
  Description of Artificial Sequence: Synthetic peptide
  Seed: RMCSLMQGSTLPRRSG
RMWSLMQSSTIPRRSG

SEQ ID NO: 129032 - protein, 16 aa, Artificial Sequence
  Description of Artificial Sequence: Synthetic peptide
  Seed: RMCSLMQGSTLPRRSG
RMWSLMQSSTLPRRSG

SEQ ID NO: 129033 - protein, 16 aa, Artificial Sequence
  Description of Artificial Sequence: Synthetic peptide
  Seed: RMCSLMQGSTLPRRSG
RMWSLMQSSTMPRRSG

SEQ ID NO: 129034 - protein, 16 aa, Artificial Sequence
  Description of Artificial Sequence: Synthetic peptide
  Seed: RMCSLMQGSTLPRRSG
RMWSLMQSSTNPRRSG

SEQ ID NO: 129035 - protein, 16 aa, Artificial Sequence
  Description of Artificial Sequence: Synthetic peptide
  Seed: RMCSLMQGSTLPRRSG
RMWSLMQSSTSPRRSG

SEQ ID NO: 129036 - protein, 16 aa, Artificial Sequence
  Description of Artificial Sequence: Synthetic peptide
  Seed: RMCSLMQGSTLPRRSG
RMWSLMQSSTTPRRSG

SEQ ID NO: 129037 - protein, 16 aa, Artificial Sequence
  Description of Artificial Sequence: Synthetic peptide
  Seed: RMCSLMQGSTLPRRSG
RMWSLMQSSTVPRRSG

SEQ ID NO: 129038 - protein, 16 aa, Artificial Sequence
  Description of Artificial Sequence: Synthetic peptide
  Seed: RMCSLMQGSTLPRRSG
RMWSLMQTSTAPRRSG

SEQ ID NO: 129039 - protein, 16 aa, Artificial Sequence
  Description of Artificial Sequence: Synthetic peptide
  Seed: RMCSLMQGSTLPRRSG
RMWSLMQTSTIPRRSG

SEQ ID NO: 129040 - protein, 16 aa, Artificial Sequence
  Description of Artificial Sequence: Synthetic peptide
  Seed: RMCSLMQGSTLPRRSG
RMWSLMQTSTLPRRSG

SEQ ID NO: 129041 - protein, 16 aa, Artificial Sequence
  Description of Artificial Sequence: Synthetic peptide
  Seed: RMCSLMQGSTLPRRSG
RMWSLMQTSTNPRRSG

SEQ ID NO: 129042 - protein, 16 aa, Artificial Sequence
  Description of Artificial Sequence: Synthetic peptide
  Seed: RMCSLMQGSTLPRRSG
RMWSLMQTSTSPRRSG

SEQ ID NO: 129043 - protein, 16 aa, Artificial Sequence
  Description of Artificial Sequence: Synthetic peptide
  Seed: RMCSLMQGSTLPRRSG
RMWSLMQTSTTPRRSG

SEQ ID NO: 129044 - protein, 16 aa, Artificial Sequence
  Description of Artificial Sequence: Synthetic peptide
  Seed: RMCSLMQGSTLPRRSG
RMWSLMQTSTVPRRSG

SEQ ID NO: 129045 - protein, 16 aa, Artificial Sequence
  Description of Artificial Sequence: Synthetic peptide
  Seed: RMCSLMQGSTLPRRSG
RMWSLMQVSTAPRRSG

SEQ ID NO: 129046 - protein, 16 aa, Artificial Sequence
  Description of Artificial Sequence: Synthetic peptide
  Seed: RMCSLMQGSTLPRRSG
RMWSLMQVSTNPRRSG

SEQ ID NO: 129047 - protein, 16 aa, Artificial Sequence
  Description of Artificial Sequence: Synthetic peptide
  Seed: RMCSLMQGSTLPRRSG
RMWSLMQVSTSPRRSG

SEQ ID NO: 129048 - protein, 16 aa, Artificial Sequence
  Description of Artificial Sequence: Synthetic peptide
  Seed: RMCSLMQGSTLPRRSG
RMWSLMQVSTTPRRSG

SEQ ID NO: 129049 - protein, 16 aa, Artificial Sequence
  Description of Artificial Sequence: Synthetic peptide
  Seed: RMCSLMQGSTLPRRSG
RMWSLMQVSTVPRRSG

SEQ ID NO: 129050 - protein, 16 aa, Artificial Sequence
  Description of Artificial Sequence: Synthetic peptide
  Seed: RMCSLMQGSTLPRRSG
RMWSLQQASTAPRRSG

SEQ ID NO: 129051 - protein, 16 aa, Artificial Sequence
  Description of Artificial Sequence: Synthetic peptide
  Seed: RMCSLMQGSTLPRRSG
RMWSLQQASTIPRRSG

SEQ ID NO: 129052 - protein, 16 aa, Artificial Sequence
  Description of Artificial Sequence: Synthetic peptide
  Seed: RMCSLMQGSTLPRRSG
RMWSLQQASTLPRRSG

SEQ ID NO: 129053 - protein, 16 aa, Artificial Sequence
  Description of Artificial Sequence: Synthetic peptide
  Seed: RMCSLMQGSTLPRRSG
RMWSLQQASTVPRRSG

SEQ ID NO: 129054 - protein, 16 aa, Artificial Sequence
  Description of Artificial Sequence: Synthetic peptide
  Seed: RMCSLMQGSTLPRRSG
RMWSLQQGSTIPRRSG

SEQ ID NO: 129055 - protein, 16 aa, Artificial Sequence
  Description of Artificial Sequence: Synthetic peptide
  Seed: RMCSLMQGSTLPRRSG
RMWSLQQGSTLPRRSG

SEQ ID NO: 129056 - protein, 16 aa, Artificial Sequence
  Description of Artificial Sequence: Synthetic peptide
  Seed: RMCSLMQGSTLPRRSG
RMWSLQQGSTVPRRSG

SEQ ID NO: 129057 - protein, 16 aa, Artificial Sequence
  Description of Artificial Sequence: Synthetic peptide
  Seed: RMCSLMQGSTLPRRSG
RMWSLQQSSTLPRRSG

SEQ ID NO: 129058 - protein, 16 aa, Artificial Sequence
  Description of Artificial Sequence: Synthetic peptide
  Seed: RMCSLMQGSTLPRRSG
RMWSLQQSSTVPRRSG

SEQ ID NO: 129059 - protein, 16 aa, Artificial Sequence
  Description of Artificial Sequence: Synthetic peptide
  Seed: RMCSLMQGSTLPRRSG
RMWSLVQASTAPRRSG

SEQ ID NO: 129060 - protein, 16 aa, Artificial Sequence
  Description of Artificial Sequence: Synthetic peptide
  Seed: RMCSLMQGSTLPRRSG
RMWSLVQASTIPRRSG

SEQ ID NO: 129061 - protein, 16 aa, Artificial Sequence
  Description of Artificial Sequence: Synthetic peptide
  Seed: RMCSLMQGSTLPRRSG
RMWSLVQASTLPRRSG

SEQ ID NO: 129062 - protein, 16 aa, Artificial Sequence
  Description of Artificial Sequence: Synthetic peptide
  Seed: RMCSLMQGSTLPRRSG
RMWSLVQASTVPRRSG

SEQ ID NO: 129063 - protein, 16 aa, Artificial Sequence
  Description of Artificial Sequence: Synthetic peptide
  Seed: RMCSLMQGSTLPRRSG
RMWSLVQGSTAPRRSG

SEQ ID NO: 129064 - protein, 16 aa, Artificial Sequence
  Description of Artificial Sequence: Synthetic peptide
  Seed: RMCSLMQGSTLPRRSG
RMWSLVQGSTIPRRSG

SEQ ID NO: 129065 - protein, 16 aa, Artificial Sequence
  Description of Artificial Sequence: Synthetic peptide
  Seed: RMCSLMQGSTLPRRSG
RMWSLVQGSTLPRRSG

SEQ ID NO: 129066 - protein, 16 aa, Artificial Sequence
  Description of Artificial Sequence: Synthetic peptide
  Seed: RMCSLMQGSTLPRRSG
RMWSLVQGSTVPRRSG

SEQ ID NO: 129067 - protein, 16 aa, Artificial Sequence
  Description of Artificial Sequence: Synthetic peptide
  Seed: RMCSLMQGSTLPRRSG
RMWSLVQSSTVPRRSG

SEQ ID NO: 129068 - protein, 16 aa, Artificial Sequence
  Description of Artificial Sequence: Synthetic peptide
  Seed: RMCSLMQGSTLPRRSG
RMYSLAQASTAPRRSG

SEQ ID NO: 129069 - protein, 16 aa, Artificial Sequence
  Description of Artificial Sequence: Synthetic peptide
  Seed: RMCSLMQGSTLPRRSG
RMYSLAQASTIPRRSG

SEQ ID NO: 129070 - protein, 16 aa, Artificial Sequence
  Description of Artificial Sequence: Synthetic peptide
  Seed: RMCSLMQGSTLPRRSG
RMYSLAQASTLPRRSG

SEQ ID NO: 129071 - protein, 16 aa, Artificial Sequence
  Description of Artificial Sequence: Synthetic peptide
  Seed: RMCSLMQGSTLPRRSG
RMYSLAQASTMPRRSG

SEQ ID NO: 129072 - protein, 16 aa, Artificial Sequence
  Description of Artificial Sequence: Synthetic peptide
  Seed: RMCSLMQGSTLPRRSG
RMYSLAQASTNPRRSG

SEQ ID NO: 129073 - protein, 16 aa, Artificial Sequence
  Description of Artificial Sequence: Synthetic peptide
  Seed: RMCSLMQGSTLPRRSG
RMYSLAQASTSPRRSG

SEQ ID NO: 129074 - protein, 16 aa, Artificial Sequence
  Description of Artificial Sequence: Synthetic peptide
  Seed: RMCSLMQGSTLPRRSG
RMYSLAQASTTPRRSG

SEQ ID NO: 129075 - protein, 16 aa, Artificial Sequence
  Description of Artificial Sequence: Synthetic peptide
  Seed: RMCSLMQGSTLPRRSG
RMYSLAQASTVPRRSG

SEQ ID NO: 129076 - protein, 16 aa, Artificial Sequence
  Description of Artificial Sequence: Synthetic peptide
  Seed: RMCSLMQGSTLPRRSG
RMYSLAQGSTAPRRSG

SEQ ID NO: 129077 - protein, 16 aa, Artificial Sequence
  Description of Artificial Sequence: Synthetic peptide
  Seed: RMCSLMQGSTLPRRSG
RMYSLAQGSTIPRRSG

SEQ ID NO: 129078 - protein, 16 aa, Artificial Sequence
  Description of Artificial Sequence: Synthetic peptide
  Seed: RMCSLMQGSTLPRRSG
RMYSLAQGSTLPRRSG

SEQ ID NO: 129079 - protein, 16 aa, Artificial Sequence
  Description of Artificial Sequence: Synthetic peptide
  Seed: RMCSLMQGSTLPRRSG
RMYSLAQGSTMPRRSG

SEQ ID NO: 129080 - protein, 16 aa, Artificial Sequence
  Description of Artificial Sequence: Synthetic peptide
  Seed: RMCSLMQGSTLPRRSG
RMYSLAQGSTVPRRSG

SEQ ID NO: 129081 - protein, 16 aa, Artificial Sequence
  Description of Artificial Sequence: Synthetic peptide
  Seed: RMCSLMQGSTLPRRSG
RMYSLAQISTAPRRSG

SEQ ID NO: 129082 - protein, 16 aa, Artificial Sequence
  Description of Artificial Sequence: Synthetic peptide
  Seed: RMCSLMQGSTLPRRSG
RMYSLAQISTNPRRSG

SEQ ID NO: 129083 - protein, 16 aa, Artificial Sequence
  Description of Artificial Sequence: Synthetic peptide
  Seed: RMCSLMQGSTLPRRSG
RMYSLAQISTSPRRSG

SEQ ID NO: 129084 - protein, 16 aa, Artificial Sequence
  Description of Artificial Sequence: Synthetic peptide
  Seed: RMCSLMQGSTLPRRSG
RMYSLAQNSTIPRRSG

SEQ ID NO: 129085 - protein, 16 aa, Artificial Sequence
  Description of Artificial Sequence: Synthetic peptide
  Seed: RMCSLMQGSTLPRRSG
RMYSLAQNSTLPRRSG

SEQ ID NO: 129086 - protein, 16 aa, Artificial Sequence
  Description of Artificial Sequence: Synthetic peptide
  Seed: RMCSLMQGSTLPRRSG
RMYSLAQNSTVPRRSG

SEQ ID NO: 129087 - protein, 16 aa, Artificial Sequence
  Description of Artificial Sequence: Synthetic peptide
  Seed: RMCSLMQGSTLPRRSG
RMYSLAQPSTAPRRSG

SEQ ID NO: 129088 - protein, 16 aa, Artificial Sequence
  Description of Artificial Sequence: Synthetic peptide
  Seed: RMCSLMQGSTLPRRSG
RMYSLAQPSTIPRRSG

SEQ ID NO: 129089 - protein, 16 aa, Artificial Sequence
  Description of Artificial Sequence: Synthetic peptide
  Seed: RMCSLMQGSTLPRRSG
RMYSLAQPSTLPRRSG

SEQ ID NO: 129090 - protein, 16 aa, Artificial Sequence
  Description of Artificial Sequence: Synthetic peptide
  Seed: RMCSLMQGSTLPRRSG
RMYSLAQPSTNPRRSG

SEQ ID NO: 129091 - protein, 16 aa, Artificial Sequence
  Description of Artificial Sequence: Synthetic peptide
  Seed: RMCSLMQGSTLPRRSG
RMYSLAQPSTSPRRSG

SEQ ID NO: 129092 - protein, 16 aa, Artificial Sequence
  Description of Artificial Sequence: Synthetic peptide
  Seed: RMCSLMQGSTLPRRSG
RMYSLAQPSTVPRRSG

SEQ ID NO: 129093 - protein, 16 aa, Artificial Sequence
  Description of Artificial Sequence: Synthetic peptide
  Seed: RMCSLMQGSTLPRRSG
RMYSLAQSSTAPRRSG

SEQ ID NO: 129094 - protein, 16 aa, Artificial Sequence
  Description of Artificial Sequence: Synthetic peptide
  Seed: RMCSLMQGSTLPRRSG
RMYSLAQSSTIPRRSG

SEQ ID NO: 129095 - protein, 16 aa, Artificial Sequence
  Description of Artificial Sequence: Synthetic peptide
  Seed: RMCSLMQGSTLPRRSG
RMYSLAQSSTLPRRSG

SEQ ID NO: 129096 - protein, 16 aa, Artificial Sequence
  Description of Artificial Sequence: Synthetic peptide
  Seed: RMCSLMQGSTLPRRSG
RMYSLAQSSTMPRRSG

SEQ ID NO: 129097 - protein, 16 aa, Artificial Sequence
  Description of Artificial Sequence: Synthetic peptide
  Seed: RMCSLMQGSTLPRRSG
RMYSLAQSSTNPRRSG

SEQ ID NO: 129098 - protein, 16 aa, Artificial Sequence
  Description of Artificial Sequence: Synthetic peptide
  Seed: RMCSLMQGSTLPRRSG
RMYSLAQSSTSPRRSG

SEQ ID NO: 129099 - protein, 16 aa, Artificial Sequence
  Description of Artificial Sequence: Synthetic peptide
  Seed: RMCSLMQGSTLPRRSG
RMYSLAQSSTTPRRSG

SEQ ID NO: 129100 - protein, 16 aa, Artificial Sequence
  Description of Artificial Sequence: Synthetic peptide
  Seed: RMCSLMQGSTLPRRSG
RMYSLAQSSTVPRRSG

SEQ ID NO: 129101 - protein, 16 aa, Artificial Sequence
  Description of Artificial Sequence: Synthetic peptide
  Seed: RMCSLMQGSTLPRRSG
RMYSLAQTSTAPRRSG

SEQ ID NO: 129102 - protein, 16 aa, Artificial Sequence
  Description of Artificial Sequence: Synthetic peptide
  Seed: RMCSLMQGSTLPRRSG
RMYSLAQTSTIPRRSG

SEQ ID NO: 129103 - protein, 16 aa, Artificial Sequence
  Description of Artificial Sequence: Synthetic peptide
  Seed: RMCSLMQGSTLPRRSG
RMYSLAQTSTLPRRSG

SEQ ID NO: 129104 - protein, 16 aa, Artificial Sequence
  Description of Artificial Sequence: Synthetic peptide
  Seed: RMCSLMQGSTLPRRSG
RMYSLAQTSTNPRRSG

SEQ ID NO: 129105 - protein, 16 aa, Artificial Sequence
  Description of Artificial Sequence: Synthetic peptide
  Seed: RMCSLMQGSTLPRRSG
RMYSLAQTSTSPRRSG

SEQ ID NO: 129106 - protein, 16 aa, Artificial Sequence
  Description of Artificial Sequence: Synthetic peptide
  Seed: RMCSLMQGSTLPRRSG
RMYSLAQTSTVPRRSG

SEQ ID NO: 129107 - protein, 16 aa, Artificial Sequence
  Description of Artificial Sequence: Synthetic peptide
  Seed: RMCSLMQGSTLPRRSG
RMYSLAQVSTAPRRSG

SEQ ID NO: 129108 - protein, 16 aa, Artificial Sequence
  Description of Artificial Sequence: Synthetic peptide
  Seed: RMCSLMQGSTLPRRSG
RMYSLAQVSTIPRRSG

SEQ ID NO: 129109 - protein, 16 aa, Artificial Sequence
  Description of Artificial Sequence: Synthetic peptide
  Seed: RMCSLMQGSTLPRRSG
RMYSLAQVSTLPRRSG

SEQ ID NO: 129110 - protein, 16 aa, Artificial Sequence
  Description of Artificial Sequence: Synthetic peptide
  Seed: RMCSLMQGSTLPRRSG
RMYSLAQVSTNPRRSG

SEQ ID NO: 129111 - protein, 16 aa, Artificial Sequence
  Description of Artificial Sequence: Synthetic peptide
  Seed: RMCSLMQGSTLPRRSG
RMYSLAQVSTSPRRSG

SEQ ID NO: 129112 - protein, 16 aa, Artificial Sequence
  Description of Artificial Sequence: Synthetic peptide
  Seed: RMCSLMQGSTLPRRSG
RMYSLAQVSTTPRRSG

SEQ ID NO: 129113 - protein, 16 aa, Artificial Sequence
  Description of Artificial Sequence: Synthetic peptide
  Seed: RMCSLMQGSTLPRRSG
RMYSLAQVSTVPRRSG

SEQ ID NO: 129114 - protein, 16 aa, Artificial Sequence
  Description of Artificial Sequence: Synthetic peptide
  Seed: RMCSLMQGSTLPRRSG
RMYSLEQASTLPRRSG

SEQ ID NO: 129115 - protein, 16 aa, Artificial Sequence
  Description of Artificial Sequence: Synthetic peptide
  Seed: RMCSLMQGSTLPRRSG
RMYSLEQASTVPRRSG

SEQ ID NO: 129116 - protein, 16 aa, Artificial Sequence
  Description of Artificial Sequence: Synthetic peptide
  Seed: RMCSLMQGSTLPRRSG
RMYSLFQASTAPRRSG

SEQ ID NO: 129117 - protein, 16 aa, Artificial Sequence
  Description of Artificial Sequence: Synthetic peptide
  Seed: RMCSLMQGSTLPRRSG
RMYSLFQASTIPRRSG

SEQ ID NO: 129118 - protein, 16 aa, Artificial Sequence
  Description of Artificial Sequence: Synthetic peptide
  Seed: RMCSLMQGSTLPRRSG
RMYSLFQASTLPRRSG

SEQ ID NO: 129119 - protein, 16 aa, Artificial Sequence
  Description of Artificial Sequence: Synthetic peptide
  Seed: RMCSLMQGSTLPRRSG
RMYSLFQASTSPRRSG

SEQ ID NO: 129120 - protein, 16 aa, Artificial Sequence
  Description of Artificial Sequence: Synthetic peptide
  Seed: RMCSLMQGSTLPRRSG
RMYSLFQASTVPRRSG

SEQ ID NO: 129121 - protein, 16 aa, Artificial Sequence
  Description of Artificial Sequence: Synthetic peptide
  Seed: RMCSLMQGSTLPRRSG
RMYSLFQPSTAPRRSG

SEQ ID NO: 129122 - protein, 16 aa, Artificial Sequence
  Description of Artificial Sequence: Synthetic peptide
  Seed: RMCSLMQGSTLPRRSG
RMYSLFQSSTAPRRSG

SEQ ID NO: 129123 - protein, 16 aa, Artificial Sequence
  Description of Artificial Sequence: Synthetic peptide
  Seed: RMCSLMQGSTLPRRSG
RMYSLGQASTIPRRSG

SEQ ID NO: 129124 - protein, 16 aa, Artificial Sequence
  Description of Artificial Sequence: Synthetic peptide
  Seed: RMCSLMQGSTLPRRSG
RMYSLGQASTLPRRSG

SEQ ID NO: 129125 - protein, 16 aa, Artificial Sequence
  Description of Artificial Sequence: Synthetic peptide
  Seed: RMCSLMQGSTLPRRSG
RMYSLGQASTVPRRSG

SEQ ID NO: 129126 - protein, 16 aa, Artificial Sequence
  Description of Artificial Sequence: Synthetic peptide
  Seed: RMCSLMQGSTLPRRSG
RMYSLIQASTAPRRSG

SEQ ID NO: 129127 - protein, 16 aa, Artificial Sequence
  Description of Artificial Sequence: Synthetic peptide
  Seed: RMCSLMQGSTLPRRSG
RMYSLIQASTGPRRSG

SEQ ID NO: 129128 - protein, 16 aa, Artificial Sequence
  Description of Artificial Sequence: Synthetic peptide
  Seed: RMCSLMQGSTLPRRSG
RMYSLIQASTHPRRSG

SEQ ID NO: 129129 - protein, 16 aa, Artificial Sequence
  Description of Artificial Sequence: Synthetic peptide
  Seed: RMCSLMQGSTLPRRSG
RMYSLIQASTIPRRSG

SEQ ID NO: 129130 - protein, 16 aa, Artificial Sequence
  Description of Artificial Sequence: Synthetic peptide
  Seed: RMCSLMQGSTLPRRSG
RMYSLIQASTLPRRSG

SEQ ID NO: 129131 - protein, 16 aa, Artificial Sequence
  Description of Artificial Sequence: Synthetic peptide
  Seed: RMCSLMQGSTLPRRSG
RMYSLIQASTMPRRSG

SEQ ID NO: 129132 - protein, 16 aa, Artificial Sequence
  Description of Artificial Sequence: Synthetic peptide
  Seed: RMCSLMQGSTLPRRSG
RMYSLIQASTNPRRSG

SEQ ID NO: 129133 - protein, 16 aa, Artificial Sequence
  Description of Artificial Sequence: Synthetic peptide
  Seed: RMCSLMQGSTLPRRSG
RMYSLIQASTQPRRSG

SEQ ID NO: 129134 - protein, 16 aa, Artificial Sequence
  Description of Artificial Sequence: Synthetic peptide
  Seed: RMCSLMQGSTLPRRSG
RMYSLIQASTSPRRSG

SEQ ID NO: 129135 - protein, 16 aa, Artificial Sequence
  Description of Artificial Sequence: Synthetic peptide
  Seed: RMCSLMQGSTLPRRSG
RMYSLIQASTTPRRSG

SEQ ID NO: 129136 - protein, 16 aa, Artificial Sequence
  Description of Artificial Sequence: Synthetic peptide
  Seed: RMCSLMQGSTLPRRSG
RMYSLIQASTVPRRSG

SEQ ID NO: 129137 - protein, 16 aa, Artificial Sequence
  Description of Artificial Sequence: Synthetic peptide
  Seed: RMCSLMQGSTLPRRSG
RMYSLIQGSTAPRRSG

SEQ ID NO: 129138 - protein, 16 aa, Artificial Sequence
  Description of Artificial Sequence: Synthetic peptide
  Seed: RMCSLMQGSTLPRRSG
RMYSLIQGSTIPRRSG

SEQ ID NO: 129139 - protein, 16 aa, Artificial Sequence
  Description of Artificial Sequence: Synthetic peptide
  Seed: RMCSLMQGSTLPRRSG
RMYSLIQGSTLPRRSG

SEQ ID NO: 129140 - protein, 16 aa, Artificial Sequence
  Description of Artificial Sequence: Synthetic peptide
  Seed: RMCSLMQGSTLPRRSG
RMYSLIQGSTMPRRSG

SEQ ID NO: 129141 - protein, 16 aa, Artificial Sequence
  Description of Artificial Sequence: Synthetic peptide
  Seed: RMCSLMQGSTLPRRSG
RMYSLIQGSTNPRRSG

SEQ ID NO: 129142 - protein, 16 aa, Artificial Sequence
  Description of Artificial Sequence: Synthetic peptide
  Seed: RMCSLMQGSTLPRRSG
RMYSLIQGSTSPRRSG

SEQ ID NO: 129143 - protein, 16 aa, Artificial Sequence
  Description of Artificial Sequence: Synthetic peptide
  Seed: RMCSLMQGSTLPRRSG
RMYSLIQGSTTPRRSG

SEQ ID NO: 129144 - protein, 16 aa, Artificial Sequence
  Description of Artificial Sequence: Synthetic peptide
  Seed: RMCSLMQGSTLPRRSG
RMYSLIQGSTVPRRSG

SEQ ID NO: 129145 - protein, 16 aa, Artificial Sequence
  Description of Artificial Sequence: Synthetic peptide
  Seed: RMCSLMQGSTLPRRSG
RMYSLIQISTAPRRSG

SEQ ID NO: 129146 - protein, 16 aa, Artificial Sequence
  Description of Artificial Sequence: Synthetic peptide
  Seed: RMCSLMQGSTLPRRSG
RMYSLIQISTIPRRSG

SEQ ID NO: 129147 - protein, 16 aa, Artificial Sequence
  Description of Artificial Sequence: Synthetic peptide
  Seed: RMCSLMQGSTLPRRSG
RMYSLIQISTNPRRSG

SEQ ID NO: 129148 - protein, 16 aa, Artificial Sequence
  Description of Artificial Sequence: Synthetic peptide
  Seed: RMCSLMQGSTLPRRSG
RMYSLIQISTSPRRSG

SEQ ID NO: 129149 - protein, 16 aa, Artificial Sequence
  Description of Artificial Sequence: Synthetic peptide
  Seed: RMCSLMQGSTLPRRSG
RMYSLIQISTTPRRSG

SEQ ID NO: 129150 - protein, 16 aa, Artificial Sequence
  Description of Artificial Sequence: Synthetic peptide
  Seed: RMCSLMQGSTLPRRSG
RMYSLIQISTVPRRSG

SEQ ID NO: 129151 - protein, 16 aa, Artificial Sequence
  Description of Artificial Sequence: Synthetic peptide
  Seed: RMCSLMQGSTLPRRSG
RMYSLIQLSTAPRRSG

SEQ ID NO: 129152 - protein, 16 aa, Artificial Sequence
  Description of Artificial Sequence: Synthetic peptide
  Seed: RMCSLMQGSTLPRRSG
RMYSLIQMSTAPRRSG

SEQ ID NO: 129153 - protein, 16 aa, Artificial Sequence
  Description of Artificial Sequence: Synthetic peptide
  Seed: RMCSLMQGSTLPRRSG
RMYSLIQNSTAPRRSG

SEQ ID NO: 129154 - protein, 16 aa, Artificial Sequence
  Description of Artificial Sequence: Synthetic peptide
  Seed: RMCSLMQGSTLPRRSG
RMYSLIQNSTIPRRSG

SEQ ID NO: 129155 - protein, 16 aa, Artificial Sequence
  Description of Artificial Sequence: Synthetic peptide
  Seed: RMCSLMQGSTLPRRSG
RMYSLIQNSTLPRRSG

SEQ ID NO: 129156 - protein, 16 aa, Artificial Sequence
  Description of Artificial Sequence: Synthetic peptide
  Seed: RMCSLMQGSTLPRRSG
RMYSLIQNSTNPRRSG

SEQ ID NO: 129157 - protein, 16 aa, Artificial Sequence
  Description of Artificial Sequence: Synthetic peptide
  Seed: RMCSLMQGSTLPRRSG
RMYSLIQNSTSPRRSG

SEQ ID NO: 129158 - protein, 16 aa, Artificial Sequence
  Description of Artificial Sequence: Synthetic peptide
  Seed: RMCSLMQGSTLPRRSG
RMYSLIQNSTVPRRSG

SEQ ID NO: 129159 - protein, 16 aa, Artificial Sequence
  Description of Artificial Sequence: Synthetic peptide
  Seed: RMCSLMQGSTLPRRSG
RMYSLIQPSTAPRRSG

SEQ ID NO: 129160 - protein, 16 aa, Artificial Sequence
  Description of Artificial Sequence: Synthetic peptide
  Seed: RMCSLMQGSTLPRRSG
RMYSLIQPSTGPRRSG

SEQ ID NO: 129161 - protein, 16 aa, Artificial Sequence
  Description of Artificial Sequence: Synthetic peptide
  Seed: RMCSLMQGSTLPRRSG
RMYSLIQPSTIPRRSG

SEQ ID NO: 129162 - protein, 16 aa, Artificial Sequence
  Description of Artificial Sequence: Synthetic peptide
  Seed: RMCSLMQGSTLPRRSG
RMYSLIQPSTLPRRSG

SEQ ID NO: 129163 - protein, 16 aa, Artificial Sequence
  Description of Artificial Sequence: Synthetic peptide
  Seed: RMCSLMQGSTLPRRSG
RMYSLIQPSTMPRRSG

SEQ ID NO: 129164 - protein, 16 aa, Artificial Sequence
  Description of Artificial Sequence: Synthetic peptide
  Seed: RMCSLMQGSTLPRRSG
RMYSLIQPSTNPRRSG

SEQ ID NO: 129165 - protein, 16 aa, Artificial Sequence
  Description of Artificial Sequence: Synthetic peptide
  Seed: RMCSLMQGSTLPRRSG
RMYSLIQPSTSPRRSG

SEQ ID NO: 129166 - protein, 16 aa, Artificial Sequence
  Description of Artificial Sequence: Synthetic peptide
  Seed: RMCSLMQGSTLPRRSG
RMYSLIQPSTTPRRSG

SEQ ID NO: 129167 - protein, 16 aa, Artificial Sequence
  Description of Artificial Sequence: Synthetic peptide
  Seed: RMCSLMQGSTLPRRSG
RMYSLIQPSTVPRRSG

SEQ ID NO: 129168 - protein, 16 aa, Artificial Sequence
  Description of Artificial Sequence: Synthetic peptide
  Seed: RMCSLMQGSTLPRRSG
RMYSLIQSSTAPRRSG

SEQ ID NO: 129169 - protein, 16 aa, Artificial Sequence
  Description of Artificial Sequence: Synthetic peptide
  Seed: RMCSLMQGSTLPRRSG
RMYSLIQSSTGPRRSG

SEQ ID NO: 129170 - protein, 16 aa, Artificial Sequence
  Description of Artificial Sequence: Synthetic peptide
  Seed: RMCSLMQGSTLPRRSG
RMYSLIQSSTIPRRSG

SEQ ID NO: 129171 - protein, 16 aa, Artificial Sequence
  Description of Artificial Sequence: Synthetic peptide
  Seed: RMCSLMQGSTLPRRSG
RMYSLIQSSTLPRRSG

SEQ ID NO: 129172 - protein, 16 aa, Artificial Sequence
  Description of Artificial Sequence: Synthetic peptide
  Seed: RMCSLMQGSTLPRRSG
RMYSLIQSSTMPRRSG

SEQ ID NO: 129173 - protein, 16 aa, Artificial Sequence
  Description of Artificial Sequence: Synthetic peptide
  Seed: RMCSLMQGSTLPRRSG
RMYSLIQSSTNPRRSG

SEQ ID NO: 129174 - protein, 16 aa, Artificial Sequence
  Description of Artificial Sequence: Synthetic peptide
  Seed: RMCSLMQGSTLPRRSG
RMYSLIQSSTSPRRSG

SEQ ID NO: 129175 - protein, 16 aa, Artificial Sequence
  Description of Artificial Sequence: Synthetic peptide
  Seed: RMCSLMQGSTLPRRSG
RMYSLIQSSTTPRRSG

SEQ ID NO: 129176 - protein, 16 aa, Artificial Sequence
  Description of Artificial Sequence: Synthetic peptide
  Seed: RMCSLMQGSTLPRRSG
RMYSLIQSSTVPRRSG

SEQ ID NO: 129177 - protein, 16 aa, Artificial Sequence
  Description of Artificial Sequence: Synthetic peptide
  Seed: RMCSLMQGSTLPRRSG
RMYSLIQTSTAPRRSG

SEQ ID NO: 129178 - protein, 16 aa, Artificial Sequence
  Description of Artificial Sequence: Synthetic peptide
  Seed: RMCSLMQGSTLPRRSG
RMYSLIQTSTIPRRSG

SEQ ID NO: 129179 - protein, 16 aa, Artificial Sequence
  Description of Artificial Sequence: Synthetic peptide
  Seed: RMCSLMQGSTLPRRSG
RMYSLIQTSTLPRRSG

SEQ ID NO: 129180 - protein, 16 aa, Artificial Sequence
  Description of Artificial Sequence: Synthetic peptide
  Seed: RMCSLMQGSTLPRRSG
RMYSLIQTSTMPRRSG

SEQ ID NO: 129181 - protein, 16 aa, Artificial Sequence
  Description of Artificial Sequence: Synthetic peptide
  Seed: RMCSLMQGSTLPRRSG
RMYSLIQTSTNPRRSG

SEQ ID NO: 129182 - protein, 16 aa, Artificial Sequence
  Description of Artificial Sequence: Synthetic peptide
  Seed: RMCSLMQGSTLPRRSG
RMYSLIQTSTSPRRSG

SEQ ID NO: 129183 - protein, 16 aa, Artificial Sequence
  Description of Artificial Sequence: Synthetic peptide
  Seed: RMCSLMQGSTLPRRSG
RMYSLIQTSTTPRRSG

SEQ ID NO: 129184 - protein, 16 aa, Artificial Sequence
  Description of Artificial Sequence: Synthetic peptide
  Seed: RMCSLMQGSTLPRRSG
RMYSLIQTSTVPRRSG

SEQ ID NO: 129185 - protein, 16 aa, Artificial Sequence
  Description of Artificial Sequence: Synthetic peptide
  Seed: RMCSLMQGSTLPRRSG
RMYSLIQVSTAPRRSG

SEQ ID NO: 129186 - protein, 16 aa, Artificial Sequence
  Description of Artificial Sequence: Synthetic peptide
  Seed: RMCSLMQGSTLPRRSG
RMYSLIQVSTGPRRSG

SEQ ID NO: 129187 - protein, 16 aa, Artificial Sequence
  Description of Artificial Sequence: Synthetic peptide
  Seed: RMCSLMQGSTLPRRSG
RMYSLIQVSTIPRRSG

SEQ ID NO: 129188 - protein, 16 aa, Artificial Sequence
  Description of Artificial Sequence: Synthetic peptide
  Seed: RMCSLMQGSTLPRRSG
RMYSLIQVSTLPRRSG

SEQ ID NO: 129189 - protein, 16 aa, Artificial Sequence
  Description of Artificial Sequence: Synthetic peptide
  Seed: RMCSLMQGSTLPRRSG
RMYSLIQVSTMPRRSG

SEQ ID NO: 129190 - protein, 16 aa, Artificial Sequence
  Description of Artificial Sequence: Synthetic peptide
  Seed: RMCSLMQGSTLPRRSG
RMYSLIQVSTNPRRSG

SEQ ID NO: 129191 - protein, 16 aa, Artificial Sequence
  Description of Artificial Sequence: Synthetic peptide
  Seed: RMCSLMQGSTLPRRSG
RMYSLIQVSTSPRRSG

SEQ ID NO: 129192 - protein, 16 aa, Artificial Sequence
  Description of Artificial Sequence: Synthetic peptide
  Seed: RMCSLMQGSTLPRRSG
RMYSLIQVSTTPRRSG

SEQ ID NO: 129193 - protein, 16 aa, Artificial Sequence
  Description of Artificial Sequence: Synthetic peptide
  Seed: RMCSLMQGSTLPRRSG
RMYSLIQVSTVPRRSG

SEQ ID NO: 129194 - protein, 16 aa, Artificial Sequence
  Description of Artificial Sequence: Synthetic peptide
  Seed: RMCSLMQGSTLPRRSG
RMYSLLQASTAPRRSG

SEQ ID NO: 129195 - protein, 16 aa, Artificial Sequence
  Description of Artificial Sequence: Synthetic peptide
  Seed: RMCSLMQGSTLPRRSG
RMYSLLQASTCPRRSG

SEQ ID NO: 129196 - protein, 16 aa, Artificial Sequence
  Description of Artificial Sequence: Synthetic peptide
  Seed: RMCSLMQGSTLPRRSG
RMYSLLQASTFPRRSG

SEQ ID NO: 129197 - protein, 16 aa, Artificial Sequence
  Description of Artificial Sequence: Synthetic peptide
  Seed: RMCSLMQGSTLPRRSG
RMYSLLQASTGPRRSG

SEQ ID NO: 129198 - protein, 16 aa, Artificial Sequence
  Description of Artificial Sequence: Synthetic peptide
  Seed: RMCSLMQGSTLPRRSG
RMYSLLQASTHPRRSG

SEQ ID NO: 129199 - protein, 16 aa, Artificial Sequence
  Description of Artificial Sequence: Synthetic peptide
  Seed: RMCSLMQGSTLPRRSG
RMYSLLQASTIPRRSG

SEQ ID NO: 129200 - protein, 16 aa, Artificial Sequence
  Description of Artificial Sequence: Synthetic peptide
  Seed: RMCSLMQGSTLPRRSG
RMYSLLQASTLPRRSG

SEQ ID NO: 129201 - protein, 16 aa, Artificial Sequence
  Description of Artificial Sequence: Synthetic peptide
  Seed: RMCSLMQGSTLPRRSG
RMYSLLQASTMPRRSG

SEQ ID NO: 129202 - protein, 16 aa, Artificial Sequence
  Description of Artificial Sequence: Synthetic peptide
  Seed: RMCSLMQGSTLPRRSG
RMYSLLQASTNPRRSG

SEQ ID NO: 129203 - protein, 16 aa, Artificial Sequence
  Description of Artificial Sequence: Synthetic peptide
  Seed: RMCSLMQGSTLPRRSG
RMYSLLQASTPPRRSG

SEQ ID NO: 129204 - protein, 16 aa, Artificial Sequence
  Description of Artificial Sequence: Synthetic peptide
  Seed: RMCSLMQGSTLPRRSG
RMYSLLQASTQPRRSG

SEQ ID NO: 129205 - protein, 16 aa, Artificial Sequence
  Description of Artificial Sequence: Synthetic peptide
  Seed: RMCSLMQGSTLPRRSG
RMYSLLQASTSPRRSG

SEQ ID NO: 129206 - protein, 16 aa, Artificial Sequence
  Description of Artificial Sequence: Synthetic peptide
  Seed: RMCSLMQGSTLPRRSG
RMYSLLQASTTPRRSG

SEQ ID NO: 129207 - protein, 16 aa, Artificial Sequence
  Description of Artificial Sequence: Synthetic peptide
  Seed: RMCSLMQGSTLPRRSG
RMYSLLQASTVPRRSG

SEQ ID NO: 129208 - protein, 16 aa, Artificial Sequence
  Description of Artificial Sequence: Synthetic peptide
  Seed: RMCSLMQGSTLPRRSG
RMYSLLQGSTAPRRSG

SEQ ID NO: 129209 - protein, 16 aa, Artificial Sequence
  Description of Artificial Sequence: Synthetic peptide
  Seed: RMCSLMQGSTLPRRSG
RMYSLLQGSTCPRRSG

SEQ ID NO: 129210 - protein, 16 aa, Artificial Sequence
  Description of Artificial Sequence: Synthetic peptide
  Seed: RMCSLMQGSTLPRRSG
RMYSLLQGSTFPRRSG

SEQ ID NO: 129211 - protein, 16 aa, Artificial Sequence
  Description of Artificial Sequence: Synthetic peptide
  Seed: RMCSLMQGSTLPRRSG
RMYSLLQGSTGPRRSG

SEQ ID NO: 129212 - protein, 16 aa, Artificial Sequence
  Description of Artificial Sequence: Synthetic peptide
  Seed: RMCSLMQGSTLPRRSG
RMYSLLQGSTIPRRSG

SEQ ID NO: 129213 - protein, 16 aa, Artificial Sequence
  Description of Artificial Sequence: Synthetic peptide
  Seed: RMCSLMQGSTLPRRSG
RMYSLLQGSTLPRRSG

SEQ ID NO: 129214 - protein, 16 aa, Artificial Sequence
  Description of Artificial Sequence: Synthetic peptide
  Seed: RMCSLMQGSTLPRRSG
RMYSLLQGSTMPRRSG

SEQ ID NO: 129215 - protein, 16 aa, Artificial Sequence
  Description of Artificial Sequence: Synthetic peptide
  Seed: RMCSLMQGSTLPRRSG
RMYSLLQGSTNPRRSG

SEQ ID NO: 129216 - protein, 16 aa, Artificial Sequence
  Description of Artificial Sequence: Synthetic peptide
  Seed: RMCSLMQGSTLPRRSG
RMYSLLQGSTSPRRSG

SEQ ID NO: 129217 - protein, 16 aa, Artificial Sequence
  Description of Artificial Sequence: Synthetic peptide
  Seed: RMCSLMQGSTLPRRSG
RMYSLLQGSTTPRRSG

SEQ ID NO: 129218 - protein, 16 aa, Artificial Sequence
  Description of Artificial Sequence: Synthetic peptide
  Seed: RMCSLMQGSTLPRRSG
RMYSLLQGSTVPRRSG

SEQ ID NO: 129219 - protein, 16 aa, Artificial Sequence
  Description of Artificial Sequence: Synthetic peptide
  Seed: RMCSLMQGSTLPRRSG
RMYSLLQISTAPRRSG

SEQ ID NO: 129220 - protein, 16 aa, Artificial Sequence
  Description of Artificial Sequence: Synthetic peptide
  Seed: RMCSLMQGSTLPRRSG
RMYSLLQISTGPRRSG

SEQ ID NO: 129221 - protein, 16 aa, Artificial Sequence
  Description of Artificial Sequence: Synthetic peptide
  Seed: RMCSLMQGSTLPRRSG
RMYSLLQISTIPRRSG

SEQ ID NO: 129222 - protein, 16 aa, Artificial Sequence
  Description of Artificial Sequence: Synthetic peptide
  Seed: RMCSLMQGSTLPRRSG
RMYSLLQISTLPRRSG

SEQ ID NO: 129223 - protein, 16 aa, Artificial Sequence
  Description of Artificial Sequence: Synthetic peptide
  Seed: RMCSLMQGSTLPRRSG
RMYSLLQISTMPRRSG

SEQ ID NO: 129224 - protein, 16 aa, Artificial Sequence
  Description of Artificial Sequence: Synthetic peptide
  Seed: RMCSLMQGSTLPRRSG
RMYSLLQISTNPRRSG

SEQ ID NO: 129225 - protein, 16 aa, Artificial Sequence
  Description of Artificial Sequence: Synthetic peptide
  Seed: RMCSLMQGSTLPRRSG
RMYSLLQISTSPRRSG

SEQ ID NO: 129226 - protein, 16 aa, Artificial Sequence
  Description of Artificial Sequence: Synthetic peptide
  Seed: RMCSLMQGSTLPRRSG
RMYSLLQISTTPRRSG

SEQ ID NO: 129227 - protein, 16 aa, Artificial Sequence
  Description of Artificial Sequence: Synthetic peptide
  Seed: RMCSLMQGSTLPRRSG
RMYSLLQISTVPRRSG

SEQ ID NO: 129228 - protein, 16 aa, Artificial Sequence
  Description of Artificial Sequence: Synthetic peptide
  Seed: RMCSLMQGSTLPRRSG
RMYSLLQLSTAPRRSG

SEQ ID NO: 129229 - protein, 16 aa, Artificial Sequence
  Description of Artificial Sequence: Synthetic peptide
  Seed: RMCSLMQGSTLPRRSG
RMYSLLQLSTSPRRSG

SEQ ID NO: 129230 - protein, 16 aa, Artificial Sequence
  Description of Artificial Sequence: Synthetic peptide
  Seed: RMCSLMQGSTLPRRSG
RMYSLLQMSTAPRRSG

SEQ ID NO: 129231 - protein, 16 aa, Artificial Sequence
  Description of Artificial Sequence: Synthetic peptide
  Seed: RMCSLMQGSTLPRRSG
RMYSLLQNSTAPRRSG

SEQ ID NO: 129232 - protein, 16 aa, Artificial Sequence
  Description of Artificial Sequence: Synthetic peptide
  Seed: RMCSLMQGSTLPRRSG
RMYSLLQNSTIPRRSG

SEQ ID NO: 129233 - protein, 16 aa, Artificial Sequence
  Description of Artificial Sequence: Synthetic peptide
  Seed: RMCSLMQGSTLPRRSG
RMYSLLQNSTLPRRSG

SEQ ID NO: 129234 - protein, 16 aa, Artificial Sequence
  Description of Artificial Sequence: Synthetic peptide
  Seed: RMCSLMQGSTLPRRSG
RMYSLLQNSTMPRRSG

SEQ ID NO: 129235 - protein, 16 aa, Artificial Sequence
  Description of Artificial Sequence: Synthetic peptide
  Seed: RMCSLMQGSTLPRRSG
RMYSLLQNSTNPRRSG

SEQ ID NO: 129236 - protein, 16 aa, Artificial Sequence
  Description of Artificial Sequence: Synthetic peptide
  Seed: RMCSLMQGSTLPRRSG
RMYSLLQNSTSPRRSG

SEQ ID NO: 129237 - protein, 16 aa, Artificial Sequence
  Description of Artificial Sequence: Synthetic peptide
  Seed: RMCSLMQGSTLPRRSG
RMYSLLQNSTTPRRSG

SEQ ID NO: 129238 - protein, 16 aa, Artificial Sequence
  Description of Artificial Sequence: Synthetic peptide
  Seed: RMCSLMQGSTLPRRSG
RMYSLLQNSTVPRRSG

SEQ ID NO: 129239 - protein, 16 aa, Artificial Sequence
  Description of Artificial Sequence: Synthetic peptide
  Seed: RMCSLMQGSTLPRRSG
RMYSLLQPSTAPRRSG

SEQ ID NO: 129240 - protein, 16 aa, Artificial Sequence
  Description of Artificial Sequence: Synthetic peptide
  Seed: RMCSLMQGSTLPRRSG
RMYSLLQPSTGPRRSG

SEQ ID NO: 129241 - protein, 16 aa, Artificial Sequence
  Description of Artificial Sequence: Synthetic peptide
  Seed: RMCSLMQGSTLPRRSG
RMYSLLQPSTHPRRSG

SEQ ID NO: 129242 - protein, 16 aa, Artificial Sequence
  Description of Artificial Sequence: Synthetic peptide
  Seed: RMCSLMQGSTLPRRSG
RMYSLLQPSTIPRRSG

SEQ ID NO: 129243 - protein, 16 aa, Artificial Sequence
  Description of Artificial Sequence: Synthetic peptide
  Seed: RMCSLMQGSTLPRRSG
RMYSLLQPSTLPRRSG

SEQ ID NO: 129244 - protein, 16 aa, Artificial Sequence
  Description of Artificial Sequence: Synthetic peptide
  Seed: RMCSLMQGSTLPRRSG
RMYSLLQPSTMPRRSG

SEQ ID NO: 129245 - protein, 16 aa, Artificial Sequence
  Description of Artificial Sequence: Synthetic peptide
  Seed: RMCSLMQGSTLPRRSG
RMYSLLQPSTNPRRSG

SEQ ID NO: 129246 - protein, 16 aa, Artificial Sequence
  Description of Artificial Sequence: Synthetic peptide
  Seed: RMCSLMQGSTLPRRSG
RMYSLLQPSTPPRRSG

SEQ ID NO: 129247 - protein, 16 aa, Artificial Sequence
  Description of Artificial Sequence: Synthetic peptide
  Seed: RMCSLMQGSTLPRRSG
RMYSLLQPSTQPRRSG

SEQ ID NO: 129248 - protein, 16 aa, Artificial Sequence
  Description of Artificial Sequence: Synthetic peptide
  Seed: RMCSLMQGSTLPRRSG
RMYSLLQPSTSPRRSG

SEQ ID NO: 129249 - protein, 16 aa, Artificial Sequence
  Description of Artificial Sequence: Synthetic peptide
  Seed: RMCSLMQGSTLPRRSG
RMYSLLQPSTTPRRSG

SEQ ID NO: 129250 - protein, 16 aa, Artificial Sequence
  Description of Artificial Sequence: Synthetic peptide
  Seed: RMCSLMQGSTLPRRSG
RMYSLLQPSTVPRRSG

SEQ ID NO: 129251 - protein, 16 aa, Artificial Sequence
  Description of Artificial Sequence: Synthetic peptide
  Seed: RMCSLMQGSTLPRRSG
RMYSLLQSSTAPRRSG

SEQ ID NO: 129252 - protein, 16 aa, Artificial Sequence
  Description of Artificial Sequence: Synthetic peptide
  Seed: RMCSLMQGSTLPRRSG
RMYSLLQSSTCPRRSG

SEQ ID NO: 129253 - protein, 16 aa, Artificial Sequence
  Description of Artificial Sequence: Synthetic peptide
  Seed: RMCSLMQGSTLPRRSG
RMYSLLQSSTGPRRSG

SEQ ID NO: 129254 - protein, 16 aa, Artificial Sequence
  Description of Artificial Sequence: Synthetic peptide
  Seed: RMCSLMQGSTLPRRSG
RMYSLLQSSTHPRRSG

SEQ ID NO: 129255 - protein, 16 aa, Artificial Sequence
  Description of Artificial Sequence: Synthetic peptide
  Seed: RMCSLMQGSTLPRRSG
RMYSLLQSSTIPRRSG

SEQ ID NO: 129256 - protein, 16 aa, Artificial Sequence
  Description of Artificial Sequence: Synthetic peptide
  Seed: RMCSLMQGSTLPRRSG
RMYSLLQSSTLPRRSG

SEQ ID NO: 129257 - protein, 16 aa, Artificial Sequence
  Description of Artificial Sequence: Synthetic peptide
  Seed: RMCSLMQGSTLPRRSG
RMYSLLQSSTMPRRSG

SEQ ID NO: 129258 - protein, 16 aa, Artificial Sequence
  Description of Artificial Sequence: Synthetic peptide
  Seed: RMCSLMQGSTLPRRSG
RMYSLLQSSTNPRRSG

SEQ ID NO: 129259 - protein, 16 aa, Artificial Sequence
  Description of Artificial Sequence: Synthetic peptide
  Seed: RMCSLMQGSTLPRRSG
RMYSLLQSSTSPRRSG

SEQ ID NO: 129260 - protein, 16 aa, Artificial Sequence
  Description of Artificial Sequence: Synthetic peptide
  Seed: RMCSLMQGSTLPRRSG
RMYSLLQSSTTPRRSG

SEQ ID NO: 129261 - protein, 16 aa, Artificial Sequence
  Description of Artificial Sequence: Synthetic peptide
  Seed: RMCSLMQGSTLPRRSG
RMYSLLQSSTVPRRSG

SEQ ID NO: 129262 - protein, 16 aa, Artificial Sequence
  Description of Artificial Sequence: Synthetic peptide
  Seed: RMCSLMQGSTLPRRSG
RMYSLLQTSTAPRRSG

SEQ ID NO: 129263 - protein, 16 aa, Artificial Sequence
  Description of Artificial Sequence: Synthetic peptide
  Seed: RMCSLMQGSTLPRRSG
RMYSLLQTSTGPRRSG

SEQ ID NO: 129264 - protein, 16 aa, Artificial Sequence
  Description of Artificial Sequence: Synthetic peptide
  Seed: RMCSLMQGSTLPRRSG
RMYSLLQTSTHPRRSG

SEQ ID NO: 129265 - protein, 16 aa, Artificial Sequence
  Description of Artificial Sequence: Synthetic peptide
  Seed: RMCSLMQGSTLPRRSG
RMYSLLQTSTIPRRSG

SEQ ID NO: 129266 - protein, 16 aa, Artificial Sequence
  Description of Artificial Sequence: Synthetic peptide
  Seed: RMCSLMQGSTLPRRSG
RMYSLLQTSTLPRRSG

SEQ ID NO: 129267 - protein, 16 aa, Artificial Sequence
  Description of Artificial Sequence: Synthetic peptide
  Seed: RMCSLMQGSTLPRRSG
RMYSLLQTSTMPRRSG

SEQ ID NO: 129268 - protein, 16 aa, Artificial Sequence
  Description of Artificial Sequence: Synthetic peptide
  Seed: RMCSLMQGSTLPRRSG
RMYSLLQTSTNPRRSG

SEQ ID NO: 129269 - protein, 16 aa, Artificial Sequence
  Description of Artificial Sequence: Synthetic peptide
  Seed: RMCSLMQGSTLPRRSG
RMYSLLQTSTSPRRSG

SEQ ID NO: 129270 - protein, 16 aa, Artificial Sequence
  Description of Artificial Sequence: Synthetic peptide
  Seed: RMCSLMQGSTLPRRSG
RMYSLLQTSTTPRRSG

SEQ ID NO: 129271 - protein, 16 aa, Artificial Sequence
  Description of Artificial Sequence: Synthetic peptide
  Seed: RMCSLMQGSTLPRRSG
RMYSLLQTSTVPRRSG

SEQ ID NO: 129272 - protein, 16 aa, Artificial Sequence
  Description of Artificial Sequence: Synthetic peptide
  Seed: RMCSLMQGSTLPRRSG
RMYSLLQVSTAPRRSG

SEQ ID NO: 129273 - protein, 16 aa, Artificial Sequence
  Description of Artificial Sequence: Synthetic peptide
  Seed: RMCSLMQGSTLPRRSG
RMYSLLQVSTGPRRSG

SEQ ID NO: 129274 - protein, 16 aa, Artificial Sequence
  Description of Artificial Sequence: Synthetic peptide
  Seed: RMCSLMQGSTLPRRSG
RMYSLLQVSTHPRRSG

SEQ ID NO: 129275 - protein, 16 aa, Artificial Sequence
  Description of Artificial Sequence: Synthetic peptide
  Seed: RMCSLMQGSTLPRRSG
RMYSLLQVSTIPRRSG

SEQ ID NO: 129276 - protein, 16 aa, Artificial Sequence
  Description of Artificial Sequence: Synthetic peptide
  Seed: RMCSLMQGSTLPRRSG
RMYSLLQVSTLPRRSG

SEQ ID NO: 129277 - protein, 16 aa, Artificial Sequence
  Description of Artificial Sequence: Synthetic peptide
  Seed: RMCSLMQGSTLPRRSG
RMYSLLQVSTMPRRSG

SEQ ID NO: 129278 - protein, 16 aa, Artificial Sequence
  Description of Artificial Sequence: Synthetic peptide
  Seed: RMCSLMQGSTLPRRSG
RMYSLLQVSTNPRRSG

SEQ ID NO: 129279 - protein, 16 aa, Artificial Sequence
  Description of Artificial Sequence: Synthetic peptide
  Seed: RMCSLMQGSTLPRRSG
RMYSLLQVSTSPRRSG

SEQ ID NO: 129280 - protein, 16 aa, Artificial Sequence
  Description of Artificial Sequence: Synthetic peptide
  Seed: RMCSLMQGSTLPRRSG
RMYSLLQVSTTPRRSG

SEQ ID NO: 129281 - protein, 16 aa, Artificial Sequence
  Description of Artificial Sequence: Synthetic peptide
  Seed: RMCSLMQGSTLPRRSG
RMYSLLQVSTVPRRSG

SEQ ID NO: 129282 - protein, 16 aa, Artificial Sequence
  Description of Artificial Sequence: Synthetic peptide
  Seed: RMCSLMQGSTLPRRSG
RMYSLMQASTAPRRSG

SEQ ID NO: 129283 - protein, 16 aa, Artificial Sequence
  Description of Artificial Sequence: Synthetic peptide
  Seed: RMCSLMQGSTLPRRSG
RMYSLMQASTCPRRSG

SEQ ID NO: 129284 - protein, 16 aa, Artificial Sequence
  Description of Artificial Sequence: Synthetic peptide
  Seed: RMCSLMQGSTLPRRSG
RMYSLMQASTFPRRSG

SEQ ID NO: 129285 - protein, 16 aa, Artificial Sequence
  Description of Artificial Sequence: Synthetic peptide
  Seed: RMCSLMQGSTLPRRSG
RMYSLMQASTGPRRSG

SEQ ID NO: 129286 - protein, 16 aa, Artificial Sequence
  Description of Artificial Sequence: Synthetic peptide
  Seed: RMCSLMQGSTLPRRSG
RMYSLMQASTHPRRSG

SEQ ID NO: 129287 - protein, 16 aa, Artificial Sequence
  Description of Artificial Sequence: Synthetic peptide
  Seed: RMCSLMQGSTLPRRSG
RMYSLMQASTIPRRSG

SEQ ID NO: 129288 - protein, 16 aa, Artificial Sequence
  Description of Artificial Sequence: Synthetic peptide
  Seed: RMCSLMQGSTLPRRSG
RMYSLMQASTLPRRSG

SEQ ID NO: 129289 - protein, 16 aa, Artificial Sequence
  Description of Artificial Sequence: Synthetic peptide
  Seed: RMCSLMQGSTLPRRSG
RMYSLMQASTMPRRSG

SEQ ID NO: 129290 - protein, 16 aa, Artificial Sequence
  Description of Artificial Sequence: Synthetic peptide
  Seed: RMCSLMQGSTLPRRSG
RMYSLMQASTNPRRSG

SEQ ID NO: 129291 - protein, 16 aa, Artificial Sequence
  Description of Artificial Sequence: Synthetic peptide
  Seed: RMCSLMQGSTLPRRSG
RMYSLMQASTPPRRSG

SEQ ID NO: 129292 - protein, 16 aa, Artificial Sequence
  Description of Artificial Sequence: Synthetic peptide
  Seed: RMCSLMQGSTLPRRSG
RMYSLMQASTQPRRSG

SEQ ID NO: 129293 - protein, 16 aa, Artificial Sequence
  Description of Artificial Sequence: Synthetic peptide
  Seed: RMCSLMQGSTLPRRSG
RMYSLMQASTSPRRSG

SEQ ID NO: 129294 - protein, 16 aa, Artificial Sequence
  Description of Artificial Sequence: Synthetic peptide
  Seed: RMCSLMQGSTLPRRSG
RMYSLMQASTTPRRSG

SEQ ID NO: 129295 - protein, 16 aa, Artificial Sequence
  Description of Artificial Sequence: Synthetic peptide
  Seed: RMCSLMQGSTLPRRSG
RMYSLMQASTVPRRSG

SEQ ID NO: 129296 - protein, 16 aa, Artificial Sequence
  Description of Artificial Sequence: Synthetic peptide
  Seed: RMCSLMQGSTLPRRSG
RMYSLMQGSTAPRRSG

SEQ ID NO: 129297 - protein, 16 aa, Artificial Sequence
  Description of Artificial Sequence: Synthetic peptide
  Seed: RMCSLMQGSTLPRRSG
RMYSLMQGSTFPRRSG

SEQ ID NO: 129298 - protein, 16 aa, Artificial Sequence
  Description of Artificial Sequence: Synthetic peptide
  Seed: RMCSLMQGSTLPRRSG
RMYSLMQGSTGPRRSG

SEQ ID NO: 129299 - protein, 16 aa, Artificial Sequence
  Description of Artificial Sequence: Synthetic peptide
  Seed: RMCSLMQGSTLPRRSG
RMYSLMQGSTIPRRSG

SEQ ID NO: 129300 - protein, 16 aa, Artificial Sequence
  Description of Artificial Sequence: Synthetic peptide
  Seed: RMCSLMQGSTLPRRSG
RMYSLMQGSTLPRRSG

SEQ ID NO: 129301 - protein, 16 aa, Artificial Sequence
  Description of Artificial Sequence: Synthetic peptide
  Seed: RMCSLMQGSTLPRRSG
RMYSLMQGSTMPRRSG

SEQ ID NO: 129302 - protein, 16 aa, Artificial Sequence
  Description of Artificial Sequence: Synthetic peptide
  Seed: RMCSLMQGSTLPRRSG
RMYSLMQGSTNPRRSG

SEQ ID NO: 129303 - protein, 16 aa, Artificial Sequence
  Description of Artificial Sequence: Synthetic peptide
  Seed: RMCSLMQGSTLPRRSG
RMYSLMQGSTSPRRSG

SEQ ID NO: 129304 - protein, 16 aa, Artificial Sequence
  Description of Artificial Sequence: Synthetic peptide
  Seed: RMCSLMQGSTLPRRSG
RMYSLMQGSTTPRRSG

SEQ ID NO: 129305 - protein, 16 aa, Artificial Sequence
  Description of Artificial Sequence: Synthetic peptide
  Seed: RMCSLMQGSTLPRRSG
RMYSLMQGSTVPRRSG

SEQ ID NO: 129306 - protein, 16 aa, Artificial Sequence
  Description of Artificial Sequence: Synthetic peptide
  Seed: RMCSLMQGSTLPRRSG
RMYSLMQISTAPRRSG

SEQ ID NO: 129307 - protein, 16 aa, Artificial Sequence
  Description of Artificial Sequence: Synthetic peptide
  Seed: RMCSLMQGSTLPRRSG
RMYSLMQISTGPRRSG

SEQ ID NO: 129308 - protein, 16 aa, Artificial Sequence
  Description of Artificial Sequence: Synthetic peptide
  Seed: RMCSLMQGSTLPRRSG
RMYSLMQISTHPRRSG

SEQ ID NO: 129309 - protein, 16 aa, Artificial Sequence
  Description of Artificial Sequence: Synthetic peptide
  Seed: RMCSLMQGSTLPRRSG
RMYSLMQISTIPRRSG

SEQ ID NO: 129310 - protein, 16 aa, Artificial Sequence
  Description of Artificial Sequence: Synthetic peptide
  Seed: RMCSLMQGSTLPRRSG
RMYSLMQISTLPRRSG

SEQ ID NO: 129311 - protein, 16 aa, Artificial Sequence
  Description of Artificial Sequence: Synthetic peptide
  Seed: RMCSLMQGSTLPRRSG
RMYSLMQISTMPRRSG

SEQ ID NO: 129312 - protein, 16 aa, Artificial Sequence
  Description of Artificial Sequence: Synthetic peptide
  Seed: RMCSLMQGSTLPRRSG
RMYSLMQISTNPRRSG

SEQ ID NO: 129313 - protein, 16 aa, Artificial Sequence
  Description of Artificial Sequence: Synthetic peptide
  Seed: RMCSLMQGSTLPRRSG
RMYSLMQISTSPRRSG

SEQ ID NO: 129314 - protein, 16 aa, Artificial Sequence
  Description of Artificial Sequence: Synthetic peptide
  Seed: RMCSLMQGSTLPRRSG
RMYSLMQISTTPRRSG

SEQ ID NO: 129315 - protein, 16 aa, Artificial Sequence
  Description of Artificial Sequence: Synthetic peptide
  Seed: RMCSLMQGSTLPRRSG
RMYSLMQISTVPRRSG

SEQ ID NO: 129316 - protein, 16 aa, Artificial Sequence
  Description of Artificial Sequence: Synthetic peptide
  Seed: RMCSLMQGSTLPRRSG
RMYSLMQLSTAPRRSG

SEQ ID NO: 129317 - protein, 16 aa, Artificial Sequence
  Description of Artificial Sequence: Synthetic peptide
  Seed: RMCSLMQGSTLPRRSG
RMYSLMQLSTNPRRSG

SEQ ID NO: 129318 - protein, 16 aa, Artificial Sequence
  Description of Artificial Sequence: Synthetic peptide
  Seed: RMCSLMQGSTLPRRSG
RMYSLMQLSTSPRRSG

SEQ ID NO: 129319 - protein, 16 aa, Artificial Sequence
  Description of Artificial Sequence: Synthetic peptide
  Seed: RMCSLMQGSTLPRRSG
RMYSLMQLSTTPRRSG

SEQ ID NO: 129320 - protein, 16 aa, Artificial Sequence
  Description of Artificial Sequence: Synthetic peptide
  Seed: RMCSLMQGSTLPRRSG
RMYSLMQLSTVPRRSG

SEQ ID NO: 129321 - protein, 16 aa, Artificial Sequence
  Description of Artificial Sequence: Synthetic peptide
  Seed: RMCSLMQGSTLPRRSG
RMYSLMQMSTAPRRSG

SEQ ID NO: 129322 - protein, 16 aa, Artificial Sequence
  Description of Artificial Sequence: Synthetic peptide
  Seed: RMCSLMQGSTLPRRSG
RMYSLMQMSTSPRRSG

SEQ ID NO: 129323 - protein, 16 aa, Artificial Sequence
  Description of Artificial Sequence: Synthetic peptide
  Seed: RMCSLMQGSTLPRRSG
RMYSLMQNSTAPRRSG

SEQ ID NO: 129324 - protein, 16 aa, Artificial Sequence
  Description of Artificial Sequence: Synthetic peptide
  Seed: RMCSLMQGSTLPRRSG
RMYSLMQNSTIPRRSG

SEQ ID NO: 129325 - protein, 16 aa, Artificial Sequence
  Description of Artificial Sequence: Synthetic peptide
  Seed: RMCSLMQGSTLPRRSG
RMYSLMQNSTLPRRSG

SEQ ID NO: 129326 - protein, 16 aa, Artificial Sequence
  Description of Artificial Sequence: Synthetic peptide
  Seed: RMCSLMQGSTLPRRSG
RMYSLMQNSTMPRRSG

SEQ ID NO: 129327 - protein, 16 aa, Artificial Sequence
  Description of Artificial Sequence: Synthetic peptide
  Seed: RMCSLMQGSTLPRRSG
RMYSLMQNSTNPRRSG

SEQ ID NO: 129328 - protein, 16 aa, Artificial Sequence
  Description of Artificial Sequence: Synthetic peptide
  Seed: RMCSLMQGSTLPRRSG
RMYSLMQNSTSPRRSG

SEQ ID NO: 129329 - protein, 16 aa, Artificial Sequence
  Description of Artificial Sequence: Synthetic peptide
  Seed: RMCSLMQGSTLPRRSG
RMYSLMQNSTTPRRSG

SEQ ID NO: 129330 - protein, 16 aa, Artificial Sequence
  Description of Artificial Sequence: Synthetic peptide
  Seed: RMCSLMQGSTLPRRSG
RMYSLMQNSTVPRRSG

SEQ ID NO: 129331 - protein, 16 aa, Artificial Sequence
  Description of Artificial Sequence: Synthetic peptide
  Seed: RMCSLMQGSTLPRRSG
RMYSLMQPSTAPRRSG

SEQ ID NO: 129332 - protein, 16 aa, Artificial Sequence
  Description of Artificial Sequence: Synthetic peptide
  Seed: RMCSLMQGSTLPRRSG
RMYSLMQPSTGPRRSG

SEQ ID NO: 129333 - protein, 16 aa, Artificial Sequence
  Description of Artificial Sequence: Synthetic peptide
  Seed: RMCSLMQGSTLPRRSG
RMYSLMQPSTHPRRSG

SEQ ID NO: 129334 - protein, 16 aa, Artificial Sequence
  Description of Artificial Sequence: Synthetic peptide
  Seed: RMCSLMQGSTLPRRSG
RMYSLMQPSTIPRRSG

SEQ ID NO: 129335 - protein, 16 aa, Artificial Sequence
  Description of Artificial Sequence: Synthetic peptide
  Seed: RMCSLMQGSTLPRRSG
RMYSLMQPSTLPRRSG

SEQ ID NO: 129336 - protein, 16 aa, Artificial Sequence
  Description of Artificial Sequence: Synthetic peptide
  Seed: RMCSLMQGSTLPRRSG
RMYSLMQPSTMPRRSG

SEQ ID NO: 129337 - protein, 16 aa, Artificial Sequence
  Description of Artificial Sequence: Synthetic peptide
  Seed: RMCSLMQGSTLPRRSG
RMYSLMQPSTNPRRSG

SEQ ID NO: 129338 - protein, 16 aa, Artificial Sequence
  Description of Artificial Sequence: Synthetic peptide
  Seed: RMCSLMQGSTLPRRSG
RMYSLMQPSTPPRRSG

SEQ ID NO: 129339 - protein, 16 aa, Artificial Sequence
  Description of Artificial Sequence: Synthetic peptide
  Seed: RMCSLMQGSTLPRRSG
RMYSLMQPSTQPRRSG

SEQ ID NO: 129340 - protein, 16 aa, Artificial Sequence
  Description of Artificial Sequence: Synthetic peptide
  Seed: RMCSLMQGSTLPRRSG
RMYSLMQPSTSPRRSG

SEQ ID NO: 129341 - protein, 16 aa, Artificial Sequence
  Description of Artificial Sequence: Synthetic peptide
  Seed: RMCSLMQGSTLPRRSG
RMYSLMQPSTTPRRSG

SEQ ID NO: 129342 - protein, 16 aa, Artificial Sequence
  Description of Artificial Sequence: Synthetic peptide
  Seed: RMCSLMQGSTLPRRSG
RMYSLMQPSTVPRRSG

SEQ ID NO: 129343 - protein, 16 aa, Artificial Sequence
  Description of Artificial Sequence: Synthetic peptide
  Seed: RMCSLMQGSTLPRRSG
RMYSLMQSSTAPRRSG

SEQ ID NO: 129344 - protein, 16 aa, Artificial Sequence
  Description of Artificial Sequence: Synthetic peptide
  Seed: RMCSLMQGSTLPRRSG
RMYSLMQSSTGPRRSG

SEQ ID NO: 129345 - protein, 16 aa, Artificial Sequence
  Description of Artificial Sequence: Synthetic peptide
  Seed: RMCSLMQGSTLPRRSG
RMYSLMQSSTHPRRSG

SEQ ID NO: 129346 - protein, 16 aa, Artificial Sequence
  Description of Artificial Sequence: Synthetic peptide
  Seed: RMCSLMQGSTLPRRSG
RMYSLMQSSTIPRRSG

SEQ ID NO: 129347 - protein, 16 aa, Artificial Sequence
  Description of Artificial Sequence: Synthetic peptide
  Seed: RMCSLMQGSTLPRRSG
RMYSLMQSSTLPRRSG

SEQ ID NO: 129348 - protein, 16 aa, Artificial Sequence
  Description of Artificial Sequence: Synthetic peptide
  Seed: RMCSLMQGSTLPRRSG
RMYSLMQSSTMPRRSG

SEQ ID NO: 129349 - protein, 16 aa, Artificial Sequence
  Description of Artificial Sequence: Synthetic peptide
  Seed: RMCSLMQGSTLPRRSG
RMYSLMQSSTNPRRSG

SEQ ID NO: 129350 - protein, 16 aa, Artificial Sequence
  Description of Artificial Sequence: Synthetic peptide
  Seed: RMCSLMQGSTLPRRSG
RMYSLMQSSTQPRRSG

SEQ ID NO: 129351 - protein, 16 aa, Artificial Sequence
  Description of Artificial Sequence: Synthetic peptide
  Seed: RMCSLMQGSTLPRRSG
RMYSLMQSSTSPRRSG

SEQ ID NO: 129352 - protein, 16 aa, Artificial Sequence
  Description of Artificial Sequence: Synthetic peptide
  Seed: RMCSLMQGSTLPRRSG
RMYSLMQSSTTPRRSG

SEQ ID NO: 129353 - protein, 16 aa, Artificial Sequence
  Description of Artificial Sequence: Synthetic peptide
  Seed: RMCSLMQGSTLPRRSG
RMYSLMQSSTVPRRSG

SEQ ID NO: 129354 - protein, 16 aa, Artificial Sequence
  Description of Artificial Sequence: Synthetic peptide
  Seed: RMCSLMQGSTLPRRSG
RMYSLMQTSTAPRRSG

SEQ ID NO: 129355 - protein, 16 aa, Artificial Sequence
  Description of Artificial Sequence: Synthetic peptide
  Seed: RMCSLMQGSTLPRRSG
RMYSLMQTSTHPRRSG

SEQ ID NO: 129356 - protein, 16 aa, Artificial Sequence
  Description of Artificial Sequence: Synthetic peptide
  Seed: RMCSLMQGSTLPRRSG
RMYSLMQTSTIPRRSG

SEQ ID NO: 129357 - protein, 16 aa, Artificial Sequence
  Description of Artificial Sequence: Synthetic peptide
  Seed: RMCSLMQGSTLPRRSG
RMYSLMQTSTLPRRSG

SEQ ID NO: 129358 - protein, 16 aa, Artificial Sequence
  Description of Artificial Sequence: Synthetic peptide
  Seed: RMCSLMQGSTLPRRSG
RMYSLMQTSTMPRRSG

SEQ ID NO: 129359 - protein, 16 aa, Artificial Sequence
  Description of Artificial Sequence: Synthetic peptide
  Seed: RMCSLMQGSTLPRRSG
RMYSLMQTSTNPRRSG

SEQ ID NO: 129360 - protein, 16 aa, Artificial Sequence
  Description of Artificial Sequence: Synthetic peptide
  Seed: RMCSLMQGSTLPRRSG
RMYSLMQTSTSPRRSG

SEQ ID NO: 129361 - protein, 16 aa, Artificial Sequence
  Description of Artificial Sequence: Synthetic peptide
  Seed: RMCSLMQGSTLPRRSG
RMYSLMQTSTTPRRSG

SEQ ID NO: 129362 - protein, 16 aa, Artificial Sequence
  Description of Artificial Sequence: Synthetic peptide
  Seed: RMCSLMQGSTLPRRSG
RMYSLMQTSTVPRRSG

SEQ ID NO: 129363 - protein, 16 aa, Artificial Sequence
  Description of Artificial Sequence: Synthetic peptide
  Seed: RMCSLMQGSTLPRRSG
RMYSLMQVSTAPRRSG

SEQ ID NO: 129364 - protein, 16 aa, Artificial Sequence
  Description of Artificial Sequence: Synthetic peptide
  Seed: RMCSLMQGSTLPRRSG
RMYSLMQVSTGPRRSG

SEQ ID NO: 129365 - protein, 16 aa, Artificial Sequence
  Description of Artificial Sequence: Synthetic peptide
  Seed: RMCSLMQGSTLPRRSG
RMYSLMQVSTHPRRSG

SEQ ID NO: 129366 - protein, 16 aa, Artificial Sequence
  Description of Artificial Sequence: Synthetic peptide
  Seed: RMCSLMQGSTLPRRSG
RMYSLMQVSTIPRRSG

SEQ ID NO: 129367 - protein, 16 aa, Artificial Sequence
  Description of Artificial Sequence: Synthetic peptide
  Seed: RMCSLMQGSTLPRRSG
RMYSLMQVSTLPRRSG

SEQ ID NO: 129368 - protein, 16 aa, Artificial Sequence
  Description of Artificial Sequence: Synthetic peptide
  Seed: RMCSLMQGSTLPRRSG
RMYSLMQVSTMPRRSG

SEQ ID NO: 129369 - protein, 16 aa, Artificial Sequence
  Description of Artificial Sequence: Synthetic peptide
  Seed: RMCSLMQGSTLPRRSG
RMYSLMQVSTNPRRSG

SEQ ID NO: 129370 - protein, 16 aa, Artificial Sequence
  Description of Artificial Sequence: Synthetic peptide
  Seed: RMCSLMQGSTLPRRSG
RMYSLMQVSTQPRRSG

SEQ ID NO: 129371 - protein, 16 aa, Artificial Sequence
  Description of Artificial Sequence: Synthetic peptide
  Seed: RMCSLMQGSTLPRRSG
RMYSLMQVSTSPRRSG

SEQ ID NO: 129372 - protein, 16 aa, Artificial Sequence
  Description of Artificial Sequence: Synthetic peptide
  Seed: RMCSLMQGSTLPRRSG
RMYSLMQVSTTPRRSG

SEQ ID NO: 129373 - protein, 16 aa, Artificial Sequence
  Description of Artificial Sequence: Synthetic peptide
  Seed: RMCSLMQGSTLPRRSG
RMYSLMQVSTVPRRSG

SEQ ID NO: 129374 - protein, 16 aa, Artificial Sequence
  Description of Artificial Sequence: Synthetic peptide
  Seed: RMCSLMQGSTLPRRSG
RMYSLNQASTIPRRSG

SEQ ID NO: 129375 - protein, 16 aa, Artificial Sequence
  Description of Artificial Sequence: Synthetic peptide
  Seed: RMCSLMQGSTLPRRSG
RMYSLNQASTLPRRSG

SEQ ID NO: 129376 - protein, 16 aa, Artificial Sequence
  Description of Artificial Sequence: Synthetic peptide
  Seed: RMCSLMQGSTLPRRSG
RMYSLNQASTVPRRSG

SEQ ID NO: 129377 - protein, 16 aa, Artificial Sequence
  Description of Artificial Sequence: Synthetic peptide
  Seed: RMCSLMQGSTLPRRSG
RMYSLQQASTAPRRSG

SEQ ID NO: 129378 - protein, 16 aa, Artificial Sequence
  Description of Artificial Sequence: Synthetic peptide
  Seed: RMCSLMQGSTLPRRSG
RMYSLQQASTIPRRSG

SEQ ID NO: 129379 - protein, 16 aa, Artificial Sequence
  Description of Artificial Sequence: Synthetic peptide
  Seed: RMCSLMQGSTLPRRSG
RMYSLQQASTLPRRSG

SEQ ID NO: 129380 - protein, 16 aa, Artificial Sequence
  Description of Artificial Sequence: Synthetic peptide
  Seed: RMCSLMQGSTLPRRSG
RMYSLQQASTMPRRSG

SEQ ID NO: 129381 - protein, 16 aa, Artificial Sequence
  Description of Artificial Sequence: Synthetic peptide
  Seed: RMCSLMQGSTLPRRSG
RMYSLQQASTSPRRSG

SEQ ID NO: 129382 - protein, 16 aa, Artificial Sequence
  Description of Artificial Sequence: Synthetic peptide
  Seed: RMCSLMQGSTLPRRSG
RMYSLQQASTTPRRSG

SEQ ID NO: 129383 - protein, 16 aa, Artificial Sequence
  Description of Artificial Sequence: Synthetic peptide
  Seed: RMCSLMQGSTLPRRSG
RMYSLQQASTVPRRSG

SEQ ID NO: 129384 - protein, 16 aa, Artificial Sequence
  Description of Artificial Sequence: Synthetic peptide
  Seed: RMCSLMQGSTLPRRSG
RMYSLQQGSTAPRRSG

SEQ ID NO: 129385 - protein, 16 aa, Artificial Sequence
  Description of Artificial Sequence: Synthetic peptide
  Seed: RMCSLMQGSTLPRRSG
RMYSLQQGSTIPRRSG

SEQ ID NO: 129386 - protein, 16 aa, Artificial Sequence
  Description of Artificial Sequence: Synthetic peptide
  Seed: RMCSLMQGSTLPRRSG
RMYSLQQGSTLPRRSG

SEQ ID NO: 129387 - protein, 16 aa, Artificial Sequence
  Description of Artificial Sequence: Synthetic peptide
  Seed: RMCSLMQGSTLPRRSG
RMYSLQQGSTMPRRSG

SEQ ID NO: 129388 - protein, 16 aa, Artificial Sequence
  Description of Artificial Sequence: Synthetic peptide
  Seed: RMCSLMQGSTLPRRSG
RMYSLQQGSTVPRRSG

SEQ ID NO: 129389 - protein, 16 aa, Artificial Sequence
  Description of Artificial Sequence: Synthetic peptide
  Seed: RMCSLMQGSTLPRRSG
RMYSLQQPSTIPRRSG

SEQ ID NO: 129390 - protein, 16 aa, Artificial Sequence
  Description of Artificial Sequence: Synthetic peptide
  Seed: RMCSLMQGSTLPRRSG
RMYSLQQPSTLPRRSG

SEQ ID NO: 129391 - protein, 16 aa, Artificial Sequence
  Description of Artificial Sequence: Synthetic peptide
  Seed: RMCSLMQGSTLPRRSG
RMYSLQQPSTVPRRSG

SEQ ID NO: 129392 - protein, 16 aa, Artificial Sequence
  Description of Artificial Sequence: Synthetic peptide
  Seed: RMCSLMQGSTLPRRSG
RMYSLQQSSTAPRRSG

SEQ ID NO: 129393 - protein, 16 aa, Artificial Sequence
  Description of Artificial Sequence: Synthetic peptide
  Seed: RMCSLMQGSTLPRRSG
RMYSLQQSSTIPRRSG

SEQ ID NO: 129394 - protein, 16 aa, Artificial Sequence
  Description of Artificial Sequence: Synthetic peptide
  Seed: RMCSLMQGSTLPRRSG
RMYSLQQSSTLPRRSG

SEQ ID NO: 129395 - protein, 16 aa, Artificial Sequence
  Description of Artificial Sequence: Synthetic peptide
  Seed: RMCSLMQGSTLPRRSG
RMYSLQQSSTVPRRSG

SEQ ID NO: 129396 - protein, 16 aa, Artificial Sequence
  Description of Artificial Sequence: Synthetic peptide
  Seed: RMCSLMQGSTLPRRSG
RMYSLQQVSTAPRRSG

SEQ ID NO: 129397 - protein, 16 aa, Artificial Sequence
  Description of Artificial Sequence: Synthetic peptide
  Seed: RMCSLMQGSTLPRRSG
RMYSLSQASTAPRRSG

SEQ ID NO: 129398 - protein, 16 aa, Artificial Sequence
  Description of Artificial Sequence: Synthetic peptide
  Seed: RMCSLMQGSTLPRRSG
RMYSLSQASTIPRRSG

SEQ ID NO: 129399 - protein, 16 aa, Artificial Sequence
  Description of Artificial Sequence: Synthetic peptide
  Seed: RMCSLMQGSTLPRRSG
RMYSLSQASTLPRRSG

SEQ ID NO: 129400 - protein, 16 aa, Artificial Sequence
  Description of Artificial Sequence: Synthetic peptide
  Seed: RMCSLMQGSTLPRRSG
RMYSLSQASTVPRRSG

SEQ ID NO: 129401 - protein, 16 aa, Artificial Sequence
  Description of Artificial Sequence: Synthetic peptide
  Seed: RMCSLMQGSTLPRRSG
RMYSLSQGSTIPRRSG

SEQ ID NO: 129402 - protein, 16 aa, Artificial Sequence
  Description of Artificial Sequence: Synthetic peptide
  Seed: RMCSLMQGSTLPRRSG
RMYSLSQGSTLPRRSG

SEQ ID NO: 129403 - protein, 16 aa, Artificial Sequence
  Description of Artificial Sequence: Synthetic peptide
  Seed: RMCSLMQGSTLPRRSG
RMYSLSQGSTVPRRSG

SEQ ID NO: 129404 - protein, 16 aa, Artificial Sequence
  Description of Artificial Sequence: Synthetic peptide
  Seed: RMCSLMQGSTLPRRSG
RMYSLSQSSTIPRRSG

SEQ ID NO: 129405 - protein, 16 aa, Artificial Sequence
  Description of Artificial Sequence: Synthetic peptide
  Seed: RMCSLMQGSTLPRRSG
RMYSLSQSSTLPRRSG

SEQ ID NO: 129406 - protein, 16 aa, Artificial Sequence
  Description of Artificial Sequence: Synthetic peptide
  Seed: RMCSLMQGSTLPRRSG
RMYSLSQSSTVPRRSG

SEQ ID NO: 129407 - protein, 16 aa, Artificial Sequence
  Description of Artificial Sequence: Synthetic peptide
  Seed: RMCSLMQGSTLPRRSG
RMYSLTQASTLPRRSG

SEQ ID NO: 129408 - protein, 16 aa, Artificial Sequence
  Description of Artificial Sequence: Synthetic peptide
  Seed: RMCSLMQGSTLPRRSG
RMYSLTQASTVPRRSG

SEQ ID NO: 129409 - protein, 16 aa, Artificial Sequence
  Description of Artificial Sequence: Synthetic peptide
  Seed: RMCSLMQGSTLPRRSG
RMYSLVQASTAPRRSG

SEQ ID NO: 129410 - protein, 16 aa, Artificial Sequence
  Description of Artificial Sequence: Synthetic peptide
  Seed: RMCSLMQGSTLPRRSG
RMYSLVQASTIPRRSG

SEQ ID NO: 129411 - protein, 16 aa, Artificial Sequence
  Description of Artificial Sequence: Synthetic peptide
  Seed: RMCSLMQGSTLPRRSG
RMYSLVQASTLPRRSG

SEQ ID NO: 129412 - protein, 16 aa, Artificial Sequence
  Description of Artificial Sequence: Synthetic peptide
  Seed: RMCSLMQGSTLPRRSG
RMYSLVQASTMPRRSG

SEQ ID NO: 129413 - protein, 16 aa, Artificial Sequence
  Description of Artificial Sequence: Synthetic peptide
  Seed: RMCSLMQGSTLPRRSG
RMYSLVQASTNPRRSG

SEQ ID NO: 129414 - protein, 16 aa, Artificial Sequence
  Description of Artificial Sequence: Synthetic peptide
  Seed: RMCSLMQGSTLPRRSG
RMYSLVQASTSPRRSG

SEQ ID NO: 129415 - protein, 16 aa, Artificial Sequence
  Description of Artificial Sequence: Synthetic peptide
  Seed: RMCSLMQGSTLPRRSG
RMYSLVQASTTPRRSG

SEQ ID NO: 129416 - protein, 16 aa, Artificial Sequence
  Description of Artificial Sequence: Synthetic peptide
  Seed: RMCSLMQGSTLPRRSG
RMYSLVQASTVPRRSG

SEQ ID NO: 129417 - protein, 16 aa, Artificial Sequence
  Description of Artificial Sequence: Synthetic peptide
  Seed: RMCSLMQGSTLPRRSG
RMYSLVQGSTAPRRSG

SEQ ID NO: 129418 - protein, 16 aa, Artificial Sequence
  Description of Artificial Sequence: Synthetic peptide
  Seed: RMCSLMQGSTLPRRSG
RMYSLVQGSTIPRRSG

SEQ ID NO: 129419 - protein, 16 aa, Artificial Sequence
  Description of Artificial Sequence: Synthetic peptide
  Seed: RMCSLMQGSTLPRRSG
RMYSLVQGSTLPRRSG

SEQ ID NO: 129420 - protein, 16 aa, Artificial Sequence
  Description of Artificial Sequence: Synthetic peptide
  Seed: RMCSLMQGSTLPRRSG
RMYSLVQGSTMPRRSG

SEQ ID NO: 129421 - protein, 16 aa, Artificial Sequence
  Description of Artificial Sequence: Synthetic peptide
  Seed: RMCSLMQGSTLPRRSG
RMYSLVQGSTVPRRSG

SEQ ID NO: 129422 - protein, 16 aa, Artificial Sequence
  Description of Artificial Sequence: Synthetic peptide
  Seed: RMCSLMQGSTLPRRSG
RMYSLVQISTAPRRSG

SEQ ID NO: 129423 - protein, 16 aa, Artificial Sequence
  Description of Artificial Sequence: Synthetic peptide
  Seed: RMCSLMQGSTLPRRSG
RMYSLVQPSTAPRRSG

SEQ ID NO: 129424 - protein, 16 aa, Artificial Sequence
  Description of Artificial Sequence: Synthetic peptide
  Seed: RMCSLMQGSTLPRRSG
RMYSLVQPSTIPRRSG

SEQ ID NO: 129425 - protein, 16 aa, Artificial Sequence
  Description of Artificial Sequence: Synthetic peptide
  Seed: RMCSLMQGSTLPRRSG
RMYSLVQPSTLPRRSG

SEQ ID NO: 129426 - protein, 16 aa, Artificial Sequence
  Description of Artificial Sequence: Synthetic peptide
  Seed: RMCSLMQGSTLPRRSG
RMYSLVQPSTNPRRSG

SEQ ID NO: 129427 - protein, 16 aa, Artificial Sequence
  Description of Artificial Sequence: Synthetic peptide
  Seed: RMCSLMQGSTLPRRSG
RMYSLVQPSTSPRRSG

SEQ ID NO: 129428 - protein, 16 aa, Artificial Sequence
  Description of Artificial Sequence: Synthetic peptide
  Seed: RMCSLMQGSTLPRRSG
RMYSLVQPSTTPRRSG

SEQ ID NO: 129429 - protein, 16 aa, Artificial Sequence
  Description of Artificial Sequence: Synthetic peptide
  Seed: RMCSLMQGSTLPRRSG
RMYSLVQPSTVPRRSG

SEQ ID NO: 129430 - protein, 16 aa, Artificial Sequence
  Description of Artificial Sequence: Synthetic peptide
  Seed: RMCSLMQGSTLPRRSG
RMYSLVQSSTAPRRSG

SEQ ID NO: 129431 - protein, 16 aa, Artificial Sequence
  Description of Artificial Sequence: Synthetic peptide
  Seed: RMCSLMQGSTLPRRSG
RMYSLVQSSTIPRRSG

SEQ ID NO: 129432 - protein, 16 aa, Artificial Sequence
  Description of Artificial Sequence: Synthetic peptide
  Seed: RMCSLMQGSTLPRRSG
RMYSLVQSSTLPRRSG

SEQ ID NO: 129433 - protein, 16 aa, Artificial Sequence
  Description of Artificial Sequence: Synthetic peptide
  Seed: RMCSLMQGSTLPRRSG
RMYSLVQSSTNPRRSG

SEQ ID NO: 129434 - protein, 16 aa, Artificial Sequence
  Description of Artificial Sequence: Synthetic peptide
  Seed: RMCSLMQGSTLPRRSG
RMYSLVQSSTSPRRSG

SEQ ID NO: 129435 - protein, 16 aa, Artificial Sequence
  Description of Artificial Sequence: Synthetic peptide
  Seed: RMCSLMQGSTLPRRSG
RMYSLVQSSTTPRRSG

SEQ ID NO: 129436 - protein, 16 aa, Artificial Sequence
  Description of Artificial Sequence: Synthetic peptide
  Seed: RMCSLMQGSTLPRRSG
RMYSLVQSSTVPRRSG

SEQ ID NO: 129437 - protein, 16 aa, Artificial Sequence
  Description of Artificial Sequence: Synthetic peptide
  Seed: RMCSLMQGSTLPRRSG
RMYSLVQTSTAPRRSG

SEQ ID NO: 129438 - protein, 16 aa, Artificial Sequence
  Description of Artificial Sequence: Synthetic peptide
  Seed: RMCSLMQGSTLPRRSG
RMYSLVQTSTNPRRSG

SEQ ID NO: 129439 - protein, 16 aa, Artificial Sequence
  Description of Artificial Sequence: Synthetic peptide
  Seed: RMCSLMQGSTLPRRSG
RMYSLVQTSTSPRRSG

SEQ ID NO: 129440 - protein, 16 aa, Artificial Sequence
  Description of Artificial Sequence: Synthetic peptide
  Seed: RMCSLMQGSTLPRRSG
RMYSLVQTSTVPRRSG

SEQ ID NO: 129441 - protein, 16 aa, Artificial Sequence
  Description of Artificial Sequence: Synthetic peptide
  Seed: RMCSLMQGSTLPRRSG
RMYSLVQVSTAPRRSG

SEQ ID NO: 129442 - protein, 16 aa, Artificial Sequence
  Description of Artificial Sequence: Synthetic peptide
  Seed: RMCSLMQGSTLPRRSG
RMYSLVQVSTNPRRSG

SEQ ID NO: 129443 - protein, 16 aa, Artificial Sequence
  Description of Artificial Sequence: Synthetic peptide
  Seed: RMCSLMQGSTLPRRSG
RMYSLVQVSTSPRRSG

SEQ ID NO: 129444 - protein, 16 aa, Artificial Sequence
  Description of Artificial Sequence: Synthetic peptide
  Seed: RMCSLMQGSTLPRRSG
RMCSLMAGSALARRAG

SEQ ID NO: 129445 - protein, 16 aa, Artificial Sequence
  Description of Artificial Sequence: Synthetic peptide
  Seed: RMCSLMQGSTLPRRSG
RMCSLMAGSALARRIG

SEQ ID NO: 129446 - protein, 16 aa, Artificial Sequence
  Description of Artificial Sequence: Synthetic peptide
  Seed: RMCSLMQGSTLPRRSG
RMCSLMAGSALARRVG

SEQ ID NO: 129447 - protein, 16 aa, Artificial Sequence
  Description of Artificial Sequence: Synthetic peptide
  Seed: RMCSLMQGSTLPRRSG
RMCSLMFGSALARRAG

SEQ ID NO: 129448 - protein, 16 aa, Artificial Sequence
  Description of Artificial Sequence: Synthetic peptide
  Seed: RMCSLMQGSTLPRRSG
RMCSLMFGSALARRIG

SEQ ID NO: 129449 - protein, 16 aa, Artificial Sequence
  Description of Artificial Sequence: Synthetic peptide
  Seed: RMCSLMQGSTLPRRSG
RMCSLMFGSALARRSG

SEQ ID NO: 129450 - protein, 16 aa, Artificial Sequence
  Description of Artificial Sequence: Synthetic peptide
  Seed: RMCSLMQGSTLPRRSG
RMCSLMFGSALARRVG

SEQ ID NO: 129451 - protein, 16 aa, Artificial Sequence
  Description of Artificial Sequence: Synthetic peptide
  Seed: RMCSLMQGSTLPRRSG
RMCSLMFGSALVRRVG

SEQ ID NO: 129452 - protein, 16 aa, Artificial Sequence
  Description of Artificial Sequence: Synthetic peptide
  Seed: RMCSLMQGSTLPRRSG
RMCSLMFGSGLARRAG

SEQ ID NO: 129453 - protein, 16 aa, Artificial Sequence
  Description of Artificial Sequence: Synthetic peptide
  Seed: RMCSLMQGSTLPRRSG
RMCSLMFGSGLARRIG

SEQ ID NO: 129454 - protein, 16 aa, Artificial Sequence
  Description of Artificial Sequence: Synthetic peptide
  Seed: RMCSLMQGSTLPRRSG
RMCSLMFGSGLARRVG

SEQ ID NO: 129455 - protein, 16 aa, Artificial Sequence
  Description of Artificial Sequence: Synthetic peptide
  Seed: RMCSLMQGSTLPRRSG
RMCSLMFGSGLVRRAG

SEQ ID NO: 129456 - protein, 16 aa, Artificial Sequence
  Description of Artificial Sequence: Synthetic peptide
  Seed: RMCSLMQGSTLPRRSG
RMCSLMFGSGLVRRVG

SEQ ID NO: 129457 - protein, 16 aa, Artificial Sequence
  Description of Artificial Sequence: Synthetic peptide
  Seed: RMCSLMQGSTLPRRSG
RMCSLMIGSALARRAG

SEQ ID NO: 129458 - protein, 16 aa, Artificial Sequence
  Description of Artificial Sequence: Synthetic peptide
  Seed: RMCSLMQGSTLPRRSG
RMCSLMIGSALARRIG

SEQ ID NO: 129459 - protein, 16 aa, Artificial Sequence
  Description of Artificial Sequence: Synthetic peptide
  Seed: RMCSLMQGSTLPRRSG
RMCSLMIGSALARRSG

SEQ ID NO: 129460 - protein, 16 aa, Artificial Sequence
  Description of Artificial Sequence: Synthetic peptide
  Seed: RMCSLMQGSTLPRRSG
RMCSLMIGSALARRTG

SEQ ID NO: 129461 - protein, 16 aa, Artificial Sequence
  Description of Artificial Sequence: Synthetic peptide
  Seed: RMCSLMQGSTLPRRSG
RMCSLMIGSALARRVG

SEQ ID NO: 129462 - protein, 16 aa, Artificial Sequence
  Description of Artificial Sequence: Synthetic peptide
  Seed: RMCSLMQGSTLPRRSG
RMCSLMIGSALVRRAG

SEQ ID NO: 129463 - protein, 16 aa, Artificial Sequence
  Description of Artificial Sequence: Synthetic peptide
  Seed: RMCSLMQGSTLPRRSG
RMCSLMIGSALVRRVG

SEQ ID NO: 129464 - protein, 16 aa, Artificial Sequence
  Description of Artificial Sequence: Synthetic peptide
  Seed: RMCSLMQGSTLPRRSG
RMCSLMIGSGLARRAG

SEQ ID NO: 129465 - protein, 16 aa, Artificial Sequence
  Description of Artificial Sequence: Synthetic peptide
  Seed: RMCSLMQGSTLPRRSG
RMCSLMIGSGLARRIG

SEQ ID NO: 129466 - protein, 16 aa, Artificial Sequence
  Description of Artificial Sequence: Synthetic peptide
  Seed: RMCSLMQGSTLPRRSG
RMCSLMIGSGLARRSG

SEQ ID NO: 129467 - protein, 16 aa, Artificial Sequence
  Description of Artificial Sequence: Synthetic peptide
  Seed: RMCSLMQGSTLPRRSG
RMCSLMIGSGLARRTG

SEQ ID NO: 129468 - protein, 16 aa, Artificial Sequence
  Description of Artificial Sequence: Synthetic peptide
  Seed: RMCSLMQGSTLPRRSG
RMCSLMIGSGLARRVG

SEQ ID NO: 129469 - protein, 16 aa, Artificial Sequence
  Description of Artificial Sequence: Synthetic peptide
  Seed: RMCSLMQGSTLPRRSG
RMCSLMIGSGLVRRAG

SEQ ID NO: 129470 - protein, 16 aa, Artificial Sequence
  Description of Artificial Sequence: Synthetic peptide
  Seed: RMCSLMQGSTLPRRSG
RMCSLMIGSGLVRRIG

SEQ ID NO: 129471 - protein, 16 aa, Artificial Sequence
  Description of Artificial Sequence: Synthetic peptide
  Seed: RMCSLMQGSTLPRRSG
RMCSLMIGSGLVRRSG

SEQ ID NO: 129472 - protein, 16 aa, Artificial Sequence
  Description of Artificial Sequence: Synthetic peptide
  Seed: RMCSLMQGSTLPRRSG
RMCSLMIGSGLVRRVG

SEQ ID NO: 129473 - protein, 16 aa, Artificial Sequence
  Description of Artificial Sequence: Synthetic peptide
  Seed: RMCSLMQGSTLPRRSG
RMCSLMIGSSLARRAG

SEQ ID NO: 129474 - protein, 16 aa, Artificial Sequence
  Description of Artificial Sequence: Synthetic peptide
  Seed: RMCSLMQGSTLPRRSG
RMCSLMLGSALARRAG

SEQ ID NO: 129475 - protein, 16 aa, Artificial Sequence
  Description of Artificial Sequence: Synthetic peptide
  Seed: RMCSLMQGSTLPRRSG
RMCSLMLGSALARRVG

SEQ ID NO: 129476 - protein, 16 aa, Artificial Sequence
  Description of Artificial Sequence: Synthetic peptide
  Seed: RMCSLMQGSTLPRRSG
RMCSLMMGSALARRAG

SEQ ID NO: 129477 - protein, 16 aa, Artificial Sequence
  Description of Artificial Sequence: Synthetic peptide
  Seed: RMCSLMQGSTLPRRSG
RMCSLMMGSALARRIG

SEQ ID NO: 129478 - protein, 16 aa, Artificial Sequence
  Description of Artificial Sequence: Synthetic peptide
  Seed: RMCSLMQGSTLPRRSG
RMCSLMMGSALARRVG

SEQ ID NO: 129479 - protein, 16 aa, Artificial Sequence
  Description of Artificial Sequence: Synthetic peptide
  Seed: RMCSLMQGSTLPRRSG
RMCSLMMGSGLARRAG

SEQ ID NO: 129480 - protein, 16 aa, Artificial Sequence
  Description of Artificial Sequence: Synthetic peptide
  Seed: RMCSLMQGSTLPRRSG
RMCSLMMGSGLARRVG

SEQ ID NO: 129481 - protein, 16 aa, Artificial Sequence
  Description of Artificial Sequence: Synthetic peptide
  Seed: RMCSLMQGSTLPRRSG
RMCSLMPGSALARRAG

SEQ ID NO: 129482 - protein, 16 aa, Artificial Sequence
  Description of Artificial Sequence: Synthetic peptide
  Seed: RMCSLMQGSTLPRRSG
RMCSLMPGSALARRVG

SEQ ID NO: 129483 - protein, 16 aa, Artificial Sequence
  Description of Artificial Sequence: Synthetic peptide
  Seed: RMCSLMQGSTLPRRSG
RMCSLMPGSALVRRAG

SEQ ID NO: 129484 - protein, 16 aa, Artificial Sequence
  Description of Artificial Sequence: Synthetic peptide
  Seed: RMCSLMQGSTLPRRSG
RMCSLMVGSALARRAG

SEQ ID NO: 129485 - protein, 16 aa, Artificial Sequence
  Description of Artificial Sequence: Synthetic peptide
  Seed: RMCSLMQGSTLPRRSG
RMCSLMVGSALARRIG

SEQ ID NO: 129486 - protein, 16 aa, Artificial Sequence
  Description of Artificial Sequence: Synthetic peptide
  Seed: RMCSLMQGSTLPRRSG
RMCSLMVGSALARRSG

SEQ ID NO: 129487 - protein, 16 aa, Artificial Sequence
  Description of Artificial Sequence: Synthetic peptide
  Seed: RMCSLMQGSTLPRRSG
RMCSLMVGSALARRTG

SEQ ID NO: 129488 - protein, 16 aa, Artificial Sequence
  Description of Artificial Sequence: Synthetic peptide
  Seed: RMCSLMQGSTLPRRSG
RMCSLMVGSALARRVG

SEQ ID NO: 129489 - protein, 16 aa, Artificial Sequence
  Description of Artificial Sequence: Synthetic peptide
  Seed: RMCSLMQGSTLPRRSG
RMCSLMVGSGLARRAG

SEQ ID NO: 129490 - protein, 16 aa, Artificial Sequence
  Description of Artificial Sequence: Synthetic peptide
  Seed: RMCSLMQGSTLPRRSG
RMCSLMVGSGLARRIG

SEQ ID NO: 129491 - protein, 16 aa, Artificial Sequence
  Description of Artificial Sequence: Synthetic peptide
  Seed: RMCSLMQGSTLPRRSG
RMCSLMVGSGLARRTG

SEQ ID NO: 129492 - protein, 16 aa, Artificial Sequence
  Description of Artificial Sequence: Synthetic peptide
  Seed: RMCSLMQGSTLPRRSG
RMCSLMVGSGLARRVG

SEQ ID NO: 129493 - protein, 16 aa, Artificial Sequence
  Description of Artificial Sequence: Synthetic peptide
  Seed: RMCSLMQGSTLPRRSG
RMCSLMVGSGLVRRAG

SEQ ID NO: 129494 - protein, 16 aa, Artificial Sequence
  Description of Artificial Sequence: Synthetic peptide
  Seed: RMCSLMQGSTLPRRSG
RMCSLMVGSGLVRRVG

SEQ ID NO: 129495 - protein, 17 aa, Artificial Sequence
  Description of Artificial Sequence: Synthetic peptide
  Seed: RMCSLMQGSTLPRRSGA
RMFSLAQASTAPRRSGA

SEQ ID NO: 129496 - protein, 17 aa, Artificial Sequence
  Description of Artificial Sequence: Synthetic peptide
  Seed: RMCSLMQGSTLPRRSGA
RMFSLAQASTCPRRSGA

SEQ ID NO: 129497 - protein, 17 aa, Artificial Sequence
  Description of Artificial Sequence: Synthetic peptide
  Seed: RMCSLMQGSTLPRRSGA
RMFSLAQASTFPRRSGA

SEQ ID NO: 129498 - protein, 17 aa, Artificial Sequence
  Description of Artificial Sequence: Synthetic peptide
  Seed: RMCSLMQGSTLPRRSGA
RMFSLAQASTGPRRSGA

SEQ ID NO: 129499 - protein, 17 aa, Artificial Sequence
  Description of Artificial Sequence: Synthetic peptide
  Seed: RMCSLMQGSTLPRRSGA
RMFSLAQASTIPRRSGA

SEQ ID NO: 129500 - protein, 17 aa, Artificial Sequence
  Description of Artificial Sequence: Synthetic peptide
  Seed: RMCSLMQGSTLPRRSGA
RMFSLAQASTLPRRSGA

SEQ ID NO: 129501 - protein, 17 aa, Artificial Sequence
  Description of Artificial Sequence: Synthetic peptide
  Seed: RMCSLMQGSTLPRRSGA
RMFSLAQASTMPRRSGA

SEQ ID NO: 129502 - protein, 17 aa, Artificial Sequence
  Description of Artificial Sequence: Synthetic peptide
  Seed: RMCSLMQGSTLPRRSGA
RMFSLAQASTSPRRSGA

SEQ ID NO: 129503 - protein, 17 aa, Artificial Sequence
  Description of Artificial Sequence: Synthetic peptide
  Seed: RMCSLMQGSTLPRRSGA
RMFSLAQASTTPRRSGA

SEQ ID NO: 129504 - protein, 17 aa, Artificial Sequence
  Description of Artificial Sequence: Synthetic peptide
  Seed: RMCSLMQGSTLPRRSGA
RMFSLAQASTVPRRSGA

SEQ ID NO: 129505 - protein, 17 aa, Artificial Sequence
  Description of Artificial Sequence: Synthetic peptide
  Seed: RMCSLMQGSTLPRRSGA
RMFSLAQGSTAPRRSGA

SEQ ID NO: 129506 - protein, 17 aa, Artificial Sequence
  Description of Artificial Sequence: Synthetic peptide
  Seed: RMCSLMQGSTLPRRSGA
RMFSLAQGSTIPRRSGA

SEQ ID NO: 129507 - protein, 17 aa, Artificial Sequence
  Description of Artificial Sequence: Synthetic peptide
  Seed: RMCSLMQGSTLPRRSGA
RMFSLAQGSTLPRRSGA

SEQ ID NO: 129508 - protein, 17 aa, Artificial Sequence
  Description of Artificial Sequence: Synthetic peptide
  Seed: RMCSLMQGSTLPRRSGA
RMFSLAQGSTMPRRSGA

SEQ ID NO: 129509 - protein, 17 aa, Artificial Sequence
  Description of Artificial Sequence: Synthetic peptide
  Seed: RMCSLMQGSTLPRRSGA
RMFSLAQGSTSPRRSGA

SEQ ID NO: 129510 - protein, 17 aa, Artificial Sequence
  Description of Artificial Sequence: Synthetic peptide
  Seed: RMCSLMQGSTLPRRSGA
RMFSLAQGSTTPRRSGA

SEQ ID NO: 129511 - protein, 17 aa, Artificial Sequence
  Description of Artificial Sequence: Synthetic peptide
  Seed: RMCSLMQGSTLPRRSGA
RMFSLAQGSTVPRRSGA

SEQ ID NO: 129512 - protein, 17 aa, Artificial Sequence
  Description of Artificial Sequence: Synthetic peptide
  Seed: RMCSLMQGSTLPRRSGA
RMFSLAQNSTAPRRSGA

SEQ ID NO: 129513 - protein, 17 aa, Artificial Sequence
  Description of Artificial Sequence: Synthetic peptide
  Seed: RMCSLMQGSTLPRRSGA
RMFSLAQNSTIPRRSGA

SEQ ID NO: 129514 - protein, 17 aa, Artificial Sequence
  Description of Artificial Sequence: Synthetic peptide
  Seed: RMCSLMQGSTLPRRSGA
RMFSLAQNSTLPRRSGA

SEQ ID NO: 129515 - protein, 17 aa, Artificial Sequence
  Description of Artificial Sequence: Synthetic peptide
  Seed: RMCSLMQGSTLPRRSGA
RMFSLAQNSTVPRRSGA

SEQ ID NO: 129516 - protein, 17 aa, Artificial Sequence
  Description of Artificial Sequence: Synthetic peptide
  Seed: RMCSLMQGSTLPRRSGA
RMFSLAQPSTAPRRSGA

SEQ ID NO: 129517 - protein, 17 aa, Artificial Sequence
  Description of Artificial Sequence: Synthetic peptide
  Seed: RMCSLMQGSTLPRRSGA
RMFSLAQPSTIPRRSGA

SEQ ID NO: 129518 - protein, 17 aa, Artificial Sequence
  Description of Artificial Sequence: Synthetic peptide
  Seed: RMCSLMQGSTLPRRSGA
RMFSLAQPSTLPRRSGA

SEQ ID NO: 129519 - protein, 17 aa, Artificial Sequence
  Description of Artificial Sequence: Synthetic peptide
  Seed: RMCSLMQGSTLPRRSGA
RMFSLAQPSTMPRRSGA

SEQ ID NO: 129520 - protein, 17 aa, Artificial Sequence
  Description of Artificial Sequence: Synthetic peptide
  Seed: RMCSLMQGSTLPRRSGA
RMFSLAQPSTTPRRSGA

SEQ ID NO: 129521 - protein, 17 aa, Artificial Sequence
  Description of Artificial Sequence: Synthetic peptide
  Seed: RMCSLMQGSTLPRRSGA
RMFSLAQPSTVPRRSGA

SEQ ID NO: 129522 - protein, 17 aa, Artificial Sequence
  Description of Artificial Sequence: Synthetic peptide
  Seed: RMCSLMQGSTLPRRSGA
RMFSLAQSSTAPRRSGA

SEQ ID NO: 129523 - protein, 17 aa, Artificial Sequence
  Description of Artificial Sequence: Synthetic peptide
  Seed: RMCSLMQGSTLPRRSGA
RMFSLAQSSTIPRRSGA

SEQ ID NO: 129524 - protein, 17 aa, Artificial Sequence
  Description of Artificial Sequence: Synthetic peptide
  Seed: RMCSLMQGSTLPRRSGA
RMFSLAQSSTLPRRSGA

SEQ ID NO: 129525 - protein, 17 aa, Artificial Sequence
  Description of Artificial Sequence: Synthetic peptide
  Seed: RMCSLMQGSTLPRRSGA
RMFSLAQSSTMPRRSGA

SEQ ID NO: 129526 - protein, 17 aa, Artificial Sequence
  Description of Artificial Sequence: Synthetic peptide
  Seed: RMCSLMQGSTLPRRSGA
RMFSLAQSSTSPRRSGA

SEQ ID NO: 129527 - protein, 17 aa, Artificial Sequence
  Description of Artificial Sequence: Synthetic peptide
  Seed: RMCSLMQGSTLPRRSGA
RMFSLAQSSTTPRRSGA

SEQ ID NO: 129528 - protein, 17 aa, Artificial Sequence
  Description of Artificial Sequence: Synthetic peptide
  Seed: RMCSLMQGSTLPRRSGA
RMFSLAQSSTVPRRSGA

SEQ ID NO: 129529 - protein, 17 aa, Artificial Sequence
  Description of Artificial Sequence: Synthetic peptide
  Seed: RMCSLMQGSTLPRRSGA
RMFSLAQTSTAPRRSGA

SEQ ID NO: 129530 - protein, 17 aa, Artificial Sequence
  Description of Artificial Sequence: Synthetic peptide
  Seed: RMCSLMQGSTLPRRSGA
RMFSLAQTSTIPRRSGA

SEQ ID NO: 129531 - protein, 17 aa, Artificial Sequence
  Description of Artificial Sequence: Synthetic peptide
  Seed: RMCSLMQGSTLPRRSGA
RMFSLAQTSTLPRRSGA

SEQ ID NO: 129532 - protein, 17 aa, Artificial Sequence
  Description of Artificial Sequence: Synthetic peptide
  Seed: RMCSLMQGSTLPRRSGA
RMFSLAQTSTVPRRSGA

SEQ ID NO: 129533 - protein, 17 aa, Artificial Sequence
  Description of Artificial Sequence: Synthetic peptide
  Seed: RMCSLMQGSTLPRRSGA
RMFSLAQVSTAPRRSGA

SEQ ID NO: 129534 - protein, 17 aa, Artificial Sequence
  Description of Artificial Sequence: Synthetic peptide
  Seed: RMCSLMQGSTLPRRSGA
RMFSLAQVSTIPRRSGA

SEQ ID NO: 129535 - protein, 17 aa, Artificial Sequence
  Description of Artificial Sequence: Synthetic peptide
  Seed: RMCSLMQGSTLPRRSGA
RMFSLAQVSTLPRRSGA

SEQ ID NO: 129536 - protein, 17 aa, Artificial Sequence
  Description of Artificial Sequence: Synthetic peptide
  Seed: RMCSLMQGSTLPRRSGA
RMFSLAQVSTVPRRSGA

SEQ ID NO: 129537 - protein, 17 aa, Artificial Sequence
  Description of Artificial Sequence: Synthetic peptide
  Seed: RMCSLMQGSTLPRRSGA
RMFSLEQASTAPRRSGA

SEQ ID NO: 129538 - protein, 17 aa, Artificial Sequence
  Description of Artificial Sequence: Synthetic peptide
  Seed: RMCSLMQGSTLPRRSGA
RMFSLEQASTIPRRSGA

SEQ ID NO: 129539 - protein, 17 aa, Artificial Sequence
  Description of Artificial Sequence: Synthetic peptide
  Seed: RMCSLMQGSTLPRRSGA
RMFSLEQASTLPRRSGA

SEQ ID NO: 129540 - protein, 17 aa, Artificial Sequence
  Description of Artificial Sequence: Synthetic peptide
  Seed: RMCSLMQGSTLPRRSGA
RMFSLEQASTVPRRSGA

SEQ ID NO: 129541 - protein, 17 aa, Artificial Sequence
  Description of Artificial Sequence: Synthetic peptide
  Seed: RMCSLMQGSTLPRRSGA
RMFSLEQGSTIPRRSGA

SEQ ID NO: 129542 - protein, 17 aa, Artificial Sequence
  Description of Artificial Sequence: Synthetic peptide
  Seed: RMCSLMQGSTLPRRSGA
RMFSLEQGSTLPRRSGA

SEQ ID NO: 129543 - protein, 17 aa, Artificial Sequence
  Description of Artificial Sequence: Synthetic peptide
  Seed: RMCSLMQGSTLPRRSGA
RMFSLEQGSTVPRRSGA

SEQ ID NO: 129544 - protein, 17 aa, Artificial Sequence
  Description of Artificial Sequence: Synthetic peptide
  Seed: RMCSLMQGSTLPRRSGA
RMFSLEQSSTLPRRSGA

SEQ ID NO: 129545 - protein, 17 aa, Artificial Sequence
  Description of Artificial Sequence: Synthetic peptide
  Seed: RMCSLMQGSTLPRRSGA
RMFSLEQSSTVPRRSGA

SEQ ID NO: 129546 - protein, 17 aa, Artificial Sequence
  Description of Artificial Sequence: Synthetic peptide
  Seed: RMCSLMQGSTLPRRSGA
RMFSLFQASTAPRRSGA

SEQ ID NO: 129547 - protein, 17 aa, Artificial Sequence
  Description of Artificial Sequence: Synthetic peptide
  Seed: RMCSLMQGSTLPRRSGA
RMFSLFQASTIPRRSGA

SEQ ID NO: 129548 - protein, 17 aa, Artificial Sequence
  Description of Artificial Sequence: Synthetic peptide
  Seed: RMCSLMQGSTLPRRSGA
RMFSLFQASTLPRRSGA

SEQ ID NO: 129549 - protein, 17 aa, Artificial Sequence
  Description of Artificial Sequence: Synthetic peptide
  Seed: RMCSLMQGSTLPRRSGA
RMFSLFQASTSPRRSGA

SEQ ID NO: 129550 - protein, 17 aa, Artificial Sequence
  Description of Artificial Sequence: Synthetic peptide
  Seed: RMCSLMQGSTLPRRSGA
RMFSLFQASTVPRRSGA

SEQ ID NO: 129551 - protein, 17 aa, Artificial Sequence
  Description of Artificial Sequence: Synthetic peptide
  Seed: RMCSLMQGSTLPRRSGA
RMFSLFQGSTAPRRSGA

SEQ ID NO: 129552 - protein, 17 aa, Artificial Sequence
  Description of Artificial Sequence: Synthetic peptide
  Seed: RMCSLMQGSTLPRRSGA
RMFSLFQGSTIPRRSGA

SEQ ID NO: 129553 - protein, 17 aa, Artificial Sequence
  Description of Artificial Sequence: Synthetic peptide
  Seed: RMCSLMQGSTLPRRSGA
RMFSLFQGSTLPRRSGA

SEQ ID NO: 129554 - protein, 17 aa, Artificial Sequence
  Description of Artificial Sequence: Synthetic peptide
  Seed: RMCSLMQGSTLPRRSGA
RMFSLFQGSTVPRRSGA

SEQ ID NO: 129555 - protein, 17 aa, Artificial Sequence
  Description of Artificial Sequence: Synthetic peptide
  Seed: RMCSLMQGSTLPRRSGA
RMFSLFQPSTAPRRSGA

SEQ ID NO: 129556 - protein, 17 aa, Artificial Sequence
  Description of Artificial Sequence: Synthetic peptide
  Seed: RMCSLMQGSTLPRRSGA
RMFSLFQSSTIPRRSGA

SEQ ID NO: 129557 - protein, 17 aa, Artificial Sequence
  Description of Artificial Sequence: Synthetic peptide
  Seed: RMCSLMQGSTLPRRSGA
RMFSLFQSSTLPRRSGA

SEQ ID NO: 129558 - protein, 17 aa, Artificial Sequence
  Description of Artificial Sequence: Synthetic peptide
  Seed: RMCSLMQGSTLPRRSGA
RMFSLFQSSTVPRRSGA

SEQ ID NO: 129559 - protein, 17 aa, Artificial Sequence
  Description of Artificial Sequence: Synthetic peptide
  Seed: RMCSLMQGSTLPRRSGA
RMFSLGQASTAPRRSGA

SEQ ID NO: 129560 - protein, 17 aa, Artificial Sequence
  Description of Artificial Sequence: Synthetic peptide
  Seed: RMCSLMQGSTLPRRSGA
RMFSLGQASTIPRRSGA

SEQ ID NO: 129561 - protein, 17 aa, Artificial Sequence
  Description of Artificial Sequence: Synthetic peptide
  Seed: RMCSLMQGSTLPRRSGA
RMFSLGQASTLPRRSGA

SEQ ID NO: 129562 - protein, 17 aa, Artificial Sequence
  Description of Artificial Sequence: Synthetic peptide
  Seed: RMCSLMQGSTLPRRSGA
RMFSLGQASTMPRRSGA

SEQ ID NO: 129563 - protein, 17 aa, Artificial Sequence
  Description of Artificial Sequence: Synthetic peptide
  Seed: RMCSLMQGSTLPRRSGA
RMFSLGQASTVPRRSGA

SEQ ID NO: 129564 - protein, 17 aa, Artificial Sequence
  Description of Artificial Sequence: Synthetic peptide
  Seed: RMCSLMQGSTLPRRSGA
RMFSLGQGSTIPRRSGA

SEQ ID NO: 129565 - protein, 17 aa, Artificial Sequence
  Description of Artificial Sequence: Synthetic peptide
  Seed: RMCSLMQGSTLPRRSGA
RMFSLGQGSTLPRRSGA

SEQ ID NO: 129566 - protein, 17 aa, Artificial Sequence
  Description of Artificial Sequence: Synthetic peptide
  Seed: RMCSLMQGSTLPRRSGA
RMFSLGQSSTIPRRSGA

SEQ ID NO: 129567 - protein, 17 aa, Artificial Sequence
  Description of Artificial Sequence: Synthetic peptide
  Seed: RMCSLMQGSTLPRRSGA
RMFSLGQSSTLPRRSGA

SEQ ID NO: 129568 - protein, 17 aa, Artificial Sequence
  Description of Artificial Sequence: Synthetic peptide
  Seed: RMCSLMQGSTLPRRSGA
RMFSLGQSSTVPRRSGA

SEQ ID NO: 129569 - protein, 17 aa, Artificial Sequence
  Description of Artificial Sequence: Synthetic peptide
  Seed: RMCSLMQGSTLPRRSGA
RMFSLHQASTLPRRSGA

SEQ ID NO: 129570 - protein, 17 aa, Artificial Sequence
  Description of Artificial Sequence: Synthetic peptide
  Seed: RMCSLMQGSTLPRRSGA
RMFSLIQASTAPRRSGA

SEQ ID NO: 129571 - protein, 17 aa, Artificial Sequence
  Description of Artificial Sequence: Synthetic peptide
  Seed: RMCSLMQGSTLPRRSGA
RMFSLIQASTCPRRSGA

SEQ ID NO: 129572 - protein, 17 aa, Artificial Sequence
  Description of Artificial Sequence: Synthetic peptide
  Seed: RMCSLMQGSTLPRRSGA
RMFSLIQASTFPRRSGA

SEQ ID NO: 129573 - protein, 17 aa, Artificial Sequence
  Description of Artificial Sequence: Synthetic peptide
  Seed: RMCSLMQGSTLPRRSGA
RMFSLIQASTGPRRSGA

SEQ ID NO: 129574 - protein, 17 aa, Artificial Sequence
  Description of Artificial Sequence: Synthetic peptide
  Seed: RMCSLMQGSTLPRRSGA
RMFSLIQASTIPRRSGA

SEQ ID NO: 129575 - protein, 17 aa, Artificial Sequence
  Description of Artificial Sequence: Synthetic peptide
  Seed: RMCSLMQGSTLPRRSGA
RMFSLIQASTLPRRSGA

SEQ ID NO: 129576 - protein, 17 aa, Artificial Sequence
  Description of Artificial Sequence: Synthetic peptide
  Seed: RMCSLMQGSTLPRRSGA
RMFSLIQASTMPRRSGA

SEQ ID NO: 129577 - protein, 17 aa, Artificial Sequence
  Description of Artificial Sequence: Synthetic peptide
  Seed: RMCSLMQGSTLPRRSGA
RMFSLIQASTNPRRSGA

SEQ ID NO: 129578 - protein, 17 aa, Artificial Sequence
  Description of Artificial Sequence: Synthetic peptide
  Seed: RMCSLMQGSTLPRRSGA
RMFSLIQASTSPRRSGA

SEQ ID NO: 129579 - protein, 17 aa, Artificial Sequence
  Description of Artificial Sequence: Synthetic peptide
  Seed: RMCSLMQGSTLPRRSGA
RMFSLIQASTTPRRSGA

SEQ ID NO: 129580 - protein, 17 aa, Artificial Sequence
  Description of Artificial Sequence: Synthetic peptide
  Seed: RMCSLMQGSTLPRRSGA
RMFSLIQASTVPRRSGA

SEQ ID NO: 129581 - protein, 17 aa, Artificial Sequence
  Description of Artificial Sequence: Synthetic peptide
  Seed: RMCSLMQGSTLPRRSGA
RMFSLIQGSTAPRRSGA

SEQ ID NO: 129582 - protein, 17 aa, Artificial Sequence
  Description of Artificial Sequence: Synthetic peptide
  Seed: RMCSLMQGSTLPRRSGA
RMFSLIQGSTCPRRSGA

SEQ ID NO: 129583 - protein, 17 aa, Artificial Sequence
  Description of Artificial Sequence: Synthetic peptide
  Seed: RMCSLMQGSTLPRRSGA
RMFSLIQGSTGPRRSGA

SEQ ID NO: 129584 - protein, 17 aa, Artificial Sequence
  Description of Artificial Sequence: Synthetic peptide
  Seed: RMCSLMQGSTLPRRSGA
RMFSLIQGSTIPRRSGA

SEQ ID NO: 129585 - protein, 17 aa, Artificial Sequence
  Description of Artificial Sequence: Synthetic peptide
  Seed: RMCSLMQGSTLPRRSGA
RMFSLIQGSTLPRRSGA

SEQ ID NO: 129586 - protein, 17 aa, Artificial Sequence
  Description of Artificial Sequence: Synthetic peptide
  Seed: RMCSLMQGSTLPRRSGA
RMFSLIQGSTMPRRSGA

SEQ ID NO: 129587 - protein, 17 aa, Artificial Sequence
  Description of Artificial Sequence: Synthetic peptide
  Seed: RMCSLMQGSTLPRRSGA
RMFSLIQGSTSPRRSGA

SEQ ID NO: 129588 - protein, 17 aa, Artificial Sequence
  Description of Artificial Sequence: Synthetic peptide
  Seed: RMCSLMQGSTLPRRSGA
RMFSLIQGSTTPRRSGA

SEQ ID NO: 129589 - protein, 17 aa, Artificial Sequence
  Description of Artificial Sequence: Synthetic peptide
  Seed: RMCSLMQGSTLPRRSGA
RMFSLIQGSTVPRRSGA

SEQ ID NO: 129590 - protein, 17 aa, Artificial Sequence
  Description of Artificial Sequence: Synthetic peptide
  Seed: RMCSLMQGSTLPRRSGA
RMFSLIQISTVPRRSGA

SEQ ID NO: 129591 - protein, 17 aa, Artificial Sequence
  Description of Artificial Sequence: Synthetic peptide
  Seed: RMCSLMQGSTLPRRSGA
RMFSLIQNSTAPRRSGA

SEQ ID NO: 129592 - protein, 17 aa, Artificial Sequence
  Description of Artificial Sequence: Synthetic peptide
  Seed: RMCSLMQGSTLPRRSGA
RMFSLIQNSTIPRRSGA

SEQ ID NO: 129593 - protein, 17 aa, Artificial Sequence
  Description of Artificial Sequence: Synthetic peptide
  Seed: RMCSLMQGSTLPRRSGA
RMFSLIQNSTLPRRSGA

SEQ ID NO: 129594 - protein, 17 aa, Artificial Sequence
  Description of Artificial Sequence: Synthetic peptide
  Seed: RMCSLMQGSTLPRRSGA
RMFSLIQNSTTPRRSGA

SEQ ID NO: 129595 - protein, 17 aa, Artificial Sequence
  Description of Artificial Sequence: Synthetic peptide
  Seed: RMCSLMQGSTLPRRSGA
RMFSLIQNSTVPRRSGA

SEQ ID NO: 129596 - protein, 17 aa, Artificial Sequence
  Description of Artificial Sequence: Synthetic peptide
  Seed: RMCSLMQGSTLPRRSGA
RMFSLIQPSTAPRRSGA

SEQ ID NO: 129597 - protein, 17 aa, Artificial Sequence
  Description of Artificial Sequence: Synthetic peptide
  Seed: RMCSLMQGSTLPRRSGA
RMFSLIQPSTIPRRSGA

SEQ ID NO: 129598 - protein, 17 aa, Artificial Sequence
  Description of Artificial Sequence: Synthetic peptide
  Seed: RMCSLMQGSTLPRRSGA
RMFSLIQPSTLPRRSGA

SEQ ID NO: 129599 - protein, 17 aa, Artificial Sequence
  Description of Artificial Sequence: Synthetic peptide
  Seed: RMCSLMQGSTLPRRSGA
RMFSLIQPSTMPRRSGA

SEQ ID NO: 129600 - protein, 17 aa, Artificial Sequence
  Description of Artificial Sequence: Synthetic peptide
  Seed: RMCSLMQGSTLPRRSGA
RMFSLIQPSTSPRRSGA

SEQ ID NO: 129601 - protein, 17 aa, Artificial Sequence
  Description of Artificial Sequence: Synthetic peptide
  Seed: RMCSLMQGSTLPRRSGA
RMFSLIQPSTTPRRSGA

SEQ ID NO: 129602 - protein, 17 aa, Artificial Sequence
  Description of Artificial Sequence: Synthetic peptide
  Seed: RMCSLMQGSTLPRRSGA
RMFSLIQPSTVPRRSGA

SEQ ID NO: 129603 - protein, 17 aa, Artificial Sequence
  Description of Artificial Sequence: Synthetic peptide
  Seed: RMCSLMQGSTLPRRSGA
RMFSLIQSSTAPRRSGA

SEQ ID NO: 129604 - protein, 17 aa, Artificial Sequence
  Description of Artificial Sequence: Synthetic peptide
  Seed: RMCSLMQGSTLPRRSGA
RMFSLIQSSTGPRRSGA

SEQ ID NO: 129605 - protein, 17 aa, Artificial Sequence
  Description of Artificial Sequence: Synthetic peptide
  Seed: RMCSLMQGSTLPRRSGA
RMFSLIQSSTIPRRSGA

SEQ ID NO: 129606 - protein, 17 aa, Artificial Sequence
  Description of Artificial Sequence: Synthetic peptide
  Seed: RMCSLMQGSTLPRRSGA
RMFSLIQSSTLPRRSGA

SEQ ID NO: 129607 - protein, 17 aa, Artificial Sequence
  Description of Artificial Sequence: Synthetic peptide
  Seed: RMCSLMQGSTLPRRSGA
RMFSLIQSSTMPRRSGA

SEQ ID NO: 129608 - protein, 17 aa, Artificial Sequence
  Description of Artificial Sequence: Synthetic peptide
  Seed: RMCSLMQGSTLPRRSGA
RMFSLIQSSTSPRRSGA

SEQ ID NO: 129609 - protein, 17 aa, Artificial Sequence
  Description of Artificial Sequence: Synthetic peptide
  Seed: RMCSLMQGSTLPRRSGA
RMFSLIQSSTTPRRSGA

SEQ ID NO: 129610 - protein, 17 aa, Artificial Sequence
  Description of Artificial Sequence: Synthetic peptide
  Seed: RMCSLMQGSTLPRRSGA
RMFSLIQSSTVPRRSGA

SEQ ID NO: 129611 - protein, 17 aa, Artificial Sequence
  Description of Artificial Sequence: Synthetic peptide
  Seed: RMCSLMQGSTLPRRSGA
RMFSLIQTSTAPRRSGA

SEQ ID NO: 129612 - protein, 17 aa, Artificial Sequence
  Description of Artificial Sequence: Synthetic peptide
  Seed: RMCSLMQGSTLPRRSGA
RMFSLIQTSTIPRRSGA

SEQ ID NO: 129613 - protein, 17 aa, Artificial Sequence
  Description of Artificial Sequence: Synthetic peptide
  Seed: RMCSLMQGSTLPRRSGA
RMFSLIQTSTLPRRSGA

SEQ ID NO: 129614 - protein, 17 aa, Artificial Sequence
  Description of Artificial Sequence: Synthetic peptide
  Seed: RMCSLMQGSTLPRRSGA
RMFSLIQTSTMPRRSGA

SEQ ID NO: 129615 - protein, 17 aa, Artificial Sequence
  Description of Artificial Sequence: Synthetic peptide
  Seed: RMCSLMQGSTLPRRSGA
RMFSLIQTSTSPRRSGA

SEQ ID NO: 129616 - protein, 17 aa, Artificial Sequence
  Description of Artificial Sequence: Synthetic peptide
  Seed: RMCSLMQGSTLPRRSGA
RMFSLIQTSTTPRRSGA

SEQ ID NO: 129617 - protein, 17 aa, Artificial Sequence
  Description of Artificial Sequence: Synthetic peptide
  Seed: RMCSLMQGSTLPRRSGA
RMFSLIQTSTVPRRSGA

SEQ ID NO: 129618 - protein, 17 aa, Artificial Sequence
  Description of Artificial Sequence: Synthetic peptide
  Seed: RMCSLMQGSTLPRRSGA
RMFSLIQVSTAPRRSGA

SEQ ID NO: 129619 - protein, 17 aa, Artificial Sequence
  Description of Artificial Sequence: Synthetic peptide
  Seed: RMCSLMQGSTLPRRSGA
RMFSLIQVSTIPRRSGA

SEQ ID NO: 129620 - protein, 17 aa, Artificial Sequence
  Description of Artificial Sequence: Synthetic peptide
  Seed: RMCSLMQGSTLPRRSGA
RMFSLIQVSTLPRRSGA

SEQ ID NO: 129621 - protein, 17 aa, Artificial Sequence
  Description of Artificial Sequence: Synthetic peptide
  Seed: RMCSLMQGSTLPRRSGA
RMFSLIQVSTVPRRSGA

SEQ ID NO: 129622 - protein, 17 aa, Artificial Sequence
  Description of Artificial Sequence: Synthetic peptide
  Seed: RMCSLMQGSTLPRRSGA
RMFSLLQASTAPRRSGA

SEQ ID NO: 129623 - protein, 17 aa, Artificial Sequence
  Description of Artificial Sequence: Synthetic peptide
  Seed: RMCSLMQGSTLPRRSGA
RMFSLLQASTCPRRSGA

SEQ ID NO: 129624 - protein, 17 aa, Artificial Sequence
  Description of Artificial Sequence: Synthetic peptide
  Seed: RMCSLMQGSTLPRRSGA
RMFSLLQASTFPRRSGA

SEQ ID NO: 129625 - protein, 17 aa, Artificial Sequence
  Description of Artificial Sequence: Synthetic peptide
  Seed: RMCSLMQGSTLPRRSGA
RMFSLLQASTGPRRSGA

SEQ ID NO: 129626 - protein, 17 aa, Artificial Sequence
  Description of Artificial Sequence: Synthetic peptide
  Seed: RMCSLMQGSTLPRRSGA
RMFSLLQASTHPRRSGA

SEQ ID NO: 129627 - protein, 17 aa, Artificial Sequence
  Description of Artificial Sequence: Synthetic peptide
  Seed: RMCSLMQGSTLPRRSGA
RMFSLLQASTIPRRSGA

SEQ ID NO: 129628 - protein, 17 aa, Artificial Sequence
  Description of Artificial Sequence: Synthetic peptide
  Seed: RMCSLMQGSTLPRRSGA
RMFSLLQASTLPRRSGA

SEQ ID NO: 129629 - protein, 17 aa, Artificial Sequence
  Description of Artificial Sequence: Synthetic peptide
  Seed: RMCSLMQGSTLPRRSGA
RMFSLLQASTMPRRSGA

SEQ ID NO: 129630 - protein, 17 aa, Artificial Sequence
  Description of Artificial Sequence: Synthetic peptide
  Seed: RMCSLMQGSTLPRRSGA
RMFSLLQASTNPRRSGA

SEQ ID NO: 129631 - protein, 17 aa, Artificial Sequence
  Description of Artificial Sequence: Synthetic peptide
  Seed: RMCSLMQGSTLPRRSGA
RMFSLLQASTPPRRSGA

SEQ ID NO: 129632 - protein, 17 aa, Artificial Sequence
  Description of Artificial Sequence: Synthetic peptide
  Seed: RMCSLMQGSTLPRRSGA
RMFSLLQASTQPRRSGA

SEQ ID NO: 129633 - protein, 17 aa, Artificial Sequence
  Description of Artificial Sequence: Synthetic peptide
  Seed: RMCSLMQGSTLPRRSGA
RMFSLLQASTSPRRSGA

SEQ ID NO: 129634 - protein, 17 aa, Artificial Sequence
  Description of Artificial Sequence: Synthetic peptide
  Seed: RMCSLMQGSTLPRRSGA
RMFSLLQASTTPRRSGA

SEQ ID NO: 129635 - protein, 17 aa, Artificial Sequence
  Description of Artificial Sequence: Synthetic peptide
  Seed: RMCSLMQGSTLPRRSGA
RMFSLLQASTVPRRSGA

SEQ ID NO: 129636 - protein, 17 aa, Artificial Sequence
  Description of Artificial Sequence: Synthetic peptide
  Seed: RMCSLMQGSTLPRRSGA
RMFSLLQASTYPRRSGA

SEQ ID NO: 129637 - protein, 17 aa, Artificial Sequence
  Description of Artificial Sequence: Synthetic peptide
  Seed: RMCSLMQGSTLPRRSGA
RMFSLLQGSTAPRRSGA

SEQ ID NO: 129638 - protein, 17 aa, Artificial Sequence
  Description of Artificial Sequence: Synthetic peptide
  Seed: RMCSLMQGSTLPRRSGA
RMFSLLQGSTCPRRSGA

SEQ ID NO: 129639 - protein, 17 aa, Artificial Sequence
  Description of Artificial Sequence: Synthetic peptide
  Seed: RMCSLMQGSTLPRRSGA
RMFSLLQGSTFPRRSGA

SEQ ID NO: 129640 - protein, 17 aa, Artificial Sequence
  Description of Artificial Sequence: Synthetic peptide
  Seed: RMCSLMQGSTLPRRSGA
RMFSLLQGSTGPRRSGA

SEQ ID NO: 129641 - protein, 17 aa, Artificial Sequence
  Description of Artificial Sequence: Synthetic peptide
  Seed: RMCSLMQGSTLPRRSGA
RMFSLLQGSTIPRRSGA

SEQ ID NO: 129642 - protein, 17 aa, Artificial Sequence
  Description of Artificial Sequence: Synthetic peptide
  Seed: RMCSLMQGSTLPRRSGA
RMFSLLQGSTLPRRSGA

SEQ ID NO: 129643 - protein, 17 aa, Artificial Sequence
  Description of Artificial Sequence: Synthetic peptide
  Seed: RMCSLMQGSTLPRRSGA
RMFSLLQGSTMPRRSGA

SEQ ID NO: 129644 - protein, 17 aa, Artificial Sequence
  Description of Artificial Sequence: Synthetic peptide
  Seed: RMCSLMQGSTLPRRSGA
RMFSLLQGSTNPRRSGA

SEQ ID NO: 129645 - protein, 17 aa, Artificial Sequence
  Description of Artificial Sequence: Synthetic peptide
  Seed: RMCSLMQGSTLPRRSGA
RMFSLLQGSTPPRRSGA

SEQ ID NO: 129646 - protein, 17 aa, Artificial Sequence
  Description of Artificial Sequence: Synthetic peptide
  Seed: RMCSLMQGSTLPRRSGA
RMFSLLQGSTSPRRSGA

SEQ ID NO: 129647 - protein, 17 aa, Artificial Sequence
  Description of Artificial Sequence: Synthetic peptide
  Seed: RMCSLMQGSTLPRRSGA
RMFSLLQGSTTPRRSGA

SEQ ID NO: 129648 - protein, 17 aa, Artificial Sequence
  Description of Artificial Sequence: Synthetic peptide
  Seed: RMCSLMQGSTLPRRSGA
RMFSLLQGSTVPRRSGA

SEQ ID NO: 129649 - protein, 17 aa, Artificial Sequence
  Description of Artificial Sequence: Synthetic peptide
  Seed: RMCSLMQGSTLPRRSGA
RMFSLLQGSTYPRRSGA

SEQ ID NO: 129650 - protein, 17 aa, Artificial Sequence
  Description of Artificial Sequence: Synthetic peptide
  Seed: RMCSLMQGSTLPRRSGA
RMFSLLQHSTVPRRSGA

SEQ ID NO: 129651 - protein, 17 aa, Artificial Sequence
  Description of Artificial Sequence: Synthetic peptide
  Seed: RMCSLMQGSTLPRRSGA
RMFSLLQISTAPRRSGA

SEQ ID NO: 129652 - protein, 17 aa, Artificial Sequence
  Description of Artificial Sequence: Synthetic peptide
  Seed: RMCSLMQGSTLPRRSGA
RMFSLLQISTIPRRSGA

SEQ ID NO: 129653 - protein, 17 aa, Artificial Sequence
  Description of Artificial Sequence: Synthetic peptide
  Seed: RMCSLMQGSTLPRRSGA
RMFSLLQISTLPRRSGA

SEQ ID NO: 129654 - protein, 17 aa, Artificial Sequence
  Description of Artificial Sequence: Synthetic peptide
  Seed: RMCSLMQGSTLPRRSGA
RMFSLLQISTTPRRSGA

SEQ ID NO: 129655 - protein, 17 aa, Artificial Sequence
  Description of Artificial Sequence: Synthetic peptide
  Seed: RMCSLMQGSTLPRRSGA
RMFSLLQISTVPRRSGA

SEQ ID NO: 129656 - protein, 17 aa, Artificial Sequence
  Description of Artificial Sequence: Synthetic peptide
  Seed: RMCSLMQGSTLPRRSGA
RMFSLLQNSTAPRRSGA

SEQ ID NO: 129657 - protein, 17 aa, Artificial Sequence
  Description of Artificial Sequence: Synthetic peptide
  Seed: RMCSLMQGSTLPRRSGA
RMFSLLQNSTGPRRSGA

SEQ ID NO: 129658 - protein, 17 aa, Artificial Sequence
  Description of Artificial Sequence: Synthetic peptide
  Seed: RMCSLMQGSTLPRRSGA
RMFSLLQNSTIPRRSGA

SEQ ID NO: 129659 - protein, 17 aa, Artificial Sequence
  Description of Artificial Sequence: Synthetic peptide
  Seed: RMCSLMQGSTLPRRSGA
RMFSLLQNSTLPRRSGA

SEQ ID NO: 129660 - protein, 17 aa, Artificial Sequence
  Description of Artificial Sequence: Synthetic peptide
  Seed: RMCSLMQGSTLPRRSGA
RMFSLLQNSTMPRRSGA

SEQ ID NO: 129661 - protein, 17 aa, Artificial Sequence
  Description of Artificial Sequence: Synthetic peptide
  Seed: RMCSLMQGSTLPRRSGA
RMFSLLQNSTSPRRSGA

SEQ ID NO: 129662 - protein, 17 aa, Artificial Sequence
  Description of Artificial Sequence: Synthetic peptide
  Seed: RMCSLMQGSTLPRRSGA
RMFSLLQNSTTPRRSGA

SEQ ID NO: 129663 - protein, 17 aa, Artificial Sequence
  Description of Artificial Sequence: Synthetic peptide
  Seed: RMCSLMQGSTLPRRSGA
RMFSLLQNSTVPRRSGA

SEQ ID NO: 129664 - protein, 17 aa, Artificial Sequence
  Description of Artificial Sequence: Synthetic peptide
  Seed: RMCSLMQGSTLPRRSGA
RMFSLLQPSTAPRRSGA

SEQ ID NO: 129665 - protein, 17 aa, Artificial Sequence
  Description of Artificial Sequence: Synthetic peptide
  Seed: RMCSLMQGSTLPRRSGA
RMFSLLQPSTCPRRSGA

SEQ ID NO: 129666 - protein, 17 aa, Artificial Sequence
  Description of Artificial Sequence: Synthetic peptide
  Seed: RMCSLMQGSTLPRRSGA
RMFSLLQPSTFPRRSGA

SEQ ID NO: 129667 - protein, 17 aa, Artificial Sequence
  Description of Artificial Sequence: Synthetic peptide
  Seed: RMCSLMQGSTLPRRSGA
RMFSLLQPSTGPRRSGA

SEQ ID NO: 129668 - protein, 17 aa, Artificial Sequence
  Description of Artificial Sequence: Synthetic peptide
  Seed: RMCSLMQGSTLPRRSGA
RMFSLLQPSTIPRRSGA

SEQ ID NO: 129669 - protein, 17 aa, Artificial Sequence
  Description of Artificial Sequence: Synthetic peptide
  Seed: RMCSLMQGSTLPRRSGA
RMFSLLQPSTLPRRSGA

SEQ ID NO: 129670 - protein, 17 aa, Artificial Sequence
  Description of Artificial Sequence: Synthetic peptide
  Seed: RMCSLMQGSTLPRRSGA
RMFSLLQPSTMPRRSGA

SEQ ID NO: 129671 - protein, 17 aa, Artificial Sequence
  Description of Artificial Sequence: Synthetic peptide
  Seed: RMCSLMQGSTLPRRSGA
RMFSLLQPSTNPRRSGA

SEQ ID NO: 129672 - protein, 17 aa, Artificial Sequence
  Description of Artificial Sequence: Synthetic peptide
  Seed: RMCSLMQGSTLPRRSGA
RMFSLLQPSTSPRRSGA

SEQ ID NO: 129673 - protein, 17 aa, Artificial Sequence
  Description of Artificial Sequence: Synthetic peptide
  Seed: RMCSLMQGSTLPRRSGA
RMFSLLQPSTTPRRSGA

SEQ ID NO: 129674 - protein, 17 aa, Artificial Sequence
  Description of Artificial Sequence: Synthetic peptide
  Seed: RMCSLMQGSTLPRRSGA
RMFSLLQPSTVPRRSGA

SEQ ID NO: 129675 - protein, 17 aa, Artificial Sequence
  Description of Artificial Sequence: Synthetic peptide
  Seed: RMCSLMQGSTLPRRSGA
RMFSLLQSSTAPRRSGA

SEQ ID NO: 129676 - protein, 17 aa, Artificial Sequence
  Description of Artificial Sequence: Synthetic peptide
  Seed: RMCSLMQGSTLPRRSGA
RMFSLLQSSTCPRRSGA

SEQ ID NO: 129677 - protein, 17 aa, Artificial Sequence
  Description of Artificial Sequence: Synthetic peptide
  Seed: RMCSLMQGSTLPRRSGA
RMFSLLQSSTFPRRSGA

SEQ ID NO: 129678 - protein, 17 aa, Artificial Sequence
  Description of Artificial Sequence: Synthetic peptide
  Seed: RMCSLMQGSTLPRRSGA
RMFSLLQSSTGPRRSGA

SEQ ID NO: 129679 - protein, 17 aa, Artificial Sequence
  Description of Artificial Sequence: Synthetic peptide
  Seed: RMCSLMQGSTLPRRSGA
RMFSLLQSSTIPRRSGA

SEQ ID NO: 129680 - protein, 17 aa, Artificial Sequence
  Description of Artificial Sequence: Synthetic peptide
  Seed: RMCSLMQGSTLPRRSGA
RMFSLLQSSTLPRRSGA

SEQ ID NO: 129681 - protein, 17 aa, Artificial Sequence
  Description of Artificial Sequence: Synthetic peptide
  Seed: RMCSLMQGSTLPRRSGA
RMFSLLQSSTMPRRSGA

SEQ ID NO: 129682 - protein, 17 aa, Artificial Sequence
  Description of Artificial Sequence: Synthetic peptide
  Seed: RMCSLMQGSTLPRRSGA
RMFSLLQSSTNPRRSGA

SEQ ID NO: 129683 - protein, 17 aa, Artificial Sequence
  Description of Artificial Sequence: Synthetic peptide
  Seed: RMCSLMQGSTLPRRSGA
RMFSLLQSSTSPRRSGA

SEQ ID NO: 129684 - protein, 17 aa, Artificial Sequence
  Description of Artificial Sequence: Synthetic peptide
  Seed: RMCSLMQGSTLPRRSGA
RMFSLLQSSTTPRRSGA

SEQ ID NO: 129685 - protein, 17 aa, Artificial Sequence
  Description of Artificial Sequence: Synthetic peptide
  Seed: RMCSLMQGSTLPRRSGA
RMFSLLQSSTVPRRSGA

SEQ ID NO: 129686 - protein, 17 aa, Artificial Sequence
  Description of Artificial Sequence: Synthetic peptide
  Seed: RMCSLMQGSTLPRRSGA
RMFSLLQTSTAPRRSGA

SEQ ID NO: 129687 - protein, 17 aa, Artificial Sequence
  Description of Artificial Sequence: Synthetic peptide
  Seed: RMCSLMQGSTLPRRSGA
RMFSLLQTSTGPRRSGA

SEQ ID NO: 129688 - protein, 17 aa, Artificial Sequence
  Description of Artificial Sequence: Synthetic peptide
  Seed: RMCSLMQGSTLPRRSGA
RMFSLLQTSTIPRRSGA

SEQ ID NO: 129689 - protein, 17 aa, Artificial Sequence
  Description of Artificial Sequence: Synthetic peptide
  Seed: RMCSLMQGSTLPRRSGA
RMFSLLQTSTLPRRSGA

SEQ ID NO: 129690 - protein, 17 aa, Artificial Sequence
  Description of Artificial Sequence: Synthetic peptide
  Seed: RMCSLMQGSTLPRRSGA
RMFSLLQTSTMPRRSGA

SEQ ID NO: 129691 - protein, 17 aa, Artificial Sequence
  Description of Artificial Sequence: Synthetic peptide
  Seed: RMCSLMQGSTLPRRSGA
RMFSLLQTSTSPRRSGA

SEQ ID NO: 129692 - protein, 17 aa, Artificial Sequence
  Description of Artificial Sequence: Synthetic peptide
  Seed: RMCSLMQGSTLPRRSGA
RMFSLLQTSTTPRRSGA

SEQ ID NO: 129693 - protein, 17 aa, Artificial Sequence
  Description of Artificial Sequence: Synthetic peptide
  Seed: RMCSLMQGSTLPRRSGA
RMFSLLQTSTVPRRSGA

SEQ ID NO: 129694 - protein, 17 aa, Artificial Sequence
  Description of Artificial Sequence: Synthetic peptide
  Seed: RMCSLMQGSTLPRRSGA
RMFSLLQVSTAPRRSGA

SEQ ID NO: 129695 - protein, 17 aa, Artificial Sequence
  Description of Artificial Sequence: Synthetic peptide
  Seed: RMCSLMQGSTLPRRSGA
RMFSLLQVSTIPRRSGA

SEQ ID NO: 129696 - protein, 17 aa, Artificial Sequence
  Description of Artificial Sequence: Synthetic peptide
  Seed: RMCSLMQGSTLPRRSGA
RMFSLLQVSTLPRRSGA

SEQ ID NO: 129697 - protein, 17 aa, Artificial Sequence
  Description of Artificial Sequence: Synthetic peptide
  Seed: RMCSLMQGSTLPRRSGA
RMFSLLQVSTMPRRSGA

SEQ ID NO: 129698 - protein, 17 aa, Artificial Sequence
  Description of Artificial Sequence: Synthetic peptide
  Seed: RMCSLMQGSTLPRRSGA
RMFSLLQVSTSPRRSGA

SEQ ID NO: 129699 - protein, 17 aa, Artificial Sequence
  Description of Artificial Sequence: Synthetic peptide
  Seed: RMCSLMQGSTLPRRSGA
RMFSLLQVSTTPRRSGA

SEQ ID NO: 129700 - protein, 17 aa, Artificial Sequence
  Description of Artificial Sequence: Synthetic peptide
  Seed: RMCSLMQGSTLPRRSGA
RMFSLLQVSTVPRRSGA

SEQ ID NO: 129701 - protein, 17 aa, Artificial Sequence
  Description of Artificial Sequence: Synthetic peptide
  Seed: RMCSLMQGSTLPRRSGA
RMFSLMQASTAPRRSGA

SEQ ID NO: 129702 - protein, 17 aa, Artificial Sequence
  Description of Artificial Sequence: Synthetic peptide
  Seed: RMCSLMQGSTLPRRSGA
RMFSLMQASTCPRRSGA

SEQ ID NO: 129703 - protein, 17 aa, Artificial Sequence
  Description of Artificial Sequence: Synthetic peptide
  Seed: RMCSLMQGSTLPRRSGA
RMFSLMQASTFPRRSGA

SEQ ID NO: 129704 - protein, 17 aa, Artificial Sequence
  Description of Artificial Sequence: Synthetic peptide
  Seed: RMCSLMQGSTLPRRSGA
RMFSLMQASTGPRRSGA

SEQ ID NO: 129705 - protein, 17 aa, Artificial Sequence
  Description of Artificial Sequence: Synthetic peptide
  Seed: RMCSLMQGSTLPRRSGA
RMFSLMQASTHPRRSGA

SEQ ID NO: 129706 - protein, 17 aa, Artificial Sequence
  Description of Artificial Sequence: Synthetic peptide
  Seed: RMCSLMQGSTLPRRSGA
RMFSLMQASTIPRRSGA

SEQ ID NO: 129707 - protein, 17 aa, Artificial Sequence
  Description of Artificial Sequence: Synthetic peptide
  Seed: RMCSLMQGSTLPRRSGA
RMFSLMQASTLPRRSGA

SEQ ID NO: 129708 - protein, 17 aa, Artificial Sequence
  Description of Artificial Sequence: Synthetic peptide
  Seed: RMCSLMQGSTLPRRSGA
RMFSLMQASTMPRRSGA

SEQ ID NO: 129709 - protein, 17 aa, Artificial Sequence
  Description of Artificial Sequence: Synthetic peptide
  Seed: RMCSLMQGSTLPRRSGA
RMFSLMQASTNPRRSGA

SEQ ID NO: 129710 - protein, 17 aa, Artificial Sequence
  Description of Artificial Sequence: Synthetic peptide
  Seed: RMCSLMQGSTLPRRSGA
RMFSLMQASTPPRRSGA

SEQ ID NO: 129711 - protein, 17 aa, Artificial Sequence
  Description of Artificial Sequence: Synthetic peptide
  Seed: RMCSLMQGSTLPRRSGA
RMFSLMQASTQPRRSGA

SEQ ID NO: 129712 - protein, 17 aa, Artificial Sequence
  Description of Artificial Sequence: Synthetic peptide
  Seed: RMCSLMQGSTLPRRSGA
RMFSLMQASTRPRRSGA

SEQ ID NO: 129713 - protein, 17 aa, Artificial Sequence
  Description of Artificial Sequence: Synthetic peptide
  Seed: RMCSLMQGSTLPRRSGA
RMFSLMQASTSPRRSGA

SEQ ID NO: 129714 - protein, 17 aa, Artificial Sequence
  Description of Artificial Sequence: Synthetic peptide
  Seed: RMCSLMQGSTLPRRSGA
RMFSLMQASTTPRRSGA

SEQ ID NO: 129715 - protein, 17 aa, Artificial Sequence
  Description of Artificial Sequence: Synthetic peptide
  Seed: RMCSLMQGSTLPRRSGA
RMFSLMQASTVPRRSGA

SEQ ID NO: 129716 - protein, 17 aa, Artificial Sequence
  Description of Artificial Sequence: Synthetic peptide
  Seed: RMCSLMQGSTLPRRSGA
RMFSLMQASTWPRRSGA

SEQ ID NO: 129717 - protein, 17 aa, Artificial Sequence
  Description of Artificial Sequence: Synthetic peptide
  Seed: RMCSLMQGSTLPRRSGA
RMFSLMQASTYPRRSGA

SEQ ID NO: 129718 - protein, 17 aa, Artificial Sequence
  Description of Artificial Sequence: Synthetic peptide
  Seed: RMCSLMQGSTLPRRSGA
RMFSLMQGSTAPRRSGA

SEQ ID NO: 129719 - protein, 17 aa, Artificial Sequence
  Description of Artificial Sequence: Synthetic peptide
  Seed: RMCSLMQGSTLPRRSGA
RMFSLMQGSTCPRRSGA

SEQ ID NO: 129720 - protein, 17 aa, Artificial Sequence
  Description of Artificial Sequence: Synthetic peptide
  Seed: RMCSLMQGSTLPRRSGA
RMFSLMQGSTFPRRSGA

SEQ ID NO: 129721 - protein, 17 aa, Artificial Sequence
  Description of Artificial Sequence: Synthetic peptide
  Seed: RMCSLMQGSTLPRRSGA
RMFSLMQGSTGPRRSGA

SEQ ID NO: 129722 - protein, 17 aa, Artificial Sequence
  Description of Artificial Sequence: Synthetic peptide
  Seed: RMCSLMQGSTLPRRSGA
RMFSLMQGSTIPRRSGA

SEQ ID NO: 129723 - protein, 17 aa, Artificial Sequence
  Description of Artificial Sequence: Synthetic peptide
  Seed: RMCSLMQGSTLPRRSGA
RMFSLMQGSTLPRRSGA

SEQ ID NO: 129724 - protein, 17 aa, Artificial Sequence
  Description of Artificial Sequence: Synthetic peptide
  Seed: RMCSLMQGSTLPRRSGA
RMFSLMQGSTMPRRSGA

SEQ ID NO: 129725 - protein, 17 aa, Artificial Sequence
  Description of Artificial Sequence: Synthetic peptide
  Seed: RMCSLMQGSTLPRRSGA
RMFSLMQGSTNPRRSGA

SEQ ID NO: 129726 - protein, 17 aa, Artificial Sequence
  Description of Artificial Sequence: Synthetic peptide
  Seed: RMCSLMQGSTLPRRSGA
RMFSLMQGSTSPRRSGA

SEQ ID NO: 129727 - protein, 17 aa, Artificial Sequence
  Description of Artificial Sequence: Synthetic peptide
  Seed: RMCSLMQGSTLPRRSGA
RMFSLMQGSTTPRRSGA

SEQ ID NO: 129728 - protein, 17 aa, Artificial Sequence
  Description of Artificial Sequence: Synthetic peptide
  Seed: RMCSLMQGSTLPRRSGA
RMFSLMQGSTVPRRSGA

SEQ ID NO: 129729 - protein, 17 aa, Artificial Sequence
  Description of Artificial Sequence: Synthetic peptide
  Seed: RMCSLMQGSTLPRRSGA
RMFSLMQGSTYPRRSGA

SEQ ID NO: 129730 - protein, 17 aa, Artificial Sequence
  Description of Artificial Sequence: Synthetic peptide
  Seed: RMCSLMQGSTLPRRSGA
RMFSLMQHSTIPRRSGA

SEQ ID NO: 129731 - protein, 17 aa, Artificial Sequence
  Description of Artificial Sequence: Synthetic peptide
  Seed: RMCSLMQGSTLPRRSGA
RMFSLMQHSTLPRRSGA

SEQ ID NO: 129732 - protein, 17 aa, Artificial Sequence
  Description of Artificial Sequence: Synthetic peptide
  Seed: RMCSLMQGSTLPRRSGA
RMFSLMQHSTVPRRSGA

SEQ ID NO: 129733 - protein, 17 aa, Artificial Sequence
  Description of Artificial Sequence: Synthetic peptide
  Seed: RMCSLMQGSTLPRRSGA
RMFSLMQISTAPRRSGA

SEQ ID NO: 129734 - protein, 17 aa, Artificial Sequence
  Description of Artificial Sequence: Synthetic peptide
  Seed: RMCSLMQGSTLPRRSGA
RMFSLMQISTIPRRSGA

SEQ ID NO: 129735 - protein, 17 aa, Artificial Sequence
  Description of Artificial Sequence: Synthetic peptide
  Seed: RMCSLMQGSTLPRRSGA
RMFSLMQISTLPRRSGA

SEQ ID NO: 129736 - protein, 17 aa, Artificial Sequence
  Description of Artificial Sequence: Synthetic peptide
  Seed: RMCSLMQGSTLPRRSGA
RMFSLMQISTMPRRSGA

SEQ ID NO: 129737 - protein, 17 aa, Artificial Sequence
  Description of Artificial Sequence: Synthetic peptide
  Seed: RMCSLMQGSTLPRRSGA
RMFSLMQISTSPRRSGA

SEQ ID NO: 129738 - protein, 17 aa, Artificial Sequence
  Description of Artificial Sequence: Synthetic peptide
  Seed: RMCSLMQGSTLPRRSGA
RMFSLMQISTTPRRSGA

SEQ ID NO: 129739 - protein, 17 aa, Artificial Sequence
  Description of Artificial Sequence: Synthetic peptide
  Seed: RMCSLMQGSTLPRRSGA
RMFSLMQISTVPRRSGA

SEQ ID NO: 129740 - protein, 17 aa, Artificial Sequence
  Description of Artificial Sequence: Synthetic peptide
  Seed: RMCSLMQGSTLPRRSGA
RMFSLMQNSTAPRRSGA

SEQ ID NO: 129741 - protein, 17 aa, Artificial Sequence
  Description of Artificial Sequence: Synthetic peptide
  Seed: RMCSLMQGSTLPRRSGA
RMFSLMQNSTGPRRSGA

SEQ ID NO: 129742 - protein, 17 aa, Artificial Sequence
  Description of Artificial Sequence: Synthetic peptide
  Seed: RMCSLMQGSTLPRRSGA
RMFSLMQNSTIPRRSGA

SEQ ID NO: 129743 - protein, 17 aa, Artificial Sequence
  Description of Artificial Sequence: Synthetic peptide
  Seed: RMCSLMQGSTLPRRSGA
RMFSLMQNSTLPRRSGA

SEQ ID NO: 129744 - protein, 17 aa, Artificial Sequence
  Description of Artificial Sequence: Synthetic peptide
  Seed: RMCSLMQGSTLPRRSGA
RMFSLMQNSTMPRRSGA

SEQ ID NO: 129745 - protein, 17 aa, Artificial Sequence
  Description of Artificial Sequence: Synthetic peptide
  Seed: RMCSLMQGSTLPRRSGA
RMFSLMQNSTSPRRSGA

SEQ ID NO: 129746 - protein, 17 aa, Artificial Sequence
  Description of Artificial Sequence: Synthetic peptide
  Seed: RMCSLMQGSTLPRRSGA
RMFSLMQNSTTPRRSGA

SEQ ID NO: 129747 - protein, 17 aa, Artificial Sequence
  Description of Artificial Sequence: Synthetic peptide
  Seed: RMCSLMQGSTLPRRSGA
RMFSLMQNSTVPRRSGA

SEQ ID NO: 129748 - protein, 17 aa, Artificial Sequence
  Description of Artificial Sequence: Synthetic peptide
  Seed: RMCSLMQGSTLPRRSGA
RMFSLMQPSTAPRRSGA

SEQ ID NO: 129749 - protein, 17 aa, Artificial Sequence
  Description of Artificial Sequence: Synthetic peptide
  Seed: RMCSLMQGSTLPRRSGA
RMFSLMQPSTCPRRSGA

SEQ ID NO: 129750 - protein, 17 aa, Artificial Sequence
  Description of Artificial Sequence: Synthetic peptide
  Seed: RMCSLMQGSTLPRRSGA
RMFSLMQPSTFPRRSGA

SEQ ID NO: 129751 - protein, 17 aa, Artificial Sequence
  Description of Artificial Sequence: Synthetic peptide
  Seed: RMCSLMQGSTLPRRSGA
RMFSLMQPSTGPRRSGA

SEQ ID NO: 129752 - protein, 17 aa, Artificial Sequence
  Description of Artificial Sequence: Synthetic peptide
  Seed: RMCSLMQGSTLPRRSGA
RMFSLMQPSTIPRRSGA

SEQ ID NO: 129753 - protein, 17 aa, Artificial Sequence
  Description of Artificial Sequence: Synthetic peptide
  Seed: RMCSLMQGSTLPRRSGA
RMFSLMQPSTLPRRSGA

SEQ ID NO: 129754 - protein, 17 aa, Artificial Sequence
  Description of Artificial Sequence: Synthetic peptide
  Seed: RMCSLMQGSTLPRRSGA
RMFSLMQPSTMPRRSGA

SEQ ID NO: 129755 - protein, 17 aa, Artificial Sequence
  Description of Artificial Sequence: Synthetic peptide
  Seed: RMCSLMQGSTLPRRSGA
RMFSLMQPSTNPRRSGA

SEQ ID NO: 129756 - protein, 17 aa, Artificial Sequence
  Description of Artificial Sequence: Synthetic peptide
  Seed: RMCSLMQGSTLPRRSGA
RMFSLMQPSTSPRRSGA

SEQ ID NO: 129757 - protein, 17 aa, Artificial Sequence
  Description of Artificial Sequence: Synthetic peptide
  Seed: RMCSLMQGSTLPRRSGA
RMFSLMQPSTTPRRSGA

SEQ ID NO: 129758 - protein, 17 aa, Artificial Sequence
  Description of Artificial Sequence: Synthetic peptide
  Seed: RMCSLMQGSTLPRRSGA
RMFSLMQPSTVPRRSGA

SEQ ID NO: 129759 - protein, 17 aa, Artificial Sequence
  Description of Artificial Sequence: Synthetic peptide
  Seed: RMCSLMQGSTLPRRSGA
RMFSLMQSSTAPRRSGA

SEQ ID NO: 129760 - protein, 17 aa, Artificial Sequence
  Description of Artificial Sequence: Synthetic peptide
  Seed: RMCSLMQGSTLPRRSGA
RMFSLMQSSTCPRRSGA

SEQ ID NO: 129761 - protein, 17 aa, Artificial Sequence
  Description of Artificial Sequence: Synthetic peptide
  Seed: RMCSLMQGSTLPRRSGA
RMFSLMQSSTFPRRSGA

SEQ ID NO: 129762 - protein, 17 aa, Artificial Sequence
  Description of Artificial Sequence: Synthetic peptide
  Seed: RMCSLMQGSTLPRRSGA
RMFSLMQSSTGPRRSGA

SEQ ID NO: 129763 - protein, 17 aa, Artificial Sequence
  Description of Artificial Sequence: Synthetic peptide
  Seed: RMCSLMQGSTLPRRSGA
RMFSLMQSSTIPRRSGA

SEQ ID NO: 129764 - protein, 17 aa, Artificial Sequence
  Description of Artificial Sequence: Synthetic peptide
  Seed: RMCSLMQGSTLPRRSGA
RMFSLMQSSTLPRRSGA

SEQ ID NO: 129765 - protein, 17 aa, Artificial Sequence
  Description of Artificial Sequence: Synthetic peptide
  Seed: RMCSLMQGSTLPRRSGA
RMFSLMQSSTMPRRSGA

SEQ ID NO: 129766 - protein, 17 aa, Artificial Sequence
  Description of Artificial Sequence: Synthetic peptide
  Seed: RMCSLMQGSTLPRRSGA
RMFSLMQSSTNPRRSGA

SEQ ID NO: 129767 - protein, 17 aa, Artificial Sequence
  Description of Artificial Sequence: Synthetic peptide
  Seed: RMCSLMQGSTLPRRSGA
RMFSLMQSSTSPRRSGA

SEQ ID NO: 129768 - protein, 17 aa, Artificial Sequence
  Description of Artificial Sequence: Synthetic peptide
  Seed: RMCSLMQGSTLPRRSGA
RMFSLMQSSTTPRRSGA

SEQ ID NO: 129769 - protein, 17 aa, Artificial Sequence
  Description of Artificial Sequence: Synthetic peptide
  Seed: RMCSLMQGSTLPRRSGA
RMFSLMQSSTVPRRSGA

SEQ ID NO: 129770 - protein, 17 aa, Artificial Sequence
  Description of Artificial Sequence: Synthetic peptide
  Seed: RMCSLMQGSTLPRRSGA
RMFSLMQTSTAPRRSGA

SEQ ID NO: 129771 - protein, 17 aa, Artificial Sequence
  Description of Artificial Sequence: Synthetic peptide
  Seed: RMCSLMQGSTLPRRSGA
RMFSLMQTSTGPRRSGA

SEQ ID NO: 129772 - protein, 17 aa, Artificial Sequence
  Description of Artificial Sequence: Synthetic peptide
  Seed: RMCSLMQGSTLPRRSGA
RMFSLMQTSTIPRRSGA

SEQ ID NO: 129773 - protein, 17 aa, Artificial Sequence
  Description of Artificial Sequence: Synthetic peptide
  Seed: RMCSLMQGSTLPRRSGA
RMFSLMQTSTLPRRSGA

SEQ ID NO: 129774 - protein, 17 aa, Artificial Sequence
  Description of Artificial Sequence: Synthetic peptide
  Seed: RMCSLMQGSTLPRRSGA
RMFSLMQTSTMPRRSGA

SEQ ID NO: 129775 - protein, 17 aa, Artificial Sequence
  Description of Artificial Sequence: Synthetic peptide
  Seed: RMCSLMQGSTLPRRSGA
RMFSLMQTSTSPRRSGA

SEQ ID NO: 129776 - protein, 17 aa, Artificial Sequence
  Description of Artificial Sequence: Synthetic peptide
  Seed: RMCSLMQGSTLPRRSGA
RMFSLMQTSTTPRRSGA

SEQ ID NO: 129777 - protein, 17 aa, Artificial Sequence
  Description of Artificial Sequence: Synthetic peptide
  Seed: RMCSLMQGSTLPRRSGA
RMFSLMQTSTVPRRSGA

SEQ ID NO: 129778 - protein, 17 aa, Artificial Sequence
  Description of Artificial Sequence: Synthetic peptide
  Seed: RMCSLMQGSTLPRRSGA
RMFSLMQVSTAPRRSGA

SEQ ID NO: 129779 - protein, 17 aa, Artificial Sequence
  Description of Artificial Sequence: Synthetic peptide
  Seed: RMCSLMQGSTLPRRSGA
RMFSLMQVSTIPRRSGA

SEQ ID NO: 129780 - protein, 17 aa, Artificial Sequence
  Description of Artificial Sequence: Synthetic peptide
  Seed: RMCSLMQGSTLPRRSGA
RMFSLMQVSTLPRRSGA

SEQ ID NO: 129781 - protein, 17 aa, Artificial Sequence
  Description of Artificial Sequence: Synthetic peptide
  Seed: RMCSLMQGSTLPRRSGA
RMFSLMQVSTMPRRSGA

SEQ ID NO: 129782 - protein, 17 aa, Artificial Sequence
  Description of Artificial Sequence: Synthetic peptide
  Seed: RMCSLMQGSTLPRRSGA
RMFSLMQVSTSPRRSGA

SEQ ID NO: 129783 - protein, 17 aa, Artificial Sequence
  Description of Artificial Sequence: Synthetic peptide
  Seed: RMCSLMQGSTLPRRSGA
RMFSLMQVSTTPRRSGA

SEQ ID NO: 129784 - protein, 17 aa, Artificial Sequence
  Description of Artificial Sequence: Synthetic peptide
  Seed: RMCSLMQGSTLPRRSGA
RMFSLMQVSTVPRRSGA

SEQ ID NO: 129785 - protein, 17 aa, Artificial Sequence
  Description of Artificial Sequence: Synthetic peptide
  Seed: RMCSLMQGSTLPRRSGA
RMFSLNQASTIPRRSGA

SEQ ID NO: 129786 - protein, 17 aa, Artificial Sequence
  Description of Artificial Sequence: Synthetic peptide
  Seed: RMCSLMQGSTLPRRSGA
RMFSLNQASTLPRRSGA

SEQ ID NO: 129787 - protein, 17 aa, Artificial Sequence
  Description of Artificial Sequence: Synthetic peptide
  Seed: RMCSLMQGSTLPRRSGA
RMFSLNQASTVPRRSGA

SEQ ID NO: 129788 - protein, 17 aa, Artificial Sequence
  Description of Artificial Sequence: Synthetic peptide
  Seed: RMCSLMQGSTLPRRSGA
RMFSLQQASTAPRRSGA

SEQ ID NO: 129789 - protein, 17 aa, Artificial Sequence
  Description of Artificial Sequence: Synthetic peptide
  Seed: RMCSLMQGSTLPRRSGA
RMFSLQQASTIPRRSGA

SEQ ID NO: 129790 - protein, 17 aa, Artificial Sequence
  Description of Artificial Sequence: Synthetic peptide
  Seed: RMCSLMQGSTLPRRSGA
RMFSLQQASTLPRRSGA

SEQ ID NO: 129791 - protein, 17 aa, Artificial Sequence
  Description of Artificial Sequence: Synthetic peptide
  Seed: RMCSLMQGSTLPRRSGA
RMFSLQQASTMPRRSGA

SEQ ID NO: 129792 - protein, 17 aa, Artificial Sequence
  Description of Artificial Sequence: Synthetic peptide
  Seed: RMCSLMQGSTLPRRSGA
RMFSLQQASTSPRRSGA

SEQ ID NO: 129793 - protein, 17 aa, Artificial Sequence
  Description of Artificial Sequence: Synthetic peptide
  Seed: RMCSLMQGSTLPRRSGA
RMFSLQQASTTPRRSGA

SEQ ID NO: 129794 - protein, 17 aa, Artificial Sequence
  Description of Artificial Sequence: Synthetic peptide
  Seed: RMCSLMQGSTLPRRSGA
RMFSLQQASTVPRRSGA

SEQ ID NO: 129795 - protein, 17 aa, Artificial Sequence
  Description of Artificial Sequence: Synthetic peptide
  Seed: RMCSLMQGSTLPRRSGA
RMFSLQQGSTAPRRSGA

SEQ ID NO: 129796 - protein, 17 aa, Artificial Sequence
  Description of Artificial Sequence: Synthetic peptide
  Seed: RMCSLMQGSTLPRRSGA
RMFSLQQGSTIPRRSGA

SEQ ID NO: 129797 - protein, 17 aa, Artificial Sequence
  Description of Artificial Sequence: Synthetic peptide
  Seed: RMCSLMQGSTLPRRSGA
RMFSLQQGSTLPRRSGA

SEQ ID NO: 129798 - protein, 17 aa, Artificial Sequence
  Description of Artificial Sequence: Synthetic peptide
  Seed: RMCSLMQGSTLPRRSGA
RMFSLQQGSTMPRRSGA

SEQ ID NO: 129799 - protein, 17 aa, Artificial Sequence
  Description of Artificial Sequence: Synthetic peptide
  Seed: RMCSLMQGSTLPRRSGA
RMFSLQQGSTTPRRSGA

SEQ ID NO: 129800 - protein, 17 aa, Artificial Sequence
  Description of Artificial Sequence: Synthetic peptide
  Seed: RMCSLMQGSTLPRRSGA
RMFSLQQGSTVPRRSGA

SEQ ID NO: 129801 - protein, 17 aa, Artificial Sequence
  Description of Artificial Sequence: Synthetic peptide
  Seed: RMCSLMQGSTLPRRSGA
RMFSLQQNSTIPRRSGA

SEQ ID NO: 129802 - protein, 17 aa, Artificial Sequence
  Description of Artificial Sequence: Synthetic peptide
  Seed: RMCSLMQGSTLPRRSGA
RMFSLQQNSTLPRRSGA

SEQ ID NO: 129803 - protein, 17 aa, Artificial Sequence
  Description of Artificial Sequence: Synthetic peptide
  Seed: RMCSLMQGSTLPRRSGA
RMFSLQQNSTVPRRSGA

SEQ ID NO: 129804 - protein, 17 aa, Artificial Sequence
  Description of Artificial Sequence: Synthetic peptide
  Seed: RMCSLMQGSTLPRRSGA
RMFSLQQPSTAPRRSGA

SEQ ID NO: 129805 - protein, 17 aa, Artificial Sequence
  Description of Artificial Sequence: Synthetic peptide
  Seed: RMCSLMQGSTLPRRSGA
RMFSLQQPSTIPRRSGA

SEQ ID NO: 129806 - protein, 17 aa, Artificial Sequence
  Description of Artificial Sequence: Synthetic peptide
  Seed: RMCSLMQGSTLPRRSGA
RMFSLQQPSTLPRRSGA

SEQ ID NO: 129807 - protein, 17 aa, Artificial Sequence
  Description of Artificial Sequence: Synthetic peptide
  Seed: RMCSLMQGSTLPRRSGA
RMFSLQQPSTVPRRSGA

SEQ ID NO: 129808 - protein, 17 aa, Artificial Sequence
  Description of Artificial Sequence: Synthetic peptide
  Seed: RMCSLMQGSTLPRRSGA
RMFSLQQSSTAPRRSGA

SEQ ID NO: 129809 - protein, 17 aa, Artificial Sequence
  Description of Artificial Sequence: Synthetic peptide
  Seed: RMCSLMQGSTLPRRSGA
RMFSLQQSSTIPRRSGA

SEQ ID NO: 129810 - protein, 17 aa, Artificial Sequence
  Description of Artificial Sequence: Synthetic peptide
  Seed: RMCSLMQGSTLPRRSGA
RMFSLQQSSTLPRRSGA

SEQ ID NO: 129811 - protein, 17 aa, Artificial Sequence
  Description of Artificial Sequence: Synthetic peptide
  Seed: RMCSLMQGSTLPRRSGA
RMFSLQQSSTMPRRSGA

SEQ ID NO: 129812 - protein, 17 aa, Artificial Sequence
  Description of Artificial Sequence: Synthetic peptide
  Seed: RMCSLMQGSTLPRRSGA
RMFSLQQSSTTPRRSGA

SEQ ID NO: 129813 - protein, 17 aa, Artificial Sequence
  Description of Artificial Sequence: Synthetic peptide
  Seed: RMCSLMQGSTLPRRSGA
RMFSLQQSSTVPRRSGA

SEQ ID NO: 129814 - protein, 17 aa, Artificial Sequence
  Description of Artificial Sequence: Synthetic peptide
  Seed: RMCSLMQGSTLPRRSGA
RMFSLQQTSTIPRRSGA

SEQ ID NO: 129815 - protein, 17 aa, Artificial Sequence
  Description of Artificial Sequence: Synthetic peptide
  Seed: RMCSLMQGSTLPRRSGA
RMFSLQQTSTLPRRSGA

SEQ ID NO: 129816 - protein, 17 aa, Artificial Sequence
  Description of Artificial Sequence: Synthetic peptide
  Seed: RMCSLMQGSTLPRRSGA
RMFSLQQTSTVPRRSGA

SEQ ID NO: 129817 - protein, 17 aa, Artificial Sequence
  Description of Artificial Sequence: Synthetic peptide
  Seed: RMCSLMQGSTLPRRSGA
RMFSLSQASTAPRRSGA

SEQ ID NO: 129818 - protein, 17 aa, Artificial Sequence
  Description of Artificial Sequence: Synthetic peptide
  Seed: RMCSLMQGSTLPRRSGA
RMFSLSQASTIPRRSGA

SEQ ID NO: 129819 - protein, 17 aa, Artificial Sequence
  Description of Artificial Sequence: Synthetic peptide
  Seed: RMCSLMQGSTLPRRSGA
RMFSLSQASTLPRRSGA

SEQ ID NO: 129820 - protein, 17 aa, Artificial Sequence
  Description of Artificial Sequence: Synthetic peptide
  Seed: RMCSLMQGSTLPRRSGA
RMFSLSQASTMPRRSGA

SEQ ID NO: 129821 - protein, 17 aa, Artificial Sequence
  Description of Artificial Sequence: Synthetic peptide
  Seed: RMCSLMQGSTLPRRSGA
RMFSLSQASTTPRRSGA

SEQ ID NO: 129822 - protein, 17 aa, Artificial Sequence
  Description of Artificial Sequence: Synthetic peptide
  Seed: RMCSLMQGSTLPRRSGA
RMFSLSQASTVPRRSGA

SEQ ID NO: 129823 - protein, 17 aa, Artificial Sequence
  Description of Artificial Sequence: Synthetic peptide
  Seed: RMCSLMQGSTLPRRSGA
RMFSLSQGSTIPRRSGA

SEQ ID NO: 129824 - protein, 17 aa, Artificial Sequence
  Description of Artificial Sequence: Synthetic peptide
  Seed: RMCSLMQGSTLPRRSGA
RMFSLSQGSTLPRRSGA

SEQ ID NO: 129825 - protein, 17 aa, Artificial Sequence
  Description of Artificial Sequence: Synthetic peptide
  Seed: RMCSLMQGSTLPRRSGA
RMFSLSQGSTVPRRSGA

SEQ ID NO: 129826 - protein, 17 aa, Artificial Sequence
  Description of Artificial Sequence: Synthetic peptide
  Seed: RMCSLMQGSTLPRRSGA
RMFSLSQPSTIPRRSGA

SEQ ID NO: 129827 - protein, 17 aa, Artificial Sequence
  Description of Artificial Sequence: Synthetic peptide
  Seed: RMCSLMQGSTLPRRSGA
RMFSLSQPSTLPRRSGA

SEQ ID NO: 129828 - protein, 17 aa, Artificial Sequence
  Description of Artificial Sequence: Synthetic peptide
  Seed: RMCSLMQGSTLPRRSGA
RMFSLSQPSTVPRRSGA

SEQ ID NO: 129829 - protein, 17 aa, Artificial Sequence
  Description of Artificial Sequence: Synthetic peptide
  Seed: RMCSLMQGSTLPRRSGA
RMFSLSQSSTIPRRSGA

SEQ ID NO: 129830 - protein, 17 aa, Artificial Sequence
  Description of Artificial Sequence: Synthetic peptide
  Seed: RMCSLMQGSTLPRRSGA
RMFSLSQSSTLPRRSGA

SEQ ID NO: 129831 - protein, 17 aa, Artificial Sequence
  Description of Artificial Sequence: Synthetic peptide
  Seed: RMCSLMQGSTLPRRSGA
RMFSLSQSSTVPRRSGA

SEQ ID NO: 129832 - protein, 17 aa, Artificial Sequence
  Description of Artificial Sequence: Synthetic peptide
  Seed: RMCSLMQGSTLPRRSGA
RMFSLTQASTAPRRSGA

SEQ ID NO: 129833 - protein, 17 aa, Artificial Sequence
  Description of Artificial Sequence: Synthetic peptide
  Seed: RMCSLMQGSTLPRRSGA
RMFSLTQASTIPRRSGA

SEQ ID NO: 129834 - protein, 17 aa, Artificial Sequence
  Description of Artificial Sequence: Synthetic peptide
  Seed: RMCSLMQGSTLPRRSGA
RMFSLTQASTLPRRSGA

SEQ ID NO: 129835 - protein, 17 aa, Artificial Sequence
  Description of Artificial Sequence: Synthetic peptide
  Seed: RMCSLMQGSTLPRRSGA
RMFSLTQASTVPRRSGA

SEQ ID NO: 129836 - protein, 17 aa, Artificial Sequence
  Description of Artificial Sequence: Synthetic peptide
  Seed: RMCSLMQGSTLPRRSGA
RMFSLTQGSTLPRRSGA

SEQ ID NO: 129837 - protein, 17 aa, Artificial Sequence
  Description of Artificial Sequence: Synthetic peptide
  Seed: RMCSLMQGSTLPRRSGA
RMFSLTQGSTVPRRSGA

SEQ ID NO: 129838 - protein, 17 aa, Artificial Sequence
  Description of Artificial Sequence: Synthetic peptide
  Seed: RMCSLMQGSTLPRRSGA
RMFSLTQSSTIPRRSGA

SEQ ID NO: 129839 - protein, 17 aa, Artificial Sequence
  Description of Artificial Sequence: Synthetic peptide
  Seed: RMCSLMQGSTLPRRSGA
RMFSLVQASTAPRRSGA

SEQ ID NO: 129840 - protein, 17 aa, Artificial Sequence
  Description of Artificial Sequence: Synthetic peptide
  Seed: RMCSLMQGSTLPRRSGA
RMFSLVQASTGPRRSGA

SEQ ID NO: 129841 - protein, 17 aa, Artificial Sequence
  Description of Artificial Sequence: Synthetic peptide
  Seed: RMCSLMQGSTLPRRSGA
RMFSLVQASTIPRRSGA

SEQ ID NO: 129842 - protein, 17 aa, Artificial Sequence
  Description of Artificial Sequence: Synthetic peptide
  Seed: RMCSLMQGSTLPRRSGA
RMFSLVQASTLPRRSGA

SEQ ID NO: 129843 - protein, 17 aa, Artificial Sequence
  Description of Artificial Sequence: Synthetic peptide
  Seed: RMCSLMQGSTLPRRSGA
RMFSLVQASTMPRRSGA

SEQ ID NO: 129844 - protein, 17 aa, Artificial Sequence
  Description of Artificial Sequence: Synthetic peptide
  Seed: RMCSLMQGSTLPRRSGA
RMFSLVQASTSPRRSGA

SEQ ID NO: 129845 - protein, 17 aa, Artificial Sequence
  Description of Artificial Sequence: Synthetic peptide
  Seed: RMCSLMQGSTLPRRSGA
RMFSLVQASTTPRRSGA

SEQ ID NO: 129846 - protein, 17 aa, Artificial Sequence
  Description of Artificial Sequence: Synthetic peptide
  Seed: RMCSLMQGSTLPRRSGA
RMFSLVQASTVPRRSGA

SEQ ID NO: 129847 - protein, 17 aa, Artificial Sequence
  Description of Artificial Sequence: Synthetic peptide
  Seed: RMCSLMQGSTLPRRSGA
RMFSLVQGSTAPRRSGA

SEQ ID NO: 129848 - protein, 17 aa, Artificial Sequence
  Description of Artificial Sequence: Synthetic peptide
  Seed: RMCSLMQGSTLPRRSGA
RMFSLVQGSTIPRRSGA

SEQ ID NO: 129849 - protein, 17 aa, Artificial Sequence
  Description of Artificial Sequence: Synthetic peptide
  Seed: RMCSLMQGSTLPRRSGA
RMFSLVQGSTLPRRSGA

SEQ ID NO: 129850 - protein, 17 aa, Artificial Sequence
  Description of Artificial Sequence: Synthetic peptide
  Seed: RMCSLMQGSTLPRRSGA
RMFSLVQGSTMPRRSGA

SEQ ID NO: 129851 - protein, 17 aa, Artificial Sequence
  Description of Artificial Sequence: Synthetic peptide
  Seed: RMCSLMQGSTLPRRSGA
RMFSLVQGSTSPRRSGA

SEQ ID NO: 129852 - protein, 17 aa, Artificial Sequence
  Description of Artificial Sequence: Synthetic peptide
  Seed: RMCSLMQGSTLPRRSGA
RMFSLVQGSTTPRRSGA

SEQ ID NO: 129853 - protein, 17 aa, Artificial Sequence
  Description of Artificial Sequence: Synthetic peptide
  Seed: RMCSLMQGSTLPRRSGA
RMFSLVQGSTVPRRSGA

SEQ ID NO: 129854 - protein, 17 aa, Artificial Sequence
  Description of Artificial Sequence: Synthetic peptide
  Seed: RMCSLMQGSTLPRRSGA
RMFSLVQNSTAPRRSGA

SEQ ID NO: 129855 - protein, 17 aa, Artificial Sequence
  Description of Artificial Sequence: Synthetic peptide
  Seed: RMCSLMQGSTLPRRSGA
RMFSLVQNSTIPRRSGA

SEQ ID NO: 129856 - protein, 17 aa, Artificial Sequence
  Description of Artificial Sequence: Synthetic peptide
  Seed: RMCSLMQGSTLPRRSGA
RMFSLVQNSTLPRRSGA

SEQ ID NO: 129857 - protein, 17 aa, Artificial Sequence
  Description of Artificial Sequence: Synthetic peptide
  Seed: RMCSLMQGSTLPRRSGA
RMFSLVQNSTVPRRSGA

SEQ ID NO: 129858 - protein, 17 aa, Artificial Sequence
  Description of Artificial Sequence: Synthetic peptide
  Seed: RMCSLMQGSTLPRRSGA
RMFSLVQPSTAPRRSGA

SEQ ID NO: 129859 - protein, 17 aa, Artificial Sequence
  Description of Artificial Sequence: Synthetic peptide
  Seed: RMCSLMQGSTLPRRSGA
RMFSLVQPSTIPRRSGA

SEQ ID NO: 129860 - protein, 17 aa, Artificial Sequence
  Description of Artificial Sequence: Synthetic peptide
  Seed: RMCSLMQGSTLPRRSGA
RMFSLVQPSTLPRRSGA

SEQ ID NO: 129861 - protein, 17 aa, Artificial Sequence
  Description of Artificial Sequence: Synthetic peptide
  Seed: RMCSLMQGSTLPRRSGA
RMFSLVQPSTMPRRSGA

SEQ ID NO: 129862 - protein, 17 aa, Artificial Sequence
  Description of Artificial Sequence: Synthetic peptide
  Seed: RMCSLMQGSTLPRRSGA
RMFSLVQPSTVPRRSGA

SEQ ID NO: 129863 - protein, 17 aa, Artificial Sequence
  Description of Artificial Sequence: Synthetic peptide
  Seed: RMCSLMQGSTLPRRSGA
RMFSLVQSSTAPRRSGA

SEQ ID NO: 129864 - protein, 17 aa, Artificial Sequence
  Description of Artificial Sequence: Synthetic peptide
  Seed: RMCSLMQGSTLPRRSGA
RMFSLVQSSTIPRRSGA

SEQ ID NO: 129865 - protein, 17 aa, Artificial Sequence
  Description of Artificial Sequence: Synthetic peptide
  Seed: RMCSLMQGSTLPRRSGA
RMFSLVQSSTLPRRSGA

SEQ ID NO: 129866 - protein, 17 aa, Artificial Sequence
  Description of Artificial Sequence: Synthetic peptide
  Seed: RMCSLMQGSTLPRRSGA
RMFSLVQSSTMPRRSGA

SEQ ID NO: 129867 - protein, 17 aa, Artificial Sequence
  Description of Artificial Sequence: Synthetic peptide
  Seed: RMCSLMQGSTLPRRSGA
RMFSLVQSSTSPRRSGA

SEQ ID NO: 129868 - protein, 17 aa, Artificial Sequence
  Description of Artificial Sequence: Synthetic peptide
  Seed: RMCSLMQGSTLPRRSGA
RMFSLVQSSTTPRRSGA

SEQ ID NO: 129869 - protein, 17 aa, Artificial Sequence
  Description of Artificial Sequence: Synthetic peptide
  Seed: RMCSLMQGSTLPRRSGA
RMFSLVQSSTVPRRSGA

SEQ ID NO: 129870 - protein, 17 aa, Artificial Sequence
  Description of Artificial Sequence: Synthetic peptide
  Seed: RMCSLMQGSTLPRRSGA
RMFSLVQTSTAPRRSGA

SEQ ID NO: 129871 - protein, 17 aa, Artificial Sequence
  Description of Artificial Sequence: Synthetic peptide
  Seed: RMCSLMQGSTLPRRSGA
RMFSLVQTSTIPRRSGA

SEQ ID NO: 129872 - protein, 17 aa, Artificial Sequence
  Description of Artificial Sequence: Synthetic peptide
  Seed: RMCSLMQGSTLPRRSGA
RMFSLVQTSTLPRRSGA

SEQ ID NO: 129873 - protein, 17 aa, Artificial Sequence
  Description of Artificial Sequence: Synthetic peptide
  Seed: RMCSLMQGSTLPRRSGA
RMFSLVQTSTVPRRSGA

SEQ ID NO: 129874 - protein, 17 aa, Artificial Sequence
  Description of Artificial Sequence: Synthetic peptide
  Seed: RMCSLMQGSTLPRRSGA
RMISLAQASTAPRRSGA

SEQ ID NO: 129875 - protein, 17 aa, Artificial Sequence
  Description of Artificial Sequence: Synthetic peptide
  Seed: RMCSLMQGSTLPRRSGA
RMISLAQASTIPRRSGA

SEQ ID NO: 129876 - protein, 17 aa, Artificial Sequence
  Description of Artificial Sequence: Synthetic peptide
  Seed: RMCSLMQGSTLPRRSGA
RMISLAQASTLPRRSGA

SEQ ID NO: 129877 - protein, 17 aa, Artificial Sequence
  Description of Artificial Sequence: Synthetic peptide
  Seed: RMCSLMQGSTLPRRSGA
RMISLAQASTVPRRSGA

SEQ ID NO: 129878 - protein, 17 aa, Artificial Sequence
  Description of Artificial Sequence: Synthetic peptide
  Seed: RMCSLMQGSTLPRRSGA
RMISLAQGSTIPRRSGA

SEQ ID NO: 129879 - protein, 17 aa, Artificial Sequence
  Description of Artificial Sequence: Synthetic peptide
  Seed: RMCSLMQGSTLPRRSGA
RMISLAQGSTLPRRSGA

SEQ ID NO: 129880 - protein, 17 aa, Artificial Sequence
  Description of Artificial Sequence: Synthetic peptide
  Seed: RMCSLMQGSTLPRRSGA
RMISLAQGSTVPRRSGA

SEQ ID NO: 129881 - protein, 17 aa, Artificial Sequence
  Description of Artificial Sequence: Synthetic peptide
  Seed: RMCSLMQGSTLPRRSGA
RMISLIQASTAPRRSGA

SEQ ID NO: 129882 - protein, 17 aa, Artificial Sequence
  Description of Artificial Sequence: Synthetic peptide
  Seed: RMCSLMQGSTLPRRSGA
RMISLIQASTIPRRSGA

SEQ ID NO: 129883 - protein, 17 aa, Artificial Sequence
  Description of Artificial Sequence: Synthetic peptide
  Seed: RMCSLMQGSTLPRRSGA
RMISLIQASTLPRRSGA

SEQ ID NO: 129884 - protein, 17 aa, Artificial Sequence
  Description of Artificial Sequence: Synthetic peptide
  Seed: RMCSLMQGSTLPRRSGA
RMISLIQASTMPRRSGA

SEQ ID NO: 129885 - protein, 17 aa, Artificial Sequence
  Description of Artificial Sequence: Synthetic peptide
  Seed: RMCSLMQGSTLPRRSGA
RMISLIQASTTPRRSGA

SEQ ID NO: 129886 - protein, 17 aa, Artificial Sequence
  Description of Artificial Sequence: Synthetic peptide
  Seed: RMCSLMQGSTLPRRSGA
RMISLIQASTVPRRSGA

SEQ ID NO: 129887 - protein, 17 aa, Artificial Sequence
  Description of Artificial Sequence: Synthetic peptide
  Seed: RMCSLMQGSTLPRRSGA
RMISLIQGSTAPRRSGA

SEQ ID NO: 129888 - protein, 17 aa, Artificial Sequence
  Description of Artificial Sequence: Synthetic peptide
  Seed: RMCSLMQGSTLPRRSGA
RMISLIQGSTIPRRSGA

SEQ ID NO: 129889 - protein, 17 aa, Artificial Sequence
  Description of Artificial Sequence: Synthetic peptide
  Seed: RMCSLMQGSTLPRRSGA
RMISLIQGSTLPRRSGA

SEQ ID NO: 129890 - protein, 17 aa, Artificial Sequence
  Description of Artificial Sequence: Synthetic peptide
  Seed: RMCSLMQGSTLPRRSGA
RMISLIQGSTVPRRSGA

SEQ ID NO: 129891 - protein, 17 aa, Artificial Sequence
  Description of Artificial Sequence: Synthetic peptide
  Seed: RMCSLMQGSTLPRRSGA
RMISLIQPSTVPRRSGA

SEQ ID NO: 129892 - protein, 17 aa, Artificial Sequence
  Description of Artificial Sequence: Synthetic peptide
  Seed: RMCSLMQGSTLPRRSGA
RMISLIQSSTAPRRSGA

SEQ ID NO: 129893 - protein, 17 aa, Artificial Sequence
  Description of Artificial Sequence: Synthetic peptide
  Seed: RMCSLMQGSTLPRRSGA
RMISLIQSSTIPRRSGA

SEQ ID NO: 129894 - protein, 17 aa, Artificial Sequence
  Description of Artificial Sequence: Synthetic peptide
  Seed: RMCSLMQGSTLPRRSGA
RMISLIQSSTLPRRSGA

SEQ ID NO: 129895 - protein, 17 aa, Artificial Sequence
  Description of Artificial Sequence: Synthetic peptide
  Seed: RMCSLMQGSTLPRRSGA
RMISLIQSSTVPRRSGA

SEQ ID NO: 129896 - protein, 17 aa, Artificial Sequence
  Description of Artificial Sequence: Synthetic peptide
  Seed: RMCSLMQGSTLPRRSGA
RMISLLQASTAPRRSGA

SEQ ID NO: 129897 - protein, 17 aa, Artificial Sequence
  Description of Artificial Sequence: Synthetic peptide
  Seed: RMCSLMQGSTLPRRSGA
RMISLLQASTGPRRSGA

SEQ ID NO: 129898 - protein, 17 aa, Artificial Sequence
  Description of Artificial Sequence: Synthetic peptide
  Seed: RMCSLMQGSTLPRRSGA
RMISLLQASTIPRRSGA

SEQ ID NO: 129899 - protein, 17 aa, Artificial Sequence
  Description of Artificial Sequence: Synthetic peptide
  Seed: RMCSLMQGSTLPRRSGA
RMISLLQASTLPRRSGA

SEQ ID NO: 129900 - protein, 17 aa, Artificial Sequence
  Description of Artificial Sequence: Synthetic peptide
  Seed: RMCSLMQGSTLPRRSGA
RMISLLQASTMPRRSGA

SEQ ID NO: 129901 - protein, 17 aa, Artificial Sequence
  Description of Artificial Sequence: Synthetic peptide
  Seed: RMCSLMQGSTLPRRSGA
RMISLLQASTSPRRSGA

SEQ ID NO: 129902 - protein, 17 aa, Artificial Sequence
  Description of Artificial Sequence: Synthetic peptide
  Seed: RMCSLMQGSTLPRRSGA
RMISLLQASTTPRRSGA

SEQ ID NO: 129903 - protein, 17 aa, Artificial Sequence
  Description of Artificial Sequence: Synthetic peptide
  Seed: RMCSLMQGSTLPRRSGA
RMISLLQASTVPRRSGA

SEQ ID NO: 129904 - protein, 17 aa, Artificial Sequence
  Description of Artificial Sequence: Synthetic peptide
  Seed: RMCSLMQGSTLPRRSGA
RMISLLQGSTAPRRSGA

SEQ ID NO: 129905 - protein, 17 aa, Artificial Sequence
  Description of Artificial Sequence: Synthetic peptide
  Seed: RMCSLMQGSTLPRRSGA
RMISLLQGSTGPRRSGA

SEQ ID NO: 129906 - protein, 17 aa, Artificial Sequence
  Description of Artificial Sequence: Synthetic peptide
  Seed: RMCSLMQGSTLPRRSGA
RMISLLQGSTIPRRSGA

SEQ ID NO: 129907 - protein, 17 aa, Artificial Sequence
  Description of Artificial Sequence: Synthetic peptide
  Seed: RMCSLMQGSTLPRRSGA
RMISLLQGSTLPRRSGA

SEQ ID NO: 129908 - protein, 17 aa, Artificial Sequence
  Description of Artificial Sequence: Synthetic peptide
  Seed: RMCSLMQGSTLPRRSGA
RMISLLQGSTMPRRSGA

SEQ ID NO: 129909 - protein, 17 aa, Artificial Sequence
  Description of Artificial Sequence: Synthetic peptide
  Seed: RMCSLMQGSTLPRRSGA
RMISLLQGSTSPRRSGA

SEQ ID NO: 129910 - protein, 17 aa, Artificial Sequence
  Description of Artificial Sequence: Synthetic peptide
  Seed: RMCSLMQGSTLPRRSGA
RMISLLQGSTTPRRSGA

SEQ ID NO: 129911 - protein, 17 aa, Artificial Sequence
  Description of Artificial Sequence: Synthetic peptide
  Seed: RMCSLMQGSTLPRRSGA
RMISLLQGSTVPRRSGA

SEQ ID NO: 129912 - protein, 17 aa, Artificial Sequence
  Description of Artificial Sequence: Synthetic peptide
  Seed: RMCSLMQGSTLPRRSGA
RMISLLQNSTAPRRSGA

SEQ ID NO: 129913 - protein, 17 aa, Artificial Sequence
  Description of Artificial Sequence: Synthetic peptide
  Seed: RMCSLMQGSTLPRRSGA
RMISLLQNSTIPRRSGA

SEQ ID NO: 129914 - protein, 17 aa, Artificial Sequence
  Description of Artificial Sequence: Synthetic peptide
  Seed: RMCSLMQGSTLPRRSGA
RMISLLQNSTLPRRSGA

SEQ ID NO: 129915 - protein, 17 aa, Artificial Sequence
  Description of Artificial Sequence: Synthetic peptide
  Seed: RMCSLMQGSTLPRRSGA
RMISLLQNSTVPRRSGA

SEQ ID NO: 129916 - protein, 17 aa, Artificial Sequence
  Description of Artificial Sequence: Synthetic peptide
  Seed: RMCSLMQGSTLPRRSGA
RMISLLQPSTAPRRSGA

SEQ ID NO: 129917 - protein, 17 aa, Artificial Sequence
  Description of Artificial Sequence: Synthetic peptide
  Seed: RMCSLMQGSTLPRRSGA
RMISLLQPSTIPRRSGA

SEQ ID NO: 129918 - protein, 17 aa, Artificial Sequence
  Description of Artificial Sequence: Synthetic peptide
  Seed: RMCSLMQGSTLPRRSGA
RMISLLQPSTLPRRSGA

SEQ ID NO: 129919 - protein, 17 aa, Artificial Sequence
  Description of Artificial Sequence: Synthetic peptide
  Seed: RMCSLMQGSTLPRRSGA
RMISLLQPSTMPRRSGA

SEQ ID NO: 129920 - protein, 17 aa, Artificial Sequence
  Description of Artificial Sequence: Synthetic peptide
  Seed: RMCSLMQGSTLPRRSGA
RMISLLQPSTTPRRSGA

SEQ ID NO: 129921 - protein, 17 aa, Artificial Sequence
  Description of Artificial Sequence: Synthetic peptide
  Seed: RMCSLMQGSTLPRRSGA
RMISLLQPSTVPRRSGA

SEQ ID NO: 129922 - protein, 17 aa, Artificial Sequence
  Description of Artificial Sequence: Synthetic peptide
  Seed: RMCSLMQGSTLPRRSGA
RMISLLQSSTAPRRSGA

SEQ ID NO: 129923 - protein, 17 aa, Artificial Sequence
  Description of Artificial Sequence: Synthetic peptide
  Seed: RMCSLMQGSTLPRRSGA
RMISLLQSSTIPRRSGA

SEQ ID NO: 129924 - protein, 17 aa, Artificial Sequence
  Description of Artificial Sequence: Synthetic peptide
  Seed: RMCSLMQGSTLPRRSGA
RMISLLQSSTLPRRSGA

SEQ ID NO: 129925 - protein, 17 aa, Artificial Sequence
  Description of Artificial Sequence: Synthetic peptide
  Seed: RMCSLMQGSTLPRRSGA
RMISLLQSSTMPRRSGA

SEQ ID NO: 129926 - protein, 17 aa, Artificial Sequence
  Description of Artificial Sequence: Synthetic peptide
  Seed: RMCSLMQGSTLPRRSGA
RMISLLQSSTSPRRSGA

SEQ ID NO: 129927 - protein, 17 aa, Artificial Sequence
  Description of Artificial Sequence: Synthetic peptide
  Seed: RMCSLMQGSTLPRRSGA
RMISLLQSSTTPRRSGA

SEQ ID NO: 129928 - protein, 17 aa, Artificial Sequence
  Description of Artificial Sequence: Synthetic peptide
  Seed: RMCSLMQGSTLPRRSGA
RMISLLQSSTVPRRSGA

SEQ ID NO: 129929 - protein, 17 aa, Artificial Sequence
  Description of Artificial Sequence: Synthetic peptide
  Seed: RMCSLMQGSTLPRRSGA
RMISLLQTSTAPRRSGA

SEQ ID NO: 129930 - protein, 17 aa, Artificial Sequence
  Description of Artificial Sequence: Synthetic peptide
  Seed: RMCSLMQGSTLPRRSGA
RMISLLQTSTIPRRSGA

SEQ ID NO: 129931 - protein, 17 aa, Artificial Sequence
  Description of Artificial Sequence: Synthetic peptide
  Seed: RMCSLMQGSTLPRRSGA
RMISLLQTSTLPRRSGA

SEQ ID NO: 129932 - protein, 17 aa, Artificial Sequence
  Description of Artificial Sequence: Synthetic peptide
  Seed: RMCSLMQGSTLPRRSGA
RMISLLQTSTVPRRSGA

SEQ ID NO: 129933 - protein, 17 aa, Artificial Sequence
  Description of Artificial Sequence: Synthetic peptide
  Seed: RMCSLMQGSTLPRRSGA
RMISLMQASTAPRRSGA

SEQ ID NO: 129934 - protein, 17 aa, Artificial Sequence
  Description of Artificial Sequence: Synthetic peptide
  Seed: RMCSLMQGSTLPRRSGA
RMISLMQASTGPRRSGA

SEQ ID NO: 129935 - protein, 17 aa, Artificial Sequence
  Description of Artificial Sequence: Synthetic peptide
  Seed: RMCSLMQGSTLPRRSGA
RMISLMQASTIPRRSGA

SEQ ID NO: 129936 - protein, 17 aa, Artificial Sequence
  Description of Artificial Sequence: Synthetic peptide
  Seed: RMCSLMQGSTLPRRSGA
RMISLMQASTLPRRSGA

SEQ ID NO: 129937 - protein, 17 aa, Artificial Sequence
  Description of Artificial Sequence: Synthetic peptide
  Seed: RMCSLMQGSTLPRRSGA
RMISLMQASTMPRRSGA

SEQ ID NO: 129938 - protein, 17 aa, Artificial Sequence
  Description of Artificial Sequence: Synthetic peptide
  Seed: RMCSLMQGSTLPRRSGA
RMISLMQASTSPRRSGA

SEQ ID NO: 129939 - protein, 17 aa, Artificial Sequence
  Description of Artificial Sequence: Synthetic peptide
  Seed: RMCSLMQGSTLPRRSGA
RMISLMQASTTPRRSGA

SEQ ID NO: 129940 - protein, 17 aa, Artificial Sequence
  Description of Artificial Sequence: Synthetic peptide
  Seed: RMCSLMQGSTLPRRSGA
RMISLMQASTVPRRSGA

SEQ ID NO: 129941 - protein, 17 aa, Artificial Sequence
  Description of Artificial Sequence: Synthetic peptide
  Seed: RMCSLMQGSTLPRRSGA
RMISLMQGSTAPRRSGA

SEQ ID NO: 129942 - protein, 17 aa, Artificial Sequence
  Description of Artificial Sequence: Synthetic peptide
  Seed: RMCSLMQGSTLPRRSGA
RMISLMQGSTIPRRSGA

SEQ ID NO: 129943 - protein, 17 aa, Artificial Sequence
  Description of Artificial Sequence: Synthetic peptide
  Seed: RMCSLMQGSTLPRRSGA
RMISLMQGSTLPRRSGA

SEQ ID NO: 129944 - protein, 17 aa, Artificial Sequence
  Description of Artificial Sequence: Synthetic peptide
  Seed: RMCSLMQGSTLPRRSGA
RMISLMQGSTMPRRSGA

SEQ ID NO: 129945 - protein, 17 aa, Artificial Sequence
  Description of Artificial Sequence: Synthetic peptide
  Seed: RMCSLMQGSTLPRRSGA
RMISLMQGSTSPRRSGA

SEQ ID NO: 129946 - protein, 17 aa, Artificial Sequence
  Description of Artificial Sequence: Synthetic peptide
  Seed: RMCSLMQGSTLPRRSGA
RMISLMQGSTTPRRSGA

SEQ ID NO: 129947 - protein, 17 aa, Artificial Sequence
  Description of Artificial Sequence: Synthetic peptide
  Seed: RMCSLMQGSTLPRRSGA
RMISLMQGSTVPRRSGA

SEQ ID NO: 129948 - protein, 17 aa, Artificial Sequence
  Description of Artificial Sequence: Synthetic peptide
  Seed: RMCSLMQGSTLPRRSGA
RMISLMQNSTAPRRSGA

SEQ ID NO: 129949 - protein, 17 aa, Artificial Sequence
  Description of Artificial Sequence: Synthetic peptide
  Seed: RMCSLMQGSTLPRRSGA
RMISLMQNSTIPRRSGA

SEQ ID NO: 129950 - protein, 17 aa, Artificial Sequence
  Description of Artificial Sequence: Synthetic peptide
  Seed: RMCSLMQGSTLPRRSGA
RMISLMQNSTLPRRSGA

SEQ ID NO: 129951 - protein, 17 aa, Artificial Sequence
  Description of Artificial Sequence: Synthetic peptide
  Seed: RMCSLMQGSTLPRRSGA
RMISLMQNSTVPRRSGA

SEQ ID NO: 129952 - protein, 17 aa, Artificial Sequence
  Description of Artificial Sequence: Synthetic peptide
  Seed: RMCSLMQGSTLPRRSGA
RMISLMQPSTAPRRSGA

SEQ ID NO: 129953 - protein, 17 aa, Artificial Sequence
  Description of Artificial Sequence: Synthetic peptide
  Seed: RMCSLMQGSTLPRRSGA
RMISLMQPSTIPRRSGA

SEQ ID NO: 129954 - protein, 17 aa, Artificial Sequence
  Description of Artificial Sequence: Synthetic peptide
  Seed: RMCSLMQGSTLPRRSGA
RMISLMQPSTLPRRSGA

SEQ ID NO: 129955 - protein, 17 aa, Artificial Sequence
  Description of Artificial Sequence: Synthetic peptide
  Seed: RMCSLMQGSTLPRRSGA
RMISLMQPSTMPRRSGA

SEQ ID NO: 129956 - protein, 17 aa, Artificial Sequence
  Description of Artificial Sequence: Synthetic peptide
  Seed: RMCSLMQGSTLPRRSGA
RMISLMQPSTTPRRSGA

SEQ ID NO: 129957 - protein, 17 aa, Artificial Sequence
  Description of Artificial Sequence: Synthetic peptide
  Seed: RMCSLMQGSTLPRRSGA
RMISLMQPSTVPRRSGA

SEQ ID NO: 129958 - protein, 17 aa, Artificial Sequence
  Description of Artificial Sequence: Synthetic peptide
  Seed: RMCSLMQGSTLPRRSGA
RMISLMQSSTAPRRSGA

SEQ ID NO: 129959 - protein, 17 aa, Artificial Sequence
  Description of Artificial Sequence: Synthetic peptide
  Seed: RMCSLMQGSTLPRRSGA
RMISLMQSSTIPRRSGA

SEQ ID NO: 129960 - protein, 17 aa, Artificial Sequence
  Description of Artificial Sequence: Synthetic peptide
  Seed: RMCSLMQGSTLPRRSGA
RMISLMQSSTLPRRSGA

SEQ ID NO: 129961 - protein, 17 aa, Artificial Sequence
  Description of Artificial Sequence: Synthetic peptide
  Seed: RMCSLMQGSTLPRRSGA
RMISLMQSSTMPRRSGA

SEQ ID NO: 129962 - protein, 17 aa, Artificial Sequence
  Description of Artificial Sequence: Synthetic peptide
  Seed: RMCSLMQGSTLPRRSGA
RMISLMQSSTSPRRSGA

SEQ ID NO: 129963 - protein, 17 aa, Artificial Sequence
  Description of Artificial Sequence: Synthetic peptide
  Seed: RMCSLMQGSTLPRRSGA
RMISLMQSSTTPRRSGA

SEQ ID NO: 129964 - protein, 17 aa, Artificial Sequence
  Description of Artificial Sequence: Synthetic peptide
  Seed: RMCSLMQGSTLPRRSGA
RMISLMQSSTVPRRSGA

SEQ ID NO: 129965 - protein, 17 aa, Artificial Sequence
  Description of Artificial Sequence: Synthetic peptide
  Seed: RMCSLMQGSTLPRRSGA
RMISLMQTSTAPRRSGA

SEQ ID NO: 129966 - protein, 17 aa, Artificial Sequence
  Description of Artificial Sequence: Synthetic peptide
  Seed: RMCSLMQGSTLPRRSGA
RMISLMQTSTIPRRSGA

SEQ ID NO: 129967 - protein, 17 aa, Artificial Sequence
  Description of Artificial Sequence: Synthetic peptide
  Seed: RMCSLMQGSTLPRRSGA
RMISLMQTSTLPRRSGA

SEQ ID NO: 129968 - protein, 17 aa, Artificial Sequence
  Description of Artificial Sequence: Synthetic peptide
  Seed: RMCSLMQGSTLPRRSGA
RMISLMQTSTVPRRSGA

SEQ ID NO: 129969 - protein, 17 aa, Artificial Sequence
  Description of Artificial Sequence: Synthetic peptide
  Seed: RMCSLMQGSTLPRRSGA
RMISLQQASTAPRRSGA

SEQ ID NO: 129970 - protein, 17 aa, Artificial Sequence
  Description of Artificial Sequence: Synthetic peptide
  Seed: RMCSLMQGSTLPRRSGA
RMISLQQASTIPRRSGA

SEQ ID NO: 129971 - protein, 17 aa, Artificial Sequence
  Description of Artificial Sequence: Synthetic peptide
  Seed: RMCSLMQGSTLPRRSGA
RMISLQQASTLPRRSGA

SEQ ID NO: 129972 - protein, 17 aa, Artificial Sequence
  Description of Artificial Sequence: Synthetic peptide
  Seed: RMCSLMQGSTLPRRSGA
RMISLQQASTVPRRSGA

SEQ ID NO: 129973 - protein, 17 aa, Artificial Sequence
  Description of Artificial Sequence: Synthetic peptide
  Seed: RMCSLMQGSTLPRRSGA
RMISLQQGSTLPRRSGA

SEQ ID NO: 129974 - protein, 17 aa, Artificial Sequence
  Description of Artificial Sequence: Synthetic peptide
  Seed: RMCSLMQGSTLPRRSGA
RMISLQQGSTVPRRSGA

SEQ ID NO: 129975 - protein, 17 aa, Artificial Sequence
  Description of Artificial Sequence: Synthetic peptide
  Seed: RMCSLMQGSTLPRRSGA
RMISLVQASTAPRRSGA

SEQ ID NO: 129976 - protein, 17 aa, Artificial Sequence
  Description of Artificial Sequence: Synthetic peptide
  Seed: RMCSLMQGSTLPRRSGA
RMISLVQASTIPRRSGA

SEQ ID NO: 129977 - protein, 17 aa, Artificial Sequence
  Description of Artificial Sequence: Synthetic peptide
  Seed: RMCSLMQGSTLPRRSGA
RMISLVQASTLPRRSGA

SEQ ID NO: 129978 - protein, 17 aa, Artificial Sequence
  Description of Artificial Sequence: Synthetic peptide
  Seed: RMCSLMQGSTLPRRSGA
RMISLVQASTVPRRSGA

SEQ ID NO: 129979 - protein, 17 aa, Artificial Sequence
  Description of Artificial Sequence: Synthetic peptide
  Seed: RMCSLMQGSTLPRRSGA
RMLSLAQASTIPRRSGA

SEQ ID NO: 129980 - protein, 17 aa, Artificial Sequence
  Description of Artificial Sequence: Synthetic peptide
  Seed: RMCSLMQGSTLPRRSGA
RMLSLAQASTLPRRSGA

SEQ ID NO: 129981 - protein, 17 aa, Artificial Sequence
  Description of Artificial Sequence: Synthetic peptide
  Seed: RMCSLMQGSTLPRRSGA
RMLSLAQASTVPRRSGA

SEQ ID NO: 129982 - protein, 17 aa, Artificial Sequence
  Description of Artificial Sequence: Synthetic peptide
  Seed: RMCSLMQGSTLPRRSGA
RMLSLIQASTAPRRSGA

SEQ ID NO: 129983 - protein, 17 aa, Artificial Sequence
  Description of Artificial Sequence: Synthetic peptide
  Seed: RMCSLMQGSTLPRRSGA
RMLSLIQASTIPRRSGA

SEQ ID NO: 129984 - protein, 17 aa, Artificial Sequence
  Description of Artificial Sequence: Synthetic peptide
  Seed: RMCSLMQGSTLPRRSGA
RMLSLIQASTLPRRSGA

SEQ ID NO: 129985 - protein, 17 aa, Artificial Sequence
  Description of Artificial Sequence: Synthetic peptide
  Seed: RMCSLMQGSTLPRRSGA
RMLSLIQASTVPRRSGA

SEQ ID NO: 129986 - protein, 17 aa, Artificial Sequence
  Description of Artificial Sequence: Synthetic peptide
  Seed: RMCSLMQGSTLPRRSGA
RMLSLIQGSTAPRRSGA

SEQ ID NO: 129987 - protein, 17 aa, Artificial Sequence
  Description of Artificial Sequence: Synthetic peptide
  Seed: RMCSLMQGSTLPRRSGA
RMLSLIQGSTIPRRSGA

SEQ ID NO: 129988 - protein, 17 aa, Artificial Sequence
  Description of Artificial Sequence: Synthetic peptide
  Seed: RMCSLMQGSTLPRRSGA
RMLSLIQGSTLPRRSGA

SEQ ID NO: 129989 - protein, 17 aa, Artificial Sequence
  Description of Artificial Sequence: Synthetic peptide
  Seed: RMCSLMQGSTLPRRSGA
RMLSLIQGSTVPRRSGA

SEQ ID NO: 129990 - protein, 17 aa, Artificial Sequence
  Description of Artificial Sequence: Synthetic peptide
  Seed: RMCSLMQGSTLPRRSGA
RMLSLIQSSTVPRRSGA

SEQ ID NO: 129991 - protein, 17 aa, Artificial Sequence
  Description of Artificial Sequence: Synthetic peptide
  Seed: RMCSLMQGSTLPRRSGA
RMLSLLQASTAPRRSGA

SEQ ID NO: 129992 - protein, 17 aa, Artificial Sequence
  Description of Artificial Sequence: Synthetic peptide
  Seed: RMCSLMQGSTLPRRSGA
RMLSLLQASTIPRRSGA

SEQ ID NO: 129993 - protein, 17 aa, Artificial Sequence
  Description of Artificial Sequence: Synthetic peptide
  Seed: RMCSLMQGSTLPRRSGA
RMLSLLQASTLPRRSGA

SEQ ID NO: 129994 - protein, 17 aa, Artificial Sequence
  Description of Artificial Sequence: Synthetic peptide
  Seed: RMCSLMQGSTLPRRSGA
RMLSLLQASTMPRRSGA

SEQ ID NO: 129995 - protein, 17 aa, Artificial Sequence
  Description of Artificial Sequence: Synthetic peptide
  Seed: RMCSLMQGSTLPRRSGA
RMLSLLQASTSPRRSGA

SEQ ID NO: 129996 - protein, 17 aa, Artificial Sequence
  Description of Artificial Sequence: Synthetic peptide
  Seed: RMCSLMQGSTLPRRSGA
RMLSLLQASTTPRRSGA

SEQ ID NO: 129997 - protein, 17 aa, Artificial Sequence
  Description of Artificial Sequence: Synthetic peptide
  Seed: RMCSLMQGSTLPRRSGA
RMLSLLQASTVPRRSGA

SEQ ID NO: 129998 - protein, 17 aa, Artificial Sequence
  Description of Artificial Sequence: Synthetic peptide
  Seed: RMCSLMQGSTLPRRSGA
RMLSLLQGSTAPRRSGA

SEQ ID NO: 129999 - protein, 17 aa, Artificial Sequence
  Description of Artificial Sequence: Synthetic peptide
  Seed: RMCSLMQGSTLPRRSGA
RMLSLLQGSTIPRRSGA

SEQ ID NO: 130000 - protein, 17 aa, Artificial Sequence
  Description of Artificial Sequence: Synthetic peptide
  Seed: RMCSLMQGSTLPRRSGA
RMLSLLQGSTLPRRSGA

SEQ ID NO: 130001 - protein, 17 aa, Artificial Sequence
  Description of Artificial Sequence: Synthetic peptide
  Seed: RMCSLMQGSTLPRRSGA
RMLSLLQGSTMPRRSGA

SEQ ID NO: 130002 - protein, 17 aa, Artificial Sequence
  Description of Artificial Sequence: Synthetic peptide
  Seed: RMCSLMQGSTLPRRSGA
RMLSLLQGSTSPRRSGA

SEQ ID NO: 130003 - protein, 17 aa, Artificial Sequence
  Description of Artificial Sequence: Synthetic peptide
  Seed: RMCSLMQGSTLPRRSGA
RMLSLLQGSTTPRRSGA

SEQ ID NO: 130004 - protein, 17 aa, Artificial Sequence
  Description of Artificial Sequence: Synthetic peptide
  Seed: RMCSLMQGSTLPRRSGA
RMLSLLQGSTVPRRSGA

SEQ ID NO: 130005 - protein, 17 aa, Artificial Sequence
  Description of Artificial Sequence: Synthetic peptide
  Seed: RMCSLMQGSTLPRRSGA
RMLSLLQNSTVPRRSGA

SEQ ID NO: 130006 - protein, 17 aa, Artificial Sequence
  Description of Artificial Sequence: Synthetic peptide
  Seed: RMCSLMQGSTLPRRSGA
RMLSLLQPSTAPRRSGA

SEQ ID NO: 130007 - protein, 17 aa, Artificial Sequence
  Description of Artificial Sequence: Synthetic peptide
  Seed: RMCSLMQGSTLPRRSGA
RMLSLLQPSTIPRRSGA

SEQ ID NO: 130008 - protein, 17 aa, Artificial Sequence
  Description of Artificial Sequence: Synthetic peptide
  Seed: RMCSLMQGSTLPRRSGA
RMLSLLQPSTLPRRSGA

SEQ ID NO: 130009 - protein, 17 aa, Artificial Sequence
  Description of Artificial Sequence: Synthetic peptide
  Seed: RMCSLMQGSTLPRRSGA
RMLSLLQPSTVPRRSGA

SEQ ID NO: 130010 - protein, 17 aa, Artificial Sequence
  Description of Artificial Sequence: Synthetic peptide
  Seed: RMCSLMQGSTLPRRSGA
RMLSLLQSSTAPRRSGA

SEQ ID NO: 130011 - protein, 17 aa, Artificial Sequence
  Description of Artificial Sequence: Synthetic peptide
  Seed: RMCSLMQGSTLPRRSGA
RMLSLLQSSTIPRRSGA

SEQ ID NO: 130012 - protein, 17 aa, Artificial Sequence
  Description of Artificial Sequence: Synthetic peptide
  Seed: RMCSLMQGSTLPRRSGA
RMLSLLQSSTLPRRSGA

SEQ ID NO: 130013 - protein, 17 aa, Artificial Sequence
  Description of Artificial Sequence: Synthetic peptide
  Seed: RMCSLMQGSTLPRRSGA
RMLSLLQSSTMPRRSGA

SEQ ID NO: 130014 - protein, 17 aa, Artificial Sequence
  Description of Artificial Sequence: Synthetic peptide
  Seed: RMCSLMQGSTLPRRSGA
RMLSLLQSSTTPRRSGA

SEQ ID NO: 130015 - protein, 17 aa, Artificial Sequence
  Description of Artificial Sequence: Synthetic peptide
  Seed: RMCSLMQGSTLPRRSGA
RMLSLLQSSTVPRRSGA

SEQ ID NO: 130016 - protein, 17 aa, Artificial Sequence
  Description of Artificial Sequence: Synthetic peptide
  Seed: RMCSLMQGSTLPRRSGA
RMLSLLQTSTVPRRSGA

SEQ ID NO: 130017 - protein, 17 aa, Artificial Sequence
  Description of Artificial Sequence: Synthetic peptide
  Seed: RMCSLMQGSTLPRRSGA
RMLSLMQASTAPRRSGA

SEQ ID NO: 130018 - protein, 17 aa, Artificial Sequence
  Description of Artificial Sequence: Synthetic peptide
  Seed: RMCSLMQGSTLPRRSGA
RMLSLMQASTIPRRSGA

SEQ ID NO: 130019 - protein, 17 aa, Artificial Sequence
  Description of Artificial Sequence: Synthetic peptide
  Seed: RMCSLMQGSTLPRRSGA
RMLSLMQASTLPRRSGA

SEQ ID NO: 130020 - protein, 17 aa, Artificial Sequence
  Description of Artificial Sequence: Synthetic peptide
  Seed: RMCSLMQGSTLPRRSGA
RMLSLMQASTMPRRSGA

SEQ ID NO: 130021 - protein, 17 aa, Artificial Sequence
  Description of Artificial Sequence: Synthetic peptide
  Seed: RMCSLMQGSTLPRRSGA
RMLSLMQASTSPRRSGA

SEQ ID NO: 130022 - protein, 17 aa, Artificial Sequence
  Description of Artificial Sequence: Synthetic peptide
  Seed: RMCSLMQGSTLPRRSGA
RMLSLMQASTTPRRSGA

SEQ ID NO: 130023 - protein, 17 aa, Artificial Sequence
  Description of Artificial Sequence: Synthetic peptide
  Seed: RMCSLMQGSTLPRRSGA
RMLSLMQASTVPRRSGA

SEQ ID NO: 130024 - protein, 17 aa, Artificial Sequence
  Description of Artificial Sequence: Synthetic peptide
  Seed: RMCSLMQGSTLPRRSGA
RMLSLMQGSTAPRRSGA

SEQ ID NO: 130025 - protein, 17 aa, Artificial Sequence
  Description of Artificial Sequence: Synthetic peptide
  Seed: RMCSLMQGSTLPRRSGA
RMLSLMQGSTIPRRSGA

SEQ ID NO: 130026 - protein, 17 aa, Artificial Sequence
  Description of Artificial Sequence: Synthetic peptide
  Seed: RMCSLMQGSTLPRRSGA
RMLSLMQGSTLPRRSGA

SEQ ID NO: 130027 - protein, 17 aa, Artificial Sequence
  Description of Artificial Sequence: Synthetic peptide
  Seed: RMCSLMQGSTLPRRSGA
RMLSLMQGSTMPRRSGA

SEQ ID NO: 130028 - protein, 17 aa, Artificial Sequence
  Description of Artificial Sequence: Synthetic peptide
  Seed: RMCSLMQGSTLPRRSGA
RMLSLMQGSTSPRRSGA

SEQ ID NO: 130029 - protein, 17 aa, Artificial Sequence
  Description of Artificial Sequence: Synthetic peptide
  Seed: RMCSLMQGSTLPRRSGA
RMLSLMQGSTTPRRSGA

SEQ ID NO: 130030 - protein, 17 aa, Artificial Sequence
  Description of Artificial Sequence: Synthetic peptide
  Seed: RMCSLMQGSTLPRRSGA
RMLSLMQGSTVPRRSGA

SEQ ID NO: 130031 - protein, 17 aa, Artificial Sequence
  Description of Artificial Sequence: Synthetic peptide
  Seed: RMCSLMQGSTLPRRSGA
RMLSLMQNSTVPRRSGA

SEQ ID NO: 130032 - protein, 17 aa, Artificial Sequence
  Description of Artificial Sequence: Synthetic peptide
  Seed: RMCSLMQGSTLPRRSGA
RMLSLMQPSTAPRRSGA

SEQ ID NO: 130033 - protein, 17 aa, Artificial Sequence
  Description of Artificial Sequence: Synthetic peptide
  Seed: RMCSLMQGSTLPRRSGA
RMLSLMQPSTIPRRSGA

SEQ ID NO: 130034 - protein, 17 aa, Artificial Sequence
  Description of Artificial Sequence: Synthetic peptide
  Seed: RMCSLMQGSTLPRRSGA
RMLSLMQPSTLPRRSGA

SEQ ID NO: 130035 - protein, 17 aa, Artificial Sequence
  Description of Artificial Sequence: Synthetic peptide
  Seed: RMCSLMQGSTLPRRSGA
RMLSLMQPSTVPRRSGA

SEQ ID NO: 130036 - protein, 17 aa, Artificial Sequence
  Description of Artificial Sequence: Synthetic peptide
  Seed: RMCSLMQGSTLPRRSGA
RMLSLMQSSTAPRRSGA

SEQ ID NO: 130037 - protein, 17 aa, Artificial Sequence
  Description of Artificial Sequence: Synthetic peptide
  Seed: RMCSLMQGSTLPRRSGA
RMLSLMQSSTIPRRSGA

SEQ ID NO: 130038 - protein, 17 aa, Artificial Sequence
  Description of Artificial Sequence: Synthetic peptide
  Seed: RMCSLMQGSTLPRRSGA
RMLSLMQSSTLPRRSGA

SEQ ID NO: 130039 - protein, 17 aa, Artificial Sequence
  Description of Artificial Sequence: Synthetic peptide
  Seed: RMCSLMQGSTLPRRSGA
RMLSLMQSSTMPRRSGA

SEQ ID NO: 130040 - protein, 17 aa, Artificial Sequence
  Description of Artificial Sequence: Synthetic peptide
  Seed: RMCSLMQGSTLPRRSGA
RMLSLMQSSTTPRRSGA

SEQ ID NO: 130041 - protein, 17 aa, Artificial Sequence
  Description of Artificial Sequence: Synthetic peptide
  Seed: RMCSLMQGSTLPRRSGA
RMLSLMQSSTVPRRSGA

SEQ ID NO: 130042 - protein, 17 aa, Artificial Sequence
  Description of Artificial Sequence: Synthetic peptide
  Seed: RMCSLMQGSTLPRRSGA
RMLSLMQTSTVPRRSGA

SEQ ID NO: 130043 - protein, 17 aa, Artificial Sequence
  Description of Artificial Sequence: Synthetic peptide
  Seed: RMCSLMQGSTLPRRSGA
RMLSLQQASTLPRRSGA

SEQ ID NO: 130044 - protein, 17 aa, Artificial Sequence
  Description of Artificial Sequence: Synthetic peptide
  Seed: RMCSLMQGSTLPRRSGA
RMLSLQQASTVPRRSGA

SEQ ID NO: 130045 - protein, 17 aa, Artificial Sequence
  Description of Artificial Sequence: Synthetic peptide
  Seed: RMCSLMQGSTLPRRSGA
RMMSLIQASTLPRRSGA

SEQ ID NO: 130046 - protein, 17 aa, Artificial Sequence
  Description of Artificial Sequence: Synthetic peptide
  Seed: RMCSLMQGSTLPRRSGA
RMMSLIQASTVPRRSGA

SEQ ID NO: 130047 - protein, 17 aa, Artificial Sequence
  Description of Artificial Sequence: Synthetic peptide
  Seed: RMCSLMQGSTLPRRSGA
RMMSLLQASTAPRRSGA

SEQ ID NO: 130048 - protein, 17 aa, Artificial Sequence
  Description of Artificial Sequence: Synthetic peptide
  Seed: RMCSLMQGSTLPRRSGA
RMMSLLQASTIPRRSGA

SEQ ID NO: 130049 - protein, 17 aa, Artificial Sequence
  Description of Artificial Sequence: Synthetic peptide
  Seed: RMCSLMQGSTLPRRSGA
RMMSLLQASTLPRRSGA

SEQ ID NO: 130050 - protein, 17 aa, Artificial Sequence
  Description of Artificial Sequence: Synthetic peptide
  Seed: RMCSLMQGSTLPRRSGA
RMMSLLQASTMPRRSGA

SEQ ID NO: 130051 - protein, 17 aa, Artificial Sequence
  Description of Artificial Sequence: Synthetic peptide
  Seed: RMCSLMQGSTLPRRSGA
RMMSLLQASTTPRRSGA

SEQ ID NO: 130052 - protein, 17 aa, Artificial Sequence
  Description of Artificial Sequence: Synthetic peptide
  Seed: RMCSLMQGSTLPRRSGA
RMMSLLQASTVPRRSGA

SEQ ID NO: 130053 - protein, 17 aa, Artificial Sequence
  Description of Artificial Sequence: Synthetic peptide
  Seed: RMCSLMQGSTLPRRSGA
RMMSLLQGSTAPRRSGA

SEQ ID NO: 130054 - protein, 17 aa, Artificial Sequence
  Description of Artificial Sequence: Synthetic peptide
  Seed: RMCSLMQGSTLPRRSGA
RMMSLLQGSTIPRRSGA

SEQ ID NO: 130055 - protein, 17 aa, Artificial Sequence
  Description of Artificial Sequence: Synthetic peptide
  Seed: RMCSLMQGSTLPRRSGA
RMMSLLQGSTLPRRSGA

SEQ ID NO: 130056 - protein, 17 aa, Artificial Sequence
  Description of Artificial Sequence: Synthetic peptide
  Seed: RMCSLMQGSTLPRRSGA
RMMSLLQGSTVPRRSGA

SEQ ID NO: 130057 - protein, 17 aa, Artificial Sequence
  Description of Artificial Sequence: Synthetic peptide
  Seed: RMCSLMQGSTLPRRSGA
RMMSLLQPSTIPRRSGA

SEQ ID NO: 130058 - protein, 17 aa, Artificial Sequence
  Description of Artificial Sequence: Synthetic peptide
  Seed: RMCSLMQGSTLPRRSGA
RMMSLLQPSTLPRRSGA

SEQ ID NO: 130059 - protein, 17 aa, Artificial Sequence
  Description of Artificial Sequence: Synthetic peptide
  Seed: RMCSLMQGSTLPRRSGA
RMMSLLQPSTVPRRSGA

SEQ ID NO: 130060 - protein, 17 aa, Artificial Sequence
  Description of Artificial Sequence: Synthetic peptide
  Seed: RMCSLMQGSTLPRRSGA
RMMSLLQSSTAPRRSGA

SEQ ID NO: 130061 - protein, 17 aa, Artificial Sequence
  Description of Artificial Sequence: Synthetic peptide
  Seed: RMCSLMQGSTLPRRSGA
RMMSLLQSSTIPRRSGA

SEQ ID NO: 130062 - protein, 17 aa, Artificial Sequence
  Description of Artificial Sequence: Synthetic peptide
  Seed: RMCSLMQGSTLPRRSGA
RMMSLLQSSTLPRRSGA

SEQ ID NO: 130063 - protein, 17 aa, Artificial Sequence
  Description of Artificial Sequence: Synthetic peptide
  Seed: RMCSLMQGSTLPRRSGA
RMMSLLQSSTVPRRSGA

SEQ ID NO: 130064 - protein, 17 aa, Artificial Sequence
  Description of Artificial Sequence: Synthetic peptide
  Seed: RMCSLMQGSTLPRRSGA
RMMSLMQASTAPRRSGA

SEQ ID NO: 130065 - protein, 17 aa, Artificial Sequence
  Description of Artificial Sequence: Synthetic peptide
  Seed: RMCSLMQGSTLPRRSGA
RMMSLMQASTIPRRSGA

SEQ ID NO: 130066 - protein, 17 aa, Artificial Sequence
  Description of Artificial Sequence: Synthetic peptide
  Seed: RMCSLMQGSTLPRRSGA
RMMSLMQASTLPRRSGA

SEQ ID NO: 130067 - protein, 17 aa, Artificial Sequence
  Description of Artificial Sequence: Synthetic peptide
  Seed: RMCSLMQGSTLPRRSGA
RMMSLMQASTMPRRSGA

SEQ ID NO: 130068 - protein, 17 aa, Artificial Sequence
  Description of Artificial Sequence: Synthetic peptide
  Seed: RMCSLMQGSTLPRRSGA
RMMSLMQASTTPRRSGA

SEQ ID NO: 130069 - protein, 17 aa, Artificial Sequence
  Description of Artificial Sequence: Synthetic peptide
  Seed: RMCSLMQGSTLPRRSGA
RMMSLMQASTVPRRSGA

SEQ ID NO: 130070 - protein, 17 aa, Artificial Sequence
  Description of Artificial Sequence: Synthetic peptide
  Seed: RMCSLMQGSTLPRRSGA
RMMSLMQGSTAPRRSGA

SEQ ID NO: 130071 - protein, 17 aa, Artificial Sequence
  Description of Artificial Sequence: Synthetic peptide
  Seed: RMCSLMQGSTLPRRSGA
RMMSLMQGSTIPRRSGA

SEQ ID NO: 130072 - protein, 17 aa, Artificial Sequence
  Description of Artificial Sequence: Synthetic peptide
  Seed: RMCSLMQGSTLPRRSGA
RMMSLMQGSTLPRRSGA

SEQ ID NO: 130073 - protein, 17 aa, Artificial Sequence
  Description of Artificial Sequence: Synthetic peptide
  Seed: RMCSLMQGSTLPRRSGA
RMMSLMQGSTVPRRSGA

SEQ ID NO: 130074 - protein, 17 aa, Artificial Sequence
  Description of Artificial Sequence: Synthetic peptide
  Seed: RMCSLMQGSTLPRRSGA
RMMSLMQPSTIPRRSGA

SEQ ID NO: 130075 - protein, 17 aa, Artificial Sequence
  Description of Artificial Sequence: Synthetic peptide
  Seed: RMCSLMQGSTLPRRSGA
RMMSLMQPSTLPRRSGA

SEQ ID NO: 130076 - protein, 17 aa, Artificial Sequence
  Description of Artificial Sequence: Synthetic peptide
  Seed: RMCSLMQGSTLPRRSGA
RMMSLMQPSTVPRRSGA

SEQ ID NO: 130077 - protein, 17 aa, Artificial Sequence
  Description of Artificial Sequence: Synthetic peptide
  Seed: RMCSLMQGSTLPRRSGA
RMMSLMQSSTAPRRSGA

SEQ ID NO: 130078 - protein, 17 aa, Artificial Sequence
  Description of Artificial Sequence: Synthetic peptide
  Seed: RMCSLMQGSTLPRRSGA
RMMSLMQSSTIPRRSGA

SEQ ID NO: 130079 - protein, 17 aa, Artificial Sequence
  Description of Artificial Sequence: Synthetic peptide
  Seed: RMCSLMQGSTLPRRSGA
RMMSLMQSSTLPRRSGA

SEQ ID NO: 130080 - protein, 17 aa, Artificial Sequence
  Description of Artificial Sequence: Synthetic peptide
  Seed: RMCSLMQGSTLPRRSGA
RMMSLMQSSTVPRRSGA

SEQ ID NO: 130081 - protein, 17 aa, Artificial Sequence
  Description of Artificial Sequence: Synthetic peptide
  Seed: RMCSLMQGSTLPRRSGA
RMVSLIQASTVPRRSGA

SEQ ID NO: 130082 - protein, 17 aa, Artificial Sequence
  Description of Artificial Sequence: Synthetic peptide
  Seed: RMCSLMQGSTLPRRSGA
RMVSLLQASTAPRRSGA

SEQ ID NO: 130083 - protein, 17 aa, Artificial Sequence
  Description of Artificial Sequence: Synthetic peptide
  Seed: RMCSLMQGSTLPRRSGA
RMVSLLQASTIPRRSGA

SEQ ID NO: 130084 - protein, 17 aa, Artificial Sequence
  Description of Artificial Sequence: Synthetic peptide
  Seed: RMCSLMQGSTLPRRSGA
RMVSLLQASTLPRRSGA

SEQ ID NO: 130085 - protein, 17 aa, Artificial Sequence
  Description of Artificial Sequence: Synthetic peptide
  Seed: RMCSLMQGSTLPRRSGA
RMVSLLQASTMPRRSGA

SEQ ID NO: 130086 - protein, 17 aa, Artificial Sequence
  Description of Artificial Sequence: Synthetic peptide
  Seed: RMCSLMQGSTLPRRSGA
RMVSLLQASTTPRRSGA

SEQ ID NO: 130087 - protein, 17 aa, Artificial Sequence
  Description of Artificial Sequence: Synthetic peptide
  Seed: RMCSLMQGSTLPRRSGA
RMVSLLQASTVPRRSGA

SEQ ID NO: 130088 - protein, 17 aa, Artificial Sequence
  Description of Artificial Sequence: Synthetic peptide
  Seed: RMCSLMQGSTLPRRSGA
RMVSLLQGSTAPRRSGA

SEQ ID NO: 130089 - protein, 17 aa, Artificial Sequence
  Description of Artificial Sequence: Synthetic peptide
  Seed: RMCSLMQGSTLPRRSGA
RMVSLLQGSTIPRRSGA

SEQ ID NO: 130090 - protein, 17 aa, Artificial Sequence
  Description of Artificial Sequence: Synthetic peptide
  Seed: RMCSLMQGSTLPRRSGA
RMVSLLQGSTLPRRSGA

SEQ ID NO: 130091 - protein, 17 aa, Artificial Sequence
  Description of Artificial Sequence: Synthetic peptide
  Seed: RMCSLMQGSTLPRRSGA
RMVSLLQGSTVPRRSGA

SEQ ID NO: 130092 - protein, 17 aa, Artificial Sequence
  Description of Artificial Sequence: Synthetic peptide
  Seed: RMCSLMQGSTLPRRSGA
RMVSLLQPSTIPRRSGA

SEQ ID NO: 130093 - protein, 17 aa, Artificial Sequence
  Description of Artificial Sequence: Synthetic peptide
  Seed: RMCSLMQGSTLPRRSGA
RMVSLLQPSTLPRRSGA

SEQ ID NO: 130094 - protein, 17 aa, Artificial Sequence
  Description of Artificial Sequence: Synthetic peptide
  Seed: RMCSLMQGSTLPRRSGA
RMVSLLQPSTVPRRSGA

SEQ ID NO: 130095 - protein, 17 aa, Artificial Sequence
  Description of Artificial Sequence: Synthetic peptide
  Seed: RMCSLMQGSTLPRRSGA
RMVSLLQSSTAPRRSGA

SEQ ID NO: 130096 - protein, 17 aa, Artificial Sequence
  Description of Artificial Sequence: Synthetic peptide
  Seed: RMCSLMQGSTLPRRSGA
RMVSLLQSSTIPRRSGA

SEQ ID NO: 130097 - protein, 17 aa, Artificial Sequence
  Description of Artificial Sequence: Synthetic peptide
  Seed: RMCSLMQGSTLPRRSGA
RMVSLLQSSTLPRRSGA

SEQ ID NO: 130098 - protein, 17 aa, Artificial Sequence
  Description of Artificial Sequence: Synthetic peptide
  Seed: RMCSLMQGSTLPRRSGA
RMVSLLQSSTVPRRSGA

SEQ ID NO: 130099 - protein, 17 aa, Artificial Sequence
  Description of Artificial Sequence: Synthetic peptide
  Seed: RMCSLMQGSTLPRRSGA
RMVSLMQASTAPRRSGA

SEQ ID NO: 130100 - protein, 17 aa, Artificial Sequence
  Description of Artificial Sequence: Synthetic peptide
  Seed: RMCSLMQGSTLPRRSGA
RMVSLMQASTIPRRSGA

SEQ ID NO: 130101 - protein, 17 aa, Artificial Sequence
  Description of Artificial Sequence: Synthetic peptide
  Seed: RMCSLMQGSTLPRRSGA
RMVSLMQASTLPRRSGA

SEQ ID NO: 130102 - protein, 17 aa, Artificial Sequence
  Description of Artificial Sequence: Synthetic peptide
  Seed: RMCSLMQGSTLPRRSGA
RMVSLMQASTMPRRSGA

SEQ ID NO: 130103 - protein, 17 aa, Artificial Sequence
  Description of Artificial Sequence: Synthetic peptide
  Seed: RMCSLMQGSTLPRRSGA
RMVSLMQASTVPRRSGA

SEQ ID NO: 130104 - protein, 17 aa, Artificial Sequence
  Description of Artificial Sequence: Synthetic peptide
  Seed: RMCSLMQGSTLPRRSGA
RMVSLMQGSTAPRRSGA

SEQ ID NO: 130105 - protein, 17 aa, Artificial Sequence
  Description of Artificial Sequence: Synthetic peptide
  Seed: RMCSLMQGSTLPRRSGA
RMVSLMQGSTIPRRSGA

SEQ ID NO: 130106 - protein, 17 aa, Artificial Sequence
  Description of Artificial Sequence: Synthetic peptide
  Seed: RMCSLMQGSTLPRRSGA
RMVSLMQGSTLPRRSGA

SEQ ID NO: 130107 - protein, 17 aa, Artificial Sequence
  Description of Artificial Sequence: Synthetic peptide
  Seed: RMCSLMQGSTLPRRSGA
RMVSLMQGSTVPRRSGA

SEQ ID NO: 130108 - protein, 17 aa, Artificial Sequence
  Description of Artificial Sequence: Synthetic peptide
  Seed: RMCSLMQGSTLPRRSGA
RMVSLMQPSTLPRRSGA

SEQ ID NO: 130109 - protein, 17 aa, Artificial Sequence
  Description of Artificial Sequence: Synthetic peptide
  Seed: RMCSLMQGSTLPRRSGA
RMVSLMQPSTVPRRSGA

SEQ ID NO: 130110 - protein, 17 aa, Artificial Sequence
  Description of Artificial Sequence: Synthetic peptide
  Seed: RMCSLMQGSTLPRRSGA
RMVSLMQSSTAPRRSGA

SEQ ID NO: 130111 - protein, 17 aa, Artificial Sequence
  Description of Artificial Sequence: Synthetic peptide
  Seed: RMCSLMQGSTLPRRSGA
RMVSLMQSSTIPRRSGA

SEQ ID NO: 130112 - protein, 17 aa, Artificial Sequence
  Description of Artificial Sequence: Synthetic peptide
  Seed: RMCSLMQGSTLPRRSGA
RMVSLMQSSTLPRRSGA

SEQ ID NO: 130113 - protein, 17 aa, Artificial Sequence
  Description of Artificial Sequence: Synthetic peptide
  Seed: RMCSLMQGSTLPRRSGA
RMVSLMQSSTVPRRSGA

SEQ ID NO: 130114 - protein, 17 aa, Artificial Sequence
  Description of Artificial Sequence: Synthetic peptide
  Seed: RMCSLMQGSTLPRRSGA
RMWSLAQASTAPRRSGA

SEQ ID NO: 130115 - protein, 17 aa, Artificial Sequence
  Description of Artificial Sequence: Synthetic peptide
  Seed: RMCSLMQGSTLPRRSGA
RMWSLAQASTIPRRSGA

SEQ ID NO: 130116 - protein, 17 aa, Artificial Sequence
  Description of Artificial Sequence: Synthetic peptide
  Seed: RMCSLMQGSTLPRRSGA
RMWSLAQASTLPRRSGA

SEQ ID NO: 130117 - protein, 17 aa, Artificial Sequence
  Description of Artificial Sequence: Synthetic peptide
  Seed: RMCSLMQGSTLPRRSGA
RMWSLAQASTMPRRSGA

SEQ ID NO: 130118 - protein, 17 aa, Artificial Sequence
  Description of Artificial Sequence: Synthetic peptide
  Seed: RMCSLMQGSTLPRRSGA
RMWSLAQASTTPRRSGA

SEQ ID NO: 130119 - protein, 17 aa, Artificial Sequence
  Description of Artificial Sequence: Synthetic peptide
  Seed: RMCSLMQGSTLPRRSGA
RMWSLAQASTVPRRSGA

SEQ ID NO: 130120 - protein, 17 aa, Artificial Sequence
  Description of Artificial Sequence: Synthetic peptide
  Seed: RMCSLMQGSTLPRRSGA
RMWSLAQGSTAPRRSGA

SEQ ID NO: 130121 - protein, 17 aa, Artificial Sequence
  Description of Artificial Sequence: Synthetic peptide
  Seed: RMCSLMQGSTLPRRSGA
RMWSLAQGSTIPRRSGA

SEQ ID NO: 130122 - protein, 17 aa, Artificial Sequence
  Description of Artificial Sequence: Synthetic peptide
  Seed: RMCSLMQGSTLPRRSGA
RMWSLAQGSTLPRRSGA

SEQ ID NO: 130123 - protein, 17 aa, Artificial Sequence
  Description of Artificial Sequence: Synthetic peptide
  Seed: RMCSLMQGSTLPRRSGA
RMWSLAQGSTVPRRSGA

SEQ ID NO: 130124 - protein, 17 aa, Artificial Sequence
  Description of Artificial Sequence: Synthetic peptide
  Seed: RMCSLMQGSTLPRRSGA
RMWSLAQSSTAPRRSGA

SEQ ID NO: 130125 - protein, 17 aa, Artificial Sequence
  Description of Artificial Sequence: Synthetic peptide
  Seed: RMCSLMQGSTLPRRSGA
RMWSLAQSSTIPRRSGA

SEQ ID NO: 130126 - protein, 17 aa, Artificial Sequence
  Description of Artificial Sequence: Synthetic peptide
  Seed: RMCSLMQGSTLPRRSGA
RMWSLAQSSTLPRRSGA

SEQ ID NO: 130127 - protein, 17 aa, Artificial Sequence
  Description of Artificial Sequence: Synthetic peptide
  Seed: RMCSLMQGSTLPRRSGA
RMWSLAQSSTVPRRSGA

SEQ ID NO: 130128 - protein, 17 aa, Artificial Sequence
  Description of Artificial Sequence: Synthetic peptide
  Seed: RMCSLMQGSTLPRRSGA
RMWSLIQASTAPRRSGA

SEQ ID NO: 130129 - protein, 17 aa, Artificial Sequence
  Description of Artificial Sequence: Synthetic peptide
  Seed: RMCSLMQGSTLPRRSGA
RMWSLIQASTIPRRSGA

SEQ ID NO: 130130 - protein, 17 aa, Artificial Sequence
  Description of Artificial Sequence: Synthetic peptide
  Seed: RMCSLMQGSTLPRRSGA
RMWSLIQASTLPRRSGA

SEQ ID NO: 130131 - protein, 17 aa, Artificial Sequence
  Description of Artificial Sequence: Synthetic peptide
  Seed: RMCSLMQGSTLPRRSGA
RMWSLIQASTMPRRSGA

SEQ ID NO: 130132 - protein, 17 aa, Artificial Sequence
  Description of Artificial Sequence: Synthetic peptide
  Seed: RMCSLMQGSTLPRRSGA
RMWSLIQASTSPRRSGA

SEQ ID NO: 130133 - protein, 17 aa, Artificial Sequence
  Description of Artificial Sequence: Synthetic peptide
  Seed: RMCSLMQGSTLPRRSGA
RMWSLIQASTTPRRSGA

SEQ ID NO: 130134 - protein, 17 aa, Artificial Sequence
  Description of Artificial Sequence: Synthetic peptide
  Seed: RMCSLMQGSTLPRRSGA
RMWSLIQASTVPRRSGA

SEQ ID NO: 130135 - protein, 17 aa, Artificial Sequence
  Description of Artificial Sequence: Synthetic peptide
  Seed: RMCSLMQGSTLPRRSGA
RMWSLIQGSTAPRRSGA

SEQ ID NO: 130136 - protein, 17 aa, Artificial Sequence
  Description of Artificial Sequence: Synthetic peptide
  Seed: RMCSLMQGSTLPRRSGA
RMWSLIQGSTIPRRSGA

SEQ ID NO: 130137 - protein, 17 aa, Artificial Sequence
  Description of Artificial Sequence: Synthetic peptide
  Seed: RMCSLMQGSTLPRRSGA
RMWSLIQGSTLPRRSGA

SEQ ID NO: 130138 - protein, 17 aa, Artificial Sequence
  Description of Artificial Sequence: Synthetic peptide
  Seed: RMCSLMQGSTLPRRSGA
RMWSLIQGSTMPRRSGA

SEQ ID NO: 130139 - protein, 17 aa, Artificial Sequence
  Description of Artificial Sequence: Synthetic peptide
  Seed: RMCSLMQGSTLPRRSGA
RMWSLIQGSTTPRRSGA

SEQ ID NO: 130140 - protein, 17 aa, Artificial Sequence
  Description of Artificial Sequence: Synthetic peptide
  Seed: RMCSLMQGSTLPRRSGA
RMWSLIQGSTVPRRSGA

SEQ ID NO: 130141 - protein, 17 aa, Artificial Sequence
  Description of Artificial Sequence: Synthetic peptide
  Seed: RMCSLMQGSTLPRRSGA
RMWSLIQPSTAPRRSGA

SEQ ID NO: 130142 - protein, 17 aa, Artificial Sequence
  Description of Artificial Sequence: Synthetic peptide
  Seed: RMCSLMQGSTLPRRSGA
RMWSLIQPSTIPRRSGA

SEQ ID NO: 130143 - protein, 17 aa, Artificial Sequence
  Description of Artificial Sequence: Synthetic peptide
  Seed: RMCSLMQGSTLPRRSGA
RMWSLIQPSTLPRRSGA

SEQ ID NO: 130144 - protein, 17 aa, Artificial Sequence
  Description of Artificial Sequence: Synthetic peptide
  Seed: RMCSLMQGSTLPRRSGA
RMWSLIQPSTVPRRSGA

SEQ ID NO: 130145 - protein, 17 aa, Artificial Sequence
  Description of Artificial Sequence: Synthetic peptide
  Seed: RMCSLMQGSTLPRRSGA
RMWSLIQSSTAPRRSGA

SEQ ID NO: 130146 - protein, 17 aa, Artificial Sequence
  Description of Artificial Sequence: Synthetic peptide
  Seed: RMCSLMQGSTLPRRSGA
RMWSLIQSSTIPRRSGA

SEQ ID NO: 130147 - protein, 17 aa, Artificial Sequence
  Description of Artificial Sequence: Synthetic peptide
  Seed: RMCSLMQGSTLPRRSGA
RMWSLIQSSTLPRRSGA

SEQ ID NO: 130148 - protein, 17 aa, Artificial Sequence
  Description of Artificial Sequence: Synthetic peptide
  Seed: RMCSLMQGSTLPRRSGA
RMWSLIQSSTVPRRSGA

SEQ ID NO: 130149 - protein, 17 aa, Artificial Sequence
  Description of Artificial Sequence: Synthetic peptide
  Seed: RMCSLMQGSTLPRRSGA
RMWSLLQASTAPRRSGA

SEQ ID NO: 130150 - protein, 17 aa, Artificial Sequence
  Description of Artificial Sequence: Synthetic peptide
  Seed: RMCSLMQGSTLPRRSGA
RMWSLLQASTGPRRSGA

SEQ ID NO: 130151 - protein, 17 aa, Artificial Sequence
  Description of Artificial Sequence: Synthetic peptide
  Seed: RMCSLMQGSTLPRRSGA
RMWSLLQASTIPRRSGA

SEQ ID NO: 130152 - protein, 17 aa, Artificial Sequence
  Description of Artificial Sequence: Synthetic peptide
  Seed: RMCSLMQGSTLPRRSGA
RMWSLLQASTLPRRSGA

SEQ ID NO: 130153 - protein, 17 aa, Artificial Sequence
  Description of Artificial Sequence: Synthetic peptide
  Seed: RMCSLMQGSTLPRRSGA
RMWSLLQASTMPRRSGA

SEQ ID NO: 130154 - protein, 17 aa, Artificial Sequence
  Description of Artificial Sequence: Synthetic peptide
  Seed: RMCSLMQGSTLPRRSGA
RMWSLLQASTSPRRSGA

SEQ ID NO: 130155 - protein, 17 aa, Artificial Sequence
  Description of Artificial Sequence: Synthetic peptide
  Seed: RMCSLMQGSTLPRRSGA
RMWSLLQASTTPRRSGA

SEQ ID NO: 130156 - protein, 17 aa, Artificial Sequence
  Description of Artificial Sequence: Synthetic peptide
  Seed: RMCSLMQGSTLPRRSGA
RMWSLLQASTVPRRSGA

SEQ ID NO: 130157 - protein, 17 aa, Artificial Sequence
  Description of Artificial Sequence: Synthetic peptide
  Seed: RMCSLMQGSTLPRRSGA
RMWSLLQGSTAPRRSGA

SEQ ID NO: 130158 - protein, 17 aa, Artificial Sequence
  Description of Artificial Sequence: Synthetic peptide
  Seed: RMCSLMQGSTLPRRSGA
RMWSLLQGSTGPRRSGA

SEQ ID NO: 130159 - protein, 17 aa, Artificial Sequence
  Description of Artificial Sequence: Synthetic peptide
  Seed: RMCSLMQGSTLPRRSGA
RMWSLLQGSTIPRRSGA

SEQ ID NO: 130160 - protein, 17 aa, Artificial Sequence
  Description of Artificial Sequence: Synthetic peptide
  Seed: RMCSLMQGSTLPRRSGA
RMWSLLQGSTLPRRSGA

SEQ ID NO: 130161 - protein, 17 aa, Artificial Sequence
  Description of Artificial Sequence: Synthetic peptide
  Seed: RMCSLMQGSTLPRRSGA
RMWSLLQGSTMPRRSGA

SEQ ID NO: 130162 - protein, 17 aa, Artificial Sequence
  Description of Artificial Sequence: Synthetic peptide
  Seed: RMCSLMQGSTLPRRSGA
RMWSLLQGSTSPRRSGA

SEQ ID NO: 130163 - protein, 17 aa, Artificial Sequence
  Description of Artificial Sequence: Synthetic peptide
  Seed: RMCSLMQGSTLPRRSGA
RMWSLLQGSTTPRRSGA

SEQ ID NO: 130164 - protein, 17 aa, Artificial Sequence
  Description of Artificial Sequence: Synthetic peptide
  Seed: RMCSLMQGSTLPRRSGA
RMWSLLQGSTVPRRSGA

SEQ ID NO: 130165 - protein, 17 aa, Artificial Sequence
  Description of Artificial Sequence: Synthetic peptide
  Seed: RMCSLMQGSTLPRRSGA
RMWSLLQNSTAPRRSGA

SEQ ID NO: 130166 - protein, 17 aa, Artificial Sequence
  Description of Artificial Sequence: Synthetic peptide
  Seed: RMCSLMQGSTLPRRSGA
RMWSLLQNSTIPRRSGA

SEQ ID NO: 130167 - protein, 17 aa, Artificial Sequence
  Description of Artificial Sequence: Synthetic peptide
  Seed: RMCSLMQGSTLPRRSGA
RMWSLLQNSTLPRRSGA

SEQ ID NO: 130168 - protein, 17 aa, Artificial Sequence
  Description of Artificial Sequence: Synthetic peptide
  Seed: RMCSLMQGSTLPRRSGA
RMWSLLQNSTVPRRSGA

SEQ ID NO: 130169 - protein, 17 aa, Artificial Sequence
  Description of Artificial Sequence: Synthetic peptide
  Seed: RMCSLMQGSTLPRRSGA
RMWSLLQPSTAPRRSGA

SEQ ID NO: 130170 - protein, 17 aa, Artificial Sequence
  Description of Artificial Sequence: Synthetic peptide
  Seed: RMCSLMQGSTLPRRSGA
RMWSLLQPSTIPRRSGA

SEQ ID NO: 130171 - protein, 17 aa, Artificial Sequence
  Description of Artificial Sequence: Synthetic peptide
  Seed: RMCSLMQGSTLPRRSGA
RMWSLLQPSTLPRRSGA

SEQ ID NO: 130172 - protein, 17 aa, Artificial Sequence
  Description of Artificial Sequence: Synthetic peptide
  Seed: RMCSLMQGSTLPRRSGA
RMWSLLQPSTMPRRSGA

SEQ ID NO: 130173 - protein, 17 aa, Artificial Sequence
  Description of Artificial Sequence: Synthetic peptide
  Seed: RMCSLMQGSTLPRRSGA
RMWSLLQPSTSPRRSGA

SEQ ID NO: 130174 - protein, 17 aa, Artificial Sequence
  Description of Artificial Sequence: Synthetic peptide
  Seed: RMCSLMQGSTLPRRSGA
RMWSLLQPSTTPRRSGA

SEQ ID NO: 130175 - protein, 17 aa, Artificial Sequence
  Description of Artificial Sequence: Synthetic peptide
  Seed: RMCSLMQGSTLPRRSGA
RMWSLLQPSTVPRRSGA

SEQ ID NO: 130176 - protein, 17 aa, Artificial Sequence
  Description of Artificial Sequence: Synthetic peptide
  Seed: RMCSLMQGSTLPRRSGA
RMWSLLQSSTAPRRSGA

SEQ ID NO: 130177 - protein, 17 aa, Artificial Sequence
  Description of Artificial Sequence: Synthetic peptide
  Seed: RMCSLMQGSTLPRRSGA
RMWSLLQSSTIPRRSGA

SEQ ID NO: 130178 - protein, 17 aa, Artificial Sequence
  Description of Artificial Sequence: Synthetic peptide
  Seed: RMCSLMQGSTLPRRSGA
RMWSLLQSSTLPRRSGA

SEQ ID NO: 130179 - protein, 17 aa, Artificial Sequence
  Description of Artificial Sequence: Synthetic peptide
  Seed: RMCSLMQGSTLPRRSGA
RMWSLLQSSTMPRRSGA

SEQ ID NO: 130180 - protein, 17 aa, Artificial Sequence
  Description of Artificial Sequence: Synthetic peptide
  Seed: RMCSLMQGSTLPRRSGA
RMWSLLQSSTSPRRSGA

SEQ ID NO: 130181 - protein, 17 aa, Artificial Sequence
  Description of Artificial Sequence: Synthetic peptide
  Seed: RMCSLMQGSTLPRRSGA
RMWSLLQSSTTPRRSGA

SEQ ID NO: 130182 - protein, 17 aa, Artificial Sequence
  Description of Artificial Sequence: Synthetic peptide
  Seed: RMCSLMQGSTLPRRSGA
RMWSLLQSSTVPRRSGA

SEQ ID NO: 130183 - protein, 17 aa, Artificial Sequence
  Description of Artificial Sequence: Synthetic peptide
  Seed: RMCSLMQGSTLPRRSGA
RMWSLLQTSTAPRRSGA

SEQ ID NO: 130184 - protein, 17 aa, Artificial Sequence
  Description of Artificial Sequence: Synthetic peptide
  Seed: RMCSLMQGSTLPRRSGA
RMWSLLQTSTIPRRSGA

SEQ ID NO: 130185 - protein, 17 aa, Artificial Sequence
  Description of Artificial Sequence: Synthetic peptide
  Seed: RMCSLMQGSTLPRRSGA
RMWSLLQTSTLPRRSGA

SEQ ID NO: 130186 - protein, 17 aa, Artificial Sequence
  Description of Artificial Sequence: Synthetic peptide
  Seed: RMCSLMQGSTLPRRSGA
RMWSLLQTSTTPRRSGA

SEQ ID NO: 130187 - protein, 17 aa, Artificial Sequence
  Description of Artificial Sequence: Synthetic peptide
  Seed: RMCSLMQGSTLPRRSGA
RMWSLLQTSTVPRRSGA

SEQ ID NO: 130188 - protein, 17 aa, Artificial Sequence
  Description of Artificial Sequence: Synthetic peptide
  Seed: RMCSLMQGSTLPRRSGA
RMWSLLQVSTAPRRSGA

SEQ ID NO: 130189 - protein, 17 aa, Artificial Sequence
  Description of Artificial Sequence: Synthetic peptide
  Seed: RMCSLMQGSTLPRRSGA
RMWSLLQVSTVPRRSGA

SEQ ID NO: 130190 - protein, 17 aa, Artificial Sequence
  Description of Artificial Sequence: Synthetic peptide
  Seed: RMCSLMQGSTLPRRSGA
RMWSLMQASTAPRRSGA

SEQ ID NO: 130191 - protein, 17 aa, Artificial Sequence
  Description of Artificial Sequence: Synthetic peptide
  Seed: RMCSLMQGSTLPRRSGA
RMWSLMQASTGPRRSGA

SEQ ID NO: 130192 - protein, 17 aa, Artificial Sequence
  Description of Artificial Sequence: Synthetic peptide
  Seed: RMCSLMQGSTLPRRSGA
RMWSLMQASTIPRRSGA

SEQ ID NO: 130193 - protein, 17 aa, Artificial Sequence
  Description of Artificial Sequence: Synthetic peptide
  Seed: RMCSLMQGSTLPRRSGA
RMWSLMQASTLPRRSGA

SEQ ID NO: 130194 - protein, 17 aa, Artificial Sequence
  Description of Artificial Sequence: Synthetic peptide
  Seed: RMCSLMQGSTLPRRSGA
RMWSLMQASTMPRRSGA

SEQ ID NO: 130195 - protein, 17 aa, Artificial Sequence
  Description of Artificial Sequence: Synthetic peptide
  Seed: RMCSLMQGSTLPRRSGA
RMWSLMQASTSPRRSGA

SEQ ID NO: 130196 - protein, 17 aa, Artificial Sequence
  Description of Artificial Sequence: Synthetic peptide
  Seed: RMCSLMQGSTLPRRSGA
RMWSLMQASTTPRRSGA

SEQ ID NO: 130197 - protein, 17 aa, Artificial Sequence
  Description of Artificial Sequence: Synthetic peptide
  Seed: RMCSLMQGSTLPRRSGA
RMWSLMQASTVPRRSGA

SEQ ID NO: 130198 - protein, 17 aa, Artificial Sequence
  Description of Artificial Sequence: Synthetic peptide
  Seed: RMCSLMQGSTLPRRSGA
RMWSLMQGSTAPRRSGA

SEQ ID NO: 130199 - protein, 17 aa, Artificial Sequence
  Description of Artificial Sequence: Synthetic peptide
  Seed: RMCSLMQGSTLPRRSGA
RMWSLMQGSTIPRRSGA

SEQ ID NO: 130200 - protein, 17 aa, Artificial Sequence
  Description of Artificial Sequence: Synthetic peptide
  Seed: RMCSLMQGSTLPRRSGA
RMWSLMQGSTLPRRSGA

SEQ ID NO: 130201 - protein, 17 aa, Artificial Sequence
  Description of Artificial Sequence: Synthetic peptide
  Seed: RMCSLMQGSTLPRRSGA
RMWSLMQGSTMPRRSGA

SEQ ID NO: 130202 - protein, 17 aa, Artificial Sequence
  Description of Artificial Sequence: Synthetic peptide
  Seed: RMCSLMQGSTLPRRSGA
RMWSLMQGSTSPRRSGA

SEQ ID NO: 130203 - protein, 17 aa, Artificial Sequence
  Description of Artificial Sequence: Synthetic peptide
  Seed: RMCSLMQGSTLPRRSGA
RMWSLMQGSTTPRRSGA

SEQ ID NO: 130204 - protein, 17 aa, Artificial Sequence
  Description of Artificial Sequence: Synthetic peptide
  Seed: RMCSLMQGSTLPRRSGA
RMWSLMQGSTVPRRSGA

SEQ ID NO: 130205 - protein, 17 aa, Artificial Sequence
  Description of Artificial Sequence: Synthetic peptide
  Seed: RMCSLMQGSTLPRRSGA
RMWSLMQNSTAPRRSGA

SEQ ID NO: 130206 - protein, 17 aa, Artificial Sequence
  Description of Artificial Sequence: Synthetic peptide
  Seed: RMCSLMQGSTLPRRSGA
RMWSLMQNSTIPRRSGA

SEQ ID NO: 130207 - protein, 17 aa, Artificial Sequence
  Description of Artificial Sequence: Synthetic peptide
  Seed: RMCSLMQGSTLPRRSGA
RMWSLMQNSTLPRRSGA

SEQ ID NO: 130208 - protein, 17 aa, Artificial Sequence
  Description of Artificial Sequence: Synthetic peptide
  Seed: RMCSLMQGSTLPRRSGA
RMWSLMQNSTVPRRSGA

SEQ ID NO: 130209 - protein, 17 aa, Artificial Sequence
  Description of Artificial Sequence: Synthetic peptide
  Seed: RMCSLMQGSTLPRRSGA
RMWSLMQPSTAPRRSGA

SEQ ID NO: 130210 - protein, 17 aa, Artificial Sequence
  Description of Artificial Sequence: Synthetic peptide
  Seed: RMCSLMQGSTLPRRSGA
RMWSLMQPSTIPRRSGA

SEQ ID NO: 130211 - protein, 17 aa, Artificial Sequence
  Description of Artificial Sequence: Synthetic peptide
  Seed: RMCSLMQGSTLPRRSGA
RMWSLMQPSTLPRRSGA

SEQ ID NO: 130212 - protein, 17 aa, Artificial Sequence
  Description of Artificial Sequence: Synthetic peptide
  Seed: RMCSLMQGSTLPRRSGA
RMWSLMQPSTMPRRSGA

SEQ ID NO: 130213 - protein, 17 aa, Artificial Sequence
  Description of Artificial Sequence: Synthetic peptide
  Seed: RMCSLMQGSTLPRRSGA
RMWSLMQPSTTPRRSGA

SEQ ID NO: 130214 - protein, 17 aa, Artificial Sequence
  Description of Artificial Sequence: Synthetic peptide
  Seed: RMCSLMQGSTLPRRSGA
RMWSLMQPSTVPRRSGA

SEQ ID NO: 130215 - protein, 17 aa, Artificial Sequence
  Description of Artificial Sequence: Synthetic peptide
  Seed: RMCSLMQGSTLPRRSGA
RMWSLMQSSTAPRRSGA

SEQ ID NO: 130216 - protein, 17 aa, Artificial Sequence
  Description of Artificial Sequence: Synthetic peptide
  Seed: RMCSLMQGSTLPRRSGA
RMWSLMQSSTIPRRSGA

SEQ ID NO: 130217 - protein, 17 aa, Artificial Sequence
  Description of Artificial Sequence: Synthetic peptide
  Seed: RMCSLMQGSTLPRRSGA
RMWSLMQSSTLPRRSGA

SEQ ID NO: 130218 - protein, 17 aa, Artificial Sequence
  Description of Artificial Sequence: Synthetic peptide
  Seed: RMCSLMQGSTLPRRSGA
RMWSLMQSSTMPRRSGA

SEQ ID NO: 130219 - protein, 17 aa, Artificial Sequence
  Description of Artificial Sequence: Synthetic peptide
  Seed: RMCSLMQGSTLPRRSGA
RMWSLMQSSTSPRRSGA

SEQ ID NO: 130220 - protein, 17 aa, Artificial Sequence
  Description of Artificial Sequence: Synthetic peptide
  Seed: RMCSLMQGSTLPRRSGA
RMWSLMQSSTTPRRSGA

SEQ ID NO: 130221 - protein, 17 aa, Artificial Sequence
  Description of Artificial Sequence: Synthetic peptide
  Seed: RMCSLMQGSTLPRRSGA
RMWSLMQSSTVPRRSGA

SEQ ID NO: 130222 - protein, 17 aa, Artificial Sequence
  Description of Artificial Sequence: Synthetic peptide
  Seed: RMCSLMQGSTLPRRSGA
RMWSLMQTSTAPRRSGA

SEQ ID NO: 130223 - protein, 17 aa, Artificial Sequence
  Description of Artificial Sequence: Synthetic peptide
  Seed: RMCSLMQGSTLPRRSGA
RMWSLMQTSTIPRRSGA

SEQ ID NO: 130224 - protein, 17 aa, Artificial Sequence
  Description of Artificial Sequence: Synthetic peptide
  Seed: RMCSLMQGSTLPRRSGA
RMWSLMQTSTLPRRSGA

SEQ ID NO: 130225 - protein, 17 aa, Artificial Sequence
  Description of Artificial Sequence: Synthetic peptide
  Seed: RMCSLMQGSTLPRRSGA
RMWSLMQTSTVPRRSGA

SEQ ID NO: 130226 - protein, 17 aa, Artificial Sequence
  Description of Artificial Sequence: Synthetic peptide
  Seed: RMCSLMQGSTLPRRSGA
RMWSLMQVSTAPRRSGA

SEQ ID NO: 130227 - protein, 17 aa, Artificial Sequence
  Description of Artificial Sequence: Synthetic peptide
  Seed: RMCSLMQGSTLPRRSGA
RMWSLMQVSTVPRRSGA

SEQ ID NO: 130228 - protein, 17 aa, Artificial Sequence
  Description of Artificial Sequence: Synthetic peptide
  Seed: RMCSLMQGSTLPRRSGA
RMWSLQQASTAPRRSGA

SEQ ID NO: 130229 - protein, 17 aa, Artificial Sequence
  Description of Artificial Sequence: Synthetic peptide
  Seed: RMCSLMQGSTLPRRSGA
RMWSLQQASTIPRRSGA

SEQ ID NO: 130230 - protein, 17 aa, Artificial Sequence
  Description of Artificial Sequence: Synthetic peptide
  Seed: RMCSLMQGSTLPRRSGA
RMWSLQQASTLPRRSGA

SEQ ID NO: 130231 - protein, 17 aa, Artificial Sequence
  Description of Artificial Sequence: Synthetic peptide
  Seed: RMCSLMQGSTLPRRSGA
RMWSLQQASTVPRRSGA

SEQ ID NO: 130232 - protein, 17 aa, Artificial Sequence
  Description of Artificial Sequence: Synthetic peptide
  Seed: RMCSLMQGSTLPRRSGA
RMWSLQQGSTIPRRSGA

SEQ ID NO: 130233 - protein, 17 aa, Artificial Sequence
  Description of Artificial Sequence: Synthetic peptide
  Seed: RMCSLMQGSTLPRRSGA
RMWSLQQGSTLPRRSGA

SEQ ID NO: 130234 - protein, 17 aa, Artificial Sequence
  Description of Artificial Sequence: Synthetic peptide
  Seed: RMCSLMQGSTLPRRSGA
RMWSLQQGSTVPRRSGA

SEQ ID NO: 130235 - protein, 17 aa, Artificial Sequence
  Description of Artificial Sequence: Synthetic peptide
  Seed: RMCSLMQGSTLPRRSGA
RMWSLQQSSTLPRRSGA

SEQ ID NO: 130236 - protein, 17 aa, Artificial Sequence
  Description of Artificial Sequence: Synthetic peptide
  Seed: RMCSLMQGSTLPRRSGA
RMWSLQQSSTVPRRSGA

SEQ ID NO: 130237 - protein, 17 aa, Artificial Sequence
  Description of Artificial Sequence: Synthetic peptide
  Seed: RMCSLMQGSTLPRRSGA
RMWSLVQASTAPRRSGA

SEQ ID NO: 130238 - protein, 17 aa, Artificial Sequence
  Description of Artificial Sequence: Synthetic peptide
  Seed: RMCSLMQGSTLPRRSGA
RMWSLVQASTIPRRSGA

SEQ ID NO: 130239 - protein, 17 aa, Artificial Sequence
  Description of Artificial Sequence: Synthetic peptide
  Seed: RMCSLMQGSTLPRRSGA
RMWSLVQASTLPRRSGA

SEQ ID NO: 130240 - protein, 17 aa, Artificial Sequence
  Description of Artificial Sequence: Synthetic peptide
  Seed: RMCSLMQGSTLPRRSGA
RMWSLVQASTVPRRSGA

SEQ ID NO: 130241 - protein, 17 aa, Artificial Sequence
  Description of Artificial Sequence: Synthetic peptide
  Seed: RMCSLMQGSTLPRRSGA
RMWSLVQGSTAPRRSGA

SEQ ID NO: 130242 - protein, 17 aa, Artificial Sequence
  Description of Artificial Sequence: Synthetic peptide
  Seed: RMCSLMQGSTLPRRSGA
RMWSLVQGSTIPRRSGA

SEQ ID NO: 130243 - protein, 17 aa, Artificial Sequence
  Description of Artificial Sequence: Synthetic peptide
  Seed: RMCSLMQGSTLPRRSGA
RMWSLVQGSTLPRRSGA

SEQ ID NO: 130244 - protein, 17 aa, Artificial Sequence
  Description of Artificial Sequence: Synthetic peptide
  Seed: RMCSLMQGSTLPRRSGA
RMWSLVQGSTVPRRSGA

SEQ ID NO: 130245 - protein, 17 aa, Artificial Sequence
  Description of Artificial Sequence: Synthetic peptide
  Seed: RMCSLMQGSTLPRRSGA
RMWSLVQSSTVPRRSGA

SEQ ID NO: 130246 - protein, 17 aa, Artificial Sequence
  Description of Artificial Sequence: Synthetic peptide
  Seed: RMCSLMQGSTLPRRSGA
RMYSLAQASTAPRRSGA

SEQ ID NO: 130247 - protein, 17 aa, Artificial Sequence
  Description of Artificial Sequence: Synthetic peptide
  Seed: RMCSLMQGSTLPRRSGA
RMYSLAQASTIPRRSGA

SEQ ID NO: 130248 - protein, 17 aa, Artificial Sequence
  Description of Artificial Sequence: Synthetic peptide
  Seed: RMCSLMQGSTLPRRSGA
RMYSLAQASTLPRRSGA

SEQ ID NO: 130249 - protein, 17 aa, Artificial Sequence
  Description of Artificial Sequence: Synthetic peptide
  Seed: RMCSLMQGSTLPRRSGA
RMYSLAQASTMPRRSGA

SEQ ID NO: 130250 - protein, 17 aa, Artificial Sequence
  Description of Artificial Sequence: Synthetic peptide
  Seed: RMCSLMQGSTLPRRSGA
RMYSLAQASTSPRRSGA

SEQ ID NO: 130251 - protein, 17 aa, Artificial Sequence
  Description of Artificial Sequence: Synthetic peptide
  Seed: RMCSLMQGSTLPRRSGA
RMYSLAQASTTPRRSGA

SEQ ID NO: 130252 - protein, 17 aa, Artificial Sequence
  Description of Artificial Sequence: Synthetic peptide
  Seed: RMCSLMQGSTLPRRSGA
RMYSLAQASTVPRRSGA

SEQ ID NO: 130253 - protein, 17 aa, Artificial Sequence
  Description of Artificial Sequence: Synthetic peptide
  Seed: RMCSLMQGSTLPRRSGA
RMYSLAQGSTAPRRSGA

SEQ ID NO: 130254 - protein, 17 aa, Artificial Sequence
  Description of Artificial Sequence: Synthetic peptide
  Seed: RMCSLMQGSTLPRRSGA
RMYSLAQGSTIPRRSGA

SEQ ID NO: 130255 - protein, 17 aa, Artificial Sequence
  Description of Artificial Sequence: Synthetic peptide
  Seed: RMCSLMQGSTLPRRSGA
RMYSLAQGSTLPRRSGA

SEQ ID NO: 130256 - protein, 17 aa, Artificial Sequence
  Description of Artificial Sequence: Synthetic peptide
  Seed: RMCSLMQGSTLPRRSGA
RMYSLAQGSTMPRRSGA

SEQ ID NO: 130257 - protein, 17 aa, Artificial Sequence
  Description of Artificial Sequence: Synthetic peptide
  Seed: RMCSLMQGSTLPRRSGA
RMYSLAQGSTVPRRSGA

SEQ ID NO: 130258 - protein, 17 aa, Artificial Sequence
  Description of Artificial Sequence: Synthetic peptide
  Seed: RMCSLMQGSTLPRRSGA
RMYSLAQNSTIPRRSGA

SEQ ID NO: 130259 - protein, 17 aa, Artificial Sequence
  Description of Artificial Sequence: Synthetic peptide
  Seed: RMCSLMQGSTLPRRSGA
RMYSLAQNSTLPRRSGA

SEQ ID NO: 130260 - protein, 17 aa, Artificial Sequence
  Description of Artificial Sequence: Synthetic peptide
  Seed: RMCSLMQGSTLPRRSGA
RMYSLAQNSTVPRRSGA

SEQ ID NO: 130261 - protein, 17 aa, Artificial Sequence
  Description of Artificial Sequence: Synthetic peptide
  Seed: RMCSLMQGSTLPRRSGA
RMYSLAQPSTAPRRSGA

SEQ ID NO: 130262 - protein, 17 aa, Artificial Sequence
  Description of Artificial Sequence: Synthetic peptide
  Seed: RMCSLMQGSTLPRRSGA
RMYSLAQPSTIPRRSGA

SEQ ID NO: 130263 - protein, 17 aa, Artificial Sequence
  Description of Artificial Sequence: Synthetic peptide
  Seed: RMCSLMQGSTLPRRSGA
RMYSLAQPSTLPRRSGA

SEQ ID NO: 130264 - protein, 17 aa, Artificial Sequence
  Description of Artificial Sequence: Synthetic peptide
  Seed: RMCSLMQGSTLPRRSGA
RMYSLAQPSTMPRRSGA

SEQ ID NO: 130265 - protein, 17 aa, Artificial Sequence
  Description of Artificial Sequence: Synthetic peptide
  Seed: RMCSLMQGSTLPRRSGA
RMYSLAQPSTVPRRSGA

SEQ ID NO: 130266 - protein, 17 aa, Artificial Sequence
  Description of Artificial Sequence: Synthetic peptide
  Seed: RMCSLMQGSTLPRRSGA
RMYSLAQSSTAPRRSGA

SEQ ID NO: 130267 - protein, 17 aa, Artificial Sequence
  Description of Artificial Sequence: Synthetic peptide
  Seed: RMCSLMQGSTLPRRSGA
RMYSLAQSSTIPRRSGA

SEQ ID NO: 130268 - protein, 17 aa, Artificial Sequence
  Description of Artificial Sequence: Synthetic peptide
  Seed: RMCSLMQGSTLPRRSGA
RMYSLAQSSTLPRRSGA

SEQ ID NO: 130269 - protein, 17 aa, Artificial Sequence
  Description of Artificial Sequence: Synthetic peptide
  Seed: RMCSLMQGSTLPRRSGA
RMYSLAQSSTMPRRSGA

SEQ ID NO: 130270 - protein, 17 aa, Artificial Sequence
  Description of Artificial Sequence: Synthetic peptide
  Seed: RMCSLMQGSTLPRRSGA
RMYSLAQSSTTPRRSGA

SEQ ID NO: 130271 - protein, 17 aa, Artificial Sequence
  Description of Artificial Sequence: Synthetic peptide
  Seed: RMCSLMQGSTLPRRSGA
RMYSLAQSSTVPRRSGA

SEQ ID NO: 130272 - protein, 17 aa, Artificial Sequence
  Description of Artificial Sequence: Synthetic peptide
  Seed: RMCSLMQGSTLPRRSGA
RMYSLAQTSTIPRRSGA

SEQ ID NO: 130273 - protein, 17 aa, Artificial Sequence
  Description of Artificial Sequence: Synthetic peptide
  Seed: RMCSLMQGSTLPRRSGA
RMYSLAQTSTLPRRSGA

SEQ ID NO: 130274 - protein, 17 aa, Artificial Sequence
  Description of Artificial Sequence: Synthetic peptide
  Seed: RMCSLMQGSTLPRRSGA
RMYSLAQTSTVPRRSGA

SEQ ID NO: 130275 - protein, 17 aa, Artificial Sequence
  Description of Artificial Sequence: Synthetic peptide
  Seed: RMCSLMQGSTLPRRSGA
RMYSLAQVSTIPRRSGA

SEQ ID NO: 130276 - protein, 17 aa, Artificial Sequence
  Description of Artificial Sequence: Synthetic peptide
  Seed: RMCSLMQGSTLPRRSGA
RMYSLAQVSTLPRRSGA

SEQ ID NO: 130277 - protein, 17 aa, Artificial Sequence
  Description of Artificial Sequence: Synthetic peptide
  Seed: RMCSLMQGSTLPRRSGA
RMYSLAQVSTVPRRSGA

SEQ ID NO: 130278 - protein, 17 aa, Artificial Sequence
  Description of Artificial Sequence: Synthetic peptide
  Seed: RMCSLMQGSTLPRRSGA
RMYSLEQASTIPRRSGA

SEQ ID NO: 130279 - protein, 17 aa, Artificial Sequence
  Description of Artificial Sequence: Synthetic peptide
  Seed: RMCSLMQGSTLPRRSGA
RMYSLEQASTLPRRSGA

SEQ ID NO: 130280 - protein, 17 aa, Artificial Sequence
  Description of Artificial Sequence: Synthetic peptide
  Seed: RMCSLMQGSTLPRRSGA
RMYSLEQASTVPRRSGA

SEQ ID NO: 130281 - protein, 17 aa, Artificial Sequence
  Description of Artificial Sequence: Synthetic peptide
  Seed: RMCSLMQGSTLPRRSGA
RMYSLFQASTAPRRSGA

SEQ ID NO: 130282 - protein, 17 aa, Artificial Sequence
  Description of Artificial Sequence: Synthetic peptide
  Seed: RMCSLMQGSTLPRRSGA
RMYSLFQASTIPRRSGA

SEQ ID NO: 130283 - protein, 17 aa, Artificial Sequence
  Description of Artificial Sequence: Synthetic peptide
  Seed: RMCSLMQGSTLPRRSGA
RMYSLFQASTLPRRSGA

SEQ ID NO: 130284 - protein, 17 aa, Artificial Sequence
  Description of Artificial Sequence: Synthetic peptide
  Seed: RMCSLMQGSTLPRRSGA
RMYSLFQASTVPRRSGA

SEQ ID NO: 130285 - protein, 17 aa, Artificial Sequence
  Description of Artificial Sequence: Synthetic peptide
  Seed: RMCSLMQGSTLPRRSGA
RMYSLFQGSTVPRRSGA

SEQ ID NO: 130286 - protein, 17 aa, Artificial Sequence
  Description of Artificial Sequence: Synthetic peptide
  Seed: RMCSLMQGSTLPRRSGA
RMYSLGQASTIPRRSGA

SEQ ID NO: 130287 - protein, 17 aa, Artificial Sequence
  Description of Artificial Sequence: Synthetic peptide
  Seed: RMCSLMQGSTLPRRSGA
RMYSLGQASTLPRRSGA

SEQ ID NO: 130288 - protein, 17 aa, Artificial Sequence
  Description of Artificial Sequence: Synthetic peptide
  Seed: RMCSLMQGSTLPRRSGA
RMYSLGQASTVPRRSGA

SEQ ID NO: 130289 - protein, 17 aa, Artificial Sequence
  Description of Artificial Sequence: Synthetic peptide
  Seed: RMCSLMQGSTLPRRSGA
RMYSLIQASTAPRRSGA

SEQ ID NO: 130290 - protein, 17 aa, Artificial Sequence
  Description of Artificial Sequence: Synthetic peptide
  Seed: RMCSLMQGSTLPRRSGA
RMYSLIQASTGPRRSGA

SEQ ID NO: 130291 - protein, 17 aa, Artificial Sequence
  Description of Artificial Sequence: Synthetic peptide
  Seed: RMCSLMQGSTLPRRSGA
RMYSLIQASTIPRRSGA

SEQ ID NO: 130292 - protein, 17 aa, Artificial Sequence
  Description of Artificial Sequence: Synthetic peptide
  Seed: RMCSLMQGSTLPRRSGA
RMYSLIQASTLPRRSGA

SEQ ID NO: 130293 - protein, 17 aa, Artificial Sequence
  Description of Artificial Sequence: Synthetic peptide
  Seed: RMCSLMQGSTLPRRSGA
RMYSLIQASTMPRRSGA

SEQ ID NO: 130294 - protein, 17 aa, Artificial Sequence
  Description of Artificial Sequence: Synthetic peptide
  Seed: RMCSLMQGSTLPRRSGA
RMYSLIQASTSPRRSGA

SEQ ID NO: 130295 - protein, 17 aa, Artificial Sequence
  Description of Artificial Sequence: Synthetic peptide
  Seed: RMCSLMQGSTLPRRSGA
RMYSLIQASTTPRRSGA

SEQ ID NO: 130296 - protein, 17 aa, Artificial Sequence
  Description of Artificial Sequence: Synthetic peptide
  Seed: RMCSLMQGSTLPRRSGA
RMYSLIQASTVPRRSGA

SEQ ID NO: 130297 - protein, 17 aa, Artificial Sequence
  Description of Artificial Sequence: Synthetic peptide
  Seed: RMCSLMQGSTLPRRSGA
RMYSLIQGSTAPRRSGA

SEQ ID NO: 130298 - protein, 17 aa, Artificial Sequence
  Description of Artificial Sequence: Synthetic peptide
  Seed: RMCSLMQGSTLPRRSGA
RMYSLIQGSTGPRRSGA

SEQ ID NO: 130299 - protein, 17 aa, Artificial Sequence
  Description of Artificial Sequence: Synthetic peptide
  Seed: RMCSLMQGSTLPRRSGA
RMYSLIQGSTIPRRSGA

SEQ ID NO: 130300 - protein, 17 aa, Artificial Sequence
  Description of Artificial Sequence: Synthetic peptide
  Seed: RMCSLMQGSTLPRRSGA
RMYSLIQGSTLPRRSGA

SEQ ID NO: 130301 - protein, 17 aa, Artificial Sequence
  Description of Artificial Sequence: Synthetic peptide
  Seed: RMCSLMQGSTLPRRSGA
RMYSLIQGSTMPRRSGA

SEQ ID NO: 130302 - protein, 17 aa, Artificial Sequence
  Description of Artificial Sequence: Synthetic peptide
  Seed: RMCSLMQGSTLPRRSGA
RMYSLIQGSTSPRRSGA

SEQ ID NO: 130303 - protein, 17 aa, Artificial Sequence
  Description of Artificial Sequence: Synthetic peptide
  Seed: RMCSLMQGSTLPRRSGA
RMYSLIQGSTTPRRSGA

SEQ ID NO: 130304 - protein, 17 aa, Artificial Sequence
  Description of Artificial Sequence: Synthetic peptide
  Seed: RMCSLMQGSTLPRRSGA
RMYSLIQGSTVPRRSGA

SEQ ID NO: 130305 - protein, 17 aa, Artificial Sequence
  Description of Artificial Sequence: Synthetic peptide
  Seed: RMCSLMQGSTLPRRSGA
RMYSLIQNSTAPRRSGA

SEQ ID NO: 130306 - protein, 17 aa, Artificial Sequence
  Description of Artificial Sequence: Synthetic peptide
  Seed: RMCSLMQGSTLPRRSGA
RMYSLIQNSTIPRRSGA

SEQ ID NO: 130307 - protein, 17 aa, Artificial Sequence
  Description of Artificial Sequence: Synthetic peptide
  Seed: RMCSLMQGSTLPRRSGA
RMYSLIQNSTLPRRSGA

SEQ ID NO: 130308 - protein, 17 aa, Artificial Sequence
  Description of Artificial Sequence: Synthetic peptide
  Seed: RMCSLMQGSTLPRRSGA
RMYSLIQNSTVPRRSGA

SEQ ID NO: 130309 - protein, 17 aa, Artificial Sequence
  Description of Artificial Sequence: Synthetic peptide
  Seed: RMCSLMQGSTLPRRSGA
RMYSLIQPSTAPRRSGA

SEQ ID NO: 130310 - protein, 17 aa, Artificial Sequence
  Description of Artificial Sequence: Synthetic peptide
  Seed: RMCSLMQGSTLPRRSGA
RMYSLIQPSTIPRRSGA

SEQ ID NO: 130311 - protein, 17 aa, Artificial Sequence
  Description of Artificial Sequence: Synthetic peptide
  Seed: RMCSLMQGSTLPRRSGA
RMYSLIQPSTLPRRSGA

SEQ ID NO: 130312 - protein, 17 aa, Artificial Sequence
  Description of Artificial Sequence: Synthetic peptide
  Seed: RMCSLMQGSTLPRRSGA
RMYSLIQPSTMPRRSGA

SEQ ID NO: 130313 - protein, 17 aa, Artificial Sequence
  Description of Artificial Sequence: Synthetic peptide
  Seed: RMCSLMQGSTLPRRSGA
RMYSLIQPSTSPRRSGA

SEQ ID NO: 130314 - protein, 17 aa, Artificial Sequence
  Description of Artificial Sequence: Synthetic peptide
  Seed: RMCSLMQGSTLPRRSGA
RMYSLIQPSTTPRRSGA

SEQ ID NO: 130315 - protein, 17 aa, Artificial Sequence
  Description of Artificial Sequence: Synthetic peptide
  Seed: RMCSLMQGSTLPRRSGA
RMYSLIQPSTVPRRSGA

SEQ ID NO: 130316 - protein, 17 aa, Artificial Sequence
  Description of Artificial Sequence: Synthetic peptide
  Seed: RMCSLMQGSTLPRRSGA
RMYSLIQSSTAPRRSGA

SEQ ID NO: 130317 - protein, 17 aa, Artificial Sequence
  Description of Artificial Sequence: Synthetic peptide
  Seed: RMCSLMQGSTLPRRSGA
RMYSLIQSSTIPRRSGA

SEQ ID NO: 130318 - protein, 17 aa, Artificial Sequence
  Description of Artificial Sequence: Synthetic peptide
  Seed: RMCSLMQGSTLPRRSGA
RMYSLIQSSTLPRRSGA

SEQ ID NO: 130319 - protein, 17 aa, Artificial Sequence
  Description of Artificial Sequence: Synthetic peptide
  Seed: RMCSLMQGSTLPRRSGA
RMYSLIQSSTMPRRSGA

SEQ ID NO: 130320 - protein, 17 aa, Artificial Sequence
  Description of Artificial Sequence: Synthetic peptide
  Seed: RMCSLMQGSTLPRRSGA
RMYSLIQSSTSPRRSGA

SEQ ID NO: 130321 - protein, 17 aa, Artificial Sequence
  Description of Artificial Sequence: Synthetic peptide
  Seed: RMCSLMQGSTLPRRSGA
RMYSLIQSSTTPRRSGA

SEQ ID NO: 130322 - protein, 17 aa, Artificial Sequence
  Description of Artificial Sequence: Synthetic peptide
  Seed: RMCSLMQGSTLPRRSGA
RMYSLIQSSTVPRRSGA

SEQ ID NO: 130323 - protein, 17 aa, Artificial Sequence
  Description of Artificial Sequence: Synthetic peptide
  Seed: RMCSLMQGSTLPRRSGA
RMYSLIQTSTAPRRSGA

SEQ ID NO: 130324 - protein, 17 aa, Artificial Sequence
  Description of Artificial Sequence: Synthetic peptide
  Seed: RMCSLMQGSTLPRRSGA
RMYSLIQTSTIPRRSGA

SEQ ID NO: 130325 - protein, 17 aa, Artificial Sequence
  Description of Artificial Sequence: Synthetic peptide
  Seed: RMCSLMQGSTLPRRSGA
RMYSLIQTSTLPRRSGA

SEQ ID NO: 130326 - protein, 17 aa, Artificial Sequence
  Description of Artificial Sequence: Synthetic peptide
  Seed: RMCSLMQGSTLPRRSGA
RMYSLIQTSTVPRRSGA

SEQ ID NO: 130327 - protein, 17 aa, Artificial Sequence
  Description of Artificial Sequence: Synthetic peptide
  Seed: RMCSLMQGSTLPRRSGA
RMYSLIQVSTAPRRSGA

SEQ ID NO: 130328 - protein, 17 aa, Artificial Sequence
  Description of Artificial Sequence: Synthetic peptide
  Seed: RMCSLMQGSTLPRRSGA
RMYSLIQVSTIPRRSGA

SEQ ID NO: 130329 - protein, 17 aa, Artificial Sequence
  Description of Artificial Sequence: Synthetic peptide
  Seed: RMCSLMQGSTLPRRSGA
RMYSLIQVSTLPRRSGA

SEQ ID NO: 130330 - protein, 17 aa, Artificial Sequence
  Description of Artificial Sequence: Synthetic peptide
  Seed: RMCSLMQGSTLPRRSGA
RMYSLIQVSTVPRRSGA

SEQ ID NO: 130331 - protein, 17 aa, Artificial Sequence
  Description of Artificial Sequence: Synthetic peptide
  Seed: RMCSLMQGSTLPRRSGA
RMYSLLQASTAPRRSGA

SEQ ID NO: 130332 - protein, 17 aa, Artificial Sequence
  Description of Artificial Sequence: Synthetic peptide
  Seed: RMCSLMQGSTLPRRSGA
RMYSLLQASTCPRRSGA

SEQ ID NO: 130333 - protein, 17 aa, Artificial Sequence
  Description of Artificial Sequence: Synthetic peptide
  Seed: RMCSLMQGSTLPRRSGA
RMYSLLQASTFPRRSGA

SEQ ID NO: 130334 - protein, 17 aa, Artificial Sequence
  Description of Artificial Sequence: Synthetic peptide
  Seed: RMCSLMQGSTLPRRSGA
RMYSLLQASTGPRRSGA

SEQ ID NO: 130335 - protein, 17 aa, Artificial Sequence
  Description of Artificial Sequence: Synthetic peptide
  Seed: RMCSLMQGSTLPRRSGA
RMYSLLQASTIPRRSGA

SEQ ID NO: 130336 - protein, 17 aa, Artificial Sequence
  Description of Artificial Sequence: Synthetic peptide
  Seed: RMCSLMQGSTLPRRSGA
RMYSLLQASTLPRRSGA

SEQ ID NO: 130337 - protein, 17 aa, Artificial Sequence
  Description of Artificial Sequence: Synthetic peptide
  Seed: RMCSLMQGSTLPRRSGA
RMYSLLQASTMPRRSGA

SEQ ID NO: 130338 - protein, 17 aa, Artificial Sequence
  Description of Artificial Sequence: Synthetic peptide
  Seed: RMCSLMQGSTLPRRSGA
RMYSLLQASTNPRRSGA

SEQ ID NO: 130339 - protein, 17 aa, Artificial Sequence
  Description of Artificial Sequence: Synthetic peptide
  Seed: RMCSLMQGSTLPRRSGA
RMYSLLQASTPPRRSGA

SEQ ID NO: 130340 - protein, 17 aa, Artificial Sequence
  Description of Artificial Sequence: Synthetic peptide
  Seed: RMCSLMQGSTLPRRSGA
RMYSLLQASTSPRRSGA

SEQ ID NO: 130341 - protein, 17 aa, Artificial Sequence
  Description of Artificial Sequence: Synthetic peptide
  Seed: RMCSLMQGSTLPRRSGA
RMYSLLQASTTPRRSGA

SEQ ID NO: 130342 - protein, 17 aa, Artificial Sequence
  Description of Artificial Sequence: Synthetic peptide
  Seed: RMCSLMQGSTLPRRSGA
RMYSLLQASTVPRRSGA

SEQ ID NO: 130343 - protein, 17 aa, Artificial Sequence
  Description of Artificial Sequence: Synthetic peptide
  Seed: RMCSLMQGSTLPRRSGA
RMYSLLQGSTAPRRSGA

SEQ ID NO: 130344 - protein, 17 aa, Artificial Sequence
  Description of Artificial Sequence: Synthetic peptide
  Seed: RMCSLMQGSTLPRRSGA
RMYSLLQGSTCPRRSGA

SEQ ID NO: 130345 - protein, 17 aa, Artificial Sequence
  Description of Artificial Sequence: Synthetic peptide
  Seed: RMCSLMQGSTLPRRSGA
RMYSLLQGSTFPRRSGA

SEQ ID NO: 130346 - protein, 17 aa, Artificial Sequence
  Description of Artificial Sequence: Synthetic peptide
  Seed: RMCSLMQGSTLPRRSGA
RMYSLLQGSTGPRRSGA

SEQ ID NO: 130347 - protein, 17 aa, Artificial Sequence
  Description of Artificial Sequence: Synthetic peptide
  Seed: RMCSLMQGSTLPRRSGA
RMYSLLQGSTIPRRSGA

SEQ ID NO: 130348 - protein, 17 aa, Artificial Sequence
  Description of Artificial Sequence: Synthetic peptide
  Seed: RMCSLMQGSTLPRRSGA
RMYSLLQGSTLPRRSGA

SEQ ID NO: 130349 - protein, 17 aa, Artificial Sequence
  Description of Artificial Sequence: Synthetic peptide
  Seed: RMCSLMQGSTLPRRSGA
RMYSLLQGSTMPRRSGA

SEQ ID NO: 130350 - protein, 17 aa, Artificial Sequence
  Description of Artificial Sequence: Synthetic peptide
  Seed: RMCSLMQGSTLPRRSGA
RMYSLLQGSTSPRRSGA

SEQ ID NO: 130351 - protein, 17 aa, Artificial Sequence
  Description of Artificial Sequence: Synthetic peptide
  Seed: RMCSLMQGSTLPRRSGA
RMYSLLQGSTTPRRSGA

SEQ ID NO: 130352 - protein, 17 aa, Artificial Sequence
  Description of Artificial Sequence: Synthetic peptide
  Seed: RMCSLMQGSTLPRRSGA
RMYSLLQGSTVPRRSGA

SEQ ID NO: 130353 - protein, 17 aa, Artificial Sequence
  Description of Artificial Sequence: Synthetic peptide
  Seed: RMCSLMQGSTLPRRSGA
RMYSLLQISTAPRRSGA

SEQ ID NO: 130354 - protein, 17 aa, Artificial Sequence
  Description of Artificial Sequence: Synthetic peptide
  Seed: RMCSLMQGSTLPRRSGA
RMYSLLQISTIPRRSGA

SEQ ID NO: 130355 - protein, 17 aa, Artificial Sequence
  Description of Artificial Sequence: Synthetic peptide
  Seed: RMCSLMQGSTLPRRSGA
RMYSLLQISTLPRRSGA

SEQ ID NO: 130356 - protein, 17 aa, Artificial Sequence
  Description of Artificial Sequence: Synthetic peptide
  Seed: RMCSLMQGSTLPRRSGA
RMYSLLQISTVPRRSGA

SEQ ID NO: 130357 - protein, 17 aa, Artificial Sequence
  Description of Artificial Sequence: Synthetic peptide
  Seed: RMCSLMQGSTLPRRSGA
RMYSLLQNSTAPRRSGA

SEQ ID NO: 130358 - protein, 17 aa, Artificial Sequence
  Description of Artificial Sequence: Synthetic peptide
  Seed: RMCSLMQGSTLPRRSGA
RMYSLLQNSTIPRRSGA

SEQ ID NO: 130359 - protein, 17 aa, Artificial Sequence
  Description of Artificial Sequence: Synthetic peptide
  Seed: RMCSLMQGSTLPRRSGA
RMYSLLQNSTLPRRSGA

SEQ ID NO: 130360 - protein, 17 aa, Artificial Sequence
  Description of Artificial Sequence: Synthetic peptide
  Seed: RMCSLMQGSTLPRRSGA
RMYSLLQNSTMPRRSGA

SEQ ID NO: 130361 - protein, 17 aa, Artificial Sequence
  Description of Artificial Sequence: Synthetic peptide
  Seed: RMCSLMQGSTLPRRSGA
RMYSLLQNSTSPRRSGA

SEQ ID NO: 130362 - protein, 17 aa, Artificial Sequence
  Description of Artificial Sequence: Synthetic peptide
  Seed: RMCSLMQGSTLPRRSGA
RMYSLLQNSTTPRRSGA

SEQ ID NO: 130363 - protein, 17 aa, Artificial Sequence
  Description of Artificial Sequence: Synthetic peptide
  Seed: RMCSLMQGSTLPRRSGA
RMYSLLQNSTVPRRSGA

SEQ ID NO: 130364 - protein, 17 aa, Artificial Sequence
  Description of Artificial Sequence: Synthetic peptide
  Seed: RMCSLMQGSTLPRRSGA
RMYSLLQPSTAPRRSGA

SEQ ID NO: 130365 - protein, 17 aa, Artificial Sequence
  Description of Artificial Sequence: Synthetic peptide
  Seed: RMCSLMQGSTLPRRSGA
RMYSLLQPSTGPRRSGA

SEQ ID NO: 130366 - protein, 17 aa, Artificial Sequence
  Description of Artificial Sequence: Synthetic peptide
  Seed: RMCSLMQGSTLPRRSGA
RMYSLLQPSTIPRRSGA

SEQ ID NO: 130367 - protein, 17 aa, Artificial Sequence
  Description of Artificial Sequence: Synthetic peptide
  Seed: RMCSLMQGSTLPRRSGA
RMYSLLQPSTLPRRSGA

SEQ ID NO: 130368 - protein, 17 aa, Artificial Sequence
  Description of Artificial Sequence: Synthetic peptide
  Seed: RMCSLMQGSTLPRRSGA
RMYSLLQPSTMPRRSGA

SEQ ID NO: 130369 - protein, 17 aa, Artificial Sequence
  Description of Artificial Sequence: Synthetic peptide
  Seed: RMCSLMQGSTLPRRSGA
RMYSLLQPSTSPRRSGA

SEQ ID NO: 130370 - protein, 17 aa, Artificial Sequence
  Description of Artificial Sequence: Synthetic peptide
  Seed: RMCSLMQGSTLPRRSGA
RMYSLLQPSTTPRRSGA

SEQ ID NO: 130371 - protein, 17 aa, Artificial Sequence
  Description of Artificial Sequence: Synthetic peptide
  Seed: RMCSLMQGSTLPRRSGA
RMYSLLQPSTVPRRSGA

SEQ ID NO: 130372 - protein, 17 aa, Artificial Sequence
  Description of Artificial Sequence: Synthetic peptide
  Seed: RMCSLMQGSTLPRRSGA
RMYSLLQSSTAPRRSGA

SEQ ID NO: 130373 - protein, 17 aa, Artificial Sequence
  Description of Artificial Sequence: Synthetic peptide
  Seed: RMCSLMQGSTLPRRSGA
RMYSLLQSSTCPRRSGA

SEQ ID NO: 130374 - protein, 17 aa, Artificial Sequence
  Description of Artificial Sequence: Synthetic peptide
  Seed: RMCSLMQGSTLPRRSGA
RMYSLLQSSTGPRRSGA

SEQ ID NO: 130375 - protein, 17 aa, Artificial Sequence
  Description of Artificial Sequence: Synthetic peptide
  Seed: RMCSLMQGSTLPRRSGA
RMYSLLQSSTIPRRSGA

SEQ ID NO: 130376 - protein, 17 aa, Artificial Sequence
  Description of Artificial Sequence: Synthetic peptide
  Seed: RMCSLMQGSTLPRRSGA
RMYSLLQSSTLPRRSGA

SEQ ID NO: 130377 - protein, 17 aa, Artificial Sequence
  Description of Artificial Sequence: Synthetic peptide
  Seed: RMCSLMQGSTLPRRSGA
RMYSLLQSSTMPRRSGA

SEQ ID NO: 130378 - protein, 17 aa, Artificial Sequence
  Description of Artificial Sequence: Synthetic peptide
  Seed: RMCSLMQGSTLPRRSGA
RMYSLLQSSTSPRRSGA

SEQ ID NO: 130379 - protein, 17 aa, Artificial Sequence
  Description of Artificial Sequence: Synthetic peptide
  Seed: RMCSLMQGSTLPRRSGA
RMYSLLQSSTTPRRSGA

SEQ ID NO: 130380 - protein, 17 aa, Artificial Sequence
  Description of Artificial Sequence: Synthetic peptide
  Seed: RMCSLMQGSTLPRRSGA
RMYSLLQSSTVPRRSGA

SEQ ID NO: 130381 - protein, 17 aa, Artificial Sequence
  Description of Artificial Sequence: Synthetic peptide
  Seed: RMCSLMQGSTLPRRSGA
RMYSLLQTSTAPRRSGA

SEQ ID NO: 130382 - protein, 17 aa, Artificial Sequence
  Description of Artificial Sequence: Synthetic peptide
  Seed: RMCSLMQGSTLPRRSGA
RMYSLLQTSTIPRRSGA

SEQ ID NO: 130383 - protein, 17 aa, Artificial Sequence
  Description of Artificial Sequence: Synthetic peptide
  Seed: RMCSLMQGSTLPRRSGA
RMYSLLQTSTLPRRSGA

SEQ ID NO: 130384 - protein, 17 aa, Artificial Sequence
  Description of Artificial Sequence: Synthetic peptide
  Seed: RMCSLMQGSTLPRRSGA
RMYSLLQTSTMPRRSGA

SEQ ID NO: 130385 - protein, 17 aa, Artificial Sequence
  Description of Artificial Sequence: Synthetic peptide
  Seed: RMCSLMQGSTLPRRSGA
RMYSLLQTSTSPRRSGA

SEQ ID NO: 130386 - protein, 17 aa, Artificial Sequence
  Description of Artificial Sequence: Synthetic peptide
  Seed: RMCSLMQGSTLPRRSGA
RMYSLLQTSTTPRRSGA

SEQ ID NO: 130387 - protein, 17 aa, Artificial Sequence
  Description of Artificial Sequence: Synthetic peptide
  Seed: RMCSLMQGSTLPRRSGA
RMYSLLQTSTVPRRSGA

SEQ ID NO: 130388 - protein, 17 aa, Artificial Sequence
  Description of Artificial Sequence: Synthetic peptide
  Seed: RMCSLMQGSTLPRRSGA
RMYSLLQVSTAPRRSGA

SEQ ID NO: 130389 - protein, 17 aa, Artificial Sequence
  Description of Artificial Sequence: Synthetic peptide
  Seed: RMCSLMQGSTLPRRSGA
RMYSLLQVSTIPRRSGA

SEQ ID NO: 130390 - protein, 17 aa, Artificial Sequence
  Description of Artificial Sequence: Synthetic peptide
  Seed: RMCSLMQGSTLPRRSGA
RMYSLLQVSTLPRRSGA

SEQ ID NO: 130391 - protein, 17 aa, Artificial Sequence
  Description of Artificial Sequence: Synthetic peptide
  Seed: RMCSLMQGSTLPRRSGA
RMYSLLQVSTMPRRSGA

SEQ ID NO: 130392 - protein, 17 aa, Artificial Sequence
  Description of Artificial Sequence: Synthetic peptide
  Seed: RMCSLMQGSTLPRRSGA
RMYSLLQVSTSPRRSGA

SEQ ID NO: 130393 - protein, 17 aa, Artificial Sequence
  Description of Artificial Sequence: Synthetic peptide
  Seed: RMCSLMQGSTLPRRSGA
RMYSLLQVSTTPRRSGA

SEQ ID NO: 130394 - protein, 17 aa, Artificial Sequence
  Description of Artificial Sequence: Synthetic peptide
  Seed: RMCSLMQGSTLPRRSGA
RMYSLLQVSTVPRRSGA

SEQ ID NO: 130395 - protein, 17 aa, Artificial Sequence
  Description of Artificial Sequence: Synthetic peptide
  Seed: RMCSLMQGSTLPRRSGA
RMYSLMQASTAPRRSGA

SEQ ID NO: 130396 - protein, 17 aa, Artificial Sequence
  Description of Artificial Sequence: Synthetic peptide
  Seed: RMCSLMQGSTLPRRSGA
RMYSLMQASTCPRRSGA

SEQ ID NO: 130397 - protein, 17 aa, Artificial Sequence
  Description of Artificial Sequence: Synthetic peptide
  Seed: RMCSLMQGSTLPRRSGA
RMYSLMQASTFPRRSGA

SEQ ID NO: 130398 - protein, 17 aa, Artificial Sequence
  Description of Artificial Sequence: Synthetic peptide
  Seed: RMCSLMQGSTLPRRSGA
RMYSLMQASTGPRRSGA

SEQ ID NO: 130399 - protein, 17 aa, Artificial Sequence
  Description of Artificial Sequence: Synthetic peptide
  Seed: RMCSLMQGSTLPRRSGA
RMYSLMQASTIPRRSGA

SEQ ID NO: 130400 - protein, 17 aa, Artificial Sequence
  Description of Artificial Sequence: Synthetic peptide
  Seed: RMCSLMQGSTLPRRSGA
RMYSLMQASTLPRRSGA

SEQ ID NO: 130401 - protein, 17 aa, Artificial Sequence
  Description of Artificial Sequence: Synthetic peptide
  Seed: RMCSLMQGSTLPRRSGA
RMYSLMQASTMPRRSGA

SEQ ID NO: 130402 - protein, 17 aa, Artificial Sequence
  Description of Artificial Sequence: Synthetic peptide
  Seed: RMCSLMQGSTLPRRSGA
RMYSLMQASTNPRRSGA

SEQ ID NO: 130403 - protein, 17 aa, Artificial Sequence
  Description of Artificial Sequence: Synthetic peptide
  Seed: RMCSLMQGSTLPRRSGA
RMYSLMQASTSPRRSGA

SEQ ID NO: 130404 - protein, 17 aa, Artificial Sequence
  Description of Artificial Sequence: Synthetic peptide
  Seed: RMCSLMQGSTLPRRSGA
RMYSLMQASTTPRRSGA

SEQ ID NO: 130405 - protein, 17 aa, Artificial Sequence
  Description of Artificial Sequence: Synthetic peptide
  Seed: RMCSLMQGSTLPRRSGA
RMYSLMQASTVPRRSGA

SEQ ID NO: 130406 - protein, 17 aa, Artificial Sequence
  Description of Artificial Sequence: Synthetic peptide
  Seed: RMCSLMQGSTLPRRSGA
RMYSLMQGSTAPRRSGA

SEQ ID NO: 130407 - protein, 17 aa, Artificial Sequence
  Description of Artificial Sequence: Synthetic peptide
  Seed: RMCSLMQGSTLPRRSGA
RMYSLMQGSTCPRRSGA

SEQ ID NO: 130408 - protein, 17 aa, Artificial Sequence
  Description of Artificial Sequence: Synthetic peptide
  Seed: RMCSLMQGSTLPRRSGA
RMYSLMQGSTFPRRSGA

SEQ ID NO: 130409 - protein, 17 aa, Artificial Sequence
  Description of Artificial Sequence: Synthetic peptide
  Seed: RMCSLMQGSTLPRRSGA
RMYSLMQGSTGPRRSGA

SEQ ID NO: 130410 - protein, 17 aa, Artificial Sequence
  Description of Artificial Sequence: Synthetic peptide
  Seed: RMCSLMQGSTLPRRSGA
RMYSLMQGSTIPRRSGA

SEQ ID NO: 130411 - protein, 17 aa, Artificial Sequence
  Description of Artificial Sequence: Synthetic peptide
  Seed: RMCSLMQGSTLPRRSGA
RMYSLMQGSTLPRRSGA

SEQ ID NO: 130412 - protein, 17 aa, Artificial Sequence
  Description of Artificial Sequence: Synthetic peptide
  Seed: RMCSLMQGSTLPRRSGA
RMYSLMQGSTMPRRSGA

SEQ ID NO: 130413 - protein, 17 aa, Artificial Sequence
  Description of Artificial Sequence: Synthetic peptide
  Seed: RMCSLMQGSTLPRRSGA
RMYSLMQGSTSPRRSGA

SEQ ID NO: 130414 - protein, 17 aa, Artificial Sequence
  Description of Artificial Sequence: Synthetic peptide
  Seed: RMCSLMQGSTLPRRSGA
RMYSLMQGSTTPRRSGA

SEQ ID NO: 130415 - protein, 17 aa, Artificial Sequence
  Description of Artificial Sequence: Synthetic peptide
  Seed: RMCSLMQGSTLPRRSGA
RMYSLMQGSTVPRRSGA

SEQ ID NO: 130416 - protein, 17 aa, Artificial Sequence
  Description of Artificial Sequence: Synthetic peptide
  Seed: RMCSLMQGSTLPRRSGA
RMYSLMQISTAPRRSGA

SEQ ID NO: 130417 - protein, 17 aa, Artificial Sequence
  Description of Artificial Sequence: Synthetic peptide
  Seed: RMCSLMQGSTLPRRSGA
RMYSLMQISTIPRRSGA

SEQ ID NO: 130418 - protein, 17 aa, Artificial Sequence
  Description of Artificial Sequence: Synthetic peptide
  Seed: RMCSLMQGSTLPRRSGA
RMYSLMQISTLPRRSGA

SEQ ID NO: 130419 - protein, 17 aa, Artificial Sequence
  Description of Artificial Sequence: Synthetic peptide
  Seed: RMCSLMQGSTLPRRSGA
RMYSLMQISTVPRRSGA

SEQ ID NO: 130420 - protein, 17 aa, Artificial Sequence
  Description of Artificial Sequence: Synthetic peptide
  Seed: RMCSLMQGSTLPRRSGA
RMYSLMQNSTAPRRSGA

SEQ ID NO: 130421 - protein, 17 aa, Artificial Sequence
  Description of Artificial Sequence: Synthetic peptide
  Seed: RMCSLMQGSTLPRRSGA
RMYSLMQNSTIPRRSGA

SEQ ID NO: 130422 - protein, 17 aa, Artificial Sequence
  Description of Artificial Sequence: Synthetic peptide
  Seed: RMCSLMQGSTLPRRSGA
RMYSLMQNSTLPRRSGA

SEQ ID NO: 130423 - protein, 17 aa, Artificial Sequence
  Description of Artificial Sequence: Synthetic peptide
  Seed: RMCSLMQGSTLPRRSGA
RMYSLMQNSTMPRRSGA

SEQ ID NO: 130424 - protein, 17 aa, Artificial Sequence
  Description of Artificial Sequence: Synthetic peptide
  Seed: RMCSLMQGSTLPRRSGA
RMYSLMQNSTSPRRSGA

SEQ ID NO: 130425 - protein, 17 aa, Artificial Sequence
  Description of Artificial Sequence: Synthetic peptide
  Seed: RMCSLMQGSTLPRRSGA
RMYSLMQNSTTPRRSGA

SEQ ID NO: 130426 - protein, 17 aa, Artificial Sequence
  Description of Artificial Sequence: Synthetic peptide
  Seed: RMCSLMQGSTLPRRSGA
RMYSLMQNSTVPRRSGA

SEQ ID NO: 130427 - protein, 17 aa, Artificial Sequence
  Description of Artificial Sequence: Synthetic peptide
  Seed: RMCSLMQGSTLPRRSGA
RMYSLMQPSTAPRRSGA

SEQ ID NO: 130428 - protein, 17 aa, Artificial Sequence
  Description of Artificial Sequence: Synthetic peptide
  Seed: RMCSLMQGSTLPRRSGA
RMYSLMQPSTIPRRSGA

SEQ ID NO: 130429 - protein, 17 aa, Artificial Sequence
  Description of Artificial Sequence: Synthetic peptide
  Seed: RMCSLMQGSTLPRRSGA
RMYSLMQPSTLPRRSGA

SEQ ID NO: 130430 - protein, 17 aa, Artificial Sequence
  Description of Artificial Sequence: Synthetic peptide
  Seed: RMCSLMQGSTLPRRSGA
RMYSLMQPSTMPRRSGA

SEQ ID NO: 130431 - protein, 17 aa, Artificial Sequence
  Description of Artificial Sequence: Synthetic peptide
  Seed: RMCSLMQGSTLPRRSGA
RMYSLMQPSTSPRRSGA

SEQ ID NO: 130432 - protein, 17 aa, Artificial Sequence
  Description of Artificial Sequence: Synthetic peptide
  Seed: RMCSLMQGSTLPRRSGA
RMYSLMQPSTTPRRSGA

SEQ ID NO: 130433 - protein, 17 aa, Artificial Sequence
  Description of Artificial Sequence: Synthetic peptide
  Seed: RMCSLMQGSTLPRRSGA
RMYSLMQPSTVPRRSGA

SEQ ID NO: 130434 - protein, 17 aa, Artificial Sequence
  Description of Artificial Sequence: Synthetic peptide
  Seed: RMCSLMQGSTLPRRSGA
RMYSLMQSSTAPRRSGA

SEQ ID NO: 130435 - protein, 17 aa, Artificial Sequence
  Description of Artificial Sequence: Synthetic peptide
  Seed: RMCSLMQGSTLPRRSGA
RMYSLMQSSTCPRRSGA

SEQ ID NO: 130436 - protein, 17 aa, Artificial Sequence
  Description of Artificial Sequence: Synthetic peptide
  Seed: RMCSLMQGSTLPRRSGA
RMYSLMQSSTGPRRSGA

SEQ ID NO: 130437 - protein, 17 aa, Artificial Sequence
  Description of Artificial Sequence: Synthetic peptide
  Seed: RMCSLMQGSTLPRRSGA
RMYSLMQSSTIPRRSGA

SEQ ID NO: 130438 - protein, 17 aa, Artificial Sequence
  Description of Artificial Sequence: Synthetic peptide
  Seed: RMCSLMQGSTLPRRSGA
RMYSLMQSSTLPRRSGA

SEQ ID NO: 130439 - protein, 17 aa, Artificial Sequence
  Description of Artificial Sequence: Synthetic peptide
  Seed: RMCSLMQGSTLPRRSGA
RMYSLMQSSTMPRRSGA

SEQ ID NO: 130440 - protein, 17 aa, Artificial Sequence
  Description of Artificial Sequence: Synthetic peptide
  Seed: RMCSLMQGSTLPRRSGA
RMYSLMQSSTSPRRSGA

SEQ ID NO: 130441 - protein, 17 aa, Artificial Sequence
  Description of Artificial Sequence: Synthetic peptide
  Seed: RMCSLMQGSTLPRRSGA
RMYSLMQSSTTPRRSGA

SEQ ID NO: 130442 - protein, 17 aa, Artificial Sequence
  Description of Artificial Sequence: Synthetic peptide
  Seed: RMCSLMQGSTLPRRSGA
RMYSLMQSSTVPRRSGA

SEQ ID NO: 130443 - protein, 17 aa, Artificial Sequence
  Description of Artificial Sequence: Synthetic peptide
  Seed: RMCSLMQGSTLPRRSGA
RMYSLMQTSTAPRRSGA

SEQ ID NO: 130444 - protein, 17 aa, Artificial Sequence
  Description of Artificial Sequence: Synthetic peptide
  Seed: RMCSLMQGSTLPRRSGA
RMYSLMQTSTIPRRSGA

SEQ ID NO: 130445 - protein, 17 aa, Artificial Sequence
  Description of Artificial Sequence: Synthetic peptide
  Seed: RMCSLMQGSTLPRRSGA
RMYSLMQTSTLPRRSGA

SEQ ID NO: 130446 - protein, 17 aa, Artificial Sequence
  Description of Artificial Sequence: Synthetic peptide
  Seed: RMCSLMQGSTLPRRSGA
RMYSLMQTSTMPRRSGA

SEQ ID NO: 130447 - protein, 17 aa, Artificial Sequence
  Description of Artificial Sequence: Synthetic peptide
  Seed: RMCSLMQGSTLPRRSGA
RMYSLMQTSTSPRRSGA

SEQ ID NO: 130448 - protein, 17 aa, Artificial Sequence
  Description of Artificial Sequence: Synthetic peptide
  Seed: RMCSLMQGSTLPRRSGA
RMYSLMQTSTTPRRSGA

SEQ ID NO: 130449 - protein, 17 aa, Artificial Sequence
  Description of Artificial Sequence: Synthetic peptide
  Seed: RMCSLMQGSTLPRRSGA
RMYSLMQTSTVPRRSGA

SEQ ID NO: 130450 - protein, 17 aa, Artificial Sequence
  Description of Artificial Sequence: Synthetic peptide
  Seed: RMCSLMQGSTLPRRSGA
RMYSLMQVSTAPRRSGA

SEQ ID NO: 130451 - protein, 17 aa, Artificial Sequence
  Description of Artificial Sequence: Synthetic peptide
  Seed: RMCSLMQGSTLPRRSGA
RMYSLMQVSTIPRRSGA

SEQ ID NO: 130452 - protein, 17 aa, Artificial Sequence
  Description of Artificial Sequence: Synthetic peptide
  Seed: RMCSLMQGSTLPRRSGA
RMYSLMQVSTLPRRSGA

SEQ ID NO: 130453 - protein, 17 aa, Artificial Sequence
  Description of Artificial Sequence: Synthetic peptide
  Seed: RMCSLMQGSTLPRRSGA
RMYSLMQVSTMPRRSGA

SEQ ID NO: 130454 - protein, 17 aa, Artificial Sequence
  Description of Artificial Sequence: Synthetic peptide
  Seed: RMCSLMQGSTLPRRSGA
RMYSLMQVSTSPRRSGA

SEQ ID NO: 130455 - protein, 17 aa, Artificial Sequence
  Description of Artificial Sequence: Synthetic peptide
  Seed: RMCSLMQGSTLPRRSGA
RMYSLMQVSTTPRRSGA

SEQ ID NO: 130456 - protein, 17 aa, Artificial Sequence
  Description of Artificial Sequence: Synthetic peptide
  Seed: RMCSLMQGSTLPRRSGA
RMYSLMQVSTVPRRSGA

SEQ ID NO: 130457 - protein, 17 aa, Artificial Sequence
  Description of Artificial Sequence: Synthetic peptide
  Seed: RMCSLMQGSTLPRRSGA
RMYSLNQASTLPRRSGA

SEQ ID NO: 130458 - protein, 17 aa, Artificial Sequence
  Description of Artificial Sequence: Synthetic peptide
  Seed: RMCSLMQGSTLPRRSGA
RMYSLQQASTAPRRSGA

SEQ ID NO: 130459 - protein, 17 aa, Artificial Sequence
  Description of Artificial Sequence: Synthetic peptide
  Seed: RMCSLMQGSTLPRRSGA
RMYSLQQASTIPRRSGA

SEQ ID NO: 130460 - protein, 17 aa, Artificial Sequence
  Description of Artificial Sequence: Synthetic peptide
  Seed: RMCSLMQGSTLPRRSGA
RMYSLQQASTLPRRSGA

SEQ ID NO: 130461 - protein, 17 aa, Artificial Sequence
  Description of Artificial Sequence: Synthetic peptide
  Seed: RMCSLMQGSTLPRRSGA
RMYSLQQASTMPRRSGA

SEQ ID NO: 130462 - protein, 17 aa, Artificial Sequence
  Description of Artificial Sequence: Synthetic peptide
  Seed: RMCSLMQGSTLPRRSGA
RMYSLQQASTTPRRSGA

SEQ ID NO: 130463 - protein, 17 aa, Artificial Sequence
  Description of Artificial Sequence: Synthetic peptide
  Seed: RMCSLMQGSTLPRRSGA
RMYSLQQASTVPRRSGA

SEQ ID NO: 130464 - protein, 17 aa, Artificial Sequence
  Description of Artificial Sequence: Synthetic peptide
  Seed: RMCSLMQGSTLPRRSGA
RMYSLQQGSTAPRRSGA

SEQ ID NO: 130465 - protein, 17 aa, Artificial Sequence
  Description of Artificial Sequence: Synthetic peptide
  Seed: RMCSLMQGSTLPRRSGA
RMYSLQQGSTIPRRSGA

SEQ ID NO: 130466 - protein, 17 aa, Artificial Sequence
  Description of Artificial Sequence: Synthetic peptide
  Seed: RMCSLMQGSTLPRRSGA
RMYSLQQGSTLPRRSGA

SEQ ID NO: 130467 - protein, 17 aa, Artificial Sequence
  Description of Artificial Sequence: Synthetic peptide
  Seed: RMCSLMQGSTLPRRSGA
RMYSLQQGSTMPRRSGA

SEQ ID NO: 130468 - protein, 17 aa, Artificial Sequence
  Description of Artificial Sequence: Synthetic peptide
  Seed: RMCSLMQGSTLPRRSGA
RMYSLQQGSTVPRRSGA

SEQ ID NO: 130469 - protein, 17 aa, Artificial Sequence
  Description of Artificial Sequence: Synthetic peptide
  Seed: RMCSLMQGSTLPRRSGA
RMYSLQQPSTIPRRSGA

SEQ ID NO: 130470 - protein, 17 aa, Artificial Sequence
  Description of Artificial Sequence: Synthetic peptide
  Seed: RMCSLMQGSTLPRRSGA
RMYSLQQPSTLPRRSGA

SEQ ID NO: 130471 - protein, 17 aa, Artificial Sequence
  Description of Artificial Sequence: Synthetic peptide
  Seed: RMCSLMQGSTLPRRSGA
RMYSLQQPSTVPRRSGA

SEQ ID NO: 130472 - protein, 17 aa, Artificial Sequence
  Description of Artificial Sequence: Synthetic peptide
  Seed: RMCSLMQGSTLPRRSGA
RMYSLQQSSTAPRRSGA

SEQ ID NO: 130473 - protein, 17 aa, Artificial Sequence
  Description of Artificial Sequence: Synthetic peptide
  Seed: RMCSLMQGSTLPRRSGA
RMYSLQQSSTIPRRSGA

SEQ ID NO: 130474 - protein, 17 aa, Artificial Sequence
  Description of Artificial Sequence: Synthetic peptide
  Seed: RMCSLMQGSTLPRRSGA
RMYSLQQSSTLPRRSGA

SEQ ID NO: 130475 - protein, 17 aa, Artificial Sequence
  Description of Artificial Sequence: Synthetic peptide
  Seed: RMCSLMQGSTLPRRSGA
RMYSLQQSSTVPRRSGA

SEQ ID NO: 130476 - protein, 17 aa, Artificial Sequence
  Description of Artificial Sequence: Synthetic peptide
  Seed: RMCSLMQGSTLPRRSGA
RMYSLSQASTAPRRSGA

SEQ ID NO: 130477 - protein, 17 aa, Artificial Sequence
  Description of Artificial Sequence: Synthetic peptide
  Seed: RMCSLMQGSTLPRRSGA
RMYSLSQASTIPRRSGA

SEQ ID NO: 130478 - protein, 17 aa, Artificial Sequence
  Description of Artificial Sequence: Synthetic peptide
  Seed: RMCSLMQGSTLPRRSGA
RMYSLSQASTLPRRSGA

SEQ ID NO: 130479 - protein, 17 aa, Artificial Sequence
  Description of Artificial Sequence: Synthetic peptide
  Seed: RMCSLMQGSTLPRRSGA
RMYSLSQASTVPRRSGA

SEQ ID NO: 130480 - protein, 17 aa, Artificial Sequence
  Description of Artificial Sequence: Synthetic peptide
  Seed: RMCSLMQGSTLPRRSGA
RMYSLSQGSTIPRRSGA

SEQ ID NO: 130481 - protein, 17 aa, Artificial Sequence
  Description of Artificial Sequence: Synthetic peptide
  Seed: RMCSLMQGSTLPRRSGA
RMYSLSQGSTLPRRSGA

SEQ ID NO: 130482 - protein, 17 aa, Artificial Sequence
  Description of Artificial Sequence: Synthetic peptide
  Seed: RMCSLMQGSTLPRRSGA
RMYSLSQGSTVPRRSGA

SEQ ID NO: 130483 - protein, 17 aa, Artificial Sequence
  Description of Artificial Sequence: Synthetic peptide
  Seed: RMCSLMQGSTLPRRSGA
RMYSLSQSSTIPRRSGA

SEQ ID NO: 130484 - protein, 17 aa, Artificial Sequence
  Description of Artificial Sequence: Synthetic peptide
  Seed: RMCSLMQGSTLPRRSGA
RMYSLSQSSTLPRRSGA

SEQ ID NO: 130485 - protein, 17 aa, Artificial Sequence
  Description of Artificial Sequence: Synthetic peptide
  Seed: RMCSLMQGSTLPRRSGA
RMYSLSQSSTVPRRSGA

SEQ ID NO: 130486 - protein, 17 aa, Artificial Sequence
  Description of Artificial Sequence: Synthetic peptide
  Seed: RMCSLMQGSTLPRRSGA
RMYSLTQASTIPRRSGA

SEQ ID NO: 130487 - protein, 17 aa, Artificial Sequence
  Description of Artificial Sequence: Synthetic peptide
  Seed: RMCSLMQGSTLPRRSGA
RMYSLTQASTLPRRSGA

SEQ ID NO: 130488 - protein, 17 aa, Artificial Sequence
  Description of Artificial Sequence: Synthetic peptide
  Seed: RMCSLMQGSTLPRRSGA
RMYSLTQASTVPRRSGA

SEQ ID NO: 130489 - protein, 17 aa, Artificial Sequence
  Description of Artificial Sequence: Synthetic peptide
  Seed: RMCSLMQGSTLPRRSGA
RMYSLVQASTAPRRSGA

SEQ ID NO: 130490 - protein, 17 aa, Artificial Sequence
  Description of Artificial Sequence: Synthetic peptide
  Seed: RMCSLMQGSTLPRRSGA
RMYSLVQASTIPRRSGA

SEQ ID NO: 130491 - protein, 17 aa, Artificial Sequence
  Description of Artificial Sequence: Synthetic peptide
  Seed: RMCSLMQGSTLPRRSGA
RMYSLVQASTLPRRSGA

SEQ ID NO: 130492 - protein, 17 aa, Artificial Sequence
  Description of Artificial Sequence: Synthetic peptide
  Seed: RMCSLMQGSTLPRRSGA
RMYSLVQASTMPRRSGA

SEQ ID NO: 130493 - protein, 17 aa, Artificial Sequence
  Description of Artificial Sequence: Synthetic peptide
  Seed: RMCSLMQGSTLPRRSGA
RMYSLVQASTSPRRSGA

SEQ ID NO: 130494 - protein, 17 aa, Artificial Sequence
  Description of Artificial Sequence: Synthetic peptide
  Seed: RMCSLMQGSTLPRRSGA
RMYSLVQASTTPRRSGA

SEQ ID NO: 130495 - protein, 17 aa, Artificial Sequence
  Description of Artificial Sequence: Synthetic peptide
  Seed: RMCSLMQGSTLPRRSGA
RMYSLVQASTVPRRSGA

SEQ ID NO: 130496 - protein, 17 aa, Artificial Sequence
  Description of Artificial Sequence: Synthetic peptide
  Seed: RMCSLMQGSTLPRRSGA
RMYSLVQGSTAPRRSGA

SEQ ID NO: 130497 - protein, 17 aa, Artificial Sequence
  Description of Artificial Sequence: Synthetic peptide
  Seed: RMCSLMQGSTLPRRSGA
RMYSLVQGSTIPRRSGA

SEQ ID NO: 130498 - protein, 17 aa, Artificial Sequence
  Description of Artificial Sequence: Synthetic peptide
  Seed: RMCSLMQGSTLPRRSGA
RMYSLVQGSTLPRRSGA

SEQ ID NO: 130499 - protein, 17 aa, Artificial Sequence
  Description of Artificial Sequence: Synthetic peptide
  Seed: RMCSLMQGSTLPRRSGA
RMYSLVQGSTMPRRSGA

SEQ ID NO: 130500 - protein, 17 aa, Artificial Sequence
  Description of Artificial Sequence: Synthetic peptide
  Seed: RMCSLMQGSTLPRRSGA
RMYSLVQGSTTPRRSGA

SEQ ID NO: 130501 - protein, 17 aa, Artificial Sequence
  Description of Artificial Sequence: Synthetic peptide
  Seed: RMCSLMQGSTLPRRSGA
RMYSLVQGSTVPRRSGA

SEQ ID NO: 130502 - protein, 17 aa, Artificial Sequence
  Description of Artificial Sequence: Synthetic peptide
  Seed: RMCSLMQGSTLPRRSGA
RMYSLVQPSTAPRRSGA

SEQ ID NO: 130503 - protein, 17 aa, Artificial Sequence
  Description of Artificial Sequence: Synthetic peptide
  Seed: RMCSLMQGSTLPRRSGA
RMYSLVQPSTIPRRSGA

SEQ ID NO: 130504 - protein, 17 aa, Artificial Sequence
  Description of Artificial Sequence: Synthetic peptide
  Seed: RMCSLMQGSTLPRRSGA
RMYSLVQPSTLPRRSGA

SEQ ID NO: 130505 - protein, 17 aa, Artificial Sequence
  Description of Artificial Sequence: Synthetic peptide
  Seed: RMCSLMQGSTLPRRSGA
RMYSLVQPSTVPRRSGA

SEQ ID NO: 130506 - protein, 17 aa, Artificial Sequence
  Description of Artificial Sequence: Synthetic peptide
  Seed: RMCSLMQGSTLPRRSGA
RMYSLVQSSTAPRRSGA

SEQ ID NO: 130507 - protein, 17 aa, Artificial Sequence
  Description of Artificial Sequence: Synthetic peptide
  Seed: RMCSLMQGSTLPRRSGA
RMYSLVQSSTIPRRSGA

SEQ ID NO: 130508 - protein, 17 aa, Artificial Sequence
  Description of Artificial Sequence: Synthetic peptide
  Seed: RMCSLMQGSTLPRRSGA
RMYSLVQSSTLPRRSGA

SEQ ID NO: 130509 - protein, 17 aa, Artificial Sequence
  Description of Artificial Sequence: Synthetic peptide
  Seed: RMCSLMQGSTLPRRSGA
RMYSLVQSSTVPRRSGA

SEQ ID NO: 130510 - protein, 17 aa, Artificial Sequence
  Description of Artificial Sequence: Synthetic peptide
  Seed: RMCSLMQGSTLPRRSGA
RMYSLVQTSTVPRRSGA

SEQ ID NO: 130511 - protein, 17 aa, Artificial Sequence
  Description of Artificial Sequence: Synthetic peptide
  Seed: RMCSLMQGSTLPRRSGA
RMCSFMQISRLPARSGA

SEQ ID NO: 130512 - protein, 17 aa, Artificial Sequence
  Description of Artificial Sequence: Synthetic peptide
  Seed: RMCSLMQGSTLPRRSGA
RMCSFMQISRLPHRSGA

SEQ ID NO: 130513 - protein, 17 aa, Artificial Sequence
  Description of Artificial Sequence: Synthetic peptide
  Seed: RMCSLMQGSTLPRRSGA
RMCSFMQISRLPSRSGA

SEQ ID NO: 130514 - protein, 17 aa, Artificial Sequence
  Description of Artificial Sequence: Synthetic peptide
  Seed: RMCSLMQGSTLPRRSGA
RMCSFMQLSRLPARSGA

SEQ ID NO: 130515 - protein, 17 aa, Artificial Sequence
  Description of Artificial Sequence: Synthetic peptide
  Seed: RMCSLMQGSTLPRRSGA
RMCSFMQLSRLPSRSGA

SEQ ID NO: 130516 - protein, 17 aa, Artificial Sequence
  Description of Artificial Sequence: Synthetic peptide
  Seed: RMCSLMQGSTLPRRSGA
RMCSFMQMSKLPRRSGA

SEQ ID NO: 130517 - protein, 17 aa, Artificial Sequence
  Description of Artificial Sequence: Synthetic peptide
  Seed: RMCSLMQGSTLPRRSGA
RMCSFMQMSRLPARSGA

SEQ ID NO: 130518 - protein, 17 aa, Artificial Sequence
  Description of Artificial Sequence: Synthetic peptide
  Seed: RMCSLMQGSTLPRRSGA
RMCSFMQMSRLPRRSGA

SEQ ID NO: 130519 - protein, 17 aa, Artificial Sequence
  Description of Artificial Sequence: Synthetic peptide
  Seed: RMCSLMQGSTLPRRSGA
RMCSFMQMSRLPSRSGA

SEQ ID NO: 130520 - protein, 17 aa, Artificial Sequence
  Description of Artificial Sequence: Synthetic peptide
  Seed: RMCSLMQGSTLPRRSGA
RMCSIMQFSRLPRRSGA

SEQ ID NO: 130521 - protein, 17 aa, Artificial Sequence
  Description of Artificial Sequence: Synthetic peptide
  Seed: RMCSLMQGSTLPRRSGA
RMCSIMQISKLPARSGA

SEQ ID NO: 130522 - protein, 17 aa, Artificial Sequence
  Description of Artificial Sequence: Synthetic peptide
  Seed: RMCSLMQGSTLPRRSGA
RMCSIMQISKLPHRSGA

SEQ ID NO: 130523 - protein, 17 aa, Artificial Sequence
  Description of Artificial Sequence: Synthetic peptide
  Seed: RMCSLMQGSTLPRRSGA
RMCSIMQISKLPSRSGA

SEQ ID NO: 130524 - protein, 17 aa, Artificial Sequence
  Description of Artificial Sequence: Synthetic peptide
  Seed: RMCSLMQGSTLPRRSGA
RMCSIMQISRLPARSGA

SEQ ID NO: 130525 - protein, 17 aa, Artificial Sequence
  Description of Artificial Sequence: Synthetic peptide
  Seed: RMCSLMQGSTLPRRSGA
RMCSIMQISRLPGRSGA

SEQ ID NO: 130526 - protein, 17 aa, Artificial Sequence
  Description of Artificial Sequence: Synthetic peptide
  Seed: RMCSLMQGSTLPRRSGA
RMCSIMQISRLPHRSGA

SEQ ID NO: 130527 - protein, 17 aa, Artificial Sequence
  Description of Artificial Sequence: Synthetic peptide
  Seed: RMCSLMQGSTLPRRSGA
RMCSIMQISRLPQRSGA

SEQ ID NO: 130528 - protein, 17 aa, Artificial Sequence
  Description of Artificial Sequence: Synthetic peptide
  Seed: RMCSLMQGSTLPRRSGA
RMCSIMQISRLPSRSGA

SEQ ID NO: 130529 - protein, 17 aa, Artificial Sequence
  Description of Artificial Sequence: Synthetic peptide
  Seed: RMCSLMQGSTLPRRSGA
RMCSIMQISRLPTRSGA

SEQ ID NO: 130530 - protein, 17 aa, Artificial Sequence
  Description of Artificial Sequence: Synthetic peptide
  Seed: RMCSLMQGSTLPRRSGA
RMCSIMQLSKLPARSGA

SEQ ID NO: 130531 - protein, 17 aa, Artificial Sequence
  Description of Artificial Sequence: Synthetic peptide
  Seed: RMCSLMQGSTLPRRSGA
RMCSIMQLSKLPHRSGA

SEQ ID NO: 130532 - protein, 17 aa, Artificial Sequence
  Description of Artificial Sequence: Synthetic peptide
  Seed: RMCSLMQGSTLPRRSGA
RMCSIMQLSKLPSRSGA

SEQ ID NO: 130533 - protein, 17 aa, Artificial Sequence
  Description of Artificial Sequence: Synthetic peptide
  Seed: RMCSLMQGSTLPRRSGA
RMCSIMQLSRLPARSGA

SEQ ID NO: 130534 - protein, 17 aa, Artificial Sequence
  Description of Artificial Sequence: Synthetic peptide
  Seed: RMCSLMQGSTLPRRSGA
RMCSIMQLSRLPGRSGA

SEQ ID NO: 130535 - protein, 17 aa, Artificial Sequence
  Description of Artificial Sequence: Synthetic peptide
  Seed: RMCSLMQGSTLPRRSGA
RMCSIMQLSRLPHRSGA

SEQ ID NO: 130536 - protein, 17 aa, Artificial Sequence
  Description of Artificial Sequence: Synthetic peptide
  Seed: RMCSLMQGSTLPRRSGA
RMCSIMQLSRLPQRSGA

SEQ ID NO: 130537 - protein, 17 aa, Artificial Sequence
  Description of Artificial Sequence: Synthetic peptide
  Seed: RMCSLMQGSTLPRRSGA
RMCSIMQLSRLPRRSGA

SEQ ID NO: 130538 - protein, 17 aa, Artificial Sequence
  Description of Artificial Sequence: Synthetic peptide
  Seed: RMCSLMQGSTLPRRSGA
RMCSIMQLSRLPSRSGA

SEQ ID NO: 130539 - protein, 17 aa, Artificial Sequence
  Description of Artificial Sequence: Synthetic peptide
  Seed: RMCSLMQGSTLPRRSGA
RMCSIMQLSRLPTRSGA

SEQ ID NO: 130540 - protein, 17 aa, Artificial Sequence
  Description of Artificial Sequence: Synthetic peptide
  Seed: RMCSLMQGSTLPRRSGA
RMCSIMQMSKLPARSGA

SEQ ID NO: 130541 - protein, 17 aa, Artificial Sequence
  Description of Artificial Sequence: Synthetic peptide
  Seed: RMCSLMQGSTLPRRSGA
RMCSIMQMSKLPHRSGA

SEQ ID NO: 130542 - protein, 17 aa, Artificial Sequence
  Description of Artificial Sequence: Synthetic peptide
  Seed: RMCSLMQGSTLPRRSGA
RMCSIMQMSKLPKRSGA

SEQ ID NO: 130543 - protein, 17 aa, Artificial Sequence
  Description of Artificial Sequence: Synthetic peptide
  Seed: RMCSLMQGSTLPRRSGA
RMCSIMQMSKLPRRSGA

SEQ ID NO: 130544 - protein, 17 aa, Artificial Sequence
  Description of Artificial Sequence: Synthetic peptide
  Seed: RMCSLMQGSTLPRRSGA
RMCSIMQMSKLPSRSGA

SEQ ID NO: 130545 - protein, 17 aa, Artificial Sequence
  Description of Artificial Sequence: Synthetic peptide
  Seed: RMCSLMQGSTLPRRSGA
RMCSIMQMSKLPTRSGA

SEQ ID NO: 130546 - protein, 17 aa, Artificial Sequence
  Description of Artificial Sequence: Synthetic peptide
  Seed: RMCSLMQGSTLPRRSGA
RMCSIMQMSRLPARSGA

SEQ ID NO: 130547 - protein, 17 aa, Artificial Sequence
  Description of Artificial Sequence: Synthetic peptide
  Seed: RMCSLMQGSTLPRRSGA
RMCSIMQMSRLPGRSGA

SEQ ID NO: 130548 - protein, 17 aa, Artificial Sequence
  Description of Artificial Sequence: Synthetic peptide
  Seed: RMCSLMQGSTLPRRSGA
RMCSIMQMSRLPHRSGA

SEQ ID NO: 130549 - protein, 17 aa, Artificial Sequence
  Description of Artificial Sequence: Synthetic peptide
  Seed: RMCSLMQGSTLPRRSGA
RMCSIMQMSRLPKRSGA

SEQ ID NO: 130550 - protein, 17 aa, Artificial Sequence
  Description of Artificial Sequence: Synthetic peptide
  Seed: RMCSLMQGSTLPRRSGA
RMCSIMQMSRLPLRSGA

SEQ ID NO: 130551 - protein, 17 aa, Artificial Sequence
  Description of Artificial Sequence: Synthetic peptide
  Seed: RMCSLMQGSTLPRRSGA
RMCSIMQMSRLPMRSGA

SEQ ID NO: 130552 - protein, 17 aa, Artificial Sequence
  Description of Artificial Sequence: Synthetic peptide
  Seed: RMCSLMQGSTLPRRSGA
RMCSIMQMSRLPQRSGA

SEQ ID NO: 130553 - protein, 17 aa, Artificial Sequence
  Description of Artificial Sequence: Synthetic peptide
  Seed: RMCSLMQGSTLPRRSGA
RMCSIMQMSRLPRRSGA

SEQ ID NO: 130554 - protein, 17 aa, Artificial Sequence
  Description of Artificial Sequence: Synthetic peptide
  Seed: RMCSLMQGSTLPRRSGA
RMCSIMQMSRLPSRSGA

SEQ ID NO: 130555 - protein, 17 aa, Artificial Sequence
  Description of Artificial Sequence: Synthetic peptide
  Seed: RMCSLMQGSTLPRRSGA
RMCSIMQMSRLPTRSGA

SEQ ID NO: 130556 - protein, 17 aa, Artificial Sequence
  Description of Artificial Sequence: Synthetic peptide
  Seed: RMCSLMQGSTLPRRSGA
RMCSIMQMSRLPVRSGA

SEQ ID NO: 130557 - protein, 17 aa, Artificial Sequence
  Description of Artificial Sequence: Synthetic peptide
  Seed: RMCSLMQGSTLPRRSGA
RMCSIMQVSKLPARSGA

SEQ ID NO: 130558 - protein, 17 aa, Artificial Sequence
  Description of Artificial Sequence: Synthetic peptide
  Seed: RMCSLMQGSTLPRRSGA
RMCSIMQVSKLPSRSGA

SEQ ID NO: 130559 - protein, 17 aa, Artificial Sequence
  Description of Artificial Sequence: Synthetic peptide
  Seed: RMCSLMQGSTLPRRSGA
RMCSIMQVSRLPARSGA

SEQ ID NO: 130560 - protein, 17 aa, Artificial Sequence
  Description of Artificial Sequence: Synthetic peptide
  Seed: RMCSLMQGSTLPRRSGA
RMCSIMQVSRLPRRSGA

SEQ ID NO: 130561 - protein, 17 aa, Artificial Sequence
  Description of Artificial Sequence: Synthetic peptide
  Seed: RMCSLMQGSTLPRRSGA
RMCSIMQVSRLPSRSGA

SEQ ID NO: 130562 - protein, 17 aa, Artificial Sequence
  Description of Artificial Sequence: Synthetic peptide
  Seed: RMCSLMQGSTLPRRSGA
RMCSLMQISKLPARSGA

SEQ ID NO: 130563 - protein, 17 aa, Artificial Sequence
  Description of Artificial Sequence: Synthetic peptide
  Seed: RMCSLMQGSTLPRRSGA
RMCSLMQISKLPSRSGA

SEQ ID NO: 130564 - protein, 17 aa, Artificial Sequence
  Description of Artificial Sequence: Synthetic peptide
  Seed: RMCSLMQGSTLPRRSGA
RMCSLMQISRLPARSGA

SEQ ID NO: 130565 - protein, 17 aa, Artificial Sequence
  Description of Artificial Sequence: Synthetic peptide
  Seed: RMCSLMQGSTLPRRSGA
RMCSLMQISRLPGRSGA

SEQ ID NO: 130566 - protein, 17 aa, Artificial Sequence
  Description of Artificial Sequence: Synthetic peptide
  Seed: RMCSLMQGSTLPRRSGA
RMCSLMQISRLPHRSGA

SEQ ID NO: 130567 - protein, 17 aa, Artificial Sequence
  Description of Artificial Sequence: Synthetic peptide
  Seed: RMCSLMQGSTLPRRSGA
RMCSLMQISRLPSRSGA

SEQ ID NO: 130568 - protein, 17 aa, Artificial Sequence
  Description of Artificial Sequence: Synthetic peptide
  Seed: RMCSLMQGSTLPRRSGA
RMCSLMQLSKLPARSGA

SEQ ID NO: 130569 - protein, 17 aa, Artificial Sequence
  Description of Artificial Sequence: Synthetic peptide
  Seed: RMCSLMQGSTLPRRSGA
RMCSLMQLSKLPSRSGA

SEQ ID NO: 130570 - protein, 17 aa, Artificial Sequence
  Description of Artificial Sequence: Synthetic peptide
  Seed: RMCSLMQGSTLPRRSGA
RMCSLMQLSRLPARSGA

SEQ ID NO: 130571 - protein, 17 aa, Artificial Sequence
  Description of Artificial Sequence: Synthetic peptide
  Seed: RMCSLMQGSTLPRRSGA
RMCSLMQLSRLPGRSGA

SEQ ID NO: 130572 - protein, 17 aa, Artificial Sequence
  Description of Artificial Sequence: Synthetic peptide
  Seed: RMCSLMQGSTLPRRSGA
RMCSLMQLSRLPHRSGA

SEQ ID NO: 130573 - protein, 17 aa, Artificial Sequence
  Description of Artificial Sequence: Synthetic peptide
  Seed: RMCSLMQGSTLPRRSGA
RMCSLMQLSRLPQRSGA

SEQ ID NO: 130574 - protein, 17 aa, Artificial Sequence
  Description of Artificial Sequence: Synthetic peptide
  Seed: RMCSLMQGSTLPRRSGA
RMCSLMQLSRLPSRSGA

SEQ ID NO: 130575 - protein, 17 aa, Artificial Sequence
  Description of Artificial Sequence: Synthetic peptide
  Seed: RMCSLMQGSTLPRRSGA
RMCSLMQMSKLPARSGA

SEQ ID NO: 130576 - protein, 17 aa, Artificial Sequence
  Description of Artificial Sequence: Synthetic peptide
  Seed: RMCSLMQGSTLPRRSGA
RMCSLMQMSKLPRRSGA

SEQ ID NO: 130577 - protein, 17 aa, Artificial Sequence
  Description of Artificial Sequence: Synthetic peptide
  Seed: RMCSLMQGSTLPRRSGA
RMCSLMQMSKLPSRSGA

SEQ ID NO: 130578 - protein, 17 aa, Artificial Sequence
  Description of Artificial Sequence: Synthetic peptide
  Seed: RMCSLMQGSTLPRRSGA
RMCSLMQMSRLPARSGA

SEQ ID NO: 130579 - protein, 17 aa, Artificial Sequence
  Description of Artificial Sequence: Synthetic peptide
  Seed: RMCSLMQGSTLPRRSGA
RMCSLMQMSRLPGRSGA

SEQ ID NO: 130580 - protein, 17 aa, Artificial Sequence
  Description of Artificial Sequence: Synthetic peptide
  Seed: RMCSLMQGSTLPRRSGA
RMCSLMQMSRLPHRSGA

SEQ ID NO: 130581 - protein, 17 aa, Artificial Sequence
  Description of Artificial Sequence: Synthetic peptide
  Seed: RMCSLMQGSTLPRRSGA
RMCSLMQMSRLPKRSGA

SEQ ID NO: 130582 - protein, 17 aa, Artificial Sequence
  Description of Artificial Sequence: Synthetic peptide
  Seed: RMCSLMQGSTLPRRSGA
RMCSLMQMSRLPQRSGA

SEQ ID NO: 130583 - protein, 17 aa, Artificial Sequence
  Description of Artificial Sequence: Synthetic peptide
  Seed: RMCSLMQGSTLPRRSGA
RMCSLMQMSRLPRRSGA

SEQ ID NO: 130584 - protein, 17 aa, Artificial Sequence
  Description of Artificial Sequence: Synthetic peptide
  Seed: RMCSLMQGSTLPRRSGA
RMCSLMQMSRLPSRSGA

SEQ ID NO: 130585 - protein, 17 aa, Artificial Sequence
  Description of Artificial Sequence: Synthetic peptide
  Seed: RMCSLMQGSTLPRRSGA
RMCSLMQMSRLPTRSGA

SEQ ID NO: 130586 - protein, 17 aa, Artificial Sequence
  Description of Artificial Sequence: Synthetic peptide
  Seed: RMCSLMQGSTLPRRSGA
RMCSLMQVSRLPSRSGA

SEQ ID NO: 130587 - protein, 17 aa, Artificial Sequence
  Description of Artificial Sequence: Synthetic peptide
  Seed: RMCSLMQGSTLPRRSGA
RMCSMMQISRLPARSGA

SEQ ID NO: 130588 - protein, 17 aa, Artificial Sequence
  Description of Artificial Sequence: Synthetic peptide
  Seed: RMCSLMQGSTLPRRSGA
RMCSMMQISRLPSRSGA

SEQ ID NO: 130589 - protein, 17 aa, Artificial Sequence
  Description of Artificial Sequence: Synthetic peptide
  Seed: RMCSLMQGSTLPRRSGA
RMCSMMQLSRLPARSGA

SEQ ID NO: 130590 - protein, 17 aa, Artificial Sequence
  Description of Artificial Sequence: Synthetic peptide
  Seed: RMCSLMQGSTLPRRSGA
RMCSMMQLSRLPSRSGA

SEQ ID NO: 130591 - protein, 17 aa, Artificial Sequence
  Description of Artificial Sequence: Synthetic peptide
  Seed: RMCSLMQGSTLPRRSGA
RMCSMMQMSRLPARSGA

SEQ ID NO: 130592 - protein, 17 aa, Artificial Sequence
  Description of Artificial Sequence: Synthetic peptide
  Seed: RMCSLMQGSTLPRRSGA
RMCSMMQMSRLPSRSGA

SEQ ID NO: 130593 - protein, 17 aa, Artificial Sequence
  Description of Artificial Sequence: Synthetic peptide
  Seed: RMCSLMQGSTLPRRSGA
RMCSVMQISRLPARSGA

SEQ ID NO: 130594 - protein, 17 aa, Artificial Sequence
  Description of Artificial Sequence: Synthetic peptide
  Seed: RMCSLMQGSTLPRRSGA
RMCSVMQISRLPSRSGA

SEQ ID NO: 130595 - protein, 17 aa, Artificial Sequence
  Description of Artificial Sequence: Synthetic peptide
  Seed: RMCSLMQGSTLPRRSGA
RMCSVMQLSRLPARSGA

SEQ ID NO: 130596 - protein, 17 aa, Artificial Sequence
  Description of Artificial Sequence: Synthetic peptide
  Seed: RMCSLMQGSTLPRRSGA
RMCSVMQLSRLPSRSGA

SEQ ID NO: 130597 - protein, 17 aa, Artificial Sequence
  Description of Artificial Sequence: Synthetic peptide
  Seed: RMCSLMQGSTLPRRSGA
RMCSVMQMSRLPARSGA

SEQ ID NO: 130598 - protein, 17 aa, Artificial Sequence
  Description of Artificial Sequence: Synthetic peptide
  Seed: RMCSLMQGSTLPRRSGA
RMCSVMQMSRLPSRSGA

SEQ ID NO: 130599 - protein, 17 aa, Artificial Sequence
  Description of Artificial Sequence: Synthetic peptide
  Seed: RMCSLMQGSTLPRRSGA
RMCSLMFGSALARRAGA

SEQ ID NO: 130600 - protein, 17 aa, Artificial Sequence
  Description of Artificial Sequence: Synthetic peptide
  Seed: RMCSLMQGSTLPRRSGA
RMCSLMFGSALARRIGA

SEQ ID NO: 130601 - protein, 17 aa, Artificial Sequence
  Description of Artificial Sequence: Synthetic peptide
  Seed: RMCSLMQGSTLPRRSGA
RMCSLMFGSALARRLGA

SEQ ID NO: 130602 - protein, 17 aa, Artificial Sequence
  Description of Artificial Sequence: Synthetic peptide
  Seed: RMCSLMQGSTLPRRSGA
RMCSLMFGSALARRMGA

SEQ ID NO: 130603 - protein, 17 aa, Artificial Sequence
  Description of Artificial Sequence: Synthetic peptide
  Seed: RMCSLMQGSTLPRRSGA
RMCSLMFGSALARRNGA

SEQ ID NO: 130604 - protein, 17 aa, Artificial Sequence
  Description of Artificial Sequence: Synthetic peptide
  Seed: RMCSLMQGSTLPRRSGA
RMCSLMFGSALARRSGA

SEQ ID NO: 130605 - protein, 17 aa, Artificial Sequence
  Description of Artificial Sequence: Synthetic peptide
  Seed: RMCSLMQGSTLPRRSGA
RMCSLMFGSALARRTGA

SEQ ID NO: 130606 - protein, 17 aa, Artificial Sequence
  Description of Artificial Sequence: Synthetic peptide
  Seed: RMCSLMQGSTLPRRSGA
RMCSLMFGSALARRVGA

SEQ ID NO: 130607 - protein, 17 aa, Artificial Sequence
  Description of Artificial Sequence: Synthetic peptide
  Seed: RMCSLMQGSTLPRRSGA
RMCSLMFGSALPRRAGA

SEQ ID NO: 130608 - protein, 17 aa, Artificial Sequence
  Description of Artificial Sequence: Synthetic peptide
  Seed: RMCSLMQGSTLPRRSGA
RMCSLMFGSALPRRVGA

SEQ ID NO: 130609 - protein, 17 aa, Artificial Sequence
  Description of Artificial Sequence: Synthetic peptide
  Seed: RMCSLMQGSTLPRRSGA
RMCSLMFGSALSRRAGA

SEQ ID NO: 130610 - protein, 17 aa, Artificial Sequence
  Description of Artificial Sequence: Synthetic peptide
  Seed: RMCSLMQGSTLPRRSGA
RMCSLMFGSALSRRIGA

SEQ ID NO: 130611 - protein, 17 aa, Artificial Sequence
  Description of Artificial Sequence: Synthetic peptide
  Seed: RMCSLMQGSTLPRRSGA
RMCSLMFGSALSRRLGA

SEQ ID NO: 130612 - protein, 17 aa, Artificial Sequence
  Description of Artificial Sequence: Synthetic peptide
  Seed: RMCSLMQGSTLPRRSGA
RMCSLMFGSALSRRMGA

SEQ ID NO: 130613 - protein, 17 aa, Artificial Sequence
  Description of Artificial Sequence: Synthetic peptide
  Seed: RMCSLMQGSTLPRRSGA
RMCSLMFGSALSRRNGA

SEQ ID NO: 130614 - protein, 17 aa, Artificial Sequence
  Description of Artificial Sequence: Synthetic peptide
  Seed: RMCSLMQGSTLPRRSGA
RMCSLMFGSALSRRSGA

SEQ ID NO: 130615 - protein, 17 aa, Artificial Sequence
  Description of Artificial Sequence: Synthetic peptide
  Seed: RMCSLMQGSTLPRRSGA
RMCSLMFGSALSRRTGA

SEQ ID NO: 130616 - protein, 17 aa, Artificial Sequence
  Description of Artificial Sequence: Synthetic peptide
  Seed: RMCSLMQGSTLPRRSGA
RMCSLMFGSALSRRVGA

SEQ ID NO: 130617 - protein, 17 aa, Artificial Sequence
  Description of Artificial Sequence: Synthetic peptide
  Seed: RMCSLMQGSTLPRRSGA
RMCSLMFGSALTRRAGA

SEQ ID NO: 130618 - protein, 17 aa, Artificial Sequence
  Description of Artificial Sequence: Synthetic peptide
  Seed: RMCSLMQGSTLPRRSGA
RMCSLMFGSALTRRIGA

SEQ ID NO: 130619 - protein, 17 aa, Artificial Sequence
  Description of Artificial Sequence: Synthetic peptide
  Seed: RMCSLMQGSTLPRRSGA
RMCSLMFGSALTRRLGA

SEQ ID NO: 130620 - protein, 17 aa, Artificial Sequence
  Description of Artificial Sequence: Synthetic peptide
  Seed: RMCSLMQGSTLPRRSGA
RMCSLMFGSALTRRNGA

SEQ ID NO: 130621 - protein, 17 aa, Artificial Sequence
  Description of Artificial Sequence: Synthetic peptide
  Seed: RMCSLMQGSTLPRRSGA
RMCSLMFGSALTRRSGA

SEQ ID NO: 130622 - protein, 17 aa, Artificial Sequence
  Description of Artificial Sequence: Synthetic peptide
  Seed: RMCSLMQGSTLPRRSGA
RMCSLMFGSALTRRVGA

SEQ ID NO: 130623 - protein, 17 aa, Artificial Sequence
  Description of Artificial Sequence: Synthetic peptide
  Seed: RMCSLMQGSTLPRRSGA
RMCSLMFGSALVRRAGA

SEQ ID NO: 130624 - protein, 17 aa, Artificial Sequence
  Description of Artificial Sequence: Synthetic peptide
  Seed: RMCSLMQGSTLPRRSGA
RMCSLMFGSALVRRNGA

SEQ ID NO: 130625 - protein, 17 aa, Artificial Sequence
  Description of Artificial Sequence: Synthetic peptide
  Seed: RMCSLMQGSTLPRRSGA
RMCSLMFGSALVRRSGA

SEQ ID NO: 130626 - protein, 17 aa, Artificial Sequence
  Description of Artificial Sequence: Synthetic peptide
  Seed: RMCSLMQGSTLPRRSGA
RMCSLMFGSALVRRVGA

SEQ ID NO: 130627 - protein, 17 aa, Artificial Sequence
  Description of Artificial Sequence: Synthetic peptide
  Seed: RMCSLMQGSTLPRRSGA
RMCSLMFGSILARRAGA

SEQ ID NO: 130628 - protein, 17 aa, Artificial Sequence
  Description of Artificial Sequence: Synthetic peptide
  Seed: RMCSLMQGSTLPRRSGA
RMCSLMFGSILARRGGA

SEQ ID NO: 130629 - protein, 17 aa, Artificial Sequence
  Description of Artificial Sequence: Synthetic peptide
  Seed: RMCSLMQGSTLPRRSGA
RMCSLMFGSILARRIGA

SEQ ID NO: 130630 - protein, 17 aa, Artificial Sequence
  Description of Artificial Sequence: Synthetic peptide
  Seed: RMCSLMQGSTLPRRSGA
RMCSLMFGSILARRLGA

SEQ ID NO: 130631 - protein, 17 aa, Artificial Sequence
  Description of Artificial Sequence: Synthetic peptide
  Seed: RMCSLMQGSTLPRRSGA
RMCSLMFGSILARRMGA

SEQ ID NO: 130632 - protein, 17 aa, Artificial Sequence
  Description of Artificial Sequence: Synthetic peptide
  Seed: RMCSLMQGSTLPRRSGA
RMCSLMFGSILARRNGA

SEQ ID NO: 130633 - protein, 17 aa, Artificial Sequence
  Description of Artificial Sequence: Synthetic peptide
  Seed: RMCSLMQGSTLPRRSGA
RMCSLMFGSILARRSGA

SEQ ID NO: 130634 - protein, 17 aa, Artificial Sequence
  Description of Artificial Sequence: Synthetic peptide
  Seed: RMCSLMQGSTLPRRSGA
RMCSLMFGSILARRTGA

SEQ ID NO: 130635 - protein, 17 aa, Artificial Sequence
  Description of Artificial Sequence: Synthetic peptide
  Seed: RMCSLMQGSTLPRRSGA
RMCSLMFGSILARRVGA

SEQ ID NO: 130636 - protein, 17 aa, Artificial Sequence
  Description of Artificial Sequence: Synthetic peptide
  Seed: RMCSLMQGSTLPRRSGA
RMCSLMFGSILGRRAGA

SEQ ID NO: 130637 - protein, 17 aa, Artificial Sequence
  Description of Artificial Sequence: Synthetic peptide
  Seed: RMCSLMQGSTLPRRSGA
RMCSLMFGSILGRRSGA

SEQ ID NO: 130638 - protein, 17 aa, Artificial Sequence
  Description of Artificial Sequence: Synthetic peptide
  Seed: RMCSLMQGSTLPRRSGA
RMCSLMFGSILGRRVGA

SEQ ID NO: 130639 - protein, 17 aa, Artificial Sequence
  Description of Artificial Sequence: Synthetic peptide
  Seed: RMCSLMQGSTLPRRSGA
RMCSLMFGSILIRRAGA

SEQ ID NO: 130640 - protein, 17 aa, Artificial Sequence
  Description of Artificial Sequence: Synthetic peptide
  Seed: RMCSLMQGSTLPRRSGA
RMCSLMFGSILNRRAGA

SEQ ID NO: 130641 - protein, 17 aa, Artificial Sequence
  Description of Artificial Sequence: Synthetic peptide
  Seed: RMCSLMQGSTLPRRSGA
RMCSLMFGSILPRRAGA

SEQ ID NO: 130642 - protein, 17 aa, Artificial Sequence
  Description of Artificial Sequence: Synthetic peptide
  Seed: RMCSLMQGSTLPRRSGA
RMCSLMFGSILPRRIGA

SEQ ID NO: 130643 - protein, 17 aa, Artificial Sequence
  Description of Artificial Sequence: Synthetic peptide
  Seed: RMCSLMQGSTLPRRSGA
RMCSLMFGSILPRRLGA

SEQ ID NO: 130644 - protein, 17 aa, Artificial Sequence
  Description of Artificial Sequence: Synthetic peptide
  Seed: RMCSLMQGSTLPRRSGA
RMCSLMFGSILPRRMGA

SEQ ID NO: 130645 - protein, 17 aa, Artificial Sequence
  Description of Artificial Sequence: Synthetic peptide
  Seed: RMCSLMQGSTLPRRSGA
RMCSLMFGSILPRRNGA

SEQ ID NO: 130646 - protein, 17 aa, Artificial Sequence
  Description of Artificial Sequence: Synthetic peptide
  Seed: RMCSLMQGSTLPRRSGA
RMCSLMFGSILPRRSGA

SEQ ID NO: 130647 - protein, 17 aa, Artificial Sequence
  Description of Artificial Sequence: Synthetic peptide
  Seed: RMCSLMQGSTLPRRSGA
RMCSLMFGSILPRRTGA

SEQ ID NO: 130648 - protein, 17 aa, Artificial Sequence
  Description of Artificial Sequence: Synthetic peptide
  Seed: RMCSLMQGSTLPRRSGA
RMCSLMFGSILPRRVGA

SEQ ID NO: 130649 - protein, 17 aa, Artificial Sequence
  Description of Artificial Sequence: Synthetic peptide
  Seed: RMCSLMQGSTLPRRSGA
RMCSLMFGSILSRRAGA

SEQ ID NO: 130650 - protein, 17 aa, Artificial Sequence
  Description of Artificial Sequence: Synthetic peptide
  Seed: RMCSLMQGSTLPRRSGA
RMCSLMFGSILSRRIGA

SEQ ID NO: 130651 - protein, 17 aa, Artificial Sequence
  Description of Artificial Sequence: Synthetic peptide
  Seed: RMCSLMQGSTLPRRSGA
RMCSLMFGSILSRRLGA

SEQ ID NO: 130652 - protein, 17 aa, Artificial Sequence
  Description of Artificial Sequence: Synthetic peptide
  Seed: RMCSLMQGSTLPRRSGA
RMCSLMFGSILSRRMGA

SEQ ID NO: 130653 - protein, 17 aa, Artificial Sequence
  Description of Artificial Sequence: Synthetic peptide
  Seed: RMCSLMQGSTLPRRSGA
RMCSLMFGSILSRRNGA

SEQ ID NO: 130654 - protein, 17 aa, Artificial Sequence
  Description of Artificial Sequence: Synthetic peptide
  Seed: RMCSLMQGSTLPRRSGA
RMCSLMFGSILSRRSGA

SEQ ID NO: 130655 - protein, 17 aa, Artificial Sequence
  Description of Artificial Sequence: Synthetic peptide
  Seed: RMCSLMQGSTLPRRSGA
RMCSLMFGSILSRRTGA

SEQ ID NO: 130656 - protein, 17 aa, Artificial Sequence
  Description of Artificial Sequence: Synthetic peptide
  Seed: RMCSLMQGSTLPRRSGA
RMCSLMFGSILSRRVGA

SEQ ID NO: 130657 - protein, 17 aa, Artificial Sequence
  Description of Artificial Sequence: Synthetic peptide
  Seed: RMCSLMQGSTLPRRSGA
RMCSLMFGSILTRRAGA

SEQ ID NO: 130658 - protein, 17 aa, Artificial Sequence
  Description of Artificial Sequence: Synthetic peptide
  Seed: RMCSLMQGSTLPRRSGA
RMCSLMFGSILTRRIGA

SEQ ID NO: 130659 - protein, 17 aa, Artificial Sequence
  Description of Artificial Sequence: Synthetic peptide
  Seed: RMCSLMQGSTLPRRSGA
RMCSLMFGSILTRRLGA

SEQ ID NO: 130660 - protein, 17 aa, Artificial Sequence
  Description of Artificial Sequence: Synthetic peptide
  Seed: RMCSLMQGSTLPRRSGA
RMCSLMFGSILTRRMGA

SEQ ID NO: 130661 - protein, 17 aa, Artificial Sequence
  Description of Artificial Sequence: Synthetic peptide
  Seed: RMCSLMQGSTLPRRSGA
RMCSLMFGSILTRRNGA

SEQ ID NO: 130662 - protein, 17 aa, Artificial Sequence
  Description of Artificial Sequence: Synthetic peptide
  Seed: RMCSLMQGSTLPRRSGA
RMCSLMFGSILTRRSGA

SEQ ID NO: 130663 - protein, 17 aa, Artificial Sequence
  Description of Artificial Sequence: Synthetic peptide
  Seed: RMCSLMQGSTLPRRSGA
RMCSLMFGSILTRRTGA

SEQ ID NO: 130664 - protein, 17 aa, Artificial Sequence
  Description of Artificial Sequence: Synthetic peptide
  Seed: RMCSLMQGSTLPRRSGA
RMCSLMFGSILTRRVGA

SEQ ID NO: 130665 - protein, 17 aa, Artificial Sequence
  Description of Artificial Sequence: Synthetic peptide
  Seed: RMCSLMQGSTLPRRSGA
RMCSLMFGSILVRRAGA

SEQ ID NO: 130666 - protein, 17 aa, Artificial Sequence
  Description of Artificial Sequence: Synthetic peptide
  Seed: RMCSLMQGSTLPRRSGA
RMCSLMFGSILVRRNGA

SEQ ID NO: 130667 - protein, 17 aa, Artificial Sequence
  Description of Artificial Sequence: Synthetic peptide
  Seed: RMCSLMQGSTLPRRSGA
RMCSLMFGSILVRRSGA

SEQ ID NO: 130668 - protein, 17 aa, Artificial Sequence
  Description of Artificial Sequence: Synthetic peptide
  Seed: RMCSLMQGSTLPRRSGA
RMCSLMFGSILVRRTGA

SEQ ID NO: 130669 - protein, 17 aa, Artificial Sequence
  Description of Artificial Sequence: Synthetic peptide
  Seed: RMCSLMQGSTLPRRSGA
RMCSLMFGSILVRRVGA

SEQ ID NO: 130670 - protein, 17 aa, Artificial Sequence
  Description of Artificial Sequence: Synthetic peptide
  Seed: RMCSLMQGSTLPRRSGA
RMCSLMFGSLLARRAGA

SEQ ID NO: 130671 - protein, 17 aa, Artificial Sequence
  Description of Artificial Sequence: Synthetic peptide
  Seed: RMCSLMQGSTLPRRSGA
RMCSLMFGSLLARRGGA

SEQ ID NO: 130672 - protein, 17 aa, Artificial Sequence
  Description of Artificial Sequence: Synthetic peptide
  Seed: RMCSLMQGSTLPRRSGA
RMCSLMFGSLLARRHGA

SEQ ID NO: 130673 - protein, 17 aa, Artificial Sequence
  Description of Artificial Sequence: Synthetic peptide
  Seed: RMCSLMQGSTLPRRSGA
RMCSLMFGSLLARRIGA

SEQ ID NO: 130674 - protein, 17 aa, Artificial Sequence
  Description of Artificial Sequence: Synthetic peptide
  Seed: RMCSLMQGSTLPRRSGA
RMCSLMFGSLLARRLGA

SEQ ID NO: 130675 - protein, 17 aa, Artificial Sequence
  Description of Artificial Sequence: Synthetic peptide
  Seed: RMCSLMQGSTLPRRSGA
RMCSLMFGSLLARRMGA

SEQ ID NO: 130676 - protein, 17 aa, Artificial Sequence
  Description of Artificial Sequence: Synthetic peptide
  Seed: RMCSLMQGSTLPRRSGA
RMCSLMFGSLLARRNGA

SEQ ID NO: 130677 - protein, 17 aa, Artificial Sequence
  Description of Artificial Sequence: Synthetic peptide
  Seed: RMCSLMQGSTLPRRSGA
RMCSLMFGSLLARRPGA

SEQ ID NO: 130678 - protein, 17 aa, Artificial Sequence
  Description of Artificial Sequence: Synthetic peptide
  Seed: RMCSLMQGSTLPRRSGA
RMCSLMFGSLLARRSGA

SEQ ID NO: 130679 - protein, 17 aa, Artificial Sequence
  Description of Artificial Sequence: Synthetic peptide
  Seed: RMCSLMQGSTLPRRSGA
RMCSLMFGSLLARRTGA

SEQ ID NO: 130680 - protein, 17 aa, Artificial Sequence
  Description of Artificial Sequence: Synthetic peptide
  Seed: RMCSLMQGSTLPRRSGA
RMCSLMFGSLLARRVGA

SEQ ID NO: 130681 - protein, 17 aa, Artificial Sequence
  Description of Artificial Sequence: Synthetic peptide
  Seed: RMCSLMQGSTLPRRSGA
RMCSLMFGSLLGRRAGA

SEQ ID NO: 130682 - protein, 17 aa, Artificial Sequence
  Description of Artificial Sequence: Synthetic peptide
  Seed: RMCSLMQGSTLPRRSGA
RMCSLMFGSLLGRRIGA

SEQ ID NO: 130683 - protein, 17 aa, Artificial Sequence
  Description of Artificial Sequence: Synthetic peptide
  Seed: RMCSLMQGSTLPRRSGA
RMCSLMFGSLLGRRLGA

SEQ ID NO: 130684 - protein, 17 aa, Artificial Sequence
  Description of Artificial Sequence: Synthetic peptide
  Seed: RMCSLMQGSTLPRRSGA
RMCSLMFGSLLGRRNGA

SEQ ID NO: 130685 - protein, 17 aa, Artificial Sequence
  Description of Artificial Sequence: Synthetic peptide
  Seed: RMCSLMQGSTLPRRSGA
RMCSLMFGSLLGRRSGA

SEQ ID NO: 130686 - protein, 17 aa, Artificial Sequence
  Description of Artificial Sequence: Synthetic peptide
  Seed: RMCSLMQGSTLPRRSGA
RMCSLMFGSLLGRRVGA

SEQ ID NO: 130687 - protein, 17 aa, Artificial Sequence
  Description of Artificial Sequence: Synthetic peptide
  Seed: RMCSLMQGSTLPRRSGA
RMCSLMFGSLLIRRAGA

SEQ ID NO: 130688 - protein, 17 aa, Artificial Sequence
  Description of Artificial Sequence: Synthetic peptide
  Seed: RMCSLMQGSTLPRRSGA
RMCSLMFGSLLIRRNGA

SEQ ID NO: 130689 - protein, 17 aa, Artificial Sequence
  Description of Artificial Sequence: Synthetic peptide
  Seed: RMCSLMQGSTLPRRSGA
RMCSLMFGSLLIRRSGA

SEQ ID NO: 130690 - protein, 17 aa, Artificial Sequence
  Description of Artificial Sequence: Synthetic peptide
  Seed: RMCSLMQGSTLPRRSGA
RMCSLMFGSLLIRRVGA

SEQ ID NO: 130691 - protein, 17 aa, Artificial Sequence
  Description of Artificial Sequence: Synthetic peptide
  Seed: RMCSLMQGSTLPRRSGA
RMCSLMFGSLLNRRAGA

SEQ ID NO: 130692 - protein, 17 aa, Artificial Sequence
  Description of Artificial Sequence: Synthetic peptide
  Seed: RMCSLMQGSTLPRRSGA
RMCSLMFGSLLNRRNGA

SEQ ID NO: 130693 - protein, 17 aa, Artificial Sequence
  Description of Artificial Sequence: Synthetic peptide
  Seed: RMCSLMQGSTLPRRSGA
RMCSLMFGSLLNRRSGA

SEQ ID NO: 130694 - protein, 17 aa, Artificial Sequence
  Description of Artificial Sequence: Synthetic peptide
  Seed: RMCSLMQGSTLPRRSGA
RMCSLMFGSLLNRRVGA

SEQ ID NO: 130695 - protein, 17 aa, Artificial Sequence
  Description of Artificial Sequence: Synthetic peptide
  Seed: RMCSLMQGSTLPRRSGA
RMCSLMFGSLLPRRAGA

SEQ ID NO: 130696 - protein, 17 aa, Artificial Sequence
  Description of Artificial Sequence: Synthetic peptide
  Seed: RMCSLMQGSTLPRRSGA
RMCSLMFGSLLPRRIGA

SEQ ID NO: 130697 - protein, 17 aa, Artificial Sequence
  Description of Artificial Sequence: Synthetic peptide
  Seed: RMCSLMQGSTLPRRSGA
RMCSLMFGSLLPRRLGA

SEQ ID NO: 130698 - protein, 17 aa, Artificial Sequence
  Description of Artificial Sequence: Synthetic peptide
  Seed: RMCSLMQGSTLPRRSGA
RMCSLMFGSLLPRRMGA

SEQ ID NO: 130699 - protein, 17 aa, Artificial Sequence
  Description of Artificial Sequence: Synthetic peptide
  Seed: RMCSLMQGSTLPRRSGA
RMCSLMFGSLLPRRNGA

SEQ ID NO: 130700 - protein, 17 aa, Artificial Sequence
  Description of Artificial Sequence: Synthetic peptide
  Seed: RMCSLMQGSTLPRRSGA
RMCSLMFGSLLPRRSGA

SEQ ID NO: 130701 - protein, 17 aa, Artificial Sequence
  Description of Artificial Sequence: Synthetic peptide
  Seed: RMCSLMQGSTLPRRSGA
RMCSLMFGSLLPRRTGA

SEQ ID NO: 130702 - protein, 17 aa, Artificial Sequence
  Description of Artificial Sequence: Synthetic peptide
  Seed: RMCSLMQGSTLPRRSGA
RMCSLMFGSLLPRRVGA

SEQ ID NO: 130703 - protein, 17 aa, Artificial Sequence
  Description of Artificial Sequence: Synthetic peptide
  Seed: RMCSLMQGSTLPRRSGA
RMCSLMFGSLLSRRAGA

SEQ ID NO: 130704 - protein, 17 aa, Artificial Sequence
  Description of Artificial Sequence: Synthetic peptide
  Seed: RMCSLMQGSTLPRRSGA
RMCSLMFGSLLSRRGGA

SEQ ID NO: 130705 - protein, 17 aa, Artificial Sequence
  Description of Artificial Sequence: Synthetic peptide
  Seed: RMCSLMQGSTLPRRSGA
RMCSLMFGSLLSRRIGA

SEQ ID NO: 130706 - protein, 17 aa, Artificial Sequence
  Description of Artificial Sequence: Synthetic peptide
  Seed: RMCSLMQGSTLPRRSGA
RMCSLMFGSLLSRRLGA

SEQ ID NO: 130707 - protein, 17 aa, Artificial Sequence
  Description of Artificial Sequence: Synthetic peptide
  Seed: RMCSLMQGSTLPRRSGA
RMCSLMFGSLLSRRMGA

SEQ ID NO: 130708 - protein, 17 aa, Artificial Sequence
  Description of Artificial Sequence: Synthetic peptide
  Seed: RMCSLMQGSTLPRRSGA
RMCSLMFGSLLSRRNGA

SEQ ID NO: 130709 - protein, 17 aa, Artificial Sequence
  Description of Artificial Sequence: Synthetic peptide
  Seed: RMCSLMQGSTLPRRSGA
RMCSLMFGSLLSRRSGA

SEQ ID NO: 130710 - protein, 17 aa, Artificial Sequence
  Description of Artificial Sequence: Synthetic peptide
  Seed: RMCSLMQGSTLPRRSGA
RMCSLMFGSLLSRRTGA

SEQ ID NO: 130711 - protein, 17 aa, Artificial Sequence
  Description of Artificial Sequence: Synthetic peptide
  Seed: RMCSLMQGSTLPRRSGA
RMCSLMFGSLLSRRVGA

SEQ ID NO: 130712 - protein, 17 aa, Artificial Sequence
  Description of Artificial Sequence: Synthetic peptide
  Seed: RMCSLMQGSTLPRRSGA
RMCSLMFGSLLTRRAGA

SEQ ID NO: 130713 - protein, 17 aa, Artificial Sequence
  Description of Artificial Sequence: Synthetic peptide
  Seed: RMCSLMQGSTLPRRSGA
RMCSLMFGSLLTRRIGA

SEQ ID NO: 130714 - protein, 17 aa, Artificial Sequence
  Description of Artificial Sequence: Synthetic peptide
  Seed: RMCSLMQGSTLPRRSGA
RMCSLMFGSLLTRRLGA

SEQ ID NO: 130715 - protein, 17 aa, Artificial Sequence
  Description of Artificial Sequence: Synthetic peptide
  Seed: RMCSLMQGSTLPRRSGA
RMCSLMFGSLLTRRMGA

SEQ ID NO: 130716 - protein, 17 aa, Artificial Sequence
  Description of Artificial Sequence: Synthetic peptide
  Seed: RMCSLMQGSTLPRRSGA
RMCSLMFGSLLTRRNGA

SEQ ID NO: 130717 - protein, 17 aa, Artificial Sequence
  Description of Artificial Sequence: Synthetic peptide
  Seed: RMCSLMQGSTLPRRSGA
RMCSLMFGSLLTRRSGA

SEQ ID NO: 130718 - protein, 17 aa, Artificial Sequence
  Description of Artificial Sequence: Synthetic peptide
  Seed: RMCSLMQGSTLPRRSGA
RMCSLMFGSLLTRRTGA

SEQ ID NO: 130719 - protein, 17 aa, Artificial Sequence
  Description of Artificial Sequence: Synthetic peptide
  Seed: RMCSLMQGSTLPRRSGA
RMCSLMFGSLLTRRVGA

SEQ ID NO: 130720 - protein, 17 aa, Artificial Sequence
  Description of Artificial Sequence: Synthetic peptide
  Seed: RMCSLMQGSTLPRRSGA
RMCSLMFGSLLVRRAGA

SEQ ID NO: 130721 - protein, 17 aa, Artificial Sequence
  Description of Artificial Sequence: Synthetic peptide
  Seed: RMCSLMQGSTLPRRSGA
RMCSLMFGSLLVRRIGA

SEQ ID NO: 130722 - protein, 17 aa, Artificial Sequence
  Description of Artificial Sequence: Synthetic peptide
  Seed: RMCSLMQGSTLPRRSGA
RMCSLMFGSLLVRRLGA

SEQ ID NO: 130723 - protein, 17 aa, Artificial Sequence
  Description of Artificial Sequence: Synthetic peptide
  Seed: RMCSLMQGSTLPRRSGA
RMCSLMFGSLLVRRMGA

SEQ ID NO: 130724 - protein, 17 aa, Artificial Sequence
  Description of Artificial Sequence: Synthetic peptide
  Seed: RMCSLMQGSTLPRRSGA
RMCSLMFGSLLVRRNGA

SEQ ID NO: 130725 - protein, 17 aa, Artificial Sequence
  Description of Artificial Sequence: Synthetic peptide
  Seed: RMCSLMQGSTLPRRSGA
RMCSLMFGSLLVRRSGA

SEQ ID NO: 130726 - protein, 17 aa, Artificial Sequence
  Description of Artificial Sequence: Synthetic peptide
  Seed: RMCSLMQGSTLPRRSGA
RMCSLMFGSLLVRRTGA

SEQ ID NO: 130727 - protein, 17 aa, Artificial Sequence
  Description of Artificial Sequence: Synthetic peptide
  Seed: RMCSLMQGSTLPRRSGA
RMCSLMFGSLLVRRVGA

SEQ ID NO: 130728 - protein, 17 aa, Artificial Sequence
  Description of Artificial Sequence: Synthetic peptide
  Seed: RMCSLMQGSTLPRRSGA
RMCSLMFGSMLARRAGA

SEQ ID NO: 130729 - protein, 17 aa, Artificial Sequence
  Description of Artificial Sequence: Synthetic peptide
  Seed: RMCSLMQGSTLPRRSGA
RMCSLMFGSMLARRDGA

SEQ ID NO: 130730 - protein, 17 aa, Artificial Sequence
  Description of Artificial Sequence: Synthetic peptide
  Seed: RMCSLMQGSTLPRRSGA
RMCSLMFGSMLARREGA

SEQ ID NO: 130731 - protein, 17 aa, Artificial Sequence
  Description of Artificial Sequence: Synthetic peptide
  Seed: RMCSLMQGSTLPRRSGA
RMCSLMFGSMLARRFGA

SEQ ID NO: 130732 - protein, 17 aa, Artificial Sequence
  Description of Artificial Sequence: Synthetic peptide
  Seed: RMCSLMQGSTLPRRSGA
RMCSLMFGSMLARRGGA

SEQ ID NO: 130733 - protein, 17 aa, Artificial Sequence
  Description of Artificial Sequence: Synthetic peptide
  Seed: RMCSLMQGSTLPRRSGA
RMCSLMFGSMLARRHGA

SEQ ID NO: 130734 - protein, 17 aa, Artificial Sequence
  Description of Artificial Sequence: Synthetic peptide
  Seed: RMCSLMQGSTLPRRSGA
RMCSLMFGSMLARRIGA

SEQ ID NO: 130735 - protein, 17 aa, Artificial Sequence
  Description of Artificial Sequence: Synthetic peptide
  Seed: RMCSLMQGSTLPRRSGA
RMCSLMFGSMLARRLGA

SEQ ID NO: 130736 - protein, 17 aa, Artificial Sequence
  Description of Artificial Sequence: Synthetic peptide
  Seed: RMCSLMQGSTLPRRSGA
RMCSLMFGSMLARRMGA

SEQ ID NO: 130737 - protein, 17 aa, Artificial Sequence
  Description of Artificial Sequence: Synthetic peptide
  Seed: RMCSLMQGSTLPRRSGA
RMCSLMFGSMLARRNGA

SEQ ID NO: 130738 - protein, 17 aa, Artificial Sequence
  Description of Artificial Sequence: Synthetic peptide
  Seed: RMCSLMQGSTLPRRSGA
RMCSLMFGSMLARRPGA

SEQ ID NO: 130739 - protein, 17 aa, Artificial Sequence
  Description of Artificial Sequence: Synthetic peptide
  Seed: RMCSLMQGSTLPRRSGA
RMCSLMFGSMLARRQGA

SEQ ID NO: 130740 - protein, 17 aa, Artificial Sequence
  Description of Artificial Sequence: Synthetic peptide
  Seed: RMCSLMQGSTLPRRSGA
RMCSLMFGSMLARRSGA

SEQ ID NO: 130741 - protein, 17 aa, Artificial Sequence
  Description of Artificial Sequence: Synthetic peptide
  Seed: RMCSLMQGSTLPRRSGA
RMCSLMFGSMLARRTGA

SEQ ID NO: 130742 - protein, 17 aa, Artificial Sequence
  Description of Artificial Sequence: Synthetic peptide
  Seed: RMCSLMQGSTLPRRSGA
RMCSLMFGSMLARRVGA

SEQ ID NO: 130743 - protein, 17 aa, Artificial Sequence
  Description of Artificial Sequence: Synthetic peptide
  Seed: RMCSLMQGSTLPRRSGA
RMCSLMFGSMLGRRAGA

SEQ ID NO: 130744 - protein, 17 aa, Artificial Sequence
  Description of Artificial Sequence: Synthetic peptide
  Seed: RMCSLMQGSTLPRRSGA
RMCSLMFGSMLGRRIGA

SEQ ID NO: 130745 - protein, 17 aa, Artificial Sequence
  Description of Artificial Sequence: Synthetic peptide
  Seed: RMCSLMQGSTLPRRSGA
RMCSLMFGSMLGRRLGA

SEQ ID NO: 130746 - protein, 17 aa, Artificial Sequence
  Description of Artificial Sequence: Synthetic peptide
  Seed: RMCSLMQGSTLPRRSGA
RMCSLMFGSMLGRRMGA

SEQ ID NO: 130747 - protein, 17 aa, Artificial Sequence
  Description of Artificial Sequence: Synthetic peptide
  Seed: RMCSLMQGSTLPRRSGA
RMCSLMFGSMLGRRNGA

SEQ ID NO: 130748 - protein, 17 aa, Artificial Sequence
  Description of Artificial Sequence: Synthetic peptide
  Seed: RMCSLMQGSTLPRRSGA
RMCSLMFGSMLGRRSGA

SEQ ID NO: 130749 - protein, 17 aa, Artificial Sequence
  Description of Artificial Sequence: Synthetic peptide
  Seed: RMCSLMQGSTLPRRSGA
RMCSLMFGSMLGRRTGA

SEQ ID NO: 130750 - protein, 17 aa, Artificial Sequence
  Description of Artificial Sequence: Synthetic peptide
  Seed: RMCSLMQGSTLPRRSGA
RMCSLMFGSMLGRRVGA

SEQ ID NO: 130751 - protein, 17 aa, Artificial Sequence
  Description of Artificial Sequence: Synthetic peptide
  Seed: RMCSLMQGSTLPRRSGA
RMCSLMFGSMLIRRAGA

SEQ ID NO: 130752 - protein, 17 aa, Artificial Sequence
  Description of Artificial Sequence: Synthetic peptide
  Seed: RMCSLMQGSTLPRRSGA
RMCSLMFGSMLIRRIGA

SEQ ID NO: 130753 - protein, 17 aa, Artificial Sequence
  Description of Artificial Sequence: Synthetic peptide
  Seed: RMCSLMQGSTLPRRSGA
RMCSLMFGSMLIRRLGA

SEQ ID NO: 130754 - protein, 17 aa, Artificial Sequence
  Description of Artificial Sequence: Synthetic peptide
  Seed: RMCSLMQGSTLPRRSGA
RMCSLMFGSMLIRRNGA

SEQ ID NO: 130755 - protein, 17 aa, Artificial Sequence
  Description of Artificial Sequence: Synthetic peptide
  Seed: RMCSLMQGSTLPRRSGA
RMCSLMFGSMLIRRSGA

SEQ ID NO: 130756 - protein, 17 aa, Artificial Sequence
  Description of Artificial Sequence: Synthetic peptide
  Seed: RMCSLMQGSTLPRRSGA
RMCSLMFGSMLIRRTGA

SEQ ID NO: 130757 - protein, 17 aa, Artificial Sequence
  Description of Artificial Sequence: Synthetic peptide
  Seed: RMCSLMQGSTLPRRSGA
RMCSLMFGSMLIRRVGA

SEQ ID NO: 130758 - protein, 17 aa, Artificial Sequence
  Description of Artificial Sequence: Synthetic peptide
  Seed: RMCSLMQGSTLPRRSGA
RMCSLMFGSMLNRRAGA

SEQ ID NO: 130759 - protein, 17 aa, Artificial Sequence
  Description of Artificial Sequence: Synthetic peptide
  Seed: RMCSLMQGSTLPRRSGA
RMCSLMFGSMLNRRIGA

SEQ ID NO: 130760 - protein, 17 aa, Artificial Sequence
  Description of Artificial Sequence: Synthetic peptide
  Seed: RMCSLMQGSTLPRRSGA
RMCSLMFGSMLNRRLGA

SEQ ID NO: 130761 - protein, 17 aa, Artificial Sequence
  Description of Artificial Sequence: Synthetic peptide
  Seed: RMCSLMQGSTLPRRSGA
RMCSLMFGSMLNRRNGA

SEQ ID NO: 130762 - protein, 17 aa, Artificial Sequence
  Description of Artificial Sequence: Synthetic peptide
  Seed: RMCSLMQGSTLPRRSGA
RMCSLMFGSMLNRRSGA

SEQ ID NO: 130763 - protein, 17 aa, Artificial Sequence
  Description of Artificial Sequence: Synthetic peptide
  Seed: RMCSLMQGSTLPRRSGA
RMCSLMFGSMLNRRVGA

SEQ ID NO: 130764 - protein, 17 aa, Artificial Sequence
  Description of Artificial Sequence: Synthetic peptide
  Seed: RMCSLMQGSTLPRRSGA
RMCSLMFGSMLPRRAGA

SEQ ID NO: 130765 - protein, 17 aa, Artificial Sequence
  Description of Artificial Sequence: Synthetic peptide
  Seed: RMCSLMQGSTLPRRSGA
RMCSLMFGSMLPRRIGA

SEQ ID NO: 130766 - protein, 17 aa, Artificial Sequence
  Description of Artificial Sequence: Synthetic peptide
  Seed: RMCSLMQGSTLPRRSGA
RMCSLMFGSMLPRRLGA

SEQ ID NO: 130767 - protein, 17 aa, Artificial Sequence
  Description of Artificial Sequence: Synthetic peptide
  Seed: RMCSLMQGSTLPRRSGA
RMCSLMFGSMLPRRMGA

SEQ ID NO: 130768 - protein, 17 aa, Artificial Sequence
  Description of Artificial Sequence: Synthetic peptide
  Seed: RMCSLMQGSTLPRRSGA
RMCSLMFGSMLPRRNGA

SEQ ID NO: 130769 - protein, 17 aa, Artificial Sequence
  Description of Artificial Sequence: Synthetic peptide
  Seed: RMCSLMQGSTLPRRSGA
RMCSLMFGSMLPRRSGA

SEQ ID NO: 130770 - protein, 17 aa, Artificial Sequence
  Description of Artificial Sequence: Synthetic peptide
  Seed: RMCSLMQGSTLPRRSGA
RMCSLMFGSMLPRRTGA

SEQ ID NO: 130771 - protein, 17 aa, Artificial Sequence
  Description of Artificial Sequence: Synthetic peptide
  Seed: RMCSLMQGSTLPRRSGA
RMCSLMFGSMLPRRVGA

SEQ ID NO: 130772 - protein, 17 aa, Artificial Sequence
  Description of Artificial Sequence: Synthetic peptide
  Seed: RMCSLMQGSTLPRRSGA
RMCSLMFGSMLSRRAGA

SEQ ID NO: 130773 - protein, 17 aa, Artificial Sequence
  Description of Artificial Sequence: Synthetic peptide
  Seed: RMCSLMQGSTLPRRSGA
RMCSLMFGSMLSRRGGA

SEQ ID NO: 130774 - protein, 17 aa, Artificial Sequence
  Description of Artificial Sequence: Synthetic peptide
  Seed: RMCSLMQGSTLPRRSGA
RMCSLMFGSMLSRRIGA

SEQ ID NO: 130775 - protein, 17 aa, Artificial Sequence
  Description of Artificial Sequence: Synthetic peptide
  Seed: RMCSLMQGSTLPRRSGA
RMCSLMFGSMLSRRLGA

SEQ ID NO: 130776 - protein, 17 aa, Artificial Sequence
  Description of Artificial Sequence: Synthetic peptide
  Seed: RMCSLMQGSTLPRRSGA
RMCSLMFGSMLSRRMGA

SEQ ID NO: 130777 - protein, 17 aa, Artificial Sequence
  Description of Artificial Sequence: Synthetic peptide
  Seed: RMCSLMQGSTLPRRSGA
RMCSLMFGSMLSRRNGA

SEQ ID NO: 130778 - protein, 17 aa, Artificial Sequence
  Description of Artificial Sequence: Synthetic peptide
  Seed: RMCSLMQGSTLPRRSGA
RMCSLMFGSMLSRRSGA

SEQ ID NO: 130779 - protein, 17 aa, Artificial Sequence
  Description of Artificial Sequence: Synthetic peptide
  Seed: RMCSLMQGSTLPRRSGA
RMCSLMFGSMLSRRTGA

SEQ ID NO: 130780 - protein, 17 aa, Artificial Sequence
  Description of Artificial Sequence: Synthetic peptide
  Seed: RMCSLMQGSTLPRRSGA
RMCSLMFGSMLSRRVGA

SEQ ID NO: 130781 - protein, 17 aa, Artificial Sequence
  Description of Artificial Sequence: Synthetic peptide
  Seed: RMCSLMQGSTLPRRSGA
RMCSLMFGSMLTRRAGA

SEQ ID NO: 130782 - protein, 17 aa, Artificial Sequence
  Description of Artificial Sequence: Synthetic peptide
  Seed: RMCSLMQGSTLPRRSGA
RMCSLMFGSMLTRRIGA

SEQ ID NO: 130783 - protein, 17 aa, Artificial Sequence
  Description of Artificial Sequence: Synthetic peptide
  Seed: RMCSLMQGSTLPRRSGA
RMCSLMFGSMLTRRLGA

SEQ ID NO: 130784 - protein, 17 aa, Artificial Sequence
  Description of Artificial Sequence: Synthetic peptide
  Seed: RMCSLMQGSTLPRRSGA
RMCSLMFGSMLTRRMGA

SEQ ID NO: 130785 - protein, 17 aa, Artificial Sequence
  Description of Artificial Sequence: Synthetic peptide
  Seed: RMCSLMQGSTLPRRSGA
RMCSLMFGSMLTRRNGA

SEQ ID NO: 130786 - protein, 17 aa, Artificial Sequence
  Description of Artificial Sequence: Synthetic peptide
  Seed: RMCSLMQGSTLPRRSGA
RMCSLMFGSMLTRRSGA

SEQ ID NO: 130787 - protein, 17 aa, Artificial Sequence
  Description of Artificial Sequence: Synthetic peptide
  Seed: RMCSLMQGSTLPRRSGA
RMCSLMFGSMLTRRTGA

SEQ ID NO: 130788 - protein, 17 aa, Artificial Sequence
  Description of Artificial Sequence: Synthetic peptide
  Seed: RMCSLMQGSTLPRRSGA
RMCSLMFGSMLTRRVGA

SEQ ID NO: 130789 - protein, 17 aa, Artificial Sequence
  Description of Artificial Sequence: Synthetic peptide
  Seed: RMCSLMQGSTLPRRSGA
RMCSLMFGSMLVRRAGA

SEQ ID NO: 130790 - protein, 17 aa, Artificial Sequence
  Description of Artificial Sequence: Synthetic peptide
  Seed: RMCSLMQGSTLPRRSGA
RMCSLMFGSMLVRRGGA

SEQ ID NO: 130791 - protein, 17 aa, Artificial Sequence
  Description of Artificial Sequence: Synthetic peptide
  Seed: RMCSLMQGSTLPRRSGA
RMCSLMFGSMLVRRIGA

SEQ ID NO: 130792 - protein, 17 aa, Artificial Sequence
  Description of Artificial Sequence: Synthetic peptide
  Seed: RMCSLMQGSTLPRRSGA
RMCSLMFGSMLVRRLGA

SEQ ID NO: 130793 - protein, 17 aa, Artificial Sequence
  Description of Artificial Sequence: Synthetic peptide
  Seed: RMCSLMQGSTLPRRSGA
RMCSLMFGSMLVRRMGA

SEQ ID NO: 130794 - protein, 17 aa, Artificial Sequence
  Description of Artificial Sequence: Synthetic peptide
  Seed: RMCSLMQGSTLPRRSGA
RMCSLMFGSMLVRRNGA

SEQ ID NO: 130795 - protein, 17 aa, Artificial Sequence
  Description of Artificial Sequence: Synthetic peptide
  Seed: RMCSLMQGSTLPRRSGA
RMCSLMFGSMLVRRSGA

SEQ ID NO: 130796 - protein, 17 aa, Artificial Sequence
  Description of Artificial Sequence: Synthetic peptide
  Seed: RMCSLMQGSTLPRRSGA
RMCSLMFGSMLVRRTGA

SEQ ID NO: 130797 - protein, 17 aa, Artificial Sequence
  Description of Artificial Sequence: Synthetic peptide
  Seed: RMCSLMQGSTLPRRSGA
RMCSLMFGSMLVRRVGA

SEQ ID NO: 130798 - protein, 17 aa, Artificial Sequence
  Description of Artificial Sequence: Synthetic peptide
  Seed: RMCSLMQGSTLPRRSGA
RMCSLMFGSQLARRAGA

SEQ ID NO: 130799 - protein, 17 aa, Artificial Sequence
  Description of Artificial Sequence: Synthetic peptide
  Seed: RMCSLMQGSTLPRRSGA
RMCSLMFGSVLARRAGA

SEQ ID NO: 130800 - protein, 17 aa, Artificial Sequence
  Description of Artificial Sequence: Synthetic peptide
  Seed: RMCSLMQGSTLPRRSGA
RMCSLMFGSVLARRIGA

SEQ ID NO: 130801 - protein, 17 aa, Artificial Sequence
  Description of Artificial Sequence: Synthetic peptide
  Seed: RMCSLMQGSTLPRRSGA
RMCSLMFGSVLARRLGA

SEQ ID NO: 130802 - protein, 17 aa, Artificial Sequence
  Description of Artificial Sequence: Synthetic peptide
  Seed: RMCSLMQGSTLPRRSGA
RMCSLMFGSVLARRMGA

SEQ ID NO: 130803 - protein, 17 aa, Artificial Sequence
  Description of Artificial Sequence: Synthetic peptide
  Seed: RMCSLMQGSTLPRRSGA
RMCSLMFGSVLARRNGA

SEQ ID NO: 130804 - protein, 17 aa, Artificial Sequence
  Description of Artificial Sequence: Synthetic peptide
  Seed: RMCSLMQGSTLPRRSGA
RMCSLMFGSVLARRSGA

SEQ ID NO: 130805 - protein, 17 aa, Artificial Sequence
  Description of Artificial Sequence: Synthetic peptide
  Seed: RMCSLMQGSTLPRRSGA
RMCSLMFGSVLARRTGA

SEQ ID NO: 130806 - protein, 17 aa, Artificial Sequence
  Description of Artificial Sequence: Synthetic peptide
  Seed: RMCSLMQGSTLPRRSGA
RMCSLMFGSVLARRVGA

SEQ ID NO: 130807 - protein, 17 aa, Artificial Sequence
  Description of Artificial Sequence: Synthetic peptide
  Seed: RMCSLMQGSTLPRRSGA
RMCSLMFGSVLPRRAGA

SEQ ID NO: 130808 - protein, 17 aa, Artificial Sequence
  Description of Artificial Sequence: Synthetic peptide
  Seed: RMCSLMQGSTLPRRSGA
RMCSLMFGSVLSRRAGA

SEQ ID NO: 130809 - protein, 17 aa, Artificial Sequence
  Description of Artificial Sequence: Synthetic peptide
  Seed: RMCSLMQGSTLPRRSGA
RMCSLMFGSVLSRRNGA

SEQ ID NO: 130810 - protein, 17 aa, Artificial Sequence
  Description of Artificial Sequence: Synthetic peptide
  Seed: RMCSLMQGSTLPRRSGA
RMCSLMFGSVLSRRSGA

SEQ ID NO: 130811 - protein, 17 aa, Artificial Sequence
  Description of Artificial Sequence: Synthetic peptide
  Seed: RMCSLMQGSTLPRRSGA
RMCSLMFGSVLSRRVGA

SEQ ID NO: 130812 - protein, 17 aa, Artificial Sequence
  Description of Artificial Sequence: Synthetic peptide
  Seed: RMCSLMQGSTLPRRSGA
RMCSLMFGSVLTRRAGA

SEQ ID NO: 130813 - protein, 17 aa, Artificial Sequence
  Description of Artificial Sequence: Synthetic peptide
  Seed: RMCSLMQGSTLPRRSGA
RMCSLMFGSVLTRRNGA

SEQ ID NO: 130814 - protein, 17 aa, Artificial Sequence
  Description of Artificial Sequence: Synthetic peptide
  Seed: RMCSLMQGSTLPRRSGA
RMCSLMFGSVLTRRSGA

SEQ ID NO: 130815 - protein, 17 aa, Artificial Sequence
  Description of Artificial Sequence: Synthetic peptide
  Seed: RMCSLMQGSTLPRRSGA
RMCSLMFGSVLTRRVGA

SEQ ID NO: 130816 - protein, 17 aa, Artificial Sequence
  Description of Artificial Sequence: Synthetic peptide
  Seed: RMCSLMQGSTLPRRSGA
RMCSLMFGSVLVRRAGA

SEQ ID NO: 130817 - protein, 17 aa, Artificial Sequence
  Description of Artificial Sequence: Synthetic peptide
  Seed: RMCSLMQGSTLPRRSGA
RMCSLMIGSLLARRAGA

SEQ ID NO: 130818 - protein, 17 aa, Artificial Sequence
  Description of Artificial Sequence: Synthetic peptide
  Seed: RMCSLMQGSTLPRRSGA
RMCSLMIGSMLARRAGA

SEQ ID NO: 130819 - protein, 17 aa, Artificial Sequence
  Description of Artificial Sequence: Synthetic peptide
  Seed: RMCSLMQGSTLPRRSGA
RMCSLMIGSMLARRSGA

SEQ ID NO: 130820 - protein, 17 aa, Artificial Sequence
  Description of Artificial Sequence: Synthetic peptide
  Seed: RMCSLMQGSTLPRRSGA
RMCSLMIGSMLARRVGA

SEQ ID NO: 130821 - protein, 17 aa, Artificial Sequence
  Description of Artificial Sequence: Synthetic peptide
  Seed: RMCSLMQGSTLPRRSGA
RMCSLMIGSMLSRRAGA

SEQ ID NO: 130822 - protein, 17 aa, Artificial Sequence
  Description of Artificial Sequence: Synthetic peptide
  Seed: RMCSLMQGSTLPRRSGA
RMCSLMLGSLLARRAGA

SEQ ID NO: 130823 - protein, 17 aa, Artificial Sequence
  Description of Artificial Sequence: Synthetic peptide
  Seed: RMCSLMQGSTLPRRSGA
RMCSLMLGSLLARRSGA

SEQ ID NO: 130824 - protein, 17 aa, Artificial Sequence
  Description of Artificial Sequence: Synthetic peptide
  Seed: RMCSLMQGSTLPRRSGA
RMCSLMLGSMLARRAGA

SEQ ID NO: 130825 - protein, 17 aa, Artificial Sequence
  Description of Artificial Sequence: Synthetic peptide
  Seed: RMCSLMQGSTLPRRSGA
RMCSLMLGSMLARRNGA

SEQ ID NO: 130826 - protein, 17 aa, Artificial Sequence
  Description of Artificial Sequence: Synthetic peptide
  Seed: RMCSLMQGSTLPRRSGA
RMCSLMLGSMLARRSGA

SEQ ID NO: 130827 - protein, 17 aa, Artificial Sequence
  Description of Artificial Sequence: Synthetic peptide
  Seed: RMCSLMQGSTLPRRSGA
RMCSLMLGSMLARRVGA

SEQ ID NO: 130828 - protein, 17 aa, Artificial Sequence
  Description of Artificial Sequence: Synthetic peptide
  Seed: RMCSLMQGSTLPRRSGA
RMCSLMLGSMLSRRAGA

SEQ ID NO: 130829 - protein, 17 aa, Artificial Sequence
  Description of Artificial Sequence: Synthetic peptide
  Seed: RMCSLMQGSTLPRRSGA
RMCSLMMGSMLARRAGA

SEQ ID NO: 130830 - protein, 17 aa, Artificial Sequence
  Description of Artificial Sequence: Synthetic peptide
  Seed: RMCSLMQGSTLPRRSGA
RMCSLMWGSLLARRAGA

SEQ ID NO: 130831 - protein, 17 aa, Artificial Sequence
  Description of Artificial Sequence: Synthetic peptide
  Seed: RMCSLMQGSTLPRRSGA
RMCSLMWGSMLARRAGA

SEQ ID NO: 130832 - protein, 17 aa, Artificial Sequence
  Description of Artificial Sequence: Synthetic peptide
  Seed: RMCSLMQGSTLPRRSGA
RMCSLMYGSALARRAGA

SEQ ID NO: 130833 - protein, 17 aa, Artificial Sequence
  Description of Artificial Sequence: Synthetic peptide
  Seed: RMCSLMQGSTLPRRSGA
RMCSLMYGSALARRIGA

SEQ ID NO: 130834 - protein, 17 aa, Artificial Sequence
  Description of Artificial Sequence: Synthetic peptide
  Seed: RMCSLMQGSTLPRRSGA
RMCSLMYGSALARRLGA

SEQ ID NO: 130835 - protein, 17 aa, Artificial Sequence
  Description of Artificial Sequence: Synthetic peptide
  Seed: RMCSLMQGSTLPRRSGA
RMCSLMYGSALARRSGA

SEQ ID NO: 130836 - protein, 17 aa, Artificial Sequence
  Description of Artificial Sequence: Synthetic peptide
  Seed: RMCSLMQGSTLPRRSGA
RMCSLMYGSALARRVGA

SEQ ID NO: 130837 - protein, 17 aa, Artificial Sequence
  Description of Artificial Sequence: Synthetic peptide
  Seed: RMCSLMQGSTLPRRSGA
RMCSLMYGSALSRRAGA

SEQ ID NO: 130838 - protein, 17 aa, Artificial Sequence
  Description of Artificial Sequence: Synthetic peptide
  Seed: RMCSLMQGSTLPRRSGA
RMCSLMYGSALSRRVGA

SEQ ID NO: 130839 - protein, 17 aa, Artificial Sequence
  Description of Artificial Sequence: Synthetic peptide
  Seed: RMCSLMQGSTLPRRSGA
RMCSLMYGSALVRRAGA

SEQ ID NO: 130840 - protein, 17 aa, Artificial Sequence
  Description of Artificial Sequence: Synthetic peptide
  Seed: RMCSLMQGSTLPRRSGA
RMCSLMYGSILARRAGA

SEQ ID NO: 130841 - protein, 17 aa, Artificial Sequence
  Description of Artificial Sequence: Synthetic peptide
  Seed: RMCSLMQGSTLPRRSGA
RMCSLMYGSILARRIGA

SEQ ID NO: 130842 - protein, 17 aa, Artificial Sequence
  Description of Artificial Sequence: Synthetic peptide
  Seed: RMCSLMQGSTLPRRSGA
RMCSLMYGSILARRLGA

SEQ ID NO: 130843 - protein, 17 aa, Artificial Sequence
  Description of Artificial Sequence: Synthetic peptide
  Seed: RMCSLMQGSTLPRRSGA
RMCSLMYGSILARRMGA

SEQ ID NO: 130844 - protein, 17 aa, Artificial Sequence
  Description of Artificial Sequence: Synthetic peptide
  Seed: RMCSLMQGSTLPRRSGA
RMCSLMYGSILARRNGA

SEQ ID NO: 130845 - protein, 17 aa, Artificial Sequence
  Description of Artificial Sequence: Synthetic peptide
  Seed: RMCSLMQGSTLPRRSGA
RMCSLMYGSILARRSGA

SEQ ID NO: 130846 - protein, 17 aa, Artificial Sequence
  Description of Artificial Sequence: Synthetic peptide
  Seed: RMCSLMQGSTLPRRSGA
RMCSLMYGSILARRTGA

SEQ ID NO: 130847 - protein, 17 aa, Artificial Sequence
  Description of Artificial Sequence: Synthetic peptide
  Seed: RMCSLMQGSTLPRRSGA
RMCSLMYGSILARRVGA

SEQ ID NO: 130848 - protein, 17 aa, Artificial Sequence
  Description of Artificial Sequence: Synthetic peptide
  Seed: RMCSLMQGSTLPRRSGA
RMCSLMYGSILGRRAGA

SEQ ID NO: 130849 - protein, 17 aa, Artificial Sequence
  Description of Artificial Sequence: Synthetic peptide
  Seed: RMCSLMQGSTLPRRSGA
RMCSLMYGSILPRRAGA

SEQ ID NO: 130850 - protein, 17 aa, Artificial Sequence
  Description of Artificial Sequence: Synthetic peptide
  Seed: RMCSLMQGSTLPRRSGA
RMCSLMYGSILPRRIGA

SEQ ID NO: 130851 - protein, 17 aa, Artificial Sequence
  Description of Artificial Sequence: Synthetic peptide
  Seed: RMCSLMQGSTLPRRSGA
RMCSLMYGSILPRRVGA

SEQ ID NO: 130852 - protein, 17 aa, Artificial Sequence
  Description of Artificial Sequence: Synthetic peptide
  Seed: RMCSLMQGSTLPRRSGA
RMCSLMYGSILSRRAGA

SEQ ID NO: 130853 - protein, 17 aa, Artificial Sequence
  Description of Artificial Sequence: Synthetic peptide
  Seed: RMCSLMQGSTLPRRSGA
RMCSLMYGSILSRRIGA

SEQ ID NO: 130854 - protein, 17 aa, Artificial Sequence
  Description of Artificial Sequence: Synthetic peptide
  Seed: RMCSLMQGSTLPRRSGA
RMCSLMYGSILSRRLGA

SEQ ID NO: 130855 - protein, 17 aa, Artificial Sequence
  Description of Artificial Sequence: Synthetic peptide
  Seed: RMCSLMQGSTLPRRSGA
RMCSLMYGSILSRRNGA

SEQ ID NO: 130856 - protein, 17 aa, Artificial Sequence
  Description of Artificial Sequence: Synthetic peptide
  Seed: RMCSLMQGSTLPRRSGA
RMCSLMYGSILSRRSGA

SEQ ID NO: 130857 - protein, 17 aa, Artificial Sequence
  Description of Artificial Sequence: Synthetic peptide
  Seed: RMCSLMQGSTLPRRSGA
RMCSLMYGSILSRRVGA

SEQ ID NO: 130858 - protein, 17 aa, Artificial Sequence
  Description of Artificial Sequence: Synthetic peptide
  Seed: RMCSLMQGSTLPRRSGA
RMCSLMYGSILTRRAGA

SEQ ID NO: 130859 - protein, 17 aa, Artificial Sequence
  Description of Artificial Sequence: Synthetic peptide
  Seed: RMCSLMQGSTLPRRSGA
RMCSLMYGSILTRRIGA

SEQ ID NO: 130860 - protein, 17 aa, Artificial Sequence
  Description of Artificial Sequence: Synthetic peptide
  Seed: RMCSLMQGSTLPRRSGA
RMCSLMYGSILTRRLGA

SEQ ID NO: 130861 - protein, 17 aa, Artificial Sequence
  Description of Artificial Sequence: Synthetic peptide
  Seed: RMCSLMQGSTLPRRSGA
RMCSLMYGSILTRRNGA

SEQ ID NO: 130862 - protein, 17 aa, Artificial Sequence
  Description of Artificial Sequence: Synthetic peptide
  Seed: RMCSLMQGSTLPRRSGA
RMCSLMYGSILTRRSGA

SEQ ID NO: 130863 - protein, 17 aa, Artificial Sequence
  Description of Artificial Sequence: Synthetic peptide
  Seed: RMCSLMQGSTLPRRSGA
RMCSLMYGSILTRRVGA

SEQ ID NO: 130864 - protein, 17 aa, Artificial Sequence
  Description of Artificial Sequence: Synthetic peptide
  Seed: RMCSLMQGSTLPRRSGA
RMCSLMYGSILVRRAGA

SEQ ID NO: 130865 - protein, 17 aa, Artificial Sequence
  Description of Artificial Sequence: Synthetic peptide
  Seed: RMCSLMQGSTLPRRSGA
RMCSLMYGSILVRRNGA

SEQ ID NO: 130866 - protein, 17 aa, Artificial Sequence
  Description of Artificial Sequence: Synthetic peptide
  Seed: RMCSLMQGSTLPRRSGA
RMCSLMYGSILVRRSGA

SEQ ID NO: 130867 - protein, 17 aa, Artificial Sequence
  Description of Artificial Sequence: Synthetic peptide
  Seed: RMCSLMQGSTLPRRSGA
RMCSLMYGSILVRRVGA

SEQ ID NO: 130868 - protein, 17 aa, Artificial Sequence
  Description of Artificial Sequence: Synthetic peptide
  Seed: RMCSLMQGSTLPRRSGA
RMCSLMYGSLLARRAGA

SEQ ID NO: 130869 - protein, 17 aa, Artificial Sequence
  Description of Artificial Sequence: Synthetic peptide
  Seed: RMCSLMQGSTLPRRSGA
RMCSLMYGSLLARRIGA

SEQ ID NO: 130870 - protein, 17 aa, Artificial Sequence
  Description of Artificial Sequence: Synthetic peptide
  Seed: RMCSLMQGSTLPRRSGA
RMCSLMYGSLLARRLGA

SEQ ID NO: 130871 - protein, 17 aa, Artificial Sequence
  Description of Artificial Sequence: Synthetic peptide
  Seed: RMCSLMQGSTLPRRSGA
RMCSLMYGSLLARRMGA

SEQ ID NO: 130872 - protein, 17 aa, Artificial Sequence
  Description of Artificial Sequence: Synthetic peptide
  Seed: RMCSLMQGSTLPRRSGA
RMCSLMYGSLLARRNGA

SEQ ID NO: 130873 - protein, 17 aa, Artificial Sequence
  Description of Artificial Sequence: Synthetic peptide
  Seed: RMCSLMQGSTLPRRSGA
RMCSLMYGSLLARRSGA

SEQ ID NO: 130874 - protein, 17 aa, Artificial Sequence
  Description of Artificial Sequence: Synthetic peptide
  Seed: RMCSLMQGSTLPRRSGA
RMCSLMYGSLLARRTGA

SEQ ID NO: 130875 - protein, 17 aa, Artificial Sequence
  Description of Artificial Sequence: Synthetic peptide
  Seed: RMCSLMQGSTLPRRSGA
RMCSLMYGSLLARRVGA

SEQ ID NO: 130876 - protein, 17 aa, Artificial Sequence
  Description of Artificial Sequence: Synthetic peptide
  Seed: RMCSLMQGSTLPRRSGA
RMCSLMYGSLLGRRAGA

SEQ ID NO: 130877 - protein, 17 aa, Artificial Sequence
  Description of Artificial Sequence: Synthetic peptide
  Seed: RMCSLMQGSTLPRRSGA
RMCSLMYGSLLGRRVGA

SEQ ID NO: 130878 - protein, 17 aa, Artificial Sequence
  Description of Artificial Sequence: Synthetic peptide
  Seed: RMCSLMQGSTLPRRSGA
RMCSLMYGSLLIRRAGA

SEQ ID NO: 130879 - protein, 17 aa, Artificial Sequence
  Description of Artificial Sequence: Synthetic peptide
  Seed: RMCSLMQGSTLPRRSGA
RMCSLMYGSLLPRRAGA

SEQ ID NO: 130880 - protein, 17 aa, Artificial Sequence
  Description of Artificial Sequence: Synthetic peptide
  Seed: RMCSLMQGSTLPRRSGA
RMCSLMYGSLLPRRIGA

SEQ ID NO: 130881 - protein, 17 aa, Artificial Sequence
  Description of Artificial Sequence: Synthetic peptide
  Seed: RMCSLMQGSTLPRRSGA
RMCSLMYGSLLPRRLGA

SEQ ID NO: 130882 - protein, 17 aa, Artificial Sequence
  Description of Artificial Sequence: Synthetic peptide
  Seed: RMCSLMQGSTLPRRSGA
RMCSLMYGSLLPRRMGA

SEQ ID NO: 130883 - protein, 17 aa, Artificial Sequence
  Description of Artificial Sequence: Synthetic peptide
  Seed: RMCSLMQGSTLPRRSGA
RMCSLMYGSLLPRRNGA

SEQ ID NO: 130884 - protein, 17 aa, Artificial Sequence
  Description of Artificial Sequence: Synthetic peptide
  Seed: RMCSLMQGSTLPRRSGA
RMCSLMYGSLLPRRSGA

SEQ ID NO: 130885 - protein, 17 aa, Artificial Sequence
  Description of Artificial Sequence: Synthetic peptide
  Seed: RMCSLMQGSTLPRRSGA
RMCSLMYGSLLPRRVGA

SEQ ID NO: 130886 - protein, 17 aa, Artificial Sequence
  Description of Artificial Sequence: Synthetic peptide
  Seed: RMCSLMQGSTLPRRSGA
RMCSLMYGSLLSRRAGA

SEQ ID NO: 130887 - protein, 17 aa, Artificial Sequence
  Description of Artificial Sequence: Synthetic peptide
  Seed: RMCSLMQGSTLPRRSGA
RMCSLMYGSLLSRRIGA

SEQ ID NO: 130888 - protein, 17 aa, Artificial Sequence
  Description of Artificial Sequence: Synthetic peptide
  Seed: RMCSLMQGSTLPRRSGA
RMCSLMYGSLLSRRLGA

SEQ ID NO: 130889 - protein, 17 aa, Artificial Sequence
  Description of Artificial Sequence: Synthetic peptide
  Seed: RMCSLMQGSTLPRRSGA
RMCSLMYGSLLSRRMGA

SEQ ID NO: 130890 - protein, 17 aa, Artificial Sequence
  Description of Artificial Sequence: Synthetic peptide
  Seed: RMCSLMQGSTLPRRSGA
RMCSLMYGSLLSRRNGA

SEQ ID NO: 130891 - protein, 17 aa, Artificial Sequence
  Description of Artificial Sequence: Synthetic peptide
  Seed: RMCSLMQGSTLPRRSGA
RMCSLMYGSLLSRRSGA

SEQ ID NO: 130892 - protein, 17 aa, Artificial Sequence
  Description of Artificial Sequence: Synthetic peptide
  Seed: RMCSLMQGSTLPRRSGA
RMCSLMYGSLLSRRTGA

SEQ ID NO: 130893 - protein, 17 aa, Artificial Sequence
  Description of Artificial Sequence: Synthetic peptide
  Seed: RMCSLMQGSTLPRRSGA
RMCSLMYGSLLSRRVGA

SEQ ID NO: 130894 - protein, 17 aa, Artificial Sequence
  Description of Artificial Sequence: Synthetic peptide
  Seed: RMCSLMQGSTLPRRSGA
RMCSLMYGSLLTRRAGA

SEQ ID NO: 130895 - protein, 17 aa, Artificial Sequence
  Description of Artificial Sequence: Synthetic peptide
  Seed: RMCSLMQGSTLPRRSGA
RMCSLMYGSLLTRRIGA

SEQ ID NO: 130896 - protein, 17 aa, Artificial Sequence
  Description of Artificial Sequence: Synthetic peptide
  Seed: RMCSLMQGSTLPRRSGA
RMCSLMYGSLLTRRLGA

SEQ ID NO: 130897 - protein, 17 aa, Artificial Sequence
  Description of Artificial Sequence: Synthetic peptide
  Seed: RMCSLMQGSTLPRRSGA
RMCSLMYGSLLTRRMGA

SEQ ID NO: 130898 - protein, 17 aa, Artificial Sequence
  Description of Artificial Sequence: Synthetic peptide
  Seed: RMCSLMQGSTLPRRSGA
RMCSLMYGSLLTRRNGA

SEQ ID NO: 130899 - protein, 17 aa, Artificial Sequence
  Description of Artificial Sequence: Synthetic peptide
  Seed: RMCSLMQGSTLPRRSGA
RMCSLMYGSLLTRRSGA

SEQ ID NO: 130900 - protein, 17 aa, Artificial Sequence
  Description of Artificial Sequence: Synthetic peptide
  Seed: RMCSLMQGSTLPRRSGA
RMCSLMYGSLLTRRTGA

SEQ ID NO: 130901 - protein, 17 aa, Artificial Sequence
  Description of Artificial Sequence: Synthetic peptide
  Seed: RMCSLMQGSTLPRRSGA
RMCSLMYGSLLTRRVGA

SEQ ID NO: 130902 - protein, 17 aa, Artificial Sequence
  Description of Artificial Sequence: Synthetic peptide
  Seed: RMCSLMQGSTLPRRSGA
RMCSLMYGSLLVRRAGA

SEQ ID NO: 130903 - protein, 17 aa, Artificial Sequence
  Description of Artificial Sequence: Synthetic peptide
  Seed: RMCSLMQGSTLPRRSGA
RMCSLMYGSLLVRRIGA

SEQ ID NO: 130904 - protein, 17 aa, Artificial Sequence
  Description of Artificial Sequence: Synthetic peptide
  Seed: RMCSLMQGSTLPRRSGA
RMCSLMYGSLLVRRLGA

SEQ ID NO: 130905 - protein, 17 aa, Artificial Sequence
  Description of Artificial Sequence: Synthetic peptide
  Seed: RMCSLMQGSTLPRRSGA
RMCSLMYGSLLVRRNGA

SEQ ID NO: 130906 - protein, 17 aa, Artificial Sequence
  Description of Artificial Sequence: Synthetic peptide
  Seed: RMCSLMQGSTLPRRSGA
RMCSLMYGSLLVRRSGA

SEQ ID NO: 130907 - protein, 17 aa, Artificial Sequence
  Description of Artificial Sequence: Synthetic peptide
  Seed: RMCSLMQGSTLPRRSGA
RMCSLMYGSLLVRRTGA

SEQ ID NO: 130908 - protein, 17 aa, Artificial Sequence
  Description of Artificial Sequence: Synthetic peptide
  Seed: RMCSLMQGSTLPRRSGA
RMCSLMYGSLLVRRVGA

SEQ ID NO: 130909 - protein, 17 aa, Artificial Sequence
  Description of Artificial Sequence: Synthetic peptide
  Seed: RMCSLMQGSTLPRRSGA
RMCSLMYGSMLARRAGA

SEQ ID NO: 130910 - protein, 17 aa, Artificial Sequence
  Description of Artificial Sequence: Synthetic peptide
  Seed: RMCSLMQGSTLPRRSGA
RMCSLMYGSMLARRGGA

SEQ ID NO: 130911 - protein, 17 aa, Artificial Sequence
  Description of Artificial Sequence: Synthetic peptide
  Seed: RMCSLMQGSTLPRRSGA
RMCSLMYGSMLARRIGA

SEQ ID NO: 130912 - protein, 17 aa, Artificial Sequence
  Description of Artificial Sequence: Synthetic peptide
  Seed: RMCSLMQGSTLPRRSGA
RMCSLMYGSMLARRLGA

SEQ ID NO: 130913 - protein, 17 aa, Artificial Sequence
  Description of Artificial Sequence: Synthetic peptide
  Seed: RMCSLMQGSTLPRRSGA
RMCSLMYGSMLARRMGA

SEQ ID NO: 130914 - protein, 17 aa, Artificial Sequence
  Description of Artificial Sequence: Synthetic peptide
  Seed: RMCSLMQGSTLPRRSGA
RMCSLMYGSMLARRNGA

SEQ ID NO: 130915 - protein, 17 aa, Artificial Sequence
  Description of Artificial Sequence: Synthetic peptide
  Seed: RMCSLMQGSTLPRRSGA
RMCSLMYGSMLARRSGA

SEQ ID NO: 130916 - protein, 17 aa, Artificial Sequence
  Description of Artificial Sequence: Synthetic peptide
  Seed: RMCSLMQGSTLPRRSGA
RMCSLMYGSMLARRTGA

SEQ ID NO: 130917 - protein, 17 aa, Artificial Sequence
  Description of Artificial Sequence: Synthetic peptide
  Seed: RMCSLMQGSTLPRRSGA
RMCSLMYGSMLARRVGA

SEQ ID NO: 130918 - protein, 17 aa, Artificial Sequence
  Description of Artificial Sequence: Synthetic peptide
  Seed: RMCSLMQGSTLPRRSGA
RMCSLMYGSMLGRRAGA

SEQ ID NO: 130919 - protein, 17 aa, Artificial Sequence
  Description of Artificial Sequence: Synthetic peptide
  Seed: RMCSLMQGSTLPRRSGA
RMCSLMYGSMLGRRIGA

SEQ ID NO: 130920 - protein, 17 aa, Artificial Sequence
  Description of Artificial Sequence: Synthetic peptide
  Seed: RMCSLMQGSTLPRRSGA
RMCSLMYGSMLGRRLGA

SEQ ID NO: 130921 - protein, 17 aa, Artificial Sequence
  Description of Artificial Sequence: Synthetic peptide
  Seed: RMCSLMQGSTLPRRSGA
RMCSLMYGSMLGRRVGA

SEQ ID NO: 130922 - protein, 17 aa, Artificial Sequence
  Description of Artificial Sequence: Synthetic peptide
  Seed: RMCSLMQGSTLPRRSGA
RMCSLMYGSMLIRRAGA

SEQ ID NO: 130923 - protein, 17 aa, Artificial Sequence
  Description of Artificial Sequence: Synthetic peptide
  Seed: RMCSLMQGSTLPRRSGA
RMCSLMYGSMLIRRIGA

SEQ ID NO: 130924 - protein, 17 aa, Artificial Sequence
  Description of Artificial Sequence: Synthetic peptide
  Seed: RMCSLMQGSTLPRRSGA
RMCSLMYGSMLIRRNGA

SEQ ID NO: 130925 - protein, 17 aa, Artificial Sequence
  Description of Artificial Sequence: Synthetic peptide
  Seed: RMCSLMQGSTLPRRSGA
RMCSLMYGSMLIRRSGA

SEQ ID NO: 130926 - protein, 17 aa, Artificial Sequence
  Description of Artificial Sequence: Synthetic peptide
  Seed: RMCSLMQGSTLPRRSGA
RMCSLMYGSMLIRRVGA

SEQ ID NO: 130927 - protein, 17 aa, Artificial Sequence
  Description of Artificial Sequence: Synthetic peptide
  Seed: RMCSLMQGSTLPRRSGA
RMCSLMYGSMLNRRAGA

SEQ ID NO: 130928 - protein, 17 aa, Artificial Sequence
  Description of Artificial Sequence: Synthetic peptide
  Seed: RMCSLMQGSTLPRRSGA
RMCSLMYGSMLPRRAGA

SEQ ID NO: 130929 - protein, 17 aa, Artificial Sequence
  Description of Artificial Sequence: Synthetic peptide
  Seed: RMCSLMQGSTLPRRSGA
RMCSLMYGSMLPRRIGA

SEQ ID NO: 130930 - protein, 17 aa, Artificial Sequence
  Description of Artificial Sequence: Synthetic peptide
  Seed: RMCSLMQGSTLPRRSGA
RMCSLMYGSMLPRRLGA

SEQ ID NO: 130931 - protein, 17 aa, Artificial Sequence
  Description of Artificial Sequence: Synthetic peptide
  Seed: RMCSLMQGSTLPRRSGA
RMCSLMYGSMLPRRMGA

SEQ ID NO: 130932 - protein, 17 aa, Artificial Sequence
  Description of Artificial Sequence: Synthetic peptide
  Seed: RMCSLMQGSTLPRRSGA
RMCSLMYGSMLPRRNGA

SEQ ID NO: 130933 - protein, 17 aa, Artificial Sequence
  Description of Artificial Sequence: Synthetic peptide
  Seed: RMCSLMQGSTLPRRSGA
RMCSLMYGSMLPRRSGA

SEQ ID NO: 130934 - protein, 17 aa, Artificial Sequence
  Description of Artificial Sequence: Synthetic peptide
  Seed: RMCSLMQGSTLPRRSGA
RMCSLMYGSMLPRRTGA

SEQ ID NO: 130935 - protein, 17 aa, Artificial Sequence
  Description of Artificial Sequence: Synthetic peptide
  Seed: RMCSLMQGSTLPRRSGA
RMCSLMYGSMLPRRVGA

SEQ ID NO: 130936 - protein, 17 aa, Artificial Sequence
  Description of Artificial Sequence: Synthetic peptide
  Seed: RMCSLMQGSTLPRRSGA
RMCSLMYGSMLSRRAGA

SEQ ID NO: 130937 - protein, 17 aa, Artificial Sequence
  Description of Artificial Sequence: Synthetic peptide
  Seed: RMCSLMQGSTLPRRSGA
RMCSLMYGSMLSRRIGA

SEQ ID NO: 130938 - protein, 17 aa, Artificial Sequence
  Description of Artificial Sequence: Synthetic peptide
  Seed: RMCSLMQGSTLPRRSGA
RMCSLMYGSMLSRRLGA

SEQ ID NO: 130939 - protein, 17 aa, Artificial Sequence
  Description of Artificial Sequence: Synthetic peptide
  Seed: RMCSLMQGSTLPRRSGA
RMCSLMYGSMLSRRMGA

SEQ ID NO: 130940 - protein, 17 aa, Artificial Sequence
  Description of Artificial Sequence: Synthetic peptide
  Seed: RMCSLMQGSTLPRRSGA
RMCSLMYGSMLSRRNGA

SEQ ID NO: 130941 - protein, 17 aa, Artificial Sequence
  Description of Artificial Sequence: Synthetic peptide
  Seed: RMCSLMQGSTLPRRSGA
RMCSLMYGSMLSRRSGA

SEQ ID NO: 130942 - protein, 17 aa, Artificial Sequence
  Description of Artificial Sequence: Synthetic peptide
  Seed: RMCSLMQGSTLPRRSGA
RMCSLMYGSMLSRRTGA

SEQ ID NO: 130943 - protein, 17 aa, Artificial Sequence
  Description of Artificial Sequence: Synthetic peptide
  Seed: RMCSLMQGSTLPRRSGA
RMCSLMYGSMLSRRVGA

SEQ ID NO: 130944 - protein, 17 aa, Artificial Sequence
  Description of Artificial Sequence: Synthetic peptide
  Seed: RMCSLMQGSTLPRRSGA
RMCSLMYGSMLTRRAGA

SEQ ID NO: 130945 - protein, 17 aa, Artificial Sequence
  Description of Artificial Sequence: Synthetic peptide
  Seed: RMCSLMQGSTLPRRSGA
RMCSLMYGSMLTRRIGA

SEQ ID NO: 130946 - protein, 17 aa, Artificial Sequence
  Description of Artificial Sequence: Synthetic peptide
  Seed: RMCSLMQGSTLPRRSGA
RMCSLMYGSMLTRRLGA

SEQ ID NO: 130947 - protein, 17 aa, Artificial Sequence
  Description of Artificial Sequence: Synthetic peptide
  Seed: RMCSLMQGSTLPRRSGA
RMCSLMYGSMLTRRMGA

SEQ ID NO: 130948 - protein, 17 aa, Artificial Sequence
  Description of Artificial Sequence: Synthetic peptide
  Seed: RMCSLMQGSTLPRRSGA
RMCSLMYGSMLTRRNGA

SEQ ID NO: 130949 - protein, 17 aa, Artificial Sequence
  Description of Artificial Sequence: Synthetic peptide
  Seed: RMCSLMQGSTLPRRSGA
RMCSLMYGSMLTRRSGA

SEQ ID NO: 130950 - protein, 17 aa, Artificial Sequence
  Description of Artificial Sequence: Synthetic peptide
  Seed: RMCSLMQGSTLPRRSGA
RMCSLMYGSMLTRRTGA

SEQ ID NO: 130951 - protein, 17 aa, Artificial Sequence
  Description of Artificial Sequence: Synthetic peptide
  Seed: RMCSLMQGSTLPRRSGA
RMCSLMYGSMLTRRVGA

SEQ ID NO: 130952 - protein, 17 aa, Artificial Sequence
  Description of Artificial Sequence: Synthetic peptide
  Seed: RMCSLMQGSTLPRRSGA
RMCSLMYGSMLVRRAGA

SEQ ID NO: 130953 - protein, 17 aa, Artificial Sequence
  Description of Artificial Sequence: Synthetic peptide
  Seed: RMCSLMQGSTLPRRSGA
RMCSLMYGSMLVRRIGA

SEQ ID NO: 130954 - protein, 17 aa, Artificial Sequence
  Description of Artificial Sequence: Synthetic peptide
  Seed: RMCSLMQGSTLPRRSGA
RMCSLMYGSMLVRRLGA

SEQ ID NO: 130955 - protein, 17 aa, Artificial Sequence
  Description of Artificial Sequence: Synthetic peptide
  Seed: RMCSLMQGSTLPRRSGA
RMCSLMYGSMLVRRMGA

SEQ ID NO: 130956 - protein, 17 aa, Artificial Sequence
  Description of Artificial Sequence: Synthetic peptide
  Seed: RMCSLMQGSTLPRRSGA
RMCSLMYGSMLVRRNGA

SEQ ID NO: 130957 - protein, 17 aa, Artificial Sequence
  Description of Artificial Sequence: Synthetic peptide
  Seed: RMCSLMQGSTLPRRSGA
RMCSLMYGSMLVRRSGA

SEQ ID NO: 130958 - protein, 17 aa, Artificial Sequence
  Description of Artificial Sequence: Synthetic peptide
  Seed: RMCSLMQGSTLPRRSGA
RMCSLMYGSMLVRRTGA

SEQ ID NO: 130959 - protein, 17 aa, Artificial Sequence
  Description of Artificial Sequence: Synthetic peptide
  Seed: RMCSLMQGSTLPRRSGA
RMCSLMYGSMLVRRVGA

SEQ ID NO: 130960 - protein, 17 aa, Artificial Sequence
  Description of Artificial Sequence: Synthetic peptide
  Seed: RMCSLMQGSTLPRRSGA
RMCSLMYGSVLARRAGA

SEQ ID NO: 130961 - protein, 17 aa, Artificial Sequence
  Description of Artificial Sequence: Synthetic peptide
  Seed: RMCSLMQGSTLPRRSGA
RMCSLMYGSVLARRSGA

SEQ ID NO: 130962 - protein, 17 aa, Artificial Sequence
  Description of Artificial Sequence: Synthetic peptide
  Seed: RMCSLMQGSTLPRRSGA
RMCSLMYGSVLARRVGA

SEQ ID NO: 130963 - protein, 17 aa, Artificial Sequence
  Description of Artificial Sequence: Synthetic peptide
  Seed: RMCSLMQGSTLPRRSGA
RMCSLMYGSVLSRRAGA

SEQ ID NO: 130964 - protein, 18 aa, Artificial Sequence
  Description of Artificial Sequence: Synthetic peptide
  Seed: RMCSLMQGSTLPRRSGAA
RMFSLAQASTLPRRSGAA

SEQ ID NO: 130965 - protein, 18 aa, Artificial Sequence
  Description of Artificial Sequence: Synthetic peptide
  Seed: RMCSLMQGSTLPRRSGAA
RMFSLIQASTAPRRSGAA

SEQ ID NO: 130966 - protein, 18 aa, Artificial Sequence
  Description of Artificial Sequence: Synthetic peptide
  Seed: RMCSLMQGSTLPRRSGAA
RMFSLIQASTIPRRSGAA

SEQ ID NO: 130967 - protein, 18 aa, Artificial Sequence
  Description of Artificial Sequence: Synthetic peptide
  Seed: RMCSLMQGSTLPRRSGAA
RMFSLIQASTLPRRSGAA

SEQ ID NO: 130968 - protein, 18 aa, Artificial Sequence
  Description of Artificial Sequence: Synthetic peptide
  Seed: RMCSLMQGSTLPRRSGAA
RMFSLIQASTVPRRSGAA

SEQ ID NO: 130969 - protein, 18 aa, Artificial Sequence
  Description of Artificial Sequence: Synthetic peptide
  Seed: RMCSLMQGSTLPRRSGAA
RMFSLIQGSTAPRRSGAA

SEQ ID NO: 130970 - protein, 18 aa, Artificial Sequence
  Description of Artificial Sequence: Synthetic peptide
  Seed: RMCSLMQGSTLPRRSGAA
RMFSLIQGSTIPRRSGAA

SEQ ID NO: 130971 - protein, 18 aa, Artificial Sequence
  Description of Artificial Sequence: Synthetic peptide
  Seed: RMCSLMQGSTLPRRSGAA
RMFSLIQGSTLPRRSGAA

SEQ ID NO: 130972 - protein, 18 aa, Artificial Sequence
  Description of Artificial Sequence: Synthetic peptide
  Seed: RMCSLMQGSTLPRRSGAA
RMFSLIQGSTVPRRSGAA

SEQ ID NO: 130973 - protein, 18 aa, Artificial Sequence
  Description of Artificial Sequence: Synthetic peptide
  Seed: RMCSLMQGSTLPRRSGAA
RMFSLIQSSTVPRRSGAA

SEQ ID NO: 130974 - protein, 18 aa, Artificial Sequence
  Description of Artificial Sequence: Synthetic peptide
  Seed: RMCSLMQGSTLPRRSGAA
RMFSLLQASTAPRRSGAA

SEQ ID NO: 130975 - protein, 18 aa, Artificial Sequence
  Description of Artificial Sequence: Synthetic peptide
  Seed: RMCSLMQGSTLPRRSGAA
RMFSLLQASTIPRRSGAA

SEQ ID NO: 130976 - protein, 18 aa, Artificial Sequence
  Description of Artificial Sequence: Synthetic peptide
  Seed: RMCSLMQGSTLPRRSGAA
RMFSLLQASTLPRRSGAA

SEQ ID NO: 130977 - protein, 18 aa, Artificial Sequence
  Description of Artificial Sequence: Synthetic peptide
  Seed: RMCSLMQGSTLPRRSGAA
RMFSLLQASTMPRRSGAA

SEQ ID NO: 130978 - protein, 18 aa, Artificial Sequence
  Description of Artificial Sequence: Synthetic peptide
  Seed: RMCSLMQGSTLPRRSGAA
RMFSLLQASTTPRRSGAA

SEQ ID NO: 130979 - protein, 18 aa, Artificial Sequence
  Description of Artificial Sequence: Synthetic peptide
  Seed: RMCSLMQGSTLPRRSGAA
RMFSLLQASTVPRRSGAA

SEQ ID NO: 130980 - protein, 18 aa, Artificial Sequence
  Description of Artificial Sequence: Synthetic peptide
  Seed: RMCSLMQGSTLPRRSGAA
RMFSLLQGSTAPRRSGAA

SEQ ID NO: 130981 - protein, 18 aa, Artificial Sequence
  Description of Artificial Sequence: Synthetic peptide
  Seed: RMCSLMQGSTLPRRSGAA
RMFSLLQGSTIPRRSGAA

SEQ ID NO: 130982 - protein, 18 aa, Artificial Sequence
  Description of Artificial Sequence: Synthetic peptide
  Seed: RMCSLMQGSTLPRRSGAA
RMFSLLQGSTLPRRSGAA

SEQ ID NO: 130983 - protein, 18 aa, Artificial Sequence
  Description of Artificial Sequence: Synthetic peptide
  Seed: RMCSLMQGSTLPRRSGAA
RMFSLLQGSTMPRRSGAA

SEQ ID NO: 130984 - protein, 18 aa, Artificial Sequence
  Description of Artificial Sequence: Synthetic peptide
  Seed: RMCSLMQGSTLPRRSGAA
RMFSLLQGSTTPRRSGAA

SEQ ID NO: 130985 - protein, 18 aa, Artificial Sequence
  Description of Artificial Sequence: Synthetic peptide
  Seed: RMCSLMQGSTLPRRSGAA
RMFSLLQGSTVPRRSGAA

SEQ ID NO: 130986 - protein, 18 aa, Artificial Sequence
  Description of Artificial Sequence: Synthetic peptide
  Seed: RMCSLMQGSTLPRRSGAA
RMFSLLQPSTAPRRSGAA

SEQ ID NO: 130987 - protein, 18 aa, Artificial Sequence
  Description of Artificial Sequence: Synthetic peptide
  Seed: RMCSLMQGSTLPRRSGAA
RMFSLLQPSTIPRRSGAA

SEQ ID NO: 130988 - protein, 18 aa, Artificial Sequence
  Description of Artificial Sequence: Synthetic peptide
  Seed: RMCSLMQGSTLPRRSGAA
RMFSLLQPSTLPRRSGAA

SEQ ID NO: 130989 - protein, 18 aa, Artificial Sequence
  Description of Artificial Sequence: Synthetic peptide
  Seed: RMCSLMQGSTLPRRSGAA
RMFSLLQPSTVPRRSGAA

SEQ ID NO: 130990 - protein, 18 aa, Artificial Sequence
  Description of Artificial Sequence: Synthetic peptide
  Seed: RMCSLMQGSTLPRRSGAA
RMFSLLQSSTAPRRSGAA

SEQ ID NO: 130991 - protein, 18 aa, Artificial Sequence
  Description of Artificial Sequence: Synthetic peptide
  Seed: RMCSLMQGSTLPRRSGAA
RMFSLLQSSTIPRRSGAA

SEQ ID NO: 130992 - protein, 18 aa, Artificial Sequence
  Description of Artificial Sequence: Synthetic peptide
  Seed: RMCSLMQGSTLPRRSGAA
RMFSLLQSSTLPRRSGAA

SEQ ID NO: 130993 - protein, 18 aa, Artificial Sequence
  Description of Artificial Sequence: Synthetic peptide
  Seed: RMCSLMQGSTLPRRSGAA
RMFSLLQSSTTPRRSGAA

SEQ ID NO: 130994 - protein, 18 aa, Artificial Sequence
  Description of Artificial Sequence: Synthetic peptide
  Seed: RMCSLMQGSTLPRRSGAA
RMFSLLQSSTVPRRSGAA

SEQ ID NO: 130995 - protein, 18 aa, Artificial Sequence
  Description of Artificial Sequence: Synthetic peptide
  Seed: RMCSLMQGSTLPRRSGAA
RMFSLLQTSTVPRRSGAA

SEQ ID NO: 130996 - protein, 18 aa, Artificial Sequence
  Description of Artificial Sequence: Synthetic peptide
  Seed: RMCSLMQGSTLPRRSGAA
RMFSLMQASTAPRRSGAA

SEQ ID NO: 130997 - protein, 18 aa, Artificial Sequence
  Description of Artificial Sequence: Synthetic peptide
  Seed: RMCSLMQGSTLPRRSGAA
RMFSLMQASTIPRRSGAA

SEQ ID NO: 130998 - protein, 18 aa, Artificial Sequence
  Description of Artificial Sequence: Synthetic peptide
  Seed: RMCSLMQGSTLPRRSGAA
RMFSLMQASTLPRRSGAA

SEQ ID NO: 130999 - protein, 18 aa, Artificial Sequence
  Description of Artificial Sequence: Synthetic peptide
  Seed: RMCSLMQGSTLPRRSGAA
RMFSLMQASTMPRRSGAA

SEQ ID NO: 131000 - protein, 18 aa, Artificial Sequence
  Description of Artificial Sequence: Synthetic peptide
  Seed: RMCSLMQGSTLPRRSGAA
RMFSLMQASTTPRRSGAA

SEQ ID NO: 131001 - protein, 18 aa, Artificial Sequence
  Description of Artificial Sequence: Synthetic peptide
  Seed: RMCSLMQGSTLPRRSGAA
RMFSLMQASTVPRRSGAA

SEQ ID NO: 131002 - protein, 18 aa, Artificial Sequence
  Description of Artificial Sequence: Synthetic peptide
  Seed: RMCSLMQGSTLPRRSGAA
RMFSLMQGSTAPRRSGAA

SEQ ID NO: 131003 - protein, 18 aa, Artificial Sequence
  Description of Artificial Sequence: Synthetic peptide
  Seed: RMCSLMQGSTLPRRSGAA
RMFSLMQGSTIPRRSGAA

SEQ ID NO: 131004 - protein, 18 aa, Artificial Sequence
  Description of Artificial Sequence: Synthetic peptide
  Seed: RMCSLMQGSTLPRRSGAA
RMFSLMQGSTLPRRSGAA

SEQ ID NO: 131005 - protein, 18 aa, Artificial Sequence
  Description of Artificial Sequence: Synthetic peptide
  Seed: RMCSLMQGSTLPRRSGAA
RMFSLMQGSTMPRRSGAA

SEQ ID NO: 131006 - protein, 18 aa, Artificial Sequence
  Description of Artificial Sequence: Synthetic peptide
  Seed: RMCSLMQGSTLPRRSGAA
RMFSLMQGSTTPRRSGAA

SEQ ID NO: 131007 - protein, 18 aa, Artificial Sequence
  Description of Artificial Sequence: Synthetic peptide
  Seed: RMCSLMQGSTLPRRSGAA
RMFSLMQGSTVPRRSGAA

SEQ ID NO: 131008 - protein, 18 aa, Artificial Sequence
  Description of Artificial Sequence: Synthetic peptide
  Seed: RMCSLMQGSTLPRRSGAA
RMFSLMQPSTAPRRSGAA

SEQ ID NO: 131009 - protein, 18 aa, Artificial Sequence
  Description of Artificial Sequence: Synthetic peptide
  Seed: RMCSLMQGSTLPRRSGAA
RMFSLMQPSTIPRRSGAA

SEQ ID NO: 131010 - protein, 18 aa, Artificial Sequence
  Description of Artificial Sequence: Synthetic peptide
  Seed: RMCSLMQGSTLPRRSGAA
RMFSLMQPSTLPRRSGAA

SEQ ID NO: 131011 - protein, 18 aa, Artificial Sequence
  Description of Artificial Sequence: Synthetic peptide
  Seed: RMCSLMQGSTLPRRSGAA
RMFSLMQPSTVPRRSGAA

SEQ ID NO: 131012 - protein, 18 aa, Artificial Sequence
  Description of Artificial Sequence: Synthetic peptide
  Seed: RMCSLMQGSTLPRRSGAA
RMFSLMQSSTAPRRSGAA

SEQ ID NO: 131013 - protein, 18 aa, Artificial Sequence
  Description of Artificial Sequence: Synthetic peptide
  Seed: RMCSLMQGSTLPRRSGAA
RMFSLMQSSTIPRRSGAA

SEQ ID NO: 131014 - protein, 18 aa, Artificial Sequence
  Description of Artificial Sequence: Synthetic peptide
  Seed: RMCSLMQGSTLPRRSGAA
RMFSLMQSSTLPRRSGAA

SEQ ID NO: 131015 - protein, 18 aa, Artificial Sequence
  Description of Artificial Sequence: Synthetic peptide
  Seed: RMCSLMQGSTLPRRSGAA
RMFSLMQSSTVPRRSGAA

SEQ ID NO: 131016 - protein, 18 aa, Artificial Sequence
  Description of Artificial Sequence: Synthetic peptide
  Seed: RMCSLMQGSTLPRRSGAA
RMYSLIQASTLPRRSGAA

SEQ ID NO: 131017 - protein, 18 aa, Artificial Sequence
  Description of Artificial Sequence: Synthetic peptide
  Seed: RMCSLMQGSTLPRRSGAA
RMYSLIQASTVPRRSGAA

SEQ ID NO: 131018 - protein, 18 aa, Artificial Sequence
  Description of Artificial Sequence: Synthetic peptide
  Seed: RMCSLMQGSTLPRRSGAA
RMYSLLQASTAPRRSGAA

SEQ ID NO: 131019 - protein, 18 aa, Artificial Sequence
  Description of Artificial Sequence: Synthetic peptide
  Seed: RMCSLMQGSTLPRRSGAA
RMYSLLQASTIPRRSGAA

SEQ ID NO: 131020 - protein, 18 aa, Artificial Sequence
  Description of Artificial Sequence: Synthetic peptide
  Seed: RMCSLMQGSTLPRRSGAA
RMYSLLQASTLPRRSGAA

SEQ ID NO: 131021 - protein, 18 aa, Artificial Sequence
  Description of Artificial Sequence: Synthetic peptide
  Seed: RMCSLMQGSTLPRRSGAA
RMYSLLQASTVPRRSGAA

SEQ ID NO: 131022 - protein, 18 aa, Artificial Sequence
  Description of Artificial Sequence: Synthetic peptide
  Seed: RMCSLMQGSTLPRRSGAA
RMYSLLQGSTAPRRSGAA

SEQ ID NO: 131023 - protein, 18 aa, Artificial Sequence
  Description of Artificial Sequence: Synthetic peptide
  Seed: RMCSLMQGSTLPRRSGAA
RMYSLLQGSTIPRRSGAA

SEQ ID NO: 131024 - protein, 18 aa, Artificial Sequence
  Description of Artificial Sequence: Synthetic peptide
  Seed: RMCSLMQGSTLPRRSGAA
RMYSLLQGSTLPRRSGAA

SEQ ID NO: 131025 - protein, 18 aa, Artificial Sequence
  Description of Artificial Sequence: Synthetic peptide
  Seed: RMCSLMQGSTLPRRSGAA
RMYSLLQGSTVPRRSGAA

SEQ ID NO: 131026 - protein, 18 aa, Artificial Sequence
  Description of Artificial Sequence: Synthetic peptide
  Seed: RMCSLMQGSTLPRRSGAA
RMYSLLQPSTLPRRSGAA

SEQ ID NO: 131027 - protein, 18 aa, Artificial Sequence
  Description of Artificial Sequence: Synthetic peptide
  Seed: RMCSLMQGSTLPRRSGAA
RMYSLLQPSTVPRRSGAA

SEQ ID NO: 131028 - protein, 18 aa, Artificial Sequence
  Description of Artificial Sequence: Synthetic peptide
  Seed: RMCSLMQGSTLPRRSGAA
RMYSLLQSSTAPRRSGAA

SEQ ID NO: 131029 - protein, 18 aa, Artificial Sequence
  Description of Artificial Sequence: Synthetic peptide
  Seed: RMCSLMQGSTLPRRSGAA
RMYSLLQSSTIPRRSGAA

SEQ ID NO: 131030 - protein, 18 aa, Artificial Sequence
  Description of Artificial Sequence: Synthetic peptide
  Seed: RMCSLMQGSTLPRRSGAA
RMYSLLQSSTLPRRSGAA

SEQ ID NO: 131031 - protein, 18 aa, Artificial Sequence
  Description of Artificial Sequence: Synthetic peptide
  Seed: RMCSLMQGSTLPRRSGAA
RMYSLLQSSTVPRRSGAA

SEQ ID NO: 131032 - protein, 18 aa, Artificial Sequence
  Description of Artificial Sequence: Synthetic peptide
  Seed: RMCSLMQGSTLPRRSGAA
RMYSLMQASTAPRRSGAA

SEQ ID NO: 131033 - protein, 18 aa, Artificial Sequence
  Description of Artificial Sequence: Synthetic peptide
  Seed: RMCSLMQGSTLPRRSGAA
RMYSLMQASTIPRRSGAA

SEQ ID NO: 131034 - protein, 18 aa, Artificial Sequence
  Description of Artificial Sequence: Synthetic peptide
  Seed: RMCSLMQGSTLPRRSGAA
RMYSLMQASTLPRRSGAA

SEQ ID NO: 131035 - protein, 18 aa, Artificial Sequence
  Description of Artificial Sequence: Synthetic peptide
  Seed: RMCSLMQGSTLPRRSGAA
RMYSLMQASTVPRRSGAA

SEQ ID NO: 131036 - protein, 18 aa, Artificial Sequence
  Description of Artificial Sequence: Synthetic peptide
  Seed: RMCSLMQGSTLPRRSGAA
RMYSLMQGSTAPRRSGAA

SEQ ID NO: 131037 - protein, 18 aa, Artificial Sequence
  Description of Artificial Sequence: Synthetic peptide
  Seed: RMCSLMQGSTLPRRSGAA
RMYSLMQGSTIPRRSGAA

SEQ ID NO: 131038 - protein, 18 aa, Artificial Sequence
  Description of Artificial Sequence: Synthetic peptide
  Seed: RMCSLMQGSTLPRRSGAA
RMYSLMQGSTLPRRSGAA

SEQ ID NO: 131039 - protein, 18 aa, Artificial Sequence
  Description of Artificial Sequence: Synthetic peptide
  Seed: RMCSLMQGSTLPRRSGAA
RMYSLMQGSTVPRRSGAA

SEQ ID NO: 131040 - protein, 18 aa, Artificial Sequence
  Description of Artificial Sequence: Synthetic peptide
  Seed: RMCSLMQGSTLPRRSGAA
RMYSLMQSSTIPRRSGAA

SEQ ID NO: 131041 - protein, 18 aa, Artificial Sequence
  Description of Artificial Sequence: Synthetic peptide
  Seed: RMCSLMQGSTLPRRSGAA
RMYSLMQSSTLPRRSGAA

SEQ ID NO: 131042 - protein, 18 aa, Artificial Sequence
  Description of Artificial Sequence: Synthetic peptide
  Seed: RMCSLMQGSTLPRRSGAA
RMYSLMQSSTVPRRSGAA

SEQ ID NO: 131043 - protein, 19 aa, Artificial Sequence
  Description of Artificial Sequence: Synthetic peptide
  Seed: RMCSLMQGSTLPRRSGAAG
RMFSLAQASTAPRRSGAAG

SEQ ID NO: 131044 - protein, 19 aa, Artificial Sequence
  Description of Artificial Sequence: Synthetic peptide
  Seed: RMCSLMQGSTLPRRSGAAG
RMFSLAQASTIPRRSGAAG

SEQ ID NO: 131045 - protein, 19 aa, Artificial Sequence
  Description of Artificial Sequence: Synthetic peptide
  Seed: RMCSLMQGSTLPRRSGAAG
RMFSLAQASTLPRRSGAAG

SEQ ID NO: 131046 - protein, 19 aa, Artificial Sequence
  Description of Artificial Sequence: Synthetic peptide
  Seed: RMCSLMQGSTLPRRSGAAG
RMFSLAQASTMPRRSGAAG

SEQ ID NO: 131047 - protein, 19 aa, Artificial Sequence
  Description of Artificial Sequence: Synthetic peptide
  Seed: RMCSLMQGSTLPRRSGAAG
RMFSLAQASTSPRRSGAAG

SEQ ID NO: 131048 - protein, 19 aa, Artificial Sequence
  Description of Artificial Sequence: Synthetic peptide
  Seed: RMCSLMQGSTLPRRSGAAG
RMFSLAQASTTPRRSGAAG

SEQ ID NO: 131049 - protein, 19 aa, Artificial Sequence
  Description of Artificial Sequence: Synthetic peptide
  Seed: RMCSLMQGSTLPRRSGAAG
RMFSLAQASTVPRRSGAAG

SEQ ID NO: 131050 - protein, 19 aa, Artificial Sequence
  Description of Artificial Sequence: Synthetic peptide
  Seed: RMCSLMQGSTLPRRSGAAG
RMFSLAQGSTAPRRSGAAG

SEQ ID NO: 131051 - protein, 19 aa, Artificial Sequence
  Description of Artificial Sequence: Synthetic peptide
  Seed: RMCSLMQGSTLPRRSGAAG
RMFSLAQGSTIPRRSGAAG

SEQ ID NO: 131052 - protein, 19 aa, Artificial Sequence
  Description of Artificial Sequence: Synthetic peptide
  Seed: RMCSLMQGSTLPRRSGAAG
RMFSLAQGSTLPRRSGAAG

SEQ ID NO: 131053 - protein, 19 aa, Artificial Sequence
  Description of Artificial Sequence: Synthetic peptide
  Seed: RMCSLMQGSTLPRRSGAAG
RMFSLAQGSTMPRRSGAAG

SEQ ID NO: 131054 - protein, 19 aa, Artificial Sequence
  Description of Artificial Sequence: Synthetic peptide
  Seed: RMCSLMQGSTLPRRSGAAG
RMFSLAQGSTVPRRSGAAG

SEQ ID NO: 131055 - protein, 19 aa, Artificial Sequence
  Description of Artificial Sequence: Synthetic peptide
  Seed: RMCSLMQGSTLPRRSGAAG
RMFSLAQPSTAPRRSGAAG

SEQ ID NO: 131056 - protein, 19 aa, Artificial Sequence
  Description of Artificial Sequence: Synthetic peptide
  Seed: RMCSLMQGSTLPRRSGAAG
RMFSLAQPSTIPRRSGAAG

SEQ ID NO: 131057 - protein, 19 aa, Artificial Sequence
  Description of Artificial Sequence: Synthetic peptide
  Seed: RMCSLMQGSTLPRRSGAAG
RMFSLAQPSTLPRRSGAAG

SEQ ID NO: 131058 - protein, 19 aa, Artificial Sequence
  Description of Artificial Sequence: Synthetic peptide
  Seed: RMCSLMQGSTLPRRSGAAG
RMFSLAQPSTVPRRSGAAG

SEQ ID NO: 131059 - protein, 19 aa, Artificial Sequence
  Description of Artificial Sequence: Synthetic peptide
  Seed: RMCSLMQGSTLPRRSGAAG
RMFSLAQSSTAPRRSGAAG

SEQ ID NO: 131060 - protein, 19 aa, Artificial Sequence
  Description of Artificial Sequence: Synthetic peptide
  Seed: RMCSLMQGSTLPRRSGAAG
RMFSLAQSSTIPRRSGAAG

SEQ ID NO: 131061 - protein, 19 aa, Artificial Sequence
  Description of Artificial Sequence: Synthetic peptide
  Seed: RMCSLMQGSTLPRRSGAAG
RMFSLAQSSTLPRRSGAAG

SEQ ID NO: 131062 - protein, 19 aa, Artificial Sequence
  Description of Artificial Sequence: Synthetic peptide
  Seed: RMCSLMQGSTLPRRSGAAG
RMFSLAQSSTVPRRSGAAG

SEQ ID NO: 131063 - protein, 19 aa, Artificial Sequence
  Description of Artificial Sequence: Synthetic peptide
  Seed: RMCSLMQGSTLPRRSGAAG
RMFSLEQASTIPRRSGAAG

SEQ ID NO: 131064 - protein, 19 aa, Artificial Sequence
  Description of Artificial Sequence: Synthetic peptide
  Seed: RMCSLMQGSTLPRRSGAAG
RMFSLEQASTLPRRSGAAG

SEQ ID NO: 131065 - protein, 19 aa, Artificial Sequence
  Description of Artificial Sequence: Synthetic peptide
  Seed: RMCSLMQGSTLPRRSGAAG
RMFSLEQASTVPRRSGAAG

SEQ ID NO: 131066 - protein, 19 aa, Artificial Sequence
  Description of Artificial Sequence: Synthetic peptide
  Seed: RMCSLMQGSTLPRRSGAAG
RMFSLFQASTVPRRSGAAG

SEQ ID NO: 131067 - protein, 19 aa, Artificial Sequence
  Description of Artificial Sequence: Synthetic peptide
  Seed: RMCSLMQGSTLPRRSGAAG
RMFSLGQASTIPRRSGAAG

SEQ ID NO: 131068 - protein, 19 aa, Artificial Sequence
  Description of Artificial Sequence: Synthetic peptide
  Seed: RMCSLMQGSTLPRRSGAAG
RMFSLGQASTLPRRSGAAG

SEQ ID NO: 131069 - protein, 19 aa, Artificial Sequence
  Description of Artificial Sequence: Synthetic peptide
  Seed: RMCSLMQGSTLPRRSGAAG
RMFSLGQASTVPRRSGAAG

SEQ ID NO: 131070 - protein, 19 aa, Artificial Sequence
  Description of Artificial Sequence: Synthetic peptide
  Seed: RMCSLMQGSTLPRRSGAAG
RMFSLIQASTAPRRSGAAG

SEQ ID NO: 131071 - protein, 19 aa, Artificial Sequence
  Description of Artificial Sequence: Synthetic peptide
  Seed: RMCSLMQGSTLPRRSGAAG
RMFSLIQASTGPRRSGAAG

SEQ ID NO: 131072 - protein, 19 aa, Artificial Sequence
  Description of Artificial Sequence: Synthetic peptide
  Seed: RMCSLMQGSTLPRRSGAAG
RMFSLIQASTIPRRSGAAG

SEQ ID NO: 131073 - protein, 19 aa, Artificial Sequence
  Description of Artificial Sequence: Synthetic peptide
  Seed: RMCSLMQGSTLPRRSGAAG
RMFSLIQASTLPRRSGAAG

SEQ ID NO: 131074 - protein, 19 aa, Artificial Sequence
  Description of Artificial Sequence: Synthetic peptide
  Seed: RMCSLMQGSTLPRRSGAAG
RMFSLIQASTMPRRSGAAG

SEQ ID NO: 131075 - protein, 19 aa, Artificial Sequence
  Description of Artificial Sequence: Synthetic peptide
  Seed: RMCSLMQGSTLPRRSGAAG
RMFSLIQASTSPRRSGAAG

SEQ ID NO: 131076 - protein, 19 aa, Artificial Sequence
  Description of Artificial Sequence: Synthetic peptide
  Seed: RMCSLMQGSTLPRRSGAAG
RMFSLIQASTTPRRSGAAG

SEQ ID NO: 131077 - protein, 19 aa, Artificial Sequence
  Description of Artificial Sequence: Synthetic peptide
  Seed: RMCSLMQGSTLPRRSGAAG
RMFSLIQASTVPRRSGAAG

SEQ ID NO: 131078 - protein, 19 aa, Artificial Sequence
  Description of Artificial Sequence: Synthetic peptide
  Seed: RMCSLMQGSTLPRRSGAAG
RMFSLIQGSTAPRRSGAAG

SEQ ID NO: 131079 - protein, 19 aa, Artificial Sequence
  Description of Artificial Sequence: Synthetic peptide
  Seed: RMCSLMQGSTLPRRSGAAG
RMFSLIQGSTIPRRSGAAG

SEQ ID NO: 131080 - protein, 19 aa, Artificial Sequence
  Description of Artificial Sequence: Synthetic peptide
  Seed: RMCSLMQGSTLPRRSGAAG
RMFSLIQGSTLPRRSGAAG

SEQ ID NO: 131081 - protein, 19 aa, Artificial Sequence
  Description of Artificial Sequence: Synthetic peptide
  Seed: RMCSLMQGSTLPRRSGAAG
RMFSLIQGSTMPRRSGAAG

SEQ ID NO: 131082 - protein, 19 aa, Artificial Sequence
  Description of Artificial Sequence: Synthetic peptide
  Seed: RMCSLMQGSTLPRRSGAAG
RMFSLIQGSTSPRRSGAAG

SEQ ID NO: 131083 - protein, 19 aa, Artificial Sequence
  Description of Artificial Sequence: Synthetic peptide
  Seed: RMCSLMQGSTLPRRSGAAG
RMFSLIQGSTTPRRSGAAG

SEQ ID NO: 131084 - protein, 19 aa, Artificial Sequence
  Description of Artificial Sequence: Synthetic peptide
  Seed: RMCSLMQGSTLPRRSGAAG
RMFSLIQGSTVPRRSGAAG

SEQ ID NO: 131085 - protein, 19 aa, Artificial Sequence
  Description of Artificial Sequence: Synthetic peptide
  Seed: RMCSLMQGSTLPRRSGAAG
RMFSLIQNSTAPRRSGAAG

SEQ ID NO: 131086 - protein, 19 aa, Artificial Sequence
  Description of Artificial Sequence: Synthetic peptide
  Seed: RMCSLMQGSTLPRRSGAAG
RMFSLIQNSTIPRRSGAAG

SEQ ID NO: 131087 - protein, 19 aa, Artificial Sequence
  Description of Artificial Sequence: Synthetic peptide
  Seed: RMCSLMQGSTLPRRSGAAG
RMFSLIQNSTLPRRSGAAG

SEQ ID NO: 131088 - protein, 19 aa, Artificial Sequence
  Description of Artificial Sequence: Synthetic peptide
  Seed: RMCSLMQGSTLPRRSGAAG
RMFSLIQNSTVPRRSGAAG

SEQ ID NO: 131089 - protein, 19 aa, Artificial Sequence
  Description of Artificial Sequence: Synthetic peptide
  Seed: RMCSLMQGSTLPRRSGAAG
RMFSLIQPSTAPRRSGAAG

SEQ ID NO: 131090 - protein, 19 aa, Artificial Sequence
  Description of Artificial Sequence: Synthetic peptide
  Seed: RMCSLMQGSTLPRRSGAAG
RMFSLIQPSTIPRRSGAAG

SEQ ID NO: 131091 - protein, 19 aa, Artificial Sequence
  Description of Artificial Sequence: Synthetic peptide
  Seed: RMCSLMQGSTLPRRSGAAG
RMFSLIQPSTLPRRSGAAG

SEQ ID NO: 131092 - protein, 19 aa, Artificial Sequence
  Description of Artificial Sequence: Synthetic peptide
  Seed: RMCSLMQGSTLPRRSGAAG
RMFSLIQPSTVPRRSGAAG

SEQ ID NO: 131093 - protein, 19 aa, Artificial Sequence
  Description of Artificial Sequence: Synthetic peptide
  Seed: RMCSLMQGSTLPRRSGAAG
RMFSLIQSSTAPRRSGAAG

SEQ ID NO: 131094 - protein, 19 aa, Artificial Sequence
  Description of Artificial Sequence: Synthetic peptide
  Seed: RMCSLMQGSTLPRRSGAAG
RMFSLIQSSTIPRRSGAAG

SEQ ID NO: 131095 - protein, 19 aa, Artificial Sequence
  Description of Artificial Sequence: Synthetic peptide
  Seed: RMCSLMQGSTLPRRSGAAG
RMFSLIQSSTLPRRSGAAG

SEQ ID NO: 131096 - protein, 19 aa, Artificial Sequence
  Description of Artificial Sequence: Synthetic peptide
  Seed: RMCSLMQGSTLPRRSGAAG
RMFSLIQSSTMPRRSGAAG

SEQ ID NO: 131097 - protein, 19 aa, Artificial Sequence
  Description of Artificial Sequence: Synthetic peptide
  Seed: RMCSLMQGSTLPRRSGAAG
RMFSLIQSSTTPRRSGAAG

SEQ ID NO: 131098 - protein, 19 aa, Artificial Sequence
  Description of Artificial Sequence: Synthetic peptide
  Seed: RMCSLMQGSTLPRRSGAAG
RMFSLIQSSTVPRRSGAAG

SEQ ID NO: 131099 - protein, 19 aa, Artificial Sequence
  Description of Artificial Sequence: Synthetic peptide
  Seed: RMCSLMQGSTLPRRSGAAG
RMFSLIQTSTAPRRSGAAG

SEQ ID NO: 131100 - protein, 19 aa, Artificial Sequence
  Description of Artificial Sequence: Synthetic peptide
  Seed: RMCSLMQGSTLPRRSGAAG
RMFSLIQTSTIPRRSGAAG

SEQ ID NO: 131101 - protein, 19 aa, Artificial Sequence
  Description of Artificial Sequence: Synthetic peptide
  Seed: RMCSLMQGSTLPRRSGAAG
RMFSLIQTSTLPRRSGAAG

SEQ ID NO: 131102 - protein, 19 aa, Artificial Sequence
  Description of Artificial Sequence: Synthetic peptide
  Seed: RMCSLMQGSTLPRRSGAAG
RMFSLIQTSTVPRRSGAAG

SEQ ID NO: 131103 - protein, 19 aa, Artificial Sequence
  Description of Artificial Sequence: Synthetic peptide
  Seed: RMCSLMQGSTLPRRSGAAG
RMFSLLQASTAPRRSGAAG

SEQ ID NO: 131104 - protein, 19 aa, Artificial Sequence
  Description of Artificial Sequence: Synthetic peptide
  Seed: RMCSLMQGSTLPRRSGAAG
RMFSLLQASTCPRRSGAAG

SEQ ID NO: 131105 - protein, 19 aa, Artificial Sequence
  Description of Artificial Sequence: Synthetic peptide
  Seed: RMCSLMQGSTLPRRSGAAG
RMFSLLQASTFPRRSGAAG

SEQ ID NO: 131106 - protein, 19 aa, Artificial Sequence
  Description of Artificial Sequence: Synthetic peptide
  Seed: RMCSLMQGSTLPRRSGAAG
RMFSLLQASTGPRRSGAAG

SEQ ID NO: 131107 - protein, 19 aa, Artificial Sequence
  Description of Artificial Sequence: Synthetic peptide
  Seed: RMCSLMQGSTLPRRSGAAG
RMFSLLQASTIPRRSGAAG

SEQ ID NO: 131108 - protein, 19 aa, Artificial Sequence
  Description of Artificial Sequence: Synthetic peptide
  Seed: RMCSLMQGSTLPRRSGAAG
RMFSLLQASTLPRRSGAAG

SEQ ID NO: 131109 - protein, 19 aa, Artificial Sequence
  Description of Artificial Sequence: Synthetic peptide
  Seed: RMCSLMQGSTLPRRSGAAG
RMFSLLQASTMPRRSGAAG

SEQ ID NO: 131110 - protein, 19 aa, Artificial Sequence
  Description of Artificial Sequence: Synthetic peptide
  Seed: RMCSLMQGSTLPRRSGAAG
RMFSLLQASTNPRRSGAAG

SEQ ID NO: 131111 - protein, 19 aa, Artificial Sequence
  Description of Artificial Sequence: Synthetic peptide
  Seed: RMCSLMQGSTLPRRSGAAG
RMFSLLQASTSPRRSGAAG

SEQ ID NO: 131112 - protein, 19 aa, Artificial Sequence
  Description of Artificial Sequence: Synthetic peptide
  Seed: RMCSLMQGSTLPRRSGAAG
RMFSLLQASTTPRRSGAAG

SEQ ID NO: 131113 - protein, 19 aa, Artificial Sequence
  Description of Artificial Sequence: Synthetic peptide
  Seed: RMCSLMQGSTLPRRSGAAG
RMFSLLQASTVPRRSGAAG

SEQ ID NO: 131114 - protein, 19 aa, Artificial Sequence
  Description of Artificial Sequence: Synthetic peptide
  Seed: RMCSLMQGSTLPRRSGAAG
RMFSLLQGSTAPRRSGAAG

SEQ ID NO: 131115 - protein, 19 aa, Artificial Sequence
  Description of Artificial Sequence: Synthetic peptide
  Seed: RMCSLMQGSTLPRRSGAAG
RMFSLLQGSTCPRRSGAAG

SEQ ID NO: 131116 - protein, 19 aa, Artificial Sequence
  Description of Artificial Sequence: Synthetic peptide
  Seed: RMCSLMQGSTLPRRSGAAG
RMFSLLQGSTGPRRSGAAG

SEQ ID NO: 131117 - protein, 19 aa, Artificial Sequence
  Description of Artificial Sequence: Synthetic peptide
  Seed: RMCSLMQGSTLPRRSGAAG
RMFSLLQGSTIPRRSGAAG

SEQ ID NO: 131118 - protein, 19 aa, Artificial Sequence
  Description of Artificial Sequence: Synthetic peptide
  Seed: RMCSLMQGSTLPRRSGAAG
RMFSLLQGSTLPRRSGAAG

SEQ ID NO: 131119 - protein, 19 aa, Artificial Sequence
  Description of Artificial Sequence: Synthetic peptide
  Seed: RMCSLMQGSTLPRRSGAAG
RMFSLLQGSTMPRRSGAAG

SEQ ID NO: 131120 - protein, 19 aa, Artificial Sequence
  Description of Artificial Sequence: Synthetic peptide
  Seed: RMCSLMQGSTLPRRSGAAG
RMFSLLQGSTSPRRSGAAG

SEQ ID NO: 131121 - protein, 19 aa, Artificial Sequence
  Description of Artificial Sequence: Synthetic peptide
  Seed: RMCSLMQGSTLPRRSGAAG
RMFSLLQGSTTPRRSGAAG

SEQ ID NO: 131122 - protein, 19 aa, Artificial Sequence
  Description of Artificial Sequence: Synthetic peptide
  Seed: RMCSLMQGSTLPRRSGAAG
RMFSLLQGSTVPRRSGAAG

SEQ ID NO: 131123 - protein, 19 aa, Artificial Sequence
  Description of Artificial Sequence: Synthetic peptide
  Seed: RMCSLMQGSTLPRRSGAAG
RMFSLLQNSTAPRRSGAAG

SEQ ID NO: 131124 - protein, 19 aa, Artificial Sequence
  Description of Artificial Sequence: Synthetic peptide
  Seed: RMCSLMQGSTLPRRSGAAG
RMFSLLQNSTIPRRSGAAG

SEQ ID NO: 131125 - protein, 19 aa, Artificial Sequence
  Description of Artificial Sequence: Synthetic peptide
  Seed: RMCSLMQGSTLPRRSGAAG
RMFSLLQNSTLPRRSGAAG

SEQ ID NO: 131126 - protein, 19 aa, Artificial Sequence
  Description of Artificial Sequence: Synthetic peptide
  Seed: RMCSLMQGSTLPRRSGAAG
RMFSLLQNSTMPRRSGAAG

SEQ ID NO: 131127 - protein, 19 aa, Artificial Sequence
  Description of Artificial Sequence: Synthetic peptide
  Seed: RMCSLMQGSTLPRRSGAAG
RMFSLLQNSTTPRRSGAAG

SEQ ID NO: 131128 - protein, 19 aa, Artificial Sequence
  Description of Artificial Sequence: Synthetic peptide
  Seed: RMCSLMQGSTLPRRSGAAG
RMFSLLQNSTVPRRSGAAG

SEQ ID NO: 131129 - protein, 19 aa, Artificial Sequence
  Description of Artificial Sequence: Synthetic peptide
  Seed: RMCSLMQGSTLPRRSGAAG
RMFSLLQPSTAPRRSGAAG

SEQ ID NO: 131130 - protein, 19 aa, Artificial Sequence
  Description of Artificial Sequence: Synthetic peptide
  Seed: RMCSLMQGSTLPRRSGAAG
RMFSLLQPSTGPRRSGAAG

SEQ ID NO: 131131 - protein, 19 aa, Artificial Sequence
  Description of Artificial Sequence: Synthetic peptide
  Seed: RMCSLMQGSTLPRRSGAAG
RMFSLLQPSTIPRRSGAAG

SEQ ID NO: 131132 - protein, 19 aa, Artificial Sequence
  Description of Artificial Sequence: Synthetic peptide
  Seed: RMCSLMQGSTLPRRSGAAG
RMFSLLQPSTLPRRSGAAG

SEQ ID NO: 131133 - protein, 19 aa, Artificial Sequence
  Description of Artificial Sequence: Synthetic peptide
  Seed: RMCSLMQGSTLPRRSGAAG
RMFSLLQPSTMPRRSGAAG

SEQ ID NO: 131134 - protein, 19 aa, Artificial Sequence
  Description of Artificial Sequence: Synthetic peptide
  Seed: RMCSLMQGSTLPRRSGAAG
RMFSLLQPSTSPRRSGAAG

SEQ ID NO: 131135 - protein, 19 aa, Artificial Sequence
  Description of Artificial Sequence: Synthetic peptide
  Seed: RMCSLMQGSTLPRRSGAAG
RMFSLLQPSTTPRRSGAAG

SEQ ID NO: 131136 - protein, 19 aa, Artificial Sequence
  Description of Artificial Sequence: Synthetic peptide
  Seed: RMCSLMQGSTLPRRSGAAG
RMFSLLQPSTVPRRSGAAG

SEQ ID NO: 131137 - protein, 19 aa, Artificial Sequence
  Description of Artificial Sequence: Synthetic peptide
  Seed: RMCSLMQGSTLPRRSGAAG
RMFSLLQSSTAPRRSGAAG

SEQ ID NO: 131138 - protein, 19 aa, Artificial Sequence
  Description of Artificial Sequence: Synthetic peptide
  Seed: RMCSLMQGSTLPRRSGAAG
RMFSLLQSSTGPRRSGAAG

SEQ ID NO: 131139 - protein, 19 aa, Artificial Sequence
  Description of Artificial Sequence: Synthetic peptide
  Seed: RMCSLMQGSTLPRRSGAAG
RMFSLLQSSTIPRRSGAAG

SEQ ID NO: 131140 - protein, 19 aa, Artificial Sequence
  Description of Artificial Sequence: Synthetic peptide
  Seed: RMCSLMQGSTLPRRSGAAG
RMFSLLQSSTLPRRSGAAG

SEQ ID NO: 131141 - protein, 19 aa, Artificial Sequence
  Description of Artificial Sequence: Synthetic peptide
  Seed: RMCSLMQGSTLPRRSGAAG
RMFSLLQSSTMPRRSGAAG

SEQ ID NO: 131142 - protein, 19 aa, Artificial Sequence
  Description of Artificial Sequence: Synthetic peptide
  Seed: RMCSLMQGSTLPRRSGAAG
RMFSLLQSSTSPRRSGAAG

SEQ ID NO: 131143 - protein, 19 aa, Artificial Sequence
  Description of Artificial Sequence: Synthetic peptide
  Seed: RMCSLMQGSTLPRRSGAAG
RMFSLLQSSTTPRRSGAAG

SEQ ID NO: 131144 - protein, 19 aa, Artificial Sequence
  Description of Artificial Sequence: Synthetic peptide
  Seed: RMCSLMQGSTLPRRSGAAG
RMFSLLQSSTVPRRSGAAG

SEQ ID NO: 131145 - protein, 19 aa, Artificial Sequence
  Description of Artificial Sequence: Synthetic peptide
  Seed: RMCSLMQGSTLPRRSGAAG
RMFSLLQTSTAPRRSGAAG

SEQ ID NO: 131146 - protein, 19 aa, Artificial Sequence
  Description of Artificial Sequence: Synthetic peptide
  Seed: RMCSLMQGSTLPRRSGAAG
RMFSLLQTSTIPRRSGAAG

SEQ ID NO: 131147 - protein, 19 aa, Artificial Sequence
  Description of Artificial Sequence: Synthetic peptide
  Seed: RMCSLMQGSTLPRRSGAAG
RMFSLLQTSTLPRRSGAAG

SEQ ID NO: 131148 - protein, 19 aa, Artificial Sequence
  Description of Artificial Sequence: Synthetic peptide
  Seed: RMCSLMQGSTLPRRSGAAG
RMFSLLQTSTMPRRSGAAG

SEQ ID NO: 131149 - protein, 19 aa, Artificial Sequence
  Description of Artificial Sequence: Synthetic peptide
  Seed: RMCSLMQGSTLPRRSGAAG
RMFSLLQTSTTPRRSGAAG

SEQ ID NO: 131150 - protein, 19 aa, Artificial Sequence
  Description of Artificial Sequence: Synthetic peptide
  Seed: RMCSLMQGSTLPRRSGAAG
RMFSLLQTSTVPRRSGAAG

SEQ ID NO: 131151 - protein, 19 aa, Artificial Sequence
  Description of Artificial Sequence: Synthetic peptide
  Seed: RMCSLMQGSTLPRRSGAAG
RMFSLLQVSTAPRRSGAAG

SEQ ID NO: 131152 - protein, 19 aa, Artificial Sequence
  Description of Artificial Sequence: Synthetic peptide
  Seed: RMCSLMQGSTLPRRSGAAG
RMFSLLQVSTIPRRSGAAG

SEQ ID NO: 131153 - protein, 19 aa, Artificial Sequence
  Description of Artificial Sequence: Synthetic peptide
  Seed: RMCSLMQGSTLPRRSGAAG
RMFSLLQVSTLPRRSGAAG

SEQ ID NO: 131154 - protein, 19 aa, Artificial Sequence
  Description of Artificial Sequence: Synthetic peptide
  Seed: RMCSLMQGSTLPRRSGAAG
RMFSLLQVSTVPRRSGAAG

SEQ ID NO: 131155 - protein, 19 aa, Artificial Sequence
  Description of Artificial Sequence: Synthetic peptide
  Seed: RMCSLMQGSTLPRRSGAAG
RMFSLMQASTAPRRSGAAG

SEQ ID NO: 131156 - protein, 19 aa, Artificial Sequence
  Description of Artificial Sequence: Synthetic peptide
  Seed: RMCSLMQGSTLPRRSGAAG
RMFSLMQASTCPRRSGAAG

SEQ ID NO: 131157 - protein, 19 aa, Artificial Sequence
  Description of Artificial Sequence: Synthetic peptide
  Seed: RMCSLMQGSTLPRRSGAAG
RMFSLMQASTFPRRSGAAG

SEQ ID NO: 131158 - protein, 19 aa, Artificial Sequence
  Description of Artificial Sequence: Synthetic peptide
  Seed: RMCSLMQGSTLPRRSGAAG
RMFSLMQASTGPRRSGAAG

SEQ ID NO: 131159 - protein, 19 aa, Artificial Sequence
  Description of Artificial Sequence: Synthetic peptide
  Seed: RMCSLMQGSTLPRRSGAAG
RMFSLMQASTIPRRSGAAG

SEQ ID NO: 131160 - protein, 19 aa, Artificial Sequence
  Description of Artificial Sequence: Synthetic peptide
  Seed: RMCSLMQGSTLPRRSGAAG
RMFSLMQASTLPRRSGAAG

SEQ ID NO: 131161 - protein, 19 aa, Artificial Sequence
  Description of Artificial Sequence: Synthetic peptide
  Seed: RMCSLMQGSTLPRRSGAAG
RMFSLMQASTMPRRSGAAG

SEQ ID NO: 131162 - protein, 19 aa, Artificial Sequence
  Description of Artificial Sequence: Synthetic peptide
  Seed: RMCSLMQGSTLPRRSGAAG
RMFSLMQASTNPRRSGAAG

SEQ ID NO: 131163 - protein, 19 aa, Artificial Sequence
  Description of Artificial Sequence: Synthetic peptide
  Seed: RMCSLMQGSTLPRRSGAAG
RMFSLMQASTSPRRSGAAG

SEQ ID NO: 131164 - protein, 19 aa, Artificial Sequence
  Description of Artificial Sequence: Synthetic peptide
  Seed: RMCSLMQGSTLPRRSGAAG
RMFSLMQASTTPRRSGAAG

SEQ ID NO: 131165 - protein, 19 aa, Artificial Sequence
  Description of Artificial Sequence: Synthetic peptide
  Seed: RMCSLMQGSTLPRRSGAAG
RMFSLMQASTVPRRSGAAG

SEQ ID NO: 131166 - protein, 19 aa, Artificial Sequence
  Description of Artificial Sequence: Synthetic peptide
  Seed: RMCSLMQGSTLPRRSGAAG
RMFSLMQGSTAPRRSGAAG

SEQ ID NO: 131167 - protein, 19 aa, Artificial Sequence
  Description of Artificial Sequence: Synthetic peptide
  Seed: RMCSLMQGSTLPRRSGAAG
RMFSLMQGSTCPRRSGAAG

SEQ ID NO: 131168 - protein, 19 aa, Artificial Sequence
  Description of Artificial Sequence: Synthetic peptide
  Seed: RMCSLMQGSTLPRRSGAAG
RMFSLMQGSTGPRRSGAAG

SEQ ID NO: 131169 - protein, 19 aa, Artificial Sequence
  Description of Artificial Sequence: Synthetic peptide
  Seed: RMCSLMQGSTLPRRSGAAG
RMFSLMQGSTIPRRSGAAG

SEQ ID NO: 131170 - protein, 19 aa, Artificial Sequence
  Description of Artificial Sequence: Synthetic peptide
  Seed: RMCSLMQGSTLPRRSGAAG
RMFSLMQGSTLPRRSGAAG

SEQ ID NO: 131171 - protein, 19 aa, Artificial Sequence
  Description of Artificial Sequence: Synthetic peptide
  Seed: RMCSLMQGSTLPRRSGAAG
RMFSLMQGSTMPRRSGAAG

SEQ ID NO: 131172 - protein, 19 aa, Artificial Sequence
  Description of Artificial Sequence: Synthetic peptide
  Seed: RMCSLMQGSTLPRRSGAAG
RMFSLMQGSTSPRRSGAAG

SEQ ID NO: 131173 - protein, 19 aa, Artificial Sequence
  Description of Artificial Sequence: Synthetic peptide
  Seed: RMCSLMQGSTLPRRSGAAG
RMFSLMQGSTTPRRSGAAG

SEQ ID NO: 131174 - protein, 19 aa, Artificial Sequence
  Description of Artificial Sequence: Synthetic peptide
  Seed: RMCSLMQGSTLPRRSGAAG
RMFSLMQGSTVPRRSGAAG

SEQ ID NO: 131175 - protein, 19 aa, Artificial Sequence
  Description of Artificial Sequence: Synthetic peptide
  Seed: RMCSLMQGSTLPRRSGAAG
RMFSLMQNSTAPRRSGAAG

SEQ ID NO: 131176 - protein, 19 aa, Artificial Sequence
  Description of Artificial Sequence: Synthetic peptide
  Seed: RMCSLMQGSTLPRRSGAAG
RMFSLMQNSTIPRRSGAAG

SEQ ID NO: 131177 - protein, 19 aa, Artificial Sequence
  Description of Artificial Sequence: Synthetic peptide
  Seed: RMCSLMQGSTLPRRSGAAG
RMFSLMQNSTLPRRSGAAG

SEQ ID NO: 131178 - protein, 19 aa, Artificial Sequence
  Description of Artificial Sequence: Synthetic peptide
  Seed: RMCSLMQGSTLPRRSGAAG
RMFSLMQNSTMPRRSGAAG

SEQ ID NO: 131179 - protein, 19 aa, Artificial Sequence
  Description of Artificial Sequence: Synthetic peptide
  Seed: RMCSLMQGSTLPRRSGAAG
RMFSLMQNSTTPRRSGAAG

SEQ ID NO: 131180 - protein, 19 aa, Artificial Sequence
  Description of Artificial Sequence: Synthetic peptide
  Seed: RMCSLMQGSTLPRRSGAAG
RMFSLMQNSTVPRRSGAAG

SEQ ID NO: 131181 - protein, 19 aa, Artificial Sequence
  Description of Artificial Sequence: Synthetic peptide
  Seed: RMCSLMQGSTLPRRSGAAG
RMFSLMQPSTAPRRSGAAG

SEQ ID NO: 131182 - protein, 19 aa, Artificial Sequence
  Description of Artificial Sequence: Synthetic peptide
  Seed: RMCSLMQGSTLPRRSGAAG
RMFSLMQPSTIPRRSGAAG

SEQ ID NO: 131183 - protein, 19 aa, Artificial Sequence
  Description of Artificial Sequence: Synthetic peptide
  Seed: RMCSLMQGSTLPRRSGAAG
RMFSLMQPSTLPRRSGAAG

SEQ ID NO: 131184 - protein, 19 aa, Artificial Sequence
  Description of Artificial Sequence: Synthetic peptide
  Seed: RMCSLMQGSTLPRRSGAAG
RMFSLMQPSTMPRRSGAAG

SEQ ID NO: 131185 - protein, 19 aa, Artificial Sequence
  Description of Artificial Sequence: Synthetic peptide
  Seed: RMCSLMQGSTLPRRSGAAG
RMFSLMQPSTSPRRSGAAG

SEQ ID NO: 131186 - protein, 19 aa, Artificial Sequence
  Description of Artificial Sequence: Synthetic peptide
  Seed: RMCSLMQGSTLPRRSGAAG
RMFSLMQPSTTPRRSGAAG

SEQ ID NO: 131187 - protein, 19 aa, Artificial Sequence
  Description of Artificial Sequence: Synthetic peptide
  Seed: RMCSLMQGSTLPRRSGAAG
RMFSLMQPSTVPRRSGAAG

SEQ ID NO: 131188 - protein, 19 aa, Artificial Sequence
  Description of Artificial Sequence: Synthetic peptide
  Seed: RMCSLMQGSTLPRRSGAAG
RMFSLMQSSTAPRRSGAAG

SEQ ID NO: 131189 - protein, 19 aa, Artificial Sequence
  Description of Artificial Sequence: Synthetic peptide
  Seed: RMCSLMQGSTLPRRSGAAG
RMFSLMQSSTGPRRSGAAG

SEQ ID NO: 131190 - protein, 19 aa, Artificial Sequence
  Description of Artificial Sequence: Synthetic peptide
  Seed: RMCSLMQGSTLPRRSGAAG
RMFSLMQSSTIPRRSGAAG

SEQ ID NO: 131191 - protein, 19 aa, Artificial Sequence
  Description of Artificial Sequence: Synthetic peptide
  Seed: RMCSLMQGSTLPRRSGAAG
RMFSLMQSSTLPRRSGAAG

SEQ ID NO: 131192 - protein, 19 aa, Artificial Sequence
  Description of Artificial Sequence: Synthetic peptide
  Seed: RMCSLMQGSTLPRRSGAAG
RMFSLMQSSTMPRRSGAAG

SEQ ID NO: 131193 - protein, 19 aa, Artificial Sequence
  Description of Artificial Sequence: Synthetic peptide
  Seed: RMCSLMQGSTLPRRSGAAG
RMFSLMQSSTSPRRSGAAG

SEQ ID NO: 131194 - protein, 19 aa, Artificial Sequence
  Description of Artificial Sequence: Synthetic peptide
  Seed: RMCSLMQGSTLPRRSGAAG
RMFSLMQSSTTPRRSGAAG

SEQ ID NO: 131195 - protein, 19 aa, Artificial Sequence
  Description of Artificial Sequence: Synthetic peptide
  Seed: RMCSLMQGSTLPRRSGAAG
RMFSLMQSSTVPRRSGAAG

SEQ ID NO: 131196 - protein, 19 aa, Artificial Sequence
  Description of Artificial Sequence: Synthetic peptide
  Seed: RMCSLMQGSTLPRRSGAAG
RMFSLMQTSTAPRRSGAAG

SEQ ID NO: 131197 - protein, 19 aa, Artificial Sequence
  Description of Artificial Sequence: Synthetic peptide
  Seed: RMCSLMQGSTLPRRSGAAG
RMFSLMQTSTIPRRSGAAG

SEQ ID NO: 131198 - protein, 19 aa, Artificial Sequence
  Description of Artificial Sequence: Synthetic peptide
  Seed: RMCSLMQGSTLPRRSGAAG
RMFSLMQTSTLPRRSGAAG

SEQ ID NO: 131199 - protein, 19 aa, Artificial Sequence
  Description of Artificial Sequence: Synthetic peptide
  Seed: RMCSLMQGSTLPRRSGAAG
RMFSLMQTSTMPRRSGAAG

SEQ ID NO: 131200 - protein, 19 aa, Artificial Sequence
  Description of Artificial Sequence: Synthetic peptide
  Seed: RMCSLMQGSTLPRRSGAAG
RMFSLMQTSTTPRRSGAAG

SEQ ID NO: 131201 - protein, 19 aa, Artificial Sequence
  Description of Artificial Sequence: Synthetic peptide
  Seed: RMCSLMQGSTLPRRSGAAG
RMFSLMQTSTVPRRSGAAG

SEQ ID NO: 131202 - protein, 19 aa, Artificial Sequence
  Description of Artificial Sequence: Synthetic peptide
  Seed: RMCSLMQGSTLPRRSGAAG
RMFSLMQVSTAPRRSGAAG

SEQ ID NO: 131203 - protein, 19 aa, Artificial Sequence
  Description of Artificial Sequence: Synthetic peptide
  Seed: RMCSLMQGSTLPRRSGAAG
RMFSLMQVSTIPRRSGAAG

SEQ ID NO: 131204 - protein, 19 aa, Artificial Sequence
  Description of Artificial Sequence: Synthetic peptide
  Seed: RMCSLMQGSTLPRRSGAAG
RMFSLMQVSTLPRRSGAAG

SEQ ID NO: 131205 - protein, 19 aa, Artificial Sequence
  Description of Artificial Sequence: Synthetic peptide
  Seed: RMCSLMQGSTLPRRSGAAG
RMFSLMQVSTVPRRSGAAG

SEQ ID NO: 131206 - protein, 19 aa, Artificial Sequence
  Description of Artificial Sequence: Synthetic peptide
  Seed: RMCSLMQGSTLPRRSGAAG
RMFSLQQASTAPRRSGAAG

SEQ ID NO: 131207 - protein, 19 aa, Artificial Sequence
  Description of Artificial Sequence: Synthetic peptide
  Seed: RMCSLMQGSTLPRRSGAAG
RMFSLQQASTIPRRSGAAG

SEQ ID NO: 131208 - protein, 19 aa, Artificial Sequence
  Description of Artificial Sequence: Synthetic peptide
  Seed: RMCSLMQGSTLPRRSGAAG
RMFSLQQASTLPRRSGAAG

SEQ ID NO: 131209 - protein, 19 aa, Artificial Sequence
  Description of Artificial Sequence: Synthetic peptide
  Seed: RMCSLMQGSTLPRRSGAAG
RMFSLQQASTMPRRSGAAG

SEQ ID NO: 131210 - protein, 19 aa, Artificial Sequence
  Description of Artificial Sequence: Synthetic peptide
  Seed: RMCSLMQGSTLPRRSGAAG
RMFSLQQASTTPRRSGAAG

SEQ ID NO: 131211 - protein, 19 aa, Artificial Sequence
  Description of Artificial Sequence: Synthetic peptide
  Seed: RMCSLMQGSTLPRRSGAAG
RMFSLQQASTVPRRSGAAG

SEQ ID NO: 131212 - protein, 19 aa, Artificial Sequence
  Description of Artificial Sequence: Synthetic peptide
  Seed: RMCSLMQGSTLPRRSGAAG
RMFSLQQGSTAPRRSGAAG

SEQ ID NO: 131213 - protein, 19 aa, Artificial Sequence
  Description of Artificial Sequence: Synthetic peptide
  Seed: RMCSLMQGSTLPRRSGAAG
RMFSLQQGSTIPRRSGAAG

SEQ ID NO: 131214 - protein, 19 aa, Artificial Sequence
  Description of Artificial Sequence: Synthetic peptide
  Seed: RMCSLMQGSTLPRRSGAAG
RMFSLQQGSTLPRRSGAAG

SEQ ID NO: 131215 - protein, 19 aa, Artificial Sequence
  Description of Artificial Sequence: Synthetic peptide
  Seed: RMCSLMQGSTLPRRSGAAG
RMFSLQQGSTVPRRSGAAG

SEQ ID NO: 131216 - protein, 19 aa, Artificial Sequence
  Description of Artificial Sequence: Synthetic peptide
  Seed: RMCSLMQGSTLPRRSGAAG
RMFSLQQPSTIPRRSGAAG

SEQ ID NO: 131217 - protein, 19 aa, Artificial Sequence
  Description of Artificial Sequence: Synthetic peptide
  Seed: RMCSLMQGSTLPRRSGAAG
RMFSLQQPSTLPRRSGAAG

SEQ ID NO: 131218 - protein, 19 aa, Artificial Sequence
  Description of Artificial Sequence: Synthetic peptide
  Seed: RMCSLMQGSTLPRRSGAAG
RMFSLQQPSTVPRRSGAAG

SEQ ID NO: 131219 - protein, 19 aa, Artificial Sequence
  Description of Artificial Sequence: Synthetic peptide
  Seed: RMCSLMQGSTLPRRSGAAG
RMFSLQQSSTAPRRSGAAG

SEQ ID NO: 131220 - protein, 19 aa, Artificial Sequence
  Description of Artificial Sequence: Synthetic peptide
  Seed: RMCSLMQGSTLPRRSGAAG
RMFSLQQSSTIPRRSGAAG

SEQ ID NO: 131221 - protein, 19 aa, Artificial Sequence
  Description of Artificial Sequence: Synthetic peptide
  Seed: RMCSLMQGSTLPRRSGAAG
RMFSLQQSSTLPRRSGAAG

SEQ ID NO: 131222 - protein, 19 aa, Artificial Sequence
  Description of Artificial Sequence: Synthetic peptide
  Seed: RMCSLMQGSTLPRRSGAAG
RMFSLQQSSTVPRRSGAAG

SEQ ID NO: 131223 - protein, 19 aa, Artificial Sequence
  Description of Artificial Sequence: Synthetic peptide
  Seed: RMCSLMQGSTLPRRSGAAG
RMFSLSQASTIPRRSGAAG

SEQ ID NO: 131224 - protein, 19 aa, Artificial Sequence
  Description of Artificial Sequence: Synthetic peptide
  Seed: RMCSLMQGSTLPRRSGAAG
RMFSLSQASTLPRRSGAAG

SEQ ID NO: 131225 - protein, 19 aa, Artificial Sequence
  Description of Artificial Sequence: Synthetic peptide
  Seed: RMCSLMQGSTLPRRSGAAG
RMFSLSQASTVPRRSGAAG

SEQ ID NO: 131226 - protein, 19 aa, Artificial Sequence
  Description of Artificial Sequence: Synthetic peptide
  Seed: RMCSLMQGSTLPRRSGAAG
RMFSLTQASTVPRRSGAAG

SEQ ID NO: 131227 - protein, 19 aa, Artificial Sequence
  Description of Artificial Sequence: Synthetic peptide
  Seed: RMCSLMQGSTLPRRSGAAG
RMFSLVQASTAPRRSGAAG

SEQ ID NO: 131228 - protein, 19 aa, Artificial Sequence
  Description of Artificial Sequence: Synthetic peptide
  Seed: RMCSLMQGSTLPRRSGAAG
RMFSLVQASTIPRRSGAAG

SEQ ID NO: 131229 - protein, 19 aa, Artificial Sequence
  Description of Artificial Sequence: Synthetic peptide
  Seed: RMCSLMQGSTLPRRSGAAG
RMFSLVQASTLPRRSGAAG

SEQ ID NO: 131230 - protein, 19 aa, Artificial Sequence
  Description of Artificial Sequence: Synthetic peptide
  Seed: RMCSLMQGSTLPRRSGAAG
RMFSLVQASTMPRRSGAAG

SEQ ID NO: 131231 - protein, 19 aa, Artificial Sequence
  Description of Artificial Sequence: Synthetic peptide
  Seed: RMCSLMQGSTLPRRSGAAG
RMFSLVQASTTPRRSGAAG

SEQ ID NO: 131232 - protein, 19 aa, Artificial Sequence
  Description of Artificial Sequence: Synthetic peptide
  Seed: RMCSLMQGSTLPRRSGAAG
RMFSLVQASTVPRRSGAAG

SEQ ID NO: 131233 - protein, 19 aa, Artificial Sequence
  Description of Artificial Sequence: Synthetic peptide
  Seed: RMCSLMQGSTLPRRSGAAG
RMFSLVQGSTAPRRSGAAG

SEQ ID NO: 131234 - protein, 19 aa, Artificial Sequence
  Description of Artificial Sequence: Synthetic peptide
  Seed: RMCSLMQGSTLPRRSGAAG
RMFSLVQGSTIPRRSGAAG

SEQ ID NO: 131235 - protein, 19 aa, Artificial Sequence
  Description of Artificial Sequence: Synthetic peptide
  Seed: RMCSLMQGSTLPRRSGAAG
RMFSLVQGSTLPRRSGAAG

SEQ ID NO: 131236 - protein, 19 aa, Artificial Sequence
  Description of Artificial Sequence: Synthetic peptide
  Seed: RMCSLMQGSTLPRRSGAAG
RMFSLVQGSTVPRRSGAAG

SEQ ID NO: 131237 - protein, 19 aa, Artificial Sequence
  Description of Artificial Sequence: Synthetic peptide
  Seed: RMCSLMQGSTLPRRSGAAG
RMFSLVQPSTIPRRSGAAG

SEQ ID NO: 131238 - protein, 19 aa, Artificial Sequence
  Description of Artificial Sequence: Synthetic peptide
  Seed: RMCSLMQGSTLPRRSGAAG
RMFSLVQPSTLPRRSGAAG

SEQ ID NO: 131239 - protein, 19 aa, Artificial Sequence
  Description of Artificial Sequence: Synthetic peptide
  Seed: RMCSLMQGSTLPRRSGAAG
RMFSLVQPSTVPRRSGAAG

SEQ ID NO: 131240 - protein, 19 aa, Artificial Sequence
  Description of Artificial Sequence: Synthetic peptide
  Seed: RMCSLMQGSTLPRRSGAAG
RMFSLVQSSTAPRRSGAAG

SEQ ID NO: 131241 - protein, 19 aa, Artificial Sequence
  Description of Artificial Sequence: Synthetic peptide
  Seed: RMCSLMQGSTLPRRSGAAG
RMFSLVQSSTIPRRSGAAG

SEQ ID NO: 131242 - protein, 19 aa, Artificial Sequence
  Description of Artificial Sequence: Synthetic peptide
  Seed: RMCSLMQGSTLPRRSGAAG
RMFSLVQSSTLPRRSGAAG

SEQ ID NO: 131243 - protein, 19 aa, Artificial Sequence
  Description of Artificial Sequence: Synthetic peptide
  Seed: RMCSLMQGSTLPRRSGAAG
RMFSLVQSSTVPRRSGAAG

SEQ ID NO: 131244 - protein, 19 aa, Artificial Sequence
  Description of Artificial Sequence: Synthetic peptide
  Seed: RMCSLMQGSTLPRRSGAAG
RMISLIQASTLPRRSGAAG

SEQ ID NO: 131245 - protein, 19 aa, Artificial Sequence
  Description of Artificial Sequence: Synthetic peptide
  Seed: RMCSLMQGSTLPRRSGAAG
RMISLIQASTVPRRSGAAG

SEQ ID NO: 131246 - protein, 19 aa, Artificial Sequence
  Description of Artificial Sequence: Synthetic peptide
  Seed: RMCSLMQGSTLPRRSGAAG
RMISLLQASTAPRRSGAAG

SEQ ID NO: 131247 - protein, 19 aa, Artificial Sequence
  Description of Artificial Sequence: Synthetic peptide
  Seed: RMCSLMQGSTLPRRSGAAG
RMISLLQASTIPRRSGAAG

SEQ ID NO: 131248 - protein, 19 aa, Artificial Sequence
  Description of Artificial Sequence: Synthetic peptide
  Seed: RMCSLMQGSTLPRRSGAAG
RMISLLQASTLPRRSGAAG

SEQ ID NO: 131249 - protein, 19 aa, Artificial Sequence
  Description of Artificial Sequence: Synthetic peptide
  Seed: RMCSLMQGSTLPRRSGAAG
RMISLLQASTMPRRSGAAG

SEQ ID NO: 131250 - protein, 19 aa, Artificial Sequence
  Description of Artificial Sequence: Synthetic peptide
  Seed: RMCSLMQGSTLPRRSGAAG
RMISLLQASTTPRRSGAAG

SEQ ID NO: 131251 - protein, 19 aa, Artificial Sequence
  Description of Artificial Sequence: Synthetic peptide
  Seed: RMCSLMQGSTLPRRSGAAG
RMISLLQASTVPRRSGAAG

SEQ ID NO: 131252 - protein, 19 aa, Artificial Sequence
  Description of Artificial Sequence: Synthetic peptide
  Seed: RMCSLMQGSTLPRRSGAAG
RMISLLQGSTAPRRSGAAG

SEQ ID NO: 131253 - protein, 19 aa, Artificial Sequence
  Description of Artificial Sequence: Synthetic peptide
  Seed: RMCSLMQGSTLPRRSGAAG
RMISLLQGSTIPRRSGAAG

SEQ ID NO: 131254 - protein, 19 aa, Artificial Sequence
  Description of Artificial Sequence: Synthetic peptide
  Seed: RMCSLMQGSTLPRRSGAAG
RMISLLQGSTLPRRSGAAG

SEQ ID NO: 131255 - protein, 19 aa, Artificial Sequence
  Description of Artificial Sequence: Synthetic peptide
  Seed: RMCSLMQGSTLPRRSGAAG
RMISLLQGSTMPRRSGAAG

SEQ ID NO: 131256 - protein, 19 aa, Artificial Sequence
  Description of Artificial Sequence: Synthetic peptide
  Seed: RMCSLMQGSTLPRRSGAAG
RMISLLQGSTTPRRSGAAG

SEQ ID NO: 131257 - protein, 19 aa, Artificial Sequence
  Description of Artificial Sequence: Synthetic peptide
  Seed: RMCSLMQGSTLPRRSGAAG
RMISLLQGSTVPRRSGAAG

SEQ ID NO: 131258 - protein, 19 aa, Artificial Sequence
  Description of Artificial Sequence: Synthetic peptide
  Seed: RMCSLMQGSTLPRRSGAAG
RMISLLQPSTIPRRSGAAG

SEQ ID NO: 131259 - protein, 19 aa, Artificial Sequence
  Description of Artificial Sequence: Synthetic peptide
  Seed: RMCSLMQGSTLPRRSGAAG
RMISLLQPSTLPRRSGAAG

SEQ ID NO: 131260 - protein, 19 aa, Artificial Sequence
  Description of Artificial Sequence: Synthetic peptide
  Seed: RMCSLMQGSTLPRRSGAAG
RMISLLQPSTVPRRSGAAG

SEQ ID NO: 131261 - protein, 19 aa, Artificial Sequence
  Description of Artificial Sequence: Synthetic peptide
  Seed: RMCSLMQGSTLPRRSGAAG
RMISLLQSSTAPRRSGAAG

SEQ ID NO: 131262 - protein, 19 aa, Artificial Sequence
  Description of Artificial Sequence: Synthetic peptide
  Seed: RMCSLMQGSTLPRRSGAAG
RMISLLQSSTIPRRSGAAG

SEQ ID NO: 131263 - protein, 19 aa, Artificial Sequence
  Description of Artificial Sequence: Synthetic peptide
  Seed: RMCSLMQGSTLPRRSGAAG
RMISLLQSSTLPRRSGAAG

SEQ ID NO: 131264 - protein, 19 aa, Artificial Sequence
  Description of Artificial Sequence: Synthetic peptide
  Seed: RMCSLMQGSTLPRRSGAAG
RMISLLQSSTVPRRSGAAG

SEQ ID NO: 131265 - protein, 19 aa, Artificial Sequence
  Description of Artificial Sequence: Synthetic peptide
  Seed: RMCSLMQGSTLPRRSGAAG
RMISLMQASTAPRRSGAAG

SEQ ID NO: 131266 - protein, 19 aa, Artificial Sequence
  Description of Artificial Sequence: Synthetic peptide
  Seed: RMCSLMQGSTLPRRSGAAG
RMISLMQASTIPRRSGAAG

SEQ ID NO: 131267 - protein, 19 aa, Artificial Sequence
  Description of Artificial Sequence: Synthetic peptide
  Seed: RMCSLMQGSTLPRRSGAAG
RMISLMQASTLPRRSGAAG

SEQ ID NO: 131268 - protein, 19 aa, Artificial Sequence
  Description of Artificial Sequence: Synthetic peptide
  Seed: RMCSLMQGSTLPRRSGAAG
RMISLMQASTMPRRSGAAG

SEQ ID NO: 131269 - protein, 19 aa, Artificial Sequence
  Description of Artificial Sequence: Synthetic peptide
  Seed: RMCSLMQGSTLPRRSGAAG
RMISLMQASTTPRRSGAAG

SEQ ID NO: 131270 - protein, 19 aa, Artificial Sequence
  Description of Artificial Sequence: Synthetic peptide
  Seed: RMCSLMQGSTLPRRSGAAG
RMISLMQASTVPRRSGAAG

SEQ ID NO: 131271 - protein, 19 aa, Artificial Sequence
  Description of Artificial Sequence: Synthetic peptide
  Seed: RMCSLMQGSTLPRRSGAAG
RMISLMQGSTAPRRSGAAG

SEQ ID NO: 131272 - protein, 19 aa, Artificial Sequence
  Description of Artificial Sequence: Synthetic peptide
  Seed: RMCSLMQGSTLPRRSGAAG
RMISLMQGSTIPRRSGAAG

SEQ ID NO: 131273 - protein, 19 aa, Artificial Sequence
  Description of Artificial Sequence: Synthetic peptide
  Seed: RMCSLMQGSTLPRRSGAAG
RMISLMQGSTLPRRSGAAG

SEQ ID NO: 131274 - protein, 19 aa, Artificial Sequence
  Description of Artificial Sequence: Synthetic peptide
  Seed: RMCSLMQGSTLPRRSGAAG
RMISLMQGSTMPRRSGAAG

SEQ ID NO: 131275 - protein, 19 aa, Artificial Sequence
  Description of Artificial Sequence: Synthetic peptide
  Seed: RMCSLMQGSTLPRRSGAAG
RMISLMQGSTTPRRSGAAG

SEQ ID NO: 131276 - protein, 19 aa, Artificial Sequence
  Description of Artificial Sequence: Synthetic peptide
  Seed: RMCSLMQGSTLPRRSGAAG
RMISLMQGSTVPRRSGAAG

SEQ ID NO: 131277 - protein, 19 aa, Artificial Sequence
  Description of Artificial Sequence: Synthetic peptide
  Seed: RMCSLMQGSTLPRRSGAAG
RMISLMQPSTIPRRSGAAG

SEQ ID NO: 131278 - protein, 19 aa, Artificial Sequence
  Description of Artificial Sequence: Synthetic peptide
  Seed: RMCSLMQGSTLPRRSGAAG
RMISLMQPSTLPRRSGAAG

SEQ ID NO: 131279 - protein, 19 aa, Artificial Sequence
  Description of Artificial Sequence: Synthetic peptide
  Seed: RMCSLMQGSTLPRRSGAAG
RMISLMQPSTVPRRSGAAG

SEQ ID NO: 131280 - protein, 19 aa, Artificial Sequence
  Description of Artificial Sequence: Synthetic peptide
  Seed: RMCSLMQGSTLPRRSGAAG
RMISLMQSSTAPRRSGAAG

SEQ ID NO: 131281 - protein, 19 aa, Artificial Sequence
  Description of Artificial Sequence: Synthetic peptide
  Seed: RMCSLMQGSTLPRRSGAAG
RMISLMQSSTIPRRSGAAG

SEQ ID NO: 131282 - protein, 19 aa, Artificial Sequence
  Description of Artificial Sequence: Synthetic peptide
  Seed: RMCSLMQGSTLPRRSGAAG
RMISLMQSSTLPRRSGAAG

SEQ ID NO: 131283 - protein, 19 aa, Artificial Sequence
  Description of Artificial Sequence: Synthetic peptide
  Seed: RMCSLMQGSTLPRRSGAAG
RMISLMQSSTVPRRSGAAG

SEQ ID NO: 131284 - protein, 19 aa, Artificial Sequence
  Description of Artificial Sequence: Synthetic peptide
  Seed: RMCSLMQGSTLPRRSGAAG
RMLSLLQASTAPRRSGAAG

SEQ ID NO: 131285 - protein, 19 aa, Artificial Sequence
  Description of Artificial Sequence: Synthetic peptide
  Seed: RMCSLMQGSTLPRRSGAAG
RMLSLLQASTIPRRSGAAG

SEQ ID NO: 131286 - protein, 19 aa, Artificial Sequence
  Description of Artificial Sequence: Synthetic peptide
  Seed: RMCSLMQGSTLPRRSGAAG
RMLSLLQASTLPRRSGAAG

SEQ ID NO: 131287 - protein, 19 aa, Artificial Sequence
  Description of Artificial Sequence: Synthetic peptide
  Seed: RMCSLMQGSTLPRRSGAAG
RMLSLLQASTVPRRSGAAG

SEQ ID NO: 131288 - protein, 19 aa, Artificial Sequence
  Description of Artificial Sequence: Synthetic peptide
  Seed: RMCSLMQGSTLPRRSGAAG
RMLSLLQGSTAPRRSGAAG

SEQ ID NO: 131289 - protein, 19 aa, Artificial Sequence
  Description of Artificial Sequence: Synthetic peptide
  Seed: RMCSLMQGSTLPRRSGAAG
RMLSLLQGSTIPRRSGAAG

SEQ ID NO: 131290 - protein, 19 aa, Artificial Sequence
  Description of Artificial Sequence: Synthetic peptide
  Seed: RMCSLMQGSTLPRRSGAAG
RMLSLLQGSTLPRRSGAAG

SEQ ID NO: 131291 - protein, 19 aa, Artificial Sequence
  Description of Artificial Sequence: Synthetic peptide
  Seed: RMCSLMQGSTLPRRSGAAG
RMLSLLQGSTVPRRSGAAG

SEQ ID NO: 131292 - protein, 19 aa, Artificial Sequence
  Description of Artificial Sequence: Synthetic peptide
  Seed: RMCSLMQGSTLPRRSGAAG
RMLSLLQPSTVPRRSGAAG

SEQ ID NO: 131293 - protein, 19 aa, Artificial Sequence
  Description of Artificial Sequence: Synthetic peptide
  Seed: RMCSLMQGSTLPRRSGAAG
RMLSLLQSSTIPRRSGAAG

SEQ ID NO: 131294 - protein, 19 aa, Artificial Sequence
  Description of Artificial Sequence: Synthetic peptide
  Seed: RMCSLMQGSTLPRRSGAAG
RMLSLLQSSTLPRRSGAAG

SEQ ID NO: 131295 - protein, 19 aa, Artificial Sequence
  Description of Artificial Sequence: Synthetic peptide
  Seed: RMCSLMQGSTLPRRSGAAG
RMLSLLQSSTVPRRSGAAG

SEQ ID NO: 131296 - protein, 19 aa, Artificial Sequence
  Description of Artificial Sequence: Synthetic peptide
  Seed: RMCSLMQGSTLPRRSGAAG
RMLSLMQASTAPRRSGAAG

SEQ ID NO: 131297 - protein, 19 aa, Artificial Sequence
  Description of Artificial Sequence: Synthetic peptide
  Seed: RMCSLMQGSTLPRRSGAAG
RMLSLMQASTIPRRSGAAG

SEQ ID NO: 131298 - protein, 19 aa, Artificial Sequence
  Description of Artificial Sequence: Synthetic peptide
  Seed: RMCSLMQGSTLPRRSGAAG
RMLSLMQASTLPRRSGAAG

SEQ ID NO: 131299 - protein, 19 aa, Artificial Sequence
  Description of Artificial Sequence: Synthetic peptide
  Seed: RMCSLMQGSTLPRRSGAAG
RMLSLMQASTVPRRSGAAG

SEQ ID NO: 131300 - protein, 19 aa, Artificial Sequence
  Description of Artificial Sequence: Synthetic peptide
  Seed: RMCSLMQGSTLPRRSGAAG
RMLSLMQGSTAPRRSGAAG

SEQ ID NO: 131301 - protein, 19 aa, Artificial Sequence
  Description of Artificial Sequence: Synthetic peptide
  Seed: RMCSLMQGSTLPRRSGAAG
RMLSLMQGSTIPRRSGAAG

SEQ ID NO: 131302 - protein, 19 aa, Artificial Sequence
  Description of Artificial Sequence: Synthetic peptide
  Seed: RMCSLMQGSTLPRRSGAAG
RMLSLMQGSTLPRRSGAAG

SEQ ID NO: 131303 - protein, 19 aa, Artificial Sequence
  Description of Artificial Sequence: Synthetic peptide
  Seed: RMCSLMQGSTLPRRSGAAG
RMLSLMQGSTVPRRSGAAG

SEQ ID NO: 131304 - protein, 19 aa, Artificial Sequence
  Description of Artificial Sequence: Synthetic peptide
  Seed: RMCSLMQGSTLPRRSGAAG
RMLSLMQSSTIPRRSGAAG

SEQ ID NO: 131305 - protein, 19 aa, Artificial Sequence
  Description of Artificial Sequence: Synthetic peptide
  Seed: RMCSLMQGSTLPRRSGAAG
RMLSLMQSSTLPRRSGAAG

SEQ ID NO: 131306 - protein, 19 aa, Artificial Sequence
  Description of Artificial Sequence: Synthetic peptide
  Seed: RMCSLMQGSTLPRRSGAAG
RMLSLMQSSTVPRRSGAAG

SEQ ID NO: 131307 - protein, 19 aa, Artificial Sequence
  Description of Artificial Sequence: Synthetic peptide
  Seed: RMCSLMQGSTLPRRSGAAG
RMMSLLQASTIPRRSGAAG

SEQ ID NO: 131308 - protein, 19 aa, Artificial Sequence
  Description of Artificial Sequence: Synthetic peptide
  Seed: RMCSLMQGSTLPRRSGAAG
RMMSLLQASTLPRRSGAAG

SEQ ID NO: 131309 - protein, 19 aa, Artificial Sequence
  Description of Artificial Sequence: Synthetic peptide
  Seed: RMCSLMQGSTLPRRSGAAG
RMMSLLQASTVPRRSGAAG

SEQ ID NO: 131310 - protein, 19 aa, Artificial Sequence
  Description of Artificial Sequence: Synthetic peptide
  Seed: RMCSLMQGSTLPRRSGAAG
RMMSLLQGSTVPRRSGAAG

SEQ ID NO: 131311 - protein, 19 aa, Artificial Sequence
  Description of Artificial Sequence: Synthetic peptide
  Seed: RMCSLMQGSTLPRRSGAAG
RMMSLMQASTIPRRSGAAG

SEQ ID NO: 131312 - protein, 19 aa, Artificial Sequence
  Description of Artificial Sequence: Synthetic peptide
  Seed: RMCSLMQGSTLPRRSGAAG
RMMSLMQASTLPRRSGAAG

SEQ ID NO: 131313 - protein, 19 aa, Artificial Sequence
  Description of Artificial Sequence: Synthetic peptide
  Seed: RMCSLMQGSTLPRRSGAAG
RMMSLMQASTVPRRSGAAG

SEQ ID NO: 131314 - protein, 19 aa, Artificial Sequence
  Description of Artificial Sequence: Synthetic peptide
  Seed: RMCSLMQGSTLPRRSGAAG
RMMSLMQGSTVPRRSGAAG

SEQ ID NO: 131315 - protein, 19 aa, Artificial Sequence
  Description of Artificial Sequence: Synthetic peptide
  Seed: RMCSLMQGSTLPRRSGAAG
RMVSLLQASTIPRRSGAAG

SEQ ID NO: 131316 - protein, 19 aa, Artificial Sequence
  Description of Artificial Sequence: Synthetic peptide
  Seed: RMCSLMQGSTLPRRSGAAG
RMVSLLQASTLPRRSGAAG

SEQ ID NO: 131317 - protein, 19 aa, Artificial Sequence
  Description of Artificial Sequence: Synthetic peptide
  Seed: RMCSLMQGSTLPRRSGAAG
RMVSLLQASTVPRRSGAAG

SEQ ID NO: 131318 - protein, 19 aa, Artificial Sequence
  Description of Artificial Sequence: Synthetic peptide
  Seed: RMCSLMQGSTLPRRSGAAG
RMVSLLQGSTIPRRSGAAG

SEQ ID NO: 131319 - protein, 19 aa, Artificial Sequence
  Description of Artificial Sequence: Synthetic peptide
  Seed: RMCSLMQGSTLPRRSGAAG
RMVSLLQGSTLPRRSGAAG

SEQ ID NO: 131320 - protein, 19 aa, Artificial Sequence
  Description of Artificial Sequence: Synthetic peptide
  Seed: RMCSLMQGSTLPRRSGAAG
RMVSLLQGSTVPRRSGAAG

SEQ ID NO: 131321 - protein, 19 aa, Artificial Sequence
  Description of Artificial Sequence: Synthetic peptide
  Seed: RMCSLMQGSTLPRRSGAAG
RMVSLMQASTIPRRSGAAG

SEQ ID NO: 131322 - protein, 19 aa, Artificial Sequence
  Description of Artificial Sequence: Synthetic peptide
  Seed: RMCSLMQGSTLPRRSGAAG
RMVSLMQASTLPRRSGAAG

SEQ ID NO: 131323 - protein, 19 aa, Artificial Sequence
  Description of Artificial Sequence: Synthetic peptide
  Seed: RMCSLMQGSTLPRRSGAAG
RMVSLMQASTVPRRSGAAG

SEQ ID NO: 131324 - protein, 19 aa, Artificial Sequence
  Description of Artificial Sequence: Synthetic peptide
  Seed: RMCSLMQGSTLPRRSGAAG
RMVSLMQGSTLPRRSGAAG

SEQ ID NO: 131325 - protein, 19 aa, Artificial Sequence
  Description of Artificial Sequence: Synthetic peptide
  Seed: RMCSLMQGSTLPRRSGAAG
RMVSLMQGSTVPRRSGAAG

SEQ ID NO: 131326 - protein, 19 aa, Artificial Sequence
  Description of Artificial Sequence: Synthetic peptide
  Seed: RMCSLMQGSTLPRRSGAAG
RMWSLAQASTIPRRSGAAG

SEQ ID NO: 131327 - protein, 19 aa, Artificial Sequence
  Description of Artificial Sequence: Synthetic peptide
  Seed: RMCSLMQGSTLPRRSGAAG
RMWSLAQASTLPRRSGAAG

SEQ ID NO: 131328 - protein, 19 aa, Artificial Sequence
  Description of Artificial Sequence: Synthetic peptide
  Seed: RMCSLMQGSTLPRRSGAAG
RMWSLAQASTVPRRSGAAG

SEQ ID NO: 131329 - protein, 19 aa, Artificial Sequence
  Description of Artificial Sequence: Synthetic peptide
  Seed: RMCSLMQGSTLPRRSGAAG
RMWSLIQASTAPRRSGAAG

SEQ ID NO: 131330 - protein, 19 aa, Artificial Sequence
  Description of Artificial Sequence: Synthetic peptide
  Seed: RMCSLMQGSTLPRRSGAAG
RMWSLIQASTIPRRSGAAG

SEQ ID NO: 131331 - protein, 19 aa, Artificial Sequence
  Description of Artificial Sequence: Synthetic peptide
  Seed: RMCSLMQGSTLPRRSGAAG
RMWSLIQASTLPRRSGAAG

SEQ ID NO: 131332 - protein, 19 aa, Artificial Sequence
  Description of Artificial Sequence: Synthetic peptide
  Seed: RMCSLMQGSTLPRRSGAAG
RMWSLIQASTVPRRSGAAG

SEQ ID NO: 131333 - protein, 19 aa, Artificial Sequence
  Description of Artificial Sequence: Synthetic peptide
  Seed: RMCSLMQGSTLPRRSGAAG
RMWSLIQGSTAPRRSGAAG

SEQ ID NO: 131334 - protein, 19 aa, Artificial Sequence
  Description of Artificial Sequence: Synthetic peptide
  Seed: RMCSLMQGSTLPRRSGAAG
RMWSLIQGSTIPRRSGAAG

SEQ ID NO: 131335 - protein, 19 aa, Artificial Sequence
  Description of Artificial Sequence: Synthetic peptide
  Seed: RMCSLMQGSTLPRRSGAAG
RMWSLIQGSTLPRRSGAAG

SEQ ID NO: 131336 - protein, 19 aa, Artificial Sequence
  Description of Artificial Sequence: Synthetic peptide
  Seed: RMCSLMQGSTLPRRSGAAG
RMWSLIQGSTVPRRSGAAG

SEQ ID NO: 131337 - protein, 19 aa, Artificial Sequence
  Description of Artificial Sequence: Synthetic peptide
  Seed: RMCSLMQGSTLPRRSGAAG
RMWSLIQSSTVPRRSGAAG

SEQ ID NO: 131338 - protein, 19 aa, Artificial Sequence
  Description of Artificial Sequence: Synthetic peptide
  Seed: RMCSLMQGSTLPRRSGAAG
RMWSLLQASTAPRRSGAAG

SEQ ID NO: 131339 - protein, 19 aa, Artificial Sequence
  Description of Artificial Sequence: Synthetic peptide
  Seed: RMCSLMQGSTLPRRSGAAG
RMWSLLQASTIPRRSGAAG

SEQ ID NO: 131340 - protein, 19 aa, Artificial Sequence
  Description of Artificial Sequence: Synthetic peptide
  Seed: RMCSLMQGSTLPRRSGAAG
RMWSLLQASTLPRRSGAAG

SEQ ID NO: 131341 - protein, 19 aa, Artificial Sequence
  Description of Artificial Sequence: Synthetic peptide
  Seed: RMCSLMQGSTLPRRSGAAG
RMWSLLQASTMPRRSGAAG

SEQ ID NO: 131342 - protein, 19 aa, Artificial Sequence
  Description of Artificial Sequence: Synthetic peptide
  Seed: RMCSLMQGSTLPRRSGAAG
RMWSLLQASTTPRRSGAAG

SEQ ID NO: 131343 - protein, 19 aa, Artificial Sequence
  Description of Artificial Sequence: Synthetic peptide
  Seed: RMCSLMQGSTLPRRSGAAG
RMWSLLQASTVPRRSGAAG

SEQ ID NO: 131344 - protein, 19 aa, Artificial Sequence
  Description of Artificial Sequence: Synthetic peptide
  Seed: RMCSLMQGSTLPRRSGAAG
RMWSLLQGSTAPRRSGAAG

SEQ ID NO: 131345 - protein, 19 aa, Artificial Sequence
  Description of Artificial Sequence: Synthetic peptide
  Seed: RMCSLMQGSTLPRRSGAAG
RMWSLLQGSTIPRRSGAAG

SEQ ID NO: 131346 - protein, 19 aa, Artificial Sequence
  Description of Artificial Sequence: Synthetic peptide
  Seed: RMCSLMQGSTLPRRSGAAG
RMWSLLQGSTLPRRSGAAG

SEQ ID NO: 131347 - protein, 19 aa, Artificial Sequence
  Description of Artificial Sequence: Synthetic peptide
  Seed: RMCSLMQGSTLPRRSGAAG
RMWSLLQGSTMPRRSGAAG

SEQ ID NO: 131348 - protein, 19 aa, Artificial Sequence
  Description of Artificial Sequence: Synthetic peptide
  Seed: RMCSLMQGSTLPRRSGAAG
RMWSLLQGSTTPRRSGAAG

SEQ ID NO: 131349 - protein, 19 aa, Artificial Sequence
  Description of Artificial Sequence: Synthetic peptide
  Seed: RMCSLMQGSTLPRRSGAAG
RMWSLLQGSTVPRRSGAAG

SEQ ID NO: 131350 - protein, 19 aa, Artificial Sequence
  Description of Artificial Sequence: Synthetic peptide
  Seed: RMCSLMQGSTLPRRSGAAG
RMWSLLQNSTVPRRSGAAG

SEQ ID NO: 131351 - protein, 19 aa, Artificial Sequence
  Description of Artificial Sequence: Synthetic peptide
  Seed: RMCSLMQGSTLPRRSGAAG
RMWSLLQPSTAPRRSGAAG

SEQ ID NO: 131352 - protein, 19 aa, Artificial Sequence
  Description of Artificial Sequence: Synthetic peptide
  Seed: RMCSLMQGSTLPRRSGAAG
RMWSLLQPSTIPRRSGAAG

SEQ ID NO: 131353 - protein, 19 aa, Artificial Sequence
  Description of Artificial Sequence: Synthetic peptide
  Seed: RMCSLMQGSTLPRRSGAAG
RMWSLLQPSTLPRRSGAAG

SEQ ID NO: 131354 - protein, 19 aa, Artificial Sequence
  Description of Artificial Sequence: Synthetic peptide
  Seed: RMCSLMQGSTLPRRSGAAG
RMWSLLQPSTVPRRSGAAG

SEQ ID NO: 131355 - protein, 19 aa, Artificial Sequence
  Description of Artificial Sequence: Synthetic peptide
  Seed: RMCSLMQGSTLPRRSGAAG
RMWSLLQSSTAPRRSGAAG

SEQ ID NO: 131356 - protein, 19 aa, Artificial Sequence
  Description of Artificial Sequence: Synthetic peptide
  Seed: RMCSLMQGSTLPRRSGAAG
RMWSLLQSSTIPRRSGAAG

SEQ ID NO: 131357 - protein, 19 aa, Artificial Sequence
  Description of Artificial Sequence: Synthetic peptide
  Seed: RMCSLMQGSTLPRRSGAAG
RMWSLLQSSTLPRRSGAAG

SEQ ID NO: 131358 - protein, 19 aa, Artificial Sequence
  Description of Artificial Sequence: Synthetic peptide
  Seed: RMCSLMQGSTLPRRSGAAG
RMWSLLQSSTVPRRSGAAG

SEQ ID NO: 131359 - protein, 19 aa, Artificial Sequence
  Description of Artificial Sequence: Synthetic peptide
  Seed: RMCSLMQGSTLPRRSGAAG
RMWSLLQTSTVPRRSGAAG

SEQ ID NO: 131360 - protein, 19 aa, Artificial Sequence
  Description of Artificial Sequence: Synthetic peptide
  Seed: RMCSLMQGSTLPRRSGAAG
RMWSLMQASTAPRRSGAAG

SEQ ID NO: 131361 - protein, 19 aa, Artificial Sequence
  Description of Artificial Sequence: Synthetic peptide
  Seed: RMCSLMQGSTLPRRSGAAG
RMWSLMQASTIPRRSGAAG

SEQ ID NO: 131362 - protein, 19 aa, Artificial Sequence
  Description of Artificial Sequence: Synthetic peptide
  Seed: RMCSLMQGSTLPRRSGAAG
RMWSLMQASTLPRRSGAAG

SEQ ID NO: 131363 - protein, 19 aa, Artificial Sequence
  Description of Artificial Sequence: Synthetic peptide
  Seed: RMCSLMQGSTLPRRSGAAG
RMWSLMQASTMPRRSGAAG

SEQ ID NO: 131364 - protein, 19 aa, Artificial Sequence
  Description of Artificial Sequence: Synthetic peptide
  Seed: RMCSLMQGSTLPRRSGAAG
RMWSLMQASTTPRRSGAAG

SEQ ID NO: 131365 - protein, 19 aa, Artificial Sequence
  Description of Artificial Sequence: Synthetic peptide
  Seed: RMCSLMQGSTLPRRSGAAG
RMWSLMQASTVPRRSGAAG

SEQ ID NO: 131366 - protein, 19 aa, Artificial Sequence
  Description of Artificial Sequence: Synthetic peptide
  Seed: RMCSLMQGSTLPRRSGAAG
RMWSLMQGSTAPRRSGAAG

SEQ ID NO: 131367 - protein, 19 aa, Artificial Sequence
  Description of Artificial Sequence: Synthetic peptide
  Seed: RMCSLMQGSTLPRRSGAAG
RMWSLMQGSTIPRRSGAAG

SEQ ID NO: 131368 - protein, 19 aa, Artificial Sequence
  Description of Artificial Sequence: Synthetic peptide
  Seed: RMCSLMQGSTLPRRSGAAG
RMWSLMQGSTLPRRSGAAG

SEQ ID NO: 131369 - protein, 19 aa, Artificial Sequence
  Description of Artificial Sequence: Synthetic peptide
  Seed: RMCSLMQGSTLPRRSGAAG
RMWSLMQGSTMPRRSGAAG

SEQ ID NO: 131370 - protein, 19 aa, Artificial Sequence
  Description of Artificial Sequence: Synthetic peptide
  Seed: RMCSLMQGSTLPRRSGAAG
RMWSLMQGSTTPRRSGAAG

SEQ ID NO: 131371 - protein, 19 aa, Artificial Sequence
  Description of Artificial Sequence: Synthetic peptide
  Seed: RMCSLMQGSTLPRRSGAAG
RMWSLMQGSTVPRRSGAAG

SEQ ID NO: 131372 - protein, 19 aa, Artificial Sequence
  Description of Artificial Sequence: Synthetic peptide
  Seed: RMCSLMQGSTLPRRSGAAG
RMWSLMQNSTVPRRSGAAG

SEQ ID NO: 131373 - protein, 19 aa, Artificial Sequence
  Description of Artificial Sequence: Synthetic peptide
  Seed: RMCSLMQGSTLPRRSGAAG
RMWSLMQPSTAPRRSGAAG

SEQ ID NO: 131374 - protein, 19 aa, Artificial Sequence
  Description of Artificial Sequence: Synthetic peptide
  Seed: RMCSLMQGSTLPRRSGAAG
RMWSLMQPSTIPRRSGAAG

SEQ ID NO: 131375 - protein, 19 aa, Artificial Sequence
  Description of Artificial Sequence: Synthetic peptide
  Seed: RMCSLMQGSTLPRRSGAAG
RMWSLMQPSTLPRRSGAAG

SEQ ID NO: 131376 - protein, 19 aa, Artificial Sequence
  Description of Artificial Sequence: Synthetic peptide
  Seed: RMCSLMQGSTLPRRSGAAG
RMWSLMQPSTVPRRSGAAG

SEQ ID NO: 131377 - protein, 19 aa, Artificial Sequence
  Description of Artificial Sequence: Synthetic peptide
  Seed: RMCSLMQGSTLPRRSGAAG
RMWSLMQSSTAPRRSGAAG

SEQ ID NO: 131378 - protein, 19 aa, Artificial Sequence
  Description of Artificial Sequence: Synthetic peptide
  Seed: RMCSLMQGSTLPRRSGAAG
RMWSLMQSSTIPRRSGAAG

SEQ ID NO: 131379 - protein, 19 aa, Artificial Sequence
  Description of Artificial Sequence: Synthetic peptide
  Seed: RMCSLMQGSTLPRRSGAAG
RMWSLMQSSTLPRRSGAAG

SEQ ID NO: 131380 - protein, 19 aa, Artificial Sequence
  Description of Artificial Sequence: Synthetic peptide
  Seed: RMCSLMQGSTLPRRSGAAG
RMWSLMQSSTVPRRSGAAG

SEQ ID NO: 131381 - protein, 19 aa, Artificial Sequence
  Description of Artificial Sequence: Synthetic peptide
  Seed: RMCSLMQGSTLPRRSGAAG
RMWSLMQTSTVPRRSGAAG

SEQ ID NO: 131382 - protein, 19 aa, Artificial Sequence
  Description of Artificial Sequence: Synthetic peptide
  Seed: RMCSLMQGSTLPRRSGAAG
RMYSLAQASTAPRRSGAAG

SEQ ID NO: 131383 - protein, 19 aa, Artificial Sequence
  Description of Artificial Sequence: Synthetic peptide
  Seed: RMCSLMQGSTLPRRSGAAG
RMYSLAQASTIPRRSGAAG

SEQ ID NO: 131384 - protein, 19 aa, Artificial Sequence
  Description of Artificial Sequence: Synthetic peptide
  Seed: RMCSLMQGSTLPRRSGAAG
RMYSLAQASTLPRRSGAAG

SEQ ID NO: 131385 - protein, 19 aa, Artificial Sequence
  Description of Artificial Sequence: Synthetic peptide
  Seed: RMCSLMQGSTLPRRSGAAG
RMYSLAQASTMPRRSGAAG

SEQ ID NO: 131386 - protein, 19 aa, Artificial Sequence
  Description of Artificial Sequence: Synthetic peptide
  Seed: RMCSLMQGSTLPRRSGAAG
RMYSLAQASTTPRRSGAAG

SEQ ID NO: 131387 - protein, 19 aa, Artificial Sequence
  Description of Artificial Sequence: Synthetic peptide
  Seed: RMCSLMQGSTLPRRSGAAG
RMYSLAQASTVPRRSGAAG

SEQ ID NO: 131388 - protein, 19 aa, Artificial Sequence
  Description of Artificial Sequence: Synthetic peptide
  Seed: RMCSLMQGSTLPRRSGAAG
RMYSLAQGSTAPRRSGAAG

SEQ ID NO: 131389 - protein, 19 aa, Artificial Sequence
  Description of Artificial Sequence: Synthetic peptide
  Seed: RMCSLMQGSTLPRRSGAAG
RMYSLAQGSTIPRRSGAAG

SEQ ID NO: 131390 - protein, 19 aa, Artificial Sequence
  Description of Artificial Sequence: Synthetic peptide
  Seed: RMCSLMQGSTLPRRSGAAG
RMYSLAQGSTLPRRSGAAG

SEQ ID NO: 131391 - protein, 19 aa, Artificial Sequence
  Description of Artificial Sequence: Synthetic peptide
  Seed: RMCSLMQGSTLPRRSGAAG
RMYSLAQGSTVPRRSGAAG

SEQ ID NO: 131392 - protein, 19 aa, Artificial Sequence
  Description of Artificial Sequence: Synthetic peptide
  Seed: RMCSLMQGSTLPRRSGAAG
RMYSLAQPSTIPRRSGAAG

SEQ ID NO: 131393 - protein, 19 aa, Artificial Sequence
  Description of Artificial Sequence: Synthetic peptide
  Seed: RMCSLMQGSTLPRRSGAAG
RMYSLAQPSTLPRRSGAAG

SEQ ID NO: 131394 - protein, 19 aa, Artificial Sequence
  Description of Artificial Sequence: Synthetic peptide
  Seed: RMCSLMQGSTLPRRSGAAG
RMYSLAQPSTVPRRSGAAG

SEQ ID NO: 131395 - protein, 19 aa, Artificial Sequence
  Description of Artificial Sequence: Synthetic peptide
  Seed: RMCSLMQGSTLPRRSGAAG
RMYSLAQSSTAPRRSGAAG

SEQ ID NO: 131396 - protein, 19 aa, Artificial Sequence
  Description of Artificial Sequence: Synthetic peptide
  Seed: RMCSLMQGSTLPRRSGAAG
RMYSLAQSSTIPRRSGAAG

SEQ ID NO: 131397 - protein, 19 aa, Artificial Sequence
  Description of Artificial Sequence: Synthetic peptide
  Seed: RMCSLMQGSTLPRRSGAAG
RMYSLAQSSTLPRRSGAAG

SEQ ID NO: 131398 - protein, 19 aa, Artificial Sequence
  Description of Artificial Sequence: Synthetic peptide
  Seed: RMCSLMQGSTLPRRSGAAG
RMYSLAQSSTVPRRSGAAG

SEQ ID NO: 131399 - protein, 19 aa, Artificial Sequence
  Description of Artificial Sequence: Synthetic peptide
  Seed: RMCSLMQGSTLPRRSGAAG
RMYSLIQASTAPRRSGAAG

SEQ ID NO: 131400 - protein, 19 aa, Artificial Sequence
  Description of Artificial Sequence: Synthetic peptide
  Seed: RMCSLMQGSTLPRRSGAAG
RMYSLIQASTIPRRSGAAG

SEQ ID NO: 131401 - protein, 19 aa, Artificial Sequence
  Description of Artificial Sequence: Synthetic peptide
  Seed: RMCSLMQGSTLPRRSGAAG
RMYSLIQASTLPRRSGAAG

SEQ ID NO: 131402 - protein, 19 aa, Artificial Sequence
  Description of Artificial Sequence: Synthetic peptide
  Seed: RMCSLMQGSTLPRRSGAAG
RMYSLIQASTMPRRSGAAG

SEQ ID NO: 131403 - protein, 19 aa, Artificial Sequence
  Description of Artificial Sequence: Synthetic peptide
  Seed: RMCSLMQGSTLPRRSGAAG
RMYSLIQASTSPRRSGAAG

SEQ ID NO: 131404 - protein, 19 aa, Artificial Sequence
  Description of Artificial Sequence: Synthetic peptide
  Seed: RMCSLMQGSTLPRRSGAAG
RMYSLIQASTTPRRSGAAG

SEQ ID NO: 131405 - protein, 19 aa, Artificial Sequence
  Description of Artificial Sequence: Synthetic peptide
  Seed: RMCSLMQGSTLPRRSGAAG
RMYSLIQASTVPRRSGAAG

SEQ ID NO: 131406 - protein, 19 aa, Artificial Sequence
  Description of Artificial Sequence: Synthetic peptide
  Seed: RMCSLMQGSTLPRRSGAAG
RMYSLIQGSTAPRRSGAAG

SEQ ID NO: 131407 - protein, 19 aa, Artificial Sequence
  Description of Artificial Sequence: Synthetic peptide
  Seed: RMCSLMQGSTLPRRSGAAG
RMYSLIQGSTIPRRSGAAG

SEQ ID NO: 131408 - protein, 19 aa, Artificial Sequence
  Description of Artificial Sequence: Synthetic peptide
  Seed: RMCSLMQGSTLPRRSGAAG
RMYSLIQGSTLPRRSGAAG

SEQ ID NO: 131409 - protein, 19 aa, Artificial Sequence
  Description of Artificial Sequence: Synthetic peptide
  Seed: RMCSLMQGSTLPRRSGAAG
RMYSLIQGSTMPRRSGAAG

SEQ ID NO: 131410 - protein, 19 aa, Artificial Sequence
  Description of Artificial Sequence: Synthetic peptide
  Seed: RMCSLMQGSTLPRRSGAAG
RMYSLIQGSTTPRRSGAAG

SEQ ID NO: 131411 - protein, 19 aa, Artificial Sequence
  Description of Artificial Sequence: Synthetic peptide
  Seed: RMCSLMQGSTLPRRSGAAG
RMYSLIQGSTVPRRSGAAG

SEQ ID NO: 131412 - protein, 19 aa, Artificial Sequence
  Description of Artificial Sequence: Synthetic peptide
  Seed: RMCSLMQGSTLPRRSGAAG
RMYSLIQNSTVPRRSGAAG

SEQ ID NO: 131413 - protein, 19 aa, Artificial Sequence
  Description of Artificial Sequence: Synthetic peptide
  Seed: RMCSLMQGSTLPRRSGAAG
RMYSLIQPSTAPRRSGAAG

SEQ ID NO: 131414 - protein, 19 aa, Artificial Sequence
  Description of Artificial Sequence: Synthetic peptide
  Seed: RMCSLMQGSTLPRRSGAAG
RMYSLIQPSTIPRRSGAAG

SEQ ID NO: 131415 - protein, 19 aa, Artificial Sequence
  Description of Artificial Sequence: Synthetic peptide
  Seed: RMCSLMQGSTLPRRSGAAG
RMYSLIQPSTLPRRSGAAG

SEQ ID NO: 131416 - protein, 19 aa, Artificial Sequence
  Description of Artificial Sequence: Synthetic peptide
  Seed: RMCSLMQGSTLPRRSGAAG
RMYSLIQPSTVPRRSGAAG

SEQ ID NO: 131417 - protein, 19 aa, Artificial Sequence
  Description of Artificial Sequence: Synthetic peptide
  Seed: RMCSLMQGSTLPRRSGAAG
RMYSLIQSSTAPRRSGAAG

SEQ ID NO: 131418 - protein, 19 aa, Artificial Sequence
  Description of Artificial Sequence: Synthetic peptide
  Seed: RMCSLMQGSTLPRRSGAAG
RMYSLIQSSTIPRRSGAAG

SEQ ID NO: 131419 - protein, 19 aa, Artificial Sequence
  Description of Artificial Sequence: Synthetic peptide
  Seed: RMCSLMQGSTLPRRSGAAG
RMYSLIQSSTLPRRSGAAG

SEQ ID NO: 131420 - protein, 19 aa, Artificial Sequence
  Description of Artificial Sequence: Synthetic peptide
  Seed: RMCSLMQGSTLPRRSGAAG
RMYSLIQSSTVPRRSGAAG

SEQ ID NO: 131421 - protein, 19 aa, Artificial Sequence
  Description of Artificial Sequence: Synthetic peptide
  Seed: RMCSLMQGSTLPRRSGAAG
RMYSLIQTSTVPRRSGAAG

SEQ ID NO: 131422 - protein, 19 aa, Artificial Sequence
  Description of Artificial Sequence: Synthetic peptide
  Seed: RMCSLMQGSTLPRRSGAAG
RMYSLLQASTAPRRSGAAG

SEQ ID NO: 131423 - protein, 19 aa, Artificial Sequence
  Description of Artificial Sequence: Synthetic peptide
  Seed: RMCSLMQGSTLPRRSGAAG
RMYSLLQASTGPRRSGAAG

SEQ ID NO: 131424 - protein, 19 aa, Artificial Sequence
  Description of Artificial Sequence: Synthetic peptide
  Seed: RMCSLMQGSTLPRRSGAAG
RMYSLLQASTIPRRSGAAG

SEQ ID NO: 131425 - protein, 19 aa, Artificial Sequence
  Description of Artificial Sequence: Synthetic peptide
  Seed: RMCSLMQGSTLPRRSGAAG
RMYSLLQASTLPRRSGAAG

SEQ ID NO: 131426 - protein, 19 aa, Artificial Sequence
  Description of Artificial Sequence: Synthetic peptide
  Seed: RMCSLMQGSTLPRRSGAAG
RMYSLLQASTMPRRSGAAG

SEQ ID NO: 131427 - protein, 19 aa, Artificial Sequence
  Description of Artificial Sequence: Synthetic peptide
  Seed: RMCSLMQGSTLPRRSGAAG
RMYSLLQASTSPRRSGAAG

SEQ ID NO: 131428 - protein, 19 aa, Artificial Sequence
  Description of Artificial Sequence: Synthetic peptide
  Seed: RMCSLMQGSTLPRRSGAAG
RMYSLLQASTTPRRSGAAG

SEQ ID NO: 131429 - protein, 19 aa, Artificial Sequence
  Description of Artificial Sequence: Synthetic peptide
  Seed: RMCSLMQGSTLPRRSGAAG
RMYSLLQASTVPRRSGAAG

SEQ ID NO: 131430 - protein, 19 aa, Artificial Sequence
  Description of Artificial Sequence: Synthetic peptide
  Seed: RMCSLMQGSTLPRRSGAAG
RMYSLLQGSTAPRRSGAAG

SEQ ID NO: 131431 - protein, 19 aa, Artificial Sequence
  Description of Artificial Sequence: Synthetic peptide
  Seed: RMCSLMQGSTLPRRSGAAG
RMYSLLQGSTGPRRSGAAG

SEQ ID NO: 131432 - protein, 19 aa, Artificial Sequence
  Description of Artificial Sequence: Synthetic peptide
  Seed: RMCSLMQGSTLPRRSGAAG
RMYSLLQGSTIPRRSGAAG

SEQ ID NO: 131433 - protein, 19 aa, Artificial Sequence
  Description of Artificial Sequence: Synthetic peptide
  Seed: RMCSLMQGSTLPRRSGAAG
RMYSLLQGSTLPRRSGAAG

SEQ ID NO: 131434 - protein, 19 aa, Artificial Sequence
  Description of Artificial Sequence: Synthetic peptide
  Seed: RMCSLMQGSTLPRRSGAAG
RMYSLLQGSTMPRRSGAAG

SEQ ID NO: 131435 - protein, 19 aa, Artificial Sequence
  Description of Artificial Sequence: Synthetic peptide
  Seed: RMCSLMQGSTLPRRSGAAG
RMYSLLQGSTSPRRSGAAG

SEQ ID NO: 131436 - protein, 19 aa, Artificial Sequence
  Description of Artificial Sequence: Synthetic peptide
  Seed: RMCSLMQGSTLPRRSGAAG
RMYSLLQGSTTPRRSGAAG

SEQ ID NO: 131437 - protein, 19 aa, Artificial Sequence
  Description of Artificial Sequence: Synthetic peptide
  Seed: RMCSLMQGSTLPRRSGAAG
RMYSLLQGSTVPRRSGAAG

SEQ ID NO: 131438 - protein, 19 aa, Artificial Sequence
  Description of Artificial Sequence: Synthetic peptide
  Seed: RMCSLMQGSTLPRRSGAAG
RMYSLLQNSTAPRRSGAAG

SEQ ID NO: 131439 - protein, 19 aa, Artificial Sequence
  Description of Artificial Sequence: Synthetic peptide
  Seed: RMCSLMQGSTLPRRSGAAG
RMYSLLQNSTIPRRSGAAG

SEQ ID NO: 131440 - protein, 19 aa, Artificial Sequence
  Description of Artificial Sequence: Synthetic peptide
  Seed: RMCSLMQGSTLPRRSGAAG
RMYSLLQNSTLPRRSGAAG

SEQ ID NO: 131441 - protein, 19 aa, Artificial Sequence
  Description of Artificial Sequence: Synthetic peptide
  Seed: RMCSLMQGSTLPRRSGAAG
RMYSLLQNSTVPRRSGAAG

SEQ ID NO: 131442 - protein, 19 aa, Artificial Sequence
  Description of Artificial Sequence: Synthetic peptide
  Seed: RMCSLMQGSTLPRRSGAAG
RMYSLLQPSTAPRRSGAAG

SEQ ID NO: 131443 - protein, 19 aa, Artificial Sequence
  Description of Artificial Sequence: Synthetic peptide
  Seed: RMCSLMQGSTLPRRSGAAG
RMYSLLQPSTIPRRSGAAG

SEQ ID NO: 131444 - protein, 19 aa, Artificial Sequence
  Description of Artificial Sequence: Synthetic peptide
  Seed: RMCSLMQGSTLPRRSGAAG
RMYSLLQPSTLPRRSGAAG

SEQ ID NO: 131445 - protein, 19 aa, Artificial Sequence
  Description of Artificial Sequence: Synthetic peptide
  Seed: RMCSLMQGSTLPRRSGAAG
RMYSLLQPSTMPRRSGAAG

SEQ ID NO: 131446 - protein, 19 aa, Artificial Sequence
  Description of Artificial Sequence: Synthetic peptide
  Seed: RMCSLMQGSTLPRRSGAAG
RMYSLLQPSTSPRRSGAAG

SEQ ID NO: 131447 - protein, 19 aa, Artificial Sequence
  Description of Artificial Sequence: Synthetic peptide
  Seed: RMCSLMQGSTLPRRSGAAG
RMYSLLQPSTTPRRSGAAG

SEQ ID NO: 131448 - protein, 19 aa, Artificial Sequence
  Description of Artificial Sequence: Synthetic peptide
  Seed: RMCSLMQGSTLPRRSGAAG
RMYSLLQPSTVPRRSGAAG

SEQ ID NO: 131449 - protein, 19 aa, Artificial Sequence
  Description of Artificial Sequence: Synthetic peptide
  Seed: RMCSLMQGSTLPRRSGAAG
RMYSLLQSSTAPRRSGAAG

SEQ ID NO: 131450 - protein, 19 aa, Artificial Sequence
  Description of Artificial Sequence: Synthetic peptide
  Seed: RMCSLMQGSTLPRRSGAAG
RMYSLLQSSTIPRRSGAAG

SEQ ID NO: 131451 - protein, 19 aa, Artificial Sequence
  Description of Artificial Sequence: Synthetic peptide
  Seed: RMCSLMQGSTLPRRSGAAG
RMYSLLQSSTLPRRSGAAG

SEQ ID NO: 131452 - protein, 19 aa, Artificial Sequence
  Description of Artificial Sequence: Synthetic peptide
  Seed: RMCSLMQGSTLPRRSGAAG
RMYSLLQSSTMPRRSGAAG

SEQ ID NO: 131453 - protein, 19 aa, Artificial Sequence
  Description of Artificial Sequence: Synthetic peptide
  Seed: RMCSLMQGSTLPRRSGAAG
RMYSLLQSSTSPRRSGAAG

SEQ ID NO: 131454 - protein, 19 aa, Artificial Sequence
  Description of Artificial Sequence: Synthetic peptide
  Seed: RMCSLMQGSTLPRRSGAAG
RMYSLLQSSTTPRRSGAAG

SEQ ID NO: 131455 - protein, 19 aa, Artificial Sequence
  Description of Artificial Sequence: Synthetic peptide
  Seed: RMCSLMQGSTLPRRSGAAG
RMYSLLQSSTVPRRSGAAG

SEQ ID NO: 131456 - protein, 19 aa, Artificial Sequence
  Description of Artificial Sequence: Synthetic peptide
  Seed: RMCSLMQGSTLPRRSGAAG
RMYSLLQTSTAPRRSGAAG

SEQ ID NO: 131457 - protein, 19 aa, Artificial Sequence
  Description of Artificial Sequence: Synthetic peptide
  Seed: RMCSLMQGSTLPRRSGAAG
RMYSLLQTSTIPRRSGAAG

SEQ ID NO: 131458 - protein, 19 aa, Artificial Sequence
  Description of Artificial Sequence: Synthetic peptide
  Seed: RMCSLMQGSTLPRRSGAAG
RMYSLLQTSTLPRRSGAAG

SEQ ID NO: 131459 - protein, 19 aa, Artificial Sequence
  Description of Artificial Sequence: Synthetic peptide
  Seed: RMCSLMQGSTLPRRSGAAG
RMYSLLQTSTVPRRSGAAG

SEQ ID NO: 131460 - protein, 19 aa, Artificial Sequence
  Description of Artificial Sequence: Synthetic peptide
  Seed: RMCSLMQGSTLPRRSGAAG
RMYSLLQVSTAPRRSGAAG

SEQ ID NO: 131461 - protein, 19 aa, Artificial Sequence
  Description of Artificial Sequence: Synthetic peptide
  Seed: RMCSLMQGSTLPRRSGAAG
RMYSLLQVSTIPRRSGAAG

SEQ ID NO: 131462 - protein, 19 aa, Artificial Sequence
  Description of Artificial Sequence: Synthetic peptide
  Seed: RMCSLMQGSTLPRRSGAAG
RMYSLLQVSTLPRRSGAAG

SEQ ID NO: 131463 - protein, 19 aa, Artificial Sequence
  Description of Artificial Sequence: Synthetic peptide
  Seed: RMCSLMQGSTLPRRSGAAG
RMYSLLQVSTVPRRSGAAG

SEQ ID NO: 131464 - protein, 19 aa, Artificial Sequence
  Description of Artificial Sequence: Synthetic peptide
  Seed: RMCSLMQGSTLPRRSGAAG
RMYSLMQASTAPRRSGAAG

SEQ ID NO: 131465 - protein, 19 aa, Artificial Sequence
  Description of Artificial Sequence: Synthetic peptide
  Seed: RMCSLMQGSTLPRRSGAAG
RMYSLMQASTGPRRSGAAG

SEQ ID NO: 131466 - protein, 19 aa, Artificial Sequence
  Description of Artificial Sequence: Synthetic peptide
  Seed: RMCSLMQGSTLPRRSGAAG
RMYSLMQASTIPRRSGAAG

SEQ ID NO: 131467 - protein, 19 aa, Artificial Sequence
  Description of Artificial Sequence: Synthetic peptide
  Seed: RMCSLMQGSTLPRRSGAAG
RMYSLMQASTLPRRSGAAG

SEQ ID NO: 131468 - protein, 19 aa, Artificial Sequence
  Description of Artificial Sequence: Synthetic peptide
  Seed: RMCSLMQGSTLPRRSGAAG
RMYSLMQASTMPRRSGAAG

SEQ ID NO: 131469 - protein, 19 aa, Artificial Sequence
  Description of Artificial Sequence: Synthetic peptide
  Seed: RMCSLMQGSTLPRRSGAAG
RMYSLMQASTSPRRSGAAG

SEQ ID NO: 131470 - protein, 19 aa, Artificial Sequence
  Description of Artificial Sequence: Synthetic peptide
  Seed: RMCSLMQGSTLPRRSGAAG
RMYSLMQASTTPRRSGAAG

SEQ ID NO: 131471 - protein, 19 aa, Artificial Sequence
  Description of Artificial Sequence: Synthetic peptide
  Seed: RMCSLMQGSTLPRRSGAAG
RMYSLMQASTVPRRSGAAG

SEQ ID NO: 131472 - protein, 19 aa, Artificial Sequence
  Description of Artificial Sequence: Synthetic peptide
  Seed: RMCSLMQGSTLPRRSGAAG
RMYSLMQGSTAPRRSGAAG

SEQ ID NO: 131473 - protein, 19 aa, Artificial Sequence
  Description of Artificial Sequence: Synthetic peptide
  Seed: RMCSLMQGSTLPRRSGAAG
RMYSLMQGSTIPRRSGAAG

SEQ ID NO: 131474 - protein, 19 aa, Artificial Sequence
  Description of Artificial Sequence: Synthetic peptide
  Seed: RMCSLMQGSTLPRRSGAAG
RMYSLMQGSTLPRRSGAAG

SEQ ID NO: 131475 - protein, 19 aa, Artificial Sequence
  Description of Artificial Sequence: Synthetic peptide
  Seed: RMCSLMQGSTLPRRSGAAG
RMYSLMQGSTMPRRSGAAG

SEQ ID NO: 131476 - protein, 19 aa, Artificial Sequence
  Description of Artificial Sequence: Synthetic peptide
  Seed: RMCSLMQGSTLPRRSGAAG
RMYSLMQGSTSPRRSGAAG

SEQ ID NO: 131477 - protein, 19 aa, Artificial Sequence
  Description of Artificial Sequence: Synthetic peptide
  Seed: RMCSLMQGSTLPRRSGAAG
RMYSLMQGSTTPRRSGAAG

SEQ ID NO: 131478 - protein, 19 aa, Artificial Sequence
  Description of Artificial Sequence: Synthetic peptide
  Seed: RMCSLMQGSTLPRRSGAAG
RMYSLMQGSTVPRRSGAAG

SEQ ID NO: 131479 - protein, 19 aa, Artificial Sequence
  Description of Artificial Sequence: Synthetic peptide
  Seed: RMCSLMQGSTLPRRSGAAG
RMYSLMQNSTAPRRSGAAG

SEQ ID NO: 131480 - protein, 19 aa, Artificial Sequence
  Description of Artificial Sequence: Synthetic peptide
  Seed: RMCSLMQGSTLPRRSGAAG
RMYSLMQNSTIPRRSGAAG

SEQ ID NO: 131481 - protein, 19 aa, Artificial Sequence
  Description of Artificial Sequence: Synthetic peptide
  Seed: RMCSLMQGSTLPRRSGAAG
RMYSLMQNSTLPRRSGAAG

SEQ ID NO: 131482 - protein, 19 aa, Artificial Sequence
  Description of Artificial Sequence: Synthetic peptide
  Seed: RMCSLMQGSTLPRRSGAAG
RMYSLMQNSTVPRRSGAAG

SEQ ID NO: 131483 - protein, 19 aa, Artificial Sequence
  Description of Artificial Sequence: Synthetic peptide
  Seed: RMCSLMQGSTLPRRSGAAG
RMYSLMQPSTAPRRSGAAG

SEQ ID NO: 131484 - protein, 19 aa, Artificial Sequence
  Description of Artificial Sequence: Synthetic peptide
  Seed: RMCSLMQGSTLPRRSGAAG
RMYSLMQPSTIPRRSGAAG

SEQ ID NO: 131485 - protein, 19 aa, Artificial Sequence
  Description of Artificial Sequence: Synthetic peptide
  Seed: RMCSLMQGSTLPRRSGAAG
RMYSLMQPSTLPRRSGAAG

SEQ ID NO: 131486 - protein, 19 aa, Artificial Sequence
  Description of Artificial Sequence: Synthetic peptide
  Seed: RMCSLMQGSTLPRRSGAAG
RMYSLMQPSTMPRRSGAAG

SEQ ID NO: 131487 - protein, 19 aa, Artificial Sequence
  Description of Artificial Sequence: Synthetic peptide
  Seed: RMCSLMQGSTLPRRSGAAG
RMYSLMQPSTTPRRSGAAG

SEQ ID NO: 131488 - protein, 19 aa, Artificial Sequence
  Description of Artificial Sequence: Synthetic peptide
  Seed: RMCSLMQGSTLPRRSGAAG
RMYSLMQPSTVPRRSGAAG

SEQ ID NO: 131489 - protein, 19 aa, Artificial Sequence
  Description of Artificial Sequence: Synthetic peptide
  Seed: RMCSLMQGSTLPRRSGAAG
RMYSLMQSSTAPRRSGAAG

SEQ ID NO: 131490 - protein, 19 aa, Artificial Sequence
  Description of Artificial Sequence: Synthetic peptide
  Seed: RMCSLMQGSTLPRRSGAAG
RMYSLMQSSTIPRRSGAAG

SEQ ID NO: 131491 - protein, 19 aa, Artificial Sequence
  Description of Artificial Sequence: Synthetic peptide
  Seed: RMCSLMQGSTLPRRSGAAG
RMYSLMQSSTLPRRSGAAG

SEQ ID NO: 131492 - protein, 19 aa, Artificial Sequence
  Description of Artificial Sequence: Synthetic peptide
  Seed: RMCSLMQGSTLPRRSGAAG
RMYSLMQSSTMPRRSGAAG

SEQ ID NO: 131493 - protein, 19 aa, Artificial Sequence
  Description of Artificial Sequence: Synthetic peptide
  Seed: RMCSLMQGSTLPRRSGAAG
RMYSLMQSSTSPRRSGAAG

SEQ ID NO: 131494 - protein, 19 aa, Artificial Sequence
  Description of Artificial Sequence: Synthetic peptide
  Seed: RMCSLMQGSTLPRRSGAAG
RMYSLMQSSTTPRRSGAAG

SEQ ID NO: 131495 - protein, 19 aa, Artificial Sequence
  Description of Artificial Sequence: Synthetic peptide
  Seed: RMCSLMQGSTLPRRSGAAG
RMYSLMQSSTVPRRSGAAG

SEQ ID NO: 131496 - protein, 19 aa, Artificial Sequence
  Description of Artificial Sequence: Synthetic peptide
  Seed: RMCSLMQGSTLPRRSGAAG
RMYSLMQTSTAPRRSGAAG

SEQ ID NO: 131497 - protein, 19 aa, Artificial Sequence
  Description of Artificial Sequence: Synthetic peptide
  Seed: RMCSLMQGSTLPRRSGAAG
RMYSLMQTSTIPRRSGAAG

SEQ ID NO: 131498 - protein, 19 aa, Artificial Sequence
  Description of Artificial Sequence: Synthetic peptide
  Seed: RMCSLMQGSTLPRRSGAAG
RMYSLMQTSTLPRRSGAAG

SEQ ID NO: 131499 - protein, 19 aa, Artificial Sequence
  Description of Artificial Sequence: Synthetic peptide
  Seed: RMCSLMQGSTLPRRSGAAG
RMYSLMQTSTVPRRSGAAG

SEQ ID NO: 131500 - protein, 19 aa, Artificial Sequence
  Description of Artificial Sequence: Synthetic peptide
  Seed: RMCSLMQGSTLPRRSGAAG
RMYSLMQVSTAPRRSGAAG

SEQ ID NO: 131501 - protein, 19 aa, Artificial Sequence
  Description of Artificial Sequence: Synthetic peptide
  Seed: RMCSLMQGSTLPRRSGAAG
RMYSLMQVSTIPRRSGAAG

SEQ ID NO: 131502 - protein, 19 aa, Artificial Sequence
  Description of Artificial Sequence: Synthetic peptide
  Seed: RMCSLMQGSTLPRRSGAAG
RMYSLMQVSTLPRRSGAAG

SEQ ID NO: 131503 - protein, 19 aa, Artificial Sequence
  Description of Artificial Sequence: Synthetic peptide
  Seed: RMCSLMQGSTLPRRSGAAG
RMYSLMQVSTVPRRSGAAG

SEQ ID NO: 131504 - protein, 19 aa, Artificial Sequence
  Description of Artificial Sequence: Synthetic peptide
  Seed: RMCSLMQGSTLPRRSGAAG
RMYSLQQASTAPRRSGAAG

SEQ ID NO: 131505 - protein, 19 aa, Artificial Sequence
  Description of Artificial Sequence: Synthetic peptide
  Seed: RMCSLMQGSTLPRRSGAAG
RMYSLQQASTIPRRSGAAG

SEQ ID NO: 131506 - protein, 19 aa, Artificial Sequence
  Description of Artificial Sequence: Synthetic peptide
  Seed: RMCSLMQGSTLPRRSGAAG
RMYSLQQASTLPRRSGAAG

SEQ ID NO: 131507 - protein, 19 aa, Artificial Sequence
  Description of Artificial Sequence: Synthetic peptide
  Seed: RMCSLMQGSTLPRRSGAAG
RMYSLQQASTVPRRSGAAG

SEQ ID NO: 131508 - protein, 19 aa, Artificial Sequence
  Description of Artificial Sequence: Synthetic peptide
  Seed: RMCSLMQGSTLPRRSGAAG
RMYSLQQGSTIPRRSGAAG

SEQ ID NO: 131509 - protein, 19 aa, Artificial Sequence
  Description of Artificial Sequence: Synthetic peptide
  Seed: RMCSLMQGSTLPRRSGAAG
RMYSLQQGSTLPRRSGAAG

SEQ ID NO: 131510 - protein, 19 aa, Artificial Sequence
  Description of Artificial Sequence: Synthetic peptide
  Seed: RMCSLMQGSTLPRRSGAAG
RMYSLQQGSTVPRRSGAAG

SEQ ID NO: 131511 - protein, 19 aa, Artificial Sequence
  Description of Artificial Sequence: Synthetic peptide
  Seed: RMCSLMQGSTLPRRSGAAG
RMYSLQQSSTIPRRSGAAG

SEQ ID NO: 131512 - protein, 19 aa, Artificial Sequence
  Description of Artificial Sequence: Synthetic peptide
  Seed: RMCSLMQGSTLPRRSGAAG
RMYSLQQSSTLPRRSGAAG

SEQ ID NO: 131513 - protein, 19 aa, Artificial Sequence
  Description of Artificial Sequence: Synthetic peptide
  Seed: RMCSLMQGSTLPRRSGAAG
RMYSLQQSSTVPRRSGAAG

SEQ ID NO: 131514 - protein, 19 aa, Artificial Sequence
  Description of Artificial Sequence: Synthetic peptide
  Seed: RMCSLMQGSTLPRRSGAAG
RMYSLSQASTIPRRSGAAG

SEQ ID NO: 131515 - protein, 19 aa, Artificial Sequence
  Description of Artificial Sequence: Synthetic peptide
  Seed: RMCSLMQGSTLPRRSGAAG
RMYSLSQASTLPRRSGAAG

SEQ ID NO: 131516 - protein, 19 aa, Artificial Sequence
  Description of Artificial Sequence: Synthetic peptide
  Seed: RMCSLMQGSTLPRRSGAAG
RMYSLSQASTVPRRSGAAG

SEQ ID NO: 131517 - protein, 19 aa, Artificial Sequence
  Description of Artificial Sequence: Synthetic peptide
  Seed: RMCSLMQGSTLPRRSGAAG
RMYSLVQASTAPRRSGAAG

SEQ ID NO: 131518 - protein, 19 aa, Artificial Sequence
  Description of Artificial Sequence: Synthetic peptide
  Seed: RMCSLMQGSTLPRRSGAAG
RMYSLVQASTIPRRSGAAG

SEQ ID NO: 131519 - protein, 19 aa, Artificial Sequence
  Description of Artificial Sequence: Synthetic peptide
  Seed: RMCSLMQGSTLPRRSGAAG
RMYSLVQASTLPRRSGAAG

SEQ ID NO: 131520 - protein, 19 aa, Artificial Sequence
  Description of Artificial Sequence: Synthetic peptide
  Seed: RMCSLMQGSTLPRRSGAAG
RMYSLVQASTVPRRSGAAG

SEQ ID NO: 131521 - protein, 19 aa, Artificial Sequence
  Description of Artificial Sequence: Synthetic peptide
  Seed: RMCSLMQGSTLPRRSGAAG
RMYSLVQGSTAPRRSGAAG

SEQ ID NO: 131522 - protein, 19 aa, Artificial Sequence
  Description of Artificial Sequence: Synthetic peptide
  Seed: RMCSLMQGSTLPRRSGAAG
RMYSLVQGSTIPRRSGAAG

SEQ ID NO: 131523 - protein, 19 aa, Artificial Sequence
  Description of Artificial Sequence: Synthetic peptide
  Seed: RMCSLMQGSTLPRRSGAAG
RMYSLVQGSTLPRRSGAAG

SEQ ID NO: 131524 - protein, 19 aa, Artificial Sequence
  Description of Artificial Sequence: Synthetic peptide
  Seed: RMCSLMQGSTLPRRSGAAG
RMYSLVQGSTVPRRSGAAG

SEQ ID NO: 131525 - protein, 19 aa, Artificial Sequence
  Description of Artificial Sequence: Synthetic peptide
  Seed: RMCSLMQGSTLPRRSGAAG
RMYSLVQPSTVPRRSGAAG

SEQ ID NO: 131526 - protein, 19 aa, Artificial Sequence
  Description of Artificial Sequence: Synthetic peptide
  Seed: RMCSLMQGSTLPRRSGAAG
RMYSLVQSSTIPRRSGAAG

SEQ ID NO: 131527 - protein, 19 aa, Artificial Sequence
  Description of Artificial Sequence: Synthetic peptide
  Seed: RMCSLMQGSTLPRRSGAAG
RMYSLVQSSTLPRRSGAAG

SEQ ID NO: 131528 - protein, 19 aa, Artificial Sequence
  Description of Artificial Sequence: Synthetic peptide
  Seed: RMCSLMQGSTLPRRSGAAG
RMYSLVQSSTVPRRSGAAG

SEQ ID NO: 131529 - protein, 19 aa, Artificial Sequence
  Description of Artificial Sequence: Synthetic peptide
  Seed: RMCSLMQGSTLPRRSGAAG
RMCSLMFGSALARRAGAAG

SEQ ID NO: 131530 - protein, 19 aa, Artificial Sequence
  Description of Artificial Sequence: Synthetic peptide
  Seed: RMCSLMQGSTLPRRSGAAG
RMCSLMFGSALARRIGAAG

SEQ ID NO: 131531 - protein, 19 aa, Artificial Sequence
  Description of Artificial Sequence: Synthetic peptide
  Seed: RMCSLMQGSTLPRRSGAAG
RMCSLMFGSALARRNGAAG

SEQ ID NO: 131532 - protein, 19 aa, Artificial Sequence
  Description of Artificial Sequence: Synthetic peptide
  Seed: RMCSLMQGSTLPRRSGAAG
RMCSLMFGSALARRSGAAG

SEQ ID NO: 131533 - protein, 19 aa, Artificial Sequence
  Description of Artificial Sequence: Synthetic peptide
  Seed: RMCSLMQGSTLPRRSGAAG
RMCSLMFGSALARRVGAAG

SEQ ID NO: 131534 - protein, 19 aa, Artificial Sequence
  Description of Artificial Sequence: Synthetic peptide
  Seed: RMCSLMQGSTLPRRSGAAG
RMCSLMFGSALSRRAGAAG

SEQ ID NO: 131535 - protein, 19 aa, Artificial Sequence
  Description of Artificial Sequence: Synthetic peptide
  Seed: RMCSLMQGSTLPRRSGAAG
RMCSLMFGSILARRAGAAG

SEQ ID NO: 131536 - protein, 19 aa, Artificial Sequence
  Description of Artificial Sequence: Synthetic peptide
  Seed: RMCSLMQGSTLPRRSGAAG
RMCSLMFGSILARRIGAAG

SEQ ID NO: 131537 - protein, 19 aa, Artificial Sequence
  Description of Artificial Sequence: Synthetic peptide
  Seed: RMCSLMQGSTLPRRSGAAG
RMCSLMFGSILARRLGAAG

SEQ ID NO: 131538 - protein, 19 aa, Artificial Sequence
  Description of Artificial Sequence: Synthetic peptide
  Seed: RMCSLMQGSTLPRRSGAAG
RMCSLMFGSILARRNGAAG

SEQ ID NO: 131539 - protein, 19 aa, Artificial Sequence
  Description of Artificial Sequence: Synthetic peptide
  Seed: RMCSLMQGSTLPRRSGAAG
RMCSLMFGSILARRSGAAG

SEQ ID NO: 131540 - protein, 19 aa, Artificial Sequence
  Description of Artificial Sequence: Synthetic peptide
  Seed: RMCSLMQGSTLPRRSGAAG
RMCSLMFGSILARRTGAAG

SEQ ID NO: 131541 - protein, 19 aa, Artificial Sequence
  Description of Artificial Sequence: Synthetic peptide
  Seed: RMCSLMQGSTLPRRSGAAG
RMCSLMFGSILARRVGAAG

SEQ ID NO: 131542 - protein, 19 aa, Artificial Sequence
  Description of Artificial Sequence: Synthetic peptide
  Seed: RMCSLMQGSTLPRRSGAAG
RMCSLMFGSILPRRAGAAG

SEQ ID NO: 131543 - protein, 19 aa, Artificial Sequence
  Description of Artificial Sequence: Synthetic peptide
  Seed: RMCSLMQGSTLPRRSGAAG
RMCSLMFGSILPRRSGAAG

SEQ ID NO: 131544 - protein, 19 aa, Artificial Sequence
  Description of Artificial Sequence: Synthetic peptide
  Seed: RMCSLMQGSTLPRRSGAAG
RMCSLMFGSILPRRVGAAG

SEQ ID NO: 131545 - protein, 19 aa, Artificial Sequence
  Description of Artificial Sequence: Synthetic peptide
  Seed: RMCSLMQGSTLPRRSGAAG
RMCSLMFGSILSRRAGAAG

SEQ ID NO: 131546 - protein, 19 aa, Artificial Sequence
  Description of Artificial Sequence: Synthetic peptide
  Seed: RMCSLMQGSTLPRRSGAAG
RMCSLMFGSILSRRNGAAG

SEQ ID NO: 131547 - protein, 19 aa, Artificial Sequence
  Description of Artificial Sequence: Synthetic peptide
  Seed: RMCSLMQGSTLPRRSGAAG
RMCSLMFGSILSRRSGAAG

SEQ ID NO: 131548 - protein, 19 aa, Artificial Sequence
  Description of Artificial Sequence: Synthetic peptide
  Seed: RMCSLMQGSTLPRRSGAAG
RMCSLMFGSILSRRVGAAG

SEQ ID NO: 131549 - protein, 19 aa, Artificial Sequence
  Description of Artificial Sequence: Synthetic peptide
  Seed: RMCSLMQGSTLPRRSGAAG
RMCSLMFGSILTRRAGAAG

SEQ ID NO: 131550 - protein, 19 aa, Artificial Sequence
  Description of Artificial Sequence: Synthetic peptide
  Seed: RMCSLMQGSTLPRRSGAAG
RMCSLMFGSILTRRNGAAG

SEQ ID NO: 131551 - protein, 19 aa, Artificial Sequence
  Description of Artificial Sequence: Synthetic peptide
  Seed: RMCSLMQGSTLPRRSGAAG
RMCSLMFGSILTRRSGAAG

SEQ ID NO: 131552 - protein, 19 aa, Artificial Sequence
  Description of Artificial Sequence: Synthetic peptide
  Seed: RMCSLMQGSTLPRRSGAAG
RMCSLMFGSILTRRVGAAG

SEQ ID NO: 131553 - protein, 19 aa, Artificial Sequence
  Description of Artificial Sequence: Synthetic peptide
  Seed: RMCSLMQGSTLPRRSGAAG
RMCSLMFGSILVRRAGAAG

SEQ ID NO: 131554 - protein, 19 aa, Artificial Sequence
  Description of Artificial Sequence: Synthetic peptide
  Seed: RMCSLMQGSTLPRRSGAAG
RMCSLMFGSILVRRNGAAG

SEQ ID NO: 131555 - protein, 19 aa, Artificial Sequence
  Description of Artificial Sequence: Synthetic peptide
  Seed: RMCSLMQGSTLPRRSGAAG
RMCSLMFGSLLARRAGAAG

SEQ ID NO: 131556 - protein, 19 aa, Artificial Sequence
  Description of Artificial Sequence: Synthetic peptide
  Seed: RMCSLMQGSTLPRRSGAAG
RMCSLMFGSLLARRIGAAG

SEQ ID NO: 131557 - protein, 19 aa, Artificial Sequence
  Description of Artificial Sequence: Synthetic peptide
  Seed: RMCSLMQGSTLPRRSGAAG
RMCSLMFGSLLARRLGAAG

SEQ ID NO: 131558 - protein, 19 aa, Artificial Sequence
  Description of Artificial Sequence: Synthetic peptide
  Seed: RMCSLMQGSTLPRRSGAAG
RMCSLMFGSLLARRMGAAG

SEQ ID NO: 131559 - protein, 19 aa, Artificial Sequence
  Description of Artificial Sequence: Synthetic peptide
  Seed: RMCSLMQGSTLPRRSGAAG
RMCSLMFGSLLARRNGAAG

SEQ ID NO: 131560 - protein, 19 aa, Artificial Sequence
  Description of Artificial Sequence: Synthetic peptide
  Seed: RMCSLMQGSTLPRRSGAAG
RMCSLMFGSLLARRSGAAG

SEQ ID NO: 131561 - protein, 19 aa, Artificial Sequence
  Description of Artificial Sequence: Synthetic peptide
  Seed: RMCSLMQGSTLPRRSGAAG
RMCSLMFGSLLARRTGAAG

SEQ ID NO: 131562 - protein, 19 aa, Artificial Sequence
  Description of Artificial Sequence: Synthetic peptide
  Seed: RMCSLMQGSTLPRRSGAAG
RMCSLMFGSLLARRVGAAG

SEQ ID NO: 131563 - protein, 19 aa, Artificial Sequence
  Description of Artificial Sequence: Synthetic peptide
  Seed: RMCSLMQGSTLPRRSGAAG
RMCSLMFGSLLGRRAGAAG

SEQ ID NO: 131564 - protein, 19 aa, Artificial Sequence
  Description of Artificial Sequence: Synthetic peptide
  Seed: RMCSLMQGSTLPRRSGAAG
RMCSLMFGSLLPRRAGAAG

SEQ ID NO: 131565 - protein, 19 aa, Artificial Sequence
  Description of Artificial Sequence: Synthetic peptide
  Seed: RMCSLMQGSTLPRRSGAAG
RMCSLMFGSLLPRRIGAAG

SEQ ID NO: 131566 - protein, 19 aa, Artificial Sequence
  Description of Artificial Sequence: Synthetic peptide
  Seed: RMCSLMQGSTLPRRSGAAG
RMCSLMFGSLLPRRNGAAG

SEQ ID NO: 131567 - protein, 19 aa, Artificial Sequence
  Description of Artificial Sequence: Synthetic peptide
  Seed: RMCSLMQGSTLPRRSGAAG
RMCSLMFGSLLPRRSGAAG

SEQ ID NO: 131568 - protein, 19 aa, Artificial Sequence
  Description of Artificial Sequence: Synthetic peptide
  Seed: RMCSLMQGSTLPRRSGAAG
RMCSLMFGSLLPRRVGAAG

SEQ ID NO: 131569 - protein, 19 aa, Artificial Sequence
  Description of Artificial Sequence: Synthetic peptide
  Seed: RMCSLMQGSTLPRRSGAAG
RMCSLMFGSLLSRRAGAAG

SEQ ID NO: 131570 - protein, 19 aa, Artificial Sequence
  Description of Artificial Sequence: Synthetic peptide
  Seed: RMCSLMQGSTLPRRSGAAG
RMCSLMFGSLLSRRIGAAG

SEQ ID NO: 131571 - protein, 19 aa, Artificial Sequence
  Description of Artificial Sequence: Synthetic peptide
  Seed: RMCSLMQGSTLPRRSGAAG
RMCSLMFGSLLSRRLGAAG

SEQ ID NO: 131572 - protein, 19 aa, Artificial Sequence
  Description of Artificial Sequence: Synthetic peptide
  Seed: RMCSLMQGSTLPRRSGAAG
RMCSLMFGSLLSRRNGAAG

SEQ ID NO: 131573 - protein, 19 aa, Artificial Sequence
  Description of Artificial Sequence: Synthetic peptide
  Seed: RMCSLMQGSTLPRRSGAAG
RMCSLMFGSLLSRRSGAAG

SEQ ID NO: 131574 - protein, 19 aa, Artificial Sequence
  Description of Artificial Sequence: Synthetic peptide
  Seed: RMCSLMQGSTLPRRSGAAG
RMCSLMFGSLLSRRTGAAG

SEQ ID NO: 131575 - protein, 19 aa, Artificial Sequence
  Description of Artificial Sequence: Synthetic peptide
  Seed: RMCSLMQGSTLPRRSGAAG
RMCSLMFGSLLSRRVGAAG

SEQ ID NO: 131576 - protein, 19 aa, Artificial Sequence
  Description of Artificial Sequence: Synthetic peptide
  Seed: RMCSLMQGSTLPRRSGAAG
RMCSLMFGSLLTRRAGAAG

SEQ ID NO: 131577 - protein, 19 aa, Artificial Sequence
  Description of Artificial Sequence: Synthetic peptide
  Seed: RMCSLMQGSTLPRRSGAAG
RMCSLMFGSLLTRRIGAAG

SEQ ID NO: 131578 - protein, 19 aa, Artificial Sequence
  Description of Artificial Sequence: Synthetic peptide
  Seed: RMCSLMQGSTLPRRSGAAG
RMCSLMFGSLLTRRLGAAG

SEQ ID NO: 131579 - protein, 19 aa, Artificial Sequence
  Description of Artificial Sequence: Synthetic peptide
  Seed: RMCSLMQGSTLPRRSGAAG
RMCSLMFGSLLTRRNGAAG

SEQ ID NO: 131580 - protein, 19 aa, Artificial Sequence
  Description of Artificial Sequence: Synthetic peptide
  Seed: RMCSLMQGSTLPRRSGAAG
RMCSLMFGSLLTRRSGAAG

SEQ ID NO: 131581 - protein, 19 aa, Artificial Sequence
  Description of Artificial Sequence: Synthetic peptide
  Seed: RMCSLMQGSTLPRRSGAAG
RMCSLMFGSLLTRRTGAAG

SEQ ID NO: 131582 - protein, 19 aa, Artificial Sequence
  Description of Artificial Sequence: Synthetic peptide
  Seed: RMCSLMQGSTLPRRSGAAG
RMCSLMFGSLLTRRVGAAG

SEQ ID NO: 131583 - protein, 19 aa, Artificial Sequence
  Description of Artificial Sequence: Synthetic peptide
  Seed: RMCSLMQGSTLPRRSGAAG
RMCSLMFGSLLVRRAGAAG

SEQ ID NO: 131584 - protein, 19 aa, Artificial Sequence
  Description of Artificial Sequence: Synthetic peptide
  Seed: RMCSLMQGSTLPRRSGAAG
RMCSLMFGSLLVRRNGAAG

SEQ ID NO: 131585 - protein, 19 aa, Artificial Sequence
  Description of Artificial Sequence: Synthetic peptide
  Seed: RMCSLMQGSTLPRRSGAAG
RMCSLMFGSLLVRRSGAAG

SEQ ID NO: 131586 - protein, 19 aa, Artificial Sequence
  Description of Artificial Sequence: Synthetic peptide
  Seed: RMCSLMQGSTLPRRSGAAG
RMCSLMFGSLLVRRVGAAG

SEQ ID NO: 131587 - protein, 19 aa, Artificial Sequence
  Description of Artificial Sequence: Synthetic peptide
  Seed: RMCSLMQGSTLPRRSGAAG
RMCSLMFGSMLARRAGAAG

SEQ ID NO: 131588 - protein, 19 aa, Artificial Sequence
  Description of Artificial Sequence: Synthetic peptide
  Seed: RMCSLMQGSTLPRRSGAAG
RMCSLMFGSMLARRIGAAG

SEQ ID NO: 131589 - protein, 19 aa, Artificial Sequence
  Description of Artificial Sequence: Synthetic peptide
  Seed: RMCSLMQGSTLPRRSGAAG
RMCSLMFGSMLARRLGAAG

SEQ ID NO: 131590 - protein, 19 aa, Artificial Sequence
  Description of Artificial Sequence: Synthetic peptide
  Seed: RMCSLMQGSTLPRRSGAAG
RMCSLMFGSMLARRMGAAG

SEQ ID NO: 131591 - protein, 19 aa, Artificial Sequence
  Description of Artificial Sequence: Synthetic peptide
  Seed: RMCSLMQGSTLPRRSGAAG
RMCSLMFGSMLARRNGAAG

SEQ ID NO: 131592 - protein, 19 aa, Artificial Sequence
  Description of Artificial Sequence: Synthetic peptide
  Seed: RMCSLMQGSTLPRRSGAAG
RMCSLMFGSMLARRSGAAG

SEQ ID NO: 131593 - protein, 19 aa, Artificial Sequence
  Description of Artificial Sequence: Synthetic peptide
  Seed: RMCSLMQGSTLPRRSGAAG
RMCSLMFGSMLARRTGAAG

SEQ ID NO: 131594 - protein, 19 aa, Artificial Sequence
  Description of Artificial Sequence: Synthetic peptide
  Seed: RMCSLMQGSTLPRRSGAAG
RMCSLMFGSMLARRVGAAG

SEQ ID NO: 131595 - protein, 19 aa, Artificial Sequence
  Description of Artificial Sequence: Synthetic peptide
  Seed: RMCSLMQGSTLPRRSGAAG
RMCSLMFGSMLGRRAGAAG

SEQ ID NO: 131596 - protein, 19 aa, Artificial Sequence
  Description of Artificial Sequence: Synthetic peptide
  Seed: RMCSLMQGSTLPRRSGAAG
RMCSLMFGSMLGRRVGAAG

SEQ ID NO: 131597 - protein, 19 aa, Artificial Sequence
  Description of Artificial Sequence: Synthetic peptide
  Seed: RMCSLMQGSTLPRRSGAAG
RMCSLMFGSMLIRRAGAAG

SEQ ID NO: 131598 - protein, 19 aa, Artificial Sequence
  Description of Artificial Sequence: Synthetic peptide
  Seed: RMCSLMQGSTLPRRSGAAG
RMCSLMFGSMLPRRAGAAG

SEQ ID NO: 131599 - protein, 19 aa, Artificial Sequence
  Description of Artificial Sequence: Synthetic peptide
  Seed: RMCSLMQGSTLPRRSGAAG
RMCSLMFGSMLPRRIGAAG

SEQ ID NO: 131600 - protein, 19 aa, Artificial Sequence
  Description of Artificial Sequence: Synthetic peptide
  Seed: RMCSLMQGSTLPRRSGAAG
RMCSLMFGSMLPRRLGAAG

SEQ ID NO: 131601 - protein, 19 aa, Artificial Sequence
  Description of Artificial Sequence: Synthetic peptide
  Seed: RMCSLMQGSTLPRRSGAAG
RMCSLMFGSMLPRRMGAAG

SEQ ID NO: 131602 - protein, 19 aa, Artificial Sequence
  Description of Artificial Sequence: Synthetic peptide
  Seed: RMCSLMQGSTLPRRSGAAG
RMCSLMFGSMLPRRNGAAG

SEQ ID NO: 131603 - protein, 19 aa, Artificial Sequence
  Description of Artificial Sequence: Synthetic peptide
  Seed: RMCSLMQGSTLPRRSGAAG
RMCSLMFGSMLPRRSGAAG

SEQ ID NO: 131604 - protein, 19 aa, Artificial Sequence
  Description of Artificial Sequence: Synthetic peptide
  Seed: RMCSLMQGSTLPRRSGAAG
RMCSLMFGSMLPRRTGAAG

SEQ ID NO: 131605 - protein, 19 aa, Artificial Sequence
  Description of Artificial Sequence: Synthetic peptide
  Seed: RMCSLMQGSTLPRRSGAAG
RMCSLMFGSMLPRRVGAAG

SEQ ID NO: 131606 - protein, 19 aa, Artificial Sequence
  Description of Artificial Sequence: Synthetic peptide
  Seed: RMCSLMQGSTLPRRSGAAG
RMCSLMFGSMLSRRAGAAG

SEQ ID NO: 131607 - protein, 19 aa, Artificial Sequence
  Description of Artificial Sequence: Synthetic peptide
  Seed: RMCSLMQGSTLPRRSGAAG
RMCSLMFGSMLSRRIGAAG

SEQ ID NO: 131608 - protein, 19 aa, Artificial Sequence
  Description of Artificial Sequence: Synthetic peptide
  Seed: RMCSLMQGSTLPRRSGAAG
RMCSLMFGSMLSRRLGAAG

SEQ ID NO: 131609 - protein, 19 aa, Artificial Sequence
  Description of Artificial Sequence: Synthetic peptide
  Seed: RMCSLMQGSTLPRRSGAAG
RMCSLMFGSMLSRRMGAAG

SEQ ID NO: 131610 - protein, 19 aa, Artificial Sequence
  Description of Artificial Sequence: Synthetic peptide
  Seed: RMCSLMQGSTLPRRSGAAG
RMCSLMFGSMLSRRNGAAG

SEQ ID NO: 131611 - protein, 19 aa, Artificial Sequence
  Description of Artificial Sequence: Synthetic peptide
  Seed: RMCSLMQGSTLPRRSGAAG
RMCSLMFGSMLSRRSGAAG

SEQ ID NO: 131612 - protein, 19 aa, Artificial Sequence
  Description of Artificial Sequence: Synthetic peptide
  Seed: RMCSLMQGSTLPRRSGAAG
RMCSLMFGSMLSRRTGAAG

SEQ ID NO: 131613 - protein, 19 aa, Artificial Sequence
  Description of Artificial Sequence: Synthetic peptide
  Seed: RMCSLMQGSTLPRRSGAAG
RMCSLMFGSMLSRRVGAAG

SEQ ID NO: 131614 - protein, 19 aa, Artificial Sequence
  Description of Artificial Sequence: Synthetic peptide
  Seed: RMCSLMQGSTLPRRSGAAG
RMCSLMFGSMLTRRAGAAG

SEQ ID NO: 131615 - protein, 19 aa, Artificial Sequence
  Description of Artificial Sequence: Synthetic peptide
  Seed: RMCSLMQGSTLPRRSGAAG
RMCSLMFGSMLTRRIGAAG

SEQ ID NO: 131616 - protein, 19 aa, Artificial Sequence
  Description of Artificial Sequence: Synthetic peptide
  Seed: RMCSLMQGSTLPRRSGAAG
RMCSLMFGSMLTRRLGAAG

SEQ ID NO: 131617 - protein, 19 aa, Artificial Sequence
  Description of Artificial Sequence: Synthetic peptide
  Seed: RMCSLMQGSTLPRRSGAAG
RMCSLMFGSMLTRRMGAAG

SEQ ID NO: 131618 - protein, 19 aa, Artificial Sequence
  Description of Artificial Sequence: Synthetic peptide
  Seed: RMCSLMQGSTLPRRSGAAG
RMCSLMFGSMLTRRNGAAG

SEQ ID NO: 131619 - protein, 19 aa, Artificial Sequence
  Description of Artificial Sequence: Synthetic peptide
  Seed: RMCSLMQGSTLPRRSGAAG
RMCSLMFGSMLTRRSGAAG

SEQ ID NO: 131620 - protein, 19 aa, Artificial Sequence
  Description of Artificial Sequence: Synthetic peptide
  Seed: RMCSLMQGSTLPRRSGAAG
RMCSLMFGSMLTRRTGAAG

SEQ ID NO: 131621 - protein, 19 aa, Artificial Sequence
  Description of Artificial Sequence: Synthetic peptide
  Seed: RMCSLMQGSTLPRRSGAAG
RMCSLMFGSMLTRRVGAAG

SEQ ID NO: 131622 - protein, 19 aa, Artificial Sequence
  Description of Artificial Sequence: Synthetic peptide
  Seed: RMCSLMQGSTLPRRSGAAG
RMCSLMFGSMLVRRAGAAG

SEQ ID NO: 131623 - protein, 19 aa, Artificial Sequence
  Description of Artificial Sequence: Synthetic peptide
  Seed: RMCSLMQGSTLPRRSGAAG
RMCSLMFGSMLVRRIGAAG

SEQ ID NO: 131624 - protein, 19 aa, Artificial Sequence
  Description of Artificial Sequence: Synthetic peptide
  Seed: RMCSLMQGSTLPRRSGAAG
RMCSLMFGSMLVRRNGAAG

SEQ ID NO: 131625 - protein, 19 aa, Artificial Sequence
  Description of Artificial Sequence: Synthetic peptide
  Seed: RMCSLMQGSTLPRRSGAAG
RMCSLMFGSMLVRRSGAAG

SEQ ID NO: 131626 - protein, 19 aa, Artificial Sequence
  Description of Artificial Sequence: Synthetic peptide
  Seed: RMCSLMQGSTLPRRSGAAG
RMCSLMFGSMLVRRTGAAG

SEQ ID NO: 131627 - protein, 19 aa, Artificial Sequence
  Description of Artificial Sequence: Synthetic peptide
  Seed: RMCSLMQGSTLPRRSGAAG
RMCSLMFGSMLVRRVGAAG

SEQ ID NO: 131628 - protein, 19 aa, Artificial Sequence
  Description of Artificial Sequence: Synthetic peptide
  Seed: RMCSLMQGSTLPRRSGAAG
RMCSLMFGSVLARRAGAAG

SEQ ID NO: 131629 - protein, 19 aa, Artificial Sequence
  Description of Artificial Sequence: Synthetic peptide
  Seed: RMCSLMQGSTLPRRSGAAG
RMCSLMYGSALARRAGAAG

SEQ ID NO: 131630 - protein, 19 aa, Artificial Sequence
  Description of Artificial Sequence: Synthetic peptide
  Seed: RMCSLMQGSTLPRRSGAAG
RMCSLMYGSILARRAGAAG

SEQ ID NO: 131631 - protein, 19 aa, Artificial Sequence
  Description of Artificial Sequence: Synthetic peptide
  Seed: RMCSLMQGSTLPRRSGAAG
RMCSLMYGSILARRIGAAG

SEQ ID NO: 131632 - protein, 19 aa, Artificial Sequence
  Description of Artificial Sequence: Synthetic peptide
  Seed: RMCSLMQGSTLPRRSGAAG
RMCSLMYGSILARRLGAAG

SEQ ID NO: 131633 - protein, 19 aa, Artificial Sequence
  Description of Artificial Sequence: Synthetic peptide
  Seed: RMCSLMQGSTLPRRSGAAG
RMCSLMYGSILARRNGAAG

SEQ ID NO: 131634 - protein, 19 aa, Artificial Sequence
  Description of Artificial Sequence: Synthetic peptide
  Seed: RMCSLMQGSTLPRRSGAAG
RMCSLMYGSILARRSGAAG

SEQ ID NO: 131635 - protein, 19 aa, Artificial Sequence
  Description of Artificial Sequence: Synthetic peptide
  Seed: RMCSLMQGSTLPRRSGAAG
RMCSLMYGSILARRVGAAG

SEQ ID NO: 131636 - protein, 19 aa, Artificial Sequence
  Description of Artificial Sequence: Synthetic peptide
  Seed: RMCSLMQGSTLPRRSGAAG
RMCSLMYGSILPRRAGAAG

SEQ ID NO: 131637 - protein, 19 aa, Artificial Sequence
  Description of Artificial Sequence: Synthetic peptide
  Seed: RMCSLMQGSTLPRRSGAAG
RMCSLMYGSILSRRAGAAG

SEQ ID NO: 131638 - protein, 19 aa, Artificial Sequence
  Description of Artificial Sequence: Synthetic peptide
  Seed: RMCSLMQGSTLPRRSGAAG
RMCSLMYGSILSRRVGAAG

SEQ ID NO: 131639 - protein, 19 aa, Artificial Sequence
  Description of Artificial Sequence: Synthetic peptide
  Seed: RMCSLMQGSTLPRRSGAAG
RMCSLMYGSILTRRAGAAG

SEQ ID NO: 131640 - protein, 19 aa, Artificial Sequence
  Description of Artificial Sequence: Synthetic peptide
  Seed: RMCSLMQGSTLPRRSGAAG
RMCSLMYGSILTRRVGAAG

SEQ ID NO: 131641 - protein, 19 aa, Artificial Sequence
  Description of Artificial Sequence: Synthetic peptide
  Seed: RMCSLMQGSTLPRRSGAAG
RMCSLMYGSLLARRAGAAG

SEQ ID NO: 131642 - protein, 19 aa, Artificial Sequence
  Description of Artificial Sequence: Synthetic peptide
  Seed: RMCSLMQGSTLPRRSGAAG
RMCSLMYGSLLARRIGAAG

SEQ ID NO: 131643 - protein, 19 aa, Artificial Sequence
  Description of Artificial Sequence: Synthetic peptide
  Seed: RMCSLMQGSTLPRRSGAAG
RMCSLMYGSLLARRLGAAG

SEQ ID NO: 131644 - protein, 19 aa, Artificial Sequence
  Description of Artificial Sequence: Synthetic peptide
  Seed: RMCSLMQGSTLPRRSGAAG
RMCSLMYGSLLARRNGAAG

SEQ ID NO: 131645 - protein, 19 aa, Artificial Sequence
  Description of Artificial Sequence: Synthetic peptide
  Seed: RMCSLMQGSTLPRRSGAAG
RMCSLMYGSLLARRSGAAG

SEQ ID NO: 131646 - protein, 19 aa, Artificial Sequence
  Description of Artificial Sequence: Synthetic peptide
  Seed: RMCSLMQGSTLPRRSGAAG
RMCSLMYGSLLARRTGAAG

SEQ ID NO: 131647 - protein, 19 aa, Artificial Sequence
  Description of Artificial Sequence: Synthetic peptide
  Seed: RMCSLMQGSTLPRRSGAAG
RMCSLMYGSLLARRVGAAG

SEQ ID NO: 131648 - protein, 19 aa, Artificial Sequence
  Description of Artificial Sequence: Synthetic peptide
  Seed: RMCSLMQGSTLPRRSGAAG
RMCSLMYGSLLPRRAGAAG

SEQ ID NO: 131649 - protein, 19 aa, Artificial Sequence
  Description of Artificial Sequence: Synthetic peptide
  Seed: RMCSLMQGSTLPRRSGAAG
RMCSLMYGSLLPRRIGAAG

SEQ ID NO: 131650 - protein, 19 aa, Artificial Sequence
  Description of Artificial Sequence: Synthetic peptide
  Seed: RMCSLMQGSTLPRRSGAAG
RMCSLMYGSLLPRRVGAAG

SEQ ID NO: 131651 - protein, 19 aa, Artificial Sequence
  Description of Artificial Sequence: Synthetic peptide
  Seed: RMCSLMQGSTLPRRSGAAG
RMCSLMYGSLLSRRAGAAG

SEQ ID NO: 131652 - protein, 19 aa, Artificial Sequence
  Description of Artificial Sequence: Synthetic peptide
  Seed: RMCSLMQGSTLPRRSGAAG
RMCSLMYGSLLSRRIGAAG

SEQ ID NO: 131653 - protein, 19 aa, Artificial Sequence
  Description of Artificial Sequence: Synthetic peptide
  Seed: RMCSLMQGSTLPRRSGAAG
RMCSLMYGSLLSRRNGAAG

SEQ ID NO: 131654 - protein, 19 aa, Artificial Sequence
  Description of Artificial Sequence: Synthetic peptide
  Seed: RMCSLMQGSTLPRRSGAAG
RMCSLMYGSLLSRRSGAAG

SEQ ID NO: 131655 - protein, 19 aa, Artificial Sequence
  Description of Artificial Sequence: Synthetic peptide
  Seed: RMCSLMQGSTLPRRSGAAG
RMCSLMYGSLLSRRVGAAG

SEQ ID NO: 131656 - protein, 19 aa, Artificial Sequence
  Description of Artificial Sequence: Synthetic peptide
  Seed: RMCSLMQGSTLPRRSGAAG
RMCSLMYGSLLTRRAGAAG

SEQ ID NO: 131657 - protein, 19 aa, Artificial Sequence
  Description of Artificial Sequence: Synthetic peptide
  Seed: RMCSLMQGSTLPRRSGAAG
RMCSLMYGSLLTRRIGAAG

SEQ ID NO: 131658 - protein, 19 aa, Artificial Sequence
  Description of Artificial Sequence: Synthetic peptide
  Seed: RMCSLMQGSTLPRRSGAAG
RMCSLMYGSLLTRRVGAAG

SEQ ID NO: 131659 - protein, 19 aa, Artificial Sequence
  Description of Artificial Sequence: Synthetic peptide
  Seed: RMCSLMQGSTLPRRSGAAG
RMCSLMYGSLLVRRAGAAG

SEQ ID NO: 131660 - protein, 19 aa, Artificial Sequence
  Description of Artificial Sequence: Synthetic peptide
  Seed: RMCSLMQGSTLPRRSGAAG
RMCSLMYGSMLARRAGAAG

SEQ ID NO: 131661 - protein, 19 aa, Artificial Sequence
  Description of Artificial Sequence: Synthetic peptide
  Seed: RMCSLMQGSTLPRRSGAAG
RMCSLMYGSMLARRIGAAG

SEQ ID NO: 131662 - protein, 19 aa, Artificial Sequence
  Description of Artificial Sequence: Synthetic peptide
  Seed: RMCSLMQGSTLPRRSGAAG
RMCSLMYGSMLARRLGAAG

SEQ ID NO: 131663 - protein, 19 aa, Artificial Sequence
  Description of Artificial Sequence: Synthetic peptide
  Seed: RMCSLMQGSTLPRRSGAAG
RMCSLMYGSMLARRMGAAG

SEQ ID NO: 131664 - protein, 19 aa, Artificial Sequence
  Description of Artificial Sequence: Synthetic peptide
  Seed: RMCSLMQGSTLPRRSGAAG
RMCSLMYGSMLARRNGAAG

SEQ ID NO: 131665 - protein, 19 aa, Artificial Sequence
  Description of Artificial Sequence: Synthetic peptide
  Seed: RMCSLMQGSTLPRRSGAAG
RMCSLMYGSMLARRSGAAG

SEQ ID NO: 131666 - protein, 19 aa, Artificial Sequence
  Description of Artificial Sequence: Synthetic peptide
  Seed: RMCSLMQGSTLPRRSGAAG
RMCSLMYGSMLARRTGAAG

SEQ ID NO: 131667 - protein, 19 aa, Artificial Sequence
  Description of Artificial Sequence: Synthetic peptide
  Seed: RMCSLMQGSTLPRRSGAAG
RMCSLMYGSMLARRVGAAG

SEQ ID NO: 131668 - protein, 19 aa, Artificial Sequence
  Description of Artificial Sequence: Synthetic peptide
  Seed: RMCSLMQGSTLPRRSGAAG
RMCSLMYGSMLPRRAGAAG

SEQ ID NO: 131669 - protein, 19 aa, Artificial Sequence
  Description of Artificial Sequence: Synthetic peptide
  Seed: RMCSLMQGSTLPRRSGAAG
RMCSLMYGSMLPRRIGAAG

SEQ ID NO: 131670 - protein, 19 aa, Artificial Sequence
  Description of Artificial Sequence: Synthetic peptide
  Seed: RMCSLMQGSTLPRRSGAAG
RMCSLMYGSMLPRRLGAAG

SEQ ID NO: 131671 - protein, 19 aa, Artificial Sequence
  Description of Artificial Sequence: Synthetic peptide
  Seed: RMCSLMQGSTLPRRSGAAG
RMCSLMYGSMLPRRVGAAG

SEQ ID NO: 131672 - protein, 19 aa, Artificial Sequence
  Description of Artificial Sequence: Synthetic peptide
  Seed: RMCSLMQGSTLPRRSGAAG
RMCSLMYGSMLSRRAGAAG

SEQ ID NO: 131673 - protein, 19 aa, Artificial Sequence
  Description of Artificial Sequence: Synthetic peptide
  Seed: RMCSLMQGSTLPRRSGAAG
RMCSLMYGSMLSRRIGAAG

SEQ ID NO: 131674 - protein, 19 aa, Artificial Sequence
  Description of Artificial Sequence: Synthetic peptide
  Seed: RMCSLMQGSTLPRRSGAAG
RMCSLMYGSMLSRRLGAAG

SEQ ID NO: 131675 - protein, 19 aa, Artificial Sequence
  Description of Artificial Sequence: Synthetic peptide
  Seed: RMCSLMQGSTLPRRSGAAG
RMCSLMYGSMLSRRNGAAG

SEQ ID NO: 131676 - protein, 19 aa, Artificial Sequence
  Description of Artificial Sequence: Synthetic peptide
  Seed: RMCSLMQGSTLPRRSGAAG
RMCSLMYGSMLSRRSGAAG

SEQ ID NO: 131677 - protein, 19 aa, Artificial Sequence
  Description of Artificial Sequence: Synthetic peptide
  Seed: RMCSLMQGSTLPRRSGAAG
RMCSLMYGSMLSRRVGAAG

SEQ ID NO: 131678 - protein, 19 aa, Artificial Sequence
  Description of Artificial Sequence: Synthetic peptide
  Seed: RMCSLMQGSTLPRRSGAAG
RMCSLMYGSMLTRRAGAAG

SEQ ID NO: 131679 - protein, 19 aa, Artificial Sequence
  Description of Artificial Sequence: Synthetic peptide
  Seed: RMCSLMQGSTLPRRSGAAG
RMCSLMYGSMLTRRIGAAG

SEQ ID NO: 131680 - protein, 19 aa, Artificial Sequence
  Description of Artificial Sequence: Synthetic peptide
  Seed: RMCSLMQGSTLPRRSGAAG
RMCSLMYGSMLTRRLGAAG

SEQ ID NO: 131681 - protein, 19 aa, Artificial Sequence
  Description of Artificial Sequence: Synthetic peptide
  Seed: RMCSLMQGSTLPRRSGAAG
RMCSLMYGSMLTRRNGAAG

SEQ ID NO: 131682 - protein, 19 aa, Artificial Sequence
  Description of Artificial Sequence: Synthetic peptide
  Seed: RMCSLMQGSTLPRRSGAAG
RMCSLMYGSMLTRRVGAAG

SEQ ID NO: 131683 - protein, 19 aa, Artificial Sequence
  Description of Artificial Sequence: Synthetic peptide
  Seed: RMCSLMQGSTLPRRSGAAG
RMCSLMYGSMLVRRAGAAG

SEQ ID NO: 131684 - protein, 19 aa, Artificial Sequence
  Description of Artificial Sequence: Synthetic peptide
  Seed: RMCSLMQGSTLPRRSGAAG
RMCSLMYGSMLVRRIGAAG

SEQ ID NO: 131685 - protein, 19 aa, Artificial Sequence
  Description of Artificial Sequence: Synthetic peptide
  Seed: RMCSLMQGSTLPRRSGAAG
RMCSLMYGSMLVRRNGAAG

SEQ ID NO: 131686 - protein, 19 aa, Artificial Sequence
  Description of Artificial Sequence: Synthetic peptide
  Seed: RMCSLMQGSTLPRRSGAAG
RMCSLMYGSMLVRRSGAAG

SEQ ID NO: 131687 - protein, 19 aa, Artificial Sequence
  Description of Artificial Sequence: Synthetic peptide
  Seed: RMCSLMQGSTLPRRSGAAG
RMCSLMYGSMLVRRVGAAG

SEQ ID NO: 131688 - protein, 20 aa, Artificial Sequence
  Description of Artificial Sequence: Synthetic peptide
  Seed: RMCSLMQGSTLPRRSGAAGA
RMFSLAQASTAPRRSGAAGA

SEQ ID NO: 131689 - protein, 20 aa, Artificial Sequence
  Description of Artificial Sequence: Synthetic peptide
  Seed: RMCSLMQGSTLPRRSGAAGA
RMFSLAQASTGPRRSGAAGA

SEQ ID NO: 131690 - protein, 20 aa, Artificial Sequence
  Description of Artificial Sequence: Synthetic peptide
  Seed: RMCSLMQGSTLPRRSGAAGA
RMFSLAQASTIPRRSGAAGA

SEQ ID NO: 131691 - protein, 20 aa, Artificial Sequence
  Description of Artificial Sequence: Synthetic peptide
  Seed: RMCSLMQGSTLPRRSGAAGA
RMFSLAQASTLPRRSGAAGA

SEQ ID NO: 131692 - protein, 20 aa, Artificial Sequence
  Description of Artificial Sequence: Synthetic peptide
  Seed: RMCSLMQGSTLPRRSGAAGA
RMFSLAQASTMPRRSGAAGA

SEQ ID NO: 131693 - protein, 20 aa, Artificial Sequence
  Description of Artificial Sequence: Synthetic peptide
  Seed: RMCSLMQGSTLPRRSGAAGA
RMFSLAQASTNPRRSGAAGA

SEQ ID NO: 131694 - protein, 20 aa, Artificial Sequence
  Description of Artificial Sequence: Synthetic peptide
  Seed: RMCSLMQGSTLPRRSGAAGA
RMFSLAQASTSPRRSGAAGA

SEQ ID NO: 131695 - protein, 20 aa, Artificial Sequence
  Description of Artificial Sequence: Synthetic peptide
  Seed: RMCSLMQGSTLPRRSGAAGA
RMFSLAQASTTPRRSGAAGA

SEQ ID NO: 131696 - protein, 20 aa, Artificial Sequence
  Description of Artificial Sequence: Synthetic peptide
  Seed: RMCSLMQGSTLPRRSGAAGA
RMFSLAQASTVPRRSGAAGA

SEQ ID NO: 131697 - protein, 20 aa, Artificial Sequence
  Description of Artificial Sequence: Synthetic peptide
  Seed: RMCSLMQGSTLPRRSGAAGA
RMFSLAQGSTAPRRSGAAGA

SEQ ID NO: 131698 - protein, 20 aa, Artificial Sequence
  Description of Artificial Sequence: Synthetic peptide
  Seed: RMCSLMQGSTLPRRSGAAGA
RMFSLAQGSTIPRRSGAAGA

SEQ ID NO: 131699 - protein, 20 aa, Artificial Sequence
  Description of Artificial Sequence: Synthetic peptide
  Seed: RMCSLMQGSTLPRRSGAAGA
RMFSLAQGSTLPRRSGAAGA

SEQ ID NO: 131700 - protein, 20 aa, Artificial Sequence
  Description of Artificial Sequence: Synthetic peptide
  Seed: RMCSLMQGSTLPRRSGAAGA
RMFSLAQGSTMPRRSGAAGA

SEQ ID NO: 131701 - protein, 20 aa, Artificial Sequence
  Description of Artificial Sequence: Synthetic peptide
  Seed: RMCSLMQGSTLPRRSGAAGA
RMFSLAQGSTVPRRSGAAGA

SEQ ID NO: 131702 - protein, 20 aa, Artificial Sequence
  Description of Artificial Sequence: Synthetic peptide
  Seed: RMCSLMQGSTLPRRSGAAGA
RMFSLAQNSTIPRRSGAAGA

SEQ ID NO: 131703 - protein, 20 aa, Artificial Sequence
  Description of Artificial Sequence: Synthetic peptide
  Seed: RMCSLMQGSTLPRRSGAAGA
RMFSLAQNSTLPRRSGAAGA

SEQ ID NO: 131704 - protein, 20 aa, Artificial Sequence
  Description of Artificial Sequence: Synthetic peptide
  Seed: RMCSLMQGSTLPRRSGAAGA
RMFSLAQNSTVPRRSGAAGA

SEQ ID NO: 131705 - protein, 20 aa, Artificial Sequence
  Description of Artificial Sequence: Synthetic peptide
  Seed: RMCSLMQGSTLPRRSGAAGA
RMFSLAQPSTAPRRSGAAGA

SEQ ID NO: 131706 - protein, 20 aa, Artificial Sequence
  Description of Artificial Sequence: Synthetic peptide
  Seed: RMCSLMQGSTLPRRSGAAGA
RMFSLAQPSTIPRRSGAAGA

SEQ ID NO: 131707 - protein, 20 aa, Artificial Sequence
  Description of Artificial Sequence: Synthetic peptide
  Seed: RMCSLMQGSTLPRRSGAAGA
RMFSLAQPSTLPRRSGAAGA

SEQ ID NO: 131708 - protein, 20 aa, Artificial Sequence
  Description of Artificial Sequence: Synthetic peptide
  Seed: RMCSLMQGSTLPRRSGAAGA
RMFSLAQPSTMPRRSGAAGA

SEQ ID NO: 131709 - protein, 20 aa, Artificial Sequence
  Description of Artificial Sequence: Synthetic peptide
  Seed: RMCSLMQGSTLPRRSGAAGA
RMFSLAQPSTVPRRSGAAGA

SEQ ID NO: 131710 - protein, 20 aa, Artificial Sequence
  Description of Artificial Sequence: Synthetic peptide
  Seed: RMCSLMQGSTLPRRSGAAGA
RMFSLAQSSTAPRRSGAAGA

SEQ ID NO: 131711 - protein, 20 aa, Artificial Sequence
  Description of Artificial Sequence: Synthetic peptide
  Seed: RMCSLMQGSTLPRRSGAAGA
RMFSLAQSSTIPRRSGAAGA

SEQ ID NO: 131712 - protein, 20 aa, Artificial Sequence
  Description of Artificial Sequence: Synthetic peptide
  Seed: RMCSLMQGSTLPRRSGAAGA
RMFSLAQSSTLPRRSGAAGA

SEQ ID NO: 131713 - protein, 20 aa, Artificial Sequence
  Description of Artificial Sequence: Synthetic peptide
  Seed: RMCSLMQGSTLPRRSGAAGA
RMFSLAQSSTMPRRSGAAGA

SEQ ID NO: 131714 - protein, 20 aa, Artificial Sequence
  Description of Artificial Sequence: Synthetic peptide
  Seed: RMCSLMQGSTLPRRSGAAGA
RMFSLAQSSTTPRRSGAAGA

SEQ ID NO: 131715 - protein, 20 aa, Artificial Sequence
  Description of Artificial Sequence: Synthetic peptide
  Seed: RMCSLMQGSTLPRRSGAAGA
RMFSLAQSSTVPRRSGAAGA

SEQ ID NO: 131716 - protein, 20 aa, Artificial Sequence
  Description of Artificial Sequence: Synthetic peptide
  Seed: RMCSLMQGSTLPRRSGAAGA
RMFSLAQTSTAPRRSGAAGA

SEQ ID NO: 131717 - protein, 20 aa, Artificial Sequence
  Description of Artificial Sequence: Synthetic peptide
  Seed: RMCSLMQGSTLPRRSGAAGA
RMFSLAQTSTIPRRSGAAGA

SEQ ID NO: 131718 - protein, 20 aa, Artificial Sequence
  Description of Artificial Sequence: Synthetic peptide
  Seed: RMCSLMQGSTLPRRSGAAGA
RMFSLAQTSTLPRRSGAAGA

SEQ ID NO: 131719 - protein, 20 aa, Artificial Sequence
  Description of Artificial Sequence: Synthetic peptide
  Seed: RMCSLMQGSTLPRRSGAAGA
RMFSLAQTSTVPRRSGAAGA

SEQ ID NO: 131720 - protein, 20 aa, Artificial Sequence
  Description of Artificial Sequence: Synthetic peptide
  Seed: RMCSLMQGSTLPRRSGAAGA
RMFSLAQVSTIPRRSGAAGA

SEQ ID NO: 131721 - protein, 20 aa, Artificial Sequence
  Description of Artificial Sequence: Synthetic peptide
  Seed: RMCSLMQGSTLPRRSGAAGA
RMFSLAQVSTVPRRSGAAGA

SEQ ID NO: 131722 - protein, 20 aa, Artificial Sequence
  Description of Artificial Sequence: Synthetic peptide
  Seed: RMCSLMQGSTLPRRSGAAGA
RMFSLEQASTAPRRSGAAGA

SEQ ID NO: 131723 - protein, 20 aa, Artificial Sequence
  Description of Artificial Sequence: Synthetic peptide
  Seed: RMCSLMQGSTLPRRSGAAGA
RMFSLEQASTIPRRSGAAGA

SEQ ID NO: 131724 - protein, 20 aa, Artificial Sequence
  Description of Artificial Sequence: Synthetic peptide
  Seed: RMCSLMQGSTLPRRSGAAGA
RMFSLEQASTLPRRSGAAGA

SEQ ID NO: 131725 - protein, 20 aa, Artificial Sequence
  Description of Artificial Sequence: Synthetic peptide
  Seed: RMCSLMQGSTLPRRSGAAGA
RMFSLEQASTVPRRSGAAGA

SEQ ID NO: 131726 - protein, 20 aa, Artificial Sequence
  Description of Artificial Sequence: Synthetic peptide
  Seed: RMCSLMQGSTLPRRSGAAGA
RMFSLEQGSTIPRRSGAAGA

SEQ ID NO: 131727 - protein, 20 aa, Artificial Sequence
  Description of Artificial Sequence: Synthetic peptide
  Seed: RMCSLMQGSTLPRRSGAAGA
RMFSLEQGSTLPRRSGAAGA

SEQ ID NO: 131728 - protein, 20 aa, Artificial Sequence
  Description of Artificial Sequence: Synthetic peptide
  Seed: RMCSLMQGSTLPRRSGAAGA
RMFSLEQGSTVPRRSGAAGA

SEQ ID NO: 131729 - protein, 20 aa, Artificial Sequence
  Description of Artificial Sequence: Synthetic peptide
  Seed: RMCSLMQGSTLPRRSGAAGA
RMFSLFQASTIPRRSGAAGA

SEQ ID NO: 131730 - protein, 20 aa, Artificial Sequence
  Description of Artificial Sequence: Synthetic peptide
  Seed: RMCSLMQGSTLPRRSGAAGA
RMFSLFQASTLPRRSGAAGA

SEQ ID NO: 131731 - protein, 20 aa, Artificial Sequence
  Description of Artificial Sequence: Synthetic peptide
  Seed: RMCSLMQGSTLPRRSGAAGA
RMFSLFQASTVPRRSGAAGA

SEQ ID NO: 131732 - protein, 20 aa, Artificial Sequence
  Description of Artificial Sequence: Synthetic peptide
  Seed: RMCSLMQGSTLPRRSGAAGA
RMFSLGQASTIPRRSGAAGA

SEQ ID NO: 131733 - protein, 20 aa, Artificial Sequence
  Description of Artificial Sequence: Synthetic peptide
  Seed: RMCSLMQGSTLPRRSGAAGA
RMFSLGQASTLPRRSGAAGA

SEQ ID NO: 131734 - protein, 20 aa, Artificial Sequence
  Description of Artificial Sequence: Synthetic peptide
  Seed: RMCSLMQGSTLPRRSGAAGA
RMFSLGQASTVPRRSGAAGA

SEQ ID NO: 131735 - protein, 20 aa, Artificial Sequence
  Description of Artificial Sequence: Synthetic peptide
  Seed: RMCSLMQGSTLPRRSGAAGA
RMFSLHQASTVPRRSGAAGA

SEQ ID NO: 131736 - protein, 20 aa, Artificial Sequence
  Description of Artificial Sequence: Synthetic peptide
  Seed: RMCSLMQGSTLPRRSGAAGA
RMFSLIQASTAPRRSGAAGA

SEQ ID NO: 131737 - protein, 20 aa, Artificial Sequence
  Description of Artificial Sequence: Synthetic peptide
  Seed: RMCSLMQGSTLPRRSGAAGA
RMFSLIQASTCPRRSGAAGA

SEQ ID NO: 131738 - protein, 20 aa, Artificial Sequence
  Description of Artificial Sequence: Synthetic peptide
  Seed: RMCSLMQGSTLPRRSGAAGA
RMFSLIQASTGPRRSGAAGA

SEQ ID NO: 131739 - protein, 20 aa, Artificial Sequence
  Description of Artificial Sequence: Synthetic peptide
  Seed: RMCSLMQGSTLPRRSGAAGA
RMFSLIQASTIPRRSGAAGA

SEQ ID NO: 131740 - protein, 20 aa, Artificial Sequence
  Description of Artificial Sequence: Synthetic peptide
  Seed: RMCSLMQGSTLPRRSGAAGA
RMFSLIQASTLPRRSGAAGA

SEQ ID NO: 131741 - protein, 20 aa, Artificial Sequence
  Description of Artificial Sequence: Synthetic peptide
  Seed: RMCSLMQGSTLPRRSGAAGA
RMFSLIQASTMPRRSGAAGA

SEQ ID NO: 131742 - protein, 20 aa, Artificial Sequence
  Description of Artificial Sequence: Synthetic peptide
  Seed: RMCSLMQGSTLPRRSGAAGA
RMFSLIQASTNPRRSGAAGA

SEQ ID NO: 131743 - protein, 20 aa, Artificial Sequence
  Description of Artificial Sequence: Synthetic peptide
  Seed: RMCSLMQGSTLPRRSGAAGA
RMFSLIQASTSPRRSGAAGA

SEQ ID NO: 131744 - protein, 20 aa, Artificial Sequence
  Description of Artificial Sequence: Synthetic peptide
  Seed: RMCSLMQGSTLPRRSGAAGA
RMFSLIQASTTPRRSGAAGA

SEQ ID NO: 131745 - protein, 20 aa, Artificial Sequence
  Description of Artificial Sequence: Synthetic peptide
  Seed: RMCSLMQGSTLPRRSGAAGA
RMFSLIQASTVPRRSGAAGA

SEQ ID NO: 131746 - protein, 20 aa, Artificial Sequence
  Description of Artificial Sequence: Synthetic peptide
  Seed: RMCSLMQGSTLPRRSGAAGA
RMFSLIQGSTAPRRSGAAGA

SEQ ID NO: 131747 - protein, 20 aa, Artificial Sequence
  Description of Artificial Sequence: Synthetic peptide
  Seed: RMCSLMQGSTLPRRSGAAGA
RMFSLIQGSTGPRRSGAAGA

SEQ ID NO: 131748 - protein, 20 aa, Artificial Sequence
  Description of Artificial Sequence: Synthetic peptide
  Seed: RMCSLMQGSTLPRRSGAAGA
RMFSLIQGSTIPRRSGAAGA

SEQ ID NO: 131749 - protein, 20 aa, Artificial Sequence
  Description of Artificial Sequence: Synthetic peptide
  Seed: RMCSLMQGSTLPRRSGAAGA
RMFSLIQGSTLPRRSGAAGA

SEQ ID NO: 131750 - protein, 20 aa, Artificial Sequence
  Description of Artificial Sequence: Synthetic peptide
  Seed: RMCSLMQGSTLPRRSGAAGA
RMFSLIQGSTMPRRSGAAGA

SEQ ID NO: 131751 - protein, 20 aa, Artificial Sequence
  Description of Artificial Sequence: Synthetic peptide
  Seed: RMCSLMQGSTLPRRSGAAGA
RMFSLIQGSTSPRRSGAAGA

SEQ ID NO: 131752 - protein, 20 aa, Artificial Sequence
  Description of Artificial Sequence: Synthetic peptide
  Seed: RMCSLMQGSTLPRRSGAAGA
RMFSLIQGSTTPRRSGAAGA

SEQ ID NO: 131753 - protein, 20 aa, Artificial Sequence
  Description of Artificial Sequence: Synthetic peptide
  Seed: RMCSLMQGSTLPRRSGAAGA
RMFSLIQGSTVPRRSGAAGA

SEQ ID NO: 131754 - protein, 20 aa, Artificial Sequence
  Description of Artificial Sequence: Synthetic peptide
  Seed: RMCSLMQGSTLPRRSGAAGA
RMFSLIQNSTAPRRSGAAGA

SEQ ID NO: 131755 - protein, 20 aa, Artificial Sequence
  Description of Artificial Sequence: Synthetic peptide
  Seed: RMCSLMQGSTLPRRSGAAGA
RMFSLIQNSTIPRRSGAAGA

SEQ ID NO: 131756 - protein, 20 aa, Artificial Sequence
  Description of Artificial Sequence: Synthetic peptide
  Seed: RMCSLMQGSTLPRRSGAAGA
RMFSLIQNSTLPRRSGAAGA

SEQ ID NO: 131757 - protein, 20 aa, Artificial Sequence
  Description of Artificial Sequence: Synthetic peptide
  Seed: RMCSLMQGSTLPRRSGAAGA
RMFSLIQNSTVPRRSGAAGA

SEQ ID NO: 131758 - protein, 20 aa, Artificial Sequence
  Description of Artificial Sequence: Synthetic peptide
  Seed: RMCSLMQGSTLPRRSGAAGA
RMFSLIQPSTAPRRSGAAGA

SEQ ID NO: 131759 - protein, 20 aa, Artificial Sequence
  Description of Artificial Sequence: Synthetic peptide
  Seed: RMCSLMQGSTLPRRSGAAGA
RMFSLIQPSTIPRRSGAAGA

SEQ ID NO: 131760 - protein, 20 aa, Artificial Sequence
  Description of Artificial Sequence: Synthetic peptide
  Seed: RMCSLMQGSTLPRRSGAAGA
RMFSLIQPSTLPRRSGAAGA

SEQ ID NO: 131761 - protein, 20 aa, Artificial Sequence
  Description of Artificial Sequence: Synthetic peptide
  Seed: RMCSLMQGSTLPRRSGAAGA
RMFSLIQPSTMPRRSGAAGA

SEQ ID NO: 131762 - protein, 20 aa, Artificial Sequence
  Description of Artificial Sequence: Synthetic peptide
  Seed: RMCSLMQGSTLPRRSGAAGA
RMFSLIQPSTSPRRSGAAGA

SEQ ID NO: 131763 - protein, 20 aa, Artificial Sequence
  Description of Artificial Sequence: Synthetic peptide
  Seed: RMCSLMQGSTLPRRSGAAGA
RMFSLIQPSTTPRRSGAAGA

SEQ ID NO: 131764 - protein, 20 aa, Artificial Sequence
  Description of Artificial Sequence: Synthetic peptide
  Seed: RMCSLMQGSTLPRRSGAAGA
RMFSLIQPSTVPRRSGAAGA

SEQ ID NO: 131765 - protein, 20 aa, Artificial Sequence
  Description of Artificial Sequence: Synthetic peptide
  Seed: RMCSLMQGSTLPRRSGAAGA
RMFSLIQSSTAPRRSGAAGA

SEQ ID NO: 131766 - protein, 20 aa, Artificial Sequence
  Description of Artificial Sequence: Synthetic peptide
  Seed: RMCSLMQGSTLPRRSGAAGA
RMFSLIQSSTIPRRSGAAGA

SEQ ID NO: 131767 - protein, 20 aa, Artificial Sequence
  Description of Artificial Sequence: Synthetic peptide
  Seed: RMCSLMQGSTLPRRSGAAGA
RMFSLIQSSTLPRRSGAAGA

SEQ ID NO: 131768 - protein, 20 aa, Artificial Sequence
  Description of Artificial Sequence: Synthetic peptide
  Seed: RMCSLMQGSTLPRRSGAAGA
RMFSLIQSSTMPRRSGAAGA

SEQ ID NO: 131769 - protein, 20 aa, Artificial Sequence
  Description of Artificial Sequence: Synthetic peptide
  Seed: RMCSLMQGSTLPRRSGAAGA
RMFSLIQSSTSPRRSGAAGA

SEQ ID NO: 131770 - protein, 20 aa, Artificial Sequence
  Description of Artificial Sequence: Synthetic peptide
  Seed: RMCSLMQGSTLPRRSGAAGA
RMFSLIQSSTTPRRSGAAGA

SEQ ID NO: 131771 - protein, 20 aa, Artificial Sequence
  Description of Artificial Sequence: Synthetic peptide
  Seed: RMCSLMQGSTLPRRSGAAGA
RMFSLIQSSTVPRRSGAAGA

SEQ ID NO: 131772 - protein, 20 aa, Artificial Sequence
  Description of Artificial Sequence: Synthetic peptide
  Seed: RMCSLMQGSTLPRRSGAAGA
RMFSLIQTSTAPRRSGAAGA

SEQ ID NO: 131773 - protein, 20 aa, Artificial Sequence
  Description of Artificial Sequence: Synthetic peptide
  Seed: RMCSLMQGSTLPRRSGAAGA
RMFSLIQTSTIPRRSGAAGA

SEQ ID NO: 131774 - protein, 20 aa, Artificial Sequence
  Description of Artificial Sequence: Synthetic peptide
  Seed: RMCSLMQGSTLPRRSGAAGA
RMFSLIQTSTLPRRSGAAGA

SEQ ID NO: 131775 - protein, 20 aa, Artificial Sequence
  Description of Artificial Sequence: Synthetic peptide
  Seed: RMCSLMQGSTLPRRSGAAGA
RMFSLIQTSTVPRRSGAAGA

SEQ ID NO: 131776 - protein, 20 aa, Artificial Sequence
  Description of Artificial Sequence: Synthetic peptide
  Seed: RMCSLMQGSTLPRRSGAAGA
RMFSLIQVSTAPRRSGAAGA

SEQ ID NO: 131777 - protein, 20 aa, Artificial Sequence
  Description of Artificial Sequence: Synthetic peptide
  Seed: RMCSLMQGSTLPRRSGAAGA
RMFSLIQVSTVPRRSGAAGA

SEQ ID NO: 131778 - protein, 20 aa, Artificial Sequence
  Description of Artificial Sequence: Synthetic peptide
  Seed: RMCSLMQGSTLPRRSGAAGA
RMFSLLQASTAPRRSGAAGA

SEQ ID NO: 131779 - protein, 20 aa, Artificial Sequence
  Description of Artificial Sequence: Synthetic peptide
  Seed: RMCSLMQGSTLPRRSGAAGA
RMFSLLQASTCPRRSGAAGA

SEQ ID NO: 131780 - protein, 20 aa, Artificial Sequence
  Description of Artificial Sequence: Synthetic peptide
  Seed: RMCSLMQGSTLPRRSGAAGA
RMFSLLQASTFPRRSGAAGA

SEQ ID NO: 131781 - protein, 20 aa, Artificial Sequence
  Description of Artificial Sequence: Synthetic peptide
  Seed: RMCSLMQGSTLPRRSGAAGA
RMFSLLQASTGPRRSGAAGA

SEQ ID NO: 131782 - protein, 20 aa, Artificial Sequence
  Description of Artificial Sequence: Synthetic peptide
  Seed: RMCSLMQGSTLPRRSGAAGA
RMFSLLQASTHPRRSGAAGA

SEQ ID NO: 131783 - protein, 20 aa, Artificial Sequence
  Description of Artificial Sequence: Synthetic peptide
  Seed: RMCSLMQGSTLPRRSGAAGA
RMFSLLQASTIPRRSGAAGA

SEQ ID NO: 131784 - protein, 20 aa, Artificial Sequence
  Description of Artificial Sequence: Synthetic peptide
  Seed: RMCSLMQGSTLPRRSGAAGA
RMFSLLQASTLPRRSGAAGA

SEQ ID NO: 131785 - protein, 20 aa, Artificial Sequence
  Description of Artificial Sequence: Synthetic peptide
  Seed: RMCSLMQGSTLPRRSGAAGA
RMFSLLQASTMPRRSGAAGA

SEQ ID NO: 131786 - protein, 20 aa, Artificial Sequence
  Description of Artificial Sequence: Synthetic peptide
  Seed: RMCSLMQGSTLPRRSGAAGA
RMFSLLQASTNPRRSGAAGA

SEQ ID NO: 131787 - protein, 20 aa, Artificial Sequence
  Description of Artificial Sequence: Synthetic peptide
  Seed: RMCSLMQGSTLPRRSGAAGA
RMFSLLQASTPPRRSGAAGA

SEQ ID NO: 131788 - protein, 20 aa, Artificial Sequence
  Description of Artificial Sequence: Synthetic peptide
  Seed: RMCSLMQGSTLPRRSGAAGA
RMFSLLQASTSPRRSGAAGA

SEQ ID NO: 131789 - protein, 20 aa, Artificial Sequence
  Description of Artificial Sequence: Synthetic peptide
  Seed: RMCSLMQGSTLPRRSGAAGA
RMFSLLQASTTPRRSGAAGA

SEQ ID NO: 131790 - protein, 20 aa, Artificial Sequence
  Description of Artificial Sequence: Synthetic peptide
  Seed: RMCSLMQGSTLPRRSGAAGA
RMFSLLQASTVPRRSGAAGA

SEQ ID NO: 131791 - protein, 20 aa, Artificial Sequence
  Description of Artificial Sequence: Synthetic peptide
  Seed: RMCSLMQGSTLPRRSGAAGA
RMFSLLQGSTAPRRSGAAGA

SEQ ID NO: 131792 - protein, 20 aa, Artificial Sequence
  Description of Artificial Sequence: Synthetic peptide
  Seed: RMCSLMQGSTLPRRSGAAGA
RMFSLLQGSTCPRRSGAAGA

SEQ ID NO: 131793 - protein, 20 aa, Artificial Sequence
  Description of Artificial Sequence: Synthetic peptide
  Seed: RMCSLMQGSTLPRRSGAAGA
RMFSLLQGSTFPRRSGAAGA

SEQ ID NO: 131794 - protein, 20 aa, Artificial Sequence
  Description of Artificial Sequence: Synthetic peptide
  Seed: RMCSLMQGSTLPRRSGAAGA
RMFSLLQGSTGPRRSGAAGA

SEQ ID NO: 131795 - protein, 20 aa, Artificial Sequence
  Description of Artificial Sequence: Synthetic peptide
  Seed: RMCSLMQGSTLPRRSGAAGA
RMFSLLQGSTIPRRSGAAGA

SEQ ID NO: 131796 - protein, 20 aa, Artificial Sequence
  Description of Artificial Sequence: Synthetic peptide
  Seed: RMCSLMQGSTLPRRSGAAGA
RMFSLLQGSTLPRRSGAAGA

SEQ ID NO: 131797 - protein, 20 aa, Artificial Sequence
  Description of Artificial Sequence: Synthetic peptide
  Seed: RMCSLMQGSTLPRRSGAAGA
RMFSLLQGSTMPRRSGAAGA

SEQ ID NO: 131798 - protein, 20 aa, Artificial Sequence
  Description of Artificial Sequence: Synthetic peptide
  Seed: RMCSLMQGSTLPRRSGAAGA
RMFSLLQGSTNPRRSGAAGA

SEQ ID NO: 131799 - protein, 20 aa, Artificial Sequence
  Description of Artificial Sequence: Synthetic peptide
  Seed: RMCSLMQGSTLPRRSGAAGA
RMFSLLQGSTSPRRSGAAGA

SEQ ID NO: 131800 - protein, 20 aa, Artificial Sequence
  Description of Artificial Sequence: Synthetic peptide
  Seed: RMCSLMQGSTLPRRSGAAGA
RMFSLLQGSTTPRRSGAAGA

SEQ ID NO: 131801 - protein, 20 aa, Artificial Sequence
  Description of Artificial Sequence: Synthetic peptide
  Seed: RMCSLMQGSTLPRRSGAAGA
RMFSLLQGSTVPRRSGAAGA

SEQ ID NO: 131802 - protein, 20 aa, Artificial Sequence
  Description of Artificial Sequence: Synthetic peptide
  Seed: RMCSLMQGSTLPRRSGAAGA
RMFSLLQISTAPRRSGAAGA

SEQ ID NO: 131803 - protein, 20 aa, Artificial Sequence
  Description of Artificial Sequence: Synthetic peptide
  Seed: RMCSLMQGSTLPRRSGAAGA
RMFSLLQISTVPRRSGAAGA

SEQ ID NO: 131804 - protein, 20 aa, Artificial Sequence
  Description of Artificial Sequence: Synthetic peptide
  Seed: RMCSLMQGSTLPRRSGAAGA
RMFSLLQNSTAPRRSGAAGA

SEQ ID NO: 131805 - protein, 20 aa, Artificial Sequence
  Description of Artificial Sequence: Synthetic peptide
  Seed: RMCSLMQGSTLPRRSGAAGA
RMFSLLQNSTIPRRSGAAGA

SEQ ID NO: 131806 - protein, 20 aa, Artificial Sequence
  Description of Artificial Sequence: Synthetic peptide
  Seed: RMCSLMQGSTLPRRSGAAGA
RMFSLLQNSTLPRRSGAAGA

SEQ ID NO: 131807 - protein, 20 aa, Artificial Sequence
  Description of Artificial Sequence: Synthetic peptide
  Seed: RMCSLMQGSTLPRRSGAAGA
RMFSLLQNSTMPRRSGAAGA

SEQ ID NO: 131808 - protein, 20 aa, Artificial Sequence
  Description of Artificial Sequence: Synthetic peptide
  Seed: RMCSLMQGSTLPRRSGAAGA
RMFSLLQNSTSPRRSGAAGA

SEQ ID NO: 131809 - protein, 20 aa, Artificial Sequence
  Description of Artificial Sequence: Synthetic peptide
  Seed: RMCSLMQGSTLPRRSGAAGA
RMFSLLQNSTTPRRSGAAGA

SEQ ID NO: 131810 - protein, 20 aa, Artificial Sequence
  Description of Artificial Sequence: Synthetic peptide
  Seed: RMCSLMQGSTLPRRSGAAGA
RMFSLLQNSTVPRRSGAAGA

SEQ ID NO: 131811 - protein, 20 aa, Artificial Sequence
  Description of Artificial Sequence: Synthetic peptide
  Seed: RMCSLMQGSTLPRRSGAAGA
RMFSLLQPSTAPRRSGAAGA

SEQ ID NO: 131812 - protein, 20 aa, Artificial Sequence
  Description of Artificial Sequence: Synthetic peptide
  Seed: RMCSLMQGSTLPRRSGAAGA
RMFSLLQPSTGPRRSGAAGA

SEQ ID NO: 131813 - protein, 20 aa, Artificial Sequence
  Description of Artificial Sequence: Synthetic peptide
  Seed: RMCSLMQGSTLPRRSGAAGA
RMFSLLQPSTIPRRSGAAGA

SEQ ID NO: 131814 - protein, 20 aa, Artificial Sequence
  Description of Artificial Sequence: Synthetic peptide
  Seed: RMCSLMQGSTLPRRSGAAGA
RMFSLLQPSTLPRRSGAAGA

SEQ ID NO: 131815 - protein, 20 aa, Artificial Sequence
  Description of Artificial Sequence: Synthetic peptide
  Seed: RMCSLMQGSTLPRRSGAAGA
RMFSLLQPSTMPRRSGAAGA

SEQ ID NO: 131816 - protein, 20 aa, Artificial Sequence
  Description of Artificial Sequence: Synthetic peptide
  Seed: RMCSLMQGSTLPRRSGAAGA
RMFSLLQPSTNPRRSGAAGA

SEQ ID NO: 131817 - protein, 20 aa, Artificial Sequence
  Description of Artificial Sequence: Synthetic peptide
  Seed: RMCSLMQGSTLPRRSGAAGA
RMFSLLQPSTSPRRSGAAGA

SEQ ID NO: 131818 - protein, 20 aa, Artificial Sequence
  Description of Artificial Sequence: Synthetic peptide
  Seed: RMCSLMQGSTLPRRSGAAGA
RMFSLLQPSTTPRRSGAAGA

SEQ ID NO: 131819 - protein, 20 aa, Artificial Sequence
  Description of Artificial Sequence: Synthetic peptide
  Seed: RMCSLMQGSTLPRRSGAAGA
RMFSLLQPSTVPRRSGAAGA

SEQ ID NO: 131820 - protein, 20 aa, Artificial Sequence
  Description of Artificial Sequence: Synthetic peptide
  Seed: RMCSLMQGSTLPRRSGAAGA
RMFSLLQSSTAPRRSGAAGA

SEQ ID NO: 131821 - protein, 20 aa, Artificial Sequence
  Description of Artificial Sequence: Synthetic peptide
  Seed: RMCSLMQGSTLPRRSGAAGA
RMFSLLQSSTGPRRSGAAGA

SEQ ID NO: 131822 - protein, 20 aa, Artificial Sequence
  Description of Artificial Sequence: Synthetic peptide
  Seed: RMCSLMQGSTLPRRSGAAGA
RMFSLLQSSTIPRRSGAAGA

SEQ ID NO: 131823 - protein, 20 aa, Artificial Sequence
  Description of Artificial Sequence: Synthetic peptide
  Seed: RMCSLMQGSTLPRRSGAAGA
RMFSLLQSSTLPRRSGAAGA

SEQ ID NO: 131824 - protein, 20 aa, Artificial Sequence
  Description of Artificial Sequence: Synthetic peptide
  Seed: RMCSLMQGSTLPRRSGAAGA
RMFSLLQSSTMPRRSGAAGA

SEQ ID NO: 131825 - protein, 20 aa, Artificial Sequence
  Description of Artificial Sequence: Synthetic peptide
  Seed: RMCSLMQGSTLPRRSGAAGA
RMFSLLQSSTNPRRSGAAGA

SEQ ID NO: 131826 - protein, 20 aa, Artificial Sequence
  Description of Artificial Sequence: Synthetic peptide
  Seed: RMCSLMQGSTLPRRSGAAGA
RMFSLLQSSTSPRRSGAAGA

SEQ ID NO: 131827 - protein, 20 aa, Artificial Sequence
  Description of Artificial Sequence: Synthetic peptide
  Seed: RMCSLMQGSTLPRRSGAAGA
RMFSLLQSSTTPRRSGAAGA

SEQ ID NO: 131828 - protein, 20 aa, Artificial Sequence
  Description of Artificial Sequence: Synthetic peptide
  Seed: RMCSLMQGSTLPRRSGAAGA
RMFSLLQSSTVPRRSGAAGA

SEQ ID NO: 131829 - protein, 20 aa, Artificial Sequence
  Description of Artificial Sequence: Synthetic peptide
  Seed: RMCSLMQGSTLPRRSGAAGA
RMFSLLQTSTAPRRSGAAGA

SEQ ID NO: 131830 - protein, 20 aa, Artificial Sequence
  Description of Artificial Sequence: Synthetic peptide
  Seed: RMCSLMQGSTLPRRSGAAGA
RMFSLLQTSTIPRRSGAAGA

SEQ ID NO: 131831 - protein, 20 aa, Artificial Sequence
  Description of Artificial Sequence: Synthetic peptide
  Seed: RMCSLMQGSTLPRRSGAAGA
RMFSLLQTSTLPRRSGAAGA

SEQ ID NO: 131832 - protein, 20 aa, Artificial Sequence
  Description of Artificial Sequence: Synthetic peptide
  Seed: RMCSLMQGSTLPRRSGAAGA
RMFSLLQTSTMPRRSGAAGA

SEQ ID NO: 131833 - protein, 20 aa, Artificial Sequence
  Description of Artificial Sequence: Synthetic peptide
  Seed: RMCSLMQGSTLPRRSGAAGA
RMFSLLQTSTSPRRSGAAGA

SEQ ID NO: 131834 - protein, 20 aa, Artificial Sequence
  Description of Artificial Sequence: Synthetic peptide
  Seed: RMCSLMQGSTLPRRSGAAGA
RMFSLLQTSTTPRRSGAAGA

SEQ ID NO: 131835 - protein, 20 aa, Artificial Sequence
  Description of Artificial Sequence: Synthetic peptide
  Seed: RMCSLMQGSTLPRRSGAAGA
RMFSLLQTSTVPRRSGAAGA

SEQ ID NO: 131836 - protein, 20 aa, Artificial Sequence
  Description of Artificial Sequence: Synthetic peptide
  Seed: RMCSLMQGSTLPRRSGAAGA
RMFSLLQVSTAPRRSGAAGA

SEQ ID NO: 131837 - protein, 20 aa, Artificial Sequence
  Description of Artificial Sequence: Synthetic peptide
  Seed: RMCSLMQGSTLPRRSGAAGA
RMFSLLQVSTIPRRSGAAGA

SEQ ID NO: 131838 - protein, 20 aa, Artificial Sequence
  Description of Artificial Sequence: Synthetic peptide
  Seed: RMCSLMQGSTLPRRSGAAGA
RMFSLLQVSTLPRRSGAAGA

SEQ ID NO: 131839 - protein, 20 aa, Artificial Sequence
  Description of Artificial Sequence: Synthetic peptide
  Seed: RMCSLMQGSTLPRRSGAAGA
RMFSLLQVSTTPRRSGAAGA

SEQ ID NO: 131840 - protein, 20 aa, Artificial Sequence
  Description of Artificial Sequence: Synthetic peptide
  Seed: RMCSLMQGSTLPRRSGAAGA
RMFSLLQVSTVPRRSGAAGA

SEQ ID NO: 131841 - protein, 20 aa, Artificial Sequence
  Description of Artificial Sequence: Synthetic peptide
  Seed: RMCSLMQGSTLPRRSGAAGA
RMFSLMQASTAPRRSGAAGA

SEQ ID NO: 131842 - protein, 20 aa, Artificial Sequence
  Description of Artificial Sequence: Synthetic peptide
  Seed: RMCSLMQGSTLPRRSGAAGA
RMFSLMQASTCPRRSGAAGA

SEQ ID NO: 131843 - protein, 20 aa, Artificial Sequence
  Description of Artificial Sequence: Synthetic peptide
  Seed: RMCSLMQGSTLPRRSGAAGA
RMFSLMQASTFPRRSGAAGA

SEQ ID NO: 131844 - protein, 20 aa, Artificial Sequence
  Description of Artificial Sequence: Synthetic peptide
  Seed: RMCSLMQGSTLPRRSGAAGA
RMFSLMQASTGPRRSGAAGA

SEQ ID NO: 131845 - protein, 20 aa, Artificial Sequence
  Description of Artificial Sequence: Synthetic peptide
  Seed: RMCSLMQGSTLPRRSGAAGA
RMFSLMQASTHPRRSGAAGA

SEQ ID NO: 131846 - protein, 20 aa, Artificial Sequence
  Description of Artificial Sequence: Synthetic peptide
  Seed: RMCSLMQGSTLPRRSGAAGA
RMFSLMQASTIPRRSGAAGA

SEQ ID NO: 131847 - protein, 20 aa, Artificial Sequence
  Description of Artificial Sequence: Synthetic peptide
  Seed: RMCSLMQGSTLPRRSGAAGA
RMFSLMQASTLPRRSGAAGA

SEQ ID NO: 131848 - protein, 20 aa, Artificial Sequence
  Description of Artificial Sequence: Synthetic peptide
  Seed: RMCSLMQGSTLPRRSGAAGA
RMFSLMQASTMPRRSGAAGA

SEQ ID NO: 131849 - protein, 20 aa, Artificial Sequence
  Description of Artificial Sequence: Synthetic peptide
  Seed: RMCSLMQGSTLPRRSGAAGA
RMFSLMQASTNPRRSGAAGA

SEQ ID NO: 131850 - protein, 20 aa, Artificial Sequence
  Description of Artificial Sequence: Synthetic peptide
  Seed: RMCSLMQGSTLPRRSGAAGA
RMFSLMQASTPPRRSGAAGA

SEQ ID NO: 131851 - protein, 20 aa, Artificial Sequence
  Description of Artificial Sequence: Synthetic peptide
  Seed: RMCSLMQGSTLPRRSGAAGA
RMFSLMQASTSPRRSGAAGA

SEQ ID NO: 131852 - protein, 20 aa, Artificial Sequence
  Description of Artificial Sequence: Synthetic peptide
  Seed: RMCSLMQGSTLPRRSGAAGA
RMFSLMQASTTPRRSGAAGA

SEQ ID NO: 131853 - protein, 20 aa, Artificial Sequence
  Description of Artificial Sequence: Synthetic peptide
  Seed: RMCSLMQGSTLPRRSGAAGA
RMFSLMQASTVPRRSGAAGA

SEQ ID NO: 131854 - protein, 20 aa, Artificial Sequence
  Description of Artificial Sequence: Synthetic peptide
  Seed: RMCSLMQGSTLPRRSGAAGA
RMFSLMQASTYPRRSGAAGA

SEQ ID NO: 131855 - protein, 20 aa, Artificial Sequence
  Description of Artificial Sequence: Synthetic peptide
  Seed: RMCSLMQGSTLPRRSGAAGA
RMFSLMQGSTAPRRSGAAGA

SEQ ID NO: 131856 - protein, 20 aa, Artificial Sequence
  Description of Artificial Sequence: Synthetic peptide
  Seed: RMCSLMQGSTLPRRSGAAGA
RMFSLMQGSTCPRRSGAAGA

SEQ ID NO: 131857 - protein, 20 aa, Artificial Sequence
  Description of Artificial Sequence: Synthetic peptide
  Seed: RMCSLMQGSTLPRRSGAAGA
RMFSLMQGSTFPRRSGAAGA

SEQ ID NO: 131858 - protein, 20 aa, Artificial Sequence
  Description of Artificial Sequence: Synthetic peptide
  Seed: RMCSLMQGSTLPRRSGAAGA
RMFSLMQGSTGPRRSGAAGA

SEQ ID NO: 131859 - protein, 20 aa, Artificial Sequence
  Description of Artificial Sequence: Synthetic peptide
  Seed: RMCSLMQGSTLPRRSGAAGA
RMFSLMQGSTIPRRSGAAGA

SEQ ID NO: 131860 - protein, 20 aa, Artificial Sequence
  Description of Artificial Sequence: Synthetic peptide
  Seed: RMCSLMQGSTLPRRSGAAGA
RMFSLMQGSTLPRRSGAAGA

SEQ ID NO: 131861 - protein, 20 aa, Artificial Sequence
  Description of Artificial Sequence: Synthetic peptide
  Seed: RMCSLMQGSTLPRRSGAAGA
RMFSLMQGSTMPRRSGAAGA

SEQ ID NO: 131862 - protein, 20 aa, Artificial Sequence
  Description of Artificial Sequence: Synthetic peptide
  Seed: RMCSLMQGSTLPRRSGAAGA
RMFSLMQGSTNPRRSGAAGA

SEQ ID NO: 131863 - protein, 20 aa, Artificial Sequence
  Description of Artificial Sequence: Synthetic peptide
  Seed: RMCSLMQGSTLPRRSGAAGA
RMFSLMQGSTSPRRSGAAGA

SEQ ID NO: 131864 - protein, 20 aa, Artificial Sequence
  Description of Artificial Sequence: Synthetic peptide
  Seed: RMCSLMQGSTLPRRSGAAGA
RMFSLMQGSTTPRRSGAAGA

SEQ ID NO: 131865 - protein, 20 aa, Artificial Sequence
  Description of Artificial Sequence: Synthetic peptide
  Seed: RMCSLMQGSTLPRRSGAAGA
RMFSLMQGSTVPRRSGAAGA

SEQ ID NO: 131866 - protein, 20 aa, Artificial Sequence
  Description of Artificial Sequence: Synthetic peptide
  Seed: RMCSLMQGSTLPRRSGAAGA
RMFSLMQHSTLPRRSGAAGA

SEQ ID NO: 131867 - protein, 20 aa, Artificial Sequence
  Description of Artificial Sequence: Synthetic peptide
  Seed: RMCSLMQGSTLPRRSGAAGA
RMFSLMQHSTVPRRSGAAGA

SEQ ID NO: 131868 - protein, 20 aa, Artificial Sequence
  Description of Artificial Sequence: Synthetic peptide
  Seed: RMCSLMQGSTLPRRSGAAGA
RMFSLMQISTAPRRSGAAGA

SEQ ID NO: 131869 - protein, 20 aa, Artificial Sequence
  Description of Artificial Sequence: Synthetic peptide
  Seed: RMCSLMQGSTLPRRSGAAGA
RMFSLMQISTIPRRSGAAGA

SEQ ID NO: 131870 - protein, 20 aa, Artificial Sequence
  Description of Artificial Sequence: Synthetic peptide
  Seed: RMCSLMQGSTLPRRSGAAGA
RMFSLMQISTVPRRSGAAGA

SEQ ID NO: 131871 - protein, 20 aa, Artificial Sequence
  Description of Artificial Sequence: Synthetic peptide
  Seed: RMCSLMQGSTLPRRSGAAGA
RMFSLMQNSTAPRRSGAAGA

SEQ ID NO: 131872 - protein, 20 aa, Artificial Sequence
  Description of Artificial Sequence: Synthetic peptide
  Seed: RMCSLMQGSTLPRRSGAAGA
RMFSLMQNSTIPRRSGAAGA

SEQ ID NO: 131873 - protein, 20 aa, Artificial Sequence
  Description of Artificial Sequence: Synthetic peptide
  Seed: RMCSLMQGSTLPRRSGAAGA
RMFSLMQNSTLPRRSGAAGA

SEQ ID NO: 131874 - protein, 20 aa, Artificial Sequence
  Description of Artificial Sequence: Synthetic peptide
  Seed: RMCSLMQGSTLPRRSGAAGA
RMFSLMQNSTMPRRSGAAGA

SEQ ID NO: 131875 - protein, 20 aa, Artificial Sequence
  Description of Artificial Sequence: Synthetic peptide
  Seed: RMCSLMQGSTLPRRSGAAGA
RMFSLMQNSTSPRRSGAAGA

SEQ ID NO: 131876 - protein, 20 aa, Artificial Sequence
  Description of Artificial Sequence: Synthetic peptide
  Seed: RMCSLMQGSTLPRRSGAAGA
RMFSLMQNSTTPRRSGAAGA

SEQ ID NO: 131877 - protein, 20 aa, Artificial Sequence
  Description of Artificial Sequence: Synthetic peptide
  Seed: RMCSLMQGSTLPRRSGAAGA
RMFSLMQNSTVPRRSGAAGA

SEQ ID NO: 131878 - protein, 20 aa, Artificial Sequence
  Description of Artificial Sequence: Synthetic peptide
  Seed: RMCSLMQGSTLPRRSGAAGA
RMFSLMQPSTAPRRSGAAGA

SEQ ID NO: 131879 - protein, 20 aa, Artificial Sequence
  Description of Artificial Sequence: Synthetic peptide
  Seed: RMCSLMQGSTLPRRSGAAGA
RMFSLMQPSTGPRRSGAAGA

SEQ ID NO: 131880 - protein, 20 aa, Artificial Sequence
  Description of Artificial Sequence: Synthetic peptide
  Seed: RMCSLMQGSTLPRRSGAAGA
RMFSLMQPSTIPRRSGAAGA

SEQ ID NO: 131881 - protein, 20 aa, Artificial Sequence
  Description of Artificial Sequence: Synthetic peptide
  Seed: RMCSLMQGSTLPRRSGAAGA
RMFSLMQPSTLPRRSGAAGA

SEQ ID NO: 131882 - protein, 20 aa, Artificial Sequence
  Description of Artificial Sequence: Synthetic peptide
  Seed: RMCSLMQGSTLPRRSGAAGA
RMFSLMQPSTMPRRSGAAGA

SEQ ID NO: 131883 - protein, 20 aa, Artificial Sequence
  Description of Artificial Sequence: Synthetic peptide
  Seed: RMCSLMQGSTLPRRSGAAGA
RMFSLMQPSTNPRRSGAAGA

SEQ ID NO: 131884 - protein, 20 aa, Artificial Sequence
  Description of Artificial Sequence: Synthetic peptide
  Seed: RMCSLMQGSTLPRRSGAAGA
RMFSLMQPSTSPRRSGAAGA

SEQ ID NO: 131885 - protein, 20 aa, Artificial Sequence
  Description of Artificial Sequence: Synthetic peptide
  Seed: RMCSLMQGSTLPRRSGAAGA
RMFSLMQPSTTPRRSGAAGA

SEQ ID NO: 131886 - protein, 20 aa, Artificial Sequence
  Description of Artificial Sequence: Synthetic peptide
  Seed: RMCSLMQGSTLPRRSGAAGA
RMFSLMQPSTVPRRSGAAGA

SEQ ID NO: 131887 - protein, 20 aa, Artificial Sequence
  Description of Artificial Sequence: Synthetic peptide
  Seed: RMCSLMQGSTLPRRSGAAGA
RMFSLMQSSTAPRRSGAAGA

SEQ ID NO: 131888 - protein, 20 aa, Artificial Sequence
  Description of Artificial Sequence: Synthetic peptide
  Seed: RMCSLMQGSTLPRRSGAAGA
RMFSLMQSSTCPRRSGAAGA

SEQ ID NO: 131889 - protein, 20 aa, Artificial Sequence
  Description of Artificial Sequence: Synthetic peptide
  Seed: RMCSLMQGSTLPRRSGAAGA
RMFSLMQSSTGPRRSGAAGA

SEQ ID NO: 131890 - protein, 20 aa, Artificial Sequence
  Description of Artificial Sequence: Synthetic peptide
  Seed: RMCSLMQGSTLPRRSGAAGA
RMFSLMQSSTIPRRSGAAGA

SEQ ID NO: 131891 - protein, 20 aa, Artificial Sequence
  Description of Artificial Sequence: Synthetic peptide
  Seed: RMCSLMQGSTLPRRSGAAGA
RMFSLMQSSTLPRRSGAAGA

SEQ ID NO: 131892 - protein, 20 aa, Artificial Sequence
  Description of Artificial Sequence: Synthetic peptide
  Seed: RMCSLMQGSTLPRRSGAAGA
RMFSLMQSSTMPRRSGAAGA

SEQ ID NO: 131893 - protein, 20 aa, Artificial Sequence
  Description of Artificial Sequence: Synthetic peptide
  Seed: RMCSLMQGSTLPRRSGAAGA
RMFSLMQSSTNPRRSGAAGA

SEQ ID NO: 131894 - protein, 20 aa, Artificial Sequence
  Description of Artificial Sequence: Synthetic peptide
  Seed: RMCSLMQGSTLPRRSGAAGA
RMFSLMQSSTSPRRSGAAGA

SEQ ID NO: 131895 - protein, 20 aa, Artificial Sequence
  Description of Artificial Sequence: Synthetic peptide
  Seed: RMCSLMQGSTLPRRSGAAGA
RMFSLMQSSTTPRRSGAAGA

SEQ ID NO: 131896 - protein, 20 aa, Artificial Sequence
  Description of Artificial Sequence: Synthetic peptide
  Seed: RMCSLMQGSTLPRRSGAAGA
RMFSLMQSSTVPRRSGAAGA

SEQ ID NO: 131897 - protein, 20 aa, Artificial Sequence
  Description of Artificial Sequence: Synthetic peptide
  Seed: RMCSLMQGSTLPRRSGAAGA
RMFSLMQTSTAPRRSGAAGA

SEQ ID NO: 131898 - protein, 20 aa, Artificial Sequence
  Description of Artificial Sequence: Synthetic peptide
  Seed: RMCSLMQGSTLPRRSGAAGA
RMFSLMQTSTIPRRSGAAGA

SEQ ID NO: 131899 - protein, 20 aa, Artificial Sequence
  Description of Artificial Sequence: Synthetic peptide
  Seed: RMCSLMQGSTLPRRSGAAGA
RMFSLMQTSTLPRRSGAAGA

SEQ ID NO: 131900 - protein, 20 aa, Artificial Sequence
  Description of Artificial Sequence: Synthetic peptide
  Seed: RMCSLMQGSTLPRRSGAAGA
RMFSLMQTSTMPRRSGAAGA

SEQ ID NO: 131901 - protein, 20 aa, Artificial Sequence
  Description of Artificial Sequence: Synthetic peptide
  Seed: RMCSLMQGSTLPRRSGAAGA
RMFSLMQTSTSPRRSGAAGA

SEQ ID NO: 131902 - protein, 20 aa, Artificial Sequence
  Description of Artificial Sequence: Synthetic peptide
  Seed: RMCSLMQGSTLPRRSGAAGA
RMFSLMQTSTTPRRSGAAGA

SEQ ID NO: 131903 - protein, 20 aa, Artificial Sequence
  Description of Artificial Sequence: Synthetic peptide
  Seed: RMCSLMQGSTLPRRSGAAGA
RMFSLMQTSTVPRRSGAAGA

SEQ ID NO: 131904 - protein, 20 aa, Artificial Sequence
  Description of Artificial Sequence: Synthetic peptide
  Seed: RMCSLMQGSTLPRRSGAAGA
RMFSLMQVSTAPRRSGAAGA

SEQ ID NO: 131905 - protein, 20 aa, Artificial Sequence
  Description of Artificial Sequence: Synthetic peptide
  Seed: RMCSLMQGSTLPRRSGAAGA
RMFSLMQVSTIPRRSGAAGA

SEQ ID NO: 131906 - protein, 20 aa, Artificial Sequence
  Description of Artificial Sequence: Synthetic peptide
  Seed: RMCSLMQGSTLPRRSGAAGA
RMFSLMQVSTLPRRSGAAGA

SEQ ID NO: 131907 - protein, 20 aa, Artificial Sequence
  Description of Artificial Sequence: Synthetic peptide
  Seed: RMCSLMQGSTLPRRSGAAGA
RMFSLMQVSTMPRRSGAAGA

SEQ ID NO: 131908 - protein, 20 aa, Artificial Sequence
  Description of Artificial Sequence: Synthetic peptide
  Seed: RMCSLMQGSTLPRRSGAAGA
RMFSLMQVSTSPRRSGAAGA

SEQ ID NO: 131909 - protein, 20 aa, Artificial Sequence
  Description of Artificial Sequence: Synthetic peptide
  Seed: RMCSLMQGSTLPRRSGAAGA
RMFSLMQVSTTPRRSGAAGA

SEQ ID NO: 131910 - protein, 20 aa, Artificial Sequence
  Description of Artificial Sequence: Synthetic peptide
  Seed: RMCSLMQGSTLPRRSGAAGA
RMFSLMQVSTVPRRSGAAGA

SEQ ID NO: 131911 - protein, 20 aa, Artificial Sequence
  Description of Artificial Sequence: Synthetic peptide
  Seed: RMCSLMQGSTLPRRSGAAGA
RMFSLNQASTIPRRSGAAGA

SEQ ID NO: 131912 - protein, 20 aa, Artificial Sequence
  Description of Artificial Sequence: Synthetic peptide
  Seed: RMCSLMQGSTLPRRSGAAGA
RMFSLNQASTLPRRSGAAGA

SEQ ID NO: 131913 - protein, 20 aa, Artificial Sequence
  Description of Artificial Sequence: Synthetic peptide
  Seed: RMCSLMQGSTLPRRSGAAGA
RMFSLNQASTVPRRSGAAGA

SEQ ID NO: 131914 - protein, 20 aa, Artificial Sequence
  Description of Artificial Sequence: Synthetic peptide
  Seed: RMCSLMQGSTLPRRSGAAGA
RMFSLQQASTAPRRSGAAGA

SEQ ID NO: 131915 - protein, 20 aa, Artificial Sequence
  Description of Artificial Sequence: Synthetic peptide
  Seed: RMCSLMQGSTLPRRSGAAGA
RMFSLQQASTIPRRSGAAGA

SEQ ID NO: 131916 - protein, 20 aa, Artificial Sequence
  Description of Artificial Sequence: Synthetic peptide
  Seed: RMCSLMQGSTLPRRSGAAGA
RMFSLQQASTLPRRSGAAGA

SEQ ID NO: 131917 - protein, 20 aa, Artificial Sequence
  Description of Artificial Sequence: Synthetic peptide
  Seed: RMCSLMQGSTLPRRSGAAGA
RMFSLQQASTMPRRSGAAGA

SEQ ID NO: 131918 - protein, 20 aa, Artificial Sequence
  Description of Artificial Sequence: Synthetic peptide
  Seed: RMCSLMQGSTLPRRSGAAGA
RMFSLQQASTSPRRSGAAGA

SEQ ID NO: 131919 - protein, 20 aa, Artificial Sequence
  Description of Artificial Sequence: Synthetic peptide
  Seed: RMCSLMQGSTLPRRSGAAGA
RMFSLQQASTTPRRSGAAGA

SEQ ID NO: 131920 - protein, 20 aa, Artificial Sequence
  Description of Artificial Sequence: Synthetic peptide
  Seed: RMCSLMQGSTLPRRSGAAGA
RMFSLQQASTVPRRSGAAGA

SEQ ID NO: 131921 - protein, 20 aa, Artificial Sequence
  Description of Artificial Sequence: Synthetic peptide
  Seed: RMCSLMQGSTLPRRSGAAGA
RMFSLQQGSTAPRRSGAAGA

SEQ ID NO: 131922 - protein, 20 aa, Artificial Sequence
  Description of Artificial Sequence: Synthetic peptide
  Seed: RMCSLMQGSTLPRRSGAAGA
RMFSLQQGSTIPRRSGAAGA

SEQ ID NO: 131923 - protein, 20 aa, Artificial Sequence
  Description of Artificial Sequence: Synthetic peptide
  Seed: RMCSLMQGSTLPRRSGAAGA
RMFSLQQGSTLPRRSGAAGA

SEQ ID NO: 131924 - protein, 20 aa, Artificial Sequence
  Description of Artificial Sequence: Synthetic peptide
  Seed: RMCSLMQGSTLPRRSGAAGA
RMFSLQQGSTMPRRSGAAGA

SEQ ID NO: 131925 - protein, 20 aa, Artificial Sequence
  Description of Artificial Sequence: Synthetic peptide
  Seed: RMCSLMQGSTLPRRSGAAGA
RMFSLQQGSTVPRRSGAAGA

SEQ ID NO: 131926 - protein, 20 aa, Artificial Sequence
  Description of Artificial Sequence: Synthetic peptide
  Seed: RMCSLMQGSTLPRRSGAAGA
RMFSLQQPSTAPRRSGAAGA

SEQ ID NO: 131927 - protein, 20 aa, Artificial Sequence
  Description of Artificial Sequence: Synthetic peptide
  Seed: RMCSLMQGSTLPRRSGAAGA
RMFSLQQPSTIPRRSGAAGA

SEQ ID NO: 131928 - protein, 20 aa, Artificial Sequence
  Description of Artificial Sequence: Synthetic peptide
  Seed: RMCSLMQGSTLPRRSGAAGA
RMFSLQQPSTLPRRSGAAGA

SEQ ID NO: 131929 - protein, 20 aa, Artificial Sequence
  Description of Artificial Sequence: Synthetic peptide
  Seed: RMCSLMQGSTLPRRSGAAGA
RMFSLQQPSTVPRRSGAAGA

SEQ ID NO: 131930 - protein, 20 aa, Artificial Sequence
  Description of Artificial Sequence: Synthetic peptide
  Seed: RMCSLMQGSTLPRRSGAAGA
RMFSLQQSSTAPRRSGAAGA

SEQ ID NO: 131931 - protein, 20 aa, Artificial Sequence
  Description of Artificial Sequence: Synthetic peptide
  Seed: RMCSLMQGSTLPRRSGAAGA
RMFSLQQSSTIPRRSGAAGA

SEQ ID NO: 131932 - protein, 20 aa, Artificial Sequence
  Description of Artificial Sequence: Synthetic peptide
  Seed: RMCSLMQGSTLPRRSGAAGA
RMFSLQQSSTLPRRSGAAGA

SEQ ID NO: 131933 - protein, 20 aa, Artificial Sequence
  Description of Artificial Sequence: Synthetic peptide
  Seed: RMCSLMQGSTLPRRSGAAGA
RMFSLQQSSTVPRRSGAAGA

SEQ ID NO: 131934 - protein, 20 aa, Artificial Sequence
  Description of Artificial Sequence: Synthetic peptide
  Seed: RMCSLMQGSTLPRRSGAAGA
RMFSLQQTSTVPRRSGAAGA

SEQ ID NO: 131935 - protein, 20 aa, Artificial Sequence
  Description of Artificial Sequence: Synthetic peptide
  Seed: RMCSLMQGSTLPRRSGAAGA
RMFSLSQASTAPRRSGAAGA

SEQ ID NO: 131936 - protein, 20 aa, Artificial Sequence
  Description of Artificial Sequence: Synthetic peptide
  Seed: RMCSLMQGSTLPRRSGAAGA
RMFSLSQASTIPRRSGAAGA

SEQ ID NO: 131937 - protein, 20 aa, Artificial Sequence
  Description of Artificial Sequence: Synthetic peptide
  Seed: RMCSLMQGSTLPRRSGAAGA
RMFSLSQASTLPRRSGAAGA

SEQ ID NO: 131938 - protein, 20 aa, Artificial Sequence
  Description of Artificial Sequence: Synthetic peptide
  Seed: RMCSLMQGSTLPRRSGAAGA
RMFSLSQASTMPRRSGAAGA

SEQ ID NO: 131939 - protein, 20 aa, Artificial Sequence
  Description of Artificial Sequence: Synthetic peptide
  Seed: RMCSLMQGSTLPRRSGAAGA
RMFSLSQASTVPRRSGAAGA

SEQ ID NO: 131940 - protein, 20 aa, Artificial Sequence
  Description of Artificial Sequence: Synthetic peptide
  Seed: RMCSLMQGSTLPRRSGAAGA
RMFSLSQGSTIPRRSGAAGA

SEQ ID NO: 131941 - protein, 20 aa, Artificial Sequence
  Description of Artificial Sequence: Synthetic peptide
  Seed: RMCSLMQGSTLPRRSGAAGA
RMFSLSQGSTLPRRSGAAGA

SEQ ID NO: 131942 - protein, 20 aa, Artificial Sequence
  Description of Artificial Sequence: Synthetic peptide
  Seed: RMCSLMQGSTLPRRSGAAGA
RMFSLSQGSTVPRRSGAAGA

SEQ ID NO: 131943 - protein, 20 aa, Artificial Sequence
  Description of Artificial Sequence: Synthetic peptide
  Seed: RMCSLMQGSTLPRRSGAAGA
RMFSLSQSSTIPRRSGAAGA

SEQ ID NO: 131944 - protein, 20 aa, Artificial Sequence
  Description of Artificial Sequence: Synthetic peptide
  Seed: RMCSLMQGSTLPRRSGAAGA
RMFSLSQSSTVPRRSGAAGA

SEQ ID NO: 131945 - protein, 20 aa, Artificial Sequence
  Description of Artificial Sequence: Synthetic peptide
  Seed: RMCSLMQGSTLPRRSGAAGA
RMFSLTQASTAPRRSGAAGA

SEQ ID NO: 131946 - protein, 20 aa, Artificial Sequence
  Description of Artificial Sequence: Synthetic peptide
  Seed: RMCSLMQGSTLPRRSGAAGA
RMFSLTQASTIPRRSGAAGA

SEQ ID NO: 131947 - protein, 20 aa, Artificial Sequence
  Description of Artificial Sequence: Synthetic peptide
  Seed: RMCSLMQGSTLPRRSGAAGA
RMFSLTQASTLPRRSGAAGA

SEQ ID NO: 131948 - protein, 20 aa, Artificial Sequence
  Description of Artificial Sequence: Synthetic peptide
  Seed: RMCSLMQGSTLPRRSGAAGA
RMFSLTQASTVPRRSGAAGA

SEQ ID NO: 131949 - protein, 20 aa, Artificial Sequence
  Description of Artificial Sequence: Synthetic peptide
  Seed: RMCSLMQGSTLPRRSGAAGA
RMFSLVQASTAPRRSGAAGA

SEQ ID NO: 131950 - protein, 20 aa, Artificial Sequence
  Description of Artificial Sequence: Synthetic peptide
  Seed: RMCSLMQGSTLPRRSGAAGA
RMFSLVQASTIPRRSGAAGA

SEQ ID NO: 131951 - protein, 20 aa, Artificial Sequence
  Description of Artificial Sequence: Synthetic peptide
  Seed: RMCSLMQGSTLPRRSGAAGA
RMFSLVQASTLPRRSGAAGA

SEQ ID NO: 131952 - protein, 20 aa, Artificial Sequence
  Description of Artificial Sequence: Synthetic peptide
  Seed: RMCSLMQGSTLPRRSGAAGA
RMFSLVQASTMPRRSGAAGA

SEQ ID NO: 131953 - protein, 20 aa, Artificial Sequence
  Description of Artificial Sequence: Synthetic peptide
  Seed: RMCSLMQGSTLPRRSGAAGA
RMFSLVQASTSPRRSGAAGA

SEQ ID NO: 131954 - protein, 20 aa, Artificial Sequence
  Description of Artificial Sequence: Synthetic peptide
  Seed: RMCSLMQGSTLPRRSGAAGA
RMFSLVQASTTPRRSGAAGA

SEQ ID NO: 131955 - protein, 20 aa, Artificial Sequence
  Description of Artificial Sequence: Synthetic peptide
  Seed: RMCSLMQGSTLPRRSGAAGA
RMFSLVQASTVPRRSGAAGA

SEQ ID NO: 131956 - protein, 20 aa, Artificial Sequence
  Description of Artificial Sequence: Synthetic peptide
  Seed: RMCSLMQGSTLPRRSGAAGA
RMFSLVQGSTAPRRSGAAGA

SEQ ID NO: 131957 - protein, 20 aa, Artificial Sequence
  Description of Artificial Sequence: Synthetic peptide
  Seed: RMCSLMQGSTLPRRSGAAGA
RMFSLVQGSTIPRRSGAAGA

SEQ ID NO: 131958 - protein, 20 aa, Artificial Sequence
  Description of Artificial Sequence: Synthetic peptide
  Seed: RMCSLMQGSTLPRRSGAAGA
RMFSLVQGSTLPRRSGAAGA

SEQ ID NO: 131959 - protein, 20 aa, Artificial Sequence
  Description of Artificial Sequence: Synthetic peptide
  Seed: RMCSLMQGSTLPRRSGAAGA
RMFSLVQGSTMPRRSGAAGA

SEQ ID NO: 131960 - protein, 20 aa, Artificial Sequence
  Description of Artificial Sequence: Synthetic peptide
  Seed: RMCSLMQGSTLPRRSGAAGA
RMFSLVQGSTTPRRSGAAGA

SEQ ID NO: 131961 - protein, 20 aa, Artificial Sequence
  Description of Artificial Sequence: Synthetic peptide
  Seed: RMCSLMQGSTLPRRSGAAGA
RMFSLVQGSTVPRRSGAAGA

SEQ ID NO: 131962 - protein, 20 aa, Artificial Sequence
  Description of Artificial Sequence: Synthetic peptide
  Seed: RMCSLMQGSTLPRRSGAAGA
RMFSLVQNSTVPRRSGAAGA

SEQ ID NO: 131963 - protein, 20 aa, Artificial Sequence
  Description of Artificial Sequence: Synthetic peptide
  Seed: RMCSLMQGSTLPRRSGAAGA
RMFSLVQPSTAPRRSGAAGA

SEQ ID NO: 131964 - protein, 20 aa, Artificial Sequence
  Description of Artificial Sequence: Synthetic peptide
  Seed: RMCSLMQGSTLPRRSGAAGA
RMFSLVQPSTIPRRSGAAGA

SEQ ID NO: 131965 - protein, 20 aa, Artificial Sequence
  Description of Artificial Sequence: Synthetic peptide
  Seed: RMCSLMQGSTLPRRSGAAGA
RMFSLVQPSTLPRRSGAAGA

SEQ ID NO: 131966 - protein, 20 aa, Artificial Sequence
  Description of Artificial Sequence: Synthetic peptide
  Seed: RMCSLMQGSTLPRRSGAAGA
RMFSLVQPSTVPRRSGAAGA

SEQ ID NO: 131967 - protein, 20 aa, Artificial Sequence
  Description of Artificial Sequence: Synthetic peptide
  Seed: RMCSLMQGSTLPRRSGAAGA
RMFSLVQSSTAPRRSGAAGA

SEQ ID NO: 131968 - protein, 20 aa, Artificial Sequence
  Description of Artificial Sequence: Synthetic peptide
  Seed: RMCSLMQGSTLPRRSGAAGA
RMFSLVQSSTIPRRSGAAGA

SEQ ID NO: 131969 - protein, 20 aa, Artificial Sequence
  Description of Artificial Sequence: Synthetic peptide
  Seed: RMCSLMQGSTLPRRSGAAGA
RMFSLVQSSTLPRRSGAAGA

SEQ ID NO: 131970 - protein, 20 aa, Artificial Sequence
  Description of Artificial Sequence: Synthetic peptide
  Seed: RMCSLMQGSTLPRRSGAAGA
RMFSLVQSSTVPRRSGAAGA

SEQ ID NO: 131971 - protein, 20 aa, Artificial Sequence
  Description of Artificial Sequence: Synthetic peptide
  Seed: RMCSLMQGSTLPRRSGAAGA
RMFSLVQTSTVPRRSGAAGA

SEQ ID NO: 131972 - protein, 20 aa, Artificial Sequence
  Description of Artificial Sequence: Synthetic peptide
  Seed: RMCSLMQGSTLPRRSGAAGA
RMISLAQASTAPRRSGAAGA

SEQ ID NO: 131973 - protein, 20 aa, Artificial Sequence
  Description of Artificial Sequence: Synthetic peptide
  Seed: RMCSLMQGSTLPRRSGAAGA
RMISLAQASTIPRRSGAAGA

SEQ ID NO: 131974 - protein, 20 aa, Artificial Sequence
  Description of Artificial Sequence: Synthetic peptide
  Seed: RMCSLMQGSTLPRRSGAAGA
RMISLAQASTLPRRSGAAGA

SEQ ID NO: 131975 - protein, 20 aa, Artificial Sequence
  Description of Artificial Sequence: Synthetic peptide
  Seed: RMCSLMQGSTLPRRSGAAGA
RMISLAQASTVPRRSGAAGA

SEQ ID NO: 131976 - protein, 20 aa, Artificial Sequence
  Description of Artificial Sequence: Synthetic peptide
  Seed: RMCSLMQGSTLPRRSGAAGA
RMISLIQASTAPRRSGAAGA

SEQ ID NO: 131977 - protein, 20 aa, Artificial Sequence
  Description of Artificial Sequence: Synthetic peptide
  Seed: RMCSLMQGSTLPRRSGAAGA
RMISLIQASTIPRRSGAAGA

SEQ ID NO: 131978 - protein, 20 aa, Artificial Sequence
  Description of Artificial Sequence: Synthetic peptide
  Seed: RMCSLMQGSTLPRRSGAAGA
RMISLIQASTLPRRSGAAGA

SEQ ID NO: 131979 - protein, 20 aa, Artificial Sequence
  Description of Artificial Sequence: Synthetic peptide
  Seed: RMCSLMQGSTLPRRSGAAGA
RMISLIQASTVPRRSGAAGA

SEQ ID NO: 131980 - protein, 20 aa, Artificial Sequence
  Description of Artificial Sequence: Synthetic peptide
  Seed: RMCSLMQGSTLPRRSGAAGA
RMISLIQGSTAPRRSGAAGA

SEQ ID NO: 131981 - protein, 20 aa, Artificial Sequence
  Description of Artificial Sequence: Synthetic peptide
  Seed: RMCSLMQGSTLPRRSGAAGA
RMISLIQGSTIPRRSGAAGA

SEQ ID NO: 131982 - protein, 20 aa, Artificial Sequence
  Description of Artificial Sequence: Synthetic peptide
  Seed: RMCSLMQGSTLPRRSGAAGA
RMISLIQGSTLPRRSGAAGA

SEQ ID NO: 131983 - protein, 20 aa, Artificial Sequence
  Description of Artificial Sequence: Synthetic peptide
  Seed: RMCSLMQGSTLPRRSGAAGA
RMISLIQGSTVPRRSGAAGA

SEQ ID NO: 131984 - protein, 20 aa, Artificial Sequence
  Description of Artificial Sequence: Synthetic peptide
  Seed: RMCSLMQGSTLPRRSGAAGA
RMISLLQASTAPRRSGAAGA

SEQ ID NO: 131985 - protein, 20 aa, Artificial Sequence
  Description of Artificial Sequence: Synthetic peptide
  Seed: RMCSLMQGSTLPRRSGAAGA
RMISLLQASTIPRRSGAAGA

SEQ ID NO: 131986 - protein, 20 aa, Artificial Sequence
  Description of Artificial Sequence: Synthetic peptide
  Seed: RMCSLMQGSTLPRRSGAAGA
RMISLLQASTLPRRSGAAGA

SEQ ID NO: 131987 - protein, 20 aa, Artificial Sequence
  Description of Artificial Sequence: Synthetic peptide
  Seed: RMCSLMQGSTLPRRSGAAGA
RMISLLQASTMPRRSGAAGA

SEQ ID NO: 131988 - protein, 20 aa, Artificial Sequence
  Description of Artificial Sequence: Synthetic peptide
  Seed: RMCSLMQGSTLPRRSGAAGA
RMISLLQASTSPRRSGAAGA

SEQ ID NO: 131989 - protein, 20 aa, Artificial Sequence
  Description of Artificial Sequence: Synthetic peptide
  Seed: RMCSLMQGSTLPRRSGAAGA
RMISLLQASTTPRRSGAAGA

SEQ ID NO: 131990 - protein, 20 aa, Artificial Sequence
  Description of Artificial Sequence: Synthetic peptide
  Seed: RMCSLMQGSTLPRRSGAAGA
RMISLLQASTVPRRSGAAGA

SEQ ID NO: 131991 - protein, 20 aa, Artificial Sequence
  Description of Artificial Sequence: Synthetic peptide
  Seed: RMCSLMQGSTLPRRSGAAGA
RMISLLQGSTAPRRSGAAGA

SEQ ID NO: 131992 - protein, 20 aa, Artificial Sequence
  Description of Artificial Sequence: Synthetic peptide
  Seed: RMCSLMQGSTLPRRSGAAGA
RMISLLQGSTIPRRSGAAGA

SEQ ID NO: 131993 - protein, 20 aa, Artificial Sequence
  Description of Artificial Sequence: Synthetic peptide
  Seed: RMCSLMQGSTLPRRSGAAGA
RMISLLQGSTLPRRSGAAGA

SEQ ID NO: 131994 - protein, 20 aa, Artificial Sequence
  Description of Artificial Sequence: Synthetic peptide
  Seed: RMCSLMQGSTLPRRSGAAGA
RMISLLQGSTMPRRSGAAGA

SEQ ID NO: 131995 - protein, 20 aa, Artificial Sequence
  Description of Artificial Sequence: Synthetic peptide
  Seed: RMCSLMQGSTLPRRSGAAGA
RMISLLQGSTSPRRSGAAGA

SEQ ID NO: 131996 - protein, 20 aa, Artificial Sequence
  Description of Artificial Sequence: Synthetic peptide
  Seed: RMCSLMQGSTLPRRSGAAGA
RMISLLQGSTTPRRSGAAGA

SEQ ID NO: 131997 - protein, 20 aa, Artificial Sequence
  Description of Artificial Sequence: Synthetic peptide
  Seed: RMCSLMQGSTLPRRSGAAGA
RMISLLQGSTVPRRSGAAGA

SEQ ID NO: 131998 - protein, 20 aa, Artificial Sequence
  Description of Artificial Sequence: Synthetic peptide
  Seed: RMCSLMQGSTLPRRSGAAGA
RMISLLQNSTVPRRSGAAGA

SEQ ID NO: 131999 - protein, 20 aa, Artificial Sequence
  Description of Artificial Sequence: Synthetic peptide
  Seed: RMCSLMQGSTLPRRSGAAGA
RMISLLQPSTAPRRSGAAGA

SEQ ID NO: 132000 - protein, 20 aa, Artificial Sequence
  Description of Artificial Sequence: Synthetic peptide
  Seed: RMCSLMQGSTLPRRSGAAGA
RMISLLQPSTIPRRSGAAGA

SEQ ID NO: 132001 - protein, 20 aa, Artificial Sequence
  Description of Artificial Sequence: Synthetic peptide
  Seed: RMCSLMQGSTLPRRSGAAGA
RMISLLQPSTLPRRSGAAGA

SEQ ID NO: 132002 - protein, 20 aa, Artificial Sequence
  Description of Artificial Sequence: Synthetic peptide
  Seed: RMCSLMQGSTLPRRSGAAGA
RMISLLQPSTVPRRSGAAGA

SEQ ID NO: 132003 - protein, 20 aa, Artificial Sequence
  Description of Artificial Sequence: Synthetic peptide
  Seed: RMCSLMQGSTLPRRSGAAGA
RMISLLQSSTAPRRSGAAGA

SEQ ID NO: 132004 - protein, 20 aa, Artificial Sequence
  Description of Artificial Sequence: Synthetic peptide
  Seed: RMCSLMQGSTLPRRSGAAGA
RMISLLQSSTIPRRSGAAGA

SEQ ID NO: 132005 - protein, 20 aa, Artificial Sequence
  Description of Artificial Sequence: Synthetic peptide
  Seed: RMCSLMQGSTLPRRSGAAGA
RMISLLQSSTLPRRSGAAGA

SEQ ID NO: 132006 - protein, 20 aa, Artificial Sequence
  Description of Artificial Sequence: Synthetic peptide
  Seed: RMCSLMQGSTLPRRSGAAGA
RMISLLQSSTVPRRSGAAGA

SEQ ID NO: 132007 - protein, 20 aa, Artificial Sequence
  Description of Artificial Sequence: Synthetic peptide
  Seed: RMCSLMQGSTLPRRSGAAGA
RMISLLQTSTVPRRSGAAGA

SEQ ID NO: 132008 - protein, 20 aa, Artificial Sequence
  Description of Artificial Sequence: Synthetic peptide
  Seed: RMCSLMQGSTLPRRSGAAGA
RMISLMQASTAPRRSGAAGA

SEQ ID NO: 132009 - protein, 20 aa, Artificial Sequence
  Description of Artificial Sequence: Synthetic peptide
  Seed: RMCSLMQGSTLPRRSGAAGA
RMISLMQASTIPRRSGAAGA

SEQ ID NO: 132010 - protein, 20 aa, Artificial Sequence
  Description of Artificial Sequence: Synthetic peptide
  Seed: RMCSLMQGSTLPRRSGAAGA
RMISLMQASTLPRRSGAAGA

SEQ ID NO: 132011 - protein, 20 aa, Artificial Sequence
  Description of Artificial Sequence: Synthetic peptide
  Seed: RMCSLMQGSTLPRRSGAAGA
RMISLMQASTMPRRSGAAGA

SEQ ID NO: 132012 - protein, 20 aa, Artificial Sequence
  Description of Artificial Sequence: Synthetic peptide
  Seed: RMCSLMQGSTLPRRSGAAGA
RMISLMQASTSPRRSGAAGA

SEQ ID NO: 132013 - protein, 20 aa, Artificial Sequence
  Description of Artificial Sequence: Synthetic peptide
  Seed: RMCSLMQGSTLPRRSGAAGA
RMISLMQASTTPRRSGAAGA

SEQ ID NO: 132014 - protein, 20 aa, Artificial Sequence
  Description of Artificial Sequence: Synthetic peptide
  Seed: RMCSLMQGSTLPRRSGAAGA
RMISLMQASTVPRRSGAAGA

SEQ ID NO: 132015 - protein, 20 aa, Artificial Sequence
  Description of Artificial Sequence: Synthetic peptide
  Seed: RMCSLMQGSTLPRRSGAAGA
RMISLMQGSTAPRRSGAAGA

SEQ ID NO: 132016 - protein, 20 aa, Artificial Sequence
  Description of Artificial Sequence: Synthetic peptide
  Seed: RMCSLMQGSTLPRRSGAAGA
RMISLMQGSTIPRRSGAAGA

SEQ ID NO: 132017 - protein, 20 aa, Artificial Sequence
  Description of Artificial Sequence: Synthetic peptide
  Seed: RMCSLMQGSTLPRRSGAAGA
RMISLMQGSTLPRRSGAAGA

SEQ ID NO: 132018 - protein, 20 aa, Artificial Sequence
  Description of Artificial Sequence: Synthetic peptide
  Seed: RMCSLMQGSTLPRRSGAAGA
RMISLMQGSTMPRRSGAAGA

SEQ ID NO: 132019 - protein, 20 aa, Artificial Sequence
  Description of Artificial Sequence: Synthetic peptide
  Seed: RMCSLMQGSTLPRRSGAAGA
RMISLMQGSTSPRRSGAAGA

SEQ ID NO: 132020 - protein, 20 aa, Artificial Sequence
  Description of Artificial Sequence: Synthetic peptide
  Seed: RMCSLMQGSTLPRRSGAAGA
RMISLMQGSTTPRRSGAAGA

SEQ ID NO: 132021 - protein, 20 aa, Artificial Sequence
  Description of Artificial Sequence: Synthetic peptide
  Seed: RMCSLMQGSTLPRRSGAAGA
RMISLMQGSTVPRRSGAAGA

SEQ ID NO: 132022 - protein, 20 aa, Artificial Sequence
  Description of Artificial Sequence: Synthetic peptide
  Seed: RMCSLMQGSTLPRRSGAAGA
RMISLMQNSTVPRRSGAAGA

SEQ ID NO: 132023 - protein, 20 aa, Artificial Sequence
  Description of Artificial Sequence: Synthetic peptide
  Seed: RMCSLMQGSTLPRRSGAAGA
RMISLMQPSTAPRRSGAAGA

SEQ ID NO: 132024 - protein, 20 aa, Artificial Sequence
  Description of Artificial Sequence: Synthetic peptide
  Seed: RMCSLMQGSTLPRRSGAAGA
RMISLMQPSTIPRRSGAAGA

SEQ ID NO: 132025 - protein, 20 aa, Artificial Sequence
  Description of Artificial Sequence: Synthetic peptide
  Seed: RMCSLMQGSTLPRRSGAAGA
RMISLMQPSTLPRRSGAAGA

SEQ ID NO: 132026 - protein, 20 aa, Artificial Sequence
  Description of Artificial Sequence: Synthetic peptide
  Seed: RMCSLMQGSTLPRRSGAAGA
RMISLMQPSTVPRRSGAAGA

SEQ ID NO: 132027 - protein, 20 aa, Artificial Sequence
  Description of Artificial Sequence: Synthetic peptide
  Seed: RMCSLMQGSTLPRRSGAAGA
RMISLMQSSTAPRRSGAAGA

SEQ ID NO: 132028 - protein, 20 aa, Artificial Sequence
  Description of Artificial Sequence: Synthetic peptide
  Seed: RMCSLMQGSTLPRRSGAAGA
RMISLMQSSTIPRRSGAAGA

SEQ ID NO: 132029 - protein, 20 aa, Artificial Sequence
  Description of Artificial Sequence: Synthetic peptide
  Seed: RMCSLMQGSTLPRRSGAAGA
RMISLMQSSTLPRRSGAAGA

SEQ ID NO: 132030 - protein, 20 aa, Artificial Sequence
  Description of Artificial Sequence: Synthetic peptide
  Seed: RMCSLMQGSTLPRRSGAAGA
RMISLMQSSTVPRRSGAAGA

SEQ ID NO: 132031 - protein, 20 aa, Artificial Sequence
  Description of Artificial Sequence: Synthetic peptide
  Seed: RMCSLMQGSTLPRRSGAAGA
RMISLMQTSTVPRRSGAAGA

SEQ ID NO: 132032 - protein, 20 aa, Artificial Sequence
  Description of Artificial Sequence: Synthetic peptide
  Seed: RMCSLMQGSTLPRRSGAAGA
RMISLQQASTIPRRSGAAGA

SEQ ID NO: 132033 - protein, 20 aa, Artificial Sequence
  Description of Artificial Sequence: Synthetic peptide
  Seed: RMCSLMQGSTLPRRSGAAGA
RMISLQQASTLPRRSGAAGA

SEQ ID NO: 132034 - protein, 20 aa, Artificial Sequence
  Description of Artificial Sequence: Synthetic peptide
  Seed: RMCSLMQGSTLPRRSGAAGA
RMISLQQASTVPRRSGAAGA

SEQ ID NO: 132035 - protein, 20 aa, Artificial Sequence
  Description of Artificial Sequence: Synthetic peptide
  Seed: RMCSLMQGSTLPRRSGAAGA
RMLSLAQASTVPRRSGAAGA

SEQ ID NO: 132036 - protein, 20 aa, Artificial Sequence
  Description of Artificial Sequence: Synthetic peptide
  Seed: RMCSLMQGSTLPRRSGAAGA
RMLSLIQASTAPRRSGAAGA

SEQ ID NO: 132037 - protein, 20 aa, Artificial Sequence
  Description of Artificial Sequence: Synthetic peptide
  Seed: RMCSLMQGSTLPRRSGAAGA
RMLSLIQASTIPRRSGAAGA

SEQ ID NO: 132038 - protein, 20 aa, Artificial Sequence
  Description of Artificial Sequence: Synthetic peptide
  Seed: RMCSLMQGSTLPRRSGAAGA
RMLSLIQASTLPRRSGAAGA

SEQ ID NO: 132039 - protein, 20 aa, Artificial Sequence
  Description of Artificial Sequence: Synthetic peptide
  Seed: RMCSLMQGSTLPRRSGAAGA
RMLSLIQASTVPRRSGAAGA

SEQ ID NO: 132040 - protein, 20 aa, Artificial Sequence
  Description of Artificial Sequence: Synthetic peptide
  Seed: RMCSLMQGSTLPRRSGAAGA
RMLSLLQASTAPRRSGAAGA

SEQ ID NO: 132041 - protein, 20 aa, Artificial Sequence
  Description of Artificial Sequence: Synthetic peptide
  Seed: RMCSLMQGSTLPRRSGAAGA
RMLSLLQASTIPRRSGAAGA

SEQ ID NO: 132042 - protein, 20 aa, Artificial Sequence
  Description of Artificial Sequence: Synthetic peptide
  Seed: RMCSLMQGSTLPRRSGAAGA
RMLSLLQASTLPRRSGAAGA

SEQ ID NO: 132043 - protein, 20 aa, Artificial Sequence
  Description of Artificial Sequence: Synthetic peptide
  Seed: RMCSLMQGSTLPRRSGAAGA
RMLSLLQASTMPRRSGAAGA

SEQ ID NO: 132044 - protein, 20 aa, Artificial Sequence
  Description of Artificial Sequence: Synthetic peptide
  Seed: RMCSLMQGSTLPRRSGAAGA
RMLSLLQASTTPRRSGAAGA

SEQ ID NO: 132045 - protein, 20 aa, Artificial Sequence
  Description of Artificial Sequence: Synthetic peptide
  Seed: RMCSLMQGSTLPRRSGAAGA
RMLSLLQASTVPRRSGAAGA

SEQ ID NO: 132046 - protein, 20 aa, Artificial Sequence
  Description of Artificial Sequence: Synthetic peptide
  Seed: RMCSLMQGSTLPRRSGAAGA
RMLSLLQGSTAPRRSGAAGA

SEQ ID NO: 132047 - protein, 20 aa, Artificial Sequence
  Description of Artificial Sequence: Synthetic peptide
  Seed: RMCSLMQGSTLPRRSGAAGA
RMLSLLQGSTIPRRSGAAGA

SEQ ID NO: 132048 - protein, 20 aa, Artificial Sequence
  Description of Artificial Sequence: Synthetic peptide
  Seed: RMCSLMQGSTLPRRSGAAGA
RMLSLLQGSTLPRRSGAAGA

SEQ ID NO: 132049 - protein, 20 aa, Artificial Sequence
  Description of Artificial Sequence: Synthetic peptide
  Seed: RMCSLMQGSTLPRRSGAAGA
RMLSLLQGSTVPRRSGAAGA

SEQ ID NO: 132050 - protein, 20 aa, Artificial Sequence
  Description of Artificial Sequence: Synthetic peptide
  Seed: RMCSLMQGSTLPRRSGAAGA
RMLSLLQPSTAPRRSGAAGA

SEQ ID NO: 132051 - protein, 20 aa, Artificial Sequence
  Description of Artificial Sequence: Synthetic peptide
  Seed: RMCSLMQGSTLPRRSGAAGA
RMLSLLQPSTIPRRSGAAGA

SEQ ID NO: 132052 - protein, 20 aa, Artificial Sequence
  Description of Artificial Sequence: Synthetic peptide
  Seed: RMCSLMQGSTLPRRSGAAGA
RMLSLLQPSTLPRRSGAAGA

SEQ ID NO: 132053 - protein, 20 aa, Artificial Sequence
  Description of Artificial Sequence: Synthetic peptide
  Seed: RMCSLMQGSTLPRRSGAAGA
RMLSLLQPSTVPRRSGAAGA

SEQ ID NO: 132054 - protein, 20 aa, Artificial Sequence
  Description of Artificial Sequence: Synthetic peptide
  Seed: RMCSLMQGSTLPRRSGAAGA
RMLSLLQSSTAPRRSGAAGA

SEQ ID NO: 132055 - protein, 20 aa, Artificial Sequence
  Description of Artificial Sequence: Synthetic peptide
  Seed: RMCSLMQGSTLPRRSGAAGA
RMLSLLQSSTIPRRSGAAGA

SEQ ID NO: 132056 - protein, 20 aa, Artificial Sequence
  Description of Artificial Sequence: Synthetic peptide
  Seed: RMCSLMQGSTLPRRSGAAGA
RMLSLLQSSTLPRRSGAAGA

SEQ ID NO: 132057 - protein, 20 aa, Artificial Sequence
  Description of Artificial Sequence: Synthetic peptide
  Seed: RMCSLMQGSTLPRRSGAAGA
RMLSLLQSSTVPRRSGAAGA

SEQ ID NO: 132058 - protein, 20 aa, Artificial Sequence
  Description of Artificial Sequence: Synthetic peptide
  Seed: RMCSLMQGSTLPRRSGAAGA
RMLSLMQASTAPRRSGAAGA

SEQ ID NO: 132059 - protein, 20 aa, Artificial Sequence
  Description of Artificial Sequence: Synthetic peptide
  Seed: RMCSLMQGSTLPRRSGAAGA
RMLSLMQASTIPRRSGAAGA

SEQ ID NO: 132060 - protein, 20 aa, Artificial Sequence
  Description of Artificial Sequence: Synthetic peptide
  Seed: RMCSLMQGSTLPRRSGAAGA
RMLSLMQASTLPRRSGAAGA

SEQ ID NO: 132061 - protein, 20 aa, Artificial Sequence
  Description of Artificial Sequence: Synthetic peptide
  Seed: RMCSLMQGSTLPRRSGAAGA
RMLSLMQASTMPRRSGAAGA

SEQ ID NO: 132062 - protein, 20 aa, Artificial Sequence
  Description of Artificial Sequence: Synthetic peptide
  Seed: RMCSLMQGSTLPRRSGAAGA
RMLSLMQASTSPRRSGAAGA

SEQ ID NO: 132063 - protein, 20 aa, Artificial Sequence
  Description of Artificial Sequence: Synthetic peptide
  Seed: RMCSLMQGSTLPRRSGAAGA
RMLSLMQASTTPRRSGAAGA

SEQ ID NO: 132064 - protein, 20 aa, Artificial Sequence
  Description of Artificial Sequence: Synthetic peptide
  Seed: RMCSLMQGSTLPRRSGAAGA
RMLSLMQASTVPRRSGAAGA

SEQ ID NO: 132065 - protein, 20 aa, Artificial Sequence
  Description of Artificial Sequence: Synthetic peptide
  Seed: RMCSLMQGSTLPRRSGAAGA
RMLSLMQGSTAPRRSGAAGA

SEQ ID NO: 132066 - protein, 20 aa, Artificial Sequence
  Description of Artificial Sequence: Synthetic peptide
  Seed: RMCSLMQGSTLPRRSGAAGA
RMLSLMQGSTIPRRSGAAGA

SEQ ID NO: 132067 - protein, 20 aa, Artificial Sequence
  Description of Artificial Sequence: Synthetic peptide
  Seed: RMCSLMQGSTLPRRSGAAGA
RMLSLMQGSTLPRRSGAAGA

SEQ ID NO: 132068 - protein, 20 aa, Artificial Sequence
  Description of Artificial Sequence: Synthetic peptide
  Seed: RMCSLMQGSTLPRRSGAAGA
RMLSLMQGSTMPRRSGAAGA

SEQ ID NO: 132069 - protein, 20 aa, Artificial Sequence
  Description of Artificial Sequence: Synthetic peptide
  Seed: RMCSLMQGSTLPRRSGAAGA
RMLSLMQGSTTPRRSGAAGA

SEQ ID NO: 132070 - protein, 20 aa, Artificial Sequence
  Description of Artificial Sequence: Synthetic peptide
  Seed: RMCSLMQGSTLPRRSGAAGA
RMLSLMQGSTVPRRSGAAGA

SEQ ID NO: 132071 - protein, 20 aa, Artificial Sequence
  Description of Artificial Sequence: Synthetic peptide
  Seed: RMCSLMQGSTLPRRSGAAGA
RMLSLMQPSTIPRRSGAAGA

SEQ ID NO: 132072 - protein, 20 aa, Artificial Sequence
  Description of Artificial Sequence: Synthetic peptide
  Seed: RMCSLMQGSTLPRRSGAAGA
RMLSLMQPSTLPRRSGAAGA

SEQ ID NO: 132073 - protein, 20 aa, Artificial Sequence
  Description of Artificial Sequence: Synthetic peptide
  Seed: RMCSLMQGSTLPRRSGAAGA
RMLSLMQPSTVPRRSGAAGA

SEQ ID NO: 132074 - protein, 20 aa, Artificial Sequence
  Description of Artificial Sequence: Synthetic peptide
  Seed: RMCSLMQGSTLPRRSGAAGA
RMLSLMQSSTAPRRSGAAGA

SEQ ID NO: 132075 - protein, 20 aa, Artificial Sequence
  Description of Artificial Sequence: Synthetic peptide
  Seed: RMCSLMQGSTLPRRSGAAGA
RMLSLMQSSTIPRRSGAAGA

SEQ ID NO: 132076 - protein, 20 aa, Artificial Sequence
  Description of Artificial Sequence: Synthetic peptide
  Seed: RMCSLMQGSTLPRRSGAAGA
RMLSLMQSSTLPRRSGAAGA

SEQ ID NO: 132077 - protein, 20 aa, Artificial Sequence
  Description of Artificial Sequence: Synthetic peptide
  Seed: RMCSLMQGSTLPRRSGAAGA
RMLSLMQSSTVPRRSGAAGA

SEQ ID NO: 132078 - protein, 20 aa, Artificial Sequence
  Description of Artificial Sequence: Synthetic peptide
  Seed: RMCSLMQGSTLPRRSGAAGA
RMMSLLQASTAPRRSGAAGA

SEQ ID NO: 132079 - protein, 20 aa, Artificial Sequence
  Description of Artificial Sequence: Synthetic peptide
  Seed: RMCSLMQGSTLPRRSGAAGA
RMMSLLQASTIPRRSGAAGA

SEQ ID NO: 132080 - protein, 20 aa, Artificial Sequence
  Description of Artificial Sequence: Synthetic peptide
  Seed: RMCSLMQGSTLPRRSGAAGA
RMMSLLQASTLPRRSGAAGA

SEQ ID NO: 132081 - protein, 20 aa, Artificial Sequence
  Description of Artificial Sequence: Synthetic peptide
  Seed: RMCSLMQGSTLPRRSGAAGA
RMMSLLQASTVPRRSGAAGA

SEQ ID NO: 132082 - protein, 20 aa, Artificial Sequence
  Description of Artificial Sequence: Synthetic peptide
  Seed: RMCSLMQGSTLPRRSGAAGA
RMMSLLQGSTAPRRSGAAGA

SEQ ID NO: 132083 - protein, 20 aa, Artificial Sequence
  Description of Artificial Sequence: Synthetic peptide
  Seed: RMCSLMQGSTLPRRSGAAGA
RMMSLLQGSTIPRRSGAAGA

SEQ ID NO: 132084 - protein, 20 aa, Artificial Sequence
  Description of Artificial Sequence: Synthetic peptide
  Seed: RMCSLMQGSTLPRRSGAAGA
RMMSLLQGSTLPRRSGAAGA

SEQ ID NO: 132085 - protein, 20 aa, Artificial Sequence
  Description of Artificial Sequence: Synthetic peptide
  Seed: RMCSLMQGSTLPRRSGAAGA
RMMSLLQGSTVPRRSGAAGA

SEQ ID NO: 132086 - protein, 20 aa, Artificial Sequence
  Description of Artificial Sequence: Synthetic peptide
  Seed: RMCSLMQGSTLPRRSGAAGA
RMMSLLQSSTVPRRSGAAGA

SEQ ID NO: 132087 - protein, 20 aa, Artificial Sequence
  Description of Artificial Sequence: Synthetic peptide
  Seed: RMCSLMQGSTLPRRSGAAGA
RMMSLMQASTAPRRSGAAGA

SEQ ID NO: 132088 - protein, 20 aa, Artificial Sequence
  Description of Artificial Sequence: Synthetic peptide
  Seed: RMCSLMQGSTLPRRSGAAGA
RMMSLMQASTIPRRSGAAGA

SEQ ID NO: 132089 - protein, 20 aa, Artificial Sequence
  Description of Artificial Sequence: Synthetic peptide
  Seed: RMCSLMQGSTLPRRSGAAGA
RMMSLMQASTLPRRSGAAGA

SEQ ID NO: 132090 - protein, 20 aa, Artificial Sequence
  Description of Artificial Sequence: Synthetic peptide
  Seed: RMCSLMQGSTLPRRSGAAGA
RMMSLMQASTVPRRSGAAGA

SEQ ID NO: 132091 - protein, 20 aa, Artificial Sequence
  Description of Artificial Sequence: Synthetic peptide
  Seed: RMCSLMQGSTLPRRSGAAGA
RMMSLMQGSTAPRRSGAAGA

SEQ ID NO: 132092 - protein, 20 aa, Artificial Sequence
  Description of Artificial Sequence: Synthetic peptide
  Seed: RMCSLMQGSTLPRRSGAAGA
RMMSLMQGSTIPRRSGAAGA

SEQ ID NO: 132093 - protein, 20 aa, Artificial Sequence
  Description of Artificial Sequence: Synthetic peptide
  Seed: RMCSLMQGSTLPRRSGAAGA
RMMSLMQGSTLPRRSGAAGA

SEQ ID NO: 132094 - protein, 20 aa, Artificial Sequence
  Description of Artificial Sequence: Synthetic peptide
  Seed: RMCSLMQGSTLPRRSGAAGA
RMMSLMQGSTVPRRSGAAGA

SEQ ID NO: 132095 - protein, 20 aa, Artificial Sequence
  Description of Artificial Sequence: Synthetic peptide
  Seed: RMCSLMQGSTLPRRSGAAGA
RMMSLMQSSTVPRRSGAAGA

SEQ ID NO: 132096 - protein, 20 aa, Artificial Sequence
  Description of Artificial Sequence: Synthetic peptide
  Seed: RMCSLMQGSTLPRRSGAAGA
RMVSLLQASTAPRRSGAAGA

SEQ ID NO: 132097 - protein, 20 aa, Artificial Sequence
  Description of Artificial Sequence: Synthetic peptide
  Seed: RMCSLMQGSTLPRRSGAAGA
RMVSLLQASTIPRRSGAAGA

SEQ ID NO: 132098 - protein, 20 aa, Artificial Sequence
  Description of Artificial Sequence: Synthetic peptide
  Seed: RMCSLMQGSTLPRRSGAAGA
RMVSLLQASTLPRRSGAAGA

SEQ ID NO: 132099 - protein, 20 aa, Artificial Sequence
  Description of Artificial Sequence: Synthetic peptide
  Seed: RMCSLMQGSTLPRRSGAAGA
RMVSLLQASTVPRRSGAAGA

SEQ ID NO: 132100 - protein, 20 aa, Artificial Sequence
  Description of Artificial Sequence: Synthetic peptide
  Seed: RMCSLMQGSTLPRRSGAAGA
RMVSLLQGSTAPRRSGAAGA

SEQ ID NO: 132101 - protein, 20 aa, Artificial Sequence
  Description of Artificial Sequence: Synthetic peptide
  Seed: RMCSLMQGSTLPRRSGAAGA
RMVSLLQGSTIPRRSGAAGA

SEQ ID NO: 132102 - protein, 20 aa, Artificial Sequence
  Description of Artificial Sequence: Synthetic peptide
  Seed: RMCSLMQGSTLPRRSGAAGA
RMVSLLQGSTLPRRSGAAGA

SEQ ID NO: 132103 - protein, 20 aa, Artificial Sequence
  Description of Artificial Sequence: Synthetic peptide
  Seed: RMCSLMQGSTLPRRSGAAGA
RMVSLLQGSTVPRRSGAAGA

SEQ ID NO: 132104 - protein, 20 aa, Artificial Sequence
  Description of Artificial Sequence: Synthetic peptide
  Seed: RMCSLMQGSTLPRRSGAAGA
RMVSLLQPSTVPRRSGAAGA

SEQ ID NO: 132105 - protein, 20 aa, Artificial Sequence
  Description of Artificial Sequence: Synthetic peptide
  Seed: RMCSLMQGSTLPRRSGAAGA
RMVSLLQSSTVPRRSGAAGA

SEQ ID NO: 132106 - protein, 20 aa, Artificial Sequence
  Description of Artificial Sequence: Synthetic peptide
  Seed: RMCSLMQGSTLPRRSGAAGA
RMVSLMQASTAPRRSGAAGA

SEQ ID NO: 132107 - protein, 20 aa, Artificial Sequence
  Description of Artificial Sequence: Synthetic peptide
  Seed: RMCSLMQGSTLPRRSGAAGA
RMVSLMQASTIPRRSGAAGA

SEQ ID NO: 132108 - protein, 20 aa, Artificial Sequence
  Description of Artificial Sequence: Synthetic peptide
  Seed: RMCSLMQGSTLPRRSGAAGA
RMVSLMQASTLPRRSGAAGA

SEQ ID NO: 132109 - protein, 20 aa, Artificial Sequence
  Description of Artificial Sequence: Synthetic peptide
  Seed: RMCSLMQGSTLPRRSGAAGA
RMVSLMQASTVPRRSGAAGA

SEQ ID NO: 132110 - protein, 20 aa, Artificial Sequence
  Description of Artificial Sequence: Synthetic peptide
  Seed: RMCSLMQGSTLPRRSGAAGA
RMVSLMQGSTAPRRSGAAGA

SEQ ID NO: 132111 - protein, 20 aa, Artificial Sequence
  Description of Artificial Sequence: Synthetic peptide
  Seed: RMCSLMQGSTLPRRSGAAGA
RMVSLMQGSTIPRRSGAAGA

SEQ ID NO: 132112 - protein, 20 aa, Artificial Sequence
  Description of Artificial Sequence: Synthetic peptide
  Seed: RMCSLMQGSTLPRRSGAAGA
RMVSLMQGSTLPRRSGAAGA

SEQ ID NO: 132113 - protein, 20 aa, Artificial Sequence
  Description of Artificial Sequence: Synthetic peptide
  Seed: RMCSLMQGSTLPRRSGAAGA
RMVSLMQGSTVPRRSGAAGA

SEQ ID NO: 132114 - protein, 20 aa, Artificial Sequence
  Description of Artificial Sequence: Synthetic peptide
  Seed: RMCSLMQGSTLPRRSGAAGA
RMVSLMQSSTVPRRSGAAGA

SEQ ID NO: 132115 - protein, 20 aa, Artificial Sequence
  Description of Artificial Sequence: Synthetic peptide
  Seed: RMCSLMQGSTLPRRSGAAGA
RMWSLAQASTAPRRSGAAGA

SEQ ID NO: 132116 - protein, 20 aa, Artificial Sequence
  Description of Artificial Sequence: Synthetic peptide
  Seed: RMCSLMQGSTLPRRSGAAGA
RMWSLAQASTIPRRSGAAGA

SEQ ID NO: 132117 - protein, 20 aa, Artificial Sequence
  Description of Artificial Sequence: Synthetic peptide
  Seed: RMCSLMQGSTLPRRSGAAGA
RMWSLAQASTLPRRSGAAGA

SEQ ID NO: 132118 - protein, 20 aa, Artificial Sequence
  Description of Artificial Sequence: Synthetic peptide
  Seed: RMCSLMQGSTLPRRSGAAGA
RMWSLAQASTVPRRSGAAGA

SEQ ID NO: 132119 - protein, 20 aa, Artificial Sequence
  Description of Artificial Sequence: Synthetic peptide
  Seed: RMCSLMQGSTLPRRSGAAGA
RMWSLAQGSTIPRRSGAAGA

SEQ ID NO: 132120 - protein, 20 aa, Artificial Sequence
  Description of Artificial Sequence: Synthetic peptide
  Seed: RMCSLMQGSTLPRRSGAAGA
RMWSLAQGSTLPRRSGAAGA

SEQ ID NO: 132121 - protein, 20 aa, Artificial Sequence
  Description of Artificial Sequence: Synthetic peptide
  Seed: RMCSLMQGSTLPRRSGAAGA
RMWSLAQGSTVPRRSGAAGA

SEQ ID NO: 132122 - protein, 20 aa, Artificial Sequence
  Description of Artificial Sequence: Synthetic peptide
  Seed: RMCSLMQGSTLPRRSGAAGA
RMWSLAQSSTVPRRSGAAGA

SEQ ID NO: 132123 - protein, 20 aa, Artificial Sequence
  Description of Artificial Sequence: Synthetic peptide
  Seed: RMCSLMQGSTLPRRSGAAGA
RMWSLIQASTAPRRSGAAGA

SEQ ID NO: 132124 - protein, 20 aa, Artificial Sequence
  Description of Artificial Sequence: Synthetic peptide
  Seed: RMCSLMQGSTLPRRSGAAGA
RMWSLIQASTIPRRSGAAGA

SEQ ID NO: 132125 - protein, 20 aa, Artificial Sequence
  Description of Artificial Sequence: Synthetic peptide
  Seed: RMCSLMQGSTLPRRSGAAGA
RMWSLIQASTLPRRSGAAGA

SEQ ID NO: 132126 - protein, 20 aa, Artificial Sequence
  Description of Artificial Sequence: Synthetic peptide
  Seed: RMCSLMQGSTLPRRSGAAGA
RMWSLIQASTMPRRSGAAGA

SEQ ID NO: 132127 - protein, 20 aa, Artificial Sequence
  Description of Artificial Sequence: Synthetic peptide
  Seed: RMCSLMQGSTLPRRSGAAGA
RMWSLIQASTTPRRSGAAGA

SEQ ID NO: 132128 - protein, 20 aa, Artificial Sequence
  Description of Artificial Sequence: Synthetic peptide
  Seed: RMCSLMQGSTLPRRSGAAGA
RMWSLIQASTVPRRSGAAGA

SEQ ID NO: 132129 - protein, 20 aa, Artificial Sequence
  Description of Artificial Sequence: Synthetic peptide
  Seed: RMCSLMQGSTLPRRSGAAGA
RMWSLIQGSTAPRRSGAAGA

SEQ ID NO: 132130 - protein, 20 aa, Artificial Sequence
  Description of Artificial Sequence: Synthetic peptide
  Seed: RMCSLMQGSTLPRRSGAAGA
RMWSLIQGSTIPRRSGAAGA

SEQ ID NO: 132131 - protein, 20 aa, Artificial Sequence
  Description of Artificial Sequence: Synthetic peptide
  Seed: RMCSLMQGSTLPRRSGAAGA
RMWSLIQGSTLPRRSGAAGA

SEQ ID NO: 132132 - protein, 20 aa, Artificial Sequence
  Description of Artificial Sequence: Synthetic peptide
  Seed: RMCSLMQGSTLPRRSGAAGA
RMWSLIQGSTVPRRSGAAGA

SEQ ID NO: 132133 - protein, 20 aa, Artificial Sequence
  Description of Artificial Sequence: Synthetic peptide
  Seed: RMCSLMQGSTLPRRSGAAGA
RMWSLIQPSTVPRRSGAAGA

SEQ ID NO: 132134 - protein, 20 aa, Artificial Sequence
  Description of Artificial Sequence: Synthetic peptide
  Seed: RMCSLMQGSTLPRRSGAAGA
RMWSLIQSSTAPRRSGAAGA

SEQ ID NO: 132135 - protein, 20 aa, Artificial Sequence
  Description of Artificial Sequence: Synthetic peptide
  Seed: RMCSLMQGSTLPRRSGAAGA
RMWSLIQSSTIPRRSGAAGA

SEQ ID NO: 132136 - protein, 20 aa, Artificial Sequence
  Description of Artificial Sequence: Synthetic peptide
  Seed: RMCSLMQGSTLPRRSGAAGA
RMWSLIQSSTLPRRSGAAGA

SEQ ID NO: 132137 - protein, 20 aa, Artificial Sequence
  Description of Artificial Sequence: Synthetic peptide
  Seed: RMCSLMQGSTLPRRSGAAGA
RMWSLIQSSTVPRRSGAAGA

SEQ ID NO: 132138 - protein, 20 aa, Artificial Sequence
  Description of Artificial Sequence: Synthetic peptide
  Seed: RMCSLMQGSTLPRRSGAAGA
RMWSLLQASTAPRRSGAAGA

SEQ ID NO: 132139 - protein, 20 aa, Artificial Sequence
  Description of Artificial Sequence: Synthetic peptide
  Seed: RMCSLMQGSTLPRRSGAAGA
RMWSLLQASTGPRRSGAAGA

SEQ ID NO: 132140 - protein, 20 aa, Artificial Sequence
  Description of Artificial Sequence: Synthetic peptide
  Seed: RMCSLMQGSTLPRRSGAAGA
RMWSLLQASTIPRRSGAAGA

SEQ ID NO: 132141 - protein, 20 aa, Artificial Sequence
  Description of Artificial Sequence: Synthetic peptide
  Seed: RMCSLMQGSTLPRRSGAAGA
RMWSLLQASTLPRRSGAAGA

SEQ ID NO: 132142 - protein, 20 aa, Artificial Sequence
  Description of Artificial Sequence: Synthetic peptide
  Seed: RMCSLMQGSTLPRRSGAAGA
RMWSLLQASTMPRRSGAAGA

SEQ ID NO: 132143 - protein, 20 aa, Artificial Sequence
  Description of Artificial Sequence: Synthetic peptide
  Seed: RMCSLMQGSTLPRRSGAAGA
RMWSLLQASTSPRRSGAAGA

SEQ ID NO: 132144 - protein, 20 aa, Artificial Sequence
  Description of Artificial Sequence: Synthetic peptide
  Seed: RMCSLMQGSTLPRRSGAAGA
RMWSLLQASTTPRRSGAAGA

SEQ ID NO: 132145 - protein, 20 aa, Artificial Sequence
  Description of Artificial Sequence: Synthetic peptide
  Seed: RMCSLMQGSTLPRRSGAAGA
RMWSLLQASTVPRRSGAAGA

SEQ ID NO: 132146 - protein, 20 aa, Artificial Sequence
  Description of Artificial Sequence: Synthetic peptide
  Seed: RMCSLMQGSTLPRRSGAAGA
RMWSLLQGSTAPRRSGAAGA

SEQ ID NO: 132147 - protein, 20 aa, Artificial Sequence
  Description of Artificial Sequence: Synthetic peptide
  Seed: RMCSLMQGSTLPRRSGAAGA
RMWSLLQGSTIPRRSGAAGA

SEQ ID NO: 132148 - protein, 20 aa, Artificial Sequence
  Description of Artificial Sequence: Synthetic peptide
  Seed: RMCSLMQGSTLPRRSGAAGA
RMWSLLQGSTLPRRSGAAGA

SEQ ID NO: 132149 - protein, 20 aa, Artificial Sequence
  Description of Artificial Sequence: Synthetic peptide
  Seed: RMCSLMQGSTLPRRSGAAGA
RMWSLLQGSTMPRRSGAAGA

SEQ ID NO: 132150 - protein, 20 aa, Artificial Sequence
  Description of Artificial Sequence: Synthetic peptide
  Seed: RMCSLMQGSTLPRRSGAAGA
RMWSLLQGSTSPRRSGAAGA

SEQ ID NO: 132151 - protein, 20 aa, Artificial Sequence
  Description of Artificial Sequence: Synthetic peptide
  Seed: RMCSLMQGSTLPRRSGAAGA
RMWSLLQGSTTPRRSGAAGA

SEQ ID NO: 132152 - protein, 20 aa, Artificial Sequence
  Description of Artificial Sequence: Synthetic peptide
  Seed: RMCSLMQGSTLPRRSGAAGA
RMWSLLQGSTVPRRSGAAGA

SEQ ID NO: 132153 - protein, 20 aa, Artificial Sequence
  Description of Artificial Sequence: Synthetic peptide
  Seed: RMCSLMQGSTLPRRSGAAGA
RMWSLLQNSTIPRRSGAAGA

SEQ ID NO: 132154 - protein, 20 aa, Artificial Sequence
  Description of Artificial Sequence: Synthetic peptide
  Seed: RMCSLMQGSTLPRRSGAAGA
RMWSLLQNSTLPRRSGAAGA

SEQ ID NO: 132155 - protein, 20 aa, Artificial Sequence
  Description of Artificial Sequence: Synthetic peptide
  Seed: RMCSLMQGSTLPRRSGAAGA
RMWSLLQNSTVPRRSGAAGA

SEQ ID NO: 132156 - protein, 20 aa, Artificial Sequence
  Description of Artificial Sequence: Synthetic peptide
  Seed: RMCSLMQGSTLPRRSGAAGA
RMWSLLQPSTAPRRSGAAGA

SEQ ID NO: 132157 - protein, 20 aa, Artificial Sequence
  Description of Artificial Sequence: Synthetic peptide
  Seed: RMCSLMQGSTLPRRSGAAGA
RMWSLLQPSTIPRRSGAAGA

SEQ ID NO: 132158 - protein, 20 aa, Artificial Sequence
  Description of Artificial Sequence: Synthetic peptide
  Seed: RMCSLMQGSTLPRRSGAAGA
RMWSLLQPSTLPRRSGAAGA

SEQ ID NO: 132159 - protein, 20 aa, Artificial Sequence
  Description of Artificial Sequence: Synthetic peptide
  Seed: RMCSLMQGSTLPRRSGAAGA
RMWSLLQPSTVPRRSGAAGA

SEQ ID NO: 132160 - protein, 20 aa, Artificial Sequence
  Description of Artificial Sequence: Synthetic peptide
  Seed: RMCSLMQGSTLPRRSGAAGA
RMWSLLQSSTAPRRSGAAGA

SEQ ID NO: 132161 - protein, 20 aa, Artificial Sequence
  Description of Artificial Sequence: Synthetic peptide
  Seed: RMCSLMQGSTLPRRSGAAGA
RMWSLLQSSTIPRRSGAAGA

SEQ ID NO: 132162 - protein, 20 aa, Artificial Sequence
  Description of Artificial Sequence: Synthetic peptide
  Seed: RMCSLMQGSTLPRRSGAAGA
RMWSLLQSSTLPRRSGAAGA

SEQ ID NO: 132163 - protein, 20 aa, Artificial Sequence
  Description of Artificial Sequence: Synthetic peptide
  Seed: RMCSLMQGSTLPRRSGAAGA
RMWSLLQSSTMPRRSGAAGA

SEQ ID NO: 132164 - protein, 20 aa, Artificial Sequence
  Description of Artificial Sequence: Synthetic peptide
  Seed: RMCSLMQGSTLPRRSGAAGA
RMWSLLQSSTTPRRSGAAGA

SEQ ID NO: 132165 - protein, 20 aa, Artificial Sequence
  Description of Artificial Sequence: Synthetic peptide
  Seed: RMCSLMQGSTLPRRSGAAGA
RMWSLLQSSTVPRRSGAAGA

SEQ ID NO: 132166 - protein, 20 aa, Artificial Sequence
  Description of Artificial Sequence: Synthetic peptide
  Seed: RMCSLMQGSTLPRRSGAAGA
RMWSLLQTSTAPRRSGAAGA

SEQ ID NO: 132167 - protein, 20 aa, Artificial Sequence
  Description of Artificial Sequence: Synthetic peptide
  Seed: RMCSLMQGSTLPRRSGAAGA
RMWSLLQTSTIPRRSGAAGA

SEQ ID NO: 132168 - protein, 20 aa, Artificial Sequence
  Description of Artificial Sequence: Synthetic peptide
  Seed: RMCSLMQGSTLPRRSGAAGA
RMWSLLQTSTLPRRSGAAGA

SEQ ID NO: 132169 - protein, 20 aa, Artificial Sequence
  Description of Artificial Sequence: Synthetic peptide
  Seed: RMCSLMQGSTLPRRSGAAGA
RMWSLLQTSTVPRRSGAAGA

SEQ ID NO: 132170 - protein, 20 aa, Artificial Sequence
  Description of Artificial Sequence: Synthetic peptide
  Seed: RMCSLMQGSTLPRRSGAAGA
RMWSLMQASTAPRRSGAAGA

SEQ ID NO: 132171 - protein, 20 aa, Artificial Sequence
  Description of Artificial Sequence: Synthetic peptide
  Seed: RMCSLMQGSTLPRRSGAAGA
RMWSLMQASTGPRRSGAAGA

SEQ ID NO: 132172 - protein, 20 aa, Artificial Sequence
  Description of Artificial Sequence: Synthetic peptide
  Seed: RMCSLMQGSTLPRRSGAAGA
RMWSLMQASTIPRRSGAAGA

SEQ ID NO: 132173 - protein, 20 aa, Artificial Sequence
  Description of Artificial Sequence: Synthetic peptide
  Seed: RMCSLMQGSTLPRRSGAAGA
RMWSLMQASTLPRRSGAAGA

SEQ ID NO: 132174 - protein, 20 aa, Artificial Sequence
  Description of Artificial Sequence: Synthetic peptide
  Seed: RMCSLMQGSTLPRRSGAAGA
RMWSLMQASTMPRRSGAAGA

SEQ ID NO: 132175 - protein, 20 aa, Artificial Sequence
  Description of Artificial Sequence: Synthetic peptide
  Seed: RMCSLMQGSTLPRRSGAAGA
RMWSLMQASTSPRRSGAAGA

SEQ ID NO: 132176 - protein, 20 aa, Artificial Sequence
  Description of Artificial Sequence: Synthetic peptide
  Seed: RMCSLMQGSTLPRRSGAAGA
RMWSLMQASTTPRRSGAAGA

SEQ ID NO: 132177 - protein, 20 aa, Artificial Sequence
  Description of Artificial Sequence: Synthetic peptide
  Seed: RMCSLMQGSTLPRRSGAAGA
RMWSLMQASTVPRRSGAAGA

SEQ ID NO: 132178 - protein, 20 aa, Artificial Sequence
  Description of Artificial Sequence: Synthetic peptide
  Seed: RMCSLMQGSTLPRRSGAAGA
RMWSLMQGSTAPRRSGAAGA

SEQ ID NO: 132179 - protein, 20 aa, Artificial Sequence
  Description of Artificial Sequence: Synthetic peptide
  Seed: RMCSLMQGSTLPRRSGAAGA
RMWSLMQGSTIPRRSGAAGA

SEQ ID NO: 132180 - protein, 20 aa, Artificial Sequence
  Description of Artificial Sequence: Synthetic peptide
  Seed: RMCSLMQGSTLPRRSGAAGA
RMWSLMQGSTLPRRSGAAGA

SEQ ID NO: 132181 - protein, 20 aa, Artificial Sequence
  Description of Artificial Sequence: Synthetic peptide
  Seed: RMCSLMQGSTLPRRSGAAGA
RMWSLMQGSTMPRRSGAAGA

SEQ ID NO: 132182 - protein, 20 aa, Artificial Sequence
  Description of Artificial Sequence: Synthetic peptide
  Seed: RMCSLMQGSTLPRRSGAAGA
RMWSLMQGSTSPRRSGAAGA

SEQ ID NO: 132183 - protein, 20 aa, Artificial Sequence
  Description of Artificial Sequence: Synthetic peptide
  Seed: RMCSLMQGSTLPRRSGAAGA
RMWSLMQGSTTPRRSGAAGA

SEQ ID NO: 132184 - protein, 20 aa, Artificial Sequence
  Description of Artificial Sequence: Synthetic peptide
  Seed: RMCSLMQGSTLPRRSGAAGA
RMWSLMQGSTVPRRSGAAGA

SEQ ID NO: 132185 - protein, 20 aa, Artificial Sequence
  Description of Artificial Sequence: Synthetic peptide
  Seed: RMCSLMQGSTLPRRSGAAGA
RMWSLMQNSTIPRRSGAAGA

SEQ ID NO: 132186 - protein, 20 aa, Artificial Sequence
  Description of Artificial Sequence: Synthetic peptide
  Seed: RMCSLMQGSTLPRRSGAAGA
RMWSLMQNSTLPRRSGAAGA

SEQ ID NO: 132187 - protein, 20 aa, Artificial Sequence
  Description of Artificial Sequence: Synthetic peptide
  Seed: RMCSLMQGSTLPRRSGAAGA
RMWSLMQNSTVPRRSGAAGA

SEQ ID NO: 132188 - protein, 20 aa, Artificial Sequence
  Description of Artificial Sequence: Synthetic peptide
  Seed: RMCSLMQGSTLPRRSGAAGA
RMWSLMQPSTAPRRSGAAGA

SEQ ID NO: 132189 - protein, 20 aa, Artificial Sequence
  Description of Artificial Sequence: Synthetic peptide
  Seed: RMCSLMQGSTLPRRSGAAGA
RMWSLMQPSTIPRRSGAAGA

SEQ ID NO: 132190 - protein, 20 aa, Artificial Sequence
  Description of Artificial Sequence: Synthetic peptide
  Seed: RMCSLMQGSTLPRRSGAAGA
RMWSLMQPSTLPRRSGAAGA

SEQ ID NO: 132191 - protein, 20 aa, Artificial Sequence
  Description of Artificial Sequence: Synthetic peptide
  Seed: RMCSLMQGSTLPRRSGAAGA
RMWSLMQPSTMPRRSGAAGA

SEQ ID NO: 132192 - protein, 20 aa, Artificial Sequence
  Description of Artificial Sequence: Synthetic peptide
  Seed: RMCSLMQGSTLPRRSGAAGA
RMWSLMQPSTVPRRSGAAGA

SEQ ID NO: 132193 - protein, 20 aa, Artificial Sequence
  Description of Artificial Sequence: Synthetic peptide
  Seed: RMCSLMQGSTLPRRSGAAGA
RMWSLMQSSTAPRRSGAAGA

SEQ ID NO: 132194 - protein, 20 aa, Artificial Sequence
  Description of Artificial Sequence: Synthetic peptide
  Seed: RMCSLMQGSTLPRRSGAAGA
RMWSLMQSSTIPRRSGAAGA

SEQ ID NO: 132195 - protein, 20 aa, Artificial Sequence
  Description of Artificial Sequence: Synthetic peptide
  Seed: RMCSLMQGSTLPRRSGAAGA
RMWSLMQSSTLPRRSGAAGA

SEQ ID NO: 132196 - protein, 20 aa, Artificial Sequence
  Description of Artificial Sequence: Synthetic peptide
  Seed: RMCSLMQGSTLPRRSGAAGA
RMWSLMQSSTMPRRSGAAGA

SEQ ID NO: 132197 - protein, 20 aa, Artificial Sequence
  Description of Artificial Sequence: Synthetic peptide
  Seed: RMCSLMQGSTLPRRSGAAGA
RMWSLMQSSTTPRRSGAAGA

SEQ ID NO: 132198 - protein, 20 aa, Artificial Sequence
  Description of Artificial Sequence: Synthetic peptide
  Seed: RMCSLMQGSTLPRRSGAAGA
RMWSLMQSSTVPRRSGAAGA

SEQ ID NO: 132199 - protein, 20 aa, Artificial Sequence
  Description of Artificial Sequence: Synthetic peptide
  Seed: RMCSLMQGSTLPRRSGAAGA
RMWSLMQTSTAPRRSGAAGA

SEQ ID NO: 132200 - protein, 20 aa, Artificial Sequence
  Description of Artificial Sequence: Synthetic peptide
  Seed: RMCSLMQGSTLPRRSGAAGA
RMWSLMQTSTIPRRSGAAGA

SEQ ID NO: 132201 - protein, 20 aa, Artificial Sequence
  Description of Artificial Sequence: Synthetic peptide
  Seed: RMCSLMQGSTLPRRSGAAGA
RMWSLMQTSTLPRRSGAAGA

SEQ ID NO: 132202 - protein, 20 aa, Artificial Sequence
  Description of Artificial Sequence: Synthetic peptide
  Seed: RMCSLMQGSTLPRRSGAAGA
RMWSLMQTSTVPRRSGAAGA

SEQ ID NO: 132203 - protein, 20 aa, Artificial Sequence
  Description of Artificial Sequence: Synthetic peptide
  Seed: RMCSLMQGSTLPRRSGAAGA
RMWSLQQASTAPRRSGAAGA

SEQ ID NO: 132204 - protein, 20 aa, Artificial Sequence
  Description of Artificial Sequence: Synthetic peptide
  Seed: RMCSLMQGSTLPRRSGAAGA
RMWSLQQASTIPRRSGAAGA

SEQ ID NO: 132205 - protein, 20 aa, Artificial Sequence
  Description of Artificial Sequence: Synthetic peptide
  Seed: RMCSLMQGSTLPRRSGAAGA
RMWSLQQASTLPRRSGAAGA

SEQ ID NO: 132206 - protein, 20 aa, Artificial Sequence
  Description of Artificial Sequence: Synthetic peptide
  Seed: RMCSLMQGSTLPRRSGAAGA
RMWSLQQASTVPRRSGAAGA

SEQ ID NO: 132207 - protein, 20 aa, Artificial Sequence
  Description of Artificial Sequence: Synthetic peptide
  Seed: RMCSLMQGSTLPRRSGAAGA
RMWSLQQGSTVPRRSGAAGA

SEQ ID NO: 132208 - protein, 20 aa, Artificial Sequence
  Description of Artificial Sequence: Synthetic peptide
  Seed: RMCSLMQGSTLPRRSGAAGA
RMWSLVQASTAPRRSGAAGA

SEQ ID NO: 132209 - protein, 20 aa, Artificial Sequence
  Description of Artificial Sequence: Synthetic peptide
  Seed: RMCSLMQGSTLPRRSGAAGA
RMWSLVQASTIPRRSGAAGA

SEQ ID NO: 132210 - protein, 20 aa, Artificial Sequence
  Description of Artificial Sequence: Synthetic peptide
  Seed: RMCSLMQGSTLPRRSGAAGA
RMWSLVQASTLPRRSGAAGA

SEQ ID NO: 132211 - protein, 20 aa, Artificial Sequence
  Description of Artificial Sequence: Synthetic peptide
  Seed: RMCSLMQGSTLPRRSGAAGA
RMWSLVQASTVPRRSGAAGA

SEQ ID NO: 132212 - protein, 20 aa, Artificial Sequence
  Description of Artificial Sequence: Synthetic peptide
  Seed: RMCSLMQGSTLPRRSGAAGA
RMWSLVQGSTVPRRSGAAGA

SEQ ID NO: 132213 - protein, 20 aa, Artificial Sequence
  Description of Artificial Sequence: Synthetic peptide
  Seed: RMCSLMQGSTLPRRSGAAGA
RMYSLAQASTAPRRSGAAGA

SEQ ID NO: 132214 - protein, 20 aa, Artificial Sequence
  Description of Artificial Sequence: Synthetic peptide
  Seed: RMCSLMQGSTLPRRSGAAGA
RMYSLAQASTGPRRSGAAGA

SEQ ID NO: 132215 - protein, 20 aa, Artificial Sequence
  Description of Artificial Sequence: Synthetic peptide
  Seed: RMCSLMQGSTLPRRSGAAGA
RMYSLAQASTIPRRSGAAGA

SEQ ID NO: 132216 - protein, 20 aa, Artificial Sequence
  Description of Artificial Sequence: Synthetic peptide
  Seed: RMCSLMQGSTLPRRSGAAGA
RMYSLAQASTLPRRSGAAGA

SEQ ID NO: 132217 - protein, 20 aa, Artificial Sequence
  Description of Artificial Sequence: Synthetic peptide
  Seed: RMCSLMQGSTLPRRSGAAGA
RMYSLAQASTMPRRSGAAGA

SEQ ID NO: 132218 - protein, 20 aa, Artificial Sequence
  Description of Artificial Sequence: Synthetic peptide
  Seed: RMCSLMQGSTLPRRSGAAGA
RMYSLAQASTSPRRSGAAGA

SEQ ID NO: 132219 - protein, 20 aa, Artificial Sequence
  Description of Artificial Sequence: Synthetic peptide
  Seed: RMCSLMQGSTLPRRSGAAGA
RMYSLAQASTTPRRSGAAGA

SEQ ID NO: 132220 - protein, 20 aa, Artificial Sequence
  Description of Artificial Sequence: Synthetic peptide
  Seed: RMCSLMQGSTLPRRSGAAGA
RMYSLAQASTVPRRSGAAGA

SEQ ID NO: 132221 - protein, 20 aa, Artificial Sequence
  Description of Artificial Sequence: Synthetic peptide
  Seed: RMCSLMQGSTLPRRSGAAGA
RMYSLAQGSTAPRRSGAAGA

SEQ ID NO: 132222 - protein, 20 aa, Artificial Sequence
  Description of Artificial Sequence: Synthetic peptide
  Seed: RMCSLMQGSTLPRRSGAAGA
RMYSLAQGSTIPRRSGAAGA

SEQ ID NO: 132223 - protein, 20 aa, Artificial Sequence
  Description of Artificial Sequence: Synthetic peptide
  Seed: RMCSLMQGSTLPRRSGAAGA
RMYSLAQGSTLPRRSGAAGA

SEQ ID NO: 132224 - protein, 20 aa, Artificial Sequence
  Description of Artificial Sequence: Synthetic peptide
  Seed: RMCSLMQGSTLPRRSGAAGA
RMYSLAQGSTMPRRSGAAGA

SEQ ID NO: 132225 - protein, 20 aa, Artificial Sequence
  Description of Artificial Sequence: Synthetic peptide
  Seed: RMCSLMQGSTLPRRSGAAGA
RMYSLAQGSTVPRRSGAAGA

SEQ ID NO: 132226 - protein, 20 aa, Artificial Sequence
  Description of Artificial Sequence: Synthetic peptide
  Seed: RMCSLMQGSTLPRRSGAAGA
RMYSLAQNSTVPRRSGAAGA

SEQ ID NO: 132227 - protein, 20 aa, Artificial Sequence
  Description of Artificial Sequence: Synthetic peptide
  Seed: RMCSLMQGSTLPRRSGAAGA
RMYSLAQPSTAPRRSGAAGA

SEQ ID NO: 132228 - protein, 20 aa, Artificial Sequence
  Description of Artificial Sequence: Synthetic peptide
  Seed: RMCSLMQGSTLPRRSGAAGA
RMYSLAQPSTIPRRSGAAGA

SEQ ID NO: 132229 - protein, 20 aa, Artificial Sequence
  Description of Artificial Sequence: Synthetic peptide
  Seed: RMCSLMQGSTLPRRSGAAGA
RMYSLAQPSTLPRRSGAAGA

SEQ ID NO: 132230 - protein, 20 aa, Artificial Sequence
  Description of Artificial Sequence: Synthetic peptide
  Seed: RMCSLMQGSTLPRRSGAAGA
RMYSLAQPSTMPRRSGAAGA

SEQ ID NO: 132231 - protein, 20 aa, Artificial Sequence
  Description of Artificial Sequence: Synthetic peptide
  Seed: RMCSLMQGSTLPRRSGAAGA
RMYSLAQPSTVPRRSGAAGA

SEQ ID NO: 132232 - protein, 20 aa, Artificial Sequence
  Description of Artificial Sequence: Synthetic peptide
  Seed: RMCSLMQGSTLPRRSGAAGA
RMYSLAQSSTAPRRSGAAGA

SEQ ID NO: 132233 - protein, 20 aa, Artificial Sequence
  Description of Artificial Sequence: Synthetic peptide
  Seed: RMCSLMQGSTLPRRSGAAGA
RMYSLAQSSTIPRRSGAAGA

SEQ ID NO: 132234 - protein, 20 aa, Artificial Sequence
  Description of Artificial Sequence: Synthetic peptide
  Seed: RMCSLMQGSTLPRRSGAAGA
RMYSLAQSSTLPRRSGAAGA

SEQ ID NO: 132235 - protein, 20 aa, Artificial Sequence
  Description of Artificial Sequence: Synthetic peptide
  Seed: RMCSLMQGSTLPRRSGAAGA
RMYSLAQSSTMPRRSGAAGA

SEQ ID NO: 132236 - protein, 20 aa, Artificial Sequence
  Description of Artificial Sequence: Synthetic peptide
  Seed: RMCSLMQGSTLPRRSGAAGA
RMYSLAQSSTVPRRSGAAGA

SEQ ID NO: 132237 - protein, 20 aa, Artificial Sequence
  Description of Artificial Sequence: Synthetic peptide
  Seed: RMCSLMQGSTLPRRSGAAGA
RMYSLAQTSTIPRRSGAAGA

SEQ ID NO: 132238 - protein, 20 aa, Artificial Sequence
  Description of Artificial Sequence: Synthetic peptide
  Seed: RMCSLMQGSTLPRRSGAAGA
RMYSLAQTSTLPRRSGAAGA

SEQ ID NO: 132239 - protein, 20 aa, Artificial Sequence
  Description of Artificial Sequence: Synthetic peptide
  Seed: RMCSLMQGSTLPRRSGAAGA
RMYSLAQTSTVPRRSGAAGA

SEQ ID NO: 132240 - protein, 20 aa, Artificial Sequence
  Description of Artificial Sequence: Synthetic peptide
  Seed: RMCSLMQGSTLPRRSGAAGA
RMYSLAQVSTIPRRSGAAGA

SEQ ID NO: 132241 - protein, 20 aa, Artificial Sequence
  Description of Artificial Sequence: Synthetic peptide
  Seed: RMCSLMQGSTLPRRSGAAGA
RMYSLAQVSTVPRRSGAAGA

SEQ ID NO: 132242 - protein, 20 aa, Artificial Sequence
  Description of Artificial Sequence: Synthetic peptide
  Seed: RMCSLMQGSTLPRRSGAAGA
RMYSLEQASTAPRRSGAAGA

SEQ ID NO: 132243 - protein, 20 aa, Artificial Sequence
  Description of Artificial Sequence: Synthetic peptide
  Seed: RMCSLMQGSTLPRRSGAAGA
RMYSLEQASTIPRRSGAAGA

SEQ ID NO: 132244 - protein, 20 aa, Artificial Sequence
  Description of Artificial Sequence: Synthetic peptide
  Seed: RMCSLMQGSTLPRRSGAAGA
RMYSLEQASTLPRRSGAAGA

SEQ ID NO: 132245 - protein, 20 aa, Artificial Sequence
  Description of Artificial Sequence: Synthetic peptide
  Seed: RMCSLMQGSTLPRRSGAAGA
RMYSLEQASTVPRRSGAAGA

SEQ ID NO: 132246 - protein, 20 aa, Artificial Sequence
  Description of Artificial Sequence: Synthetic peptide
  Seed: RMCSLMQGSTLPRRSGAAGA
RMYSLFQASTIPRRSGAAGA

SEQ ID NO: 132247 - protein, 20 aa, Artificial Sequence
  Description of Artificial Sequence: Synthetic peptide
  Seed: RMCSLMQGSTLPRRSGAAGA
RMYSLFQASTLPRRSGAAGA

SEQ ID NO: 132248 - protein, 20 aa, Artificial Sequence
  Description of Artificial Sequence: Synthetic peptide
  Seed: RMCSLMQGSTLPRRSGAAGA
RMYSLFQASTVPRRSGAAGA

SEQ ID NO: 132249 - protein, 20 aa, Artificial Sequence
  Description of Artificial Sequence: Synthetic peptide
  Seed: RMCSLMQGSTLPRRSGAAGA
RMYSLGQASTIPRRSGAAGA

SEQ ID NO: 132250 - protein, 20 aa, Artificial Sequence
  Description of Artificial Sequence: Synthetic peptide
  Seed: RMCSLMQGSTLPRRSGAAGA
RMYSLGQASTLPRRSGAAGA

SEQ ID NO: 132251 - protein, 20 aa, Artificial Sequence
  Description of Artificial Sequence: Synthetic peptide
  Seed: RMCSLMQGSTLPRRSGAAGA
RMYSLGQASTVPRRSGAAGA

SEQ ID NO: 132252 - protein, 20 aa, Artificial Sequence
  Description of Artificial Sequence: Synthetic peptide
  Seed: RMCSLMQGSTLPRRSGAAGA
RMYSLIQASTAPRRSGAAGA

SEQ ID NO: 132253 - protein, 20 aa, Artificial Sequence
  Description of Artificial Sequence: Synthetic peptide
  Seed: RMCSLMQGSTLPRRSGAAGA
RMYSLIQASTGPRRSGAAGA

SEQ ID NO: 132254 - protein, 20 aa, Artificial Sequence
  Description of Artificial Sequence: Synthetic peptide
  Seed: RMCSLMQGSTLPRRSGAAGA
RMYSLIQASTIPRRSGAAGA

SEQ ID NO: 132255 - protein, 20 aa, Artificial Sequence
  Description of Artificial Sequence: Synthetic peptide
  Seed: RMCSLMQGSTLPRRSGAAGA
RMYSLIQASTLPRRSGAAGA

SEQ ID NO: 132256 - protein, 20 aa, Artificial Sequence
  Description of Artificial Sequence: Synthetic peptide
  Seed: RMCSLMQGSTLPRRSGAAGA
RMYSLIQASTMPRRSGAAGA

SEQ ID NO: 132257 - protein, 20 aa, Artificial Sequence
  Description of Artificial Sequence: Synthetic peptide
  Seed: RMCSLMQGSTLPRRSGAAGA
RMYSLIQASTSPRRSGAAGA

SEQ ID NO: 132258 - protein, 20 aa, Artificial Sequence
  Description of Artificial Sequence: Synthetic peptide
  Seed: RMCSLMQGSTLPRRSGAAGA
RMYSLIQASTTPRRSGAAGA

SEQ ID NO: 132259 - protein, 20 aa, Artificial Sequence
  Description of Artificial Sequence: Synthetic peptide
  Seed: RMCSLMQGSTLPRRSGAAGA
RMYSLIQASTVPRRSGAAGA

SEQ ID NO: 132260 - protein, 20 aa, Artificial Sequence
  Description of Artificial Sequence: Synthetic peptide
  Seed: RMCSLMQGSTLPRRSGAAGA
RMYSLIQGSTAPRRSGAAGA

SEQ ID NO: 132261 - protein, 20 aa, Artificial Sequence
  Description of Artificial Sequence: Synthetic peptide
  Seed: RMCSLMQGSTLPRRSGAAGA
RMYSLIQGSTIPRRSGAAGA

SEQ ID NO: 132262 - protein, 20 aa, Artificial Sequence
  Description of Artificial Sequence: Synthetic peptide
  Seed: RMCSLMQGSTLPRRSGAAGA
RMYSLIQGSTLPRRSGAAGA

SEQ ID NO: 132263 - protein, 20 aa, Artificial Sequence
  Description of Artificial Sequence: Synthetic peptide
  Seed: RMCSLMQGSTLPRRSGAAGA
RMYSLIQGSTMPRRSGAAGA

SEQ ID NO: 132264 - protein, 20 aa, Artificial Sequence
  Description of Artificial Sequence: Synthetic peptide
  Seed: RMCSLMQGSTLPRRSGAAGA
RMYSLIQGSTSPRRSGAAGA

SEQ ID NO: 132265 - protein, 20 aa, Artificial Sequence
  Description of Artificial Sequence: Synthetic peptide
  Seed: RMCSLMQGSTLPRRSGAAGA
RMYSLIQGSTTPRRSGAAGA

SEQ ID NO: 132266 - protein, 20 aa, Artificial Sequence
  Description of Artificial Sequence: Synthetic peptide
  Seed: RMCSLMQGSTLPRRSGAAGA
RMYSLIQGSTVPRRSGAAGA

SEQ ID NO: 132267 - protein, 20 aa, Artificial Sequence
  Description of Artificial Sequence: Synthetic peptide
  Seed: RMCSLMQGSTLPRRSGAAGA
RMYSLIQNSTAPRRSGAAGA

SEQ ID NO: 132268 - protein, 20 aa, Artificial Sequence
  Description of Artificial Sequence: Synthetic peptide
  Seed: RMCSLMQGSTLPRRSGAAGA
RMYSLIQNSTIPRRSGAAGA

SEQ ID NO: 132269 - protein, 20 aa, Artificial Sequence
  Description of Artificial Sequence: Synthetic peptide
  Seed: RMCSLMQGSTLPRRSGAAGA
RMYSLIQNSTLPRRSGAAGA

SEQ ID NO: 132270 - protein, 20 aa, Artificial Sequence
  Description of Artificial Sequence: Synthetic peptide
  Seed: RMCSLMQGSTLPRRSGAAGA
RMYSLIQNSTVPRRSGAAGA

SEQ ID NO: 132271 - protein, 20 aa, Artificial Sequence
  Description of Artificial Sequence: Synthetic peptide
  Seed: RMCSLMQGSTLPRRSGAAGA
RMYSLIQPSTAPRRSGAAGA

SEQ ID NO: 132272 - protein, 20 aa, Artificial Sequence
  Description of Artificial Sequence: Synthetic peptide
  Seed: RMCSLMQGSTLPRRSGAAGA
RMYSLIQPSTIPRRSGAAGA

SEQ ID NO: 132273 - protein, 20 aa, Artificial Sequence
  Description of Artificial Sequence: Synthetic peptide
  Seed: RMCSLMQGSTLPRRSGAAGA
RMYSLIQPSTLPRRSGAAGA

SEQ ID NO: 132274 - protein, 20 aa, Artificial Sequence
  Description of Artificial Sequence: Synthetic peptide
  Seed: RMCSLMQGSTLPRRSGAAGA
RMYSLIQPSTMPRRSGAAGA

SEQ ID NO: 132275 - protein, 20 aa, Artificial Sequence
  Description of Artificial Sequence: Synthetic peptide
  Seed: RMCSLMQGSTLPRRSGAAGA
RMYSLIQPSTTPRRSGAAGA

SEQ ID NO: 132276 - protein, 20 aa, Artificial Sequence
  Description of Artificial Sequence: Synthetic peptide
  Seed: RMCSLMQGSTLPRRSGAAGA
RMYSLIQPSTVPRRSGAAGA

SEQ ID NO: 132277 - protein, 20 aa, Artificial Sequence
  Description of Artificial Sequence: Synthetic peptide
  Seed: RMCSLMQGSTLPRRSGAAGA
RMYSLIQSSTAPRRSGAAGA

SEQ ID NO: 132278 - protein, 20 aa, Artificial Sequence
  Description of Artificial Sequence: Synthetic peptide
  Seed: RMCSLMQGSTLPRRSGAAGA
RMYSLIQSSTIPRRSGAAGA

SEQ ID NO: 132279 - protein, 20 aa, Artificial Sequence
  Description of Artificial Sequence: Synthetic peptide
  Seed: RMCSLMQGSTLPRRSGAAGA
RMYSLIQSSTLPRRSGAAGA

SEQ ID NO: 132280 - protein, 20 aa, Artificial Sequence
  Description of Artificial Sequence: Synthetic peptide
  Seed: RMCSLMQGSTLPRRSGAAGA
RMYSLIQSSTMPRRSGAAGA

SEQ ID NO: 132281 - protein, 20 aa, Artificial Sequence
  Description of Artificial Sequence: Synthetic peptide
  Seed: RMCSLMQGSTLPRRSGAAGA
RMYSLIQSSTTPRRSGAAGA

SEQ ID NO: 132282 - protein, 20 aa, Artificial Sequence
  Description of Artificial Sequence: Synthetic peptide
  Seed: RMCSLMQGSTLPRRSGAAGA
RMYSLIQSSTVPRRSGAAGA

SEQ ID NO: 132283 - protein, 20 aa, Artificial Sequence
  Description of Artificial Sequence: Synthetic peptide
  Seed: RMCSLMQGSTLPRRSGAAGA
RMYSLIQTSTAPRRSGAAGA

SEQ ID NO: 132284 - protein, 20 aa, Artificial Sequence
  Description of Artificial Sequence: Synthetic peptide
  Seed: RMCSLMQGSTLPRRSGAAGA
RMYSLIQTSTIPRRSGAAGA

SEQ ID NO: 132285 - protein, 20 aa, Artificial Sequence
  Description of Artificial Sequence: Synthetic peptide
  Seed: RMCSLMQGSTLPRRSGAAGA
RMYSLIQTSTLPRRSGAAGA

SEQ ID NO: 132286 - protein, 20 aa, Artificial Sequence
  Description of Artificial Sequence: Synthetic peptide
  Seed: RMCSLMQGSTLPRRSGAAGA
RMYSLIQTSTVPRRSGAAGA

SEQ ID NO: 132287 - protein, 20 aa, Artificial Sequence
  Description of Artificial Sequence: Synthetic peptide
  Seed: RMCSLMQGSTLPRRSGAAGA
RMYSLIQVSTAPRRSGAAGA

SEQ ID NO: 132288 - protein, 20 aa, Artificial Sequence
  Description of Artificial Sequence: Synthetic peptide
  Seed: RMCSLMQGSTLPRRSGAAGA
RMYSLIQVSTVPRRSGAAGA

SEQ ID NO: 132289 - protein, 20 aa, Artificial Sequence
  Description of Artificial Sequence: Synthetic peptide
  Seed: RMCSLMQGSTLPRRSGAAGA
RMYSLLQASTAPRRSGAAGA

SEQ ID NO: 132290 - protein, 20 aa, Artificial Sequence
  Description of Artificial Sequence: Synthetic peptide
  Seed: RMCSLMQGSTLPRRSGAAGA
RMYSLLQASTCPRRSGAAGA

SEQ ID NO: 132291 - protein, 20 aa, Artificial Sequence
  Description of Artificial Sequence: Synthetic peptide
  Seed: RMCSLMQGSTLPRRSGAAGA
RMYSLLQASTFPRRSGAAGA

SEQ ID NO: 132292 - protein, 20 aa, Artificial Sequence
  Description of Artificial Sequence: Synthetic peptide
  Seed: RMCSLMQGSTLPRRSGAAGA
RMYSLLQASTGPRRSGAAGA

SEQ ID NO: 132293 - protein, 20 aa, Artificial Sequence
  Description of Artificial Sequence: Synthetic peptide
  Seed: RMCSLMQGSTLPRRSGAAGA
RMYSLLQASTIPRRSGAAGA

SEQ ID NO: 132294 - protein, 20 aa, Artificial Sequence
  Description of Artificial Sequence: Synthetic peptide
  Seed: RMCSLMQGSTLPRRSGAAGA
RMYSLLQASTLPRRSGAAGA

SEQ ID NO: 132295 - protein, 20 aa, Artificial Sequence
  Description of Artificial Sequence: Synthetic peptide
  Seed: RMCSLMQGSTLPRRSGAAGA
RMYSLLQASTMPRRSGAAGA

SEQ ID NO: 132296 - protein, 20 aa, Artificial Sequence
  Description of Artificial Sequence: Synthetic peptide
  Seed: RMCSLMQGSTLPRRSGAAGA
RMYSLLQASTNPRRSGAAGA

SEQ ID NO: 132297 - protein, 20 aa, Artificial Sequence
  Description of Artificial Sequence: Synthetic peptide
  Seed: RMCSLMQGSTLPRRSGAAGA
RMYSLLQASTSPRRSGAAGA

SEQ ID NO: 132298 - protein, 20 aa, Artificial Sequence
  Description of Artificial Sequence: Synthetic peptide
  Seed: RMCSLMQGSTLPRRSGAAGA
RMYSLLQASTTPRRSGAAGA

SEQ ID NO: 132299 - protein, 20 aa, Artificial Sequence
  Description of Artificial Sequence: Synthetic peptide
  Seed: RMCSLMQGSTLPRRSGAAGA
RMYSLLQASTVPRRSGAAGA

SEQ ID NO: 132300 - protein, 20 aa, Artificial Sequence
  Description of Artificial Sequence: Synthetic peptide
  Seed: RMCSLMQGSTLPRRSGAAGA
RMYSLLQGSTAPRRSGAAGA

SEQ ID NO: 132301 - protein, 20 aa, Artificial Sequence
  Description of Artificial Sequence: Synthetic peptide
  Seed: RMCSLMQGSTLPRRSGAAGA
RMYSLLQGSTGPRRSGAAGA

SEQ ID NO: 132302 - protein, 20 aa, Artificial Sequence
  Description of Artificial Sequence: Synthetic peptide
  Seed: RMCSLMQGSTLPRRSGAAGA
RMYSLLQGSTIPRRSGAAGA

SEQ ID NO: 132303 - protein, 20 aa, Artificial Sequence
  Description of Artificial Sequence: Synthetic peptide
  Seed: RMCSLMQGSTLPRRSGAAGA
RMYSLLQGSTLPRRSGAAGA

SEQ ID NO: 132304 - protein, 20 aa, Artificial Sequence
  Description of Artificial Sequence: Synthetic peptide
  Seed: RMCSLMQGSTLPRRSGAAGA
RMYSLLQGSTMPRRSGAAGA

SEQ ID NO: 132305 - protein, 20 aa, Artificial Sequence
  Description of Artificial Sequence: Synthetic peptide
  Seed: RMCSLMQGSTLPRRSGAAGA
RMYSLLQGSTSPRRSGAAGA

SEQ ID NO: 132306 - protein, 20 aa, Artificial Sequence
  Description of Artificial Sequence: Synthetic peptide
  Seed: RMCSLMQGSTLPRRSGAAGA
RMYSLLQGSTTPRRSGAAGA

SEQ ID NO: 132307 - protein, 20 aa, Artificial Sequence
  Description of Artificial Sequence: Synthetic peptide
  Seed: RMCSLMQGSTLPRRSGAAGA
RMYSLLQGSTVPRRSGAAGA

SEQ ID NO: 132308 - protein, 20 aa, Artificial Sequence
  Description of Artificial Sequence: Synthetic peptide
  Seed: RMCSLMQGSTLPRRSGAAGA
RMYSLLQISTAPRRSGAAGA

SEQ ID NO: 132309 - protein, 20 aa, Artificial Sequence
  Description of Artificial Sequence: Synthetic peptide
  Seed: RMCSLMQGSTLPRRSGAAGA
RMYSLLQISTVPRRSGAAGA

SEQ ID NO: 132310 - protein, 20 aa, Artificial Sequence
  Description of Artificial Sequence: Synthetic peptide
  Seed: RMCSLMQGSTLPRRSGAAGA
RMYSLLQNSTAPRRSGAAGA

SEQ ID NO: 132311 - protein, 20 aa, Artificial Sequence
  Description of Artificial Sequence: Synthetic peptide
  Seed: RMCSLMQGSTLPRRSGAAGA
RMYSLLQNSTIPRRSGAAGA

SEQ ID NO: 132312 - protein, 20 aa, Artificial Sequence
  Description of Artificial Sequence: Synthetic peptide
  Seed: RMCSLMQGSTLPRRSGAAGA
RMYSLLQNSTLPRRSGAAGA

SEQ ID NO: 132313 - protein, 20 aa, Artificial Sequence
  Description of Artificial Sequence: Synthetic peptide
  Seed: RMCSLMQGSTLPRRSGAAGA
RMYSLLQNSTMPRRSGAAGA

SEQ ID NO: 132314 - protein, 20 aa, Artificial Sequence
  Description of Artificial Sequence: Synthetic peptide
  Seed: RMCSLMQGSTLPRRSGAAGA
RMYSLLQNSTTPRRSGAAGA

SEQ ID NO: 132315 - protein, 20 aa, Artificial Sequence
  Description of Artificial Sequence: Synthetic peptide
  Seed: RMCSLMQGSTLPRRSGAAGA
RMYSLLQNSTVPRRSGAAGA

SEQ ID NO: 132316 - protein, 20 aa, Artificial Sequence
  Description of Artificial Sequence: Synthetic peptide
  Seed: RMCSLMQGSTLPRRSGAAGA
RMYSLLQPSTAPRRSGAAGA

SEQ ID NO: 132317 - protein, 20 aa, Artificial Sequence
  Description of Artificial Sequence: Synthetic peptide
  Seed: RMCSLMQGSTLPRRSGAAGA
RMYSLLQPSTGPRRSGAAGA

SEQ ID NO: 132318 - protein, 20 aa, Artificial Sequence
  Description of Artificial Sequence: Synthetic peptide
  Seed: RMCSLMQGSTLPRRSGAAGA
RMYSLLQPSTIPRRSGAAGA

SEQ ID NO: 132319 - protein, 20 aa, Artificial Sequence
  Description of Artificial Sequence: Synthetic peptide
  Seed: RMCSLMQGSTLPRRSGAAGA
RMYSLLQPSTLPRRSGAAGA

SEQ ID NO: 132320 - protein, 20 aa, Artificial Sequence
  Description of Artificial Sequence: Synthetic peptide
  Seed: RMCSLMQGSTLPRRSGAAGA
RMYSLLQPSTMPRRSGAAGA

SEQ ID NO: 132321 - protein, 20 aa, Artificial Sequence
  Description of Artificial Sequence: Synthetic peptide
  Seed: RMCSLMQGSTLPRRSGAAGA
RMYSLLQPSTSPRRSGAAGA

SEQ ID NO: 132322 - protein, 20 aa, Artificial Sequence
  Description of Artificial Sequence: Synthetic peptide
  Seed: RMCSLMQGSTLPRRSGAAGA
RMYSLLQPSTTPRRSGAAGA

SEQ ID NO: 132323 - protein, 20 aa, Artificial Sequence
  Description of Artificial Sequence: Synthetic peptide
  Seed: RMCSLMQGSTLPRRSGAAGA
RMYSLLQPSTVPRRSGAAGA

SEQ ID NO: 132324 - protein, 20 aa, Artificial Sequence
  Description of Artificial Sequence: Synthetic peptide
  Seed: RMCSLMQGSTLPRRSGAAGA
RMYSLLQSSTAPRRSGAAGA

SEQ ID NO: 132325 - protein, 20 aa, Artificial Sequence
  Description of Artificial Sequence: Synthetic peptide
  Seed: RMCSLMQGSTLPRRSGAAGA
RMYSLLQSSTGPRRSGAAGA

SEQ ID NO: 132326 - protein, 20 aa, Artificial Sequence
  Description of Artificial Sequence: Synthetic peptide
  Seed: RMCSLMQGSTLPRRSGAAGA
RMYSLLQSSTIPRRSGAAGA

SEQ ID NO: 132327 - protein, 20 aa, Artificial Sequence
  Description of Artificial Sequence: Synthetic peptide
  Seed: RMCSLMQGSTLPRRSGAAGA
RMYSLLQSSTLPRRSGAAGA

SEQ ID NO: 132328 - protein, 20 aa, Artificial Sequence
  Description of Artificial Sequence: Synthetic peptide
  Seed: RMCSLMQGSTLPRRSGAAGA
RMYSLLQSSTMPRRSGAAGA

SEQ ID NO: 132329 - protein, 20 aa, Artificial Sequence
  Description of Artificial Sequence: Synthetic peptide
  Seed: RMCSLMQGSTLPRRSGAAGA
RMYSLLQSSTSPRRSGAAGA

SEQ ID NO: 132330 - protein, 20 aa, Artificial Sequence
  Description of Artificial Sequence: Synthetic peptide
  Seed: RMCSLMQGSTLPRRSGAAGA
RMYSLLQSSTTPRRSGAAGA

SEQ ID NO: 132331 - protein, 20 aa, Artificial Sequence
  Description of Artificial Sequence: Synthetic peptide
  Seed: RMCSLMQGSTLPRRSGAAGA
RMYSLLQSSTVPRRSGAAGA

SEQ ID NO: 132332 - protein, 20 aa, Artificial Sequence
  Description of Artificial Sequence: Synthetic peptide
  Seed: RMCSLMQGSTLPRRSGAAGA
RMYSLLQTSTAPRRSGAAGA

SEQ ID NO: 132333 - protein, 20 aa, Artificial Sequence
  Description of Artificial Sequence: Synthetic peptide
  Seed: RMCSLMQGSTLPRRSGAAGA
RMYSLLQTSTIPRRSGAAGA

SEQ ID NO: 132334 - protein, 20 aa, Artificial Sequence
  Description of Artificial Sequence: Synthetic peptide
  Seed: RMCSLMQGSTLPRRSGAAGA
RMYSLLQTSTLPRRSGAAGA

SEQ ID NO: 132335 - protein, 20 aa, Artificial Sequence
  Description of Artificial Sequence: Synthetic peptide
  Seed: RMCSLMQGSTLPRRSGAAGA
RMYSLLQTSTMPRRSGAAGA

SEQ ID NO: 132336 - protein, 20 aa, Artificial Sequence
  Description of Artificial Sequence: Synthetic peptide
  Seed: RMCSLMQGSTLPRRSGAAGA
RMYSLLQTSTSPRRSGAAGA

SEQ ID NO: 132337 - protein, 20 aa, Artificial Sequence
  Description of Artificial Sequence: Synthetic peptide
  Seed: RMCSLMQGSTLPRRSGAAGA
RMYSLLQTSTTPRRSGAAGA

SEQ ID NO: 132338 - protein, 20 aa, Artificial Sequence
  Description of Artificial Sequence: Synthetic peptide
  Seed: RMCSLMQGSTLPRRSGAAGA
RMYSLLQTSTVPRRSGAAGA

SEQ ID NO: 132339 - protein, 20 aa, Artificial Sequence
  Description of Artificial Sequence: Synthetic peptide
  Seed: RMCSLMQGSTLPRRSGAAGA
RMYSLLQVSTAPRRSGAAGA

SEQ ID NO: 132340 - protein, 20 aa, Artificial Sequence
  Description of Artificial Sequence: Synthetic peptide
  Seed: RMCSLMQGSTLPRRSGAAGA
RMYSLLQVSTIPRRSGAAGA

SEQ ID NO: 132341 - protein, 20 aa, Artificial Sequence
  Description of Artificial Sequence: Synthetic peptide
  Seed: RMCSLMQGSTLPRRSGAAGA
RMYSLLQVSTLPRRSGAAGA

SEQ ID NO: 132342 - protein, 20 aa, Artificial Sequence
  Description of Artificial Sequence: Synthetic peptide
  Seed: RMCSLMQGSTLPRRSGAAGA
RMYSLLQVSTVPRRSGAAGA

SEQ ID NO: 132343 - protein, 20 aa, Artificial Sequence
  Description of Artificial Sequence: Synthetic peptide
  Seed: RMCSLMQGSTLPRRSGAAGA
RMYSLMQASTAPRRSGAAGA

SEQ ID NO: 132344 - protein, 20 aa, Artificial Sequence
  Description of Artificial Sequence: Synthetic peptide
  Seed: RMCSLMQGSTLPRRSGAAGA
RMYSLMQASTCPRRSGAAGA

SEQ ID NO: 132345 - protein, 20 aa, Artificial Sequence
  Description of Artificial Sequence: Synthetic peptide
  Seed: RMCSLMQGSTLPRRSGAAGA
RMYSLMQASTFPRRSGAAGA

SEQ ID NO: 132346 - protein, 20 aa, Artificial Sequence
  Description of Artificial Sequence: Synthetic peptide
  Seed: RMCSLMQGSTLPRRSGAAGA
RMYSLMQASTGPRRSGAAGA

SEQ ID NO: 132347 - protein, 20 aa, Artificial Sequence
  Description of Artificial Sequence: Synthetic peptide
  Seed: RMCSLMQGSTLPRRSGAAGA
RMYSLMQASTIPRRSGAAGA

SEQ ID NO: 132348 - protein, 20 aa, Artificial Sequence
  Description of Artificial Sequence: Synthetic peptide
  Seed: RMCSLMQGSTLPRRSGAAGA
RMYSLMQASTLPRRSGAAGA

SEQ ID NO: 132349 - protein, 20 aa, Artificial Sequence
  Description of Artificial Sequence: Synthetic peptide
  Seed: RMCSLMQGSTLPRRSGAAGA
RMYSLMQASTMPRRSGAAGA

SEQ ID NO: 132350 - protein, 20 aa, Artificial Sequence
  Description of Artificial Sequence: Synthetic peptide
  Seed: RMCSLMQGSTLPRRSGAAGA
RMYSLMQASTNPRRSGAAGA

SEQ ID NO: 132351 - protein, 20 aa, Artificial Sequence
  Description of Artificial Sequence: Synthetic peptide
  Seed: RMCSLMQGSTLPRRSGAAGA
RMYSLMQASTSPRRSGAAGA

SEQ ID NO: 132352 - protein, 20 aa, Artificial Sequence
  Description of Artificial Sequence: Synthetic peptide
  Seed: RMCSLMQGSTLPRRSGAAGA
RMYSLMQASTTPRRSGAAGA

SEQ ID NO: 132353 - protein, 20 aa, Artificial Sequence
  Description of Artificial Sequence: Synthetic peptide
  Seed: RMCSLMQGSTLPRRSGAAGA
RMYSLMQASTVPRRSGAAGA

SEQ ID NO: 132354 - protein, 20 aa, Artificial Sequence
  Description of Artificial Sequence: Synthetic peptide
  Seed: RMCSLMQGSTLPRRSGAAGA
RMYSLMQGSTAPRRSGAAGA

SEQ ID NO: 132355 - protein, 20 aa, Artificial Sequence
  Description of Artificial Sequence: Synthetic peptide
  Seed: RMCSLMQGSTLPRRSGAAGA
RMYSLMQGSTGPRRSGAAGA

SEQ ID NO: 132356 - protein, 20 aa, Artificial Sequence
  Description of Artificial Sequence: Synthetic peptide
  Seed: RMCSLMQGSTLPRRSGAAGA
RMYSLMQGSTIPRRSGAAGA

SEQ ID NO: 132357 - protein, 20 aa, Artificial Sequence
  Description of Artificial Sequence: Synthetic peptide
  Seed: RMCSLMQGSTLPRRSGAAGA
RMYSLMQGSTLPRRSGAAGA

SEQ ID NO: 132358 - protein, 20 aa, Artificial Sequence
  Description of Artificial Sequence: Synthetic peptide
  Seed: RMCSLMQGSTLPRRSGAAGA
RMYSLMQGSTMPRRSGAAGA

SEQ ID NO: 132359 - protein, 20 aa, Artificial Sequence
  Description of Artificial Sequence: Synthetic peptide
  Seed: RMCSLMQGSTLPRRSGAAGA
RMYSLMQGSTSPRRSGAAGA

SEQ ID NO: 132360 - protein, 20 aa, Artificial Sequence
  Description of Artificial Sequence: Synthetic peptide
  Seed: RMCSLMQGSTLPRRSGAAGA
RMYSLMQGSTTPRRSGAAGA

SEQ ID NO: 132361 - protein, 20 aa, Artificial Sequence
  Description of Artificial Sequence: Synthetic peptide
  Seed: RMCSLMQGSTLPRRSGAAGA
RMYSLMQGSTVPRRSGAAGA

SEQ ID NO: 132362 - protein, 20 aa, Artificial Sequence
  Description of Artificial Sequence: Synthetic peptide
  Seed: RMCSLMQGSTLPRRSGAAGA
RMYSLMQISTAPRRSGAAGA

SEQ ID NO: 132363 - protein, 20 aa, Artificial Sequence
  Description of Artificial Sequence: Synthetic peptide
  Seed: RMCSLMQGSTLPRRSGAAGA
RMYSLMQISTVPRRSGAAGA

SEQ ID NO: 132364 - protein, 20 aa, Artificial Sequence
  Description of Artificial Sequence: Synthetic peptide
  Seed: RMCSLMQGSTLPRRSGAAGA
RMYSLMQNSTAPRRSGAAGA

SEQ ID NO: 132365 - protein, 20 aa, Artificial Sequence
  Description of Artificial Sequence: Synthetic peptide
  Seed: RMCSLMQGSTLPRRSGAAGA
RMYSLMQNSTIPRRSGAAGA

SEQ ID NO: 132366 - protein, 20 aa, Artificial Sequence
  Description of Artificial Sequence: Synthetic peptide
  Seed: RMCSLMQGSTLPRRSGAAGA
RMYSLMQNSTLPRRSGAAGA

SEQ ID NO: 132367 - protein, 20 aa, Artificial Sequence
  Description of Artificial Sequence: Synthetic peptide
  Seed: RMCSLMQGSTLPRRSGAAGA
RMYSLMQNSTMPRRSGAAGA

SEQ ID NO: 132368 - protein, 20 aa, Artificial Sequence
  Description of Artificial Sequence: Synthetic peptide
  Seed: RMCSLMQGSTLPRRSGAAGA
RMYSLMQNSTTPRRSGAAGA

SEQ ID NO: 132369 - protein, 20 aa, Artificial Sequence
  Description of Artificial Sequence: Synthetic peptide
  Seed: RMCSLMQGSTLPRRSGAAGA
RMYSLMQNSTVPRRSGAAGA

SEQ ID NO: 132370 - protein, 20 aa, Artificial Sequence
  Description of Artificial Sequence: Synthetic peptide
  Seed: RMCSLMQGSTLPRRSGAAGA
RMYSLMQPSTAPRRSGAAGA

SEQ ID NO: 132371 - protein, 20 aa, Artificial Sequence
  Description of Artificial Sequence: Synthetic peptide
  Seed: RMCSLMQGSTLPRRSGAAGA
RMYSLMQPSTIPRRSGAAGA

SEQ ID NO: 132372 - protein, 20 aa, Artificial Sequence
  Description of Artificial Sequence: Synthetic peptide
  Seed: RMCSLMQGSTLPRRSGAAGA
RMYSLMQPSTLPRRSGAAGA

SEQ ID NO: 132373 - protein, 20 aa, Artificial Sequence
  Description of Artificial Sequence: Synthetic peptide
  Seed: RMCSLMQGSTLPRRSGAAGA
RMYSLMQPSTMPRRSGAAGA

SEQ ID NO: 132374 - protein, 20 aa, Artificial Sequence
  Description of Artificial Sequence: Synthetic peptide
  Seed: RMCSLMQGSTLPRRSGAAGA
RMYSLMQPSTSPRRSGAAGA

SEQ ID NO: 132375 - protein, 20 aa, Artificial Sequence
  Description of Artificial Sequence: Synthetic peptide
  Seed: RMCSLMQGSTLPRRSGAAGA
RMYSLMQPSTTPRRSGAAGA

SEQ ID NO: 132376 - protein, 20 aa, Artificial Sequence
  Description of Artificial Sequence: Synthetic peptide
  Seed: RMCSLMQGSTLPRRSGAAGA
RMYSLMQPSTVPRRSGAAGA

SEQ ID NO: 132377 - protein, 20 aa, Artificial Sequence
  Description of Artificial Sequence: Synthetic peptide
  Seed: RMCSLMQGSTLPRRSGAAGA
RMYSLMQSSTAPRRSGAAGA

SEQ ID NO: 132378 - protein, 20 aa, Artificial Sequence
  Description of Artificial Sequence: Synthetic peptide
  Seed: RMCSLMQGSTLPRRSGAAGA
RMYSLMQSSTGPRRSGAAGA

SEQ ID NO: 132379 - protein, 20 aa, Artificial Sequence
  Description of Artificial Sequence: Synthetic peptide
  Seed: RMCSLMQGSTLPRRSGAAGA
RMYSLMQSSTIPRRSGAAGA

SEQ ID NO: 132380 - protein, 20 aa, Artificial Sequence
  Description of Artificial Sequence: Synthetic peptide
  Seed: RMCSLMQGSTLPRRSGAAGA
RMYSLMQSSTLPRRSGAAGA

SEQ ID NO: 132381 - protein, 20 aa, Artificial Sequence
  Description of Artificial Sequence: Synthetic peptide
  Seed: RMCSLMQGSTLPRRSGAAGA
RMYSLMQSSTMPRRSGAAGA

SEQ ID NO: 132382 - protein, 20 aa, Artificial Sequence
  Description of Artificial Sequence: Synthetic peptide
  Seed: RMCSLMQGSTLPRRSGAAGA
RMYSLMQSSTSPRRSGAAGA

SEQ ID NO: 132383 - protein, 20 aa, Artificial Sequence
  Description of Artificial Sequence: Synthetic peptide
  Seed: RMCSLMQGSTLPRRSGAAGA
RMYSLMQSSTTPRRSGAAGA

SEQ ID NO: 132384 - protein, 20 aa, Artificial Sequence
  Description of Artificial Sequence: Synthetic peptide
  Seed: RMCSLMQGSTLPRRSGAAGA
RMYSLMQSSTVPRRSGAAGA

SEQ ID NO: 132385 - protein, 20 aa, Artificial Sequence
  Description of Artificial Sequence: Synthetic peptide
  Seed: RMCSLMQGSTLPRRSGAAGA
RMYSLMQTSTAPRRSGAAGA

SEQ ID NO: 132386 - protein, 20 aa, Artificial Sequence
  Description of Artificial Sequence: Synthetic peptide
  Seed: RMCSLMQGSTLPRRSGAAGA
RMYSLMQTSTIPRRSGAAGA

SEQ ID NO: 132387 - protein, 20 aa, Artificial Sequence
  Description of Artificial Sequence: Synthetic peptide
  Seed: RMCSLMQGSTLPRRSGAAGA
RMYSLMQTSTLPRRSGAAGA

SEQ ID NO: 132388 - protein, 20 aa, Artificial Sequence
  Description of Artificial Sequence: Synthetic peptide
  Seed: RMCSLMQGSTLPRRSGAAGA
RMYSLMQTSTMPRRSGAAGA

SEQ ID NO: 132389 - protein, 20 aa, Artificial Sequence
  Description of Artificial Sequence: Synthetic peptide
  Seed: RMCSLMQGSTLPRRSGAAGA
RMYSLMQTSTTPRRSGAAGA

SEQ ID NO: 132390 - protein, 20 aa, Artificial Sequence
  Description of Artificial Sequence: Synthetic peptide
  Seed: RMCSLMQGSTLPRRSGAAGA
RMYSLMQTSTVPRRSGAAGA

SEQ ID NO: 132391 - protein, 20 aa, Artificial Sequence
  Description of Artificial Sequence: Synthetic peptide
  Seed: RMCSLMQGSTLPRRSGAAGA
RMYSLMQVSTAPRRSGAAGA

SEQ ID NO: 132392 - protein, 20 aa, Artificial Sequence
  Description of Artificial Sequence: Synthetic peptide
  Seed: RMCSLMQGSTLPRRSGAAGA
RMYSLMQVSTIPRRSGAAGA

SEQ ID NO: 132393 - protein, 20 aa, Artificial Sequence
  Description of Artificial Sequence: Synthetic peptide
  Seed: RMCSLMQGSTLPRRSGAAGA
RMYSLMQVSTLPRRSGAAGA

SEQ ID NO: 132394 - protein, 20 aa, Artificial Sequence
  Description of Artificial Sequence: Synthetic peptide
  Seed: RMCSLMQGSTLPRRSGAAGA
RMYSLMQVSTMPRRSGAAGA

SEQ ID NO: 132395 - protein, 20 aa, Artificial Sequence
  Description of Artificial Sequence: Synthetic peptide
  Seed: RMCSLMQGSTLPRRSGAAGA
RMYSLMQVSTVPRRSGAAGA

SEQ ID NO: 132396 - protein, 20 aa, Artificial Sequence
  Description of Artificial Sequence: Synthetic peptide
  Seed: RMCSLMQGSTLPRRSGAAGA
RMYSLNQASTIPRRSGAAGA

SEQ ID NO: 132397 - protein, 20 aa, Artificial Sequence
  Description of Artificial Sequence: Synthetic peptide
  Seed: RMCSLMQGSTLPRRSGAAGA
RMYSLNQASTLPRRSGAAGA

SEQ ID NO: 132398 - protein, 20 aa, Artificial Sequence
  Description of Artificial Sequence: Synthetic peptide
  Seed: RMCSLMQGSTLPRRSGAAGA
RMYSLNQASTVPRRSGAAGA

SEQ ID NO: 132399 - protein, 20 aa, Artificial Sequence
  Description of Artificial Sequence: Synthetic peptide
  Seed: RMCSLMQGSTLPRRSGAAGA
RMYSLQQASTAPRRSGAAGA

SEQ ID NO: 132400 - protein, 20 aa, Artificial Sequence
  Description of Artificial Sequence: Synthetic peptide
  Seed: RMCSLMQGSTLPRRSGAAGA
RMYSLQQASTIPRRSGAAGA

SEQ ID NO: 132401 - protein, 20 aa, Artificial Sequence
  Description of Artificial Sequence: Synthetic peptide
  Seed: RMCSLMQGSTLPRRSGAAGA
RMYSLQQASTLPRRSGAAGA

SEQ ID NO: 132402 - protein, 20 aa, Artificial Sequence
  Description of Artificial Sequence: Synthetic peptide
  Seed: RMCSLMQGSTLPRRSGAAGA
RMYSLQQASTMPRRSGAAGA

SEQ ID NO: 132403 - protein, 20 aa, Artificial Sequence
  Description of Artificial Sequence: Synthetic peptide
  Seed: RMCSLMQGSTLPRRSGAAGA
RMYSLQQASTSPRRSGAAGA

SEQ ID NO: 132404 - protein, 20 aa, Artificial Sequence
  Description of Artificial Sequence: Synthetic peptide
  Seed: RMCSLMQGSTLPRRSGAAGA
RMYSLQQASTTPRRSGAAGA

SEQ ID NO: 132405 - protein, 20 aa, Artificial Sequence
  Description of Artificial Sequence: Synthetic peptide
  Seed: RMCSLMQGSTLPRRSGAAGA
RMYSLQQASTVPRRSGAAGA

SEQ ID NO: 132406 - protein, 20 aa, Artificial Sequence
  Description of Artificial Sequence: Synthetic peptide
  Seed: RMCSLMQGSTLPRRSGAAGA
RMYSLQQGSTAPRRSGAAGA

SEQ ID NO: 132407 - protein, 20 aa, Artificial Sequence
  Description of Artificial Sequence: Synthetic peptide
  Seed: RMCSLMQGSTLPRRSGAAGA
RMYSLQQGSTIPRRSGAAGA

SEQ ID NO: 132408 - protein, 20 aa, Artificial Sequence
  Description of Artificial Sequence: Synthetic peptide
  Seed: RMCSLMQGSTLPRRSGAAGA
RMYSLQQGSTLPRRSGAAGA

SEQ ID NO: 132409 - protein, 20 aa, Artificial Sequence
  Description of Artificial Sequence: Synthetic peptide
  Seed: RMCSLMQGSTLPRRSGAAGA
RMYSLQQGSTVPRRSGAAGA

SEQ ID NO: 132410 - protein, 20 aa, Artificial Sequence
  Description of Artificial Sequence: Synthetic peptide
  Seed: RMCSLMQGSTLPRRSGAAGA
RMYSLQQPSTIPRRSGAAGA

SEQ ID NO: 132411 - protein, 20 aa, Artificial Sequence
  Description of Artificial Sequence: Synthetic peptide
  Seed: RMCSLMQGSTLPRRSGAAGA
RMYSLQQPSTLPRRSGAAGA

SEQ ID NO: 132412 - protein, 20 aa, Artificial Sequence
  Description of Artificial Sequence: Synthetic peptide
  Seed: RMCSLMQGSTLPRRSGAAGA
RMYSLQQPSTVPRRSGAAGA

SEQ ID NO: 132413 - protein, 20 aa, Artificial Sequence
  Description of Artificial Sequence: Synthetic peptide
  Seed: RMCSLMQGSTLPRRSGAAGA
RMYSLQQSSTAPRRSGAAGA

SEQ ID NO: 132414 - protein, 20 aa, Artificial Sequence
  Description of Artificial Sequence: Synthetic peptide
  Seed: RMCSLMQGSTLPRRSGAAGA
RMYSLQQSSTIPRRSGAAGA

SEQ ID NO: 132415 - protein, 20 aa, Artificial Sequence
  Description of Artificial Sequence: Synthetic peptide
  Seed: RMCSLMQGSTLPRRSGAAGA
RMYSLQQSSTLPRRSGAAGA

SEQ ID NO: 132416 - protein, 20 aa, Artificial Sequence
  Description of Artificial Sequence: Synthetic peptide
  Seed: RMCSLMQGSTLPRRSGAAGA
RMYSLQQSSTVPRRSGAAGA

SEQ ID NO: 132417 - protein, 20 aa, Artificial Sequence
  Description of Artificial Sequence: Synthetic peptide
  Seed: RMCSLMQGSTLPRRSGAAGA
RMYSLSQASTAPRRSGAAGA

SEQ ID NO: 132418 - protein, 20 aa, Artificial Sequence
  Description of Artificial Sequence: Synthetic peptide
  Seed: RMCSLMQGSTLPRRSGAAGA
RMYSLSQASTIPRRSGAAGA

SEQ ID NO: 132419 - protein, 20 aa, Artificial Sequence
  Description of Artificial Sequence: Synthetic peptide
  Seed: RMCSLMQGSTLPRRSGAAGA
RMYSLSQASTLPRRSGAAGA

SEQ ID NO: 132420 - protein, 20 aa, Artificial Sequence
  Description of Artificial Sequence: Synthetic peptide
  Seed: RMCSLMQGSTLPRRSGAAGA
RMYSLSQASTVPRRSGAAGA

SEQ ID NO: 132421 - protein, 20 aa, Artificial Sequence
  Description of Artificial Sequence: Synthetic peptide
  Seed: RMCSLMQGSTLPRRSGAAGA
RMYSLSQGSTIPRRSGAAGA

SEQ ID NO: 132422 - protein, 20 aa, Artificial Sequence
  Description of Artificial Sequence: Synthetic peptide
  Seed: RMCSLMQGSTLPRRSGAAGA
RMYSLSQGSTVPRRSGAAGA

SEQ ID NO: 132423 - protein, 20 aa, Artificial Sequence
  Description of Artificial Sequence: Synthetic peptide
  Seed: RMCSLMQGSTLPRRSGAAGA
RMYSLSQSSTVPRRSGAAGA

SEQ ID NO: 132424 - protein, 20 aa, Artificial Sequence
  Description of Artificial Sequence: Synthetic peptide
  Seed: RMCSLMQGSTLPRRSGAAGA
RMYSLTQASTIPRRSGAAGA

SEQ ID NO: 132425 - protein, 20 aa, Artificial Sequence
  Description of Artificial Sequence: Synthetic peptide
  Seed: RMCSLMQGSTLPRRSGAAGA
RMYSLTQASTLPRRSGAAGA

SEQ ID NO: 132426 - protein, 20 aa, Artificial Sequence
  Description of Artificial Sequence: Synthetic peptide
  Seed: RMCSLMQGSTLPRRSGAAGA
RMYSLTQASTVPRRSGAAGA

SEQ ID NO: 132427 - protein, 20 aa, Artificial Sequence
  Description of Artificial Sequence: Synthetic peptide
  Seed: RMCSLMQGSTLPRRSGAAGA
RMYSLVQASTAPRRSGAAGA

SEQ ID NO: 132428 - protein, 20 aa, Artificial Sequence
  Description of Artificial Sequence: Synthetic peptide
  Seed: RMCSLMQGSTLPRRSGAAGA
RMYSLVQASTIPRRSGAAGA

SEQ ID NO: 132429 - protein, 20 aa, Artificial Sequence
  Description of Artificial Sequence: Synthetic peptide
  Seed: RMCSLMQGSTLPRRSGAAGA
RMYSLVQASTLPRRSGAAGA

SEQ ID NO: 132430 - protein, 20 aa, Artificial Sequence
  Description of Artificial Sequence: Synthetic peptide
  Seed: RMCSLMQGSTLPRRSGAAGA
RMYSLVQASTMPRRSGAAGA

SEQ ID NO: 132431 - protein, 20 aa, Artificial Sequence
  Description of Artificial Sequence: Synthetic peptide
  Seed: RMCSLMQGSTLPRRSGAAGA
RMYSLVQASTSPRRSGAAGA

SEQ ID NO: 132432 - protein, 20 aa, Artificial Sequence
  Description of Artificial Sequence: Synthetic peptide
  Seed: RMCSLMQGSTLPRRSGAAGA
RMYSLVQASTTPRRSGAAGA

SEQ ID NO: 132433 - protein, 20 aa, Artificial Sequence
  Description of Artificial Sequence: Synthetic peptide
  Seed: RMCSLMQGSTLPRRSGAAGA
RMYSLVQASTVPRRSGAAGA

SEQ ID NO: 132434 - protein, 20 aa, Artificial Sequence
  Description of Artificial Sequence: Synthetic peptide
  Seed: RMCSLMQGSTLPRRSGAAGA
RMYSLVQGSTAPRRSGAAGA

SEQ ID NO: 132435 - protein, 20 aa, Artificial Sequence
  Description of Artificial Sequence: Synthetic peptide
  Seed: RMCSLMQGSTLPRRSGAAGA
RMYSLVQGSTIPRRSGAAGA

SEQ ID NO: 132436 - protein, 20 aa, Artificial Sequence
  Description of Artificial Sequence: Synthetic peptide
  Seed: RMCSLMQGSTLPRRSGAAGA
RMYSLVQGSTLPRRSGAAGA

SEQ ID NO: 132437 - protein, 20 aa, Artificial Sequence
  Description of Artificial Sequence: Synthetic peptide
  Seed: RMCSLMQGSTLPRRSGAAGA
RMYSLVQGSTVPRRSGAAGA

SEQ ID NO: 132438 - protein, 20 aa, Artificial Sequence
  Description of Artificial Sequence: Synthetic peptide
  Seed: RMCSLMQGSTLPRRSGAAGA
RMYSLVQPSTAPRRSGAAGA

SEQ ID NO: 132439 - protein, 20 aa, Artificial Sequence
  Description of Artificial Sequence: Synthetic peptide
  Seed: RMCSLMQGSTLPRRSGAAGA
RMYSLVQPSTIPRRSGAAGA

SEQ ID NO: 132440 - protein, 20 aa, Artificial Sequence
  Description of Artificial Sequence: Synthetic peptide
  Seed: RMCSLMQGSTLPRRSGAAGA
RMYSLVQPSTLPRRSGAAGA

SEQ ID NO: 132441 - protein, 20 aa, Artificial Sequence
  Description of Artificial Sequence: Synthetic peptide
  Seed: RMCSLMQGSTLPRRSGAAGA
RMYSLVQPSTVPRRSGAAGA

SEQ ID NO: 132442 - protein, 20 aa, Artificial Sequence
  Description of Artificial Sequence: Synthetic peptide
  Seed: RMCSLMQGSTLPRRSGAAGA
RMYSLVQSSTAPRRSGAAGA

SEQ ID NO: 132443 - protein, 20 aa, Artificial Sequence
  Description of Artificial Sequence: Synthetic peptide
  Seed: RMCSLMQGSTLPRRSGAAGA
RMYSLVQSSTIPRRSGAAGA

SEQ ID NO: 132444 - protein, 20 aa, Artificial Sequence
  Description of Artificial Sequence: Synthetic peptide
  Seed: RMCSLMQGSTLPRRSGAAGA
RMYSLVQSSTLPRRSGAAGA

SEQ ID NO: 132445 - protein, 20 aa, Artificial Sequence
  Description of Artificial Sequence: Synthetic peptide
  Seed: RMCSLMQGSTLPRRSGAAGA
RMYSLVQSSTVPRRSGAAGA

SEQ ID NO: 132446 - protein, 20 aa, Artificial Sequence
  Description of Artificial Sequence: Synthetic peptide
  Seed: RMCSLMQGSTLPRRSGAAGA
RMCSLMFGSALARRAGAAGA

SEQ ID NO: 132447 - protein, 20 aa, Artificial Sequence
  Description of Artificial Sequence: Synthetic peptide
  Seed: RMCSLMQGSTLPRRSGAAGA
RMCSLMFGSALARRIGAAGA

SEQ ID NO: 132448 - protein, 20 aa, Artificial Sequence
  Description of Artificial Sequence: Synthetic peptide
  Seed: RMCSLMQGSTLPRRSGAAGA
RMCSLMFGSALARRLGAAGA

SEQ ID NO: 132449 - protein, 20 aa, Artificial Sequence
  Description of Artificial Sequence: Synthetic peptide
  Seed: RMCSLMQGSTLPRRSGAAGA
RMCSLMFGSALARRMGAAGA

SEQ ID NO: 132450 - protein, 20 aa, Artificial Sequence
  Description of Artificial Sequence: Synthetic peptide
  Seed: RMCSLMQGSTLPRRSGAAGA
RMCSLMFGSALARRNGAAGA

SEQ ID NO: 132451 - protein, 20 aa, Artificial Sequence
  Description of Artificial Sequence: Synthetic peptide
  Seed: RMCSLMQGSTLPRRSGAAGA
RMCSLMFGSALARRSGAAGA

SEQ ID NO: 132452 - protein, 20 aa, Artificial Sequence
  Description of Artificial Sequence: Synthetic peptide
  Seed: RMCSLMQGSTLPRRSGAAGA
RMCSLMFGSALARRTGAAGA

SEQ ID NO: 132453 - protein, 20 aa, Artificial Sequence
  Description of Artificial Sequence: Synthetic peptide
  Seed: RMCSLMQGSTLPRRSGAAGA
RMCSLMFGSALARRVGAAGA

SEQ ID NO: 132454 - protein, 20 aa, Artificial Sequence
  Description of Artificial Sequence: Synthetic peptide
  Seed: RMCSLMQGSTLPRRSGAAGA
RMCSLMFGSALPRRAGAAGA

SEQ ID NO: 132455 - protein, 20 aa, Artificial Sequence
  Description of Artificial Sequence: Synthetic peptide
  Seed: RMCSLMQGSTLPRRSGAAGA
RMCSLMFGSALPRRNGAAGA

SEQ ID NO: 132456 - protein, 20 aa, Artificial Sequence
  Description of Artificial Sequence: Synthetic peptide
  Seed: RMCSLMQGSTLPRRSGAAGA
RMCSLMFGSALPRRVGAAGA

SEQ ID NO: 132457 - protein, 20 aa, Artificial Sequence
  Description of Artificial Sequence: Synthetic peptide
  Seed: RMCSLMQGSTLPRRSGAAGA
RMCSLMFGSALSRRAGAAGA

SEQ ID NO: 132458 - protein, 20 aa, Artificial Sequence
  Description of Artificial Sequence: Synthetic peptide
  Seed: RMCSLMQGSTLPRRSGAAGA
RMCSLMFGSALSRRIGAAGA

SEQ ID NO: 132459 - protein, 20 aa, Artificial Sequence
  Description of Artificial Sequence: Synthetic peptide
  Seed: RMCSLMQGSTLPRRSGAAGA
RMCSLMFGSALSRRNGAAGA

SEQ ID NO: 132460 - protein, 20 aa, Artificial Sequence
  Description of Artificial Sequence: Synthetic peptide
  Seed: RMCSLMQGSTLPRRSGAAGA
RMCSLMFGSALSRRSGAAGA

SEQ ID NO: 132461 - protein, 20 aa, Artificial Sequence
  Description of Artificial Sequence: Synthetic peptide
  Seed: RMCSLMQGSTLPRRSGAAGA
RMCSLMFGSALSRRVGAAGA

SEQ ID NO: 132462 - protein, 20 aa, Artificial Sequence
  Description of Artificial Sequence: Synthetic peptide
  Seed: RMCSLMQGSTLPRRSGAAGA
RMCSLMFGSALTRRAGAAGA

SEQ ID NO: 132463 - protein, 20 aa, Artificial Sequence
  Description of Artificial Sequence: Synthetic peptide
  Seed: RMCSLMQGSTLPRRSGAAGA
RMCSLMFGSALTRRIGAAGA

SEQ ID NO: 132464 - protein, 20 aa, Artificial Sequence
  Description of Artificial Sequence: Synthetic peptide
  Seed: RMCSLMQGSTLPRRSGAAGA
RMCSLMFGSALTRRNGAAGA

SEQ ID NO: 132465 - protein, 20 aa, Artificial Sequence
  Description of Artificial Sequence: Synthetic peptide
  Seed: RMCSLMQGSTLPRRSGAAGA
RMCSLMFGSALTRRSGAAGA

SEQ ID NO: 132466 - protein, 20 aa, Artificial Sequence
  Description of Artificial Sequence: Synthetic peptide
  Seed: RMCSLMQGSTLPRRSGAAGA
RMCSLMFGSALTRRVGAAGA

SEQ ID NO: 132467 - protein, 20 aa, Artificial Sequence
  Description of Artificial Sequence: Synthetic peptide
  Seed: RMCSLMQGSTLPRRSGAAGA
RMCSLMFGSALVRRAGAAGA

SEQ ID NO: 132468 - protein, 20 aa, Artificial Sequence
  Description of Artificial Sequence: Synthetic peptide
  Seed: RMCSLMQGSTLPRRSGAAGA
RMCSLMFGSALVRRNGAAGA

SEQ ID NO: 132469 - protein, 20 aa, Artificial Sequence
  Description of Artificial Sequence: Synthetic peptide
  Seed: RMCSLMQGSTLPRRSGAAGA
RMCSLMFGSILARRAGAAGA

SEQ ID NO: 132470 - protein, 20 aa, Artificial Sequence
  Description of Artificial Sequence: Synthetic peptide
  Seed: RMCSLMQGSTLPRRSGAAGA
RMCSLMFGSILARRGGAAGA

SEQ ID NO: 132471 - protein, 20 aa, Artificial Sequence
  Description of Artificial Sequence: Synthetic peptide
  Seed: RMCSLMQGSTLPRRSGAAGA
RMCSLMFGSILARRIGAAGA

SEQ ID NO: 132472 - protein, 20 aa, Artificial Sequence
  Description of Artificial Sequence: Synthetic peptide
  Seed: RMCSLMQGSTLPRRSGAAGA
RMCSLMFGSILARRLGAAGA

SEQ ID NO: 132473 - protein, 20 aa, Artificial Sequence
  Description of Artificial Sequence: Synthetic peptide
  Seed: RMCSLMQGSTLPRRSGAAGA
RMCSLMFGSILARRMGAAGA

SEQ ID NO: 132474 - protein, 20 aa, Artificial Sequence
  Description of Artificial Sequence: Synthetic peptide
  Seed: RMCSLMQGSTLPRRSGAAGA
RMCSLMFGSILARRNGAAGA

SEQ ID NO: 132475 - protein, 20 aa, Artificial Sequence
  Description of Artificial Sequence: Synthetic peptide
  Seed: RMCSLMQGSTLPRRSGAAGA
RMCSLMFGSILARRSGAAGA

SEQ ID NO: 132476 - protein, 20 aa, Artificial Sequence
  Description of Artificial Sequence: Synthetic peptide
  Seed: RMCSLMQGSTLPRRSGAAGA
RMCSLMFGSILARRTGAAGA

SEQ ID NO: 132477 - protein, 20 aa, Artificial Sequence
  Description of Artificial Sequence: Synthetic peptide
  Seed: RMCSLMQGSTLPRRSGAAGA
RMCSLMFGSILARRVGAAGA

SEQ ID NO: 132478 - protein, 20 aa, Artificial Sequence
  Description of Artificial Sequence: Synthetic peptide
  Seed: RMCSLMQGSTLPRRSGAAGA
RMCSLMFGSILGRRAGAAGA

SEQ ID NO: 132479 - protein, 20 aa, Artificial Sequence
  Description of Artificial Sequence: Synthetic peptide
  Seed: RMCSLMQGSTLPRRSGAAGA
RMCSLMFGSILPRRAGAAGA

SEQ ID NO: 132480 - protein, 20 aa, Artificial Sequence
  Description of Artificial Sequence: Synthetic peptide
  Seed: RMCSLMQGSTLPRRSGAAGA
RMCSLMFGSILPRRIGAAGA

SEQ ID NO: 132481 - protein, 20 aa, Artificial Sequence
  Description of Artificial Sequence: Synthetic peptide
  Seed: RMCSLMQGSTLPRRSGAAGA
RMCSLMFGSILPRRLGAAGA

SEQ ID NO: 132482 - protein, 20 aa, Artificial Sequence
  Description of Artificial Sequence: Synthetic peptide
  Seed: RMCSLMQGSTLPRRSGAAGA
RMCSLMFGSILPRRNGAAGA

SEQ ID NO: 132483 - protein, 20 aa, Artificial Sequence
  Description of Artificial Sequence: Synthetic peptide
  Seed: RMCSLMQGSTLPRRSGAAGA
RMCSLMFGSILPRRSGAAGA

SEQ ID NO: 132484 - protein, 20 aa, Artificial Sequence
  Description of Artificial Sequence: Synthetic peptide
  Seed: RMCSLMQGSTLPRRSGAAGA
RMCSLMFGSILPRRTGAAGA

SEQ ID NO: 132485 - protein, 20 aa, Artificial Sequence
  Description of Artificial Sequence: Synthetic peptide
  Seed: RMCSLMQGSTLPRRSGAAGA
RMCSLMFGSILPRRVGAAGA

SEQ ID NO: 132486 - protein, 20 aa, Artificial Sequence
  Description of Artificial Sequence: Synthetic peptide
  Seed: RMCSLMQGSTLPRRSGAAGA
RMCSLMFGSILSRRAGAAGA

SEQ ID NO: 132487 - protein, 20 aa, Artificial Sequence
  Description of Artificial Sequence: Synthetic peptide
  Seed: RMCSLMQGSTLPRRSGAAGA
RMCSLMFGSILSRRIGAAGA

SEQ ID NO: 132488 - protein, 20 aa, Artificial Sequence
  Description of Artificial Sequence: Synthetic peptide
  Seed: RMCSLMQGSTLPRRSGAAGA
RMCSLMFGSILSRRLGAAGA

SEQ ID NO: 132489 - protein, 20 aa, Artificial Sequence
  Description of Artificial Sequence: Synthetic peptide
  Seed: RMCSLMQGSTLPRRSGAAGA
RMCSLMFGSILSRRNGAAGA

SEQ ID NO: 132490 - protein, 20 aa, Artificial Sequence
  Description of Artificial Sequence: Synthetic peptide
  Seed: RMCSLMQGSTLPRRSGAAGA
RMCSLMFGSILSRRSGAAGA

SEQ ID NO: 132491 - protein, 20 aa, Artificial Sequence
  Description of Artificial Sequence: Synthetic peptide
  Seed: RMCSLMQGSTLPRRSGAAGA
RMCSLMFGSILSRRTGAAGA

SEQ ID NO: 132492 - protein, 20 aa, Artificial Sequence
  Description of Artificial Sequence: Synthetic peptide
  Seed: RMCSLMQGSTLPRRSGAAGA
RMCSLMFGSILSRRVGAAGA

SEQ ID NO: 132493 - protein, 20 aa, Artificial Sequence
  Description of Artificial Sequence: Synthetic peptide
  Seed: RMCSLMQGSTLPRRSGAAGA
RMCSLMFGSILTRRAGAAGA

SEQ ID NO: 132494 - protein, 20 aa, Artificial Sequence
  Description of Artificial Sequence: Synthetic peptide
  Seed: RMCSLMQGSTLPRRSGAAGA
RMCSLMFGSILTRRIGAAGA

SEQ ID NO: 132495 - protein, 20 aa, Artificial Sequence
  Description of Artificial Sequence: Synthetic peptide
  Seed: RMCSLMQGSTLPRRSGAAGA
RMCSLMFGSILTRRLGAAGA

SEQ ID NO: 132496 - protein, 20 aa, Artificial Sequence
  Description of Artificial Sequence: Synthetic peptide
  Seed: RMCSLMQGSTLPRRSGAAGA
RMCSLMFGSILTRRNGAAGA

SEQ ID NO: 132497 - protein, 20 aa, Artificial Sequence
  Description of Artificial Sequence: Synthetic peptide
  Seed: RMCSLMQGSTLPRRSGAAGA
RMCSLMFGSILTRRSGAAGA

SEQ ID NO: 132498 - protein, 20 aa, Artificial Sequence
  Description of Artificial Sequence: Synthetic peptide
  Seed: RMCSLMQGSTLPRRSGAAGA
RMCSLMFGSILTRRTGAAGA

SEQ ID NO: 132499 - protein, 20 aa, Artificial Sequence
  Description of Artificial Sequence: Synthetic peptide
  Seed: RMCSLMQGSTLPRRSGAAGA
RMCSLMFGSILTRRVGAAGA

SEQ ID NO: 132500 - protein, 20 aa, Artificial Sequence
  Description of Artificial Sequence: Synthetic peptide
  Seed: RMCSLMQGSTLPRRSGAAGA
RMCSLMFGSILVRRAGAAGA

SEQ ID NO: 132501 - protein, 20 aa, Artificial Sequence
  Description of Artificial Sequence: Synthetic peptide
  Seed: RMCSLMQGSTLPRRSGAAGA
RMCSLMFGSILVRRNGAAGA

SEQ ID NO: 132502 - protein, 20 aa, Artificial Sequence
  Description of Artificial Sequence: Synthetic peptide
  Seed: RMCSLMQGSTLPRRSGAAGA
RMCSLMFGSILVRRSGAAGA

SEQ ID NO: 132503 - protein, 20 aa, Artificial Sequence
  Description of Artificial Sequence: Synthetic peptide
  Seed: RMCSLMQGSTLPRRSGAAGA
RMCSLMFGSILVRRVGAAGA

SEQ ID NO: 132504 - protein, 20 aa, Artificial Sequence
  Description of Artificial Sequence: Synthetic peptide
  Seed: RMCSLMQGSTLPRRSGAAGA
RMCSLMFGSLLARRAGAAGA

SEQ ID NO: 132505 - protein, 20 aa, Artificial Sequence
  Description of Artificial Sequence: Synthetic peptide
  Seed: RMCSLMQGSTLPRRSGAAGA
RMCSLMFGSLLARRGGAAGA

SEQ ID NO: 132506 - protein, 20 aa, Artificial Sequence
  Description of Artificial Sequence: Synthetic peptide
  Seed: RMCSLMQGSTLPRRSGAAGA
RMCSLMFGSLLARRIGAAGA

SEQ ID NO: 132507 - protein, 20 aa, Artificial Sequence
  Description of Artificial Sequence: Synthetic peptide
  Seed: RMCSLMQGSTLPRRSGAAGA
RMCSLMFGSLLARRLGAAGA

SEQ ID NO: 132508 - protein, 20 aa, Artificial Sequence
  Description of Artificial Sequence: Synthetic peptide
  Seed: RMCSLMQGSTLPRRSGAAGA
RMCSLMFGSLLARRMGAAGA

SEQ ID NO: 132509 - protein, 20 aa, Artificial Sequence
  Description of Artificial Sequence: Synthetic peptide
  Seed: RMCSLMQGSTLPRRSGAAGA
RMCSLMFGSLLARRNGAAGA

SEQ ID NO: 132510 - protein, 20 aa, Artificial Sequence
  Description of Artificial Sequence: Synthetic peptide
  Seed: RMCSLMQGSTLPRRSGAAGA
RMCSLMFGSLLARRSGAAGA

SEQ ID NO: 132511 - protein, 20 aa, Artificial Sequence
  Description of Artificial Sequence: Synthetic peptide
  Seed: RMCSLMQGSTLPRRSGAAGA
RMCSLMFGSLLARRTGAAGA

SEQ ID NO: 132512 - protein, 20 aa, Artificial Sequence
  Description of Artificial Sequence: Synthetic peptide
  Seed: RMCSLMQGSTLPRRSGAAGA
RMCSLMFGSLLARRVGAAGA

SEQ ID NO: 132513 - protein, 20 aa, Artificial Sequence
  Description of Artificial Sequence: Synthetic peptide
  Seed: RMCSLMQGSTLPRRSGAAGA
RMCSLMFGSLLGRRAGAAGA

SEQ ID NO: 132514 - protein, 20 aa, Artificial Sequence
  Description of Artificial Sequence: Synthetic peptide
  Seed: RMCSLMQGSTLPRRSGAAGA
RMCSLMFGSLLGRRVGAAGA

SEQ ID NO: 132515 - protein, 20 aa, Artificial Sequence
  Description of Artificial Sequence: Synthetic peptide
  Seed: RMCSLMQGSTLPRRSGAAGA
RMCSLMFGSLLIRRAGAAGA

SEQ ID NO: 132516 - protein, 20 aa, Artificial Sequence
  Description of Artificial Sequence: Synthetic peptide
  Seed: RMCSLMQGSTLPRRSGAAGA
RMCSLMFGSLLPRRAGAAGA

SEQ ID NO: 132517 - protein, 20 aa, Artificial Sequence
  Description of Artificial Sequence: Synthetic peptide
  Seed: RMCSLMQGSTLPRRSGAAGA
RMCSLMFGSLLPRRIGAAGA

SEQ ID NO: 132518 - protein, 20 aa, Artificial Sequence
  Description of Artificial Sequence: Synthetic peptide
  Seed: RMCSLMQGSTLPRRSGAAGA
RMCSLMFGSLLPRRLGAAGA

SEQ ID NO: 132519 - protein, 20 aa, Artificial Sequence
  Description of Artificial Sequence: Synthetic peptide
  Seed: RMCSLMQGSTLPRRSGAAGA
RMCSLMFGSLLPRRMGAAGA

SEQ ID NO: 132520 - protein, 20 aa, Artificial Sequence
  Description of Artificial Sequence: Synthetic peptide
  Seed: RMCSLMQGSTLPRRSGAAGA
RMCSLMFGSLLPRRNGAAGA

SEQ ID NO: 132521 - protein, 20 aa, Artificial Sequence
  Description of Artificial Sequence: Synthetic peptide
  Seed: RMCSLMQGSTLPRRSGAAGA
RMCSLMFGSLLPRRSGAAGA

SEQ ID NO: 132522 - protein, 20 aa, Artificial Sequence
  Description of Artificial Sequence: Synthetic peptide
  Seed: RMCSLMQGSTLPRRSGAAGA
RMCSLMFGSLLPRRTGAAGA

SEQ ID NO: 132523 - protein, 20 aa, Artificial Sequence
  Description of Artificial Sequence: Synthetic peptide
  Seed: RMCSLMQGSTLPRRSGAAGA
RMCSLMFGSLLPRRVGAAGA

SEQ ID NO: 132524 - protein, 20 aa, Artificial Sequence
  Description of Artificial Sequence: Synthetic peptide
  Seed: RMCSLMQGSTLPRRSGAAGA
RMCSLMFGSLLSRRAGAAGA

SEQ ID NO: 132525 - protein, 20 aa, Artificial Sequence
  Description of Artificial Sequence: Synthetic peptide
  Seed: RMCSLMQGSTLPRRSGAAGA
RMCSLMFGSLLSRRIGAAGA

SEQ ID NO: 132526 - protein, 20 aa, Artificial Sequence
  Description of Artificial Sequence: Synthetic peptide
  Seed: RMCSLMQGSTLPRRSGAAGA
RMCSLMFGSLLSRRLGAAGA

SEQ ID NO: 132527 - protein, 20 aa, Artificial Sequence
  Description of Artificial Sequence: Synthetic peptide
  Seed: RMCSLMQGSTLPRRSGAAGA
RMCSLMFGSLLSRRMGAAGA

SEQ ID NO: 132528 - protein, 20 aa, Artificial Sequence
  Description of Artificial Sequence: Synthetic peptide
  Seed: RMCSLMQGSTLPRRSGAAGA
RMCSLMFGSLLSRRNGAAGA

SEQ ID NO: 132529 - protein, 20 aa, Artificial Sequence
  Description of Artificial Sequence: Synthetic peptide
  Seed: RMCSLMQGSTLPRRSGAAGA
RMCSLMFGSLLSRRSGAAGA

SEQ ID NO: 132530 - protein, 20 aa, Artificial Sequence
  Description of Artificial Sequence: Synthetic peptide
  Seed: RMCSLMQGSTLPRRSGAAGA
RMCSLMFGSLLSRRTGAAGA

SEQ ID NO: 132531 - protein, 20 aa, Artificial Sequence
  Description of Artificial Sequence: Synthetic peptide
  Seed: RMCSLMQGSTLPRRSGAAGA
RMCSLMFGSLLSRRVGAAGA

SEQ ID NO: 132532 - protein, 20 aa, Artificial Sequence
  Description of Artificial Sequence: Synthetic peptide
  Seed: RMCSLMQGSTLPRRSGAAGA
RMCSLMFGSLLTRRAGAAGA

SEQ ID NO: 132533 - protein, 20 aa, Artificial Sequence
  Description of Artificial Sequence: Synthetic peptide
  Seed: RMCSLMQGSTLPRRSGAAGA
RMCSLMFGSLLTRRIGAAGA

SEQ ID NO: 132534 - protein, 20 aa, Artificial Sequence
  Description of Artificial Sequence: Synthetic peptide
  Seed: RMCSLMQGSTLPRRSGAAGA
RMCSLMFGSLLTRRLGAAGA

SEQ ID NO: 132535 - protein, 20 aa, Artificial Sequence
  Description of Artificial Sequence: Synthetic peptide
  Seed: RMCSLMQGSTLPRRSGAAGA
RMCSLMFGSLLTRRMGAAGA

SEQ ID NO: 132536 - protein, 20 aa, Artificial Sequence
  Description of Artificial Sequence: Synthetic peptide
  Seed: RMCSLMQGSTLPRRSGAAGA
RMCSLMFGSLLTRRNGAAGA

SEQ ID NO: 132537 - protein, 20 aa, Artificial Sequence
  Description of Artificial Sequence: Synthetic peptide
  Seed: RMCSLMQGSTLPRRSGAAGA
RMCSLMFGSLLTRRSGAAGA

SEQ ID NO: 132538 - protein, 20 aa, Artificial Sequence
  Description of Artificial Sequence: Synthetic peptide
  Seed: RMCSLMQGSTLPRRSGAAGA
RMCSLMFGSLLTRRTGAAGA

SEQ ID NO: 132539 - protein, 20 aa, Artificial Sequence
  Description of Artificial Sequence: Synthetic peptide
  Seed: RMCSLMQGSTLPRRSGAAGA
RMCSLMFGSLLTRRVGAAGA

SEQ ID NO: 132540 - protein, 20 aa, Artificial Sequence
  Description of Artificial Sequence: Synthetic peptide
  Seed: RMCSLMQGSTLPRRSGAAGA
RMCSLMFGSLLVRRAGAAGA

SEQ ID NO: 132541 - protein, 20 aa, Artificial Sequence
  Description of Artificial Sequence: Synthetic peptide
  Seed: RMCSLMQGSTLPRRSGAAGA
RMCSLMFGSLLVRRIGAAGA

SEQ ID NO: 132542 - protein, 20 aa, Artificial Sequence
  Description of Artificial Sequence: Synthetic peptide
  Seed: RMCSLMQGSTLPRRSGAAGA
RMCSLMFGSLLVRRNGAAGA

SEQ ID NO: 132543 - protein, 20 aa, Artificial Sequence
  Description of Artificial Sequence: Synthetic peptide
  Seed: RMCSLMQGSTLPRRSGAAGA
RMCSLMFGSLLVRRSGAAGA

SEQ ID NO: 132544 - protein, 20 aa, Artificial Sequence
  Description of Artificial Sequence: Synthetic peptide
  Seed: RMCSLMQGSTLPRRSGAAGA
RMCSLMFGSLLVRRTGAAGA

SEQ ID NO: 132545 - protein, 20 aa, Artificial Sequence
  Description of Artificial Sequence: Synthetic peptide
  Seed: RMCSLMQGSTLPRRSGAAGA
RMCSLMFGSLLVRRVGAAGA

SEQ ID NO: 132546 - protein, 20 aa, Artificial Sequence
  Description of Artificial Sequence: Synthetic peptide
  Seed: RMCSLMQGSTLPRRSGAAGA
RMCSLMFGSMLARRAGAAGA

SEQ ID NO: 132547 - protein, 20 aa, Artificial Sequence
  Description of Artificial Sequence: Synthetic peptide
  Seed: RMCSLMQGSTLPRRSGAAGA
RMCSLMFGSMLARRDGAAGA

SEQ ID NO: 132548 - protein, 20 aa, Artificial Sequence
  Description of Artificial Sequence: Synthetic peptide
  Seed: RMCSLMQGSTLPRRSGAAGA
RMCSLMFGSMLARRGGAAGA

SEQ ID NO: 132549 - protein, 20 aa, Artificial Sequence
  Description of Artificial Sequence: Synthetic peptide
  Seed: RMCSLMQGSTLPRRSGAAGA
RMCSLMFGSMLARRHGAAGA

SEQ ID NO: 132550 - protein, 20 aa, Artificial Sequence
  Description of Artificial Sequence: Synthetic peptide
  Seed: RMCSLMQGSTLPRRSGAAGA
RMCSLMFGSMLARRIGAAGA

SEQ ID NO: 132551 - protein, 20 aa, Artificial Sequence
  Description of Artificial Sequence: Synthetic peptide
  Seed: RMCSLMQGSTLPRRSGAAGA
RMCSLMFGSMLARRLGAAGA

SEQ ID NO: 132552 - protein, 20 aa, Artificial Sequence
  Description of Artificial Sequence: Synthetic peptide
  Seed: RMCSLMQGSTLPRRSGAAGA
RMCSLMFGSMLARRMGAAGA

SEQ ID NO: 132553 - protein, 20 aa, Artificial Sequence
  Description of Artificial Sequence: Synthetic peptide
  Seed: RMCSLMQGSTLPRRSGAAGA
RMCSLMFGSMLARRNGAAGA

SEQ ID NO: 132554 - protein, 20 aa, Artificial Sequence
  Description of Artificial Sequence: Synthetic peptide
  Seed: RMCSLMQGSTLPRRSGAAGA
RMCSLMFGSMLARRPGAAGA

SEQ ID NO: 132555 - protein, 20 aa, Artificial Sequence
  Description of Artificial Sequence: Synthetic peptide
  Seed: RMCSLMQGSTLPRRSGAAGA
RMCSLMFGSMLARRQGAAGA

SEQ ID NO: 132556 - protein, 20 aa, Artificial Sequence
  Description of Artificial Sequence: Synthetic peptide
  Seed: RMCSLMQGSTLPRRSGAAGA
RMCSLMFGSMLARRSGAAGA

SEQ ID NO: 132557 - protein, 20 aa, Artificial Sequence
  Description of Artificial Sequence: Synthetic peptide
  Seed: RMCSLMQGSTLPRRSGAAGA
RMCSLMFGSMLARRTGAAGA

SEQ ID NO: 132558 - protein, 20 aa, Artificial Sequence
  Description of Artificial Sequence: Synthetic peptide
  Seed: RMCSLMQGSTLPRRSGAAGA
RMCSLMFGSMLARRVGAAGA

SEQ ID NO: 132559 - protein, 20 aa, Artificial Sequence
  Description of Artificial Sequence: Synthetic peptide
  Seed: RMCSLMQGSTLPRRSGAAGA
RMCSLMFGSMLGRRAGAAGA

SEQ ID NO: 132560 - protein, 20 aa, Artificial Sequence
  Description of Artificial Sequence: Synthetic peptide
  Seed: RMCSLMQGSTLPRRSGAAGA
RMCSLMFGSMLGRRIGAAGA

SEQ ID NO: 132561 - protein, 20 aa, Artificial Sequence
  Description of Artificial Sequence: Synthetic peptide
  Seed: RMCSLMQGSTLPRRSGAAGA
RMCSLMFGSMLGRRLGAAGA

SEQ ID NO: 132562 - protein, 20 aa, Artificial Sequence
  Description of Artificial Sequence: Synthetic peptide
  Seed: RMCSLMQGSTLPRRSGAAGA
RMCSLMFGSMLGRRNGAAGA

SEQ ID NO: 132563 - protein, 20 aa, Artificial Sequence
  Description of Artificial Sequence: Synthetic peptide
  Seed: RMCSLMQGSTLPRRSGAAGA
RMCSLMFGSMLGRRSGAAGA

SEQ ID NO: 132564 - protein, 20 aa, Artificial Sequence
  Description of Artificial Sequence: Synthetic peptide
  Seed: RMCSLMQGSTLPRRSGAAGA
RMCSLMFGSMLGRRVGAAGA

SEQ ID NO: 132565 - protein, 20 aa, Artificial Sequence
  Description of Artificial Sequence: Synthetic peptide
  Seed: RMCSLMQGSTLPRRSGAAGA
RMCSLMFGSMLIRRAGAAGA

SEQ ID NO: 132566 - protein, 20 aa, Artificial Sequence
  Description of Artificial Sequence: Synthetic peptide
  Seed: RMCSLMQGSTLPRRSGAAGA
RMCSLMFGSMLIRRMGAAGA

SEQ ID NO: 132567 - protein, 20 aa, Artificial Sequence
  Description of Artificial Sequence: Synthetic peptide
  Seed: RMCSLMQGSTLPRRSGAAGA
RMCSLMFGSMLIRRNGAAGA

SEQ ID NO: 132568 - protein, 20 aa, Artificial Sequence
  Description of Artificial Sequence: Synthetic peptide
  Seed: RMCSLMQGSTLPRRSGAAGA
RMCSLMFGSMLIRRSGAAGA

SEQ ID NO: 132569 - protein, 20 aa, Artificial Sequence
  Description of Artificial Sequence: Synthetic peptide
  Seed: RMCSLMQGSTLPRRSGAAGA
RMCSLMFGSMLIRRVGAAGA

SEQ ID NO: 132570 - protein, 20 aa, Artificial Sequence
  Description of Artificial Sequence: Synthetic peptide
  Seed: RMCSLMQGSTLPRRSGAAGA
RMCSLMFGSMLNRRAGAAGA

SEQ ID NO: 132571 - protein, 20 aa, Artificial Sequence
  Description of Artificial Sequence: Synthetic peptide
  Seed: RMCSLMQGSTLPRRSGAAGA
RMCSLMFGSMLNRRNGAAGA

SEQ ID NO: 132572 - protein, 20 aa, Artificial Sequence
  Description of Artificial Sequence: Synthetic peptide
  Seed: RMCSLMQGSTLPRRSGAAGA
RMCSLMFGSMLNRRVGAAGA

SEQ ID NO: 132573 - protein, 20 aa, Artificial Sequence
  Description of Artificial Sequence: Synthetic peptide
  Seed: RMCSLMQGSTLPRRSGAAGA
RMCSLMFGSMLPRRAGAAGA

SEQ ID NO: 132574 - protein, 20 aa, Artificial Sequence
  Description of Artificial Sequence: Synthetic peptide
  Seed: RMCSLMQGSTLPRRSGAAGA
RMCSLMFGSMLPRRIGAAGA

SEQ ID NO: 132575 - protein, 20 aa, Artificial Sequence
  Description of Artificial Sequence: Synthetic peptide
  Seed: RMCSLMQGSTLPRRSGAAGA
RMCSLMFGSMLPRRLGAAGA

SEQ ID NO: 132576 - protein, 20 aa, Artificial Sequence
  Description of Artificial Sequence: Synthetic peptide
  Seed: RMCSLMQGSTLPRRSGAAGA
RMCSLMFGSMLPRRMGAAGA

SEQ ID NO: 132577 - protein, 20 aa, Artificial Sequence
  Description of Artificial Sequence: Synthetic peptide
  Seed: RMCSLMQGSTLPRRSGAAGA
RMCSLMFGSMLPRRNGAAGA

SEQ ID NO: 132578 - protein, 20 aa, Artificial Sequence
  Description of Artificial Sequence: Synthetic peptide
  Seed: RMCSLMQGSTLPRRSGAAGA
RMCSLMFGSMLPRRSGAAGA

SEQ ID NO: 132579 - protein, 20 aa, Artificial Sequence
  Description of Artificial Sequence: Synthetic peptide
  Seed: RMCSLMQGSTLPRRSGAAGA
RMCSLMFGSMLPRRTGAAGA

SEQ ID NO: 132580 - protein, 20 aa, Artificial Sequence
  Description of Artificial Sequence: Synthetic peptide
  Seed: RMCSLMQGSTLPRRSGAAGA
RMCSLMFGSMLPRRVGAAGA

SEQ ID NO: 132581 - protein, 20 aa, Artificial Sequence
  Description of Artificial Sequence: Synthetic peptide
  Seed: RMCSLMQGSTLPRRSGAAGA
RMCSLMFGSMLSRRAGAAGA

SEQ ID NO: 132582 - protein, 20 aa, Artificial Sequence
  Description of Artificial Sequence: Synthetic peptide
  Seed: RMCSLMQGSTLPRRSGAAGA
RMCSLMFGSMLSRRIGAAGA

SEQ ID NO: 132583 - protein, 20 aa, Artificial Sequence
  Description of Artificial Sequence: Synthetic peptide
  Seed: RMCSLMQGSTLPRRSGAAGA
RMCSLMFGSMLSRRLGAAGA

SEQ ID NO: 132584 - protein, 20 aa, Artificial Sequence
  Description of Artificial Sequence: Synthetic peptide
  Seed: RMCSLMQGSTLPRRSGAAGA
RMCSLMFGSMLSRRMGAAGA

SEQ ID NO: 132585 - protein, 20 aa, Artificial Sequence
  Description of Artificial Sequence: Synthetic peptide
  Seed: RMCSLMQGSTLPRRSGAAGA
RMCSLMFGSMLSRRNGAAGA

SEQ ID NO: 132586 - protein, 20 aa, Artificial Sequence
  Description of Artificial Sequence: Synthetic peptide
  Seed: RMCSLMQGSTLPRRSGAAGA
RMCSLMFGSMLSRRSGAAGA

SEQ ID NO: 132587 - protein, 20 aa, Artificial Sequence
  Description of Artificial Sequence: Synthetic peptide
  Seed: RMCSLMQGSTLPRRSGAAGA
RMCSLMFGSMLSRRTGAAGA

SEQ ID NO: 132588 - protein, 20 aa, Artificial Sequence
  Description of Artificial Sequence: Synthetic peptide
  Seed: RMCSLMQGSTLPRRSGAAGA
RMCSLMFGSMLSRRVGAAGA

SEQ ID NO: 132589 - protein, 20 aa, Artificial Sequence
  Description of Artificial Sequence: Synthetic peptide
  Seed: RMCSLMQGSTLPRRSGAAGA
RMCSLMFGSMLTRRAGAAGA

SEQ ID NO: 132590 - protein, 20 aa, Artificial Sequence
  Description of Artificial Sequence: Synthetic peptide
  Seed: RMCSLMQGSTLPRRSGAAGA
RMCSLMFGSMLTRRIGAAGA

SEQ ID NO: 132591 - protein, 20 aa, Artificial Sequence
  Description of Artificial Sequence: Synthetic peptide
  Seed: RMCSLMQGSTLPRRSGAAGA
RMCSLMFGSMLTRRLGAAGA

SEQ ID NO: 132592 - protein, 20 aa, Artificial Sequence
  Description of Artificial Sequence: Synthetic peptide
  Seed: RMCSLMQGSTLPRRSGAAGA
RMCSLMFGSMLTRRMGAAGA

SEQ ID NO: 132593 - protein, 20 aa, Artificial Sequence
  Description of Artificial Sequence: Synthetic peptide
  Seed: RMCSLMQGSTLPRRSGAAGA
RMCSLMFGSMLTRRNGAAGA

SEQ ID NO: 132594 - protein, 20 aa, Artificial Sequence
  Description of Artificial Sequence: Synthetic peptide
  Seed: RMCSLMQGSTLPRRSGAAGA
RMCSLMFGSMLTRRSGAAGA

SEQ ID NO: 132595 - protein, 20 aa, Artificial Sequence
  Description of Artificial Sequence: Synthetic peptide
  Seed: RMCSLMQGSTLPRRSGAAGA
RMCSLMFGSMLTRRTGAAGA

SEQ ID NO: 132596 - protein, 20 aa, Artificial Sequence
  Description of Artificial Sequence: Synthetic peptide
  Seed: RMCSLMQGSTLPRRSGAAGA
RMCSLMFGSMLTRRVGAAGA

SEQ ID NO: 132597 - protein, 20 aa, Artificial Sequence
  Description of Artificial Sequence: Synthetic peptide
  Seed: RMCSLMQGSTLPRRSGAAGA
RMCSLMFGSMLVRRAGAAGA

SEQ ID NO: 132598 - protein, 20 aa, Artificial Sequence
  Description of Artificial Sequence: Synthetic peptide
  Seed: RMCSLMQGSTLPRRSGAAGA
RMCSLMFGSMLVRRIGAAGA

SEQ ID NO: 132599 - protein, 20 aa, Artificial Sequence
  Description of Artificial Sequence: Synthetic peptide
  Seed: RMCSLMQGSTLPRRSGAAGA
RMCSLMFGSMLVRRLGAAGA

SEQ ID NO: 132600 - protein, 20 aa, Artificial Sequence
  Description of Artificial Sequence: Synthetic peptide
  Seed: RMCSLMQGSTLPRRSGAAGA
RMCSLMFGSMLVRRMGAAGA

SEQ ID NO: 132601 - protein, 20 aa, Artificial Sequence
  Description of Artificial Sequence: Synthetic peptide
  Seed: RMCSLMQGSTLPRRSGAAGA
RMCSLMFGSMLVRRNGAAGA

SEQ ID NO: 132602 - protein, 20 aa, Artificial Sequence
  Description of Artificial Sequence: Synthetic peptide
  Seed: RMCSLMQGSTLPRRSGAAGA
RMCSLMFGSMLVRRSGAAGA

SEQ ID NO: 132603 - protein, 20 aa, Artificial Sequence
  Description of Artificial Sequence: Synthetic peptide
  Seed: RMCSLMQGSTLPRRSGAAGA
RMCSLMFGSMLVRRTGAAGA

SEQ ID NO: 132604 - protein, 20 aa, Artificial Sequence
  Description of Artificial Sequence: Synthetic peptide
  Seed: RMCSLMQGSTLPRRSGAAGA
RMCSLMFGSMLVRRVGAAGA

SEQ ID NO: 132605 - protein, 20 aa, Artificial Sequence
  Description of Artificial Sequence: Synthetic peptide
  Seed: RMCSLMQGSTLPRRSGAAGA
RMCSLMFGSQLARRAGAAGA

SEQ ID NO: 132606 - protein, 20 aa, Artificial Sequence
  Description of Artificial Sequence: Synthetic peptide
  Seed: RMCSLMQGSTLPRRSGAAGA
RMCSLMFGSVLARRAGAAGA

SEQ ID NO: 132607 - protein, 20 aa, Artificial Sequence
  Description of Artificial Sequence: Synthetic peptide
  Seed: RMCSLMQGSTLPRRSGAAGA
RMCSLMFGSVLARRIGAAGA

SEQ ID NO: 132608 - protein, 20 aa, Artificial Sequence
  Description of Artificial Sequence: Synthetic peptide
  Seed: RMCSLMQGSTLPRRSGAAGA
RMCSLMFGSVLARRNGAAGA

SEQ ID NO: 132609 - protein, 20 aa, Artificial Sequence
  Description of Artificial Sequence: Synthetic peptide
  Seed: RMCSLMQGSTLPRRSGAAGA
RMCSLMFGSVLARRSGAAGA

SEQ ID NO: 132610 - protein, 20 aa, Artificial Sequence
  Description of Artificial Sequence: Synthetic peptide
  Seed: RMCSLMQGSTLPRRSGAAGA
RMCSLMFGSVLARRVGAAGA

SEQ ID NO: 132611 - protein, 20 aa, Artificial Sequence
  Description of Artificial Sequence: Synthetic peptide
  Seed: RMCSLMQGSTLPRRSGAAGA
RMCSLMFGSVLPRRAGAAGA

SEQ ID NO: 132612 - protein, 20 aa, Artificial Sequence
  Description of Artificial Sequence: Synthetic peptide
  Seed: RMCSLMQGSTLPRRSGAAGA
RMCSLMFGSVLSRRAGAAGA

SEQ ID NO: 132613 - protein, 20 aa, Artificial Sequence
  Description of Artificial Sequence: Synthetic peptide
  Seed: RMCSLMQGSTLPRRSGAAGA
RMCSLMFGSVLSRRNGAAGA

SEQ ID NO: 132614 - protein, 20 aa, Artificial Sequence
  Description of Artificial Sequence: Synthetic peptide
  Seed: RMCSLMQGSTLPRRSGAAGA
RMCSLMFGSVLSRRSGAAGA

SEQ ID NO: 132615 - protein, 20 aa, Artificial Sequence
  Description of Artificial Sequence: Synthetic peptide
  Seed: RMCSLMQGSTLPRRSGAAGA
RMCSLMFGSVLSRRVGAAGA

SEQ ID NO: 132616 - protein, 20 aa, Artificial Sequence
  Description of Artificial Sequence: Synthetic peptide
  Seed: RMCSLMQGSTLPRRSGAAGA
RMCSLMFGSVLTRRAGAAGA

SEQ ID NO: 132617 - protein, 20 aa, Artificial Sequence
  Description of Artificial Sequence: Synthetic peptide
  Seed: RMCSLMQGSTLPRRSGAAGA
RMCSLMFGSVLTRRNGAAGA

SEQ ID NO: 132618 - protein, 20 aa, Artificial Sequence
  Description of Artificial Sequence: Synthetic peptide
  Seed: RMCSLMQGSTLPRRSGAAGA
RMCSLMFGSWLARRVGAAGA

SEQ ID NO: 132619 - protein, 20 aa, Artificial Sequence
  Description of Artificial Sequence: Synthetic peptide
  Seed: RMCSLMQGSTLPRRSGAAGA
RMCSLMIGSMLARRAGAAGA

SEQ ID NO: 132620 - protein, 20 aa, Artificial Sequence
  Description of Artificial Sequence: Synthetic peptide
  Seed: RMCSLMQGSTLPRRSGAAGA
RMCSLMIGSWLARRAGAAGA

SEQ ID NO: 132621 - protein, 20 aa, Artificial Sequence
  Description of Artificial Sequence: Synthetic peptide
  Seed: RMCSLMQGSTLPRRSGAAGA
RMCSLMWGSMLARRAGAAGA

SEQ ID NO: 132622 - protein, 20 aa, Artificial Sequence
  Description of Artificial Sequence: Synthetic peptide
  Seed: RMCSLMQGSTLPRRSGAAGA
RMCSLMYGSALARRAGAAGA

SEQ ID NO: 132623 - protein, 20 aa, Artificial Sequence
  Description of Artificial Sequence: Synthetic peptide
  Seed: RMCSLMQGSTLPRRSGAAGA
RMCSLMYGSALARRIGAAGA

SEQ ID NO: 132624 - protein, 20 aa, Artificial Sequence
  Description of Artificial Sequence: Synthetic peptide
  Seed: RMCSLMQGSTLPRRSGAAGA
RMCSLMYGSALARRLGAAGA

SEQ ID NO: 132625 - protein, 20 aa, Artificial Sequence
  Description of Artificial Sequence: Synthetic peptide
  Seed: RMCSLMQGSTLPRRSGAAGA
RMCSLMYGSALARRMGAAGA

SEQ ID NO: 132626 - protein, 20 aa, Artificial Sequence
  Description of Artificial Sequence: Synthetic peptide
  Seed: RMCSLMQGSTLPRRSGAAGA
RMCSLMYGSALARRNGAAGA

SEQ ID NO: 132627 - protein, 20 aa, Artificial Sequence
  Description of Artificial Sequence: Synthetic peptide
  Seed: RMCSLMQGSTLPRRSGAAGA
RMCSLMYGSALARRSGAAGA

SEQ ID NO: 132628 - protein, 20 aa, Artificial Sequence
  Description of Artificial Sequence: Synthetic peptide
  Seed: RMCSLMQGSTLPRRSGAAGA
RMCSLMYGSALARRVGAAGA

SEQ ID NO: 132629 - protein, 20 aa, Artificial Sequence
  Description of Artificial Sequence: Synthetic peptide
  Seed: RMCSLMQGSTLPRRSGAAGA
RMCSLMYGSALPRRAGAAGA

SEQ ID NO: 132630 - protein, 20 aa, Artificial Sequence
  Description of Artificial Sequence: Synthetic peptide
  Seed: RMCSLMQGSTLPRRSGAAGA
RMCSLMYGSALSRRAGAAGA

SEQ ID NO: 132631 - protein, 20 aa, Artificial Sequence
  Description of Artificial Sequence: Synthetic peptide
  Seed: RMCSLMQGSTLPRRSGAAGA
RMCSLMYGSALSRRIGAAGA

SEQ ID NO: 132632 - protein, 20 aa, Artificial Sequence
  Description of Artificial Sequence: Synthetic peptide
  Seed: RMCSLMQGSTLPRRSGAAGA
RMCSLMYGSALSRRVGAAGA

SEQ ID NO: 132633 - protein, 20 aa, Artificial Sequence
  Description of Artificial Sequence: Synthetic peptide
  Seed: RMCSLMQGSTLPRRSGAAGA
RMCSLMYGSALTRRAGAAGA

SEQ ID NO: 132634 - protein, 20 aa, Artificial Sequence
  Description of Artificial Sequence: Synthetic peptide
  Seed: RMCSLMQGSTLPRRSGAAGA
RMCSLMYGSALTRRVGAAGA

SEQ ID NO: 132635 - protein, 20 aa, Artificial Sequence
  Description of Artificial Sequence: Synthetic peptide
  Seed: RMCSLMQGSTLPRRSGAAGA
RMCSLMYGSALVRRAGAAGA

SEQ ID NO: 132636 - protein, 20 aa, Artificial Sequence
  Description of Artificial Sequence: Synthetic peptide
  Seed: RMCSLMQGSTLPRRSGAAGA
RMCSLMYGSILARRAGAAGA

SEQ ID NO: 132637 - protein, 20 aa, Artificial Sequence
  Description of Artificial Sequence: Synthetic peptide
  Seed: RMCSLMQGSTLPRRSGAAGA
RMCSLMYGSILARRIGAAGA

SEQ ID NO: 132638 - protein, 20 aa, Artificial Sequence
  Description of Artificial Sequence: Synthetic peptide
  Seed: RMCSLMQGSTLPRRSGAAGA
RMCSLMYGSILARRLGAAGA

SEQ ID NO: 132639 - protein, 20 aa, Artificial Sequence
  Description of Artificial Sequence: Synthetic peptide
  Seed: RMCSLMQGSTLPRRSGAAGA
RMCSLMYGSILARRMGAAGA

SEQ ID NO: 132640 - protein, 20 aa, Artificial Sequence
  Description of Artificial Sequence: Synthetic peptide
  Seed: RMCSLMQGSTLPRRSGAAGA
RMCSLMYGSILARRNGAAGA

SEQ ID NO: 132641 - protein, 20 aa, Artificial Sequence
  Description of Artificial Sequence: Synthetic peptide
  Seed: RMCSLMQGSTLPRRSGAAGA
RMCSLMYGSILARRSGAAGA

SEQ ID NO: 132642 - protein, 20 aa, Artificial Sequence
  Description of Artificial Sequence: Synthetic peptide
  Seed: RMCSLMQGSTLPRRSGAAGA
RMCSLMYGSILARRTGAAGA

SEQ ID NO: 132643 - protein, 20 aa, Artificial Sequence
  Description of Artificial Sequence: Synthetic peptide
  Seed: RMCSLMQGSTLPRRSGAAGA
RMCSLMYGSILARRVGAAGA

SEQ ID NO: 132644 - protein, 20 aa, Artificial Sequence
  Description of Artificial Sequence: Synthetic peptide
  Seed: RMCSLMQGSTLPRRSGAAGA
RMCSLMYGSILPRRAGAAGA

SEQ ID NO: 132645 - protein, 20 aa, Artificial Sequence
  Description of Artificial Sequence: Synthetic peptide
  Seed: RMCSLMQGSTLPRRSGAAGA
RMCSLMYGSILPRRIGAAGA

SEQ ID NO: 132646 - protein, 20 aa, Artificial Sequence
  Description of Artificial Sequence: Synthetic peptide
  Seed: RMCSLMQGSTLPRRSGAAGA
RMCSLMYGSILPRRNGAAGA

SEQ ID NO: 132647 - protein, 20 aa, Artificial Sequence
  Description of Artificial Sequence: Synthetic peptide
  Seed: RMCSLMQGSTLPRRSGAAGA
RMCSLMYGSILPRRSGAAGA

SEQ ID NO: 132648 - protein, 20 aa, Artificial Sequence
  Description of Artificial Sequence: Synthetic peptide
  Seed: RMCSLMQGSTLPRRSGAAGA
RMCSLMYGSILPRRVGAAGA

SEQ ID NO: 132649 - protein, 20 aa, Artificial Sequence
  Description of Artificial Sequence: Synthetic peptide
  Seed: RMCSLMQGSTLPRRSGAAGA
RMCSLMYGSILSRRAGAAGA

SEQ ID NO: 132650 - protein, 20 aa, Artificial Sequence
  Description of Artificial Sequence: Synthetic peptide
  Seed: RMCSLMQGSTLPRRSGAAGA
RMCSLMYGSILSRRIGAAGA

SEQ ID NO: 132651 - protein, 20 aa, Artificial Sequence
  Description of Artificial Sequence: Synthetic peptide
  Seed: RMCSLMQGSTLPRRSGAAGA
RMCSLMYGSILSRRNGAAGA

SEQ ID NO: 132652 - protein, 20 aa, Artificial Sequence
  Description of Artificial Sequence: Synthetic peptide
  Seed: RMCSLMQGSTLPRRSGAAGA
RMCSLMYGSILSRRSGAAGA

SEQ ID NO: 132653 - protein, 20 aa, Artificial Sequence
  Description of Artificial Sequence: Synthetic peptide
  Seed: RMCSLMQGSTLPRRSGAAGA
RMCSLMYGSILSRRVGAAGA

SEQ ID NO: 132654 - protein, 20 aa, Artificial Sequence
  Description of Artificial Sequence: Synthetic peptide
  Seed: RMCSLMQGSTLPRRSGAAGA
RMCSLMYGSILTRRAGAAGA

SEQ ID NO: 132655 - protein, 20 aa, Artificial Sequence
  Description of Artificial Sequence: Synthetic peptide
  Seed: RMCSLMQGSTLPRRSGAAGA
RMCSLMYGSILTRRIGAAGA

SEQ ID NO: 132656 - protein, 20 aa, Artificial Sequence
  Description of Artificial Sequence: Synthetic peptide
  Seed: RMCSLMQGSTLPRRSGAAGA
RMCSLMYGSILTRRNGAAGA

SEQ ID NO: 132657 - protein, 20 aa, Artificial Sequence
  Description of Artificial Sequence: Synthetic peptide
  Seed: RMCSLMQGSTLPRRSGAAGA
RMCSLMYGSILTRRSGAAGA

SEQ ID NO: 132658 - protein, 20 aa, Artificial Sequence
  Description of Artificial Sequence: Synthetic peptide
  Seed: RMCSLMQGSTLPRRSGAAGA
RMCSLMYGSILTRRVGAAGA

SEQ ID NO: 132659 - protein, 20 aa, Artificial Sequence
  Description of Artificial Sequence: Synthetic peptide
  Seed: RMCSLMQGSTLPRRSGAAGA
RMCSLMYGSILVRRAGAAGA

SEQ ID NO: 132660 - protein, 20 aa, Artificial Sequence
  Description of Artificial Sequence: Synthetic peptide
  Seed: RMCSLMQGSTLPRRSGAAGA
RMCSLMYGSILVRRNGAAGA

SEQ ID NO: 132661 - protein, 20 aa, Artificial Sequence
  Description of Artificial Sequence: Synthetic peptide
  Seed: RMCSLMQGSTLPRRSGAAGA
RMCSLMYGSILVRRVGAAGA

SEQ ID NO: 132662 - protein, 20 aa, Artificial Sequence
  Description of Artificial Sequence: Synthetic peptide
  Seed: RMCSLMQGSTLPRRSGAAGA
RMCSLMYGSLLARRAGAAGA

SEQ ID NO: 132663 - protein, 20 aa, Artificial Sequence
  Description of Artificial Sequence: Synthetic peptide
  Seed: RMCSLMQGSTLPRRSGAAGA
RMCSLMYGSLLARRIGAAGA

SEQ ID NO: 132664 - protein, 20 aa, Artificial Sequence
  Description of Artificial Sequence: Synthetic peptide
  Seed: RMCSLMQGSTLPRRSGAAGA
RMCSLMYGSLLARRLGAAGA

SEQ ID NO: 132665 - protein, 20 aa, Artificial Sequence
  Description of Artificial Sequence: Synthetic peptide
  Seed: RMCSLMQGSTLPRRSGAAGA
RMCSLMYGSLLARRMGAAGA

SEQ ID NO: 132666 - protein, 20 aa, Artificial Sequence
  Description of Artificial Sequence: Synthetic peptide
  Seed: RMCSLMQGSTLPRRSGAAGA
RMCSLMYGSLLARRNGAAGA

SEQ ID NO: 132667 - protein, 20 aa, Artificial Sequence
  Description of Artificial Sequence: Synthetic peptide
  Seed: RMCSLMQGSTLPRRSGAAGA
RMCSLMYGSLLARRSGAAGA

SEQ ID NO: 132668 - protein, 20 aa, Artificial Sequence
  Description of Artificial Sequence: Synthetic peptide
  Seed: RMCSLMQGSTLPRRSGAAGA
RMCSLMYGSLLARRTGAAGA

SEQ ID NO: 132669 - protein, 20 aa, Artificial Sequence
  Description of Artificial Sequence: Synthetic peptide
  Seed: RMCSLMQGSTLPRRSGAAGA
RMCSLMYGSLLARRVGAAGA

SEQ ID NO: 132670 - protein, 20 aa, Artificial Sequence
  Description of Artificial Sequence: Synthetic peptide
  Seed: RMCSLMQGSTLPRRSGAAGA
RMCSLMYGSLLIRRAGAAGA

SEQ ID NO: 132671 - protein, 20 aa, Artificial Sequence
  Description of Artificial Sequence: Synthetic peptide
  Seed: RMCSLMQGSTLPRRSGAAGA
RMCSLMYGSLLPRRAGAAGA

SEQ ID NO: 132672 - protein, 20 aa, Artificial Sequence
  Description of Artificial Sequence: Synthetic peptide
  Seed: RMCSLMQGSTLPRRSGAAGA
RMCSLMYGSLLPRRIGAAGA

SEQ ID NO: 132673 - protein, 20 aa, Artificial Sequence
  Description of Artificial Sequence: Synthetic peptide
  Seed: RMCSLMQGSTLPRRSGAAGA
RMCSLMYGSLLPRRLGAAGA

SEQ ID NO: 132674 - protein, 20 aa, Artificial Sequence
  Description of Artificial Sequence: Synthetic peptide
  Seed: RMCSLMQGSTLPRRSGAAGA
RMCSLMYGSLLPRRNGAAGA

SEQ ID NO: 132675 - protein, 20 aa, Artificial Sequence
  Description of Artificial Sequence: Synthetic peptide
  Seed: RMCSLMQGSTLPRRSGAAGA
RMCSLMYGSLLPRRSGAAGA

SEQ ID NO: 132676 - protein, 20 aa, Artificial Sequence
  Description of Artificial Sequence: Synthetic peptide
  Seed: RMCSLMQGSTLPRRSGAAGA
RMCSLMYGSLLPRRVGAAGA

SEQ ID NO: 132677 - protein, 20 aa, Artificial Sequence
  Description of Artificial Sequence: Synthetic peptide
  Seed: RMCSLMQGSTLPRRSGAAGA
RMCSLMYGSLLSRRAGAAGA

SEQ ID NO: 132678 - protein, 20 aa, Artificial Sequence
  Description of Artificial Sequence: Synthetic peptide
  Seed: RMCSLMQGSTLPRRSGAAGA
RMCSLMYGSLLSRRIGAAGA

SEQ ID NO: 132679 - protein, 20 aa, Artificial Sequence
  Description of Artificial Sequence: Synthetic peptide
  Seed: RMCSLMQGSTLPRRSGAAGA
RMCSLMYGSLLSRRLGAAGA

SEQ ID NO: 132680 - protein, 20 aa, Artificial Sequence
  Description of Artificial Sequence: Synthetic peptide
  Seed: RMCSLMQGSTLPRRSGAAGA
RMCSLMYGSLLSRRMGAAGA

SEQ ID NO: 132681 - protein, 20 aa, Artificial Sequence
  Description of Artificial Sequence: Synthetic peptide
  Seed: RMCSLMQGSTLPRRSGAAGA
RMCSLMYGSLLSRRNGAAGA

SEQ ID NO: 132682 - protein, 20 aa, Artificial Sequence
  Description of Artificial Sequence: Synthetic peptide
  Seed: RMCSLMQGSTLPRRSGAAGA
RMCSLMYGSLLSRRSGAAGA

SEQ ID NO: 132683 - protein, 20 aa, Artificial Sequence
  Description of Artificial Sequence: Synthetic peptide
  Seed: RMCSLMQGSTLPRRSGAAGA
RMCSLMYGSLLSRRTGAAGA

SEQ ID NO: 132684 - protein, 20 aa, Artificial Sequence
  Description of Artificial Sequence: Synthetic peptide
  Seed: RMCSLMQGSTLPRRSGAAGA
RMCSLMYGSLLSRRVGAAGA

SEQ ID NO: 132685 - protein, 20 aa, Artificial Sequence
  Description of Artificial Sequence: Synthetic peptide
  Seed: RMCSLMQGSTLPRRSGAAGA
RMCSLMYGSLLTRRAGAAGA

SEQ ID NO: 132686 - protein, 20 aa, Artificial Sequence
  Description of Artificial Sequence: Synthetic peptide
  Seed: RMCSLMQGSTLPRRSGAAGA
RMCSLMYGSLLTRRIGAAGA

SEQ ID NO: 132687 - protein, 20 aa, Artificial Sequence
  Description of Artificial Sequence: Synthetic peptide
  Seed: RMCSLMQGSTLPRRSGAAGA
RMCSLMYGSLLTRRLGAAGA

SEQ ID NO: 132688 - protein, 20 aa, Artificial Sequence
  Description of Artificial Sequence: Synthetic peptide
  Seed: RMCSLMQGSTLPRRSGAAGA
RMCSLMYGSLLTRRMGAAGA

SEQ ID NO: 132689 - protein, 20 aa, Artificial Sequence
  Description of Artificial Sequence: Synthetic peptide
  Seed: RMCSLMQGSTLPRRSGAAGA
RMCSLMYGSLLTRRNGAAGA

SEQ ID NO: 132690 - protein, 20 aa, Artificial Sequence
  Description of Artificial Sequence: Synthetic peptide
  Seed: RMCSLMQGSTLPRRSGAAGA
RMCSLMYGSLLTRRSGAAGA

SEQ ID NO: 132691 - protein, 20 aa, Artificial Sequence
  Description of Artificial Sequence: Synthetic peptide
  Seed: RMCSLMQGSTLPRRSGAAGA
RMCSLMYGSLLTRRTGAAGA

SEQ ID NO: 132692 - protein, 20 aa, Artificial Sequence
  Description of Artificial Sequence: Synthetic peptide
  Seed: RMCSLMQGSTLPRRSGAAGA
RMCSLMYGSLLTRRVGAAGA

SEQ ID NO: 132693 - protein, 20 aa, Artificial Sequence
  Description of Artificial Sequence: Synthetic peptide
  Seed: RMCSLMQGSTLPRRSGAAGA
RMCSLMYGSLLVRRAGAAGA

SEQ ID NO: 132694 - protein, 20 aa, Artificial Sequence
  Description of Artificial Sequence: Synthetic peptide
  Seed: RMCSLMQGSTLPRRSGAAGA
RMCSLMYGSLLVRRNGAAGA

SEQ ID NO: 132695 - protein, 20 aa, Artificial Sequence
  Description of Artificial Sequence: Synthetic peptide
  Seed: RMCSLMQGSTLPRRSGAAGA
RMCSLMYGSLLVRRSGAAGA

SEQ ID NO: 132696 - protein, 20 aa, Artificial Sequence
  Description of Artificial Sequence: Synthetic peptide
  Seed: RMCSLMQGSTLPRRSGAAGA
RMCSLMYGSLLVRRVGAAGA

SEQ ID NO: 132697 - protein, 20 aa, Artificial Sequence
  Description of Artificial Sequence: Synthetic peptide
  Seed: RMCSLMQGSTLPRRSGAAGA
RMCSLMYGSMLARRAGAAGA

SEQ ID NO: 132698 - protein, 20 aa, Artificial Sequence
  Description of Artificial Sequence: Synthetic peptide
  Seed: RMCSLMQGSTLPRRSGAAGA
RMCSLMYGSMLARRIGAAGA

SEQ ID NO: 132699 - protein, 20 aa, Artificial Sequence
  Description of Artificial Sequence: Synthetic peptide
  Seed: RMCSLMQGSTLPRRSGAAGA
RMCSLMYGSMLARRLGAAGA

SEQ ID NO: 132700 - protein, 20 aa, Artificial Sequence
  Description of Artificial Sequence: Synthetic peptide
  Seed: RMCSLMQGSTLPRRSGAAGA
RMCSLMYGSMLARRMGAAGA

SEQ ID NO: 132701 - protein, 20 aa, Artificial Sequence
  Description of Artificial Sequence: Synthetic peptide
  Seed: RMCSLMQGSTLPRRSGAAGA
RMCSLMYGSMLARRNGAAGA

SEQ ID NO: 132702 - protein, 20 aa, Artificial Sequence
  Description of Artificial Sequence: Synthetic peptide
  Seed: RMCSLMQGSTLPRRSGAAGA
RMCSLMYGSMLARRSGAAGA

SEQ ID NO: 132703 - protein, 20 aa, Artificial Sequence
  Description of Artificial Sequence: Synthetic peptide
  Seed: RMCSLMQGSTLPRRSGAAGA
RMCSLMYGSMLARRTGAAGA

SEQ ID NO: 132704 - protein, 20 aa, Artificial Sequence
  Description of Artificial Sequence: Synthetic peptide
  Seed: RMCSLMQGSTLPRRSGAAGA
RMCSLMYGSMLARRVGAAGA

SEQ ID NO: 132705 - protein, 20 aa, Artificial Sequence
  Description of Artificial Sequence: Synthetic peptide
  Seed: RMCSLMQGSTLPRRSGAAGA
RMCSLMYGSMLGRRAGAAGA

SEQ ID NO: 132706 - protein, 20 aa, Artificial Sequence
  Description of Artificial Sequence: Synthetic peptide
  Seed: RMCSLMQGSTLPRRSGAAGA
RMCSLMYGSMLGRRIGAAGA

SEQ ID NO: 132707 - protein, 20 aa, Artificial Sequence
  Description of Artificial Sequence: Synthetic peptide
  Seed: RMCSLMQGSTLPRRSGAAGA
RMCSLMYGSMLGRRVGAAGA

SEQ ID NO: 132708 - protein, 20 aa, Artificial Sequence
  Description of Artificial Sequence: Synthetic peptide
  Seed: RMCSLMQGSTLPRRSGAAGA
RMCSLMYGSMLIRRAGAAGA

SEQ ID NO: 132709 - protein, 20 aa, Artificial Sequence
  Description of Artificial Sequence: Synthetic peptide
  Seed: RMCSLMQGSTLPRRSGAAGA
RMCSLMYGSMLIRRNGAAGA

SEQ ID NO: 132710 - protein, 20 aa, Artificial Sequence
  Description of Artificial Sequence: Synthetic peptide
  Seed: RMCSLMQGSTLPRRSGAAGA
RMCSLMYGSMLIRRVGAAGA

SEQ ID NO: 132711 - protein, 20 aa, Artificial Sequence
  Description of Artificial Sequence: Synthetic peptide
  Seed: RMCSLMQGSTLPRRSGAAGA
RMCSLMYGSMLPRRAGAAGA

SEQ ID NO: 132712 - protein, 20 aa, Artificial Sequence
  Description of Artificial Sequence: Synthetic peptide
  Seed: RMCSLMQGSTLPRRSGAAGA
RMCSLMYGSMLPRRIGAAGA

SEQ ID NO: 132713 - protein, 20 aa, Artificial Sequence
  Description of Artificial Sequence: Synthetic peptide
  Seed: RMCSLMQGSTLPRRSGAAGA
RMCSLMYGSMLPRRLGAAGA

SEQ ID NO: 132714 - protein, 20 aa, Artificial Sequence
  Description of Artificial Sequence: Synthetic peptide
  Seed: RMCSLMQGSTLPRRSGAAGA
RMCSLMYGSMLPRRMGAAGA

SEQ ID NO: 132715 - protein, 20 aa, Artificial Sequence
  Description of Artificial Sequence: Synthetic peptide
  Seed: RMCSLMQGSTLPRRSGAAGA
RMCSLMYGSMLPRRNGAAGA

SEQ ID NO: 132716 - protein, 20 aa, Artificial Sequence
  Description of Artificial Sequence: Synthetic peptide
  Seed: RMCSLMQGSTLPRRSGAAGA
RMCSLMYGSMLPRRSGAAGA

SEQ ID NO: 132717 - protein, 20 aa, Artificial Sequence
  Description of Artificial Sequence: Synthetic peptide
  Seed: RMCSLMQGSTLPRRSGAAGA
RMCSLMYGSMLPRRTGAAGA

SEQ ID NO: 132718 - protein, 20 aa, Artificial Sequence
  Description of Artificial Sequence: Synthetic peptide
  Seed: RMCSLMQGSTLPRRSGAAGA
RMCSLMYGSMLPRRVGAAGA

SEQ ID NO: 132719 - protein, 20 aa, Artificial Sequence
  Description of Artificial Sequence: Synthetic peptide
  Seed: RMCSLMQGSTLPRRSGAAGA
RMCSLMYGSMLSRRAGAAGA

SEQ ID NO: 132720 - protein, 20 aa, Artificial Sequence
  Description of Artificial Sequence: Synthetic peptide
  Seed: RMCSLMQGSTLPRRSGAAGA
RMCSLMYGSMLSRRIGAAGA

SEQ ID NO: 132721 - protein, 20 aa, Artificial Sequence
  Description of Artificial Sequence: Synthetic peptide
  Seed: RMCSLMQGSTLPRRSGAAGA
RMCSLMYGSMLSRRLGAAGA

SEQ ID NO: 132722 - protein, 20 aa, Artificial Sequence
  Description of Artificial Sequence: Synthetic peptide
  Seed: RMCSLMQGSTLPRRSGAAGA
RMCSLMYGSMLSRRMGAAGA

SEQ ID NO: 132723 - protein, 20 aa, Artificial Sequence
  Description of Artificial Sequence: Synthetic peptide
  Seed: RMCSLMQGSTLPRRSGAAGA
RMCSLMYGSMLSRRNGAAGA

SEQ ID NO: 132724 - protein, 20 aa, Artificial Sequence
  Description of Artificial Sequence: Synthetic peptide
  Seed: RMCSLMQGSTLPRRSGAAGA
RMCSLMYGSMLSRRSGAAGA

SEQ ID NO: 132725 - protein, 20 aa, Artificial Sequence
  Description of Artificial Sequence: Synthetic peptide
  Seed: RMCSLMQGSTLPRRSGAAGA
RMCSLMYGSMLSRRTGAAGA

SEQ ID NO: 132726 - protein, 20 aa, Artificial Sequence
  Description of Artificial Sequence: Synthetic peptide
  Seed: RMCSLMQGSTLPRRSGAAGA
RMCSLMYGSMLSRRVGAAGA

SEQ ID NO: 132727 - protein, 20 aa, Artificial Sequence
  Description of Artificial Sequence: Synthetic peptide
  Seed: RMCSLMQGSTLPRRSGAAGA
RMCSLMYGSMLTRRAGAAGA

SEQ ID NO: 132728 - protein, 20 aa, Artificial Sequence
  Description of Artificial Sequence: Synthetic peptide
  Seed: RMCSLMQGSTLPRRSGAAGA
RMCSLMYGSMLTRRIGAAGA

SEQ ID NO: 132729 - protein, 20 aa, Artificial Sequence
  Description of Artificial Sequence: Synthetic peptide
  Seed: RMCSLMQGSTLPRRSGAAGA
RMCSLMYGSMLTRRLGAAGA

SEQ ID NO: 132730 - protein, 20 aa, Artificial Sequence
  Description of Artificial Sequence: Synthetic peptide
  Seed: RMCSLMQGSTLPRRSGAAGA
RMCSLMYGSMLTRRMGAAGA

SEQ ID NO: 132731 - protein, 20 aa, Artificial Sequence
  Description of Artificial Sequence: Synthetic peptide
  Seed: RMCSLMQGSTLPRRSGAAGA
RMCSLMYGSMLTRRNGAAGA

SEQ ID NO: 132732 - protein, 20 aa, Artificial Sequence
  Description of Artificial Sequence: Synthetic peptide
  Seed: RMCSLMQGSTLPRRSGAAGA
RMCSLMYGSMLTRRSGAAGA

SEQ ID NO: 132733 - protein, 20 aa, Artificial Sequence
  Description of Artificial Sequence: Synthetic peptide
  Seed: RMCSLMQGSTLPRRSGAAGA
RMCSLMYGSMLTRRTGAAGA

SEQ ID NO: 132734 - protein, 20 aa, Artificial Sequence
  Description of Artificial Sequence: Synthetic peptide
  Seed: RMCSLMQGSTLPRRSGAAGA
RMCSLMYGSMLTRRVGAAGA

SEQ ID NO: 132735 - protein, 20 aa, Artificial Sequence
  Description of Artificial Sequence: Synthetic peptide
  Seed: RMCSLMQGSTLPRRSGAAGA
RMCSLMYGSMLVRRAGAAGA

SEQ ID NO: 132736 - protein, 20 aa, Artificial Sequence
  Description of Artificial Sequence: Synthetic peptide
  Seed: RMCSLMQGSTLPRRSGAAGA
RMCSLMYGSMLVRRIGAAGA

SEQ ID NO: 132737 - protein, 20 aa, Artificial Sequence
  Description of Artificial Sequence: Synthetic peptide
  Seed: RMCSLMQGSTLPRRSGAAGA
RMCSLMYGSMLVRRLGAAGA

SEQ ID NO: 132738 - protein, 20 aa, Artificial Sequence
  Description of Artificial Sequence: Synthetic peptide
  Seed: RMCSLMQGSTLPRRSGAAGA
RMCSLMYGSMLVRRMGAAGA

SEQ ID NO: 132739 - protein, 20 aa, Artificial Sequence
  Description of Artificial Sequence: Synthetic peptide
  Seed: RMCSLMQGSTLPRRSGAAGA
RMCSLMYGSMLVRRNGAAGA

SEQ ID NO: 132740 - protein, 20 aa, Artificial Sequence
  Description of Artificial Sequence: Synthetic peptide
  Seed: RMCSLMQGSTLPRRSGAAGA
RMCSLMYGSMLVRRSGAAGA

SEQ ID NO: 132741 - protein, 20 aa, Artificial Sequence
  Description of Artificial Sequence: Synthetic peptide
  Seed: RMCSLMQGSTLPRRSGAAGA
RMCSLMYGSMLVRRTGAAGA

SEQ ID NO: 132742 - protein, 20 aa, Artificial Sequence
  Description of Artificial Sequence: Synthetic peptide
  Seed: RMCSLMQGSTLPRRSGAAGA
RMCSLMYGSMLVRRVGAAGA

SEQ ID NO: 132743 - protein, 20 aa, Artificial Sequence
  Description of Artificial Sequence: Synthetic peptide
  Seed: RMCSLMQGSTLPRRSGAAGA
RMCSLMYGSVLARRAGAAGA

SEQ ID NO: 132744 - protein, 20 aa, Artificial Sequence
  Description of Artificial Sequence: Synthetic peptide
  Seed: RMCSLMQGSTLPRRSGAAGA
RMCSLMYGSVLARRIGAAGA

SEQ ID NO: 132745 - protein, 20 aa, Artificial Sequence
  Description of Artificial Sequence: Synthetic peptide
  Seed: RMCSLMQGSTLPRRSGAAGA
RMCSLMYGSVLARRNGAAGA

SEQ ID NO: 132746 - protein, 20 aa, Artificial Sequence
  Description of Artificial Sequence: Synthetic peptide
  Seed: RMCSLMQGSTLPRRSGAAGA
RMCSLMYGSVLARRSGAAGA

SEQ ID NO: 132747 - protein, 20 aa, Artificial Sequence
  Description of Artificial Sequence: Synthetic peptide
  Seed: RMCSLMQGSTLPRRSGAAGA
RMCSLMYGSVLARRVGAAGA

SEQ ID NO: 132748 - protein, 20 aa, Artificial Sequence
  Description of Artificial Sequence: Synthetic peptide
  Seed: RMCSLMQGSTLPRRSGAAGA
RMCSLMYGSVLPRRAGAAGA

SEQ ID NO: 132749 - protein, 20 aa, Artificial Sequence
  Description of Artificial Sequence: Synthetic peptide
  Seed: RMCSLMQGSTLPRRSGAAGA
RMCSLMYGSVLSRRAGAAGA

SEQ ID NO: 132750 - protein, 15 aa, Artificial Sequence
  Description of Artificial Sequence: Synthetic peptide
  Seed: SLMQGSTLPRRSGAA
SLMQFSTAPRRSAAA

SEQ ID NO: 132751 - protein, 15 aa, Artificial Sequence
  Description of Artificial Sequence: Synthetic peptide
  Seed: SLMQGSTLPRRSGAA
SLMQFSTAPRRSSAA

SEQ ID NO: 132752 - protein, 15 aa, Artificial Sequence
  Description of Artificial Sequence: Synthetic peptide
  Seed: SLMQGSTLPRRSGAA
SLMQFSTFPKRSAAA

SEQ ID NO: 132753 - protein, 15 aa, Artificial Sequence
  Description of Artificial Sequence: Synthetic peptide
  Seed: SLMQGSTLPRRSGAA
SLMQFSTFPRRSAAA

SEQ ID NO: 132754 - protein, 15 aa, Artificial Sequence
  Description of Artificial Sequence: Synthetic peptide
  Seed: SLMQGSTLPRRSGAA
SLMQFSTFPRRSGAA

SEQ ID NO: 132755 - protein, 15 aa, Artificial Sequence
  Description of Artificial Sequence: Synthetic peptide
  Seed: SLMQGSTLPRRSGAA
SLMQFSTFPRRSRAA

SEQ ID NO: 132756 - protein, 15 aa, Artificial Sequence
  Description of Artificial Sequence: Synthetic peptide
  Seed: SLMQGSTLPRRSGAA
SLMQFSTFPRRSSAA

SEQ ID NO: 132757 - protein, 15 aa, Artificial Sequence
  Description of Artificial Sequence: Synthetic peptide
  Seed: SLMQGSTLPRRSGAA
SLMQFSTIPKRSAAA

SEQ ID NO: 132758 - protein, 15 aa, Artificial Sequence
  Description of Artificial Sequence: Synthetic peptide
  Seed: SLMQGSTLPRRSGAA
SLMQFSTIPKRSGAA

SEQ ID NO: 132759 - protein, 15 aa, Artificial Sequence
  Description of Artificial Sequence: Synthetic peptide
  Seed: SLMQGSTLPRRSGAA
SLMQFSTIPKRSQAA

SEQ ID NO: 132760 - protein, 15 aa, Artificial Sequence
  Description of Artificial Sequence: Synthetic peptide
  Seed: SLMQGSTLPRRSGAA
SLMQFSTIPKRSRAA

SEQ ID NO: 132761 - protein, 15 aa, Artificial Sequence
  Description of Artificial Sequence: Synthetic peptide
  Seed: SLMQGSTLPRRSGAA
SLMQFSTIPKRSSAA

SEQ ID NO: 132762 - protein, 15 aa, Artificial Sequence
  Description of Artificial Sequence: Synthetic peptide
  Seed: SLMQGSTLPRRSGAA
SLMQFSTIPKRSTAA

SEQ ID NO: 132763 - protein, 15 aa, Artificial Sequence
  Description of Artificial Sequence: Synthetic peptide
  Seed: SLMQGSTLPRRSGAA
SLMQFSTIPRRSAAA

SEQ ID NO: 132764 - protein, 15 aa, Artificial Sequence
  Description of Artificial Sequence: Synthetic peptide
  Seed: SLMQGSTLPRRSGAA
SLMQFSTIPRRSGAA

SEQ ID NO: 132765 - protein, 15 aa, Artificial Sequence
  Description of Artificial Sequence: Synthetic peptide
  Seed: SLMQGSTLPRRSGAA
SLMQFSTIPRRSHAA

SEQ ID NO: 132766 - protein, 15 aa, Artificial Sequence
  Description of Artificial Sequence: Synthetic peptide
  Seed: SLMQGSTLPRRSGAA
SLMQFSTIPRRSIAA

SEQ ID NO: 132767 - protein, 15 aa, Artificial Sequence
  Description of Artificial Sequence: Synthetic peptide
  Seed: SLMQGSTLPRRSGAA
SLMQFSTIPRRSKAA

SEQ ID NO: 132768 - protein, 15 aa, Artificial Sequence
  Description of Artificial Sequence: Synthetic peptide
  Seed: SLMQGSTLPRRSGAA
SLMQFSTIPRRSLAA

SEQ ID NO: 132769 - protein, 15 aa, Artificial Sequence
  Description of Artificial Sequence: Synthetic peptide
  Seed: SLMQGSTLPRRSGAA
SLMQFSTIPRRSMAA

SEQ ID NO: 132770 - protein, 15 aa, Artificial Sequence
  Description of Artificial Sequence: Synthetic peptide
  Seed: SLMQGSTLPRRSGAA
SLMQFSTIPRRSQAA

SEQ ID NO: 132771 - protein, 15 aa, Artificial Sequence
  Description of Artificial Sequence: Synthetic peptide
  Seed: SLMQGSTLPRRSGAA
SLMQFSTIPRRSRAA

SEQ ID NO: 132772 - protein, 15 aa, Artificial Sequence
  Description of Artificial Sequence: Synthetic peptide
  Seed: SLMQGSTLPRRSGAA
SLMQFSTIPRRSSAA

SEQ ID NO: 132773 - protein, 15 aa, Artificial Sequence
  Description of Artificial Sequence: Synthetic peptide
  Seed: SLMQGSTLPRRSGAA
SLMQFSTIPRRSTAA

SEQ ID NO: 132774 - protein, 15 aa, Artificial Sequence
  Description of Artificial Sequence: Synthetic peptide
  Seed: SLMQGSTLPRRSGAA
SLMQFSTIPRRSVAA

SEQ ID NO: 132775 - protein, 15 aa, Artificial Sequence
  Description of Artificial Sequence: Synthetic peptide
  Seed: SLMQGSTLPRRSGAA
SLMQFSTIPRRSYAA

SEQ ID NO: 132776 - protein, 15 aa, Artificial Sequence
  Description of Artificial Sequence: Synthetic peptide
  Seed: SLMQGSTLPRRSGAA
SLMQFSTKPRRSAAA

SEQ ID NO: 132777 - protein, 15 aa, Artificial Sequence
  Description of Artificial Sequence: Synthetic peptide
  Seed: SLMQGSTLPRRSGAA
SLMQFSTKPRRSLAA

SEQ ID NO: 132778 - protein, 15 aa, Artificial Sequence
  Description of Artificial Sequence: Synthetic peptide
  Seed: SLMQGSTLPRRSGAA
SLMQFSTKPRRSMAA

SEQ ID NO: 132779 - protein, 15 aa, Artificial Sequence
  Description of Artificial Sequence: Synthetic peptide
  Seed: SLMQGSTLPRRSGAA
SLMQFSTKPRRSRAA

SEQ ID NO: 132780 - protein, 15 aa, Artificial Sequence
  Description of Artificial Sequence: Synthetic peptide
  Seed: SLMQGSTLPRRSGAA
SLMQFSTKPRRSSAA

SEQ ID NO: 132781 - protein, 15 aa, Artificial Sequence
  Description of Artificial Sequence: Synthetic peptide
  Seed: SLMQGSTLPRRSGAA
SLMQFSTKPRRSVAA

SEQ ID NO: 132782 - protein, 15 aa, Artificial Sequence
  Description of Artificial Sequence: Synthetic peptide
  Seed: SLMQGSTLPRRSGAA
SLMQFSTKPRRSYAA

SEQ ID NO: 132783 - protein, 15 aa, Artificial Sequence
  Description of Artificial Sequence: Synthetic peptide
  Seed: SLMQGSTLPRRSGAA
SLMQFSTLPKRSAAA

SEQ ID NO: 132784 - protein, 15 aa, Artificial Sequence
  Description of Artificial Sequence: Synthetic peptide
  Seed: SLMQGSTLPRRSGAA
SLMQFSTLPKRSGAA

SEQ ID NO: 132785 - protein, 15 aa, Artificial Sequence
  Description of Artificial Sequence: Synthetic peptide
  Seed: SLMQGSTLPRRSGAA
SLMQFSTLPKRSQAA

SEQ ID NO: 132786 - protein, 15 aa, Artificial Sequence
  Description of Artificial Sequence: Synthetic peptide
  Seed: SLMQGSTLPRRSGAA
SLMQFSTLPKRSRAA

SEQ ID NO: 132787 - protein, 15 aa, Artificial Sequence
  Description of Artificial Sequence: Synthetic peptide
  Seed: SLMQGSTLPRRSGAA
SLMQFSTLPKRSSAA

SEQ ID NO: 132788 - protein, 15 aa, Artificial Sequence
  Description of Artificial Sequence: Synthetic peptide
  Seed: SLMQGSTLPRRSGAA
SLMQFSTLPKRSTAA

SEQ ID NO: 132789 - protein, 15 aa, Artificial Sequence
  Description of Artificial Sequence: Synthetic peptide
  Seed: SLMQGSTLPRRSGAA
SLMQFSTLPKRSVAA

SEQ ID NO: 132790 - protein, 15 aa, Artificial Sequence
  Description of Artificial Sequence: Synthetic peptide
  Seed: SLMQGSTLPRRSGAA
SLMQFSTLPRRSAAA

SEQ ID NO: 132791 - protein, 15 aa, Artificial Sequence
  Description of Artificial Sequence: Synthetic peptide
  Seed: SLMQGSTLPRRSGAA
SLMQFSTLPRRSFAA

SEQ ID NO: 132792 - protein, 15 aa, Artificial Sequence
  Description of Artificial Sequence: Synthetic peptide
  Seed: SLMQGSTLPRRSGAA
SLMQFSTLPRRSGAA

SEQ ID NO: 132793 - protein, 15 aa, Artificial Sequence
  Description of Artificial Sequence: Synthetic peptide
  Seed: SLMQGSTLPRRSGAA
SLMQFSTLPRRSHAA

SEQ ID NO: 132794 - protein, 15 aa, Artificial Sequence
  Description of Artificial Sequence: Synthetic peptide
  Seed: SLMQGSTLPRRSGAA
SLMQFSTLPRRSIAA

SEQ ID NO: 132795 - protein, 15 aa, Artificial Sequence
  Description of Artificial Sequence: Synthetic peptide
  Seed: SLMQGSTLPRRSGAA
SLMQFSTLPRRSKAA

SEQ ID NO: 132796 - protein, 15 aa, Artificial Sequence
  Description of Artificial Sequence: Synthetic peptide
  Seed: SLMQGSTLPRRSGAA
SLMQFSTLPRRSLAA

SEQ ID NO: 132797 - protein, 15 aa, Artificial Sequence
  Description of Artificial Sequence: Synthetic peptide
  Seed: SLMQGSTLPRRSGAA
SLMQFSTLPRRSMAA

SEQ ID NO: 132798 - protein, 15 aa, Artificial Sequence
  Description of Artificial Sequence: Synthetic peptide
  Seed: SLMQGSTLPRRSGAA
SLMQFSTLPRRSNAA

SEQ ID NO: 132799 - protein, 15 aa, Artificial Sequence
  Description of Artificial Sequence: Synthetic peptide
  Seed: SLMQGSTLPRRSGAA
SLMQFSTLPRRSQAA

SEQ ID NO: 132800 - protein, 15 aa, Artificial Sequence
  Description of Artificial Sequence: Synthetic peptide
  Seed: SLMQGSTLPRRSGAA
SLMQFSTLPRRSRAA

SEQ ID NO: 132801 - protein, 15 aa, Artificial Sequence
  Description of Artificial Sequence: Synthetic peptide
  Seed: SLMQGSTLPRRSGAA
SLMQFSTLPRRSSAA

SEQ ID NO: 132802 - protein, 15 aa, Artificial Sequence
  Description of Artificial Sequence: Synthetic peptide
  Seed: SLMQGSTLPRRSGAA
SLMQFSTLPRRSTAA

SEQ ID NO: 132803 - protein, 15 aa, Artificial Sequence
  Description of Artificial Sequence: Synthetic peptide
  Seed: SLMQGSTLPRRSGAA
SLMQFSTLPRRSVAA

SEQ ID NO: 132804 - protein, 15 aa, Artificial Sequence
  Description of Artificial Sequence: Synthetic peptide
  Seed: SLMQGSTLPRRSGAA
SLMQFSTLPRRSWAA

SEQ ID NO: 132805 - protein, 15 aa, Artificial Sequence
  Description of Artificial Sequence: Synthetic peptide
  Seed: SLMQGSTLPRRSGAA
SLMQFSTLPRRSYAA

SEQ ID NO: 132806 - protein, 15 aa, Artificial Sequence
  Description of Artificial Sequence: Synthetic peptide
  Seed: SLMQGSTLPRRSGAA
SLMQFSTMPKRSAAA

SEQ ID NO: 132807 - protein, 15 aa, Artificial Sequence
  Description of Artificial Sequence: Synthetic peptide
  Seed: SLMQGSTLPRRSGAA
SLMQFSTMPKRSGAA

SEQ ID NO: 132808 - protein, 15 aa, Artificial Sequence
  Description of Artificial Sequence: Synthetic peptide
  Seed: SLMQGSTLPRRSGAA
SLMQFSTMPKRSHAA

SEQ ID NO: 132809 - protein, 15 aa, Artificial Sequence
  Description of Artificial Sequence: Synthetic peptide
  Seed: SLMQGSTLPRRSGAA
SLMQFSTMPKRSMAA

SEQ ID NO: 132810 - protein, 15 aa, Artificial Sequence
  Description of Artificial Sequence: Synthetic peptide
  Seed: SLMQGSTLPRRSGAA
SLMQFSTMPKRSQAA

SEQ ID NO: 132811 - protein, 15 aa, Artificial Sequence
  Description of Artificial Sequence: Synthetic peptide
  Seed: SLMQGSTLPRRSGAA
SLMQFSTMPKRSRAA

SEQ ID NO: 132812 - protein, 15 aa, Artificial Sequence
  Description of Artificial Sequence: Synthetic peptide
  Seed: SLMQGSTLPRRSGAA
SLMQFSTMPKRSSAA

SEQ ID NO: 132813 - protein, 15 aa, Artificial Sequence
  Description of Artificial Sequence: Synthetic peptide
  Seed: SLMQGSTLPRRSGAA
SLMQFSTMPKRSTAA

SEQ ID NO: 132814 - protein, 15 aa, Artificial Sequence
  Description of Artificial Sequence: Synthetic peptide
  Seed: SLMQGSTLPRRSGAA
SLMQFSTMPKRSVAA

SEQ ID NO: 132815 - protein, 15 aa, Artificial Sequence
  Description of Artificial Sequence: Synthetic peptide
  Seed: SLMQGSTLPRRSGAA
SLMQFSTMPKRSYAA

SEQ ID NO: 132816 - protein, 15 aa, Artificial Sequence
  Description of Artificial Sequence: Synthetic peptide
  Seed: SLMQGSTLPRRSGAA
SLMQFSTMPRRSAAA

SEQ ID NO: 132817 - protein, 15 aa, Artificial Sequence
  Description of Artificial Sequence: Synthetic peptide
  Seed: SLMQGSTLPRRSGAA
SLMQFSTMPRRSFAA

SEQ ID NO: 132818 - protein, 15 aa, Artificial Sequence
  Description of Artificial Sequence: Synthetic peptide
  Seed: SLMQGSTLPRRSGAA
SLMQFSTMPRRSGAA

SEQ ID NO: 132819 - protein, 15 aa, Artificial Sequence
  Description of Artificial Sequence: Synthetic peptide
  Seed: SLMQGSTLPRRSGAA
SLMQFSTMPRRSHAA

SEQ ID NO: 132820 - protein, 15 aa, Artificial Sequence
  Description of Artificial Sequence: Synthetic peptide
  Seed: SLMQGSTLPRRSGAA
SLMQFSTMPRRSIAA

SEQ ID NO: 132821 - protein, 15 aa, Artificial Sequence
  Description of Artificial Sequence: Synthetic peptide
  Seed: SLMQGSTLPRRSGAA
SLMQFSTMPRRSKAA

SEQ ID NO: 132822 - protein, 15 aa, Artificial Sequence
  Description of Artificial Sequence: Synthetic peptide
  Seed: SLMQGSTLPRRSGAA
SLMQFSTMPRRSLAA

SEQ ID NO: 132823 - protein, 15 aa, Artificial Sequence
  Description of Artificial Sequence: Synthetic peptide
  Seed: SLMQGSTLPRRSGAA
SLMQFSTMPRRSMAA

SEQ ID NO: 132824 - protein, 15 aa, Artificial Sequence
  Description of Artificial Sequence: Synthetic peptide
  Seed: SLMQGSTLPRRSGAA
SLMQFSTMPRRSNAA

SEQ ID NO: 132825 - protein, 15 aa, Artificial Sequence
  Description of Artificial Sequence: Synthetic peptide
  Seed: SLMQGSTLPRRSGAA
SLMQFSTMPRRSPAA

SEQ ID NO: 132826 - protein, 15 aa, Artificial Sequence
  Description of Artificial Sequence: Synthetic peptide
  Seed: SLMQGSTLPRRSGAA
SLMQFSTMPRRSQAA

SEQ ID NO: 132827 - protein, 15 aa, Artificial Sequence
  Description of Artificial Sequence: Synthetic peptide
  Seed: SLMQGSTLPRRSGAA
SLMQFSTMPRRSRAA

SEQ ID NO: 132828 - protein, 15 aa, Artificial Sequence
  Description of Artificial Sequence: Synthetic peptide
  Seed: SLMQGSTLPRRSGAA
SLMQFSTMPRRSSAA

SEQ ID NO: 132829 - protein, 15 aa, Artificial Sequence
  Description of Artificial Sequence: Synthetic peptide
  Seed: SLMQGSTLPRRSGAA
SLMQFSTMPRRSTAA

SEQ ID NO: 132830 - protein, 15 aa, Artificial Sequence
  Description of Artificial Sequence: Synthetic peptide
  Seed: SLMQGSTLPRRSGAA
SLMQFSTMPRRSVAA

SEQ ID NO: 132831 - protein, 15 aa, Artificial Sequence
  Description of Artificial Sequence: Synthetic peptide
  Seed: SLMQGSTLPRRSGAA
SLMQFSTMPRRSWAA

SEQ ID NO: 132832 - protein, 15 aa, Artificial Sequence
  Description of Artificial Sequence: Synthetic peptide
  Seed: SLMQGSTLPRRSGAA
SLMQFSTMPRRSYAA

SEQ ID NO: 132833 - protein, 15 aa, Artificial Sequence
  Description of Artificial Sequence: Synthetic peptide
  Seed: SLMQGSTLPRRSGAA
SLMQFSTRPKRSAAA

SEQ ID NO: 132834 - protein, 15 aa, Artificial Sequence
  Description of Artificial Sequence: Synthetic peptide
  Seed: SLMQGSTLPRRSGAA
SLMQFSTRPRRSAAA

SEQ ID NO: 132835 - protein, 15 aa, Artificial Sequence
  Description of Artificial Sequence: Synthetic peptide
  Seed: SLMQGSTLPRRSGAA
SLMQFSTRPRRSGAA

SEQ ID NO: 132836 - protein, 15 aa, Artificial Sequence
  Description of Artificial Sequence: Synthetic peptide
  Seed: SLMQGSTLPRRSGAA
SLMQFSTRPRRSQAA

SEQ ID NO: 132837 - protein, 15 aa, Artificial Sequence
  Description of Artificial Sequence: Synthetic peptide
  Seed: SLMQGSTLPRRSGAA
SLMQFSTRPRRSSAA

SEQ ID NO: 132838 - protein, 15 aa, Artificial Sequence
  Description of Artificial Sequence: Synthetic peptide
  Seed: SLMQGSTLPRRSGAA
SLMQFSTVPKRSAAA

SEQ ID NO: 132839 - protein, 15 aa, Artificial Sequence
  Description of Artificial Sequence: Synthetic peptide
  Seed: SLMQGSTLPRRSGAA
SLMQFSTVPKRSSAA

SEQ ID NO: 132840 - protein, 15 aa, Artificial Sequence
  Description of Artificial Sequence: Synthetic peptide
  Seed: SLMQGSTLPRRSGAA
SLMQFSTVPRRSAAA

SEQ ID NO: 132841 - protein, 15 aa, Artificial Sequence
  Description of Artificial Sequence: Synthetic peptide
  Seed: SLMQGSTLPRRSGAA
SLMQFSTVPRRSGAA

SEQ ID NO: 132842 - protein, 15 aa, Artificial Sequence
  Description of Artificial Sequence: Synthetic peptide
  Seed: SLMQGSTLPRRSGAA
SLMQFSTVPRRSQAA

SEQ ID NO: 132843 - protein, 15 aa, Artificial Sequence
  Description of Artificial Sequence: Synthetic peptide
  Seed: SLMQGSTLPRRSGAA
SLMQFSTVPRRSRAA

SEQ ID NO: 132844 - protein, 15 aa, Artificial Sequence
  Description of Artificial Sequence: Synthetic peptide
  Seed: SLMQGSTLPRRSGAA
SLMQFSTVPRRSSAA

SEQ ID NO: 132845 - protein, 15 aa, Artificial Sequence
  Description of Artificial Sequence: Synthetic peptide
  Seed: SLMQGSTLPRRSGAA
SLMQFSTVPRRSTAA

SEQ ID NO: 132846 - protein, 15 aa, Artificial Sequence
  Description of Artificial Sequence: Synthetic peptide
  Seed: SLMQGSTLPRRSGAA
SLMQFSTVPRRSVAA

SEQ ID NO: 132847 - protein, 15 aa, Artificial Sequence
  Description of Artificial Sequence: Synthetic peptide
  Seed: SLMQGSTLPRRSGAA
SLMQFSTVPRRSYAA

SEQ ID NO: 132848 - protein, 15 aa, Artificial Sequence
  Description of Artificial Sequence: Synthetic peptide
  Seed: SLMQGSTLPRRSGAA
SLMQFSTWPRRSAAA

SEQ ID NO: 132849 - protein, 15 aa, Artificial Sequence
  Description of Artificial Sequence: Synthetic peptide
  Seed: SLMQGSTLPRRSGAA
SLMQISTAPKRSAAA

SEQ ID NO: 132850 - protein, 15 aa, Artificial Sequence
  Description of Artificial Sequence: Synthetic peptide
  Seed: SLMQGSTLPRRSGAA
SLMQISTAPKRSSAA

SEQ ID NO: 132851 - protein, 15 aa, Artificial Sequence
  Description of Artificial Sequence: Synthetic peptide
  Seed: SLMQGSTLPRRSGAA
SLMQISTAPRRSAAA

SEQ ID NO: 132852 - protein, 15 aa, Artificial Sequence
  Description of Artificial Sequence: Synthetic peptide
  Seed: SLMQGSTLPRRSGAA
SLMQISTAPRRSGAA

SEQ ID NO: 132853 - protein, 15 aa, Artificial Sequence
  Description of Artificial Sequence: Synthetic peptide
  Seed: SLMQGSTLPRRSGAA
SLMQISTAPRRSHAA

SEQ ID NO: 132854 - protein, 15 aa, Artificial Sequence
  Description of Artificial Sequence: Synthetic peptide
  Seed: SLMQGSTLPRRSGAA
SLMQISTAPRRSIAA

SEQ ID NO: 132855 - protein, 15 aa, Artificial Sequence
  Description of Artificial Sequence: Synthetic peptide
  Seed: SLMQGSTLPRRSGAA
SLMQISTAPRRSKAA

SEQ ID NO: 132856 - protein, 15 aa, Artificial Sequence
  Description of Artificial Sequence: Synthetic peptide
  Seed: SLMQGSTLPRRSGAA
SLMQISTAPRRSLAA

SEQ ID NO: 132857 - protein, 15 aa, Artificial Sequence
  Description of Artificial Sequence: Synthetic peptide
  Seed: SLMQGSTLPRRSGAA
SLMQISTAPRRSMAA

SEQ ID NO: 132858 - protein, 15 aa, Artificial Sequence
  Description of Artificial Sequence: Synthetic peptide
  Seed: SLMQGSTLPRRSGAA
SLMQISTAPRRSQAA

SEQ ID NO: 132859 - protein, 15 aa, Artificial Sequence
  Description of Artificial Sequence: Synthetic peptide
  Seed: SLMQGSTLPRRSGAA
SLMQISTAPRRSRAA

SEQ ID NO: 132860 - protein, 15 aa, Artificial Sequence
  Description of Artificial Sequence: Synthetic peptide
  Seed: SLMQGSTLPRRSGAA
SLMQISTAPRRSSAA

SEQ ID NO: 132861 - protein, 15 aa, Artificial Sequence
  Description of Artificial Sequence: Synthetic peptide
  Seed: SLMQGSTLPRRSGAA
SLMQISTAPRRSTAA

SEQ ID NO: 132862 - protein, 15 aa, Artificial Sequence
  Description of Artificial Sequence: Synthetic peptide
  Seed: SLMQGSTLPRRSGAA
SLMQISTAPRRSVAA

SEQ ID NO: 132863 - protein, 15 aa, Artificial Sequence
  Description of Artificial Sequence: Synthetic peptide
  Seed: SLMQGSTLPRRSGAA
SLMQISTAPRRSYAA

SEQ ID NO: 132864 - protein, 15 aa, Artificial Sequence
  Description of Artificial Sequence: Synthetic peptide
  Seed: SLMQGSTLPRRSGAA
SLMQISTFPKRSAAA

SEQ ID NO: 132865 - protein, 15 aa, Artificial Sequence
  Description of Artificial Sequence: Synthetic peptide
  Seed: SLMQGSTLPRRSGAA
SLMQISTFPKRSGAA

SEQ ID NO: 132866 - protein, 15 aa, Artificial Sequence
  Description of Artificial Sequence: Synthetic peptide
  Seed: SLMQGSTLPRRSGAA
SLMQISTFPKRSHAA

SEQ ID NO: 132867 - protein, 15 aa, Artificial Sequence
  Description of Artificial Sequence: Synthetic peptide
  Seed: SLMQGSTLPRRSGAA
SLMQISTFPKRSIAA

SEQ ID NO: 132868 - protein, 15 aa, Artificial Sequence
  Description of Artificial Sequence: Synthetic peptide
  Seed: SLMQGSTLPRRSGAA
SLMQISTFPKRSKAA

SEQ ID NO: 132869 - protein, 15 aa, Artificial Sequence
  Description of Artificial Sequence: Synthetic peptide
  Seed: SLMQGSTLPRRSGAA
SLMQISTFPKRSLAA

SEQ ID NO: 132870 - protein, 15 aa, Artificial Sequence
  Description of Artificial Sequence: Synthetic peptide
  Seed: SLMQGSTLPRRSGAA
SLMQISTFPKRSMAA

SEQ ID NO: 132871 - protein, 15 aa, Artificial Sequence
  Description of Artificial Sequence: Synthetic peptide
  Seed: SLMQGSTLPRRSGAA
SLMQISTFPKRSQAA

SEQ ID NO: 132872 - protein, 15 aa, Artificial Sequence
  Description of Artificial Sequence: Synthetic peptide
  Seed: SLMQGSTLPRRSGAA
SLMQISTFPKRSRAA

SEQ ID NO: 132873 - protein, 15 aa, Artificial Sequence
  Description of Artificial Sequence: Synthetic peptide
  Seed: SLMQGSTLPRRSGAA
SLMQISTFPKRSSAA

SEQ ID NO: 132874 - protein, 15 aa, Artificial Sequence
  Description of Artificial Sequence: Synthetic peptide
  Seed: SLMQGSTLPRRSGAA
SLMQISTFPKRSTAA

SEQ ID NO: 132875 - protein, 15 aa, Artificial Sequence
  Description of Artificial Sequence: Synthetic peptide
  Seed: SLMQGSTLPRRSGAA
SLMQISTFPKRSVAA

SEQ ID NO: 132876 - protein, 15 aa, Artificial Sequence
  Description of Artificial Sequence: Synthetic peptide
  Seed: SLMQGSTLPRRSGAA
SLMQISTFPKRSYAA

SEQ ID NO: 132877 - protein, 15 aa, Artificial Sequence
  Description of Artificial Sequence: Synthetic peptide
  Seed: SLMQGSTLPRRSGAA
SLMQISTFPRRSAAA

SEQ ID NO: 132878 - protein, 15 aa, Artificial Sequence
  Description of Artificial Sequence: Synthetic peptide
  Seed: SLMQGSTLPRRSGAA
SLMQISTFPRRSFAA

SEQ ID NO: 132879 - protein, 15 aa, Artificial Sequence
  Description of Artificial Sequence: Synthetic peptide
  Seed: SLMQGSTLPRRSGAA
SLMQISTFPRRSGAA

SEQ ID NO: 132880 - protein, 15 aa, Artificial Sequence
  Description of Artificial Sequence: Synthetic peptide
  Seed: SLMQGSTLPRRSGAA
SLMQISTFPRRSHAA

SEQ ID NO: 132881 - protein, 15 aa, Artificial Sequence
  Description of Artificial Sequence: Synthetic peptide
  Seed: SLMQGSTLPRRSGAA
SLMQISTFPRRSIAA

SEQ ID NO: 132882 - protein, 15 aa, Artificial Sequence
  Description of Artificial Sequence: Synthetic peptide
  Seed: SLMQGSTLPRRSGAA
SLMQISTFPRRSKAA

SEQ ID NO: 132883 - protein, 15 aa, Artificial Sequence
  Description of Artificial Sequence: Synthetic peptide
  Seed: SLMQGSTLPRRSGAA
SLMQISTFPRRSLAA

SEQ ID NO: 132884 - protein, 15 aa, Artificial Sequence
  Description of Artificial Sequence: Synthetic peptide
  Seed: SLMQGSTLPRRSGAA
SLMQISTFPRRSMAA

SEQ ID NO: 132885 - protein, 15 aa, Artificial Sequence
  Description of Artificial Sequence: Synthetic peptide
  Seed: SLMQGSTLPRRSGAA
SLMQISTFPRRSQAA

SEQ ID NO: 132886 - protein, 15 aa, Artificial Sequence
  Description of Artificial Sequence: Synthetic peptide
  Seed: SLMQGSTLPRRSGAA
SLMQISTFPRRSRAA

SEQ ID NO: 132887 - protein, 15 aa, Artificial Sequence
  Description of Artificial Sequence: Synthetic peptide
  Seed: SLMQGSTLPRRSGAA
SLMQISTFPRRSSAA

SEQ ID NO: 132888 - protein, 15 aa, Artificial Sequence
  Description of Artificial Sequence: Synthetic peptide
  Seed: SLMQGSTLPRRSGAA
SLMQISTFPRRSTAA

SEQ ID NO: 132889 - protein, 15 aa, Artificial Sequence
  Description of Artificial Sequence: Synthetic peptide
  Seed: SLMQGSTLPRRSGAA
SLMQISTFPRRSVAA

SEQ ID NO: 132890 - protein, 15 aa, Artificial Sequence
  Description of Artificial Sequence: Synthetic peptide
  Seed: SLMQGSTLPRRSGAA
SLMQISTFPRRSYAA

SEQ ID NO: 132891 - protein, 15 aa, Artificial Sequence
  Description of Artificial Sequence: Synthetic peptide
  Seed: SLMQGSTLPRRSGAA
SLMQISTHPRRSAAA

SEQ ID NO: 132892 - protein, 15 aa, Artificial Sequence
  Description of Artificial Sequence: Synthetic peptide
  Seed: SLMQGSTLPRRSGAA
SLMQISTHPRRSIAA

SEQ ID NO: 132893 - protein, 15 aa, Artificial Sequence
  Description of Artificial Sequence: Synthetic peptide
  Seed: SLMQGSTLPRRSGAA
SLMQISTHPRRSKAA

SEQ ID NO: 132894 - protein, 15 aa, Artificial Sequence
  Description of Artificial Sequence: Synthetic peptide
  Seed: SLMQGSTLPRRSGAA
SLMQISTHPRRSLAA

SEQ ID NO: 132895 - protein, 15 aa, Artificial Sequence
  Description of Artificial Sequence: Synthetic peptide
  Seed: SLMQGSTLPRRSGAA
SLMQISTHPRRSMAA

SEQ ID NO: 132896 - protein, 15 aa, Artificial Sequence
  Description of Artificial Sequence: Synthetic peptide
  Seed: SLMQGSTLPRRSGAA
SLMQISTHPRRSQAA

SEQ ID NO: 132897 - protein, 15 aa, Artificial Sequence
  Description of Artificial Sequence: Synthetic peptide
  Seed: SLMQGSTLPRRSGAA
SLMQISTHPRRSRAA

SEQ ID NO: 132898 - protein, 15 aa, Artificial Sequence
  Description of Artificial Sequence: Synthetic peptide
  Seed: SLMQGSTLPRRSGAA
SLMQISTHPRRSSAA

SEQ ID NO: 132899 - protein, 15 aa, Artificial Sequence
  Description of Artificial Sequence: Synthetic peptide
  Seed: SLMQGSTLPRRSGAA
SLMQISTHPRRSVAA

SEQ ID NO: 132900 - protein, 15 aa, Artificial Sequence
  Description of Artificial Sequence: Synthetic peptide
  Seed: SLMQGSTLPRRSGAA
SLMQISTHPRRSYAA

SEQ ID NO: 132901 - protein, 15 aa, Artificial Sequence
  Description of Artificial Sequence: Synthetic peptide
  Seed: SLMQGSTLPRRSGAA
SLMQISTIPKRSAAA

SEQ ID NO: 132902 - protein, 15 aa, Artificial Sequence
  Description of Artificial Sequence: Synthetic peptide
  Seed: SLMQGSTLPRRSGAA
SLMQISTIPKRSGAA

SEQ ID NO: 132903 - protein, 15 aa, Artificial Sequence
  Description of Artificial Sequence: Synthetic peptide
  Seed: SLMQGSTLPRRSGAA
SLMQISTIPKRSHAA

SEQ ID NO: 132904 - protein, 15 aa, Artificial Sequence
  Description of Artificial Sequence: Synthetic peptide
  Seed: SLMQGSTLPRRSGAA
SLMQISTIPKRSIAA

SEQ ID NO: 132905 - protein, 15 aa, Artificial Sequence
  Description of Artificial Sequence: Synthetic peptide
  Seed: SLMQGSTLPRRSGAA
SLMQISTIPKRSKAA

SEQ ID NO: 132906 - protein, 15 aa, Artificial Sequence
  Description of Artificial Sequence: Synthetic peptide
  Seed: SLMQGSTLPRRSGAA
SLMQISTIPKRSLAA

SEQ ID NO: 132907 - protein, 15 aa, Artificial Sequence
  Description of Artificial Sequence: Synthetic peptide
  Seed: SLMQGSTLPRRSGAA
SLMQISTIPKRSMAA

SEQ ID NO: 132908 - protein, 15 aa, Artificial Sequence
  Description of Artificial Sequence: Synthetic peptide
  Seed: SLMQGSTLPRRSGAA
SLMQISTIPKRSQAA

SEQ ID NO: 132909 - protein, 15 aa, Artificial Sequence
  Description of Artificial Sequence: Synthetic peptide
  Seed: SLMQGSTLPRRSGAA
SLMQISTIPKRSRAA

SEQ ID NO: 132910 - protein, 15 aa, Artificial Sequence
  Description of Artificial Sequence: Synthetic peptide
  Seed: SLMQGSTLPRRSGAA
SLMQISTIPKRSSAA

SEQ ID NO: 132911 - protein, 15 aa, Artificial Sequence
  Description of Artificial Sequence: Synthetic peptide
  Seed: SLMQGSTLPRRSGAA
SLMQISTIPKRSTAA

SEQ ID NO: 132912 - protein, 15 aa, Artificial Sequence
  Description of Artificial Sequence: Synthetic peptide
  Seed: SLMQGSTLPRRSGAA
SLMQISTIPKRSVAA

SEQ ID NO: 132913 - protein, 15 aa, Artificial Sequence
  Description of Artificial Sequence: Synthetic peptide
  Seed: SLMQGSTLPRRSGAA
SLMQISTIPKRSYAA

SEQ ID NO: 132914 - protein, 15 aa, Artificial Sequence
  Description of Artificial Sequence: Synthetic peptide
  Seed: SLMQGSTLPRRSGAA
SLMQISTIPRRSAAA

SEQ ID NO: 132915 - protein, 15 aa, Artificial Sequence
  Description of Artificial Sequence: Synthetic peptide
  Seed: SLMQGSTLPRRSGAA
SLMQISTIPRRSFAA

SEQ ID NO: 132916 - protein, 15 aa, Artificial Sequence
  Description of Artificial Sequence: Synthetic peptide
  Seed: SLMQGSTLPRRSGAA
SLMQISTIPRRSGAA

SEQ ID NO: 132917 - protein, 15 aa, Artificial Sequence
  Description of Artificial Sequence: Synthetic peptide
  Seed: SLMQGSTLPRRSGAA
SLMQISTIPRRSHAA

SEQ ID NO: 132918 - protein, 15 aa, Artificial Sequence
  Description of Artificial Sequence: Synthetic peptide
  Seed: SLMQGSTLPRRSGAA
SLMQISTIPRRSIAA

SEQ ID NO: 132919 - protein, 15 aa, Artificial Sequence
  Description of Artificial Sequence: Synthetic peptide
  Seed: SLMQGSTLPRRSGAA
SLMQISTIPRRSKAA

SEQ ID NO: 132920 - protein, 15 aa, Artificial Sequence
  Description of Artificial Sequence: Synthetic peptide
  Seed: SLMQGSTLPRRSGAA
SLMQISTIPRRSLAA

SEQ ID NO: 132921 - protein, 15 aa, Artificial Sequence
  Description of Artificial Sequence: Synthetic peptide
  Seed: SLMQGSTLPRRSGAA
SLMQISTIPRRSMAA

SEQ ID NO: 132922 - protein, 15 aa, Artificial Sequence
  Description of Artificial Sequence: Synthetic peptide
  Seed: SLMQGSTLPRRSGAA
SLMQISTIPRRSNAA

SEQ ID NO: 132923 - protein, 15 aa, Artificial Sequence
  Description of Artificial Sequence: Synthetic peptide
  Seed: SLMQGSTLPRRSGAA
SLMQISTIPRRSPAA

SEQ ID NO: 132924 - protein, 15 aa, Artificial Sequence
  Description of Artificial Sequence: Synthetic peptide
  Seed: SLMQGSTLPRRSGAA
SLMQISTIPRRSQAA

SEQ ID NO: 132925 - protein, 15 aa, Artificial Sequence
  Description of Artificial Sequence: Synthetic peptide
  Seed: SLMQGSTLPRRSGAA
SLMQISTIPRRSRAA

SEQ ID NO: 132926 - protein, 15 aa, Artificial Sequence
  Description of Artificial Sequence: Synthetic peptide
  Seed: SLMQGSTLPRRSGAA
SLMQISTIPRRSSAA

SEQ ID NO: 132927 - protein, 15 aa, Artificial Sequence
  Description of Artificial Sequence: Synthetic peptide
  Seed: SLMQGSTLPRRSGAA
SLMQISTIPRRSTAA

SEQ ID NO: 132928 - protein, 15 aa, Artificial Sequence
  Description of Artificial Sequence: Synthetic peptide
  Seed: SLMQGSTLPRRSGAA
SLMQISTIPRRSVAA

SEQ ID NO: 132929 - protein, 15 aa, Artificial Sequence
  Description of Artificial Sequence: Synthetic peptide
  Seed: SLMQGSTLPRRSGAA
SLMQISTIPRRSWAA

SEQ ID NO: 132930 - protein, 15 aa, Artificial Sequence
  Description of Artificial Sequence: Synthetic peptide
  Seed: SLMQGSTLPRRSGAA
SLMQISTIPRRSYAA

SEQ ID NO: 132931 - protein, 15 aa, Artificial Sequence
  Description of Artificial Sequence: Synthetic peptide
  Seed: SLMQGSTLPRRSGAA
SLMQISTKPKRSAAA

SEQ ID NO: 132932 - protein, 15 aa, Artificial Sequence
  Description of Artificial Sequence: Synthetic peptide
  Seed: SLMQGSTLPRRSGAA
SLMQISTKPRRSAAA

SEQ ID NO: 132933 - protein, 15 aa, Artificial Sequence
  Description of Artificial Sequence: Synthetic peptide
  Seed: SLMQGSTLPRRSGAA
SLMQISTKPRRSFAA

SEQ ID NO: 132934 - protein, 15 aa, Artificial Sequence
  Description of Artificial Sequence: Synthetic peptide
  Seed: SLMQGSTLPRRSGAA
SLMQISTKPRRSHAA

SEQ ID NO: 132935 - protein, 15 aa, Artificial Sequence
  Description of Artificial Sequence: Synthetic peptide
  Seed: SLMQGSTLPRRSGAA
SLMQISTKPRRSIAA

SEQ ID NO: 132936 - protein, 15 aa, Artificial Sequence
  Description of Artificial Sequence: Synthetic peptide
  Seed: SLMQGSTLPRRSGAA
SLMQISTKPRRSKAA

SEQ ID NO: 132937 - protein, 15 aa, Artificial Sequence
  Description of Artificial Sequence: Synthetic peptide
  Seed: SLMQGSTLPRRSGAA
SLMQISTKPRRSLAA

SEQ ID NO: 132938 - protein, 15 aa, Artificial Sequence
  Description of Artificial Sequence: Synthetic peptide
  Seed: SLMQGSTLPRRSGAA
SLMQISTKPRRSMAA

SEQ ID NO: 132939 - protein, 15 aa, Artificial Sequence
  Description of Artificial Sequence: Synthetic peptide
  Seed: SLMQGSTLPRRSGAA
SLMQISTKPRRSQAA

SEQ ID NO: 132940 - protein, 15 aa, Artificial Sequence
  Description of Artificial Sequence: Synthetic peptide
  Seed: SLMQGSTLPRRSGAA
SLMQISTKPRRSRAA

SEQ ID NO: 132941 - protein, 15 aa, Artificial Sequence
  Description of Artificial Sequence: Synthetic peptide
  Seed: SLMQGSTLPRRSGAA
SLMQISTKPRRSSAA

SEQ ID NO: 132942 - protein, 15 aa, Artificial Sequence
  Description of Artificial Sequence: Synthetic peptide
  Seed: SLMQGSTLPRRSGAA
SLMQISTKPRRSTAA

SEQ ID NO: 132943 - protein, 15 aa, Artificial Sequence
  Description of Artificial Sequence: Synthetic peptide
  Seed: SLMQGSTLPRRSGAA
SLMQISTKPRRSVAA

SEQ ID NO: 132944 - protein, 15 aa, Artificial Sequence
  Description of Artificial Sequence: Synthetic peptide
  Seed: SLMQGSTLPRRSGAA
SLMQISTKPRRSYAA

SEQ ID NO: 132945 - protein, 15 aa, Artificial Sequence
  Description of Artificial Sequence: Synthetic peptide
  Seed: SLMQGSTLPRRSGAA
SLMQISTLPHRSAAA

SEQ ID NO: 132946 - protein, 15 aa, Artificial Sequence
  Description of Artificial Sequence: Synthetic peptide
  Seed: SLMQGSTLPRRSGAA
SLMQISTLPKRSAAA

SEQ ID NO: 132947 - protein, 15 aa, Artificial Sequence
  Description of Artificial Sequence: Synthetic peptide
  Seed: SLMQGSTLPRRSGAA
SLMQISTLPKRSGAA

SEQ ID NO: 132948 - protein, 15 aa, Artificial Sequence
  Description of Artificial Sequence: Synthetic peptide
  Seed: SLMQGSTLPRRSGAA
SLMQISTLPKRSHAA

SEQ ID NO: 132949 - protein, 15 aa, Artificial Sequence
  Description of Artificial Sequence: Synthetic peptide
  Seed: SLMQGSTLPRRSGAA
SLMQISTLPKRSIAA

SEQ ID NO: 132950 - protein, 15 aa, Artificial Sequence
  Description of Artificial Sequence: Synthetic peptide
  Seed: SLMQGSTLPRRSGAA
SLMQISTLPKRSKAA

SEQ ID NO: 132951 - protein, 15 aa, Artificial Sequence
  Description of Artificial Sequence: Synthetic peptide
  Seed: SLMQGSTLPRRSGAA
SLMQISTLPKRSLAA

SEQ ID NO: 132952 - protein, 15 aa, Artificial Sequence
  Description of Artificial Sequence: Synthetic peptide
  Seed: SLMQGSTLPRRSGAA
SLMQISTLPKRSMAA

SEQ ID NO: 132953 - protein, 15 aa, Artificial Sequence
  Description of Artificial Sequence: Synthetic peptide
  Seed: SLMQGSTLPRRSGAA
SLMQISTLPKRSNAA

SEQ ID NO: 132954 - protein, 15 aa, Artificial Sequence
  Description of Artificial Sequence: Synthetic peptide
  Seed: SLMQGSTLPRRSGAA
SLMQISTLPKRSQAA

SEQ ID NO: 132955 - protein, 15 aa, Artificial Sequence
  Description of Artificial Sequence: Synthetic peptide
  Seed: SLMQGSTLPRRSGAA
SLMQISTLPKRSRAA

SEQ ID NO: 132956 - protein, 15 aa, Artificial Sequence
  Description of Artificial Sequence: Synthetic peptide
  Seed: SLMQGSTLPRRSGAA
SLMQISTLPKRSSAA

SEQ ID NO: 132957 - protein, 15 aa, Artificial Sequence
  Description of Artificial Sequence: Synthetic peptide
  Seed: SLMQGSTLPRRSGAA
SLMQISTLPKRSTAA

SEQ ID NO: 132958 - protein, 15 aa, Artificial Sequence
  Description of Artificial Sequence: Synthetic peptide
  Seed: SLMQGSTLPRRSGAA
SLMQISTLPKRSVAA

SEQ ID NO: 132959 - protein, 15 aa, Artificial Sequence
  Description of Artificial Sequence: Synthetic peptide
  Seed: SLMQGSTLPRRSGAA
SLMQISTLPKRSWAA

SEQ ID NO: 132960 - protein, 15 aa, Artificial Sequence
  Description of Artificial Sequence: Synthetic peptide
  Seed: SLMQGSTLPRRSGAA
SLMQISTLPKRSYAA

SEQ ID NO: 132961 - protein, 15 aa, Artificial Sequence
  Description of Artificial Sequence: Synthetic peptide
  Seed: SLMQGSTLPRRSGAA
SLMQISTLPRRSAAA

SEQ ID NO: 132962 - protein, 15 aa, Artificial Sequence
  Description of Artificial Sequence: Synthetic peptide
  Seed: SLMQGSTLPRRSGAA
SLMQISTLPRRSCAA

SEQ ID NO: 132963 - protein, 15 aa, Artificial Sequence
  Description of Artificial Sequence: Synthetic peptide
  Seed: SLMQGSTLPRRSGAA
SLMQISTLPRRSFAA

SEQ ID NO: 132964 - protein, 15 aa, Artificial Sequence
  Description of Artificial Sequence: Synthetic peptide
  Seed: SLMQGSTLPRRSGAA
SLMQISTLPRRSGAA

SEQ ID NO: 132965 - protein, 15 aa, Artificial Sequence
  Description of Artificial Sequence: Synthetic peptide
  Seed: SLMQGSTLPRRSGAA
SLMQISTLPRRSHAA

SEQ ID NO: 132966 - protein, 15 aa, Artificial Sequence
  Description of Artificial Sequence: Synthetic peptide
  Seed: SLMQGSTLPRRSGAA
SLMQISTLPRRSIAA

SEQ ID NO: 132967 - protein, 15 aa, Artificial Sequence
  Description of Artificial Sequence: Synthetic peptide
  Seed: SLMQGSTLPRRSGAA
SLMQISTLPRRSKAA

SEQ ID NO: 132968 - protein, 15 aa, Artificial Sequence
  Description of Artificial Sequence: Synthetic peptide
  Seed: SLMQGSTLPRRSGAA
SLMQISTLPRRSLAA

SEQ ID NO: 132969 - protein, 15 aa, Artificial Sequence
  Description of Artificial Sequence: Synthetic peptide
  Seed: SLMQGSTLPRRSGAA
SLMQISTLPRRSMAA

SEQ ID NO: 132970 - protein, 15 aa, Artificial Sequence
  Description of Artificial Sequence: Synthetic peptide
  Seed: SLMQGSTLPRRSGAA
SLMQISTLPRRSNAA

SEQ ID NO: 132971 - protein, 15 aa, Artificial Sequence
  Description of Artificial Sequence: Synthetic peptide
  Seed: SLMQGSTLPRRSGAA
SLMQISTLPRRSPAA

SEQ ID NO: 132972 - protein, 15 aa, Artificial Sequence
  Description of Artificial Sequence: Synthetic peptide
  Seed: SLMQGSTLPRRSGAA
SLMQISTLPRRSQAA

SEQ ID NO: 132973 - protein, 15 aa, Artificial Sequence
  Description of Artificial Sequence: Synthetic peptide
  Seed: SLMQGSTLPRRSGAA
SLMQISTLPRRSRAA

SEQ ID NO: 132974 - protein, 15 aa, Artificial Sequence
  Description of Artificial Sequence: Synthetic peptide
  Seed: SLMQGSTLPRRSGAA
SLMQISTLPRRSSAA

SEQ ID NO: 132975 - protein, 15 aa, Artificial Sequence
  Description of Artificial Sequence: Synthetic peptide
  Seed: SLMQGSTLPRRSGAA
SLMQISTLPRRSTAA

SEQ ID NO: 132976 - protein, 15 aa, Artificial Sequence
  Description of Artificial Sequence: Synthetic peptide
  Seed: SLMQGSTLPRRSGAA
SLMQISTLPRRSVAA

SEQ ID NO: 132977 - protein, 15 aa, Artificial Sequence
  Description of Artificial Sequence: Synthetic peptide
  Seed: SLMQGSTLPRRSGAA
SLMQISTLPRRSWAA

SEQ ID NO: 132978 - protein, 15 aa, Artificial Sequence
  Description of Artificial Sequence: Synthetic peptide
  Seed: SLMQGSTLPRRSGAA
SLMQISTLPRRSYAA

SEQ ID NO: 132979 - protein, 15 aa, Artificial Sequence
  Description of Artificial Sequence: Synthetic peptide
  Seed: SLMQGSTLPRRSGAA
SLMQISTMPHRSAAA

SEQ ID NO: 132980 - protein, 15 aa, Artificial Sequence
  Description of Artificial Sequence: Synthetic peptide
  Seed: SLMQGSTLPRRSGAA
SLMQISTMPHRSSAA

SEQ ID NO: 132981 - protein, 15 aa, Artificial Sequence
  Description of Artificial Sequence: Synthetic peptide
  Seed: SLMQGSTLPRRSGAA
SLMQISTMPKRSAAA

SEQ ID NO: 132982 - protein, 15 aa, Artificial Sequence
  Description of Artificial Sequence: Synthetic peptide
  Seed: SLMQGSTLPRRSGAA
SLMQISTMPKRSFAA

SEQ ID NO: 132983 - protein, 15 aa, Artificial Sequence
  Description of Artificial Sequence: Synthetic peptide
  Seed: SLMQGSTLPRRSGAA
SLMQISTMPKRSGAA

SEQ ID NO: 132984 - protein, 15 aa, Artificial Sequence
  Description of Artificial Sequence: Synthetic peptide
  Seed: SLMQGSTLPRRSGAA
SLMQISTMPKRSHAA

SEQ ID NO: 132985 - protein, 15 aa, Artificial Sequence
  Description of Artificial Sequence: Synthetic peptide
  Seed: SLMQGSTLPRRSGAA
SLMQISTMPKRSIAA

SEQ ID NO: 132986 - protein, 15 aa, Artificial Sequence
  Description of Artificial Sequence: Synthetic peptide
  Seed: SLMQGSTLPRRSGAA
SLMQISTMPKRSKAA

SEQ ID NO: 132987 - protein, 15 aa, Artificial Sequence
  Description of Artificial Sequence: Synthetic peptide
  Seed: SLMQGSTLPRRSGAA
SLMQISTMPKRSLAA

SEQ ID NO: 132988 - protein, 15 aa, Artificial Sequence
  Description of Artificial Sequence: Synthetic peptide
  Seed: SLMQGSTLPRRSGAA
SLMQISTMPKRSMAA

SEQ ID NO: 132989 - protein, 15 aa, Artificial Sequence
  Description of Artificial Sequence: Synthetic peptide
  Seed: SLMQGSTLPRRSGAA
SLMQISTMPKRSNAA

SEQ ID NO: 132990 - protein, 15 aa, Artificial Sequence
  Description of Artificial Sequence: Synthetic peptide
  Seed: SLMQGSTLPRRSGAA
SLMQISTMPKRSQAA

SEQ ID NO: 132991 - protein, 15 aa, Artificial Sequence
  Description of Artificial Sequence: Synthetic peptide
  Seed: SLMQGSTLPRRSGAA
SLMQISTMPKRSRAA

SEQ ID NO: 132992 - protein, 15 aa, Artificial Sequence
  Description of Artificial Sequence: Synthetic peptide
  Seed: SLMQGSTLPRRSGAA
SLMQISTMPKRSSAA

SEQ ID NO: 132993 - protein, 15 aa, Artificial Sequence
  Description of Artificial Sequence: Synthetic peptide
  Seed: SLMQGSTLPRRSGAA
SLMQISTMPKRSTAA

SEQ ID NO: 132994 - protein, 15 aa, Artificial Sequence
  Description of Artificial Sequence: Synthetic peptide
  Seed: SLMQGSTLPRRSGAA
SLMQISTMPKRSVAA

SEQ ID NO: 132995 - protein, 15 aa, Artificial Sequence
  Description of Artificial Sequence: Synthetic peptide
  Seed: SLMQGSTLPRRSGAA
SLMQISTMPKRSWAA

SEQ ID NO: 132996 - protein, 15 aa, Artificial Sequence
  Description of Artificial Sequence: Synthetic peptide
  Seed: SLMQGSTLPRRSGAA
SLMQISTMPKRSYAA

SEQ ID NO: 132997 - protein, 15 aa, Artificial Sequence
  Description of Artificial Sequence: Synthetic peptide
  Seed: SLMQGSTLPRRSGAA
SLMQISTMPRRSAAA

SEQ ID NO: 132998 - protein, 15 aa, Artificial Sequence
  Description of Artificial Sequence: Synthetic peptide
  Seed: SLMQGSTLPRRSGAA
SLMQISTMPRRSCAA

SEQ ID NO: 132999 - protein, 15 aa, Artificial Sequence
  Description of Artificial Sequence: Synthetic peptide
  Seed: SLMQGSTLPRRSGAA
SLMQISTMPRRSFAA

SEQ ID NO: 133000 - protein, 15 aa, Artificial Sequence
  Description of Artificial Sequence: Synthetic peptide
  Seed: SLMQGSTLPRRSGAA
SLMQISTMPRRSGAA

SEQ ID NO: 133001 - protein, 15 aa, Artificial Sequence
  Description of Artificial Sequence: Synthetic peptide
  Seed: SLMQGSTLPRRSGAA
SLMQISTMPRRSHAA

SEQ ID NO: 133002 - protein, 15 aa, Artificial Sequence
  Description of Artificial Sequence: Synthetic peptide
  Seed: SLMQGSTLPRRSGAA
SLMQISTMPRRSIAA

SEQ ID NO: 133003 - protein, 15 aa, Artificial Sequence
  Description of Artificial Sequence: Synthetic peptide
  Seed: SLMQGSTLPRRSGAA
SLMQISTMPRRSKAA

SEQ ID NO: 133004 - protein, 15 aa, Artificial Sequence
  Description of Artificial Sequence: Synthetic peptide
  Seed: SLMQGSTLPRRSGAA
SLMQISTMPRRSLAA

SEQ ID NO: 133005 - protein, 15 aa, Artificial Sequence
  Description of Artificial Sequence: Synthetic peptide
  Seed: SLMQGSTLPRRSGAA
SLMQISTMPRRSMAA

SEQ ID NO: 133006 - protein, 15 aa, Artificial Sequence
  Description of Artificial Sequence: Synthetic peptide
  Seed: SLMQGSTLPRRSGAA
SLMQISTMPRRSNAA

SEQ ID NO: 133007 - protein, 15 aa, Artificial Sequence
  Description of Artificial Sequence: Synthetic peptide
  Seed: SLMQGSTLPRRSGAA
SLMQISTMPRRSPAA

SEQ ID NO: 133008 - protein, 15 aa, Artificial Sequence
  Description of Artificial Sequence: Synthetic peptide
  Seed: SLMQGSTLPRRSGAA
SLMQISTMPRRSQAA

SEQ ID NO: 133009 - protein, 15 aa, Artificial Sequence
  Description of Artificial Sequence: Synthetic peptide
  Seed: SLMQGSTLPRRSGAA
SLMQISTMPRRSRAA

SEQ ID NO: 133010 - protein, 15 aa, Artificial Sequence
  Description of Artificial Sequence: Synthetic peptide
  Seed: SLMQGSTLPRRSGAA
SLMQISTMPRRSSAA

SEQ ID NO: 133011 - protein, 15 aa, Artificial Sequence
  Description of Artificial Sequence: Synthetic peptide
  Seed: SLMQGSTLPRRSGAA
SLMQISTMPRRSTAA

SEQ ID NO: 133012 - protein, 15 aa, Artificial Sequence
  Description of Artificial Sequence: Synthetic peptide
  Seed: SLMQGSTLPRRSGAA
SLMQISTMPRRSVAA

SEQ ID NO: 133013 - protein, 15 aa, Artificial Sequence
  Description of Artificial Sequence: Synthetic peptide
  Seed: SLMQGSTLPRRSGAA
SLMQISTMPRRSWAA

SEQ ID NO: 133014 - protein, 15 aa, Artificial Sequence
  Description of Artificial Sequence: Synthetic peptide
  Seed: SLMQGSTLPRRSGAA
SLMQISTMPRRSYAA

SEQ ID NO: 133015 - protein, 15 aa, Artificial Sequence
  Description of Artificial Sequence: Synthetic peptide
  Seed: SLMQGSTLPRRSGAA
SLMQISTQPRRSAAA

SEQ ID NO: 133016 - protein, 15 aa, Artificial Sequence
  Description of Artificial Sequence: Synthetic peptide
  Seed: SLMQGSTLPRRSGAA
SLMQISTQPRRSSAA

SEQ ID NO: 133017 - protein, 15 aa, Artificial Sequence
  Description of Artificial Sequence: Synthetic peptide
  Seed: SLMQGSTLPRRSGAA
SLMQISTRPARSRAA

SEQ ID NO: 133018 - protein, 15 aa, Artificial Sequence
  Description of Artificial Sequence: Synthetic peptide
  Seed: SLMQGSTLPRRSGAA
SLMQISTRPKRSAAA

SEQ ID NO: 133019 - protein, 15 aa, Artificial Sequence
  Description of Artificial Sequence: Synthetic peptide
  Seed: SLMQGSTLPRRSGAA
SLMQISTRPKRSFAA

SEQ ID NO: 133020 - protein, 15 aa, Artificial Sequence
  Description of Artificial Sequence: Synthetic peptide
  Seed: SLMQGSTLPRRSGAA
SLMQISTRPKRSIAA

SEQ ID NO: 133021 - protein, 15 aa, Artificial Sequence
  Description of Artificial Sequence: Synthetic peptide
  Seed: SLMQGSTLPRRSGAA
SLMQISTRPKRSLAA

SEQ ID NO: 133022 - protein, 15 aa, Artificial Sequence
  Description of Artificial Sequence: Synthetic peptide
  Seed: SLMQGSTLPRRSGAA
SLMQISTRPKRSMAA

SEQ ID NO: 133023 - protein, 15 aa, Artificial Sequence
  Description of Artificial Sequence: Synthetic peptide
  Seed: SLMQGSTLPRRSGAA
SLMQISTRPKRSRAA

SEQ ID NO: 133024 - protein, 15 aa, Artificial Sequence
  Description of Artificial Sequence: Synthetic peptide
  Seed: SLMQGSTLPRRSGAA
SLMQISTRPKRSSAA

SEQ ID NO: 133025 - protein, 15 aa, Artificial Sequence
  Description of Artificial Sequence: Synthetic peptide
  Seed: SLMQGSTLPRRSGAA
SLMQISTRPKRSVAA

SEQ ID NO: 133026 - protein, 15 aa, Artificial Sequence
  Description of Artificial Sequence: Synthetic peptide
  Seed: SLMQGSTLPRRSGAA
SLMQISTRPKRSYAA

SEQ ID NO: 133027 - protein, 15 aa, Artificial Sequence
  Description of Artificial Sequence: Synthetic peptide
  Seed: SLMQGSTLPRRSGAA
SLMQISTRPRRSAAA

SEQ ID NO: 133028 - protein, 15 aa, Artificial Sequence
  Description of Artificial Sequence: Synthetic peptide
  Seed: SLMQGSTLPRRSGAA
SLMQISTRPRRSGAA

SEQ ID NO: 133029 - protein, 15 aa, Artificial Sequence
  Description of Artificial Sequence: Synthetic peptide
  Seed: SLMQGSTLPRRSGAA
SLMQISTRPRRSHAA

SEQ ID NO: 133030 - protein, 15 aa, Artificial Sequence
  Description of Artificial Sequence: Synthetic peptide
  Seed: SLMQGSTLPRRSGAA
SLMQISTRPRRSIAA

SEQ ID NO: 133031 - protein, 15 aa, Artificial Sequence
  Description of Artificial Sequence: Synthetic peptide
  Seed: SLMQGSTLPRRSGAA
SLMQISTRPRRSLAA

SEQ ID NO: 133032 - protein, 15 aa, Artificial Sequence
  Description of Artificial Sequence: Synthetic peptide
  Seed: SLMQGSTLPRRSGAA
SLMQISTRPRRSMAA

SEQ ID NO: 133033 - protein, 15 aa, Artificial Sequence
  Description of Artificial Sequence: Synthetic peptide
  Seed: SLMQGSTLPRRSGAA
SLMQISTRPRRSQAA

SEQ ID NO: 133034 - protein, 15 aa, Artificial Sequence
  Description of Artificial Sequence: Synthetic peptide
  Seed: SLMQGSTLPRRSGAA
SLMQISTRPRRSRAA

SEQ ID NO: 133035 - protein, 15 aa, Artificial Sequence
  Description of Artificial Sequence: Synthetic peptide
  Seed: SLMQGSTLPRRSGAA
SLMQISTRPRRSSAA

SEQ ID NO: 133036 - protein, 15 aa, Artificial Sequence
  Description of Artificial Sequence: Synthetic peptide
  Seed: SLMQGSTLPRRSGAA
SLMQISTRPRRSTAA

SEQ ID NO: 133037 - protein, 15 aa, Artificial Sequence
  Description of Artificial Sequence: Synthetic peptide
  Seed: SLMQGSTLPRRSGAA
SLMQISTRPRRSVAA

SEQ ID NO: 133038 - protein, 15 aa, Artificial Sequence
  Description of Artificial Sequence: Synthetic peptide
  Seed: SLMQGSTLPRRSGAA
SLMQISTRPRRSYAA

SEQ ID NO: 133039 - protein, 15 aa, Artificial Sequence
  Description of Artificial Sequence: Synthetic peptide
  Seed: SLMQGSTLPRRSGAA
SLMQISTTPRRSAAA

SEQ ID NO: 133040 - protein, 15 aa, Artificial Sequence
  Description of Artificial Sequence: Synthetic peptide
  Seed: SLMQGSTLPRRSGAA
SLMQISTVPKRSAAA

SEQ ID NO: 133041 - protein, 15 aa, Artificial Sequence
  Description of Artificial Sequence: Synthetic peptide
  Seed: SLMQGSTLPRRSGAA
SLMQISTVPKRSGAA

SEQ ID NO: 133042 - protein, 15 aa, Artificial Sequence
  Description of Artificial Sequence: Synthetic peptide
  Seed: SLMQGSTLPRRSGAA
SLMQISTVPKRSQAA

SEQ ID NO: 133043 - protein, 15 aa, Artificial Sequence
  Description of Artificial Sequence: Synthetic peptide
  Seed: SLMQGSTLPRRSGAA
SLMQISTVPKRSSAA

SEQ ID NO: 133044 - protein, 15 aa, Artificial Sequence
  Description of Artificial Sequence: Synthetic peptide
  Seed: SLMQGSTLPRRSGAA
SLMQISTVPKRSTAA

SEQ ID NO: 133045 - protein, 15 aa, Artificial Sequence
  Description of Artificial Sequence: Synthetic peptide
  Seed: SLMQGSTLPRRSGAA
SLMQISTVPKRSVAA

SEQ ID NO: 133046 - protein, 15 aa, Artificial Sequence
  Description of Artificial Sequence: Synthetic peptide
  Seed: SLMQGSTLPRRSGAA
SLMQISTVPRRSAAA

SEQ ID NO: 133047 - protein, 15 aa, Artificial Sequence
  Description of Artificial Sequence: Synthetic peptide
  Seed: SLMQGSTLPRRSGAA
SLMQISTVPRRSGAA

SEQ ID NO: 133048 - protein, 15 aa, Artificial Sequence
  Description of Artificial Sequence: Synthetic peptide
  Seed: SLMQGSTLPRRSGAA
SLMQISTVPRRSHAA

SEQ ID NO: 133049 - protein, 15 aa, Artificial Sequence
  Description of Artificial Sequence: Synthetic peptide
  Seed: SLMQGSTLPRRSGAA
SLMQISTVPRRSIAA

SEQ ID NO: 133050 - protein, 15 aa, Artificial Sequence
  Description of Artificial Sequence: Synthetic peptide
  Seed: SLMQGSTLPRRSGAA
SLMQISTVPRRSKAA

SEQ ID NO: 133051 - protein, 15 aa, Artificial Sequence
  Description of Artificial Sequence: Synthetic peptide
  Seed: SLMQGSTLPRRSGAA
SLMQISTVPRRSLAA

SEQ ID NO: 133052 - protein, 15 aa, Artificial Sequence
  Description of Artificial Sequence: Synthetic peptide
  Seed: SLMQGSTLPRRSGAA
SLMQISTVPRRSMAA

SEQ ID NO: 133053 - protein, 15 aa, Artificial Sequence
  Description of Artificial Sequence: Synthetic peptide
  Seed: SLMQGSTLPRRSGAA
SLMQISTVPRRSNAA

SEQ ID NO: 133054 - protein, 15 aa, Artificial Sequence
  Description of Artificial Sequence: Synthetic peptide
  Seed: SLMQGSTLPRRSGAA
SLMQISTVPRRSQAA

SEQ ID NO: 133055 - protein, 15 aa, Artificial Sequence
  Description of Artificial Sequence: Synthetic peptide
  Seed: SLMQGSTLPRRSGAA
SLMQISTVPRRSRAA

SEQ ID NO: 133056 - protein, 15 aa, Artificial Sequence
  Description of Artificial Sequence: Synthetic peptide
  Seed: SLMQGSTLPRRSGAA
SLMQISTVPRRSSAA

SEQ ID NO: 133057 - protein, 15 aa, Artificial Sequence
  Description of Artificial Sequence: Synthetic peptide
  Seed: SLMQGSTLPRRSGAA
SLMQISTVPRRSTAA

SEQ ID NO: 133058 - protein, 15 aa, Artificial Sequence
  Description of Artificial Sequence: Synthetic peptide
  Seed: SLMQGSTLPRRSGAA
SLMQISTVPRRSVAA

SEQ ID NO: 133059 - protein, 15 aa, Artificial Sequence
  Description of Artificial Sequence: Synthetic peptide
  Seed: SLMQGSTLPRRSGAA
SLMQISTVPRRSYAA

SEQ ID NO: 133060 - protein, 15 aa, Artificial Sequence
  Description of Artificial Sequence: Synthetic peptide
  Seed: SLMQGSTLPRRSGAA
SLMQISTWPKRSAAA

SEQ ID NO: 133061 - protein, 15 aa, Artificial Sequence
  Description of Artificial Sequence: Synthetic peptide
  Seed: SLMQGSTLPRRSGAA
SLMQISTWPRRSAAA

SEQ ID NO: 133062 - protein, 15 aa, Artificial Sequence
  Description of Artificial Sequence: Synthetic peptide
  Seed: SLMQGSTLPRRSGAA
SLMQISTWPRRSHAA

SEQ ID NO: 133063 - protein, 15 aa, Artificial Sequence
  Description of Artificial Sequence: Synthetic peptide
  Seed: SLMQGSTLPRRSGAA
SLMQISTWPRRSIAA

SEQ ID NO: 133064 - protein, 15 aa, Artificial Sequence
  Description of Artificial Sequence: Synthetic peptide
  Seed: SLMQGSTLPRRSGAA
SLMQISTWPRRSKAA

SEQ ID NO: 133065 - protein, 15 aa, Artificial Sequence
  Description of Artificial Sequence: Synthetic peptide
  Seed: SLMQGSTLPRRSGAA
SLMQISTWPRRSLAA

SEQ ID NO: 133066 - protein, 15 aa, Artificial Sequence
  Description of Artificial Sequence: Synthetic peptide
  Seed: SLMQGSTLPRRSGAA
SLMQISTWPRRSMAA

SEQ ID NO: 133067 - protein, 15 aa, Artificial Sequence
  Description of Artificial Sequence: Synthetic peptide
  Seed: SLMQGSTLPRRSGAA
SLMQISTWPRRSRAA

SEQ ID NO: 133068 - protein, 15 aa, Artificial Sequence
  Description of Artificial Sequence: Synthetic peptide
  Seed: SLMQGSTLPRRSGAA
SLMQISTWPRRSSAA

SEQ ID NO: 133069 - protein, 15 aa, Artificial Sequence
  Description of Artificial Sequence: Synthetic peptide
  Seed: SLMQGSTLPRRSGAA
SLMQISTWPRRSVAA

SEQ ID NO: 133070 - protein, 15 aa, Artificial Sequence
  Description of Artificial Sequence: Synthetic peptide
  Seed: SLMQGSTLPRRSGAA
SLMQISTWPRRSYAA

SEQ ID NO: 133071 - protein, 15 aa, Artificial Sequence
  Description of Artificial Sequence: Synthetic peptide
  Seed: SLMQGSTLPRRSGAA
SLMQISTYPKRSAAA

SEQ ID NO: 133072 - protein, 15 aa, Artificial Sequence
  Description of Artificial Sequence: Synthetic peptide
  Seed: SLMQGSTLPRRSGAA
SLMQISTYPRRSAAA

SEQ ID NO: 133073 - protein, 15 aa, Artificial Sequence
  Description of Artificial Sequence: Synthetic peptide
  Seed: SLMQGSTLPRRSGAA
SLMQISTYPRRSHAA

SEQ ID NO: 133074 - protein, 15 aa, Artificial Sequence
  Description of Artificial Sequence: Synthetic peptide
  Seed: SLMQGSTLPRRSGAA
SLMQISTYPRRSKAA

SEQ ID NO: 133075 - protein, 15 aa, Artificial Sequence
  Description of Artificial Sequence: Synthetic peptide
  Seed: SLMQGSTLPRRSGAA
SLMQISTYPRRSMAA

SEQ ID NO: 133076 - protein, 15 aa, Artificial Sequence
  Description of Artificial Sequence: Synthetic peptide
  Seed: SLMQGSTLPRRSGAA
SLMQISTYPRRSRAA

SEQ ID NO: 133077 - protein, 15 aa, Artificial Sequence
  Description of Artificial Sequence: Synthetic peptide
  Seed: SLMQGSTLPRRSGAA
SLMQISTYPRRSSAA

SEQ ID NO: 133078 - protein, 15 aa, Artificial Sequence
  Description of Artificial Sequence: Synthetic peptide
  Seed: SLMQGSTLPRRSGAA
SLMQISTYPRRSVAA

SEQ ID NO: 133079 - protein, 15 aa, Artificial Sequence
  Description of Artificial Sequence: Synthetic peptide
  Seed: SLMQGSTLPRRSGAA
SLMQISTYPRRSYAA

SEQ ID NO: 133080 - protein, 15 aa, Artificial Sequence
  Description of Artificial Sequence: Synthetic peptide
  Seed: SLMQGSTLPRRSGAA
SLMQLSTAPKRSAAA

SEQ ID NO: 133081 - protein, 15 aa, Artificial Sequence
  Description of Artificial Sequence: Synthetic peptide
  Seed: SLMQGSTLPRRSGAA
SLMQLSTAPRRSAAA

SEQ ID NO: 133082 - protein, 15 aa, Artificial Sequence
  Description of Artificial Sequence: Synthetic peptide
  Seed: SLMQGSTLPRRSGAA
SLMQLSTAPRRSQAA

SEQ ID NO: 133083 - protein, 15 aa, Artificial Sequence
  Description of Artificial Sequence: Synthetic peptide
  Seed: SLMQGSTLPRRSGAA
SLMQLSTAPRRSRAA

SEQ ID NO: 133084 - protein, 15 aa, Artificial Sequence
  Description of Artificial Sequence: Synthetic peptide
  Seed: SLMQGSTLPRRSGAA
SLMQLSTAPRRSSAA

SEQ ID NO: 133085 - protein, 15 aa, Artificial Sequence
  Description of Artificial Sequence: Synthetic peptide
  Seed: SLMQGSTLPRRSGAA
SLMQLSTFPKRSAAA

SEQ ID NO: 133086 - protein, 15 aa, Artificial Sequence
  Description of Artificial Sequence: Synthetic peptide
  Seed: SLMQGSTLPRRSGAA
SLMQLSTFPKRSKAA

SEQ ID NO: 133087 - protein, 15 aa, Artificial Sequence
  Description of Artificial Sequence: Synthetic peptide
  Seed: SLMQGSTLPRRSGAA
SLMQLSTFPKRSRAA

SEQ ID NO: 133088 - protein, 15 aa, Artificial Sequence
  Description of Artificial Sequence: Synthetic peptide
  Seed: SLMQGSTLPRRSGAA
SLMQLSTFPKRSSAA

SEQ ID NO: 133089 - protein, 15 aa, Artificial Sequence
  Description of Artificial Sequence: Synthetic peptide
  Seed: SLMQGSTLPRRSGAA
SLMQLSTFPRRSAAA

SEQ ID NO: 133090 - protein, 15 aa, Artificial Sequence
  Description of Artificial Sequence: Synthetic peptide
  Seed: SLMQGSTLPRRSGAA
SLMQLSTFPRRSGAA

SEQ ID NO: 133091 - protein, 15 aa, Artificial Sequence
  Description of Artificial Sequence: Synthetic peptide
  Seed: SLMQGSTLPRRSGAA
SLMQLSTFPRRSHAA

SEQ ID NO: 133092 - protein, 15 aa, Artificial Sequence
  Description of Artificial Sequence: Synthetic peptide
  Seed: SLMQGSTLPRRSGAA
SLMQLSTFPRRSIAA

SEQ ID NO: 133093 - protein, 15 aa, Artificial Sequence
  Description of Artificial Sequence: Synthetic peptide
  Seed: SLMQGSTLPRRSGAA
SLMQLSTFPRRSKAA

SEQ ID NO: 133094 - protein, 15 aa, Artificial Sequence
  Description of Artificial Sequence: Synthetic peptide
  Seed: SLMQGSTLPRRSGAA
SLMQLSTFPRRSLAA

SEQ ID NO: 133095 - protein, 15 aa, Artificial Sequence
  Description of Artificial Sequence: Synthetic peptide
  Seed: SLMQGSTLPRRSGAA
SLMQLSTFPRRSMAA

SEQ ID NO: 133096 - protein, 15 aa, Artificial Sequence
  Description of Artificial Sequence: Synthetic peptide
  Seed: SLMQGSTLPRRSGAA
SLMQLSTFPRRSQAA

SEQ ID NO: 133097 - protein, 15 aa, Artificial Sequence
  Description of Artificial Sequence: Synthetic peptide
  Seed: SLMQGSTLPRRSGAA
SLMQLSTFPRRSRAA

SEQ ID NO: 133098 - protein, 15 aa, Artificial Sequence
  Description of Artificial Sequence: Synthetic peptide
  Seed: SLMQGSTLPRRSGAA
SLMQLSTFPRRSSAA

SEQ ID NO: 133099 - protein, 15 aa, Artificial Sequence
  Description of Artificial Sequence: Synthetic peptide
  Seed: SLMQGSTLPRRSGAA
SLMQLSTFPRRSTAA

SEQ ID NO: 133100 - protein, 15 aa, Artificial Sequence
  Description of Artificial Sequence: Synthetic peptide
  Seed: SLMQGSTLPRRSGAA
SLMQLSTFPRRSVAA

SEQ ID NO: 133101 - protein, 15 aa, Artificial Sequence
  Description of Artificial Sequence: Synthetic peptide
  Seed: SLMQGSTLPRRSGAA
SLMQLSTFPRRSYAA

SEQ ID NO: 133102 - protein, 15 aa, Artificial Sequence
  Description of Artificial Sequence: Synthetic peptide
  Seed: SLMQGSTLPRRSGAA
SLMQLSTHPRRSAAA

SEQ ID NO: 133103 - protein, 15 aa, Artificial Sequence
  Description of Artificial Sequence: Synthetic peptide
  Seed: SLMQGSTLPRRSGAA
SLMQLSTHPRRSRAA

SEQ ID NO: 133104 - protein, 15 aa, Artificial Sequence
  Description of Artificial Sequence: Synthetic peptide
  Seed: SLMQGSTLPRRSGAA
SLMQLSTHPRRSSAA

SEQ ID NO: 133105 - protein, 15 aa, Artificial Sequence
  Description of Artificial Sequence: Synthetic peptide
  Seed: SLMQGSTLPRRSGAA
SLMQLSTIPKRSAAA

SEQ ID NO: 133106 - protein, 15 aa, Artificial Sequence
  Description of Artificial Sequence: Synthetic peptide
  Seed: SLMQGSTLPRRSGAA
SLMQLSTIPKRSGAA

SEQ ID NO: 133107 - protein, 15 aa, Artificial Sequence
  Description of Artificial Sequence: Synthetic peptide
  Seed: SLMQGSTLPRRSGAA
SLMQLSTIPKRSHAA

SEQ ID NO: 133108 - protein, 15 aa, Artificial Sequence
  Description of Artificial Sequence: Synthetic peptide
  Seed: SLMQGSTLPRRSGAA
SLMQLSTIPKRSKAA

SEQ ID NO: 133109 - protein, 15 aa, Artificial Sequence
  Description of Artificial Sequence: Synthetic peptide
  Seed: SLMQGSTLPRRSGAA
SLMQLSTIPKRSMAA

SEQ ID NO: 133110 - protein, 15 aa, Artificial Sequence
  Description of Artificial Sequence: Synthetic peptide
  Seed: SLMQGSTLPRRSGAA
SLMQLSTIPKRSQAA

SEQ ID NO: 133111 - protein, 15 aa, Artificial Sequence
  Description of Artificial Sequence: Synthetic peptide
  Seed: SLMQGSTLPRRSGAA
SLMQLSTIPKRSSAA

SEQ ID NO: 133112 - protein, 15 aa, Artificial Sequence
  Description of Artificial Sequence: Synthetic peptide
  Seed: SLMQGSTLPRRSGAA
SLMQLSTIPKRSTAA

SEQ ID NO: 133113 - protein, 15 aa, Artificial Sequence
  Description of Artificial Sequence: Synthetic peptide
  Seed: SLMQGSTLPRRSGAA
SLMQLSTIPKRSVAA

SEQ ID NO: 133114 - protein, 15 aa, Artificial Sequence
  Description of Artificial Sequence: Synthetic peptide
  Seed: SLMQGSTLPRRSGAA
SLMQLSTIPRRSAAA

SEQ ID NO: 133115 - protein, 15 aa, Artificial Sequence
  Description of Artificial Sequence: Synthetic peptide
  Seed: SLMQGSTLPRRSGAA
SLMQLSTIPRRSGAA

SEQ ID NO: 133116 - protein, 15 aa, Artificial Sequence
  Description of Artificial Sequence: Synthetic peptide
  Seed: SLMQGSTLPRRSGAA
SLMQLSTIPRRSHAA

SEQ ID NO: 133117 - protein, 15 aa, Artificial Sequence
  Description of Artificial Sequence: Synthetic peptide
  Seed: SLMQGSTLPRRSGAA
SLMQLSTIPRRSIAA

SEQ ID NO: 133118 - protein, 15 aa, Artificial Sequence
  Description of Artificial Sequence: Synthetic peptide
  Seed: SLMQGSTLPRRSGAA
SLMQLSTIPRRSKAA

SEQ ID NO: 133119 - protein, 15 aa, Artificial Sequence
  Description of Artificial Sequence: Synthetic peptide
  Seed: SLMQGSTLPRRSGAA
SLMQLSTIPRRSLAA

SEQ ID NO: 133120 - protein, 15 aa, Artificial Sequence
  Description of Artificial Sequence: Synthetic peptide
  Seed: SLMQGSTLPRRSGAA
SLMQLSTIPRRSMAA

SEQ ID NO: 133121 - protein, 15 aa, Artificial Sequence
  Description of Artificial Sequence: Synthetic peptide
  Seed: SLMQGSTLPRRSGAA
SLMQLSTIPRRSNAA

SEQ ID NO: 133122 - protein, 15 aa, Artificial Sequence
  Description of Artificial Sequence: Synthetic peptide
  Seed: SLMQGSTLPRRSGAA
SLMQLSTIPRRSQAA

SEQ ID NO: 133123 - protein, 15 aa, Artificial Sequence
  Description of Artificial Sequence: Synthetic peptide
  Seed: SLMQGSTLPRRSGAA
SLMQLSTIPRRSRAA

SEQ ID NO: 133124 - protein, 15 aa, Artificial Sequence
  Description of Artificial Sequence: Synthetic peptide
  Seed: SLMQGSTLPRRSGAA
SLMQLSTIPRRSSAA

SEQ ID NO: 133125 - protein, 15 aa, Artificial Sequence
  Description of Artificial Sequence: Synthetic peptide
  Seed: SLMQGSTLPRRSGAA
SLMQLSTIPRRSTAA

SEQ ID NO: 133126 - protein, 15 aa, Artificial Sequence
  Description of Artificial Sequence: Synthetic peptide
  Seed: SLMQGSTLPRRSGAA
SLMQLSTIPRRSVAA

SEQ ID NO: 133127 - protein, 15 aa, Artificial Sequence
  Description of Artificial Sequence: Synthetic peptide
  Seed: SLMQGSTLPRRSGAA
SLMQLSTIPRRSYAA

SEQ ID NO: 133128 - protein, 15 aa, Artificial Sequence
  Description of Artificial Sequence: Synthetic peptide
  Seed: SLMQGSTLPRRSGAA
SLMQLSTKPRRSAAA

SEQ ID NO: 133129 - protein, 15 aa, Artificial Sequence
  Description of Artificial Sequence: Synthetic peptide
  Seed: SLMQGSTLPRRSGAA
SLMQLSTKPRRSFAA

SEQ ID NO: 133130 - protein, 15 aa, Artificial Sequence
  Description of Artificial Sequence: Synthetic peptide
  Seed: SLMQGSTLPRRSGAA
SLMQLSTKPRRSHAA

SEQ ID NO: 133131 - protein, 15 aa, Artificial Sequence
  Description of Artificial Sequence: Synthetic peptide
  Seed: SLMQGSTLPRRSGAA
SLMQLSTKPRRSIAA

SEQ ID NO: 133132 - protein, 15 aa, Artificial Sequence
  Description of Artificial Sequence: Synthetic peptide
  Seed: SLMQGSTLPRRSGAA
SLMQLSTKPRRSKAA

SEQ ID NO: 133133 - protein, 15 aa, Artificial Sequence
  Description of Artificial Sequence: Synthetic peptide
  Seed: SLMQGSTLPRRSGAA
SLMQLSTKPRRSLAA

SEQ ID NO: 133134 - protein, 15 aa, Artificial Sequence
  Description of Artificial Sequence: Synthetic peptide
  Seed: SLMQGSTLPRRSGAA
SLMQLSTKPRRSMAA

SEQ ID NO: 133135 - protein, 15 aa, Artificial Sequence
  Description of Artificial Sequence: Synthetic peptide
  Seed: SLMQGSTLPRRSGAA
SLMQLSTKPRRSQAA

SEQ ID NO: 133136 - protein, 15 aa, Artificial Sequence
  Description of Artificial Sequence: Synthetic peptide
  Seed: SLMQGSTLPRRSGAA
SLMQLSTKPRRSRAA

SEQ ID NO: 133137 - protein, 15 aa, Artificial Sequence
  Description of Artificial Sequence: Synthetic peptide
  Seed: SLMQGSTLPRRSGAA
SLMQLSTKPRRSSAA

SEQ ID NO: 133138 - protein, 15 aa, Artificial Sequence
  Description of Artificial Sequence: Synthetic peptide
  Seed: SLMQGSTLPRRSGAA
SLMQLSTKPRRSTAA

SEQ ID NO: 133139 - protein, 15 aa, Artificial Sequence
  Description of Artificial Sequence: Synthetic peptide
  Seed: SLMQGSTLPRRSGAA
SLMQLSTKPRRSVAA

SEQ ID NO: 133140 - protein, 15 aa, Artificial Sequence
  Description of Artificial Sequence: Synthetic peptide
  Seed: SLMQGSTLPRRSGAA
SLMQLSTKPRRSYAA

SEQ ID NO: 133141 - protein, 15 aa, Artificial Sequence
  Description of Artificial Sequence: Synthetic peptide
  Seed: SLMQGSTLPRRSGAA
SLMQLSTLPKRSAAA

SEQ ID NO: 133142 - protein, 15 aa, Artificial Sequence
  Description of Artificial Sequence: Synthetic peptide
  Seed: SLMQGSTLPRRSGAA
SLMQLSTLPKRSGAA

SEQ ID NO: 133143 - protein, 15 aa, Artificial Sequence
  Description of Artificial Sequence: Synthetic peptide
  Seed: SLMQGSTLPRRSGAA
SLMQLSTLPKRSHAA

SEQ ID NO: 133144 - protein, 15 aa, Artificial Sequence
  Description of Artificial Sequence: Synthetic peptide
  Seed: SLMQGSTLPRRSGAA
SLMQLSTLPKRSIAA

SEQ ID NO: 133145 - protein, 15 aa, Artificial Sequence
  Description of Artificial Sequence: Synthetic peptide
  Seed: SLMQGSTLPRRSGAA
SLMQLSTLPKRSKAA

SEQ ID NO: 133146 - protein, 15 aa, Artificial Sequence
  Description of Artificial Sequence: Synthetic peptide
  Seed: SLMQGSTLPRRSGAA
SLMQLSTLPKRSLAA

SEQ ID NO: 133147 - protein, 15 aa, Artificial Sequence
  Description of Artificial Sequence: Synthetic peptide
  Seed: SLMQGSTLPRRSGAA
SLMQLSTLPKRSMAA

SEQ ID NO: 133148 - protein, 15 aa, Artificial Sequence
  Description of Artificial Sequence: Synthetic peptide
  Seed: SLMQGSTLPRRSGAA
SLMQLSTLPKRSQAA

SEQ ID NO: 133149 - protein, 15 aa, Artificial Sequence
  Description of Artificial Sequence: Synthetic peptide
  Seed: SLMQGSTLPRRSGAA
SLMQLSTLPKRSRAA

SEQ ID NO: 133150 - protein, 15 aa, Artificial Sequence
  Description of Artificial Sequence: Synthetic peptide
  Seed: SLMQGSTLPRRSGAA
SLMQLSTLPKRSSAA

SEQ ID NO: 133151 - protein, 15 aa, Artificial Sequence
  Description of Artificial Sequence: Synthetic peptide
  Seed: SLMQGSTLPRRSGAA
SLMQLSTLPKRSTAA

SEQ ID NO: 133152 - protein, 15 aa, Artificial Sequence
  Description of Artificial Sequence: Synthetic peptide
  Seed: SLMQGSTLPRRSGAA
SLMQLSTLPKRSVAA

SEQ ID NO: 133153 - protein, 15 aa, Artificial Sequence
  Description of Artificial Sequence: Synthetic peptide
  Seed: SLMQGSTLPRRSGAA
SLMQLSTLPRRSAAA

SEQ ID NO: 133154 - protein, 15 aa, Artificial Sequence
  Description of Artificial Sequence: Synthetic peptide
  Seed: SLMQGSTLPRRSGAA
SLMQLSTLPRRSFAA

SEQ ID NO: 133155 - protein, 15 aa, Artificial Sequence
  Description of Artificial Sequence: Synthetic peptide
  Seed: SLMQGSTLPRRSGAA
SLMQLSTLPRRSGAA

SEQ ID NO: 133156 - protein, 15 aa, Artificial Sequence
  Description of Artificial Sequence: Synthetic peptide
  Seed: SLMQGSTLPRRSGAA
SLMQLSTLPRRSHAA

SEQ ID NO: 133157 - protein, 15 aa, Artificial Sequence
  Description of Artificial Sequence: Synthetic peptide
  Seed: SLMQGSTLPRRSGAA
SLMQLSTLPRRSIAA

SEQ ID NO: 133158 - protein, 15 aa, Artificial Sequence
  Description of Artificial Sequence: Synthetic peptide
  Seed: SLMQGSTLPRRSGAA
SLMQLSTLPRRSKAA

SEQ ID NO: 133159 - protein, 15 aa, Artificial Sequence
  Description of Artificial Sequence: Synthetic peptide
  Seed: SLMQGSTLPRRSGAA
SLMQLSTLPRRSLAA

SEQ ID NO: 133160 - protein, 15 aa, Artificial Sequence
  Description of Artificial Sequence: Synthetic peptide
  Seed: SLMQGSTLPRRSGAA
SLMQLSTLPRRSMAA

SEQ ID NO: 133161 - protein, 15 aa, Artificial Sequence
  Description of Artificial Sequence: Synthetic peptide
  Seed: SLMQGSTLPRRSGAA
SLMQLSTLPRRSNAA

SEQ ID NO: 133162 - protein, 15 aa, Artificial Sequence
  Description of Artificial Sequence: Synthetic peptide
  Seed: SLMQGSTLPRRSGAA
SLMQLSTLPRRSPAA

SEQ ID NO: 133163 - protein, 15 aa, Artificial Sequence
  Description of Artificial Sequence: Synthetic peptide
  Seed: SLMQGSTLPRRSGAA
SLMQLSTLPRRSQAA

SEQ ID NO: 133164 - protein, 15 aa, Artificial Sequence
  Description of Artificial Sequence: Synthetic peptide
  Seed: SLMQGSTLPRRSGAA
SLMQLSTLPRRSRAA

SEQ ID NO: 133165 - protein, 15 aa, Artificial Sequence
  Description of Artificial Sequence: Synthetic peptide
  Seed: SLMQGSTLPRRSGAA
SLMQLSTLPRRSSAA

SEQ ID NO: 133166 - protein, 15 aa, Artificial Sequence
  Description of Artificial Sequence: Synthetic peptide
  Seed: SLMQGSTLPRRSGAA
SLMQLSTLPRRSTAA

SEQ ID NO: 133167 - protein, 15 aa, Artificial Sequence
  Description of Artificial Sequence: Synthetic peptide
  Seed: SLMQGSTLPRRSGAA
SLMQLSTLPRRSVAA

SEQ ID NO: 133168 - protein, 15 aa, Artificial Sequence
  Description of Artificial Sequence: Synthetic peptide
  Seed: SLMQGSTLPRRSGAA
SLMQLSTLPRRSWAA

SEQ ID NO: 133169 - protein, 15 aa, Artificial Sequence
  Description of Artificial Sequence: Synthetic peptide
  Seed: SLMQGSTLPRRSGAA
SLMQLSTLPRRSYAA

SEQ ID NO: 133170 - protein, 15 aa, Artificial Sequence
  Description of Artificial Sequence: Synthetic peptide
  Seed: SLMQGSTLPRRSGAA
SLMQLSTMPKRSAAA

SEQ ID NO: 133171 - protein, 15 aa, Artificial Sequence
  Description of Artificial Sequence: Synthetic peptide
  Seed: SLMQGSTLPRRSGAA
SLMQLSTMPKRSGAA

SEQ ID NO: 133172 - protein, 15 aa, Artificial Sequence
  Description of Artificial Sequence: Synthetic peptide
  Seed: SLMQGSTLPRRSGAA
SLMQLSTMPKRSHAA

SEQ ID NO: 133173 - protein, 15 aa, Artificial Sequence
  Description of Artificial Sequence: Synthetic peptide
  Seed: SLMQGSTLPRRSGAA
SLMQLSTMPKRSIAA

SEQ ID NO: 133174 - protein, 15 aa, Artificial Sequence
  Description of Artificial Sequence: Synthetic peptide
  Seed: SLMQGSTLPRRSGAA
SLMQLSTMPKRSKAA

SEQ ID NO: 133175 - protein, 15 aa, Artificial Sequence
  Description of Artificial Sequence: Synthetic peptide
  Seed: SLMQGSTLPRRSGAA
SLMQLSTMPKRSLAA

SEQ ID NO: 133176 - protein, 15 aa, Artificial Sequence
  Description of Artificial Sequence: Synthetic peptide
  Seed: SLMQGSTLPRRSGAA
SLMQLSTMPKRSMAA

SEQ ID NO: 133177 - protein, 15 aa, Artificial Sequence
  Description of Artificial Sequence: Synthetic peptide
  Seed: SLMQGSTLPRRSGAA
SLMQLSTMPKRSQAA

SEQ ID NO: 133178 - protein, 15 aa, Artificial Sequence
  Description of Artificial Sequence: Synthetic peptide
  Seed: SLMQGSTLPRRSGAA
SLMQLSTMPKRSRAA

SEQ ID NO: 133179 - protein, 15 aa, Artificial Sequence
  Description of Artificial Sequence: Synthetic peptide
  Seed: SLMQGSTLPRRSGAA
SLMQLSTMPKRSSAA

SEQ ID NO: 133180 - protein, 15 aa, Artificial Sequence
  Description of Artificial Sequence: Synthetic peptide
  Seed: SLMQGSTLPRRSGAA
SLMQLSTMPKRSTAA

SEQ ID NO: 133181 - protein, 15 aa, Artificial Sequence
  Description of Artificial Sequence: Synthetic peptide
  Seed: SLMQGSTLPRRSGAA
SLMQLSTMPKRSVAA

SEQ ID NO: 133182 - protein, 15 aa, Artificial Sequence
  Description of Artificial Sequence: Synthetic peptide
  Seed: SLMQGSTLPRRSGAA
SLMQLSTMPKRSYAA

SEQ ID NO: 133183 - protein, 15 aa, Artificial Sequence
  Description of Artificial Sequence: Synthetic peptide
  Seed: SLMQGSTLPRRSGAA
SLMQLSTMPRRSAAA

SEQ ID NO: 133184 - protein, 15 aa, Artificial Sequence
  Description of Artificial Sequence: Synthetic peptide
  Seed: SLMQGSTLPRRSGAA
SLMQLSTMPRRSFAA

SEQ ID NO: 133185 - protein, 15 aa, Artificial Sequence
  Description of Artificial Sequence: Synthetic peptide
  Seed: SLMQGSTLPRRSGAA
SLMQLSTMPRRSGAA

SEQ ID NO: 133186 - protein, 15 aa, Artificial Sequence
  Description of Artificial Sequence: Synthetic peptide
  Seed: SLMQGSTLPRRSGAA
SLMQLSTMPRRSHAA

SEQ ID NO: 133187 - protein, 15 aa, Artificial Sequence
  Description of Artificial Sequence: Synthetic peptide
  Seed: SLMQGSTLPRRSGAA
SLMQLSTMPRRSIAA

SEQ ID NO: 133188 - protein, 15 aa, Artificial Sequence
  Description of Artificial Sequence: Synthetic peptide
  Seed: SLMQGSTLPRRSGAA
SLMQLSTMPRRSKAA

SEQ ID NO: 133189 - protein, 15 aa, Artificial Sequence
  Description of Artificial Sequence: Synthetic peptide
  Seed: SLMQGSTLPRRSGAA
SLMQLSTMPRRSLAA

SEQ ID NO: 133190 - protein, 15 aa, Artificial Sequence
  Description of Artificial Sequence: Synthetic peptide
  Seed: SLMQGSTLPRRSGAA
SLMQLSTMPRRSMAA

SEQ ID NO: 133191 - protein, 15 aa, Artificial Sequence
  Description of Artificial Sequence: Synthetic peptide
  Seed: SLMQGSTLPRRSGAA
SLMQLSTMPRRSNAA

SEQ ID NO: 133192 - protein, 15 aa, Artificial Sequence
  Description of Artificial Sequence: Synthetic peptide
  Seed: SLMQGSTLPRRSGAA
SLMQLSTMPRRSPAA

SEQ ID NO: 133193 - protein, 15 aa, Artificial Sequence
  Description of Artificial Sequence: Synthetic peptide
  Seed: SLMQGSTLPRRSGAA
SLMQLSTMPRRSQAA

SEQ ID NO: 133194 - protein, 15 aa, Artificial Sequence
  Description of Artificial Sequence: Synthetic peptide
  Seed: SLMQGSTLPRRSGAA
SLMQLSTMPRRSRAA

SEQ ID NO: 133195 - protein, 15 aa, Artificial Sequence
  Description of Artificial Sequence: Synthetic peptide
  Seed: SLMQGSTLPRRSGAA
SLMQLSTMPRRSSAA

SEQ ID NO: 133196 - protein, 15 aa, Artificial Sequence
  Description of Artificial Sequence: Synthetic peptide
  Seed: SLMQGSTLPRRSGAA
SLMQLSTMPRRSTAA

SEQ ID NO: 133197 - protein, 15 aa, Artificial Sequence
  Description of Artificial Sequence: Synthetic peptide
  Seed: SLMQGSTLPRRSGAA
SLMQLSTMPRRSVAA

SEQ ID NO: 133198 - protein, 15 aa, Artificial Sequence
  Description of Artificial Sequence: Synthetic peptide
  Seed: SLMQGSTLPRRSGAA
SLMQLSTMPRRSWAA

SEQ ID NO: 133199 - protein, 15 aa, Artificial Sequence
  Description of Artificial Sequence: Synthetic peptide
  Seed: SLMQGSTLPRRSGAA
SLMQLSTMPRRSYAA

SEQ ID NO: 133200 - protein, 15 aa, Artificial Sequence
  Description of Artificial Sequence: Synthetic peptide
  Seed: SLMQGSTLPRRSGAA
SLMQLSTRPKRSAAA

SEQ ID NO: 133201 - protein, 15 aa, Artificial Sequence
  Description of Artificial Sequence: Synthetic peptide
  Seed: SLMQGSTLPRRSGAA
SLMQLSTRPKRSIAA

SEQ ID NO: 133202 - protein, 15 aa, Artificial Sequence
  Description of Artificial Sequence: Synthetic peptide
  Seed: SLMQGSTLPRRSGAA
SLMQLSTRPKRSLAA

SEQ ID NO: 133203 - protein, 15 aa, Artificial Sequence
  Description of Artificial Sequence: Synthetic peptide
  Seed: SLMQGSTLPRRSGAA
SLMQLSTRPKRSMAA

SEQ ID NO: 133204 - protein, 15 aa, Artificial Sequence
  Description of Artificial Sequence: Synthetic peptide
  Seed: SLMQGSTLPRRSGAA
SLMQLSTRPKRSRAA

SEQ ID NO: 133205 - protein, 15 aa, Artificial Sequence
  Description of Artificial Sequence: Synthetic peptide
  Seed: SLMQGSTLPRRSGAA
SLMQLSTRPKRSVAA

SEQ ID NO: 133206 - protein, 15 aa, Artificial Sequence
  Description of Artificial Sequence: Synthetic peptide
  Seed: SLMQGSTLPRRSGAA
SLMQLSTRPKRSYAA

SEQ ID NO: 133207 - protein, 15 aa, Artificial Sequence
  Description of Artificial Sequence: Synthetic peptide
  Seed: SLMQGSTLPRRSGAA
SLMQLSTRPRRSAAA

SEQ ID NO: 133208 - protein, 15 aa, Artificial Sequence
  Description of Artificial Sequence: Synthetic peptide
  Seed: SLMQGSTLPRRSGAA
SLMQLSTRPRRSGAA

SEQ ID NO: 133209 - protein, 15 aa, Artificial Sequence
  Description of Artificial Sequence: Synthetic peptide
  Seed: SLMQGSTLPRRSGAA
SLMQLSTRPRRSIAA

SEQ ID NO: 133210 - protein, 15 aa, Artificial Sequence
  Description of Artificial Sequence: Synthetic peptide
  Seed: SLMQGSTLPRRSGAA
SLMQLSTRPRRSLAA

SEQ ID NO: 133211 - protein, 15 aa, Artificial Sequence
  Description of Artificial Sequence: Synthetic peptide
  Seed: SLMQGSTLPRRSGAA
SLMQLSTRPRRSMAA

SEQ ID NO: 133212 - protein, 15 aa, Artificial Sequence
  Description of Artificial Sequence: Synthetic peptide
  Seed: SLMQGSTLPRRSGAA
SLMQLSTRPRRSQAA

SEQ ID NO: 133213 - protein, 15 aa, Artificial Sequence
  Description of Artificial Sequence: Synthetic peptide
  Seed: SLMQGSTLPRRSGAA
SLMQLSTRPRRSSAA

SEQ ID NO: 133214 - protein, 15 aa, Artificial Sequence
  Description of Artificial Sequence: Synthetic peptide
  Seed: SLMQGSTLPRRSGAA
SLMQLSTRPRRSVAA

SEQ ID NO: 133215 - protein, 15 aa, Artificial Sequence
  Description of Artificial Sequence: Synthetic peptide
  Seed: SLMQGSTLPRRSGAA
SLMQLSTRPRRSYAA

SEQ ID NO: 133216 - protein, 15 aa, Artificial Sequence
  Description of Artificial Sequence: Synthetic peptide
  Seed: SLMQGSTLPRRSGAA
SLMQLSTVPKRSAAA

SEQ ID NO: 133217 - protein, 15 aa, Artificial Sequence
  Description of Artificial Sequence: Synthetic peptide
  Seed: SLMQGSTLPRRSGAA
SLMQLSTVPKRSQAA

SEQ ID NO: 133218 - protein, 15 aa, Artificial Sequence
  Description of Artificial Sequence: Synthetic peptide
  Seed: SLMQGSTLPRRSGAA
SLMQLSTVPKRSSAA

SEQ ID NO: 133219 - protein, 15 aa, Artificial Sequence
  Description of Artificial Sequence: Synthetic peptide
  Seed: SLMQGSTLPRRSGAA
SLMQLSTVPRRSAAA

SEQ ID NO: 133220 - protein, 15 aa, Artificial Sequence
  Description of Artificial Sequence: Synthetic peptide
  Seed: SLMQGSTLPRRSGAA
SLMQLSTVPRRSGAA

SEQ ID NO: 133221 - protein, 15 aa, Artificial Sequence
  Description of Artificial Sequence: Synthetic peptide
  Seed: SLMQGSTLPRRSGAA
SLMQLSTVPRRSHAA

SEQ ID NO: 133222 - protein, 15 aa, Artificial Sequence
  Description of Artificial Sequence: Synthetic peptide
  Seed: SLMQGSTLPRRSGAA
SLMQLSTVPRRSIAA

SEQ ID NO: 133223 - protein, 15 aa, Artificial Sequence
  Description of Artificial Sequence: Synthetic peptide
  Seed: SLMQGSTLPRRSGAA
SLMQLSTVPRRSKAA

SEQ ID NO: 133224 - protein, 15 aa, Artificial Sequence
  Description of Artificial Sequence: Synthetic peptide
  Seed: SLMQGSTLPRRSGAA
SLMQLSTVPRRSLAA

SEQ ID NO: 133225 - protein, 15 aa, Artificial Sequence
  Description of Artificial Sequence: Synthetic peptide
  Seed: SLMQGSTLPRRSGAA
SLMQLSTVPRRSMAA

SEQ ID NO: 133226 - protein, 15 aa, Artificial Sequence
  Description of Artificial Sequence: Synthetic peptide
  Seed: SLMQGSTLPRRSGAA
SLMQLSTVPRRSQAA

SEQ ID NO: 133227 - protein, 15 aa, Artificial Sequence
  Description of Artificial Sequence: Synthetic peptide
  Seed: SLMQGSTLPRRSGAA
SLMQLSTVPRRSRAA

SEQ ID NO: 133228 - protein, 15 aa, Artificial Sequence
  Description of Artificial Sequence: Synthetic peptide
  Seed: SLMQGSTLPRRSGAA
SLMQLSTVPRRSSAA

SEQ ID NO: 133229 - protein, 15 aa, Artificial Sequence
  Description of Artificial Sequence: Synthetic peptide
  Seed: SLMQGSTLPRRSGAA
SLMQLSTVPRRSTAA

SEQ ID NO: 133230 - protein, 15 aa, Artificial Sequence
  Description of Artificial Sequence: Synthetic peptide
  Seed: SLMQGSTLPRRSGAA
SLMQLSTVPRRSVAA

SEQ ID NO: 133231 - protein, 15 aa, Artificial Sequence
  Description of Artificial Sequence: Synthetic peptide
  Seed: SLMQGSTLPRRSGAA
SLMQLSTVPRRSYAA

SEQ ID NO: 133232 - protein, 15 aa, Artificial Sequence
  Description of Artificial Sequence: Synthetic peptide
  Seed: SLMQGSTLPRRSGAA
SLMQLSTWPRRSAAA

SEQ ID NO: 133233 - protein, 15 aa, Artificial Sequence
  Description of Artificial Sequence: Synthetic peptide
  Seed: SLMQGSTLPRRSGAA
SLMQLSTWPRRSKAA

SEQ ID NO: 133234 - protein, 15 aa, Artificial Sequence
  Description of Artificial Sequence: Synthetic peptide
  Seed: SLMQGSTLPRRSGAA
SLMQLSTWPRRSRAA

SEQ ID NO: 133235 - protein, 15 aa, Artificial Sequence
  Description of Artificial Sequence: Synthetic peptide
  Seed: SLMQGSTLPRRSGAA
SLMQLSTWPRRSSAA

SEQ ID NO: 133236 - protein, 15 aa, Artificial Sequence
  Description of Artificial Sequence: Synthetic peptide
  Seed: SLMQGSTLPRRSGAA
SLMQLSTYPRRSAAA

SEQ ID NO: 133237 - protein, 15 aa, Artificial Sequence
  Description of Artificial Sequence: Synthetic peptide
  Seed: SLMQGSTLPRRSGAA
SLMQLSTYPRRSSAA

SEQ ID NO: 133238 - protein, 15 aa, Artificial Sequence
  Description of Artificial Sequence: Synthetic peptide
  Seed: SLMQGSTLPRRSGAA
SLMQMSTFPKRSAAA

SEQ ID NO: 133239 - protein, 15 aa, Artificial Sequence
  Description of Artificial Sequence: Synthetic peptide
  Seed: SLMQGSTLPRRSGAA
SLMQMSTFPRRSAAA

SEQ ID NO: 133240 - protein, 15 aa, Artificial Sequence
  Description of Artificial Sequence: Synthetic peptide
  Seed: SLMQGSTLPRRSGAA
SLMQMSTFPRRSKAA

SEQ ID NO: 133241 - protein, 15 aa, Artificial Sequence
  Description of Artificial Sequence: Synthetic peptide
  Seed: SLMQGSTLPRRSGAA
SLMQMSTFPRRSRAA

SEQ ID NO: 133242 - protein, 15 aa, Artificial Sequence
  Description of Artificial Sequence: Synthetic peptide
  Seed: SLMQGSTLPRRSGAA
SLMQMSTFPRRSSAA

SEQ ID NO: 133243 - protein, 15 aa, Artificial Sequence
  Description of Artificial Sequence: Synthetic peptide
  Seed: SLMQGSTLPRRSGAA
SLMQMSTFPRRSVAA

SEQ ID NO: 133244 - protein, 15 aa, Artificial Sequence
  Description of Artificial Sequence: Synthetic peptide
  Seed: SLMQGSTLPRRSGAA
SLMQMSTIPKRSAAA

SEQ ID NO: 133245 - protein, 15 aa, Artificial Sequence
  Description of Artificial Sequence: Synthetic peptide
  Seed: SLMQGSTLPRRSGAA
SLMQMSTIPKRSSAA

SEQ ID NO: 133246 - protein, 15 aa, Artificial Sequence
  Description of Artificial Sequence: Synthetic peptide
  Seed: SLMQGSTLPRRSGAA
SLMQMSTIPRRSAAA

SEQ ID NO: 133247 - protein, 15 aa, Artificial Sequence
  Description of Artificial Sequence: Synthetic peptide
  Seed: SLMQGSTLPRRSGAA
SLMQMSTIPRRSGAA

SEQ ID NO: 133248 - protein, 15 aa, Artificial Sequence
  Description of Artificial Sequence: Synthetic peptide
  Seed: SLMQGSTLPRRSGAA
SLMQMSTIPRRSHAA

SEQ ID NO: 133249 - protein, 15 aa, Artificial Sequence
  Description of Artificial Sequence: Synthetic peptide
  Seed: SLMQGSTLPRRSGAA
SLMQMSTIPRRSIAA

SEQ ID NO: 133250 - protein, 15 aa, Artificial Sequence
  Description of Artificial Sequence: Synthetic peptide
  Seed: SLMQGSTLPRRSGAA
SLMQMSTIPRRSKAA

SEQ ID NO: 133251 - protein, 15 aa, Artificial Sequence
  Description of Artificial Sequence: Synthetic peptide
  Seed: SLMQGSTLPRRSGAA
SLMQMSTIPRRSLAA

SEQ ID NO: 133252 - protein, 15 aa, Artificial Sequence
  Description of Artificial Sequence: Synthetic peptide
  Seed: SLMQGSTLPRRSGAA
SLMQMSTIPRRSQAA

SEQ ID NO: 133253 - protein, 15 aa, Artificial Sequence
  Description of Artificial Sequence: Synthetic peptide
  Seed: SLMQGSTLPRRSGAA
SLMQMSTIPRRSRAA

SEQ ID NO: 133254 - protein, 15 aa, Artificial Sequence
  Description of Artificial Sequence: Synthetic peptide
  Seed: SLMQGSTLPRRSGAA
SLMQMSTIPRRSSAA

SEQ ID NO: 133255 - protein, 15 aa, Artificial Sequence
  Description of Artificial Sequence: Synthetic peptide
  Seed: SLMQGSTLPRRSGAA
SLMQMSTIPRRSTAA

SEQ ID NO: 133256 - protein, 15 aa, Artificial Sequence
  Description of Artificial Sequence: Synthetic peptide
  Seed: SLMQGSTLPRRSGAA
SLMQMSTIPRRSVAA

SEQ ID NO: 133257 - protein, 15 aa, Artificial Sequence
  Description of Artificial Sequence: Synthetic peptide
  Seed: SLMQGSTLPRRSGAA
SLMQMSTKPRRSAAA

SEQ ID NO: 133258 - protein, 15 aa, Artificial Sequence
  Description of Artificial Sequence: Synthetic peptide
  Seed: SLMQGSTLPRRSGAA
SLMQMSTKPRRSIAA

SEQ ID NO: 133259 - protein, 15 aa, Artificial Sequence
  Description of Artificial Sequence: Synthetic peptide
  Seed: SLMQGSTLPRRSGAA
SLMQMSTKPRRSLAA

SEQ ID NO: 133260 - protein, 15 aa, Artificial Sequence
  Description of Artificial Sequence: Synthetic peptide
  Seed: SLMQGSTLPRRSGAA
SLMQMSTKPRRSMAA

SEQ ID NO: 133261 - protein, 15 aa, Artificial Sequence
  Description of Artificial Sequence: Synthetic peptide
  Seed: SLMQGSTLPRRSGAA
SLMQMSTKPRRSRAA

SEQ ID NO: 133262 - protein, 15 aa, Artificial Sequence
  Description of Artificial Sequence: Synthetic peptide
  Seed: SLMQGSTLPRRSGAA
SLMQMSTKPRRSVAA

SEQ ID NO: 133263 - protein, 15 aa, Artificial Sequence
  Description of Artificial Sequence: Synthetic peptide
  Seed: SLMQGSTLPRRSGAA
SLMQMSTKPRRSYAA

SEQ ID NO: 133264 - protein, 15 aa, Artificial Sequence
  Description of Artificial Sequence: Synthetic peptide
  Seed: SLMQGSTLPRRSGAA
SLMQMSTLPKRSAAA

SEQ ID NO: 133265 - protein, 15 aa, Artificial Sequence
  Description of Artificial Sequence: Synthetic peptide
  Seed: SLMQGSTLPRRSGAA
SLMQMSTLPKRSGAA

SEQ ID NO: 133266 - protein, 15 aa, Artificial Sequence
  Description of Artificial Sequence: Synthetic peptide
  Seed: SLMQGSTLPRRSGAA
SLMQMSTLPKRSQAA

SEQ ID NO: 133267 - protein, 15 aa, Artificial Sequence
  Description of Artificial Sequence: Synthetic peptide
  Seed: SLMQGSTLPRRSGAA
SLMQMSTLPKRSSAA

SEQ ID NO: 133268 - protein, 15 aa, Artificial Sequence
  Description of Artificial Sequence: Synthetic peptide
  Seed: SLMQGSTLPRRSGAA
SLMQMSTLPRRSAAA

SEQ ID NO: 133269 - protein, 15 aa, Artificial Sequence
  Description of Artificial Sequence: Synthetic peptide
  Seed: SLMQGSTLPRRSGAA
SLMQMSTLPRRSGAA

SEQ ID NO: 133270 - protein, 15 aa, Artificial Sequence
  Description of Artificial Sequence: Synthetic peptide
  Seed: SLMQGSTLPRRSGAA
SLMQMSTLPRRSHAA

SEQ ID NO: 133271 - protein, 15 aa, Artificial Sequence
  Description of Artificial Sequence: Synthetic peptide
  Seed: SLMQGSTLPRRSGAA
SLMQMSTLPRRSIAA

SEQ ID NO: 133272 - protein, 15 aa, Artificial Sequence
  Description of Artificial Sequence: Synthetic peptide
  Seed: SLMQGSTLPRRSGAA
SLMQMSTLPRRSKAA

SEQ ID NO: 133273 - protein, 15 aa, Artificial Sequence
  Description of Artificial Sequence: Synthetic peptide
  Seed: SLMQGSTLPRRSGAA
SLMQMSTLPRRSLAA

SEQ ID NO: 133274 - protein, 15 aa, Artificial Sequence
  Description of Artificial Sequence: Synthetic peptide
  Seed: SLMQGSTLPRRSGAA
SLMQMSTLPRRSMAA

SEQ ID NO: 133275 - protein, 15 aa, Artificial Sequence
  Description of Artificial Sequence: Synthetic peptide
  Seed: SLMQGSTLPRRSGAA
SLMQMSTLPRRSQAA

SEQ ID NO: 133276 - protein, 15 aa, Artificial Sequence
  Description of Artificial Sequence: Synthetic peptide
  Seed: SLMQGSTLPRRSGAA
SLMQMSTLPRRSRAA

SEQ ID NO: 133277 - protein, 15 aa, Artificial Sequence
  Description of Artificial Sequence: Synthetic peptide
  Seed: SLMQGSTLPRRSGAA
SLMQMSTLPRRSSAA

SEQ ID NO: 133278 - protein, 15 aa, Artificial Sequence
  Description of Artificial Sequence: Synthetic peptide
  Seed: SLMQGSTLPRRSGAA
SLMQMSTLPRRSTAA

SEQ ID NO: 133279 - protein, 15 aa, Artificial Sequence
  Description of Artificial Sequence: Synthetic peptide
  Seed: SLMQGSTLPRRSGAA
SLMQMSTLPRRSVAA

SEQ ID NO: 133280 - protein, 15 aa, Artificial Sequence
  Description of Artificial Sequence: Synthetic peptide
  Seed: SLMQGSTLPRRSGAA
SLMQMSTLPRRSYAA

SEQ ID NO: 133281 - protein, 15 aa, Artificial Sequence
  Description of Artificial Sequence: Synthetic peptide
  Seed: SLMQGSTLPRRSGAA
SLMQMSTMPKRSAAA

SEQ ID NO: 133282 - protein, 15 aa, Artificial Sequence
  Description of Artificial Sequence: Synthetic peptide
  Seed: SLMQGSTLPRRSGAA
SLMQMSTMPKRSQAA

SEQ ID NO: 133283 - protein, 15 aa, Artificial Sequence
  Description of Artificial Sequence: Synthetic peptide
  Seed: SLMQGSTLPRRSGAA
SLMQMSTMPKRSSAA

SEQ ID NO: 133284 - protein, 15 aa, Artificial Sequence
  Description of Artificial Sequence: Synthetic peptide
  Seed: SLMQGSTLPRRSGAA
SLMQMSTMPKRSVAA

SEQ ID NO: 133285 - protein, 15 aa, Artificial Sequence
  Description of Artificial Sequence: Synthetic peptide
  Seed: SLMQGSTLPRRSGAA
SLMQMSTMPRRSAAA

SEQ ID NO: 133286 - protein, 15 aa, Artificial Sequence
  Description of Artificial Sequence: Synthetic peptide
  Seed: SLMQGSTLPRRSGAA
SLMQMSTMPRRSGAA

SEQ ID NO: 133287 - protein, 15 aa, Artificial Sequence
  Description of Artificial Sequence: Synthetic peptide
  Seed: SLMQGSTLPRRSGAA
SLMQMSTMPRRSHAA

SEQ ID NO: 133288 - protein, 15 aa, Artificial Sequence
  Description of Artificial Sequence: Synthetic peptide
  Seed: SLMQGSTLPRRSGAA
SLMQMSTMPRRSIAA

SEQ ID NO: 133289 - protein, 15 aa, Artificial Sequence
  Description of Artificial Sequence: Synthetic peptide
  Seed: SLMQGSTLPRRSGAA
SLMQMSTMPRRSKAA

SEQ ID NO: 133290 - protein, 15 aa, Artificial Sequence
  Description of Artificial Sequence: Synthetic peptide
  Seed: SLMQGSTLPRRSGAA
SLMQMSTMPRRSLAA

SEQ ID NO: 133291 - protein, 15 aa, Artificial Sequence
  Description of Artificial Sequence: Synthetic peptide
  Seed: SLMQGSTLPRRSGAA
SLMQMSTMPRRSMAA

SEQ ID NO: 133292 - protein, 15 aa, Artificial Sequence
  Description of Artificial Sequence: Synthetic peptide
  Seed: SLMQGSTLPRRSGAA
SLMQMSTMPRRSQAA

SEQ ID NO: 133293 - protein, 15 aa, Artificial Sequence
  Description of Artificial Sequence: Synthetic peptide
  Seed: SLMQGSTLPRRSGAA
SLMQMSTMPRRSRAA

SEQ ID NO: 133294 - protein, 15 aa, Artificial Sequence
  Description of Artificial Sequence: Synthetic peptide
  Seed: SLMQGSTLPRRSGAA
SLMQMSTMPRRSSAA

SEQ ID NO: 133295 - protein, 15 aa, Artificial Sequence
  Description of Artificial Sequence: Synthetic peptide
  Seed: SLMQGSTLPRRSGAA
SLMQMSTMPRRSTAA

SEQ ID NO: 133296 - protein, 15 aa, Artificial Sequence
  Description of Artificial Sequence: Synthetic peptide
  Seed: SLMQGSTLPRRSGAA
SLMQMSTMPRRSVAA

SEQ ID NO: 133297 - protein, 15 aa, Artificial Sequence
  Description of Artificial Sequence: Synthetic peptide
  Seed: SLMQGSTLPRRSGAA
SLMQMSTMPRRSYAA

SEQ ID NO: 133298 - protein, 15 aa, Artificial Sequence
  Description of Artificial Sequence: Synthetic peptide
  Seed: SLMQGSTLPRRSGAA
SLMQMSTRPRRSAAA

SEQ ID NO: 133299 - protein, 15 aa, Artificial Sequence
  Description of Artificial Sequence: Synthetic peptide
  Seed: SLMQGSTLPRRSGAA
SLMQMSTVPRRSAAA

SEQ ID NO: 133300 - protein, 15 aa, Artificial Sequence
  Description of Artificial Sequence: Synthetic peptide
  Seed: SLMQGSTLPRRSGAA
SLMQMSTVPRRSQAA

SEQ ID NO: 133301 - protein, 15 aa, Artificial Sequence
  Description of Artificial Sequence: Synthetic peptide
  Seed: SLMQGSTLPRRSGAA
SLMQMSTVPRRSSAA

SEQ ID NO: 133302 - protein, 15 aa, Artificial Sequence
  Description of Artificial Sequence: Synthetic peptide
  Seed: SLMQGSTLPRRSGAA
SLMQVSTFPRRSAAA

SEQ ID NO: 133303 - protein, 15 aa, Artificial Sequence
  Description of Artificial Sequence: Synthetic peptide
  Seed: SLMQGSTLPRRSGAA
SLMQVSTFPRRSKAA

SEQ ID NO: 133304 - protein, 15 aa, Artificial Sequence
  Description of Artificial Sequence: Synthetic peptide
  Seed: SLMQGSTLPRRSGAA
SLMQVSTFPRRSRAA

SEQ ID NO: 133305 - protein, 15 aa, Artificial Sequence
  Description of Artificial Sequence: Synthetic peptide
  Seed: SLMQGSTLPRRSGAA
SLMQVSTFPRRSSAA

SEQ ID NO: 133306 - protein, 15 aa, Artificial Sequence
  Description of Artificial Sequence: Synthetic peptide
  Seed: SLMQGSTLPRRSGAA
SLMQVSTFPRRSVAA

SEQ ID NO: 133307 - protein, 15 aa, Artificial Sequence
  Description of Artificial Sequence: Synthetic peptide
  Seed: SLMQGSTLPRRSGAA
SLMQVSTIPKRSAAA

SEQ ID NO: 133308 - protein, 15 aa, Artificial Sequence
  Description of Artificial Sequence: Synthetic peptide
  Seed: SLMQGSTLPRRSGAA
SLMQVSTIPKRSSAA

SEQ ID NO: 133309 - protein, 15 aa, Artificial Sequence
  Description of Artificial Sequence: Synthetic peptide
  Seed: SLMQGSTLPRRSGAA
SLMQVSTIPRRSAAA

SEQ ID NO: 133310 - protein, 15 aa, Artificial Sequence
  Description of Artificial Sequence: Synthetic peptide
  Seed: SLMQGSTLPRRSGAA
SLMQVSTIPRRSGAA

SEQ ID NO: 133311 - protein, 15 aa, Artificial Sequence
  Description of Artificial Sequence: Synthetic peptide
  Seed: SLMQGSTLPRRSGAA
SLMQVSTIPRRSHAA

SEQ ID NO: 133312 - protein, 15 aa, Artificial Sequence
  Description of Artificial Sequence: Synthetic peptide
  Seed: SLMQGSTLPRRSGAA
SLMQVSTIPRRSKAA

SEQ ID NO: 133313 - protein, 15 aa, Artificial Sequence
  Description of Artificial Sequence: Synthetic peptide
  Seed: SLMQGSTLPRRSGAA
SLMQVSTIPRRSQAA

SEQ ID NO: 133314 - protein, 15 aa, Artificial Sequence
  Description of Artificial Sequence: Synthetic peptide
  Seed: SLMQGSTLPRRSGAA
SLMQVSTIPRRSSAA

SEQ ID NO: 133315 - protein, 15 aa, Artificial Sequence
  Description of Artificial Sequence: Synthetic peptide
  Seed: SLMQGSTLPRRSGAA
SLMQVSTIPRRSTAA

SEQ ID NO: 133316 - protein, 15 aa, Artificial Sequence
  Description of Artificial Sequence: Synthetic peptide
  Seed: SLMQGSTLPRRSGAA
SLMQVSTIPRRSVAA

SEQ ID NO: 133317 - protein, 15 aa, Artificial Sequence
  Description of Artificial Sequence: Synthetic peptide
  Seed: SLMQGSTLPRRSGAA
SLMQVSTLPKRSAAA

SEQ ID NO: 133318 - protein, 15 aa, Artificial Sequence
  Description of Artificial Sequence: Synthetic peptide
  Seed: SLMQGSTLPRRSGAA
SLMQVSTLPKRSQAA

SEQ ID NO: 133319 - protein, 15 aa, Artificial Sequence
  Description of Artificial Sequence: Synthetic peptide
  Seed: SLMQGSTLPRRSGAA
SLMQVSTLPKRSSAA

SEQ ID NO: 133320 - protein, 15 aa, Artificial Sequence
  Description of Artificial Sequence: Synthetic peptide
  Seed: SLMQGSTLPRRSGAA
SLMQVSTLPRRSAAA

SEQ ID NO: 133321 - protein, 15 aa, Artificial Sequence
  Description of Artificial Sequence: Synthetic peptide
  Seed: SLMQGSTLPRRSGAA
SLMQVSTLPRRSGAA

SEQ ID NO: 133322 - protein, 15 aa, Artificial Sequence
  Description of Artificial Sequence: Synthetic peptide
  Seed: SLMQGSTLPRRSGAA
SLMQVSTLPRRSHAA

SEQ ID NO: 133323 - protein, 15 aa, Artificial Sequence
  Description of Artificial Sequence: Synthetic peptide
  Seed: SLMQGSTLPRRSGAA
SLMQVSTLPRRSIAA

SEQ ID NO: 133324 - protein, 15 aa, Artificial Sequence
  Description of Artificial Sequence: Synthetic peptide
  Seed: SLMQGSTLPRRSGAA
SLMQVSTLPRRSKAA

SEQ ID NO: 133325 - protein, 15 aa, Artificial Sequence
  Description of Artificial Sequence: Synthetic peptide
  Seed: SLMQGSTLPRRSGAA
SLMQVSTLPRRSLAA

SEQ ID NO: 133326 - protein, 15 aa, Artificial Sequence
  Description of Artificial Sequence: Synthetic peptide
  Seed: SLMQGSTLPRRSGAA
SLMQVSTLPRRSMAA

SEQ ID NO: 133327 - protein, 15 aa, Artificial Sequence
  Description of Artificial Sequence: Synthetic peptide
  Seed: SLMQGSTLPRRSGAA
SLMQVSTLPRRSQAA

SEQ ID NO: 133328 - protein, 15 aa, Artificial Sequence
  Description of Artificial Sequence: Synthetic peptide
  Seed: SLMQGSTLPRRSGAA
SLMQVSTLPRRSRAA

SEQ ID NO: 133329 - protein, 15 aa, Artificial Sequence
  Description of Artificial Sequence: Synthetic peptide
  Seed: SLMQGSTLPRRSGAA
SLMQVSTLPRRSSAA

SEQ ID NO: 133330 - protein, 15 aa, Artificial Sequence
  Description of Artificial Sequence: Synthetic peptide
  Seed: SLMQGSTLPRRSGAA
SLMQVSTLPRRSTAA

SEQ ID NO: 133331 - protein, 15 aa, Artificial Sequence
  Description of Artificial Sequence: Synthetic peptide
  Seed: SLMQGSTLPRRSGAA
SLMQVSTLPRRSVAA

SEQ ID NO: 133332 - protein, 15 aa, Artificial Sequence
  Description of Artificial Sequence: Synthetic peptide
  Seed: SLMQGSTLPRRSGAA
SLMQVSTLPRRSYAA

SEQ ID NO: 133333 - protein, 15 aa, Artificial Sequence
  Description of Artificial Sequence: Synthetic peptide
  Seed: SLMQGSTLPRRSGAA
SLMQVSTMPKRSAAA

SEQ ID NO: 133334 - protein, 15 aa, Artificial Sequence
  Description of Artificial Sequence: Synthetic peptide
  Seed: SLMQGSTLPRRSGAA
SLMQVSTMPKRSSAA

SEQ ID NO: 133335 - protein, 15 aa, Artificial Sequence
  Description of Artificial Sequence: Synthetic peptide
  Seed: SLMQGSTLPRRSGAA
SLMQVSTMPRRSAAA

SEQ ID NO: 133336 - protein, 15 aa, Artificial Sequence
  Description of Artificial Sequence: Synthetic peptide
  Seed: SLMQGSTLPRRSGAA
SLMQVSTMPRRSGAA

SEQ ID NO: 133337 - protein, 15 aa, Artificial Sequence
  Description of Artificial Sequence: Synthetic peptide
  Seed: SLMQGSTLPRRSGAA
SLMQVSTMPRRSHAA

SEQ ID NO: 133338 - protein, 15 aa, Artificial Sequence
  Description of Artificial Sequence: Synthetic peptide
  Seed: SLMQGSTLPRRSGAA
SLMQVSTMPRRSIAA

SEQ ID NO: 133339 - protein, 15 aa, Artificial Sequence
  Description of Artificial Sequence: Synthetic peptide
  Seed: SLMQGSTLPRRSGAA
SLMQVSTMPRRSKAA

SEQ ID NO: 133340 - protein, 15 aa, Artificial Sequence
  Description of Artificial Sequence: Synthetic peptide
  Seed: SLMQGSTLPRRSGAA
SLMQVSTMPRRSLAA

SEQ ID NO: 133341 - protein, 15 aa, Artificial Sequence
  Description of Artificial Sequence: Synthetic peptide
  Seed: SLMQGSTLPRRSGAA
SLMQVSTMPRRSMAA

SEQ ID NO: 133342 - protein, 15 aa, Artificial Sequence
  Description of Artificial Sequence: Synthetic peptide
  Seed: SLMQGSTLPRRSGAA
SLMQVSTMPRRSQAA

SEQ ID NO: 133343 - protein, 15 aa, Artificial Sequence
  Description of Artificial Sequence: Synthetic peptide
  Seed: SLMQGSTLPRRSGAA
SLMQVSTMPRRSRAA

SEQ ID NO: 133344 - protein, 15 aa, Artificial Sequence
  Description of Artificial Sequence: Synthetic peptide
  Seed: SLMQGSTLPRRSGAA
SLMQVSTMPRRSSAA

SEQ ID NO: 133345 - protein, 15 aa, Artificial Sequence
  Description of Artificial Sequence: Synthetic peptide
  Seed: SLMQGSTLPRRSGAA
SLMQVSTMPRRSTAA

SEQ ID NO: 133346 - protein, 15 aa, Artificial Sequence
  Description of Artificial Sequence: Synthetic peptide
  Seed: SLMQGSTLPRRSGAA
SLMQVSTMPRRSVAA

SEQ ID NO: 133347 - protein, 15 aa, Artificial Sequence
  Description of Artificial Sequence: Synthetic peptide
  Seed: SLMQGSTLPRRSGAA
SLMQVSTMPRRSYAA

SEQ ID NO: 133348 - protein, 15 aa, Artificial Sequence
  Description of Artificial Sequence: Synthetic peptide
  Seed: SLMQGSTLPRRSGAA
SLMQVSTRPRRSAAA

SEQ ID NO: 133349 - protein, 15 aa, Artificial Sequence
  Description of Artificial Sequence: Synthetic peptide
  Seed: SLMQGSTLPRRSGAA
SLMQVSTRPRRSLAA

SEQ ID NO: 133350 - protein, 15 aa, Artificial Sequence
  Description of Artificial Sequence: Synthetic peptide
  Seed: SLMQGSTLPRRSGAA
SLMQVSTRPRRSSAA

SEQ ID NO: 133351 - protein, 15 aa, Artificial Sequence
  Description of Artificial Sequence: Synthetic peptide
  Seed: SLMQGSTLPRRSGAA
SLMQVSTRPRRSVAA

SEQ ID NO: 133352 - protein, 15 aa, Artificial Sequence
  Description of Artificial Sequence: Synthetic peptide
  Seed: SLMQGSTLPRRSGAA
SLMQVSTVPRRSAAA

SEQ ID NO: 133353 - protein, 15 aa, Artificial Sequence
  Description of Artificial Sequence: Synthetic peptide
  Seed: SLMQGSTLPRRSGAA
SLMQVSTVPRRSQAA

SEQ ID NO: 133354 - protein, 15 aa, Artificial Sequence
  Description of Artificial Sequence: Synthetic peptide
  Seed: SLMQGSTLPRRSGAA
SLMQVSTVPRRSSAA

SEQ ID NO: 133355 - protein, 15 aa, Artificial Sequence
  Description of Artificial Sequence: Synthetic peptide
  Seed: SLMQGSTLPRRSGAA
SLMQWSTLPRRSAAA

SEQ ID NO: 133356 - protein, 15 aa, Artificial Sequence
  Description of Artificial Sequence: Synthetic peptide
  Seed: SLMQGSTLPRRSGAA
SLMQWSTMPRRSAAA

SEQ ID NO: 133357 - protein, 15 aa, Artificial Sequence
  Description of Artificial Sequence: Synthetic peptide
  Seed: SLMQGSTLPRRSGAA
SLMQWSTRPRRSAAA

SEQ ID NO: 133358 - protein, 15 aa, Artificial Sequence
  Description of Artificial Sequence: Synthetic peptide
  Seed: SLMQGSTLPRRSGAA
SLMQYSTIPRRSAAA

SEQ ID NO: 133359 - protein, 15 aa, Artificial Sequence
  Description of Artificial Sequence: Synthetic peptide
  Seed: SLMQGSTLPRRSGAA
SLMQYSTIPRRSSAA

SEQ ID NO: 133360 - protein, 15 aa, Artificial Sequence
  Description of Artificial Sequence: Synthetic peptide
  Seed: SLMQGSTLPRRSGAA
SLMQYSTLPRRSAAA

SEQ ID NO: 133361 - protein, 15 aa, Artificial Sequence
  Description of Artificial Sequence: Synthetic peptide
  Seed: SLMQGSTLPRRSGAA
SLMQYSTLPRRSSAA

SEQ ID NO: 133362 - protein, 15 aa, Artificial Sequence
  Description of Artificial Sequence: Synthetic peptide
  Seed: SLMQGSTLPRRSGAA
SLMQYSTMPRRSAAA

SEQ ID NO: 133363 - protein, 15 aa, Artificial Sequence
  Description of Artificial Sequence: Synthetic peptide
  Seed: SLMQGSTLPRRSGAA
SLMQYSTMPRRSSAA

SEQ ID NO: 133364 - protein, 15 aa, Artificial Sequence
  Description of Artificial Sequence: Synthetic peptide
  Seed: SLMQGSTLPRRSGAA
SLIQGFTKPRFSGAA

SEQ ID NO: 133365 - protein, 15 aa, Artificial Sequence
  Description of Artificial Sequence: Synthetic peptide
  Seed: SLMQGSTLPRRSGAA
SLIQGFTRPRFSGAA

SEQ ID NO: 133366 - protein, 15 aa, Artificial Sequence
  Description of Artificial Sequence: Synthetic peptide
  Seed: SLMQGSTLPRRSGAA
SLIQGFTRPRISGAA

SEQ ID NO: 133367 - protein, 15 aa, Artificial Sequence
  Description of Artificial Sequence: Synthetic peptide
  Seed: SLMQGSTLPRRSGAA
SLIQGFTRPRLSGAA

SEQ ID NO: 133368 - protein, 15 aa, Artificial Sequence
  Description of Artificial Sequence: Synthetic peptide
  Seed: SLMQGSTLPRRSGAA
SLIQGFTRPRMSGAA

SEQ ID NO: 133369 - protein, 15 aa, Artificial Sequence
  Description of Artificial Sequence: Synthetic peptide
  Seed: SLMQGSTLPRRSGAA
SLIQGFTRPRRSGAA

SEQ ID NO: 133370 - protein, 15 aa, Artificial Sequence
  Description of Artificial Sequence: Synthetic peptide
  Seed: SLMQGSTLPRRSGAA
SLIQGFTRPRVSGAA

SEQ ID NO: 133371 - protein, 15 aa, Artificial Sequence
  Description of Artificial Sequence: Synthetic peptide
  Seed: SLMQGSTLPRRSGAA
SLIQGFTRPRYSGAA

SEQ ID NO: 133372 - protein, 15 aa, Artificial Sequence
  Description of Artificial Sequence: Synthetic peptide
  Seed: SLMQGSTLPRRSGAA
SLIQGITRPRFSGAA

SEQ ID NO: 133373 - protein, 15 aa, Artificial Sequence
  Description of Artificial Sequence: Synthetic peptide
  Seed: SLMQGSTLPRRSGAA
SLIQGITRPRISGAA

SEQ ID NO: 133374 - protein, 15 aa, Artificial Sequence
  Description of Artificial Sequence: Synthetic peptide
  Seed: SLMQGSTLPRRSGAA
SLIQGITRPRLSGAA

SEQ ID NO: 133375 - protein, 15 aa, Artificial Sequence
  Description of Artificial Sequence: Synthetic peptide
  Seed: SLMQGSTLPRRSGAA
SLIQGITRPRMSGAA

SEQ ID NO: 133376 - protein, 15 aa, Artificial Sequence
  Description of Artificial Sequence: Synthetic peptide
  Seed: SLMQGSTLPRRSGAA
SLIQGITRPRRSGAA

SEQ ID NO: 133377 - protein, 15 aa, Artificial Sequence
  Description of Artificial Sequence: Synthetic peptide
  Seed: SLMQGSTLPRRSGAA
SLIQGITRPRVSGAA

SEQ ID NO: 133378 - protein, 15 aa, Artificial Sequence
  Description of Artificial Sequence: Synthetic peptide
  Seed: SLMQGSTLPRRSGAA
SLIQGITRPRYSGAA

SEQ ID NO: 133379 - protein, 15 aa, Artificial Sequence
  Description of Artificial Sequence: Synthetic peptide
  Seed: SLMQGSTLPRRSGAA
SLIQGLTRPRFSGAA

SEQ ID NO: 133380 - protein, 15 aa, Artificial Sequence
  Description of Artificial Sequence: Synthetic peptide
  Seed: SLMQGSTLPRRSGAA
SLIQGLTRPRISGAA

SEQ ID NO: 133381 - protein, 15 aa, Artificial Sequence
  Description of Artificial Sequence: Synthetic peptide
  Seed: SLMQGSTLPRRSGAA
SLIQGLTRPRLSGAA

SEQ ID NO: 133382 - protein, 15 aa, Artificial Sequence
  Description of Artificial Sequence: Synthetic peptide
  Seed: SLMQGSTLPRRSGAA
SLIQGLTRPRRSGAA

SEQ ID NO: 133383 - protein, 15 aa, Artificial Sequence
  Description of Artificial Sequence: Synthetic peptide
  Seed: SLMQGSTLPRRSGAA
SLIQGLTRPRVSGAA

SEQ ID NO: 133384 - protein, 15 aa, Artificial Sequence
  Description of Artificial Sequence: Synthetic peptide
  Seed: SLMQGSTLPRRSGAA
SLIQGMTRPRFSGAA

SEQ ID NO: 133385 - protein, 15 aa, Artificial Sequence
  Description of Artificial Sequence: Synthetic peptide
  Seed: SLMQGSTLPRRSGAA
SLIQGMTRPRISGAA

SEQ ID NO: 133386 - protein, 15 aa, Artificial Sequence
  Description of Artificial Sequence: Synthetic peptide
  Seed: SLMQGSTLPRRSGAA
SLIQGMTRPRLSGAA

SEQ ID NO: 133387 - protein, 15 aa, Artificial Sequence
  Description of Artificial Sequence: Synthetic peptide
  Seed: SLMQGSTLPRRSGAA
SLIQGMTRPRMSGAA

SEQ ID NO: 133388 - protein, 15 aa, Artificial Sequence
  Description of Artificial Sequence: Synthetic peptide
  Seed: SLMQGSTLPRRSGAA
SLIQGMTRPRRSGAA

SEQ ID NO: 133389 - protein, 15 aa, Artificial Sequence
  Description of Artificial Sequence: Synthetic peptide
  Seed: SLMQGSTLPRRSGAA
SLIQGMTRPRVSGAA

SEQ ID NO: 133390 - protein, 15 aa, Artificial Sequence
  Description of Artificial Sequence: Synthetic peptide
  Seed: SLMQGSTLPRRSGAA
SLIQGMTRPRYSGAA

SEQ ID NO: 133391 - protein, 15 aa, Artificial Sequence
  Description of Artificial Sequence: Synthetic peptide
  Seed: SLMQGSTLPRRSGAA
SLIQGVTRPRLSGAA

SEQ ID NO: 133392 - protein, 15 aa, Artificial Sequence
  Description of Artificial Sequence: Synthetic peptide
  Seed: SLMQGSTLPRRSGAA
SLIQGVTRPRRSGAA

SEQ ID NO: 133393 - protein, 15 aa, Artificial Sequence
  Description of Artificial Sequence: Synthetic peptide
  Seed: SLMQGSTLPRRSGAA
SLLQGFTRPRFSGAA

SEQ ID NO: 133394 - protein, 15 aa, Artificial Sequence
  Description of Artificial Sequence: Synthetic peptide
  Seed: SLMQGSTLPRRSGAA
SLMAGSALARRAGAA

SEQ ID NO: 133395 - protein, 15 aa, Artificial Sequence
  Description of Artificial Sequence: Synthetic peptide
  Seed: SLMQGSTLPRRSGAA
SLMAGSALARRIGAA

SEQ ID NO: 133396 - protein, 15 aa, Artificial Sequence
  Description of Artificial Sequence: Synthetic peptide
  Seed: SLMQGSTLPRRSGAA
SLMAGSALARRSGAA

SEQ ID NO: 133397 - protein, 15 aa, Artificial Sequence
  Description of Artificial Sequence: Synthetic peptide
  Seed: SLMQGSTLPRRSGAA
SLMAGSALARRTGAA

SEQ ID NO: 133398 - protein, 15 aa, Artificial Sequence
  Description of Artificial Sequence: Synthetic peptide
  Seed: SLMQGSTLPRRSGAA
SLMAGSALARRVGAA

SEQ ID NO: 133399 - protein, 15 aa, Artificial Sequence
  Description of Artificial Sequence: Synthetic peptide
  Seed: SLMQGSTLPRRSGAA
SLMAGSALPRRAGAA

SEQ ID NO: 133400 - protein, 15 aa, Artificial Sequence
  Description of Artificial Sequence: Synthetic peptide
  Seed: SLMQGSTLPRRSGAA
SLMAGSALPRRVGAA

SEQ ID NO: 133401 - protein, 15 aa, Artificial Sequence
  Description of Artificial Sequence: Synthetic peptide
  Seed: SLMQGSTLPRRSGAA
SLMAGSALVRRAGAA

SEQ ID NO: 133402 - protein, 15 aa, Artificial Sequence
  Description of Artificial Sequence: Synthetic peptide
  Seed: SLMQGSTLPRRSGAA
SLMAGSALVRRSGAA

SEQ ID NO: 133403 - protein, 15 aa, Artificial Sequence
  Description of Artificial Sequence: Synthetic peptide
  Seed: SLMQGSTLPRRSGAA
SLMAGSALVRRTGAA

SEQ ID NO: 133404 - protein, 15 aa, Artificial Sequence
  Description of Artificial Sequence: Synthetic peptide
  Seed: SLMQGSTLPRRSGAA
SLMAGSALVRRVGAA

SEQ ID NO: 133405 - protein, 15 aa, Artificial Sequence
  Description of Artificial Sequence: Synthetic peptide
  Seed: SLMQGSTLPRRSGAA
SLMAGSGLARRAGAA

SEQ ID NO: 133406 - protein, 15 aa, Artificial Sequence
  Description of Artificial Sequence: Synthetic peptide
  Seed: SLMQGSTLPRRSGAA
SLMAGSGLARRIGAA

SEQ ID NO: 133407 - protein, 15 aa, Artificial Sequence
  Description of Artificial Sequence: Synthetic peptide
  Seed: SLMQGSTLPRRSGAA
SLMAGSGLARRSGAA

SEQ ID NO: 133408 - protein, 15 aa, Artificial Sequence
  Description of Artificial Sequence: Synthetic peptide
  Seed: SLMQGSTLPRRSGAA
SLMAGSGLARRTGAA

SEQ ID NO: 133409 - protein, 15 aa, Artificial Sequence
  Description of Artificial Sequence: Synthetic peptide
  Seed: SLMQGSTLPRRSGAA
SLMAGSGLARRVGAA

SEQ ID NO: 133410 - protein, 15 aa, Artificial Sequence
  Description of Artificial Sequence: Synthetic peptide
  Seed: SLMQGSTLPRRSGAA
SLMAGSGLVRRAGAA

SEQ ID NO: 133411 - protein, 15 aa, Artificial Sequence
  Description of Artificial Sequence: Synthetic peptide
  Seed: SLMQGSTLPRRSGAA
SLMAGSGLVRRVGAA

SEQ ID NO: 133412 - protein, 15 aa, Artificial Sequence
  Description of Artificial Sequence: Synthetic peptide
  Seed: SLMQGSTLPRRSGAA
SLMAGSSLARRAGAA

SEQ ID NO: 133413 - protein, 15 aa, Artificial Sequence
  Description of Artificial Sequence: Synthetic peptide
  Seed: SLMQGSTLPRRSGAA
SLMFGSALARRAGAA

SEQ ID NO: 133414 - protein, 15 aa, Artificial Sequence
  Description of Artificial Sequence: Synthetic peptide
  Seed: SLMQGSTLPRRSGAA
SLMFGSALARRGGAA

SEQ ID NO: 133415 - protein, 15 aa, Artificial Sequence
  Description of Artificial Sequence: Synthetic peptide
  Seed: SLMQGSTLPRRSGAA
SLMFGSALARRIGAA

SEQ ID NO: 133416 - protein, 15 aa, Artificial Sequence
  Description of Artificial Sequence: Synthetic peptide
  Seed: SLMQGSTLPRRSGAA
SLMFGSALARRMGAA

SEQ ID NO: 133417 - protein, 15 aa, Artificial Sequence
  Description of Artificial Sequence: Synthetic peptide
  Seed: SLMQGSTLPRRSGAA
SLMFGSALARRSGAA

SEQ ID NO: 133418 - protein, 15 aa, Artificial Sequence
  Description of Artificial Sequence: Synthetic peptide
  Seed: SLMQGSTLPRRSGAA
SLMFGSALARRTGAA

SEQ ID NO: 133419 - protein, 15 aa, Artificial Sequence
  Description of Artificial Sequence: Synthetic peptide
  Seed: SLMQGSTLPRRSGAA
SLMFGSALARRVGAA

SEQ ID NO: 133420 - protein, 15 aa, Artificial Sequence
  Description of Artificial Sequence: Synthetic peptide
  Seed: SLMQGSTLPRRSGAA
SLMFGSALIRRAGAA

SEQ ID NO: 133421 - protein, 15 aa, Artificial Sequence
  Description of Artificial Sequence: Synthetic peptide
  Seed: SLMQGSTLPRRSGAA
SLMFGSALIRRSGAA

SEQ ID NO: 133422 - protein, 15 aa, Artificial Sequence
  Description of Artificial Sequence: Synthetic peptide
  Seed: SLMQGSTLPRRSGAA
SLMFGSALIRRTGAA

SEQ ID NO: 133423 - protein, 15 aa, Artificial Sequence
  Description of Artificial Sequence: Synthetic peptide
  Seed: SLMQGSTLPRRSGAA
SLMFGSALIRRVGAA

SEQ ID NO: 133424 - protein, 15 aa, Artificial Sequence
  Description of Artificial Sequence: Synthetic peptide
  Seed: SLMQGSTLPRRSGAA
SLMFGSALPRRAGAA

SEQ ID NO: 133425 - protein, 15 aa, Artificial Sequence
  Description of Artificial Sequence: Synthetic peptide
  Seed: SLMQGSTLPRRSGAA
SLMFGSALPRRIGAA

SEQ ID NO: 133426 - protein, 15 aa, Artificial Sequence
  Description of Artificial Sequence: Synthetic peptide
  Seed: SLMQGSTLPRRSGAA
SLMFGSALPRRSGAA

SEQ ID NO: 133427 - protein, 15 aa, Artificial Sequence
  Description of Artificial Sequence: Synthetic peptide
  Seed: SLMQGSTLPRRSGAA
SLMFGSALPRRTGAA

SEQ ID NO: 133428 - protein, 15 aa, Artificial Sequence
  Description of Artificial Sequence: Synthetic peptide
  Seed: SLMQGSTLPRRSGAA
SLMFGSALPRRVGAA

SEQ ID NO: 133429 - protein, 15 aa, Artificial Sequence
  Description of Artificial Sequence: Synthetic peptide
  Seed: SLMQGSTLPRRSGAA
SLMFGSALVRRAGAA

SEQ ID NO: 133430 - protein, 15 aa, Artificial Sequence
  Description of Artificial Sequence: Synthetic peptide
  Seed: SLMQGSTLPRRSGAA
SLMFGSALVRRIGAA

SEQ ID NO: 133431 - protein, 15 aa, Artificial Sequence
  Description of Artificial Sequence: Synthetic peptide
  Seed: SLMQGSTLPRRSGAA
SLMFGSALVRRSGAA

SEQ ID NO: 133432 - protein, 15 aa, Artificial Sequence
  Description of Artificial Sequence: Synthetic peptide
  Seed: SLMQGSTLPRRSGAA
SLMFGSALVRRTGAA

SEQ ID NO: 133433 - protein, 15 aa, Artificial Sequence
  Description of Artificial Sequence: Synthetic peptide
  Seed: SLMQGSTLPRRSGAA
SLMFGSALVRRVGAA

SEQ ID NO: 133434 - protein, 15 aa, Artificial Sequence
  Description of Artificial Sequence: Synthetic peptide
  Seed: SLMQGSTLPRRSGAA
SLMFGSGLARRAGAA

SEQ ID NO: 133435 - protein, 15 aa, Artificial Sequence
  Description of Artificial Sequence: Synthetic peptide
  Seed: SLMQGSTLPRRSGAA
SLMFGSGLARRGGAA

SEQ ID NO: 133436 - protein, 15 aa, Artificial Sequence
  Description of Artificial Sequence: Synthetic peptide
  Seed: SLMQGSTLPRRSGAA
SLMFGSGLARRIGAA

SEQ ID NO: 133437 - protein, 15 aa, Artificial Sequence
  Description of Artificial Sequence: Synthetic peptide
  Seed: SLMQGSTLPRRSGAA
SLMFGSGLARRLGAA

SEQ ID NO: 133438 - protein, 15 aa, Artificial Sequence
  Description of Artificial Sequence: Synthetic peptide
  Seed: SLMQGSTLPRRSGAA
SLMFGSGLARRMGAA

SEQ ID NO: 133439 - protein, 15 aa, Artificial Sequence
  Description of Artificial Sequence: Synthetic peptide
  Seed: SLMQGSTLPRRSGAA
SLMFGSGLARRSGAA

SEQ ID NO: 133440 - protein, 15 aa, Artificial Sequence
  Description of Artificial Sequence: Synthetic peptide
  Seed: SLMQGSTLPRRSGAA
SLMFGSGLARRTGAA

SEQ ID NO: 133441 - protein, 15 aa, Artificial Sequence
  Description of Artificial Sequence: Synthetic peptide
  Seed: SLMQGSTLPRRSGAA
SLMFGSGLARRVGAA

SEQ ID NO: 133442 - protein, 15 aa, Artificial Sequence
  Description of Artificial Sequence: Synthetic peptide
  Seed: SLMQGSTLPRRSGAA
SLMFGSGLIRRAGAA

SEQ ID NO: 133443 - protein, 15 aa, Artificial Sequence
  Description of Artificial Sequence: Synthetic peptide
  Seed: SLMQGSTLPRRSGAA
SLMFGSGLIRRSGAA

SEQ ID NO: 133444 - protein, 15 aa, Artificial Sequence
  Description of Artificial Sequence: Synthetic peptide
  Seed: SLMQGSTLPRRSGAA
SLMFGSGLIRRTGAA

SEQ ID NO: 133445 - protein, 15 aa, Artificial Sequence
  Description of Artificial Sequence: Synthetic peptide
  Seed: SLMQGSTLPRRSGAA
SLMFGSGLIRRVGAA

SEQ ID NO: 133446 - protein, 15 aa, Artificial Sequence
  Description of Artificial Sequence: Synthetic peptide
  Seed: SLMQGSTLPRRSGAA
SLMFGSGLPRRAGAA

SEQ ID NO: 133447 - protein, 15 aa, Artificial Sequence
  Description of Artificial Sequence: Synthetic peptide
  Seed: SLMQGSTLPRRSGAA
SLMFGSGLPRRIGAA

SEQ ID NO: 133448 - protein, 15 aa, Artificial Sequence
  Description of Artificial Sequence: Synthetic peptide
  Seed: SLMQGSTLPRRSGAA
SLMFGSGLPRRVGAA

SEQ ID NO: 133449 - protein, 15 aa, Artificial Sequence
  Description of Artificial Sequence: Synthetic peptide
  Seed: SLMQGSTLPRRSGAA
SLMFGSGLTRRVGAA

SEQ ID NO: 133450 - protein, 15 aa, Artificial Sequence
  Description of Artificial Sequence: Synthetic peptide
  Seed: SLMQGSTLPRRSGAA
SLMFGSGLVRRAGAA

SEQ ID NO: 133451 - protein, 15 aa, Artificial Sequence
  Description of Artificial Sequence: Synthetic peptide
  Seed: SLMQGSTLPRRSGAA
SLMFGSGLVRRIGAA

SEQ ID NO: 133452 - protein, 15 aa, Artificial Sequence
  Description of Artificial Sequence: Synthetic peptide
  Seed: SLMQGSTLPRRSGAA
SLMFGSGLVRRSGAA

SEQ ID NO: 133453 - protein, 15 aa, Artificial Sequence
  Description of Artificial Sequence: Synthetic peptide
  Seed: SLMQGSTLPRRSGAA
SLMFGSGLVRRTGAA

SEQ ID NO: 133454 - protein, 15 aa, Artificial Sequence
  Description of Artificial Sequence: Synthetic peptide
  Seed: SLMQGSTLPRRSGAA
SLMFGSGLVRRVGAA

SEQ ID NO: 133455 - protein, 15 aa, Artificial Sequence
  Description of Artificial Sequence: Synthetic peptide
  Seed: SLMQGSTLPRRSGAA
SLMFGSSLARRAGAA

SEQ ID NO: 133456 - protein, 15 aa, Artificial Sequence
  Description of Artificial Sequence: Synthetic peptide
  Seed: SLMQGSTLPRRSGAA
SLMFGSSLARRSGAA

SEQ ID NO: 133457 - protein, 15 aa, Artificial Sequence
  Description of Artificial Sequence: Synthetic peptide
  Seed: SLMQGSTLPRRSGAA
SLMFGSSLARRTGAA

SEQ ID NO: 133458 - protein, 15 aa, Artificial Sequence
  Description of Artificial Sequence: Synthetic peptide
  Seed: SLMQGSTLPRRSGAA
SLMFGSSLARRVGAA

SEQ ID NO: 133459 - protein, 15 aa, Artificial Sequence
  Description of Artificial Sequence: Synthetic peptide
  Seed: SLMQGSTLPRRSGAA
SLMIGSALARRAGAA

SEQ ID NO: 133460 - protein, 15 aa, Artificial Sequence
  Description of Artificial Sequence: Synthetic peptide
  Seed: SLMQGSTLPRRSGAA
SLMIGSALARRFGAA

SEQ ID NO: 133461 - protein, 15 aa, Artificial Sequence
  Description of Artificial Sequence: Synthetic peptide
  Seed: SLMQGSTLPRRSGAA
SLMIGSALARRGGAA

SEQ ID NO: 133462 - protein, 15 aa, Artificial Sequence
  Description of Artificial Sequence: Synthetic peptide
  Seed: SLMQGSTLPRRSGAA
SLMIGSALARRIGAA

SEQ ID NO: 133463 - protein, 15 aa, Artificial Sequence
  Description of Artificial Sequence: Synthetic peptide
  Seed: SLMQGSTLPRRSGAA
SLMIGSALARRLGAA

SEQ ID NO: 133464 - protein, 15 aa, Artificial Sequence
  Description of Artificial Sequence: Synthetic peptide
  Seed: SLMQGSTLPRRSGAA
SLMIGSALARRMGAA

SEQ ID NO: 133465 - protein, 15 aa, Artificial Sequence
  Description of Artificial Sequence: Synthetic peptide
  Seed: SLMQGSTLPRRSGAA
SLMIGSALARRNGAA

SEQ ID NO: 133466 - protein, 15 aa, Artificial Sequence
  Description of Artificial Sequence: Synthetic peptide
  Seed: SLMQGSTLPRRSGAA
SLMIGSALARRSGAA

SEQ ID NO: 133467 - protein, 15 aa, Artificial Sequence
  Description of Artificial Sequence: Synthetic peptide
  Seed: SLMQGSTLPRRSGAA
SLMIGSALARRTGAA

SEQ ID NO: 133468 - protein, 15 aa, Artificial Sequence
  Description of Artificial Sequence: Synthetic peptide
  Seed: SLMQGSTLPRRSGAA
SLMIGSALARRVGAA

SEQ ID NO: 133469 - protein, 15 aa, Artificial Sequence
  Description of Artificial Sequence: Synthetic peptide
  Seed: SLMQGSTLPRRSGAA
SLMIGSALIRRAGAA

SEQ ID NO: 133470 - protein, 15 aa, Artificial Sequence
  Description of Artificial Sequence: Synthetic peptide
  Seed: SLMQGSTLPRRSGAA
SLMIGSALIRRIGAA

SEQ ID NO: 133471 - protein, 15 aa, Artificial Sequence
  Description of Artificial Sequence: Synthetic peptide
  Seed: SLMQGSTLPRRSGAA
SLMIGSALIRRSGAA

SEQ ID NO: 133472 - protein, 15 aa, Artificial Sequence
  Description of Artificial Sequence: Synthetic peptide
  Seed: SLMQGSTLPRRSGAA
SLMIGSALIRRTGAA

SEQ ID NO: 133473 - protein, 15 aa, Artificial Sequence
  Description of Artificial Sequence: Synthetic peptide
  Seed: SLMQGSTLPRRSGAA
SLMIGSALIRRVGAA

SEQ ID NO: 133474 - protein, 15 aa, Artificial Sequence
  Description of Artificial Sequence: Synthetic peptide
  Seed: SLMQGSTLPRRSGAA
SLMIGSALPRRAGAA

SEQ ID NO: 133475 - protein, 15 aa, Artificial Sequence
  Description of Artificial Sequence: Synthetic peptide
  Seed: SLMQGSTLPRRSGAA
SLMIGSALPRRIGAA

SEQ ID NO: 133476 - protein, 15 aa, Artificial Sequence
  Description of Artificial Sequence: Synthetic peptide
  Seed: SLMQGSTLPRRSGAA
SLMIGSALPRRSGAA

SEQ ID NO: 133477 - protein, 15 aa, Artificial Sequence
  Description of Artificial Sequence: Synthetic peptide
  Seed: SLMQGSTLPRRSGAA
SLMIGSALPRRTGAA

SEQ ID NO: 133478 - protein, 15 aa, Artificial Sequence
  Description of Artificial Sequence: Synthetic peptide
  Seed: SLMQGSTLPRRSGAA
SLMIGSALPRRVGAA

SEQ ID NO: 133479 - protein, 15 aa, Artificial Sequence
  Description of Artificial Sequence: Synthetic peptide
  Seed: SLMQGSTLPRRSGAA
SLMIGSALSRRAGAA

SEQ ID NO: 133480 - protein, 15 aa, Artificial Sequence
  Description of Artificial Sequence: Synthetic peptide
  Seed: SLMQGSTLPRRSGAA
SLMIGSALSRRSGAA

SEQ ID NO: 133481 - protein, 15 aa, Artificial Sequence
  Description of Artificial Sequence: Synthetic peptide
  Seed: SLMQGSTLPRRSGAA
SLMIGSALSRRVGAA

SEQ ID NO: 133482 - protein, 15 aa, Artificial Sequence
  Description of Artificial Sequence: Synthetic peptide
  Seed: SLMQGSTLPRRSGAA
SLMIGSALTRRAGAA

SEQ ID NO: 133483 - protein, 15 aa, Artificial Sequence
  Description of Artificial Sequence: Synthetic peptide
  Seed: SLMQGSTLPRRSGAA
SLMIGSALTRRVGAA

SEQ ID NO: 133484 - protein, 15 aa, Artificial Sequence
  Description of Artificial Sequence: Synthetic peptide
  Seed: SLMQGSTLPRRSGAA
SLMIGSALVRRIGAA

SEQ ID NO: 133485 - protein, 15 aa, Artificial Sequence
  Description of Artificial Sequence: Synthetic peptide
  Seed: SLMQGSTLPRRSGAA
SLMIGSALVRRNGAA

SEQ ID NO: 133486 - protein, 15 aa, Artificial Sequence
  Description of Artificial Sequence: Synthetic peptide
  Seed: SLMQGSTLPRRSGAA
SLMIGSALVRRSGAA

SEQ ID NO: 133487 - protein, 15 aa, Artificial Sequence
  Description of Artificial Sequence: Synthetic peptide
  Seed: SLMQGSTLPRRSGAA
SLMIGSALVRRTGAA

SEQ ID NO: 133488 - protein, 15 aa, Artificial Sequence
  Description of Artificial Sequence: Synthetic peptide
  Seed: SLMQGSTLPRRSGAA
SLMIGSALVRRVGAA

SEQ ID NO: 133489 - protein, 15 aa, Artificial Sequence
  Description of Artificial Sequence: Synthetic peptide
  Seed: SLMQGSTLPRRSGAA
SLMIGSGLARRAGAA

SEQ ID NO: 133490 - protein, 15 aa, Artificial Sequence
  Description of Artificial Sequence: Synthetic peptide
  Seed: SLMQGSTLPRRSGAA
SLMIGSGLARRFGAA

SEQ ID NO: 133491 - protein, 15 aa, Artificial Sequence
  Description of Artificial Sequence: Synthetic peptide
  Seed: SLMQGSTLPRRSGAA
SLMIGSGLARRGGAA

SEQ ID NO: 133492 - protein, 15 aa, Artificial Sequence
  Description of Artificial Sequence: Synthetic peptide
  Seed: SLMQGSTLPRRSGAA
SLMIGSGLARRIGAA

SEQ ID NO: 133493 - protein, 15 aa, Artificial Sequence
  Description of Artificial Sequence: Synthetic peptide
  Seed: SLMQGSTLPRRSGAA
SLMIGSGLARRLGAA

SEQ ID NO: 133494 - protein, 15 aa, Artificial Sequence
  Description of Artificial Sequence: Synthetic peptide
  Seed: SLMQGSTLPRRSGAA
SLMIGSGLARRMGAA

SEQ ID NO: 133495 - protein, 15 aa, Artificial Sequence
  Description of Artificial Sequence: Synthetic peptide
  Seed: SLMQGSTLPRRSGAA
SLMIGSGLARRNGAA

SEQ ID NO: 133496 - protein, 15 aa, Artificial Sequence
  Description of Artificial Sequence: Synthetic peptide
  Seed: SLMQGSTLPRRSGAA
SLMIGSGLARRSGAA

SEQ ID NO: 133497 - protein, 15 aa, Artificial Sequence
  Description of Artificial Sequence: Synthetic peptide
  Seed: SLMQGSTLPRRSGAA
SLMIGSGLARRTGAA

SEQ ID NO: 133498 - protein, 15 aa, Artificial Sequence
  Description of Artificial Sequence: Synthetic peptide
  Seed: SLMQGSTLPRRSGAA
SLMIGSGLARRVGAA

SEQ ID NO: 133499 - protein, 15 aa, Artificial Sequence
  Description of Artificial Sequence: Synthetic peptide
  Seed: SLMQGSTLPRRSGAA
SLMIGSGLIRRAGAA

SEQ ID NO: 133500 - protein, 15 aa, Artificial Sequence
  Description of Artificial Sequence: Synthetic peptide
  Seed: SLMQGSTLPRRSGAA
SLMIGSGLIRRIGAA

SEQ ID NO: 133501 - protein, 15 aa, Artificial Sequence
  Description of Artificial Sequence: Synthetic peptide
  Seed: SLMQGSTLPRRSGAA
SLMIGSGLIRRSGAA

SEQ ID NO: 133502 - protein, 15 aa, Artificial Sequence
  Description of Artificial Sequence: Synthetic peptide
  Seed: SLMQGSTLPRRSGAA
SLMIGSGLIRRTGAA

SEQ ID NO: 133503 - protein, 15 aa, Artificial Sequence
  Description of Artificial Sequence: Synthetic peptide
  Seed: SLMQGSTLPRRSGAA
SLMIGSGLIRRVGAA

SEQ ID NO: 133504 - protein, 15 aa, Artificial Sequence
  Description of Artificial Sequence: Synthetic peptide
  Seed: SLMQGSTLPRRSGAA
SLMIGSGLPRRAGAA

SEQ ID NO: 133505 - protein, 15 aa, Artificial Sequence
  Description of Artificial Sequence: Synthetic peptide
  Seed: SLMQGSTLPRRSGAA
SLMIGSGLPRRIGAA

SEQ ID NO: 133506 - protein, 15 aa, Artificial Sequence
  Description of Artificial Sequence: Synthetic peptide
  Seed: SLMQGSTLPRRSGAA
SLMIGSGLPRRSGAA

SEQ ID NO: 133507 - protein, 15 aa, Artificial Sequence
  Description of Artificial Sequence: Synthetic peptide
  Seed: SLMQGSTLPRRSGAA
SLMIGSGLPRRTGAA

SEQ ID NO: 133508 - protein, 15 aa, Artificial Sequence
  Description of Artificial Sequence: Synthetic peptide
  Seed: SLMQGSTLPRRSGAA
SLMIGSGLPRRVGAA

SEQ ID NO: 133509 - protein, 15 aa, Artificial Sequence
  Description of Artificial Sequence: Synthetic peptide
  Seed: SLMQGSTLPRRSGAA
SLMIGSGLSRRAGAA

SEQ ID NO: 133510 - protein, 15 aa, Artificial Sequence
  Description of Artificial Sequence: Synthetic peptide
  Seed: SLMQGSTLPRRSGAA
SLMIGSGLSRRIGAA

SEQ ID NO: 133511 - protein, 15 aa, Artificial Sequence
  Description of Artificial Sequence: Synthetic peptide
  Seed: SLMQGSTLPRRSGAA
SLMIGSGLSRRVGAA

SEQ ID NO: 133512 - protein, 15 aa, Artificial Sequence
  Description of Artificial Sequence: Synthetic peptide
  Seed: SLMQGSTLPRRSGAA
SLMIGSGLTRRAGAA

SEQ ID NO: 133513 - protein, 15 aa, Artificial Sequence
  Description of Artificial Sequence: Synthetic peptide
  Seed: SLMQGSTLPRRSGAA
SLMIGSGLTRRIGAA

SEQ ID NO: 133514 - protein, 15 aa, Artificial Sequence
  Description of Artificial Sequence: Synthetic peptide
  Seed: SLMQGSTLPRRSGAA
SLMIGSGLTRRVGAA

SEQ ID NO: 133515 - protein, 15 aa, Artificial Sequence
  Description of Artificial Sequence: Synthetic peptide
  Seed: SLMQGSTLPRRSGAA
SLMIGSGLVRRAGAA

SEQ ID NO: 133516 - protein, 15 aa, Artificial Sequence
  Description of Artificial Sequence: Synthetic peptide
  Seed: SLMQGSTLPRRSGAA
SLMIGSGLVRRGGAA

SEQ ID NO: 133517 - protein, 15 aa, Artificial Sequence
  Description of Artificial Sequence: Synthetic peptide
  Seed: SLMQGSTLPRRSGAA
SLMIGSGLVRRIGAA

SEQ ID NO: 133518 - protein, 15 aa, Artificial Sequence
  Description of Artificial Sequence: Synthetic peptide
  Seed: SLMQGSTLPRRSGAA
SLMIGSGLVRRLGAA

SEQ ID NO: 133519 - protein, 15 aa, Artificial Sequence
  Description of Artificial Sequence: Synthetic peptide
  Seed: SLMQGSTLPRRSGAA
SLMIGSGLVRRMGAA

SEQ ID NO: 133520 - protein, 15 aa, Artificial Sequence
  Description of Artificial Sequence: Synthetic peptide
  Seed: SLMQGSTLPRRSGAA
SLMIGSGLVRRNGAA

SEQ ID NO: 133521 - protein, 15 aa, Artificial Sequence
  Description of Artificial Sequence: Synthetic peptide
  Seed: SLMQGSTLPRRSGAA
SLMIGSGLVRRSGAA

SEQ ID NO: 133522 - protein, 15 aa, Artificial Sequence
  Description of Artificial Sequence: Synthetic peptide
  Seed: SLMQGSTLPRRSGAA
SLMIGSGLVRRTGAA

SEQ ID NO: 133523 - protein, 15 aa, Artificial Sequence
  Description of Artificial Sequence: Synthetic peptide
  Seed: SLMQGSTLPRRSGAA
SLMIGSGLVRRVGAA

SEQ ID NO: 133524 - protein, 15 aa, Artificial Sequence
  Description of Artificial Sequence: Synthetic peptide
  Seed: SLMQGSTLPRRSGAA
SLMIGSSLARRAGAA

SEQ ID NO: 133525 - protein, 15 aa, Artificial Sequence
  Description of Artificial Sequence: Synthetic peptide
  Seed: SLMQGSTLPRRSGAA
SLMIGSSLARRIGAA

SEQ ID NO: 133526 - protein, 15 aa, Artificial Sequence
  Description of Artificial Sequence: Synthetic peptide
  Seed: SLMQGSTLPRRSGAA
SLMIGSSLARRSGAA

SEQ ID NO: 133527 - protein, 15 aa, Artificial Sequence
  Description of Artificial Sequence: Synthetic peptide
  Seed: SLMQGSTLPRRSGAA
SLMIGSSLARRTGAA

SEQ ID NO: 133528 - protein, 15 aa, Artificial Sequence
  Description of Artificial Sequence: Synthetic peptide
  Seed: SLMQGSTLPRRSGAA
SLMIGSSLARRVGAA

SEQ ID NO: 133529 - protein, 15 aa, Artificial Sequence
  Description of Artificial Sequence: Synthetic peptide
  Seed: SLMQGSTLPRRSGAA
SLMIGSSLIRRAGAA

SEQ ID NO: 133530 - protein, 15 aa, Artificial Sequence
  Description of Artificial Sequence: Synthetic peptide
  Seed: SLMQGSTLPRRSGAA
SLMIGSSLPRRAGAA

SEQ ID NO: 133531 - protein, 15 aa, Artificial Sequence
  Description of Artificial Sequence: Synthetic peptide
  Seed: SLMQGSTLPRRSGAA
SLMIGSSLPRRVGAA

SEQ ID NO: 133532 - protein, 15 aa, Artificial Sequence
  Description of Artificial Sequence: Synthetic peptide
  Seed: SLMQGSTLPRRSGAA
SLMIGSSLVRRAGAA

SEQ ID NO: 133533 - protein, 15 aa, Artificial Sequence
  Description of Artificial Sequence: Synthetic peptide
  Seed: SLMQGSTLPRRSGAA
SLMIGSSLVRRSGAA

SEQ ID NO: 133534 - protein, 15 aa, Artificial Sequence
  Description of Artificial Sequence: Synthetic peptide
  Seed: SLMQGSTLPRRSGAA
SLMIGSSLVRRVGAA

SEQ ID NO: 133535 - protein, 15 aa, Artificial Sequence
  Description of Artificial Sequence: Synthetic peptide
  Seed: SLMQGSTLPRRSGAA
SLMIGSVLIRRAGAA

SEQ ID NO: 133536 - protein, 15 aa, Artificial Sequence
  Description of Artificial Sequence: Synthetic peptide
  Seed: SLMQGSTLPRRSGAA
SLMLGSALARRAGAA

SEQ ID NO: 133537 - protein, 15 aa, Artificial Sequence
  Description of Artificial Sequence: Synthetic peptide
  Seed: SLMQGSTLPRRSGAA
SLMLGSALARRIGAA

SEQ ID NO: 133538 - protein, 15 aa, Artificial Sequence
  Description of Artificial Sequence: Synthetic peptide
  Seed: SLMQGSTLPRRSGAA
SLMLGSALARRSGAA

SEQ ID NO: 133539 - protein, 15 aa, Artificial Sequence
  Description of Artificial Sequence: Synthetic peptide
  Seed: SLMQGSTLPRRSGAA
SLMLGSALARRTGAA

SEQ ID NO: 133540 - protein, 15 aa, Artificial Sequence
  Description of Artificial Sequence: Synthetic peptide
  Seed: SLMQGSTLPRRSGAA
SLMLGSALARRVGAA

SEQ ID NO: 133541 - protein, 15 aa, Artificial Sequence
  Description of Artificial Sequence: Synthetic peptide
  Seed: SLMQGSTLPRRSGAA
SLMLGSALIRRAGAA

SEQ ID NO: 133542 - protein, 15 aa, Artificial Sequence
  Description of Artificial Sequence: Synthetic peptide
  Seed: SLMQGSTLPRRSGAA
SLMLGSALVRRAGAA

SEQ ID NO: 133543 - protein, 15 aa, Artificial Sequence
  Description of Artificial Sequence: Synthetic peptide
  Seed: SLMQGSTLPRRSGAA
SLMLGSALVRRSGAA

SEQ ID NO: 133544 - protein, 15 aa, Artificial Sequence
  Description of Artificial Sequence: Synthetic peptide
  Seed: SLMQGSTLPRRSGAA
SLMLGSALVRRVGAA

SEQ ID NO: 133545 - protein, 15 aa, Artificial Sequence
  Description of Artificial Sequence: Synthetic peptide
  Seed: SLMQGSTLPRRSGAA
SLMLGSGLARRAGAA

SEQ ID NO: 133546 - protein, 15 aa, Artificial Sequence
  Description of Artificial Sequence: Synthetic peptide
  Seed: SLMQGSTLPRRSGAA
SLMLGSGLARRIGAA

SEQ ID NO: 133547 - protein, 15 aa, Artificial Sequence
  Description of Artificial Sequence: Synthetic peptide
  Seed: SLMQGSTLPRRSGAA
SLMLGSGLARRSGAA

SEQ ID NO: 133548 - protein, 15 aa, Artificial Sequence
  Description of Artificial Sequence: Synthetic peptide
  Seed: SLMQGSTLPRRSGAA
SLMLGSGLARRTGAA

SEQ ID NO: 133549 - protein, 15 aa, Artificial Sequence
  Description of Artificial Sequence: Synthetic peptide
  Seed: SLMQGSTLPRRSGAA
SLMLGSGLARRVGAA

SEQ ID NO: 133550 - protein, 15 aa, Artificial Sequence
  Description of Artificial Sequence: Synthetic peptide
  Seed: SLMQGSTLPRRSGAA
SLMLGSGLVRRAGAA

SEQ ID NO: 133551 - protein, 15 aa, Artificial Sequence
  Description of Artificial Sequence: Synthetic peptide
  Seed: SLMQGSTLPRRSGAA
SLMLGSGLVRRSGAA

SEQ ID NO: 133552 - protein, 15 aa, Artificial Sequence
  Description of Artificial Sequence: Synthetic peptide
  Seed: SLMQGSTLPRRSGAA
SLMLGSGLVRRVGAA

SEQ ID NO: 133553 - protein, 15 aa, Artificial Sequence
  Description of Artificial Sequence: Synthetic peptide
  Seed: SLMQGSTLPRRSGAA
SLMMGSALARRAGAA

SEQ ID NO: 133554 - protein, 15 aa, Artificial Sequence
  Description of Artificial Sequence: Synthetic peptide
  Seed: SLMQGSTLPRRSGAA
SLMMGSALARRIGAA

SEQ ID NO: 133555 - protein, 15 aa, Artificial Sequence
  Description of Artificial Sequence: Synthetic peptide
  Seed: SLMQGSTLPRRSGAA
SLMMGSALARRMGAA

SEQ ID NO: 133556 - protein, 15 aa, Artificial Sequence
  Description of Artificial Sequence: Synthetic peptide
  Seed: SLMQGSTLPRRSGAA
SLMMGSALARRSGAA

SEQ ID NO: 133557 - protein, 15 aa, Artificial Sequence
  Description of Artificial Sequence: Synthetic peptide
  Seed: SLMQGSTLPRRSGAA
SLMMGSALARRTGAA

SEQ ID NO: 133558 - protein, 15 aa, Artificial Sequence
  Description of Artificial Sequence: Synthetic peptide
  Seed: SLMQGSTLPRRSGAA
SLMMGSALARRVGAA

SEQ ID NO: 133559 - protein, 15 aa, Artificial Sequence
  Description of Artificial Sequence: Synthetic peptide
  Seed: SLMQGSTLPRRSGAA
SLMMGSALIRRAGAA

SEQ ID NO: 133560 - protein, 15 aa, Artificial Sequence
  Description of Artificial Sequence: Synthetic peptide
  Seed: SLMQGSTLPRRSGAA
SLMMGSALIRRSGAA

SEQ ID NO: 133561 - protein, 15 aa, Artificial Sequence
  Description of Artificial Sequence: Synthetic peptide
  Seed: SLMQGSTLPRRSGAA
SLMMGSALPRRAGAA

SEQ ID NO: 133562 - protein, 15 aa, Artificial Sequence
  Description of Artificial Sequence: Synthetic peptide
  Seed: SLMQGSTLPRRSGAA
SLMMGSALPRRVGAA

SEQ ID NO: 133563 - protein, 15 aa, Artificial Sequence
  Description of Artificial Sequence: Synthetic peptide
  Seed: SLMQGSTLPRRSGAA
SLMMGSALVRRAGAA

SEQ ID NO: 133564 - protein, 15 aa, Artificial Sequence
  Description of Artificial Sequence: Synthetic peptide
  Seed: SLMQGSTLPRRSGAA
SLMMGSALVRRIGAA

SEQ ID NO: 133565 - protein, 15 aa, Artificial Sequence
  Description of Artificial Sequence: Synthetic peptide
  Seed: SLMQGSTLPRRSGAA
SLMMGSALVRRSGAA

SEQ ID NO: 133566 - protein, 15 aa, Artificial Sequence
  Description of Artificial Sequence: Synthetic peptide
  Seed: SLMQGSTLPRRSGAA
SLMMGSALVRRTGAA

SEQ ID NO: 133567 - protein, 15 aa, Artificial Sequence
  Description of Artificial Sequence: Synthetic peptide
  Seed: SLMQGSTLPRRSGAA
SLMMGSALVRRVGAA

SEQ ID NO: 133568 - protein, 15 aa, Artificial Sequence
  Description of Artificial Sequence: Synthetic peptide
  Seed: SLMQGSTLPRRSGAA
SLMMGSGLARRAGAA

SEQ ID NO: 133569 - protein, 15 aa, Artificial Sequence
  Description of Artificial Sequence: Synthetic peptide
  Seed: SLMQGSTLPRRSGAA
SLMMGSGLARRIGAA

SEQ ID NO: 133570 - protein, 15 aa, Artificial Sequence
  Description of Artificial Sequence: Synthetic peptide
  Seed: SLMQGSTLPRRSGAA
SLMMGSGLARRSGAA

SEQ ID NO: 133571 - protein, 15 aa, Artificial Sequence
  Description of Artificial Sequence: Synthetic peptide
  Seed: SLMQGSTLPRRSGAA
SLMMGSGLARRTGAA

SEQ ID NO: 133572 - protein, 15 aa, Artificial Sequence
  Description of Artificial Sequence: Synthetic peptide
  Seed: SLMQGSTLPRRSGAA
SLMMGSGLARRVGAA

SEQ ID NO: 133573 - protein, 15 aa, Artificial Sequence
  Description of Artificial Sequence: Synthetic peptide
  Seed: SLMQGSTLPRRSGAA
SLMMGSGLIRRAGAA

SEQ ID NO: 133574 - protein, 15 aa, Artificial Sequence
  Description of Artificial Sequence: Synthetic peptide
  Seed: SLMQGSTLPRRSGAA
SLMMGSGLPRRVGAA

SEQ ID NO: 133575 - protein, 15 aa, Artificial Sequence
  Description of Artificial Sequence: Synthetic peptide
  Seed: SLMQGSTLPRRSGAA
SLMMGSGLVRRAGAA

SEQ ID NO: 133576 - protein, 15 aa, Artificial Sequence
  Description of Artificial Sequence: Synthetic peptide
  Seed: SLMQGSTLPRRSGAA
SLMMGSGLVRRIGAA

SEQ ID NO: 133577 - protein, 15 aa, Artificial Sequence
  Description of Artificial Sequence: Synthetic peptide
  Seed: SLMQGSTLPRRSGAA
SLMMGSGLVRRSGAA

SEQ ID NO: 133578 - protein, 15 aa, Artificial Sequence
  Description of Artificial Sequence: Synthetic peptide
  Seed: SLMQGSTLPRRSGAA
SLMMGSGLVRRTGAA

SEQ ID NO: 133579 - protein, 15 aa, Artificial Sequence
  Description of Artificial Sequence: Synthetic peptide
  Seed: SLMQGSTLPRRSGAA
SLMMGSGLVRRVGAA

SEQ ID NO: 133580 - protein, 15 aa, Artificial Sequence
  Description of Artificial Sequence: Synthetic peptide
  Seed: SLMQGSTLPRRSGAA
SLMMGSSLARRAGAA

SEQ ID NO: 133581 - protein, 15 aa, Artificial Sequence
  Description of Artificial Sequence: Synthetic peptide
  Seed: SLMQGSTLPRRSGAA
SLMMGSSLARRVGAA

SEQ ID NO: 133582 - protein, 15 aa, Artificial Sequence
  Description of Artificial Sequence: Synthetic peptide
  Seed: SLMQGSTLPRRSGAA
SLMMGSSLIRRAGAA

SEQ ID NO: 133583 - protein, 15 aa, Artificial Sequence
  Description of Artificial Sequence: Synthetic peptide
  Seed: SLMQGSTLPRRSGAA
SLMMGSVLIRRAGAA

SEQ ID NO: 133584 - protein, 15 aa, Artificial Sequence
  Description of Artificial Sequence: Synthetic peptide
  Seed: SLMQGSTLPRRSGAA
SLMNGSALIRRSGAA

SEQ ID NO: 133585 - protein, 15 aa, Artificial Sequence
  Description of Artificial Sequence: Synthetic peptide
  Seed: SLMQGSTLPRRSGAA
SLMNGSALVRRAGAA

SEQ ID NO: 133586 - protein, 15 aa, Artificial Sequence
  Description of Artificial Sequence: Synthetic peptide
  Seed: SLMQGSTLPRRSGAA
SLMNGSILIRRAGAA

SEQ ID NO: 133587 - protein, 15 aa, Artificial Sequence
  Description of Artificial Sequence: Synthetic peptide
  Seed: SLMQGSTLPRRSGAA
SLMNGSSLIRRAGAA

SEQ ID NO: 133588 - protein, 15 aa, Artificial Sequence
  Description of Artificial Sequence: Synthetic peptide
  Seed: SLMQGSTLPRRSGAA
SLMNGSVLIRRAGAA

SEQ ID NO: 133589 - protein, 15 aa, Artificial Sequence
  Description of Artificial Sequence: Synthetic peptide
  Seed: SLMQGSTLPRRSGAA
SLMNGSVLVRRAGAA

SEQ ID NO: 133590 - protein, 15 aa, Artificial Sequence
  Description of Artificial Sequence: Synthetic peptide
  Seed: SLMQGSTLPRRSGAA
SLMPGSALARRAGAA

SEQ ID NO: 133591 - protein, 15 aa, Artificial Sequence
  Description of Artificial Sequence: Synthetic peptide
  Seed: SLMQGSTLPRRSGAA
SLMPGSALARRGGAA

SEQ ID NO: 133592 - protein, 15 aa, Artificial Sequence
  Description of Artificial Sequence: Synthetic peptide
  Seed: SLMQGSTLPRRSGAA
SLMPGSALARRIGAA

SEQ ID NO: 133593 - protein, 15 aa, Artificial Sequence
  Description of Artificial Sequence: Synthetic peptide
  Seed: SLMQGSTLPRRSGAA
SLMPGSALARRSGAA

SEQ ID NO: 133594 - protein, 15 aa, Artificial Sequence
  Description of Artificial Sequence: Synthetic peptide
  Seed: SLMQGSTLPRRSGAA
SLMPGSALARRTGAA

SEQ ID NO: 133595 - protein, 15 aa, Artificial Sequence
  Description of Artificial Sequence: Synthetic peptide
  Seed: SLMQGSTLPRRSGAA
SLMPGSALARRVGAA

SEQ ID NO: 133596 - protein, 15 aa, Artificial Sequence
  Description of Artificial Sequence: Synthetic peptide
  Seed: SLMQGSTLPRRSGAA
SLMPGSALIRRAGAA

SEQ ID NO: 133597 - protein, 15 aa, Artificial Sequence
  Description of Artificial Sequence: Synthetic peptide
  Seed: SLMQGSTLPRRSGAA
SLMPGSALIRRSGAA

SEQ ID NO: 133598 - protein, 15 aa, Artificial Sequence
  Description of Artificial Sequence: Synthetic peptide
  Seed: SLMQGSTLPRRSGAA
SLMPGSALIRRVGAA

SEQ ID NO: 133599 - protein, 15 aa, Artificial Sequence
  Description of Artificial Sequence: Synthetic peptide
  Seed: SLMQGSTLPRRSGAA
SLMPGSALPRRAGAA

SEQ ID NO: 133600 - protein, 15 aa, Artificial Sequence
  Description of Artificial Sequence: Synthetic peptide
  Seed: SLMQGSTLPRRSGAA
SLMPGSALPRRSGAA

SEQ ID NO: 133601 - protein, 15 aa, Artificial Sequence
  Description of Artificial Sequence: Synthetic peptide
  Seed: SLMQGSTLPRRSGAA
SLMPGSALPRRVGAA

SEQ ID NO: 133602 - protein, 15 aa, Artificial Sequence
  Description of Artificial Sequence: Synthetic peptide
  Seed: SLMQGSTLPRRSGAA
SLMPGSALVRRAGAA

SEQ ID NO: 133603 - protein, 15 aa, Artificial Sequence
  Description of Artificial Sequence: Synthetic peptide
  Seed: SLMQGSTLPRRSGAA
SLMPGSALVRRIGAA

SEQ ID NO: 133604 - protein, 15 aa, Artificial Sequence
  Description of Artificial Sequence: Synthetic peptide
  Seed: SLMQGSTLPRRSGAA
SLMPGSALVRRSGAA

SEQ ID NO: 133605 - protein, 15 aa, Artificial Sequence
  Description of Artificial Sequence: Synthetic peptide
  Seed: SLMQGSTLPRRSGAA
SLMPGSALVRRTGAA

SEQ ID NO: 133606 - protein, 15 aa, Artificial Sequence
  Description of Artificial Sequence: Synthetic peptide
  Seed: SLMQGSTLPRRSGAA
SLMPGSALVRRVGAA

SEQ ID NO: 133607 - protein, 15 aa, Artificial Sequence
  Description of Artificial Sequence: Synthetic peptide
  Seed: SLMQGSTLPRRSGAA
SLMPGSGLARRAGAA

SEQ ID NO: 133608 - protein, 15 aa, Artificial Sequence
  Description of Artificial Sequence: Synthetic peptide
  Seed: SLMQGSTLPRRSGAA
SLMPGSGLARRIGAA

SEQ ID NO: 133609 - protein, 15 aa, Artificial Sequence
  Description of Artificial Sequence: Synthetic peptide
  Seed: SLMQGSTLPRRSGAA
SLMPGSGLARRLGAA

SEQ ID NO: 133610 - protein, 15 aa, Artificial Sequence
  Description of Artificial Sequence: Synthetic peptide
  Seed: SLMQGSTLPRRSGAA
SLMPGSGLARRMGAA

SEQ ID NO: 133611 - protein, 15 aa, Artificial Sequence
  Description of Artificial Sequence: Synthetic peptide
  Seed: SLMQGSTLPRRSGAA
SLMPGSGLARRSGAA

SEQ ID NO: 133612 - protein, 15 aa, Artificial Sequence
  Description of Artificial Sequence: Synthetic peptide
  Seed: SLMQGSTLPRRSGAA
SLMPGSGLARRTGAA

SEQ ID NO: 133613 - protein, 15 aa, Artificial Sequence
  Description of Artificial Sequence: Synthetic peptide
  Seed: SLMQGSTLPRRSGAA
SLMPGSGLARRVGAA

SEQ ID NO: 133614 - protein, 15 aa, Artificial Sequence
  Description of Artificial Sequence: Synthetic peptide
  Seed: SLMQGSTLPRRSGAA
SLMPGSGLIRRAGAA

SEQ ID NO: 133615 - protein, 15 aa, Artificial Sequence
  Description of Artificial Sequence: Synthetic peptide
  Seed: SLMQGSTLPRRSGAA
SLMPGSGLIRRIGAA

SEQ ID NO: 133616 - protein, 15 aa, Artificial Sequence
  Description of Artificial Sequence: Synthetic peptide
  Seed: SLMQGSTLPRRSGAA
SLMPGSGLIRRSGAA

SEQ ID NO: 133617 - protein, 15 aa, Artificial Sequence
  Description of Artificial Sequence: Synthetic peptide
  Seed: SLMQGSTLPRRSGAA
SLMPGSGLIRRVGAA

SEQ ID NO: 133618 - protein, 15 aa, Artificial Sequence
  Description of Artificial Sequence: Synthetic peptide
  Seed: SLMQGSTLPRRSGAA
SLMPGSGLPRRVGAA

SEQ ID NO: 133619 - protein, 15 aa, Artificial Sequence
  Description of Artificial Sequence: Synthetic peptide
  Seed: SLMQGSTLPRRSGAA
SLMPGSGLVRRAGAA

SEQ ID NO: 133620 - protein, 15 aa, Artificial Sequence
  Description of Artificial Sequence: Synthetic peptide
  Seed: SLMQGSTLPRRSGAA
SLMPGSGLVRRIGAA

SEQ ID NO: 133621 - protein, 15 aa, Artificial Sequence
  Description of Artificial Sequence: Synthetic peptide
  Seed: SLMQGSTLPRRSGAA
SLMPGSGLVRRSGAA

SEQ ID NO: 133622 - protein, 15 aa, Artificial Sequence
  Description of Artificial Sequence: Synthetic peptide
  Seed: SLMQGSTLPRRSGAA
SLMPGSGLVRRTGAA

SEQ ID NO: 133623 - protein, 15 aa, Artificial Sequence
  Description of Artificial Sequence: Synthetic peptide
  Seed: SLMQGSTLPRRSGAA
SLMPGSGLVRRVGAA

SEQ ID NO: 133624 - protein, 15 aa, Artificial Sequence
  Description of Artificial Sequence: Synthetic peptide
  Seed: SLMQGSTLPRRSGAA
SLMPGSSLARRAGAA

SEQ ID NO: 133625 - protein, 15 aa, Artificial Sequence
  Description of Artificial Sequence: Synthetic peptide
  Seed: SLMQGSTLPRRSGAA
SLMPGSSLARRSGAA

SEQ ID NO: 133626 - protein, 15 aa, Artificial Sequence
  Description of Artificial Sequence: Synthetic peptide
  Seed: SLMQGSTLPRRSGAA
SLMPGSSLARRVGAA

SEQ ID NO: 133627 - protein, 15 aa, Artificial Sequence
  Description of Artificial Sequence: Synthetic peptide
  Seed: SLMQGSTLPRRSGAA
SLMPGSSLVRRAGAA

SEQ ID NO: 133628 - protein, 15 aa, Artificial Sequence
  Description of Artificial Sequence: Synthetic peptide
  Seed: SLMQGSTLPRRSGAA
SLMSGSALARRAGAA

SEQ ID NO: 133629 - protein, 15 aa, Artificial Sequence
  Description of Artificial Sequence: Synthetic peptide
  Seed: SLMQGSTLPRRSGAA
SLMSGSALARRVGAA

SEQ ID NO: 133630 - protein, 15 aa, Artificial Sequence
  Description of Artificial Sequence: Synthetic peptide
  Seed: SLMQGSTLPRRSGAA
SLMTGSALARRAGAA

SEQ ID NO: 133631 - protein, 15 aa, Artificial Sequence
  Description of Artificial Sequence: Synthetic peptide
  Seed: SLMQGSTLPRRSGAA
SLMTGSALARRIGAA

SEQ ID NO: 133632 - protein, 15 aa, Artificial Sequence
  Description of Artificial Sequence: Synthetic peptide
  Seed: SLMQGSTLPRRSGAA
SLMTGSALARRSGAA

SEQ ID NO: 133633 - protein, 15 aa, Artificial Sequence
  Description of Artificial Sequence: Synthetic peptide
  Seed: SLMQGSTLPRRSGAA
SLMTGSALARRTGAA

SEQ ID NO: 133634 - protein, 15 aa, Artificial Sequence
  Description of Artificial Sequence: Synthetic peptide
  Seed: SLMQGSTLPRRSGAA
SLMTGSALARRVGAA

SEQ ID NO: 133635 - protein, 15 aa, Artificial Sequence
  Description of Artificial Sequence: Synthetic peptide
  Seed: SLMQGSTLPRRSGAA
SLMTGSALVRRAGAA

SEQ ID NO: 133636 - protein, 15 aa, Artificial Sequence
  Description of Artificial Sequence: Synthetic peptide
  Seed: SLMQGSTLPRRSGAA
SLMTGSALVRRVGAA

SEQ ID NO: 133637 - protein, 15 aa, Artificial Sequence
  Description of Artificial Sequence: Synthetic peptide
  Seed: SLMQGSTLPRRSGAA
SLMTGSGLARRAGAA

SEQ ID NO: 133638 - protein, 15 aa, Artificial Sequence
  Description of Artificial Sequence: Synthetic peptide
  Seed: SLMQGSTLPRRSGAA
SLMTGSGLARRIGAA

SEQ ID NO: 133639 - protein, 15 aa, Artificial Sequence
  Description of Artificial Sequence: Synthetic peptide
  Seed: SLMQGSTLPRRSGAA
SLMTGSGLARRTGAA

SEQ ID NO: 133640 - protein, 15 aa, Artificial Sequence
  Description of Artificial Sequence: Synthetic peptide
  Seed: SLMQGSTLPRRSGAA
SLMTGSGLARRVGAA

SEQ ID NO: 133641 - protein, 15 aa, Artificial Sequence
  Description of Artificial Sequence: Synthetic peptide
  Seed: SLMQGSTLPRRSGAA
SLMTGSGLVRRAGAA

SEQ ID NO: 133642 - protein, 15 aa, Artificial Sequence
  Description of Artificial Sequence: Synthetic peptide
  Seed: SLMQGSTLPRRSGAA
SLMTGSGLVRRVGAA

SEQ ID NO: 133643 - protein, 15 aa, Artificial Sequence
  Description of Artificial Sequence: Synthetic peptide
  Seed: SLMQGSTLPRRSGAA
SLMVGSALARRAGAA

SEQ ID NO: 133644 - protein, 15 aa, Artificial Sequence
  Description of Artificial Sequence: Synthetic peptide
  Seed: SLMQGSTLPRRSGAA
SLMVGSALARRGGAA

SEQ ID NO: 133645 - protein, 15 aa, Artificial Sequence
  Description of Artificial Sequence: Synthetic peptide
  Seed: SLMQGSTLPRRSGAA
SLMVGSALARRIGAA

SEQ ID NO: 133646 - protein, 15 aa, Artificial Sequence
  Description of Artificial Sequence: Synthetic peptide
  Seed: SLMQGSTLPRRSGAA
SLMVGSALARRLGAA

SEQ ID NO: 133647 - protein, 15 aa, Artificial Sequence
  Description of Artificial Sequence: Synthetic peptide
  Seed: SLMQGSTLPRRSGAA
SLMVGSALARRMGAA

SEQ ID NO: 133648 - protein, 15 aa, Artificial Sequence
  Description of Artificial Sequence: Synthetic peptide
  Seed: SLMQGSTLPRRSGAA
SLMVGSALARRNGAA

SEQ ID NO: 133649 - protein, 15 aa, Artificial Sequence
  Description of Artificial Sequence: Synthetic peptide
  Seed: SLMQGSTLPRRSGAA
SLMVGSALARRSGAA

SEQ ID NO: 133650 - protein, 15 aa, Artificial Sequence
  Description of Artificial Sequence: Synthetic peptide
  Seed: SLMQGSTLPRRSGAA
SLMVGSALARRTGAA

SEQ ID NO: 133651 - protein, 15 aa, Artificial Sequence
  Description of Artificial Sequence: Synthetic peptide
  Seed: SLMQGSTLPRRSGAA
SLMVGSALARRVGAA

SEQ ID NO: 133652 - protein, 15 aa, Artificial Sequence
  Description of Artificial Sequence: Synthetic peptide
  Seed: SLMQGSTLPRRSGAA
SLMVGSALIRRAGAA

SEQ ID NO: 133653 - protein, 15 aa, Artificial Sequence
  Description of Artificial Sequence: Synthetic peptide
  Seed: SLMQGSTLPRRSGAA
SLMVGSALIRRSGAA

SEQ ID NO: 133654 - protein, 15 aa, Artificial Sequence
  Description of Artificial Sequence: Synthetic peptide
  Seed: SLMQGSTLPRRSGAA
SLMVGSALIRRVGAA

SEQ ID NO: 133655 - protein, 15 aa, Artificial Sequence
  Description of Artificial Sequence: Synthetic peptide
  Seed: SLMQGSTLPRRSGAA
SLMVGSALPRRAGAA

SEQ ID NO: 133656 - protein, 15 aa, Artificial Sequence
  Description of Artificial Sequence: Synthetic peptide
  Seed: SLMQGSTLPRRSGAA
SLMVGSALPRRIGAA

SEQ ID NO: 133657 - protein, 15 aa, Artificial Sequence
  Description of Artificial Sequence: Synthetic peptide
  Seed: SLMQGSTLPRRSGAA
SLMVGSALPRRSGAA

SEQ ID NO: 133658 - protein, 15 aa, Artificial Sequence
  Description of Artificial Sequence: Synthetic peptide
  Seed: SLMQGSTLPRRSGAA
SLMVGSALPRRTGAA

SEQ ID NO: 133659 - protein, 15 aa, Artificial Sequence
  Description of Artificial Sequence: Synthetic peptide
  Seed: SLMQGSTLPRRSGAA
SLMVGSALPRRVGAA

SEQ ID NO: 133660 - protein, 15 aa, Artificial Sequence
  Description of Artificial Sequence: Synthetic peptide
  Seed: SLMQGSTLPRRSGAA
SLMVGSALSRRAGAA

SEQ ID NO: 133661 - protein, 15 aa, Artificial Sequence
  Description of Artificial Sequence: Synthetic peptide
  Seed: SLMQGSTLPRRSGAA
SLMVGSALSRRVGAA

SEQ ID NO: 133662 - protein, 15 aa, Artificial Sequence
  Description of Artificial Sequence: Synthetic peptide
  Seed: SLMQGSTLPRRSGAA
SLMVGSALVRRAGAA

SEQ ID NO: 133663 - protein, 15 aa, Artificial Sequence
  Description of Artificial Sequence: Synthetic peptide
  Seed: SLMQGSTLPRRSGAA
SLMVGSALVRRIGAA

SEQ ID NO: 133664 - protein, 15 aa, Artificial Sequence
  Description of Artificial Sequence: Synthetic peptide
  Seed: SLMQGSTLPRRSGAA
SLMVGSALVRRSGAA

SEQ ID NO: 133665 - protein, 15 aa, Artificial Sequence
  Description of Artificial Sequence: Synthetic peptide
  Seed: SLMQGSTLPRRSGAA
SLMVGSALVRRTGAA

SEQ ID NO: 133666 - protein, 15 aa, Artificial Sequence
  Description of Artificial Sequence: Synthetic peptide
  Seed: SLMQGSTLPRRSGAA
SLMVGSALVRRVGAA

SEQ ID NO: 133667 - protein, 15 aa, Artificial Sequence
  Description of Artificial Sequence: Synthetic peptide
  Seed: SLMQGSTLPRRSGAA
SLMVGSGLARRAGAA

SEQ ID NO: 133668 - protein, 15 aa, Artificial Sequence
  Description of Artificial Sequence: Synthetic peptide
  Seed: SLMQGSTLPRRSGAA
SLMVGSGLARRGGAA

SEQ ID NO: 133669 - protein, 15 aa, Artificial Sequence
  Description of Artificial Sequence: Synthetic peptide
  Seed: SLMQGSTLPRRSGAA
SLMVGSGLARRIGAA

SEQ ID NO: 133670 - protein, 15 aa, Artificial Sequence
  Description of Artificial Sequence: Synthetic peptide
  Seed: SLMQGSTLPRRSGAA
SLMVGSGLARRLGAA

SEQ ID NO: 133671 - protein, 15 aa, Artificial Sequence
  Description of Artificial Sequence: Synthetic peptide
  Seed: SLMQGSTLPRRSGAA
SLMVGSGLARRMGAA

SEQ ID NO: 133672 - protein, 15 aa, Artificial Sequence
  Description of Artificial Sequence: Synthetic peptide
  Seed: SLMQGSTLPRRSGAA
SLMVGSGLARRSGAA

SEQ ID NO: 133673 - protein, 15 aa, Artificial Sequence
  Description of Artificial Sequence: Synthetic peptide
  Seed: SLMQGSTLPRRSGAA
SLMVGSGLARRTGAA

SEQ ID NO: 133674 - protein, 15 aa, Artificial Sequence
  Description of Artificial Sequence: Synthetic peptide
  Seed: SLMQGSTLPRRSGAA
SLMVGSGLARRVGAA

SEQ ID NO: 133675 - protein, 15 aa, Artificial Sequence
  Description of Artificial Sequence: Synthetic peptide
  Seed: SLMQGSTLPRRSGAA
SLMVGSGLIRRAGAA

SEQ ID NO: 133676 - protein, 15 aa, Artificial Sequence
  Description of Artificial Sequence: Synthetic peptide
  Seed: SLMQGSTLPRRSGAA
SLMVGSGLIRRIGAA

SEQ ID NO: 133677 - protein, 15 aa, Artificial Sequence
  Description of Artificial Sequence: Synthetic peptide
  Seed: SLMQGSTLPRRSGAA
SLMVGSGLIRRSGAA

SEQ ID NO: 133678 - protein, 15 aa, Artificial Sequence
  Description of Artificial Sequence: Synthetic peptide
  Seed: SLMQGSTLPRRSGAA
SLMVGSGLIRRTGAA

SEQ ID NO: 133679 - protein, 15 aa, Artificial Sequence
  Description of Artificial Sequence: Synthetic peptide
  Seed: SLMQGSTLPRRSGAA
SLMVGSGLIRRVGAA

SEQ ID NO: 133680 - protein, 15 aa, Artificial Sequence
  Description of Artificial Sequence: Synthetic peptide
  Seed: SLMQGSTLPRRSGAA
SLMVGSGLPRRAGAA

SEQ ID NO: 133681 - protein, 15 aa, Artificial Sequence
  Description of Artificial Sequence: Synthetic peptide
  Seed: SLMQGSTLPRRSGAA
SLMVGSGLPRRIGAA

SEQ ID NO: 133682 - protein, 15 aa, Artificial Sequence
  Description of Artificial Sequence: Synthetic peptide
  Seed: SLMQGSTLPRRSGAA
SLMVGSGLPRRSGAA

SEQ ID NO: 133683 - protein, 15 aa, Artificial Sequence
  Description of Artificial Sequence: Synthetic peptide
  Seed: SLMQGSTLPRRSGAA
SLMVGSGLPRRVGAA

SEQ ID NO: 133684 - protein, 15 aa, Artificial Sequence
  Description of Artificial Sequence: Synthetic peptide
  Seed: SLMQGSTLPRRSGAA
SLMVGSGLSRRAGAA

SEQ ID NO: 133685 - protein, 15 aa, Artificial Sequence
  Description of Artificial Sequence: Synthetic peptide
  Seed: SLMQGSTLPRRSGAA
SLMVGSGLSRRVGAA

SEQ ID NO: 133686 - protein, 15 aa, Artificial Sequence
  Description of Artificial Sequence: Synthetic peptide
  Seed: SLMQGSTLPRRSGAA
SLMVGSGLTRRVGAA

SEQ ID NO: 133687 - protein, 15 aa, Artificial Sequence
  Description of Artificial Sequence: Synthetic peptide
  Seed: SLMQGSTLPRRSGAA
SLMVGSGLVRRAGAA

SEQ ID NO: 133688 - protein, 15 aa, Artificial Sequence
  Description of Artificial Sequence: Synthetic peptide
  Seed: SLMQGSTLPRRSGAA
SLMVGSGLVRRIGAA

SEQ ID NO: 133689 - protein, 15 aa, Artificial Sequence
  Description of Artificial Sequence: Synthetic peptide
  Seed: SLMQGSTLPRRSGAA
SLMVGSGLVRRLGAA

SEQ ID NO: 133690 - protein, 15 aa, Artificial Sequence
  Description of Artificial Sequence: Synthetic peptide
  Seed: SLMQGSTLPRRSGAA
SLMVGSGLVRRMGAA

SEQ ID NO: 133691 - protein, 15 aa, Artificial Sequence
  Description of Artificial Sequence: Synthetic peptide
  Seed: SLMQGSTLPRRSGAA
SLMVGSGLVRRSGAA

SEQ ID NO: 133692 - protein, 15 aa, Artificial Sequence
  Description of Artificial Sequence: Synthetic peptide
  Seed: SLMQGSTLPRRSGAA
SLMVGSGLVRRTGAA

SEQ ID NO: 133693 - protein, 15 aa, Artificial Sequence
  Description of Artificial Sequence: Synthetic peptide
  Seed: SLMQGSTLPRRSGAA
SLMVGSGLVRRVGAA

SEQ ID NO: 133694 - protein, 15 aa, Artificial Sequence
  Description of Artificial Sequence: Synthetic peptide
  Seed: SLMQGSTLPRRSGAA
SLMVGSSLARRAGAA

SEQ ID NO: 133695 - protein, 15 aa, Artificial Sequence
  Description of Artificial Sequence: Synthetic peptide
  Seed: SLMQGSTLPRRSGAA
SLMVGSSLARRIGAA

SEQ ID NO: 133696 - protein, 15 aa, Artificial Sequence
  Description of Artificial Sequence: Synthetic peptide
  Seed: SLMQGSTLPRRSGAA
SLMVGSSLARRSGAA

SEQ ID NO: 133697 - protein, 15 aa, Artificial Sequence
  Description of Artificial Sequence: Synthetic peptide
  Seed: SLMQGSTLPRRSGAA
SLMVGSSLARRTGAA

SEQ ID NO: 133698 - protein, 15 aa, Artificial Sequence
  Description of Artificial Sequence: Synthetic peptide
  Seed: SLMQGSTLPRRSGAA
SLMVGSSLARRVGAA

SEQ ID NO: 133699 - protein, 15 aa, Artificial Sequence
  Description of Artificial Sequence: Synthetic peptide
  Seed: SLMQGSTLPRRSGAA
SLMVGSSLVRRAGAA

SEQ ID NO: 133700 - protein, 15 aa, Artificial Sequence
  Description of Artificial Sequence: Synthetic peptide
  Seed: SLMQGSTLPRRSGAA
SLMWGSALARRAGAA

SEQ ID NO: 133701 - protein, 15 aa, Artificial Sequence
  Description of Artificial Sequence: Synthetic peptide
  Seed: SLMQGSTLPRRSGAA
SLMWGSALARRIGAA

SEQ ID NO: 133702 - protein, 15 aa, Artificial Sequence
  Description of Artificial Sequence: Synthetic peptide
  Seed: SLMQGSTLPRRSGAA
SLMWGSALARRSGAA

SEQ ID NO: 133703 - protein, 15 aa, Artificial Sequence
  Description of Artificial Sequence: Synthetic peptide
  Seed: SLMQGSTLPRRSGAA
SLMWGSALARRTGAA

SEQ ID NO: 133704 - protein, 15 aa, Artificial Sequence
  Description of Artificial Sequence: Synthetic peptide
  Seed: SLMQGSTLPRRSGAA
SLMWGSALARRVGAA

SEQ ID NO: 133705 - protein, 15 aa, Artificial Sequence
  Description of Artificial Sequence: Synthetic peptide
  Seed: SLMQGSTLPRRSGAA
SLMWGSALVRRAGAA

SEQ ID NO: 133706 - protein, 15 aa, Artificial Sequence
  Description of Artificial Sequence: Synthetic peptide
  Seed: SLMQGSTLPRRSGAA
SLMWGSALVRRSGAA

SEQ ID NO: 133707 - protein, 15 aa, Artificial Sequence
  Description of Artificial Sequence: Synthetic peptide
  Seed: SLMQGSTLPRRSGAA
SLMWGSALVRRVGAA

SEQ ID NO: 133708 - protein, 15 aa, Artificial Sequence
  Description of Artificial Sequence: Synthetic peptide
  Seed: SLMQGSTLPRRSGAA
SLMWGSGLARRAGAA

SEQ ID NO: 133709 - protein, 15 aa, Artificial Sequence
  Description of Artificial Sequence: Synthetic peptide
  Seed: SLMQGSTLPRRSGAA
SLMWGSGLARRIGAA

SEQ ID NO: 133710 - protein, 15 aa, Artificial Sequence
  Description of Artificial Sequence: Synthetic peptide
  Seed: SLMQGSTLPRRSGAA
SLMWGSGLARRSGAA

SEQ ID NO: 133711 - protein, 15 aa, Artificial Sequence
  Description of Artificial Sequence: Synthetic peptide
  Seed: SLMQGSTLPRRSGAA
SLMWGSGLARRTGAA

SEQ ID NO: 133712 - protein, 15 aa, Artificial Sequence
  Description of Artificial Sequence: Synthetic peptide
  Seed: SLMQGSTLPRRSGAA
SLMWGSGLARRVGAA

SEQ ID NO: 133713 - protein, 15 aa, Artificial Sequence
  Description of Artificial Sequence: Synthetic peptide
  Seed: SLMQGSTLPRRSGAA
SLMWGSGLVRRAGAA

SEQ ID NO: 133714 - protein, 15 aa, Artificial Sequence
  Description of Artificial Sequence: Synthetic peptide
  Seed: SLMQGSTLPRRSGAA
SLMWGSGLVRRIGAA

SEQ ID NO: 133715 - protein, 15 aa, Artificial Sequence
  Description of Artificial Sequence: Synthetic peptide
  Seed: SLMQGSTLPRRSGAA
SLMWGSGLVRRSGAA

SEQ ID NO: 133716 - protein, 15 aa, Artificial Sequence
  Description of Artificial Sequence: Synthetic peptide
  Seed: SLMQGSTLPRRSGAA
SLMWGSGLVRRVGAA

SEQ ID NO: 133717 - protein, 15 aa, Artificial Sequence
  Description of Artificial Sequence: Synthetic peptide
  Seed: SLMQGSTLPRRSGAA
SLMYGSALARRAGAA

SEQ ID NO: 133718 - protein, 15 aa, Artificial Sequence
  Description of Artificial Sequence: Synthetic peptide
  Seed: SLMQGSTLPRRSGAA
SLMYGSALARRIGAA

SEQ ID NO: 133719 - protein, 15 aa, Artificial Sequence
  Description of Artificial Sequence: Synthetic peptide
  Seed: SLMQGSTLPRRSGAA
SLMYGSALARRSGAA

SEQ ID NO: 133720 - protein, 15 aa, Artificial Sequence
  Description of Artificial Sequence: Synthetic peptide
  Seed: SLMQGSTLPRRSGAA
SLMYGSALARRTGAA

SEQ ID NO: 133721 - protein, 15 aa, Artificial Sequence
  Description of Artificial Sequence: Synthetic peptide
  Seed: SLMQGSTLPRRSGAA
SLMYGSALARRVGAA

SEQ ID NO: 133722 - protein, 15 aa, Artificial Sequence
  Description of Artificial Sequence: Synthetic peptide
  Seed: SLMQGSTLPRRSGAA
SLMYGSALPRRVGAA

SEQ ID NO: 133723 - protein, 15 aa, Artificial Sequence
  Description of Artificial Sequence: Synthetic peptide
  Seed: SLMQGSTLPRRSGAA
SLMYGSALVRRAGAA

SEQ ID NO: 133724 - protein, 15 aa, Artificial Sequence
  Description of Artificial Sequence: Synthetic peptide
  Seed: SLMQGSTLPRRSGAA
SLMYGSALVRRTGAA

SEQ ID NO: 133725 - protein, 15 aa, Artificial Sequence
  Description of Artificial Sequence: Synthetic peptide
  Seed: SLMQGSTLPRRSGAA
SLMYGSALVRRVGAA

SEQ ID NO: 133726 - protein, 15 aa, Artificial Sequence
  Description of Artificial Sequence: Synthetic peptide
  Seed: SLMQGSTLPRRSGAA
SLMYGSGLARRAGAA

SEQ ID NO: 133727 - protein, 15 aa, Artificial Sequence
  Description of Artificial Sequence: Synthetic peptide
  Seed: SLMQGSTLPRRSGAA
SLMYGSGLARRIGAA

SEQ ID NO: 133728 - protein, 15 aa, Artificial Sequence
  Description of Artificial Sequence: Synthetic peptide
  Seed: SLMQGSTLPRRSGAA
SLMYGSGLARRSGAA

SEQ ID NO: 133729 - protein, 15 aa, Artificial Sequence
  Description of Artificial Sequence: Synthetic peptide
  Seed: SLMQGSTLPRRSGAA
SLMYGSGLARRTGAA

SEQ ID NO: 133730 - protein, 15 aa, Artificial Sequence
  Description of Artificial Sequence: Synthetic peptide
  Seed: SLMQGSTLPRRSGAA
SLMYGSGLARRVGAA

SEQ ID NO: 133731 - protein, 15 aa, Artificial Sequence
  Description of Artificial Sequence: Synthetic peptide
  Seed: SLMQGSTLPRRSGAA
SLMYGSGLVRRAGAA

SEQ ID NO: 133732 - protein, 15 aa, Artificial Sequence
  Description of Artificial Sequence: Synthetic peptide
  Seed: SLMQGSTLPRRSGAA
SLMYGSGLVRRIGAA

SEQ ID NO: 133733 - protein, 15 aa, Artificial Sequence
  Description of Artificial Sequence: Synthetic peptide
  Seed: SLMQGSTLPRRSGAA
SLMYGSGLVRRSGAA

SEQ ID NO: 133734 - protein, 15 aa, Artificial Sequence
  Description of Artificial Sequence: Synthetic peptide
  Seed: SLMQGSTLPRRSGAA
SLMYGSGLVRRTGAA

SEQ ID NO: 133735 - protein, 15 aa, Artificial Sequence
  Description of Artificial Sequence: Synthetic peptide
  Seed: SLMQGSTLPRRSGAA
SLMYGSGLVRRVGAA

SEQ ID NO: 133736 - protein, 16 aa, Artificial Sequence
  Description of Artificial Sequence: Synthetic peptide
  Seed: SLMQGSTLPRRSGAAG
SLMAGSALARRAGAAG

SEQ ID NO: 133737 - protein, 16 aa, Artificial Sequence
  Description of Artificial Sequence: Synthetic peptide
  Seed: SLMQGSTLPRRSGAAG
SLMAGSALARRIGAAG

SEQ ID NO: 133738 - protein, 16 aa, Artificial Sequence
  Description of Artificial Sequence: Synthetic peptide
  Seed: SLMQGSTLPRRSGAAG
SLMAGSALARRTGAAG

SEQ ID NO: 133739 - protein, 16 aa, Artificial Sequence
  Description of Artificial Sequence: Synthetic peptide
  Seed: SLMQGSTLPRRSGAAG
SLMAGSALARRVGAAG

SEQ ID NO: 133740 - protein, 16 aa, Artificial Sequence
  Description of Artificial Sequence: Synthetic peptide
  Seed: SLMQGSTLPRRSGAAG
SLMAGSGLARRVGAAG

SEQ ID NO: 133741 - protein, 16 aa, Artificial Sequence
  Description of Artificial Sequence: Synthetic peptide
  Seed: SLMQGSTLPRRSGAAG
SLMFGSALARRAGAAG

SEQ ID NO: 133742 - protein, 16 aa, Artificial Sequence
  Description of Artificial Sequence: Synthetic peptide
  Seed: SLMQGSTLPRRSGAAG
SLMFGSALARRIGAAG

SEQ ID NO: 133743 - protein, 16 aa, Artificial Sequence
  Description of Artificial Sequence: Synthetic peptide
  Seed: SLMQGSTLPRRSGAAG
SLMFGSALARRSGAAG

SEQ ID NO: 133744 - protein, 16 aa, Artificial Sequence
  Description of Artificial Sequence: Synthetic peptide
  Seed: SLMQGSTLPRRSGAAG
SLMFGSALARRTGAAG

SEQ ID NO: 133745 - protein, 16 aa, Artificial Sequence
  Description of Artificial Sequence: Synthetic peptide
  Seed: SLMQGSTLPRRSGAAG
SLMFGSALARRVGAAG

SEQ ID NO: 133746 - protein, 16 aa, Artificial Sequence
  Description of Artificial Sequence: Synthetic peptide
  Seed: SLMQGSTLPRRSGAAG
SLMFGSALVRRAGAAG

SEQ ID NO: 133747 - protein, 16 aa, Artificial Sequence
  Description of Artificial Sequence: Synthetic peptide
  Seed: SLMQGSTLPRRSGAAG
SLMFGSALVRRIGAAG

SEQ ID NO: 133748 - protein, 16 aa, Artificial Sequence
  Description of Artificial Sequence: Synthetic peptide
  Seed: SLMQGSTLPRRSGAAG
SLMFGSALVRRSGAAG

SEQ ID NO: 133749 - protein, 16 aa, Artificial Sequence
  Description of Artificial Sequence: Synthetic peptide
  Seed: SLMQGSTLPRRSGAAG
SLMFGSALVRRTGAAG

SEQ ID NO: 133750 - protein, 16 aa, Artificial Sequence
  Description of Artificial Sequence: Synthetic peptide
  Seed: SLMQGSTLPRRSGAAG
SLMFGSALVRRVGAAG

SEQ ID NO: 133751 - protein, 16 aa, Artificial Sequence
  Description of Artificial Sequence: Synthetic peptide
  Seed: SLMQGSTLPRRSGAAG
SLMFGSGLARRAGAAG

SEQ ID NO: 133752 - protein, 16 aa, Artificial Sequence
  Description of Artificial Sequence: Synthetic peptide
  Seed: SLMQGSTLPRRSGAAG
SLMFGSGLARRIGAAG

SEQ ID NO: 133753 - protein, 16 aa, Artificial Sequence
  Description of Artificial Sequence: Synthetic peptide
  Seed: SLMQGSTLPRRSGAAG
SLMFGSGLARRSGAAG

SEQ ID NO: 133754 - protein, 16 aa, Artificial Sequence
  Description of Artificial Sequence: Synthetic peptide
  Seed: SLMQGSTLPRRSGAAG
SLMFGSGLARRTGAAG

SEQ ID NO: 133755 - protein, 16 aa, Artificial Sequence
  Description of Artificial Sequence: Synthetic peptide
  Seed: SLMQGSTLPRRSGAAG
SLMFGSGLARRVGAAG

SEQ ID NO: 133756 - protein, 16 aa, Artificial Sequence
  Description of Artificial Sequence: Synthetic peptide
  Seed: SLMQGSTLPRRSGAAG
SLMFGSGLIRRAGAAG

SEQ ID NO: 133757 - protein, 16 aa, Artificial Sequence
  Description of Artificial Sequence: Synthetic peptide
  Seed: SLMQGSTLPRRSGAAG
SLMFGSGLVRRAGAAG

SEQ ID NO: 133758 - protein, 16 aa, Artificial Sequence
  Description of Artificial Sequence: Synthetic peptide
  Seed: SLMQGSTLPRRSGAAG
SLMFGSGLVRRIGAAG

SEQ ID NO: 133759 - protein, 16 aa, Artificial Sequence
  Description of Artificial Sequence: Synthetic peptide
  Seed: SLMQGSTLPRRSGAAG
SLMFGSGLVRRSGAAG

SEQ ID NO: 133760 - protein, 16 aa, Artificial Sequence
  Description of Artificial Sequence: Synthetic peptide
  Seed: SLMQGSTLPRRSGAAG
SLMFGSGLVRRTGAAG

SEQ ID NO: 133761 - protein, 16 aa, Artificial Sequence
  Description of Artificial Sequence: Synthetic peptide
  Seed: SLMQGSTLPRRSGAAG
SLMFGSGLVRRVGAAG

SEQ ID NO: 133762 - protein, 16 aa, Artificial Sequence
  Description of Artificial Sequence: Synthetic peptide
  Seed: SLMQGSTLPRRSGAAG
SLMIGSALARRAGAAG

SEQ ID NO: 133763 - protein, 16 aa, Artificial Sequence
  Description of Artificial Sequence: Synthetic peptide
  Seed: SLMQGSTLPRRSGAAG
SLMIGSALARRGGAAG

SEQ ID NO: 133764 - protein, 16 aa, Artificial Sequence
  Description of Artificial Sequence: Synthetic peptide
  Seed: SLMQGSTLPRRSGAAG
SLMIGSALARRIGAAG

SEQ ID NO: 133765 - protein, 16 aa, Artificial Sequence
  Description of Artificial Sequence: Synthetic peptide
  Seed: SLMQGSTLPRRSGAAG
SLMIGSALARRLGAAG

SEQ ID NO: 133766 - protein, 16 aa, Artificial Sequence
  Description of Artificial Sequence: Synthetic peptide
  Seed: SLMQGSTLPRRSGAAG
SLMIGSALARRMGAAG

SEQ ID NO: 133767 - protein, 16 aa, Artificial Sequence
  Description of Artificial Sequence: Synthetic peptide
  Seed: SLMQGSTLPRRSGAAG
SLMIGSALARRNGAAG

SEQ ID NO: 133768 - protein, 16 aa, Artificial Sequence
  Description of Artificial Sequence: Synthetic peptide
  Seed: SLMQGSTLPRRSGAAG
SLMIGSALARRSGAAG

SEQ ID NO: 133769 - protein, 16 aa, Artificial Sequence
  Description of Artificial Sequence: Synthetic peptide
  Seed: SLMQGSTLPRRSGAAG
SLMIGSALARRTGAAG

SEQ ID NO: 133770 - protein, 16 aa, Artificial Sequence
  Description of Artificial Sequence: Synthetic peptide
  Seed: SLMQGSTLPRRSGAAG
SLMIGSALARRVGAAG

SEQ ID NO: 133771 - protein, 16 aa, Artificial Sequence
  Description of Artificial Sequence: Synthetic peptide
  Seed: SLMQGSTLPRRSGAAG
SLMIGSALIRRAGAAG

SEQ ID NO: 133772 - protein, 16 aa, Artificial Sequence
  Description of Artificial Sequence: Synthetic peptide
  Seed: SLMQGSTLPRRSGAAG
SLMIGSALIRRVGAAG

SEQ ID NO: 133773 - protein, 16 aa, Artificial Sequence
  Description of Artificial Sequence: Synthetic peptide
  Seed: SLMQGSTLPRRSGAAG
SLMIGSALPRRAGAAG

SEQ ID NO: 133774 - protein, 16 aa, Artificial Sequence
  Description of Artificial Sequence: Synthetic peptide
  Seed: SLMQGSTLPRRSGAAG
SLMIGSALPRRIGAAG

SEQ ID NO: 133775 - protein, 16 aa, Artificial Sequence
  Description of Artificial Sequence: Synthetic peptide
  Seed: SLMQGSTLPRRSGAAG
SLMIGSALPRRVGAAG

SEQ ID NO: 133776 - protein, 16 aa, Artificial Sequence
  Description of Artificial Sequence: Synthetic peptide
  Seed: SLMQGSTLPRRSGAAG
SLMIGSALVRRAGAAG

SEQ ID NO: 133777 - protein, 16 aa, Artificial Sequence
  Description of Artificial Sequence: Synthetic peptide
  Seed: SLMQGSTLPRRSGAAG
SLMIGSALVRRIGAAG

SEQ ID NO: 133778 - protein, 16 aa, Artificial Sequence
  Description of Artificial Sequence: Synthetic peptide
  Seed: SLMQGSTLPRRSGAAG
SLMIGSALVRRSGAAG

SEQ ID NO: 133779 - protein, 16 aa, Artificial Sequence
  Description of Artificial Sequence: Synthetic peptide
  Seed: SLMQGSTLPRRSGAAG
SLMIGSALVRRTGAAG

SEQ ID NO: 133780 - protein, 16 aa, Artificial Sequence
  Description of Artificial Sequence: Synthetic peptide
  Seed: SLMQGSTLPRRSGAAG
SLMIGSALVRRVGAAG

SEQ ID NO: 133781 - protein, 16 aa, Artificial Sequence
  Description of Artificial Sequence: Synthetic peptide
  Seed: SLMQGSTLPRRSGAAG
SLMIGSGLARRAGAAG

SEQ ID NO: 133782 - protein, 16 aa, Artificial Sequence
  Description of Artificial Sequence: Synthetic peptide
  Seed: SLMQGSTLPRRSGAAG
SLMIGSGLARRGGAAG

SEQ ID NO: 133783 - protein, 16 aa, Artificial Sequence
  Description of Artificial Sequence: Synthetic peptide
  Seed: SLMQGSTLPRRSGAAG
SLMIGSGLARRIGAAG

SEQ ID NO: 133784 - protein, 16 aa, Artificial Sequence
  Description of Artificial Sequence: Synthetic peptide
  Seed: SLMQGSTLPRRSGAAG
SLMIGSGLARRLGAAG

SEQ ID NO: 133785 - protein, 16 aa, Artificial Sequence
  Description of Artificial Sequence: Synthetic peptide
  Seed: SLMQGSTLPRRSGAAG
SLMIGSGLARRMGAAG

SEQ ID NO: 133786 - protein, 16 aa, Artificial Sequence
  Description of Artificial Sequence: Synthetic peptide
  Seed: SLMQGSTLPRRSGAAG
SLMIGSGLARRSGAAG

SEQ ID NO: 133787 - protein, 16 aa, Artificial Sequence
  Description of Artificial Sequence: Synthetic peptide
  Seed: SLMQGSTLPRRSGAAG
SLMIGSGLARRTGAAG

SEQ ID NO: 133788 - protein, 16 aa, Artificial Sequence
  Description of Artificial Sequence: Synthetic peptide
  Seed: SLMQGSTLPRRSGAAG
SLMIGSGLARRVGAAG

SEQ ID NO: 133789 - protein, 16 aa, Artificial Sequence
  Description of Artificial Sequence: Synthetic peptide
  Seed: SLMQGSTLPRRSGAAG
SLMIGSGLIRRAGAAG

SEQ ID NO: 133790 - protein, 16 aa, Artificial Sequence
  Description of Artificial Sequence: Synthetic peptide
  Seed: SLMQGSTLPRRSGAAG
SLMIGSGLIRRVGAAG

SEQ ID NO: 133791 - protein, 16 aa, Artificial Sequence
  Description of Artificial Sequence: Synthetic peptide
  Seed: SLMQGSTLPRRSGAAG
SLMIGSGLPRRAGAAG

SEQ ID NO: 133792 - protein, 16 aa, Artificial Sequence
  Description of Artificial Sequence: Synthetic peptide
  Seed: SLMQGSTLPRRSGAAG
SLMIGSGLPRRIGAAG

SEQ ID NO: 133793 - protein, 16 aa, Artificial Sequence
  Description of Artificial Sequence: Synthetic peptide
  Seed: SLMQGSTLPRRSGAAG
SLMIGSGLPRRVGAAG

SEQ ID NO: 133794 - protein, 16 aa, Artificial Sequence
  Description of Artificial Sequence: Synthetic peptide
  Seed: SLMQGSTLPRRSGAAG
SLMIGSGLVRRAGAAG

SEQ ID NO: 133795 - protein, 16 aa, Artificial Sequence
  Description of Artificial Sequence: Synthetic peptide
  Seed: SLMQGSTLPRRSGAAG
SLMIGSGLVRRIGAAG

SEQ ID NO: 133796 - protein, 16 aa, Artificial Sequence
  Description of Artificial Sequence: Synthetic peptide
  Seed: SLMQGSTLPRRSGAAG
SLMIGSGLVRRSGAAG

SEQ ID NO: 133797 - protein, 16 aa, Artificial Sequence
  Description of Artificial Sequence: Synthetic peptide
  Seed: SLMQGSTLPRRSGAAG
SLMIGSGLVRRTGAAG

SEQ ID NO: 133798 - protein, 16 aa, Artificial Sequence
  Description of Artificial Sequence: Synthetic peptide
  Seed: SLMQGSTLPRRSGAAG
SLMIGSGLVRRVGAAG

SEQ ID NO: 133799 - protein, 16 aa, Artificial Sequence
  Description of Artificial Sequence: Synthetic peptide
  Seed: SLMQGSTLPRRSGAAG
SLMIGSSLARRAGAAG

SEQ ID NO: 133800 - protein, 16 aa, Artificial Sequence
  Description of Artificial Sequence: Synthetic peptide
  Seed: SLMQGSTLPRRSGAAG
SLMIGSSLARRSGAAG

SEQ ID NO: 133801 - protein, 16 aa, Artificial Sequence
  Description of Artificial Sequence: Synthetic peptide
  Seed: SLMQGSTLPRRSGAAG
SLMIGSSLARRTGAAG

SEQ ID NO: 133802 - protein, 16 aa, Artificial Sequence
  Description of Artificial Sequence: Synthetic peptide
  Seed: SLMQGSTLPRRSGAAG
SLMIGSSLARRVGAAG

SEQ ID NO: 133803 - protein, 16 aa, Artificial Sequence
  Description of Artificial Sequence: Synthetic peptide
  Seed: SLMQGSTLPRRSGAAG
SLMLGSALARRAGAAG

SEQ ID NO: 133804 - protein, 16 aa, Artificial Sequence
  Description of Artificial Sequence: Synthetic peptide
  Seed: SLMQGSTLPRRSGAAG
SLMLGSALARRIGAAG

SEQ ID NO: 133805 - protein, 16 aa, Artificial Sequence
  Description of Artificial Sequence: Synthetic peptide
  Seed: SLMQGSTLPRRSGAAG
SLMLGSALARRSGAAG

SEQ ID NO: 133806 - protein, 16 aa, Artificial Sequence
  Description of Artificial Sequence: Synthetic peptide
  Seed: SLMQGSTLPRRSGAAG
SLMLGSALARRTGAAG

SEQ ID NO: 133807 - protein, 16 aa, Artificial Sequence
  Description of Artificial Sequence: Synthetic peptide
  Seed: SLMQGSTLPRRSGAAG
SLMLGSALARRVGAAG

SEQ ID NO: 133808 - protein, 16 aa, Artificial Sequence
  Description of Artificial Sequence: Synthetic peptide
  Seed: SLMQGSTLPRRSGAAG
SLMLGSGLARRAGAAG

SEQ ID NO: 133809 - protein, 16 aa, Artificial Sequence
  Description of Artificial Sequence: Synthetic peptide
  Seed: SLMQGSTLPRRSGAAG
SLMLGSGLARRIGAAG

SEQ ID NO: 133810 - protein, 16 aa, Artificial Sequence
  Description of Artificial Sequence: Synthetic peptide
  Seed: SLMQGSTLPRRSGAAG
SLMLGSGLARRVGAAG

SEQ ID NO: 133811 - protein, 16 aa, Artificial Sequence
  Description of Artificial Sequence: Synthetic peptide
  Seed: SLMQGSTLPRRSGAAG
SLMLGSGLVRRAGAAG

SEQ ID NO: 133812 - protein, 16 aa, Artificial Sequence
  Description of Artificial Sequence: Synthetic peptide
  Seed: SLMQGSTLPRRSGAAG
SLMMGSALARRAGAAG

SEQ ID NO: 133813 - protein, 16 aa, Artificial Sequence
  Description of Artificial Sequence: Synthetic peptide
  Seed: SLMQGSTLPRRSGAAG
SLMMGSALARRIGAAG

SEQ ID NO: 133814 - protein, 16 aa, Artificial Sequence
  Description of Artificial Sequence: Synthetic peptide
  Seed: SLMQGSTLPRRSGAAG
SLMMGSALARRSGAAG

SEQ ID NO: 133815 - protein, 16 aa, Artificial Sequence
  Description of Artificial Sequence: Synthetic peptide
  Seed: SLMQGSTLPRRSGAAG
SLMMGSALARRTGAAG

SEQ ID NO: 133816 - protein, 16 aa, Artificial Sequence
  Description of Artificial Sequence: Synthetic peptide
  Seed: SLMQGSTLPRRSGAAG
SLMMGSALARRVGAAG

SEQ ID NO: 133817 - protein, 16 aa, Artificial Sequence
  Description of Artificial Sequence: Synthetic peptide
  Seed: SLMQGSTLPRRSGAAG
SLMMGSALVRRAGAAG

SEQ ID NO: 133818 - protein, 16 aa, Artificial Sequence
  Description of Artificial Sequence: Synthetic peptide
  Seed: SLMQGSTLPRRSGAAG
SLMMGSALVRRVGAAG

SEQ ID NO: 133819 - protein, 16 aa, Artificial Sequence
  Description of Artificial Sequence: Synthetic peptide
  Seed: SLMQGSTLPRRSGAAG
SLMMGSGLARRAGAAG

SEQ ID NO: 133820 - protein, 16 aa, Artificial Sequence
  Description of Artificial Sequence: Synthetic peptide
  Seed: SLMQGSTLPRRSGAAG
SLMMGSGLARRIGAAG

SEQ ID NO: 133821 - protein, 16 aa, Artificial Sequence
  Description of Artificial Sequence: Synthetic peptide
  Seed: SLMQGSTLPRRSGAAG
SLMMGSGLARRSGAAG

SEQ ID NO: 133822 - protein, 16 aa, Artificial Sequence
  Description of Artificial Sequence: Synthetic peptide
  Seed: SLMQGSTLPRRSGAAG
SLMMGSGLARRTGAAG

SEQ ID NO: 133823 - protein, 16 aa, Artificial Sequence
  Description of Artificial Sequence: Synthetic peptide
  Seed: SLMQGSTLPRRSGAAG
SLMMGSGLARRVGAAG

SEQ ID NO: 133824 - protein, 16 aa, Artificial Sequence
  Description of Artificial Sequence: Synthetic peptide
  Seed: SLMQGSTLPRRSGAAG
SLMMGSGLVRRAGAAG

SEQ ID NO: 133825 - protein, 16 aa, Artificial Sequence
  Description of Artificial Sequence: Synthetic peptide
  Seed: SLMQGSTLPRRSGAAG
SLMMGSGLVRRVGAAG

SEQ ID NO: 133826 - protein, 16 aa, Artificial Sequence
  Description of Artificial Sequence: Synthetic peptide
  Seed: SLMQGSTLPRRSGAAG
SLMPGSALARRAGAAG

SEQ ID NO: 133827 - protein, 16 aa, Artificial Sequence
  Description of Artificial Sequence: Synthetic peptide
  Seed: SLMQGSTLPRRSGAAG
SLMPGSALARRIGAAG

SEQ ID NO: 133828 - protein, 16 aa, Artificial Sequence
  Description of Artificial Sequence: Synthetic peptide
  Seed: SLMQGSTLPRRSGAAG
SLMPGSALARRSGAAG

SEQ ID NO: 133829 - protein, 16 aa, Artificial Sequence
  Description of Artificial Sequence: Synthetic peptide
  Seed: SLMQGSTLPRRSGAAG
SLMPGSALARRTGAAG

SEQ ID NO: 133830 - protein, 16 aa, Artificial Sequence
  Description of Artificial Sequence: Synthetic peptide
  Seed: SLMQGSTLPRRSGAAG
SLMPGSALARRVGAAG

SEQ ID NO: 133831 - protein, 16 aa, Artificial Sequence
  Description of Artificial Sequence: Synthetic peptide
  Seed: SLMQGSTLPRRSGAAG
SLMPGSALVRRAGAAG

SEQ ID NO: 133832 - protein, 16 aa, Artificial Sequence
  Description of Artificial Sequence: Synthetic peptide
  Seed: SLMQGSTLPRRSGAAG
SLMPGSALVRRSGAAG

SEQ ID NO: 133833 - protein, 16 aa, Artificial Sequence
  Description of Artificial Sequence: Synthetic peptide
  Seed: SLMQGSTLPRRSGAAG
SLMPGSALVRRTGAAG

SEQ ID NO: 133834 - protein, 16 aa, Artificial Sequence
  Description of Artificial Sequence: Synthetic peptide
  Seed: SLMQGSTLPRRSGAAG
SLMPGSALVRRVGAAG

SEQ ID NO: 133835 - protein, 16 aa, Artificial Sequence
  Description of Artificial Sequence: Synthetic peptide
  Seed: SLMQGSTLPRRSGAAG
SLMPGSGLARRAGAAG

SEQ ID NO: 133836 - protein, 16 aa, Artificial Sequence
  Description of Artificial Sequence: Synthetic peptide
  Seed: SLMQGSTLPRRSGAAG
SLMPGSGLARRIGAAG

SEQ ID NO: 133837 - protein, 16 aa, Artificial Sequence
  Description of Artificial Sequence: Synthetic peptide
  Seed: SLMQGSTLPRRSGAAG
SLMPGSGLARRVGAAG

SEQ ID NO: 133838 - protein, 16 aa, Artificial Sequence
  Description of Artificial Sequence: Synthetic peptide
  Seed: SLMQGSTLPRRSGAAG
SLMPGSGLVRRAGAAG

SEQ ID NO: 133839 - protein, 16 aa, Artificial Sequence
  Description of Artificial Sequence: Synthetic peptide
  Seed: SLMQGSTLPRRSGAAG
SLMPGSGLVRRIGAAG

SEQ ID NO: 133840 - protein, 16 aa, Artificial Sequence
  Description of Artificial Sequence: Synthetic peptide
  Seed: SLMQGSTLPRRSGAAG
SLMPGSGLVRRVGAAG

SEQ ID NO: 133841 - protein, 16 aa, Artificial Sequence
  Description of Artificial Sequence: Synthetic peptide
  Seed: SLMQGSTLPRRSGAAG
SLMTGSALARRVGAAG

SEQ ID NO: 133842 - protein, 16 aa, Artificial Sequence
  Description of Artificial Sequence: Synthetic peptide
  Seed: SLMQGSTLPRRSGAAG
SLMVGSALARRAGAAG

SEQ ID NO: 133843 - protein, 16 aa, Artificial Sequence
  Description of Artificial Sequence: Synthetic peptide
  Seed: SLMQGSTLPRRSGAAG
SLMVGSALARRIGAAG

SEQ ID NO: 133844 - protein, 16 aa, Artificial Sequence
  Description of Artificial Sequence: Synthetic peptide
  Seed: SLMQGSTLPRRSGAAG
SLMVGSALARRMGAAG

SEQ ID NO: 133845 - protein, 16 aa, Artificial Sequence
  Description of Artificial Sequence: Synthetic peptide
  Seed: SLMQGSTLPRRSGAAG
SLMVGSALARRSGAAG

SEQ ID NO: 133846 - protein, 16 aa, Artificial Sequence
  Description of Artificial Sequence: Synthetic peptide
  Seed: SLMQGSTLPRRSGAAG
SLMVGSALARRTGAAG

SEQ ID NO: 133847 - protein, 16 aa, Artificial Sequence
  Description of Artificial Sequence: Synthetic peptide
  Seed: SLMQGSTLPRRSGAAG
SLMVGSALARRVGAAG

SEQ ID NO: 133848 - protein, 16 aa, Artificial Sequence
  Description of Artificial Sequence: Synthetic peptide
  Seed: SLMQGSTLPRRSGAAG
SLMVGSALPRRAGAAG

SEQ ID NO: 133849 - protein, 16 aa, Artificial Sequence
  Description of Artificial Sequence: Synthetic peptide
  Seed: SLMQGSTLPRRSGAAG
SLMVGSALPRRVGAAG

SEQ ID NO: 133850 - protein, 16 aa, Artificial Sequence
  Description of Artificial Sequence: Synthetic peptide
  Seed: SLMQGSTLPRRSGAAG
SLMVGSALVRRAGAAG

SEQ ID NO: 133851 - protein, 16 aa, Artificial Sequence
  Description of Artificial Sequence: Synthetic peptide
  Seed: SLMQGSTLPRRSGAAG
SLMVGSALVRRIGAAG

SEQ ID NO: 133852 - protein, 16 aa, Artificial Sequence
  Description of Artificial Sequence: Synthetic peptide
  Seed: SLMQGSTLPRRSGAAG
SLMVGSALVRRSGAAG

SEQ ID NO: 133853 - protein, 16 aa, Artificial Sequence
  Description of Artificial Sequence: Synthetic peptide
  Seed: SLMQGSTLPRRSGAAG
SLMVGSALVRRTGAAG

SEQ ID NO: 133854 - protein, 16 aa, Artificial Sequence
  Description of Artificial Sequence: Synthetic peptide
  Seed: SLMQGSTLPRRSGAAG
SLMVGSALVRRVGAAG

SEQ ID NO: 133855 - protein, 16 aa, Artificial Sequence
  Description of Artificial Sequence: Synthetic peptide
  Seed: SLMQGSTLPRRSGAAG
SLMVGSGLARRAGAAG

SEQ ID NO: 133856 - protein, 16 aa, Artificial Sequence
  Description of Artificial Sequence: Synthetic peptide
  Seed: SLMQGSTLPRRSGAAG
SLMVGSGLARRIGAAG

SEQ ID NO: 133857 - protein, 16 aa, Artificial Sequence
  Description of Artificial Sequence: Synthetic peptide
  Seed: SLMQGSTLPRRSGAAG
SLMVGSGLARRLGAAG

SEQ ID NO: 133858 - protein, 16 aa, Artificial Sequence
  Description of Artificial Sequence: Synthetic peptide
  Seed: SLMQGSTLPRRSGAAG
SLMVGSGLARRMGAAG

SEQ ID NO: 133859 - protein, 16 aa, Artificial Sequence
  Description of Artificial Sequence: Synthetic peptide
  Seed: SLMQGSTLPRRSGAAG
SLMVGSGLARRSGAAG

SEQ ID NO: 133860 - protein, 16 aa, Artificial Sequence
  Description of Artificial Sequence: Synthetic peptide
  Seed: SLMQGSTLPRRSGAAG
SLMVGSGLARRTGAAG

SEQ ID NO: 133861 - protein, 16 aa, Artificial Sequence
  Description of Artificial Sequence: Synthetic peptide
  Seed: SLMQGSTLPRRSGAAG
SLMVGSGLARRVGAAG

SEQ ID NO: 133862 - protein, 16 aa, Artificial Sequence
  Description of Artificial Sequence: Synthetic peptide
  Seed: SLMQGSTLPRRSGAAG
SLMVGSGLIRRAGAAG

SEQ ID NO: 133863 - protein, 16 aa, Artificial Sequence
  Description of Artificial Sequence: Synthetic peptide
  Seed: SLMQGSTLPRRSGAAG
SLMVGSGLPRRVGAAG

SEQ ID NO: 133864 - protein, 16 aa, Artificial Sequence
  Description of Artificial Sequence: Synthetic peptide
  Seed: SLMQGSTLPRRSGAAG
SLMVGSGLVRRAGAAG

SEQ ID NO: 133865 - protein, 16 aa, Artificial Sequence
  Description of Artificial Sequence: Synthetic peptide
  Seed: SLMQGSTLPRRSGAAG
SLMVGSGLVRRIGAAG

SEQ ID NO: 133866 - protein, 16 aa, Artificial Sequence
  Description of Artificial Sequence: Synthetic peptide
  Seed: SLMQGSTLPRRSGAAG
SLMVGSGLVRRSGAAG

SEQ ID NO: 133867 - protein, 16 aa, Artificial Sequence
  Description of Artificial Sequence: Synthetic peptide
  Seed: SLMQGSTLPRRSGAAG
SLMVGSGLVRRTGAAG

SEQ ID NO: 133868 - protein, 16 aa, Artificial Sequence
  Description of Artificial Sequence: Synthetic peptide
  Seed: SLMQGSTLPRRSGAAG
SLMVGSGLVRRVGAAG

SEQ ID NO: 133869 - protein, 16 aa, Artificial Sequence
  Description of Artificial Sequence: Synthetic peptide
  Seed: SLMQGSTLPRRSGAAG
SLMVGSSLARRAGAAG

SEQ ID NO: 133870 - protein, 16 aa, Artificial Sequence
  Description of Artificial Sequence: Synthetic peptide
  Seed: SLMQGSTLPRRSGAAG
SLMVGSSLARRVGAAG

SEQ ID NO: 133871 - protein, 16 aa, Artificial Sequence
  Description of Artificial Sequence: Synthetic peptide
  Seed: SLMQGSTLPRRSGAAG
SLMWGSALARRAGAAG

SEQ ID NO: 133872 - protein, 16 aa, Artificial Sequence
  Description of Artificial Sequence: Synthetic peptide
  Seed: SLMQGSTLPRRSGAAG
SLMWGSALARRVGAAG

SEQ ID NO: 133873 - protein, 16 aa, Artificial Sequence
  Description of Artificial Sequence: Synthetic peptide
  Seed: SLMQGSTLPRRSGAAG
SLMWGSGLARRAGAAG

SEQ ID NO: 133874 - protein, 16 aa, Artificial Sequence
  Description of Artificial Sequence: Synthetic peptide
  Seed: SLMQGSTLPRRSGAAG
SLMWGSGLARRVGAAG

SEQ ID NO: 133875 - protein, 16 aa, Artificial Sequence
  Description of Artificial Sequence: Synthetic peptide
  Seed: SLMQGSTLPRRSGAAG
SLMWGSGLVRRAGAAG

SEQ ID NO: 133876 - protein, 16 aa, Artificial Sequence
  Description of Artificial Sequence: Synthetic peptide
  Seed: SLMQGSTLPRRSGAAG
SLMWGSGLVRRVGAAG

SEQ ID NO: 133877 - protein, 16 aa, Artificial Sequence
  Description of Artificial Sequence: Synthetic peptide
  Seed: SLMQGSTLPRRSGAAG
SLMYGSALARRAGAAG

SEQ ID NO: 133878 - protein, 16 aa, Artificial Sequence
  Description of Artificial Sequence: Synthetic peptide
  Seed: SLMQGSTLPRRSGAAG
SLMYGSALARRIGAAG

SEQ ID NO: 133879 - protein, 16 aa, Artificial Sequence
  Description of Artificial Sequence: Synthetic peptide
  Seed: SLMQGSTLPRRSGAAG
SLMYGSALARRVGAAG

SEQ ID NO: 133880 - protein, 16 aa, Artificial Sequence
  Description of Artificial Sequence: Synthetic peptide
  Seed: SLMQGSTLPRRSGAAG
SLMYGSGLARRAGAAG

SEQ ID NO: 133881 - protein, 16 aa, Artificial Sequence
  Description of Artificial Sequence: Synthetic peptide
  Seed: SLMQGSTLPRRSGAAG
SLMYGSGLARRVGAAG

SEQ ID NO: 133882 - protein, 16 aa, Artificial Sequence
  Description of Artificial Sequence: Synthetic peptide
  Seed: SLMQGSTLPRRSGAAG
SLMYGSGLVRRAGAAG

SEQ ID NO: 133883 - protein, 14 aa, Artificial Sequence
  Description of Artificial Sequence: Synthetic peptide
  Seed: YERMCNILKGKFQT
YERICNILRGKAQT

SEQ ID NO: 133884 - protein, 14 aa, Artificial Sequence
  Description of Artificial Sequence: Synthetic peptide
  Seed: YERMCNILKGKFQT
YERICNLLRGKAQT

SEQ ID NO: 133885 - protein, 14 aa, Artificial Sequence
  Description of Artificial Sequence: Synthetic peptide
  Seed: YERMCNILKGKFQT
YERICNMLRGKAQT

SEQ ID NO: 133886 - protein, 15 aa, Artificial Sequence
  Description of Artificial Sequence: Synthetic peptide
  Seed: YERMCNILKGKFQTA
YERMANILKAKFLTA

SEQ ID NO: 133887 - protein, 15 aa, Artificial Sequence
  Description of Artificial Sequence: Synthetic peptide
  Seed: YERMCNILKGKFQTA
YERMANIMKAKFLTA

SEQ ID NO: 133888 - protein, 15 aa, Artificial Sequence
  Description of Artificial Sequence: Synthetic peptide
  Seed: YERMCNILKGKFQTA
YERMCNIAKAKFITA

SEQ ID NO: 133889 - protein, 15 aa, Artificial Sequence
  Description of Artificial Sequence: Synthetic peptide
  Seed: YERMCNILKGKFQTA
YERMCNIAKAKFLTA

SEQ ID NO: 133890 - protein, 15 aa, Artificial Sequence
  Description of Artificial Sequence: Synthetic peptide
  Seed: YERMCNILKGKFQTA
YERMCNIAKAKFVTA

SEQ ID NO: 133891 - protein, 15 aa, Artificial Sequence
  Description of Artificial Sequence: Synthetic peptide
  Seed: YERMCNILKGKFQTA
YERMCNIAKSKFVTA

SEQ ID NO: 133892 - protein, 15 aa, Artificial Sequence
  Description of Artificial Sequence: Synthetic peptide
  Seed: YERMCNILKGKFQTA
YERMCNIIKAKFATA

SEQ ID NO: 133893 - protein, 15 aa, Artificial Sequence
  Description of Artificial Sequence: Synthetic peptide
  Seed: YERMCNILKGKFQTA
YERMCNIIKAKFITA

SEQ ID NO: 133894 - protein, 15 aa, Artificial Sequence
  Description of Artificial Sequence: Synthetic peptide
  Seed: YERMCNILKGKFQTA
YERMCNIIKAKFLTA

SEQ ID NO: 133895 - protein, 15 aa, Artificial Sequence
  Description of Artificial Sequence: Synthetic peptide
  Seed: YERMCNILKGKFQTA
YERMCNIIKAKFVTA

SEQ ID NO: 133896 - protein, 15 aa, Artificial Sequence
  Description of Artificial Sequence: Synthetic peptide
  Seed: YERMCNILKGKFQTA
YERMCNIIKGKFITA

SEQ ID NO: 133897 - protein, 15 aa, Artificial Sequence
  Description of Artificial Sequence: Synthetic peptide
  Seed: YERMCNILKGKFQTA
YERMCNIIKGKFLTA

SEQ ID NO: 133898 - protein, 15 aa, Artificial Sequence
  Description of Artificial Sequence: Synthetic peptide
  Seed: YERMCNILKGKFQTA
YERMCNIIKGKFVTA

SEQ ID NO: 133899 - protein, 15 aa, Artificial Sequence
  Description of Artificial Sequence: Synthetic peptide
  Seed: YERMCNILKGKFQTA
YERMCNIIKSKFITA

SEQ ID NO: 133900 - protein, 15 aa, Artificial Sequence
  Description of Artificial Sequence: Synthetic peptide
  Seed: YERMCNILKGKFQTA
YERMCNIIKSKFLTA

SEQ ID NO: 133901 - protein, 15 aa, Artificial Sequence
  Description of Artificial Sequence: Synthetic peptide
  Seed: YERMCNILKGKFQTA
YERMCNIIKSKFVTA

SEQ ID NO: 133902 - protein, 15 aa, Artificial Sequence
  Description of Artificial Sequence: Synthetic peptide
  Seed: YERMCNILKGKFQTA
YERMCNILKAKFATA

SEQ ID NO: 133903 - protein, 15 aa, Artificial Sequence
  Description of Artificial Sequence: Synthetic peptide
  Seed: YERMCNILKGKFQTA
YERMCNILKAKFITA

SEQ ID NO: 133904 - protein, 15 aa, Artificial Sequence
  Description of Artificial Sequence: Synthetic peptide
  Seed: YERMCNILKGKFQTA
YERMCNILKAKFLTA

SEQ ID NO: 133905 - protein, 15 aa, Artificial Sequence
  Description of Artificial Sequence: Synthetic peptide
  Seed: YERMCNILKGKFQTA
YERMCNILKAKFMTA

SEQ ID NO: 133906 - protein, 15 aa, Artificial Sequence
  Description of Artificial Sequence: Synthetic peptide
  Seed: YERMCNILKGKFQTA
YERMCNILKAKFSTA

SEQ ID NO: 133907 - protein, 15 aa, Artificial Sequence
  Description of Artificial Sequence: Synthetic peptide
  Seed: YERMCNILKGKFQTA
YERMCNILKAKFTTA

SEQ ID NO: 133908 - protein, 15 aa, Artificial Sequence
  Description of Artificial Sequence: Synthetic peptide
  Seed: YERMCNILKGKFQTA
YERMCNILKAKFVTA

SEQ ID NO: 133909 - protein, 15 aa, Artificial Sequence
  Description of Artificial Sequence: Synthetic peptide
  Seed: YERMCNILKGKFQTA
YERMCNILKGKFATA

SEQ ID NO: 133910 - protein, 15 aa, Artificial Sequence
  Description of Artificial Sequence: Synthetic peptide
  Seed: YERMCNILKGKFQTA
YERMCNILKGKFITA

SEQ ID NO: 133911 - protein, 15 aa, Artificial Sequence
  Description of Artificial Sequence: Synthetic peptide
  Seed: YERMCNILKGKFQTA
YERMCNILKGKFLTA

SEQ ID NO: 133912 - protein, 15 aa, Artificial Sequence
  Description of Artificial Sequence: Synthetic peptide
  Seed: YERMCNILKGKFQTA
YERMCNILKGKFMTA

SEQ ID NO: 133913 - protein, 15 aa, Artificial Sequence
  Description of Artificial Sequence: Synthetic peptide
  Seed: YERMCNILKGKFQTA
YERMCNILKGKFVTA

SEQ ID NO: 133914 - protein, 15 aa, Artificial Sequence
  Description of Artificial Sequence: Synthetic peptide
  Seed: YERMCNILKGKFQTA
YERMCNILKPKFITA

SEQ ID NO: 133915 - protein, 15 aa, Artificial Sequence
  Description of Artificial Sequence: Synthetic peptide
  Seed: YERMCNILKGKFQTA
YERMCNILKPKFLTA

SEQ ID NO: 133916 - protein, 15 aa, Artificial Sequence
  Description of Artificial Sequence: Synthetic peptide
  Seed: YERMCNILKGKFQTA
YERMCNILKPKFVTA

SEQ ID NO: 133917 - protein, 15 aa, Artificial Sequence
  Description of Artificial Sequence: Synthetic peptide
  Seed: YERMCNILKGKFQTA
YERMCNILKSKFATA

SEQ ID NO: 133918 - protein, 15 aa, Artificial Sequence
  Description of Artificial Sequence: Synthetic peptide
  Seed: YERMCNILKGKFQTA
YERMCNILKSKFITA

SEQ ID NO: 133919 - protein, 15 aa, Artificial Sequence
  Description of Artificial Sequence: Synthetic peptide
  Seed: YERMCNILKGKFQTA
YERMCNILKSKFLTA

SEQ ID NO: 133920 - protein, 15 aa, Artificial Sequence
  Description of Artificial Sequence: Synthetic peptide
  Seed: YERMCNILKGKFQTA
YERMCNILKSKFMTA

SEQ ID NO: 133921 - protein, 15 aa, Artificial Sequence
  Description of Artificial Sequence: Synthetic peptide
  Seed: YERMCNILKGKFQTA
YERMCNILKSKFTTA

SEQ ID NO: 133922 - protein, 15 aa, Artificial Sequence
  Description of Artificial Sequence: Synthetic peptide
  Seed: YERMCNILKGKFQTA
YERMCNILKSKFVTA

SEQ ID NO: 133923 - protein, 15 aa, Artificial Sequence
  Description of Artificial Sequence: Synthetic peptide
  Seed: YERMCNILKGKFQTA
YERMCNILKTKFITA

SEQ ID NO: 133924 - protein, 15 aa, Artificial Sequence
  Description of Artificial Sequence: Synthetic peptide
  Seed: YERMCNILKGKFQTA
YERMCNILKTKFLTA

SEQ ID NO: 133925 - protein, 15 aa, Artificial Sequence
  Description of Artificial Sequence: Synthetic peptide
  Seed: YERMCNILKGKFQTA
YERMCNILKTKFVTA

SEQ ID NO: 133926 - protein, 15 aa, Artificial Sequence
  Description of Artificial Sequence: Synthetic peptide
  Seed: YERMCNILKGKFQTA
YERMCNIMKAKFATA

SEQ ID NO: 133927 - protein, 15 aa, Artificial Sequence
  Description of Artificial Sequence: Synthetic peptide
  Seed: YERMCNILKGKFQTA
YERMCNIMKAKFITA

SEQ ID NO: 133928 - protein, 15 aa, Artificial Sequence
  Description of Artificial Sequence: Synthetic peptide
  Seed: YERMCNILKGKFQTA
YERMCNIMKAKFLTA

SEQ ID NO: 133929 - protein, 15 aa, Artificial Sequence
  Description of Artificial Sequence: Synthetic peptide
  Seed: YERMCNILKGKFQTA
YERMCNIMKAKFMTA

SEQ ID NO: 133930 - protein, 15 aa, Artificial Sequence
  Description of Artificial Sequence: Synthetic peptide
  Seed: YERMCNILKGKFQTA
YERMCNIMKAKFTTA

SEQ ID NO: 133931 - protein, 15 aa, Artificial Sequence
  Description of Artificial Sequence: Synthetic peptide
  Seed: YERMCNILKGKFQTA
YERMCNIMKAKFVTA

SEQ ID NO: 133932 - protein, 15 aa, Artificial Sequence
  Description of Artificial Sequence: Synthetic peptide
  Seed: YERMCNILKGKFQTA
YERMCNIMKGKFATA

SEQ ID NO: 133933 - protein, 15 aa, Artificial Sequence
  Description of Artificial Sequence: Synthetic peptide
  Seed: YERMCNILKGKFQTA
YERMCNIMKGKFITA

SEQ ID NO: 133934 - protein, 15 aa, Artificial Sequence
  Description of Artificial Sequence: Synthetic peptide
  Seed: YERMCNILKGKFQTA
YERMCNIMKGKFLTA

SEQ ID NO: 133935 - protein, 15 aa, Artificial Sequence
  Description of Artificial Sequence: Synthetic peptide
  Seed: YERMCNILKGKFQTA
YERMCNIMKGKFMTA

SEQ ID NO: 133936 - protein, 15 aa, Artificial Sequence
  Description of Artificial Sequence: Synthetic peptide
  Seed: YERMCNILKGKFQTA
YERMCNIMKGKFVTA

SEQ ID NO: 133937 - protein, 15 aa, Artificial Sequence
  Description of Artificial Sequence: Synthetic peptide
  Seed: YERMCNILKGKFQTA
YERMCNIMKNKFVTA

SEQ ID NO: 133938 - protein, 15 aa, Artificial Sequence
  Description of Artificial Sequence: Synthetic peptide
  Seed: YERMCNILKGKFQTA
YERMCNIMKPKFITA

SEQ ID NO: 133939 - protein, 15 aa, Artificial Sequence
  Description of Artificial Sequence: Synthetic peptide
  Seed: YERMCNILKGKFQTA
YERMCNIMKPKFLTA

SEQ ID NO: 133940 - protein, 15 aa, Artificial Sequence
  Description of Artificial Sequence: Synthetic peptide
  Seed: YERMCNILKGKFQTA
YERMCNIMKPKFVTA

SEQ ID NO: 133941 - protein, 15 aa, Artificial Sequence
  Description of Artificial Sequence: Synthetic peptide
  Seed: YERMCNILKGKFQTA
YERMCNIMKSKFATA

SEQ ID NO: 133942 - protein, 15 aa, Artificial Sequence
  Description of Artificial Sequence: Synthetic peptide
  Seed: YERMCNILKGKFQTA
YERMCNIMKSKFITA

SEQ ID NO: 133943 - protein, 15 aa, Artificial Sequence
  Description of Artificial Sequence: Synthetic peptide
  Seed: YERMCNILKGKFQTA
YERMCNIMKSKFLTA

SEQ ID NO: 133944 - protein, 15 aa, Artificial Sequence
  Description of Artificial Sequence: Synthetic peptide
  Seed: YERMCNILKGKFQTA
YERMCNIMKSKFMTA

SEQ ID NO: 133945 - protein, 15 aa, Artificial Sequence
  Description of Artificial Sequence: Synthetic peptide
  Seed: YERMCNILKGKFQTA
YERMCNIMKSKFVTA

SEQ ID NO: 133946 - protein, 15 aa, Artificial Sequence
  Description of Artificial Sequence: Synthetic peptide
  Seed: YERMCNILKGKFQTA
YERMCNIMKTKFITA

SEQ ID NO: 133947 - protein, 15 aa, Artificial Sequence
  Description of Artificial Sequence: Synthetic peptide
  Seed: YERMCNILKGKFQTA
YERMCNIMKTKFLTA

SEQ ID NO: 133948 - protein, 15 aa, Artificial Sequence
  Description of Artificial Sequence: Synthetic peptide
  Seed: YERMCNILKGKFQTA
YERMCNIMKTKFVTA

SEQ ID NO: 133949 - protein, 15 aa, Artificial Sequence
  Description of Artificial Sequence: Synthetic peptide
  Seed: YERMCNILKGKFQTA
YERMCNIVKAKFITA

SEQ ID NO: 133950 - protein, 15 aa, Artificial Sequence
  Description of Artificial Sequence: Synthetic peptide
  Seed: YERMCNILKGKFQTA
YERMCNIVKAKFLTA

SEQ ID NO: 133951 - protein, 15 aa, Artificial Sequence
  Description of Artificial Sequence: Synthetic peptide
  Seed: YERMCNILKGKFQTA
YERMCNIVKAKFVTA

SEQ ID NO: 133952 - protein, 15 aa, Artificial Sequence
  Description of Artificial Sequence: Synthetic peptide
  Seed: YERMCNILKGKFQTA
YERMFNIAKAKFATA

SEQ ID NO: 133953 - protein, 15 aa, Artificial Sequence
  Description of Artificial Sequence: Synthetic peptide
  Seed: YERMCNILKGKFQTA
YERMFNIAKAKFCTA

SEQ ID NO: 133954 - protein, 15 aa, Artificial Sequence
  Description of Artificial Sequence: Synthetic peptide
  Seed: YERMCNILKGKFQTA
YERMFNIAKAKFDTA

SEQ ID NO: 133955 - protein, 15 aa, Artificial Sequence
  Description of Artificial Sequence: Synthetic peptide
  Seed: YERMCNILKGKFQTA
YERMFNIAKAKFETA

SEQ ID NO: 133956 - protein, 15 aa, Artificial Sequence
  Description of Artificial Sequence: Synthetic peptide
  Seed: YERMCNILKGKFQTA
YERMFNIAKAKFFTA

SEQ ID NO: 133957 - protein, 15 aa, Artificial Sequence
  Description of Artificial Sequence: Synthetic peptide
  Seed: YERMCNILKGKFQTA
YERMFNIAKAKFGTA

SEQ ID NO: 133958 - protein, 15 aa, Artificial Sequence
  Description of Artificial Sequence: Synthetic peptide
  Seed: YERMCNILKGKFQTA
YERMFNIAKAKFHTA

SEQ ID NO: 133959 - protein, 15 aa, Artificial Sequence
  Description of Artificial Sequence: Synthetic peptide
  Seed: YERMCNILKGKFQTA
YERMFNIAKAKFITA

SEQ ID NO: 133960 - protein, 15 aa, Artificial Sequence
  Description of Artificial Sequence: Synthetic peptide
  Seed: YERMCNILKGKFQTA
YERMFNIAKAKFKTA

SEQ ID NO: 133961 - protein, 15 aa, Artificial Sequence
  Description of Artificial Sequence: Synthetic peptide
  Seed: YERMCNILKGKFQTA
YERMFNIAKAKFLTA

SEQ ID NO: 133962 - protein, 15 aa, Artificial Sequence
  Description of Artificial Sequence: Synthetic peptide
  Seed: YERMCNILKGKFQTA
YERMFNIAKAKFMTA

SEQ ID NO: 133963 - protein, 15 aa, Artificial Sequence
  Description of Artificial Sequence: Synthetic peptide
  Seed: YERMCNILKGKFQTA
YERMFNIAKAKFNTA

SEQ ID NO: 133964 - protein, 15 aa, Artificial Sequence
  Description of Artificial Sequence: Synthetic peptide
  Seed: YERMCNILKGKFQTA
YERMFNIAKAKFPTA

SEQ ID NO: 133965 - protein, 15 aa, Artificial Sequence
  Description of Artificial Sequence: Synthetic peptide
  Seed: YERMCNILKGKFQTA
YERMFNIAKAKFQTA

SEQ ID NO: 133966 - protein, 15 aa, Artificial Sequence
  Description of Artificial Sequence: Synthetic peptide
  Seed: YERMCNILKGKFQTA
YERMFNIAKAKFRTA

SEQ ID NO: 133967 - protein, 15 aa, Artificial Sequence
  Description of Artificial Sequence: Synthetic peptide
  Seed: YERMCNILKGKFQTA
YERMFNIAKAKFSTA

SEQ ID NO: 133968 - protein, 15 aa, Artificial Sequence
  Description of Artificial Sequence: Synthetic peptide
  Seed: YERMCNILKGKFQTA
YERMFNIAKAKFTTA

SEQ ID NO: 133969 - protein, 15 aa, Artificial Sequence
  Description of Artificial Sequence: Synthetic peptide
  Seed: YERMCNILKGKFQTA
YERMFNIAKAKFVTA

SEQ ID NO: 133970 - protein, 15 aa, Artificial Sequence
  Description of Artificial Sequence: Synthetic peptide
  Seed: YERMCNILKGKFQTA
YERMFNIAKAKFWTA

SEQ ID NO: 133971 - protein, 15 aa, Artificial Sequence
  Description of Artificial Sequence: Synthetic peptide
  Seed: YERMCNILKGKFQTA
YERMFNIAKAKFYTA

SEQ ID NO: 133972 - protein, 15 aa, Artificial Sequence
  Description of Artificial Sequence: Synthetic peptide
  Seed: YERMCNILKGKFQTA
YERMFNIAKCKFITA

SEQ ID NO: 133973 - protein, 15 aa, Artificial Sequence
  Description of Artificial Sequence: Synthetic peptide
  Seed: YERMCNILKGKFQTA
YERMFNIAKCKFLTA

SEQ ID NO: 133974 - protein, 15 aa, Artificial Sequence
  Description of Artificial Sequence: Synthetic peptide
  Seed: YERMCNILKGKFQTA
YERMFNIAKCKFVTA

SEQ ID NO: 133975 - protein, 15 aa, Artificial Sequence
  Description of Artificial Sequence: Synthetic peptide
  Seed: YERMCNILKGKFQTA
YERMFNIAKGKFATA

SEQ ID NO: 133976 - protein, 15 aa, Artificial Sequence
  Description of Artificial Sequence: Synthetic peptide
  Seed: YERMCNILKGKFQTA
YERMFNIAKGKFCTA

SEQ ID NO: 133977 - protein, 15 aa, Artificial Sequence
  Description of Artificial Sequence: Synthetic peptide
  Seed: YERMCNILKGKFQTA
YERMFNIAKGKFFTA

SEQ ID NO: 133978 - protein, 15 aa, Artificial Sequence
  Description of Artificial Sequence: Synthetic peptide
  Seed: YERMCNILKGKFQTA
YERMFNIAKGKFGTA

SEQ ID NO: 133979 - protein, 15 aa, Artificial Sequence
  Description of Artificial Sequence: Synthetic peptide
  Seed: YERMCNILKGKFQTA
YERMFNIAKGKFHTA

SEQ ID NO: 133980 - protein, 15 aa, Artificial Sequence
  Description of Artificial Sequence: Synthetic peptide
  Seed: YERMCNILKGKFQTA
YERMFNIAKGKFITA

SEQ ID NO: 133981 - protein, 15 aa, Artificial Sequence
  Description of Artificial Sequence: Synthetic peptide
  Seed: YERMCNILKGKFQTA
YERMFNIAKGKFLTA

SEQ ID NO: 133982 - protein, 15 aa, Artificial Sequence
  Description of Artificial Sequence: Synthetic peptide
  Seed: YERMCNILKGKFQTA
YERMFNIAKGKFMTA

SEQ ID NO: 133983 - protein, 15 aa, Artificial Sequence
  Description of Artificial Sequence: Synthetic peptide
  Seed: YERMCNILKGKFQTA
YERMFNIAKGKFNTA

SEQ ID NO: 133984 - protein, 15 aa, Artificial Sequence
  Description of Artificial Sequence: Synthetic peptide
  Seed: YERMCNILKGKFQTA
YERMFNIAKGKFPTA

SEQ ID NO: 133985 - protein, 15 aa, Artificial Sequence
  Description of Artificial Sequence: Synthetic peptide
  Seed: YERMCNILKGKFQTA
YERMFNIAKGKFQTA

SEQ ID NO: 133986 - protein, 15 aa, Artificial Sequence
  Description of Artificial Sequence: Synthetic peptide
  Seed: YERMCNILKGKFQTA
YERMFNIAKGKFSTA

SEQ ID NO: 133987 - protein, 15 aa, Artificial Sequence
  Description of Artificial Sequence: Synthetic peptide
  Seed: YERMCNILKGKFQTA
YERMFNIAKGKFTTA

SEQ ID NO: 133988 - protein, 15 aa, Artificial Sequence
  Description of Artificial Sequence: Synthetic peptide
  Seed: YERMCNILKGKFQTA
YERMFNIAKGKFVTA

SEQ ID NO: 133989 - protein, 15 aa, Artificial Sequence
  Description of Artificial Sequence: Synthetic peptide
  Seed: YERMCNILKGKFQTA
YERMFNIAKGKFWTA

SEQ ID NO: 133990 - protein, 15 aa, Artificial Sequence
  Description of Artificial Sequence: Synthetic peptide
  Seed: YERMCNILKGKFQTA
YERMFNIAKGKFYTA

SEQ ID NO: 133991 - protein, 15 aa, Artificial Sequence
  Description of Artificial Sequence: Synthetic peptide
  Seed: YERMCNILKGKFQTA
YERMFNIAKHKFITA

SEQ ID NO: 133992 - protein, 15 aa, Artificial Sequence
  Description of Artificial Sequence: Synthetic peptide
  Seed: YERMCNILKGKFQTA
YERMFNIAKHKFLTA

SEQ ID NO: 133993 - protein, 15 aa, Artificial Sequence
  Description of Artificial Sequence: Synthetic peptide
  Seed: YERMCNILKGKFQTA
YERMFNIAKHKFVTA

SEQ ID NO: 133994 - protein, 15 aa, Artificial Sequence
  Description of Artificial Sequence: Synthetic peptide
  Seed: YERMCNILKGKFQTA
YERMFNIAKIKFATA

SEQ ID NO: 133995 - protein, 15 aa, Artificial Sequence
  Description of Artificial Sequence: Synthetic peptide
  Seed: YERMCNILKGKFQTA
YERMFNIAKIKFITA

SEQ ID NO: 133996 - protein, 15 aa, Artificial Sequence
  Description of Artificial Sequence: Synthetic peptide
  Seed: YERMCNILKGKFQTA
YERMFNIAKIKFLTA

SEQ ID NO: 133997 - protein, 15 aa, Artificial Sequence
  Description of Artificial Sequence: Synthetic peptide
  Seed: YERMCNILKGKFQTA
YERMFNIAKIKFMTA

SEQ ID NO: 133998 - protein, 15 aa, Artificial Sequence
  Description of Artificial Sequence: Synthetic peptide
  Seed: YERMCNILKGKFQTA
YERMFNIAKIKFNTA

SEQ ID NO: 133999 - protein, 15 aa, Artificial Sequence
  Description of Artificial Sequence: Synthetic peptide
  Seed: YERMCNILKGKFQTA
YERMFNIAKIKFSTA

SEQ ID NO: 134000 - protein, 15 aa, Artificial Sequence
  Description of Artificial Sequence: Synthetic peptide
  Seed: YERMCNILKGKFQTA
YERMFNIAKIKFTTA

SEQ ID NO: 134001 - protein, 15 aa, Artificial Sequence
  Description of Artificial Sequence: Synthetic peptide
  Seed: YERMCNILKGKFQTA
YERMFNIAKIKFVTA

SEQ ID NO: 134002 - protein, 15 aa, Artificial Sequence
  Description of Artificial Sequence: Synthetic peptide
  Seed: YERMCNILKGKFQTA
YERMFNIAKLKFNTA

SEQ ID NO: 134003 - protein, 15 aa, Artificial Sequence
  Description of Artificial Sequence: Synthetic peptide
  Seed: YERMCNILKGKFQTA
YERMFNIAKLKFVTA

SEQ ID NO: 134004 - protein, 15 aa, Artificial Sequence
  Description of Artificial Sequence: Synthetic peptide
  Seed: YERMCNILKGKFQTA
YERMFNIAKMKFATA

SEQ ID NO: 134005 - protein, 15 aa, Artificial Sequence
  Description of Artificial Sequence: Synthetic peptide
  Seed: YERMCNILKGKFQTA
YERMFNIAKMKFITA

SEQ ID NO: 134006 - protein, 15 aa, Artificial Sequence
  Description of Artificial Sequence: Synthetic peptide
  Seed: YERMCNILKGKFQTA
YERMFNIAKMKFLTA

SEQ ID NO: 134007 - protein, 15 aa, Artificial Sequence
  Description of Artificial Sequence: Synthetic peptide
  Seed: YERMCNILKGKFQTA
YERMFNIAKMKFNTA

SEQ ID NO: 134008 - protein, 15 aa, Artificial Sequence
  Description of Artificial Sequence: Synthetic peptide
  Seed: YERMCNILKGKFQTA
YERMFNIAKMKFVTA

SEQ ID NO: 134009 - protein, 15 aa, Artificial Sequence
  Description of Artificial Sequence: Synthetic peptide
  Seed: YERMCNILKGKFQTA
YERMFNIAKNKFATA

SEQ ID NO: 134010 - protein, 15 aa, Artificial Sequence
  Description of Artificial Sequence: Synthetic peptide
  Seed: YERMCNILKGKFQTA
YERMFNIAKNKFCTA

SEQ ID NO: 134011 - protein, 15 aa, Artificial Sequence
  Description of Artificial Sequence: Synthetic peptide
  Seed: YERMCNILKGKFQTA
YERMFNIAKNKFFTA

SEQ ID NO: 134012 - protein, 15 aa, Artificial Sequence
  Description of Artificial Sequence: Synthetic peptide
  Seed: YERMCNILKGKFQTA
YERMFNIAKNKFGTA

SEQ ID NO: 134013 - protein, 15 aa, Artificial Sequence
  Description of Artificial Sequence: Synthetic peptide
  Seed: YERMCNILKGKFQTA
YERMFNIAKNKFITA

SEQ ID NO: 134014 - protein, 15 aa, Artificial Sequence
  Description of Artificial Sequence: Synthetic peptide
  Seed: YERMCNILKGKFQTA
YERMFNIAKNKFLTA

SEQ ID NO: 134015 - protein, 15 aa, Artificial Sequence
  Description of Artificial Sequence: Synthetic peptide
  Seed: YERMCNILKGKFQTA
YERMFNIAKNKFMTA

SEQ ID NO: 134016 - protein, 15 aa, Artificial Sequence
  Description of Artificial Sequence: Synthetic peptide
  Seed: YERMCNILKGKFQTA
YERMFNIAKNKFNTA

SEQ ID NO: 134017 - protein, 15 aa, Artificial Sequence
  Description of Artificial Sequence: Synthetic peptide
  Seed: YERMCNILKGKFQTA
YERMFNIAKNKFSTA

SEQ ID NO: 134018 - protein, 15 aa, Artificial Sequence
  Description of Artificial Sequence: Synthetic peptide
  Seed: YERMCNILKGKFQTA
YERMFNIAKNKFTTA

SEQ ID NO: 134019 - protein, 15 aa, Artificial Sequence
  Description of Artificial Sequence: Synthetic peptide
  Seed: YERMCNILKGKFQTA
YERMFNIAKNKFVTA

SEQ ID NO: 134020 - protein, 15 aa, Artificial Sequence
  Description of Artificial Sequence: Synthetic peptide
  Seed: YERMCNILKGKFQTA
YERMFNIAKPKFATA

SEQ ID NO: 134021 - protein, 15 aa, Artificial Sequence
  Description of Artificial Sequence: Synthetic peptide
  Seed: YERMCNILKGKFQTA
YERMFNIAKPKFCTA

SEQ ID NO: 134022 - protein, 15 aa, Artificial Sequence
  Description of Artificial Sequence: Synthetic peptide
  Seed: YERMCNILKGKFQTA
YERMFNIAKPKFFTA

SEQ ID NO: 134023 - protein, 15 aa, Artificial Sequence
  Description of Artificial Sequence: Synthetic peptide
  Seed: YERMCNILKGKFQTA
YERMFNIAKPKFGTA

SEQ ID NO: 134024 - protein, 15 aa, Artificial Sequence
  Description of Artificial Sequence: Synthetic peptide
  Seed: YERMCNILKGKFQTA
YERMFNIAKPKFITA

SEQ ID NO: 134025 - protein, 15 aa, Artificial Sequence
  Description of Artificial Sequence: Synthetic peptide
  Seed: YERMCNILKGKFQTA
YERMFNIAKPKFLTA

SEQ ID NO: 134026 - protein, 15 aa, Artificial Sequence
  Description of Artificial Sequence: Synthetic peptide
  Seed: YERMCNILKGKFQTA
YERMFNIAKPKFMTA

SEQ ID NO: 134027 - protein, 15 aa, Artificial Sequence
  Description of Artificial Sequence: Synthetic peptide
  Seed: YERMCNILKGKFQTA
YERMFNIAKPKFNTA

SEQ ID NO: 134028 - protein, 15 aa, Artificial Sequence
  Description of Artificial Sequence: Synthetic peptide
  Seed: YERMCNILKGKFQTA
YERMFNIAKPKFPTA

SEQ ID NO: 134029 - protein, 15 aa, Artificial Sequence
  Description of Artificial Sequence: Synthetic peptide
  Seed: YERMCNILKGKFQTA
YERMFNIAKPKFSTA

SEQ ID NO: 134030 - protein, 15 aa, Artificial Sequence
  Description of Artificial Sequence: Synthetic peptide
  Seed: YERMCNILKGKFQTA
YERMFNIAKPKFTTA

SEQ ID NO: 134031 - protein, 15 aa, Artificial Sequence
  Description of Artificial Sequence: Synthetic peptide
  Seed: YERMCNILKGKFQTA
YERMFNIAKPKFVTA

SEQ ID NO: 134032 - protein, 15 aa, Artificial Sequence
  Description of Artificial Sequence: Synthetic peptide
  Seed: YERMCNILKGKFQTA
YERMFNIAKPKFWTA

SEQ ID NO: 134033 - protein, 15 aa, Artificial Sequence
  Description of Artificial Sequence: Synthetic peptide
  Seed: YERMCNILKGKFQTA
YERMFNIAKPKFYTA

SEQ ID NO: 134034 - protein, 15 aa, Artificial Sequence
  Description of Artificial Sequence: Synthetic peptide
  Seed: YERMCNILKGKFQTA
YERMFNIAKQKFLTA

SEQ ID NO: 134035 - protein, 15 aa, Artificial Sequence
  Description of Artificial Sequence: Synthetic peptide
  Seed: YERMCNILKGKFQTA
YERMFNIAKQKFVTA

SEQ ID NO: 134036 - protein, 15 aa, Artificial Sequence
  Description of Artificial Sequence: Synthetic peptide
  Seed: YERMCNILKGKFQTA
YERMFNIAKSKFATA

SEQ ID NO: 134037 - protein, 15 aa, Artificial Sequence
  Description of Artificial Sequence: Synthetic peptide
  Seed: YERMCNILKGKFQTA
YERMFNIAKSKFCTA

SEQ ID NO: 134038 - protein, 15 aa, Artificial Sequence
  Description of Artificial Sequence: Synthetic peptide
  Seed: YERMCNILKGKFQTA
YERMFNIAKSKFFTA

SEQ ID NO: 134039 - protein, 15 aa, Artificial Sequence
  Description of Artificial Sequence: Synthetic peptide
  Seed: YERMCNILKGKFQTA
YERMFNIAKSKFGTA

SEQ ID NO: 134040 - protein, 15 aa, Artificial Sequence
  Description of Artificial Sequence: Synthetic peptide
  Seed: YERMCNILKGKFQTA
YERMFNIAKSKFHTA

SEQ ID NO: 134041 - protein, 15 aa, Artificial Sequence
  Description of Artificial Sequence: Synthetic peptide
  Seed: YERMCNILKGKFQTA
YERMFNIAKSKFITA

SEQ ID NO: 134042 - protein, 15 aa, Artificial Sequence
  Description of Artificial Sequence: Synthetic peptide
  Seed: YERMCNILKGKFQTA
YERMFNIAKSKFLTA

SEQ ID NO: 134043 - protein, 15 aa, Artificial Sequence
  Description of Artificial Sequence: Synthetic peptide
  Seed: YERMCNILKGKFQTA
YERMFNIAKSKFMTA

SEQ ID NO: 134044 - protein, 15 aa, Artificial Sequence
  Description of Artificial Sequence: Synthetic peptide
  Seed: YERMCNILKGKFQTA
YERMFNIAKSKFNTA

SEQ ID NO: 134045 - protein, 15 aa, Artificial Sequence
  Description of Artificial Sequence: Synthetic peptide
  Seed: YERMCNILKGKFQTA
YERMFNIAKSKFPTA

SEQ ID NO: 134046 - protein, 15 aa, Artificial Sequence
  Description of Artificial Sequence: Synthetic peptide
  Seed: YERMCNILKGKFQTA
YERMFNIAKSKFQTA

SEQ ID NO: 134047 - protein, 15 aa, Artificial Sequence
  Description of Artificial Sequence: Synthetic peptide
  Seed: YERMCNILKGKFQTA
YERMFNIAKSKFSTA

SEQ ID NO: 134048 - protein, 15 aa, Artificial Sequence
  Description of Artificial Sequence: Synthetic peptide
  Seed: YERMCNILKGKFQTA
YERMFNIAKSKFTTA

SEQ ID NO: 134049 - protein, 15 aa, Artificial Sequence
  Description of Artificial Sequence: Synthetic peptide
  Seed: YERMCNILKGKFQTA
YERMFNIAKSKFVTA

SEQ ID NO: 134050 - protein, 15 aa, Artificial Sequence
  Description of Artificial Sequence: Synthetic peptide
  Seed: YERMCNILKGKFQTA
YERMFNIAKSKFWTA

SEQ ID NO: 134051 - protein, 15 aa, Artificial Sequence
  Description of Artificial Sequence: Synthetic peptide
  Seed: YERMCNILKGKFQTA
YERMFNIAKSKFYTA

SEQ ID NO: 134052 - protein, 15 aa, Artificial Sequence
  Description of Artificial Sequence: Synthetic peptide
  Seed: YERMCNILKGKFQTA
YERMFNIAKTKFATA

SEQ ID NO: 134053 - protein, 15 aa, Artificial Sequence
  Description of Artificial Sequence: Synthetic peptide
  Seed: YERMCNILKGKFQTA
YERMFNIAKTKFCTA

SEQ ID NO: 134054 - protein, 15 aa, Artificial Sequence
  Description of Artificial Sequence: Synthetic peptide
  Seed: YERMCNILKGKFQTA
YERMFNIAKTKFFTA

SEQ ID NO: 134055 - protein, 15 aa, Artificial Sequence
  Description of Artificial Sequence: Synthetic peptide
  Seed: YERMCNILKGKFQTA
YERMFNIAKTKFGTA

SEQ ID NO: 134056 - protein, 15 aa, Artificial Sequence
  Description of Artificial Sequence: Synthetic peptide
  Seed: YERMCNILKGKFQTA
YERMFNIAKTKFHTA

SEQ ID NO: 134057 - protein, 15 aa, Artificial Sequence
  Description of Artificial Sequence: Synthetic peptide
  Seed: YERMCNILKGKFQTA
YERMFNIAKTKFITA

SEQ ID NO: 134058 - protein, 15 aa, Artificial Sequence
  Description of Artificial Sequence: Synthetic peptide
  Seed: YERMCNILKGKFQTA
YERMFNIAKTKFLTA

SEQ ID NO: 134059 - protein, 15 aa, Artificial Sequence
  Description of Artificial Sequence: Synthetic peptide
  Seed: YERMCNILKGKFQTA
YERMFNIAKTKFMTA

SEQ ID NO: 134060 - protein, 15 aa, Artificial Sequence
  Description of Artificial Sequence: Synthetic peptide
  Seed: YERMCNILKGKFQTA
YERMFNIAKTKFNTA

SEQ ID NO: 134061 - protein, 15 aa, Artificial Sequence
  Description of Artificial Sequence: Synthetic peptide
  Seed: YERMCNILKGKFQTA
YERMFNIAKTKFSTA

SEQ ID NO: 134062 - protein, 15 aa, Artificial Sequence
  Description of Artificial Sequence: Synthetic peptide
  Seed: YERMCNILKGKFQTA
YERMFNIAKTKFTTA

SEQ ID NO: 134063 - protein, 15 aa, Artificial Sequence
  Description of Artificial Sequence: Synthetic peptide
  Seed: YERMCNILKGKFQTA
YERMFNIAKTKFVTA

SEQ ID NO: 134064 - protein, 15 aa, Artificial Sequence
  Description of Artificial Sequence: Synthetic peptide
  Seed: YERMCNILKGKFQTA
YERMFNIAKVKFATA

SEQ ID NO: 134065 - protein, 15 aa, Artificial Sequence
  Description of Artificial Sequence: Synthetic peptide
  Seed: YERMCNILKGKFQTA
YERMFNIAKVKFGTA

SEQ ID NO: 134066 - protein, 15 aa, Artificial Sequence
  Description of Artificial Sequence: Synthetic peptide
  Seed: YERMCNILKGKFQTA
YERMFNIAKVKFHTA

SEQ ID NO: 134067 - protein, 15 aa, Artificial Sequence
  Description of Artificial Sequence: Synthetic peptide
  Seed: YERMCNILKGKFQTA
YERMFNIAKVKFITA

SEQ ID NO: 134068 - protein, 15 aa, Artificial Sequence
  Description of Artificial Sequence: Synthetic peptide
  Seed: YERMCNILKGKFQTA
YERMFNIAKVKFLTA

SEQ ID NO: 134069 - protein, 15 aa, Artificial Sequence
  Description of Artificial Sequence: Synthetic peptide
  Seed: YERMCNILKGKFQTA
YERMFNIAKVKFMTA

SEQ ID NO: 134070 - protein, 15 aa, Artificial Sequence
  Description of Artificial Sequence: Synthetic peptide
  Seed: YERMCNILKGKFQTA
YERMFNIAKVKFNTA

SEQ ID NO: 134071 - protein, 15 aa, Artificial Sequence
  Description of Artificial Sequence: Synthetic peptide
  Seed: YERMCNILKGKFQTA
YERMFNIAKVKFQTA

SEQ ID NO: 134072 - protein, 15 aa, Artificial Sequence
  Description of Artificial Sequence: Synthetic peptide
  Seed: YERMCNILKGKFQTA
YERMFNIAKVKFSTA

SEQ ID NO: 134073 - protein, 15 aa, Artificial Sequence
  Description of Artificial Sequence: Synthetic peptide
  Seed: YERMCNILKGKFQTA
YERMFNIAKVKFTTA

SEQ ID NO: 134074 - protein, 15 aa, Artificial Sequence
  Description of Artificial Sequence: Synthetic peptide
  Seed: YERMCNILKGKFQTA
YERMFNIAKVKFVTA

SEQ ID NO: 134075 - protein, 15 aa, Artificial Sequence
  Description of Artificial Sequence: Synthetic peptide
  Seed: YERMCNILKGKFQTA
YERMFNICKAKFATA

SEQ ID NO: 134076 - protein, 15 aa, Artificial Sequence
  Description of Artificial Sequence: Synthetic peptide
  Seed: YERMCNILKGKFQTA
YERMFNICKAKFITA

SEQ ID NO: 134077 - protein, 15 aa, Artificial Sequence
  Description of Artificial Sequence: Synthetic peptide
  Seed: YERMCNILKGKFQTA
YERMFNICKAKFLTA

SEQ ID NO: 134078 - protein, 15 aa, Artificial Sequence
  Description of Artificial Sequence: Synthetic peptide
  Seed: YERMCNILKGKFQTA
YERMFNICKAKFMTA

SEQ ID NO: 134079 - protein, 15 aa, Artificial Sequence
  Description of Artificial Sequence: Synthetic peptide
  Seed: YERMCNILKGKFQTA
YERMFNICKAKFSTA

SEQ ID NO: 134080 - protein, 15 aa, Artificial Sequence
  Description of Artificial Sequence: Synthetic peptide
  Seed: YERMCNILKGKFQTA
YERMFNICKAKFTTA

SEQ ID NO: 134081 - protein, 15 aa, Artificial Sequence
  Description of Artificial Sequence: Synthetic peptide
  Seed: YERMCNILKGKFQTA
YERMFNICKAKFVTA

SEQ ID NO: 134082 - protein, 15 aa, Artificial Sequence
  Description of Artificial Sequence: Synthetic peptide
  Seed: YERMCNILKGKFQTA
YERMFNICKGKFATA

SEQ ID NO: 134083 - protein, 15 aa, Artificial Sequence
  Description of Artificial Sequence: Synthetic peptide
  Seed: YERMCNILKGKFQTA
YERMFNICKGKFITA

SEQ ID NO: 134084 - protein, 15 aa, Artificial Sequence
  Description of Artificial Sequence: Synthetic peptide
  Seed: YERMCNILKGKFQTA
YERMFNICKGKFLTA

SEQ ID NO: 134085 - protein, 15 aa, Artificial Sequence
  Description of Artificial Sequence: Synthetic peptide
  Seed: YERMCNILKGKFQTA
YERMFNICKGKFMTA

SEQ ID NO: 134086 - protein, 15 aa, Artificial Sequence
  Description of Artificial Sequence: Synthetic peptide
  Seed: YERMCNILKGKFQTA
YERMFNICKGKFVTA

SEQ ID NO: 134087 - protein, 15 aa, Artificial Sequence
  Description of Artificial Sequence: Synthetic peptide
  Seed: YERMCNILKGKFQTA
YERMFNICKPKFITA

SEQ ID NO: 134088 - protein, 15 aa, Artificial Sequence
  Description of Artificial Sequence: Synthetic peptide
  Seed: YERMCNILKGKFQTA
YERMFNICKPKFLTA

SEQ ID NO: 134089 - protein, 15 aa, Artificial Sequence
  Description of Artificial Sequence: Synthetic peptide
  Seed: YERMCNILKGKFQTA
YERMFNICKPKFVTA

SEQ ID NO: 134090 - protein, 15 aa, Artificial Sequence
  Description of Artificial Sequence: Synthetic peptide
  Seed: YERMCNILKGKFQTA
YERMFNICKSKFATA

SEQ ID NO: 134091 - protein, 15 aa, Artificial Sequence
  Description of Artificial Sequence: Synthetic peptide
  Seed: YERMCNILKGKFQTA
YERMFNICKSKFITA

SEQ ID NO: 134092 - protein, 15 aa, Artificial Sequence
  Description of Artificial Sequence: Synthetic peptide
  Seed: YERMCNILKGKFQTA
YERMFNICKSKFLTA

SEQ ID NO: 134093 - protein, 15 aa, Artificial Sequence
  Description of Artificial Sequence: Synthetic peptide
  Seed: YERMCNILKGKFQTA
YERMFNICKSKFVTA

SEQ ID NO: 134094 - protein, 15 aa, Artificial Sequence
  Description of Artificial Sequence: Synthetic peptide
  Seed: YERMCNILKGKFQTA
YERMFNICKTKFLTA

SEQ ID NO: 134095 - protein, 15 aa, Artificial Sequence
  Description of Artificial Sequence: Synthetic peptide
  Seed: YERMCNILKGKFQTA
YERMFNICKTKFVTA

SEQ ID NO: 134096 - protein, 15 aa, Artificial Sequence
  Description of Artificial Sequence: Synthetic peptide
  Seed: YERMCNILKGKFQTA
YERMFNIDKAKFATA

SEQ ID NO: 134097 - protein, 15 aa, Artificial Sequence
  Description of Artificial Sequence: Synthetic peptide
  Seed: YERMCNILKGKFQTA
YERMFNIDKAKFITA

SEQ ID NO: 134098 - protein, 15 aa, Artificial Sequence
  Description of Artificial Sequence: Synthetic peptide
  Seed: YERMCNILKGKFQTA
YERMFNIDKAKFLTA

SEQ ID NO: 134099 - protein, 15 aa, Artificial Sequence
  Description of Artificial Sequence: Synthetic peptide
  Seed: YERMCNILKGKFQTA
YERMFNIDKAKFVTA

SEQ ID NO: 134100 - protein, 15 aa, Artificial Sequence
  Description of Artificial Sequence: Synthetic peptide
  Seed: YERMCNILKGKFQTA
YERMFNIEKAKFATA

SEQ ID NO: 134101 - protein, 15 aa, Artificial Sequence
  Description of Artificial Sequence: Synthetic peptide
  Seed: YERMCNILKGKFQTA
YERMFNIEKAKFGTA

SEQ ID NO: 134102 - protein, 15 aa, Artificial Sequence
  Description of Artificial Sequence: Synthetic peptide
  Seed: YERMCNILKGKFQTA
YERMFNIEKAKFITA

SEQ ID NO: 134103 - protein, 15 aa, Artificial Sequence
  Description of Artificial Sequence: Synthetic peptide
  Seed: YERMCNILKGKFQTA
YERMFNIEKAKFLTA

SEQ ID NO: 134104 - protein, 15 aa, Artificial Sequence
  Description of Artificial Sequence: Synthetic peptide
  Seed: YERMCNILKGKFQTA
YERMFNIEKAKFMTA

SEQ ID NO: 134105 - protein, 15 aa, Artificial Sequence
  Description of Artificial Sequence: Synthetic peptide
  Seed: YERMCNILKGKFQTA
YERMFNIEKAKFSTA

SEQ ID NO: 134106 - protein, 15 aa, Artificial Sequence
  Description of Artificial Sequence: Synthetic peptide
  Seed: YERMCNILKGKFQTA
YERMFNIEKAKFTTA

SEQ ID NO: 134107 - protein, 15 aa, Artificial Sequence
  Description of Artificial Sequence: Synthetic peptide
  Seed: YERMCNILKGKFQTA
YERMFNIEKAKFVTA

SEQ ID NO: 134108 - protein, 15 aa, Artificial Sequence
  Description of Artificial Sequence: Synthetic peptide
  Seed: YERMCNILKGKFQTA
YERMFNIEKGKFATA

SEQ ID NO: 134109 - protein, 15 aa, Artificial Sequence
  Description of Artificial Sequence: Synthetic peptide
  Seed: YERMCNILKGKFQTA
YERMFNIEKGKFITA

SEQ ID NO: 134110 - protein, 15 aa, Artificial Sequence
  Description of Artificial Sequence: Synthetic peptide
  Seed: YERMCNILKGKFQTA
YERMFNIEKGKFLTA

SEQ ID NO: 134111 - protein, 15 aa, Artificial Sequence
  Description of Artificial Sequence: Synthetic peptide
  Seed: YERMCNILKGKFQTA
YERMFNIEKGKFMTA

SEQ ID NO: 134112 - protein, 15 aa, Artificial Sequence
  Description of Artificial Sequence: Synthetic peptide
  Seed: YERMCNILKGKFQTA
YERMFNIEKGKFSTA

SEQ ID NO: 134113 - protein, 15 aa, Artificial Sequence
  Description of Artificial Sequence: Synthetic peptide
  Seed: YERMCNILKGKFQTA
YERMFNIEKGKFTTA

SEQ ID NO: 134114 - protein, 15 aa, Artificial Sequence
  Description of Artificial Sequence: Synthetic peptide
  Seed: YERMCNILKGKFQTA
YERMFNIEKGKFVTA

SEQ ID NO: 134115 - protein, 15 aa, Artificial Sequence
  Description of Artificial Sequence: Synthetic peptide
  Seed: YERMCNILKGKFQTA
YERMFNIEKNKFATA

SEQ ID NO: 134116 - protein, 15 aa, Artificial Sequence
  Description of Artificial Sequence: Synthetic peptide
  Seed: YERMCNILKGKFQTA
YERMFNIEKNKFITA

SEQ ID NO: 134117 - protein, 15 aa, Artificial Sequence
  Description of Artificial Sequence: Synthetic peptide
  Seed: YERMCNILKGKFQTA
YERMFNIEKNKFLTA

SEQ ID NO: 134118 - protein, 15 aa, Artificial Sequence
  Description of Artificial Sequence: Synthetic peptide
  Seed: YERMCNILKGKFQTA
YERMFNIEKNKFMTA

SEQ ID NO: 134119 - protein, 15 aa, Artificial Sequence
  Description of Artificial Sequence: Synthetic peptide
  Seed: YERMCNILKGKFQTA
YERMFNIEKNKFTTA

SEQ ID NO: 134120 - protein, 15 aa, Artificial Sequence
  Description of Artificial Sequence: Synthetic peptide
  Seed: YERMCNILKGKFQTA
YERMFNIEKNKFVTA

SEQ ID NO: 134121 - protein, 15 aa, Artificial Sequence
  Description of Artificial Sequence: Synthetic peptide
  Seed: YERMCNILKGKFQTA
YERMFNIEKPKFATA

SEQ ID NO: 134122 - protein, 15 aa, Artificial Sequence
  Description of Artificial Sequence: Synthetic peptide
  Seed: YERMCNILKGKFQTA
YERMFNIEKPKFITA

SEQ ID NO: 134123 - protein, 15 aa, Artificial Sequence
  Description of Artificial Sequence: Synthetic peptide
  Seed: YERMCNILKGKFQTA
YERMFNIEKPKFLTA

SEQ ID NO: 134124 - protein, 15 aa, Artificial Sequence
  Description of Artificial Sequence: Synthetic peptide
  Seed: YERMCNILKGKFQTA
YERMFNIEKPKFMTA

SEQ ID NO: 134125 - protein, 15 aa, Artificial Sequence
  Description of Artificial Sequence: Synthetic peptide
  Seed: YERMCNILKGKFQTA
YERMFNIEKPKFTTA

SEQ ID NO: 134126 - protein, 15 aa, Artificial Sequence
  Description of Artificial Sequence: Synthetic peptide
  Seed: YERMCNILKGKFQTA
YERMFNIEKPKFVTA

SEQ ID NO: 134127 - protein, 15 aa, Artificial Sequence
  Description of Artificial Sequence: Synthetic peptide
  Seed: YERMCNILKGKFQTA
YERMFNIEKSKFATA

SEQ ID NO: 134128 - protein, 15 aa, Artificial Sequence
  Description of Artificial Sequence: Synthetic peptide
  Seed: YERMCNILKGKFQTA
YERMFNIEKSKFITA

SEQ ID NO: 134129 - protein, 15 aa, Artificial Sequence
  Description of Artificial Sequence: Synthetic peptide
  Seed: YERMCNILKGKFQTA
YERMFNIEKSKFLTA

SEQ ID NO: 134130 - protein, 15 aa, Artificial Sequence
  Description of Artificial Sequence: Synthetic peptide
  Seed: YERMCNILKGKFQTA
YERMFNIEKSKFMTA

SEQ ID NO: 134131 - protein, 15 aa, Artificial Sequence
  Description of Artificial Sequence: Synthetic peptide
  Seed: YERMCNILKGKFQTA
YERMFNIEKSKFSTA

SEQ ID NO: 134132 - protein, 15 aa, Artificial Sequence
  Description of Artificial Sequence: Synthetic peptide
  Seed: YERMCNILKGKFQTA
YERMFNIEKSKFTTA

SEQ ID NO: 134133 - protein, 15 aa, Artificial Sequence
  Description of Artificial Sequence: Synthetic peptide
  Seed: YERMCNILKGKFQTA
YERMFNIEKSKFVTA

SEQ ID NO: 134134 - protein, 15 aa, Artificial Sequence
  Description of Artificial Sequence: Synthetic peptide
  Seed: YERMCNILKGKFQTA
YERMFNIEKTKFATA

SEQ ID NO: 134135 - protein, 15 aa, Artificial Sequence
  Description of Artificial Sequence: Synthetic peptide
  Seed: YERMCNILKGKFQTA
YERMFNIEKTKFITA

SEQ ID NO: 134136 - protein, 15 aa, Artificial Sequence
  Description of Artificial Sequence: Synthetic peptide
  Seed: YERMCNILKGKFQTA
YERMFNIEKTKFLTA

SEQ ID NO: 134137 - protein, 15 aa, Artificial Sequence
  Description of Artificial Sequence: Synthetic peptide
  Seed: YERMCNILKGKFQTA
YERMFNIEKTKFMTA

SEQ ID NO: 134138 - protein, 15 aa, Artificial Sequence
  Description of Artificial Sequence: Synthetic peptide
  Seed: YERMCNILKGKFQTA
YERMFNIEKTKFTTA

SEQ ID NO: 134139 - protein, 15 aa, Artificial Sequence
  Description of Artificial Sequence: Synthetic peptide
  Seed: YERMCNILKGKFQTA
YERMFNIEKTKFVTA

SEQ ID NO: 134140 - protein, 15 aa, Artificial Sequence
  Description of Artificial Sequence: Synthetic peptide
  Seed: YERMCNILKGKFQTA
YERMFNIEKVKFITA

SEQ ID NO: 134141 - protein, 15 aa, Artificial Sequence
  Description of Artificial Sequence: Synthetic peptide
  Seed: YERMCNILKGKFQTA
YERMFNIEKVKFLTA

SEQ ID NO: 134142 - protein, 15 aa, Artificial Sequence
  Description of Artificial Sequence: Synthetic peptide
  Seed: YERMCNILKGKFQTA
YERMFNIEKVKFVTA

SEQ ID NO: 134143 - protein, 15 aa, Artificial Sequence
  Description of Artificial Sequence: Synthetic peptide
  Seed: YERMCNILKGKFQTA
YERMFNIFKAKFATA

SEQ ID NO: 134144 - protein, 15 aa, Artificial Sequence
  Description of Artificial Sequence: Synthetic peptide
  Seed: YERMCNILKGKFQTA
YERMFNIFKAKFGTA

SEQ ID NO: 134145 - protein, 15 aa, Artificial Sequence
  Description of Artificial Sequence: Synthetic peptide
  Seed: YERMCNILKGKFQTA
YERMFNIFKAKFITA

SEQ ID NO: 134146 - protein, 15 aa, Artificial Sequence
  Description of Artificial Sequence: Synthetic peptide
  Seed: YERMCNILKGKFQTA
YERMFNIFKAKFLTA

SEQ ID NO: 134147 - protein, 15 aa, Artificial Sequence
  Description of Artificial Sequence: Synthetic peptide
  Seed: YERMCNILKGKFQTA
YERMFNIFKAKFMTA

SEQ ID NO: 134148 - protein, 15 aa, Artificial Sequence
  Description of Artificial Sequence: Synthetic peptide
  Seed: YERMCNILKGKFQTA
YERMFNIFKAKFNTA

SEQ ID NO: 134149 - protein, 15 aa, Artificial Sequence
  Description of Artificial Sequence: Synthetic peptide
  Seed: YERMCNILKGKFQTA
YERMFNIFKAKFSTA

SEQ ID NO: 134150 - protein, 15 aa, Artificial Sequence
  Description of Artificial Sequence: Synthetic peptide
  Seed: YERMCNILKGKFQTA
YERMFNIFKAKFTTA

SEQ ID NO: 134151 - protein, 15 aa, Artificial Sequence
  Description of Artificial Sequence: Synthetic peptide
  Seed: YERMCNILKGKFQTA
YERMFNIFKAKFVTA

SEQ ID NO: 134152 - protein, 15 aa, Artificial Sequence
  Description of Artificial Sequence: Synthetic peptide
  Seed: YERMCNILKGKFQTA
YERMFNIFKGKFATA

SEQ ID NO: 134153 - protein, 15 aa, Artificial Sequence
  Description of Artificial Sequence: Synthetic peptide
  Seed: YERMCNILKGKFQTA
YERMFNIFKGKFITA

SEQ ID NO: 134154 - protein, 15 aa, Artificial Sequence
  Description of Artificial Sequence: Synthetic peptide
  Seed: YERMCNILKGKFQTA
YERMFNIFKGKFLTA

SEQ ID NO: 134155 - protein, 15 aa, Artificial Sequence
  Description of Artificial Sequence: Synthetic peptide
  Seed: YERMCNILKGKFQTA
YERMFNIFKGKFMTA

SEQ ID NO: 134156 - protein, 15 aa, Artificial Sequence
  Description of Artificial Sequence: Synthetic peptide
  Seed: YERMCNILKGKFQTA
YERMFNIFKGKFSTA

SEQ ID NO: 134157 - protein, 15 aa, Artificial Sequence
  Description of Artificial Sequence: Synthetic peptide
  Seed: YERMCNILKGKFQTA
YERMFNIFKGKFTTA

SEQ ID NO: 134158 - protein, 15 aa, Artificial Sequence
  Description of Artificial Sequence: Synthetic peptide
  Seed: YERMCNILKGKFQTA
YERMFNIFKGKFVTA

SEQ ID NO: 134159 - protein, 15 aa, Artificial Sequence
  Description of Artificial Sequence: Synthetic peptide
  Seed: YERMCNILKGKFQTA
YERMFNIFKNKFATA

SEQ ID NO: 134160 - protein, 15 aa, Artificial Sequence
  Description of Artificial Sequence: Synthetic peptide
  Seed: YERMCNILKGKFQTA
YERMFNIFKNKFITA

SEQ ID NO: 134161 - protein, 15 aa, Artificial Sequence
  Description of Artificial Sequence: Synthetic peptide
  Seed: YERMCNILKGKFQTA
YERMFNIFKNKFLTA

SEQ ID NO: 134162 - protein, 15 aa, Artificial Sequence
  Description of Artificial Sequence: Synthetic peptide
  Seed: YERMCNILKGKFQTA
YERMFNIFKNKFVTA

SEQ ID NO: 134163 - protein, 15 aa, Artificial Sequence
  Description of Artificial Sequence: Synthetic peptide
  Seed: YERMCNILKGKFQTA
YERMFNIFKPKFATA

SEQ ID NO: 134164 - protein, 15 aa, Artificial Sequence
  Description of Artificial Sequence: Synthetic peptide
  Seed: YERMCNILKGKFQTA
YERMFNIFKPKFITA

SEQ ID NO: 134165 - protein, 15 aa, Artificial Sequence
  Description of Artificial Sequence: Synthetic peptide
  Seed: YERMCNILKGKFQTA
YERMFNIFKPKFLTA

SEQ ID NO: 134166 - protein, 15 aa, Artificial Sequence
  Description of Artificial Sequence: Synthetic peptide
  Seed: YERMCNILKGKFQTA
YERMFNIFKPKFMTA

SEQ ID NO: 134167 - protein, 15 aa, Artificial Sequence
  Description of Artificial Sequence: Synthetic peptide
  Seed: YERMCNILKGKFQTA
YERMFNIFKPKFVTA

SEQ ID NO: 134168 - protein, 15 aa, Artificial Sequence
  Description of Artificial Sequence: Synthetic peptide
  Seed: YERMCNILKGKFQTA
YERMFNIFKSKFATA

SEQ ID NO: 134169 - protein, 15 aa, Artificial Sequence
  Description of Artificial Sequence: Synthetic peptide
  Seed: YERMCNILKGKFQTA
YERMFNIFKSKFITA

SEQ ID NO: 134170 - protein, 15 aa, Artificial Sequence
  Description of Artificial Sequence: Synthetic peptide
  Seed: YERMCNILKGKFQTA
YERMFNIFKSKFLTA

SEQ ID NO: 134171 - protein, 15 aa, Artificial Sequence
  Description of Artificial Sequence: Synthetic peptide
  Seed: YERMCNILKGKFQTA
YERMFNIFKSKFMTA

SEQ ID NO: 134172 - protein, 15 aa, Artificial Sequence
  Description of Artificial Sequence: Synthetic peptide
  Seed: YERMCNILKGKFQTA
YERMFNIFKSKFSTA

SEQ ID NO: 134173 - protein, 15 aa, Artificial Sequence
  Description of Artificial Sequence: Synthetic peptide
  Seed: YERMCNILKGKFQTA
YERMFNIFKSKFTTA

SEQ ID NO: 134174 - protein, 15 aa, Artificial Sequence
  Description of Artificial Sequence: Synthetic peptide
  Seed: YERMCNILKGKFQTA
YERMFNIFKSKFVTA

SEQ ID NO: 134175 - protein, 15 aa, Artificial Sequence
  Description of Artificial Sequence: Synthetic peptide
  Seed: YERMCNILKGKFQTA
YERMFNIFKTKFATA

SEQ ID NO: 134176 - protein, 15 aa, Artificial Sequence
  Description of Artificial Sequence: Synthetic peptide
  Seed: YERMCNILKGKFQTA
YERMFNIFKTKFITA

SEQ ID NO: 134177 - protein, 15 aa, Artificial Sequence
  Description of Artificial Sequence: Synthetic peptide
  Seed: YERMCNILKGKFQTA
YERMFNIFKTKFLTA

SEQ ID NO: 134178 - protein, 15 aa, Artificial Sequence
  Description of Artificial Sequence: Synthetic peptide
  Seed: YERMCNILKGKFQTA
YERMFNIFKTKFVTA

SEQ ID NO: 134179 - protein, 15 aa, Artificial Sequence
  Description of Artificial Sequence: Synthetic peptide
  Seed: YERMCNILKGKFQTA
YERMFNIGKAKFATA

SEQ ID NO: 134180 - protein, 15 aa, Artificial Sequence
  Description of Artificial Sequence: Synthetic peptide
  Seed: YERMCNILKGKFQTA
YERMFNIGKAKFFTA

SEQ ID NO: 134181 - protein, 15 aa, Artificial Sequence
  Description of Artificial Sequence: Synthetic peptide
  Seed: YERMCNILKGKFQTA
YERMFNIGKAKFGTA

SEQ ID NO: 134182 - protein, 15 aa, Artificial Sequence
  Description of Artificial Sequence: Synthetic peptide
  Seed: YERMCNILKGKFQTA
YERMFNIGKAKFITA

SEQ ID NO: 134183 - protein, 15 aa, Artificial Sequence
  Description of Artificial Sequence: Synthetic peptide
  Seed: YERMCNILKGKFQTA
YERMFNIGKAKFLTA

SEQ ID NO: 134184 - protein, 15 aa, Artificial Sequence
  Description of Artificial Sequence: Synthetic peptide
  Seed: YERMCNILKGKFQTA
YERMFNIGKAKFMTA

SEQ ID NO: 134185 - protein, 15 aa, Artificial Sequence
  Description of Artificial Sequence: Synthetic peptide
  Seed: YERMCNILKGKFQTA
YERMFNIGKAKFSTA

SEQ ID NO: 134186 - protein, 15 aa, Artificial Sequence
  Description of Artificial Sequence: Synthetic peptide
  Seed: YERMCNILKGKFQTA
YERMFNIGKAKFTTA

SEQ ID NO: 134187 - protein, 15 aa, Artificial Sequence
  Description of Artificial Sequence: Synthetic peptide
  Seed: YERMCNILKGKFQTA
YERMFNIGKAKFVTA

SEQ ID NO: 134188 - protein, 15 aa, Artificial Sequence
  Description of Artificial Sequence: Synthetic peptide
  Seed: YERMCNILKGKFQTA
YERMFNIGKGKFATA

SEQ ID NO: 134189 - protein, 15 aa, Artificial Sequence
  Description of Artificial Sequence: Synthetic peptide
  Seed: YERMCNILKGKFQTA
YERMFNIGKGKFITA

SEQ ID NO: 134190 - protein, 15 aa, Artificial Sequence
  Description of Artificial Sequence: Synthetic peptide
  Seed: YERMCNILKGKFQTA
YERMFNIGKGKFLTA

SEQ ID NO: 134191 - protein, 15 aa, Artificial Sequence
  Description of Artificial Sequence: Synthetic peptide
  Seed: YERMCNILKGKFQTA
YERMFNIGKGKFMTA

SEQ ID NO: 134192 - protein, 15 aa, Artificial Sequence
  Description of Artificial Sequence: Synthetic peptide
  Seed: YERMCNILKGKFQTA
YERMFNIGKGKFTTA

SEQ ID NO: 134193 - protein, 15 aa, Artificial Sequence
  Description of Artificial Sequence: Synthetic peptide
  Seed: YERMCNILKGKFQTA
YERMFNIGKGKFVTA

SEQ ID NO: 134194 - protein, 15 aa, Artificial Sequence
  Description of Artificial Sequence: Synthetic peptide
  Seed: YERMCNILKGKFQTA
YERMFNIGKNKFATA

SEQ ID NO: 134195 - protein, 15 aa, Artificial Sequence
  Description of Artificial Sequence: Synthetic peptide
  Seed: YERMCNILKGKFQTA
YERMFNIGKNKFITA

SEQ ID NO: 134196 - protein, 15 aa, Artificial Sequence
  Description of Artificial Sequence: Synthetic peptide
  Seed: YERMCNILKGKFQTA
YERMFNIGKNKFLTA

SEQ ID NO: 134197 - protein, 15 aa, Artificial Sequence
  Description of Artificial Sequence: Synthetic peptide
  Seed: YERMCNILKGKFQTA
YERMFNIGKNKFMTA

SEQ ID NO: 134198 - protein, 15 aa, Artificial Sequence
  Description of Artificial Sequence: Synthetic peptide
  Seed: YERMCNILKGKFQTA
YERMFNIGKNKFVTA

SEQ ID NO: 134199 - protein, 15 aa, Artificial Sequence
  Description of Artificial Sequence: Synthetic peptide
  Seed: YERMCNILKGKFQTA
YERMFNIGKPKFATA

SEQ ID NO: 134200 - protein, 15 aa, Artificial Sequence
  Description of Artificial Sequence: Synthetic peptide
  Seed: YERMCNILKGKFQTA
YERMFNIGKPKFITA

SEQ ID NO: 134201 - protein, 15 aa, Artificial Sequence
  Description of Artificial Sequence: Synthetic peptide
  Seed: YERMCNILKGKFQTA
YERMFNIGKPKFLTA

SEQ ID NO: 134202 - protein, 15 aa, Artificial Sequence
  Description of Artificial Sequence: Synthetic peptide
  Seed: YERMCNILKGKFQTA
YERMFNIGKPKFMTA

SEQ ID NO: 134203 - protein, 15 aa, Artificial Sequence
  Description of Artificial Sequence: Synthetic peptide
  Seed: YERMCNILKGKFQTA
YERMFNIGKPKFVTA

SEQ ID NO: 134204 - protein, 15 aa, Artificial Sequence
  Description of Artificial Sequence: Synthetic peptide
  Seed: YERMCNILKGKFQTA
YERMFNIGKSKFATA

SEQ ID NO: 134205 - protein, 15 aa, Artificial Sequence
  Description of Artificial Sequence: Synthetic peptide
  Seed: YERMCNILKGKFQTA
YERMFNIGKSKFITA

SEQ ID NO: 134206 - protein, 15 aa, Artificial Sequence
  Description of Artificial Sequence: Synthetic peptide
  Seed: YERMCNILKGKFQTA
YERMFNIGKSKFLTA

SEQ ID NO: 134207 - protein, 15 aa, Artificial Sequence
  Description of Artificial Sequence: Synthetic peptide
  Seed: YERMCNILKGKFQTA
YERMFNIGKSKFMTA

SEQ ID NO: 134208 - protein, 15 aa, Artificial Sequence
  Description of Artificial Sequence: Synthetic peptide
  Seed: YERMCNILKGKFQTA
YERMFNIGKSKFSTA

SEQ ID NO: 134209 - protein, 15 aa, Artificial Sequence
  Description of Artificial Sequence: Synthetic peptide
  Seed: YERMCNILKGKFQTA
YERMFNIGKSKFTTA

SEQ ID NO: 134210 - protein, 15 aa, Artificial Sequence
  Description of Artificial Sequence: Synthetic peptide
  Seed: YERMCNILKGKFQTA
YERMFNIGKSKFVTA

SEQ ID NO: 134211 - protein, 15 aa, Artificial Sequence
  Description of Artificial Sequence: Synthetic peptide
  Seed: YERMCNILKGKFQTA
YERMFNIGKTKFATA

SEQ ID NO: 134212 - protein, 15 aa, Artificial Sequence
  Description of Artificial Sequence: Synthetic peptide
  Seed: YERMCNILKGKFQTA
YERMFNIGKTKFITA

SEQ ID NO: 134213 - protein, 15 aa, Artificial Sequence
  Description of Artificial Sequence: Synthetic peptide
  Seed: YERMCNILKGKFQTA
YERMFNIGKTKFLTA

SEQ ID NO: 134214 - protein, 15 aa, Artificial Sequence
  Description of Artificial Sequence: Synthetic peptide
  Seed: YERMCNILKGKFQTA
YERMFNIGKTKFMTA

SEQ ID NO: 134215 - protein, 15 aa, Artificial Sequence
  Description of Artificial Sequence: Synthetic peptide
  Seed: YERMCNILKGKFQTA
YERMFNIGKTKFVTA

SEQ ID NO: 134216 - protein, 15 aa, Artificial Sequence
  Description of Artificial Sequence: Synthetic peptide
  Seed: YERMCNILKGKFQTA
YERMFNIGKVKFATA

SEQ ID NO: 134217 - protein, 15 aa, Artificial Sequence
  Description of Artificial Sequence: Synthetic peptide
  Seed: YERMCNILKGKFQTA
YERMFNIGKVKFITA

SEQ ID NO: 134218 - protein, 15 aa, Artificial Sequence
  Description of Artificial Sequence: Synthetic peptide
  Seed: YERMCNILKGKFQTA
YERMFNIGKVKFLTA

SEQ ID NO: 134219 - protein, 15 aa, Artificial Sequence
  Description of Artificial Sequence: Synthetic peptide
  Seed: YERMCNILKGKFQTA
YERMFNIGKVKFVTA

SEQ ID NO: 134220 - protein, 15 aa, Artificial Sequence
  Description of Artificial Sequence: Synthetic peptide
  Seed: YERMCNILKGKFQTA
YERMFNIHKAKFATA

SEQ ID NO: 134221 - protein, 15 aa, Artificial Sequence
  Description of Artificial Sequence: Synthetic peptide
  Seed: YERMCNILKGKFQTA
YERMFNIHKAKFITA

SEQ ID NO: 134222 - protein, 15 aa, Artificial Sequence
  Description of Artificial Sequence: Synthetic peptide
  Seed: YERMCNILKGKFQTA
YERMFNIHKAKFLTA

SEQ ID NO: 134223 - protein, 15 aa, Artificial Sequence
  Description of Artificial Sequence: Synthetic peptide
  Seed: YERMCNILKGKFQTA
YERMFNIHKAKFMTA

SEQ ID NO: 134224 - protein, 15 aa, Artificial Sequence
  Description of Artificial Sequence: Synthetic peptide
  Seed: YERMCNILKGKFQTA
YERMFNIHKAKFVTA

SEQ ID NO: 134225 - protein, 15 aa, Artificial Sequence
  Description of Artificial Sequence: Synthetic peptide
  Seed: YERMCNILKGKFQTA
YERMFNIHKGKFATA

SEQ ID NO: 134226 - protein, 15 aa, Artificial Sequence
  Description of Artificial Sequence: Synthetic peptide
  Seed: YERMCNILKGKFQTA
YERMFNIHKGKFITA

SEQ ID NO: 134227 - protein, 15 aa, Artificial Sequence
  Description of Artificial Sequence: Synthetic peptide
  Seed: YERMCNILKGKFQTA
YERMFNIHKGKFLTA

SEQ ID NO: 134228 - protein, 15 aa, Artificial Sequence
  Description of Artificial Sequence: Synthetic peptide
  Seed: YERMCNILKGKFQTA
YERMFNIHKGKFVTA

SEQ ID NO: 134229 - protein, 15 aa, Artificial Sequence
  Description of Artificial Sequence: Synthetic peptide
  Seed: YERMCNILKGKFQTA
YERMFNIHKPKFLTA

SEQ ID NO: 134230 - protein, 15 aa, Artificial Sequence
  Description of Artificial Sequence: Synthetic peptide
  Seed: YERMCNILKGKFQTA
YERMFNIHKSKFATA

SEQ ID NO: 134231 - protein, 15 aa, Artificial Sequence
  Description of Artificial Sequence: Synthetic peptide
  Seed: YERMCNILKGKFQTA
YERMFNIHKSKFITA

SEQ ID NO: 134232 - protein, 15 aa, Artificial Sequence
  Description of Artificial Sequence: Synthetic peptide
  Seed: YERMCNILKGKFQTA
YERMFNIHKSKFLTA

SEQ ID NO: 134233 - protein, 15 aa, Artificial Sequence
  Description of Artificial Sequence: Synthetic peptide
  Seed: YERMCNILKGKFQTA
YERMFNIHKSKFVTA

SEQ ID NO: 134234 - protein, 15 aa, Artificial Sequence
  Description of Artificial Sequence: Synthetic peptide
  Seed: YERMCNILKGKFQTA
YERMFNIHKTKFLTA

SEQ ID NO: 134235 - protein, 15 aa, Artificial Sequence
  Description of Artificial Sequence: Synthetic peptide
  Seed: YERMCNILKGKFQTA
YERMFNIIKAKFATA

SEQ ID NO: 134236 - protein, 15 aa, Artificial Sequence
  Description of Artificial Sequence: Synthetic peptide
  Seed: YERMCNILKGKFQTA
YERMFNIIKAKFCTA

SEQ ID NO: 134237 - protein, 15 aa, Artificial Sequence
  Description of Artificial Sequence: Synthetic peptide
  Seed: YERMCNILKGKFQTA
YERMFNIIKAKFDTA

SEQ ID NO: 134238 - protein, 15 aa, Artificial Sequence
  Description of Artificial Sequence: Synthetic peptide
  Seed: YERMCNILKGKFQTA
YERMFNIIKAKFETA

SEQ ID NO: 134239 - protein, 15 aa, Artificial Sequence
  Description of Artificial Sequence: Synthetic peptide
  Seed: YERMCNILKGKFQTA
YERMFNIIKAKFFTA

SEQ ID NO: 134240 - protein, 15 aa, Artificial Sequence
  Description of Artificial Sequence: Synthetic peptide
  Seed: YERMCNILKGKFQTA
YERMFNIIKAKFGTA

SEQ ID NO: 134241 - protein, 15 aa, Artificial Sequence
  Description of Artificial Sequence: Synthetic peptide
  Seed: YERMCNILKGKFQTA
YERMFNIIKAKFHTA

SEQ ID NO: 134242 - protein, 15 aa, Artificial Sequence
  Description of Artificial Sequence: Synthetic peptide
  Seed: YERMCNILKGKFQTA
YERMFNIIKAKFITA

SEQ ID NO: 134243 - protein, 15 aa, Artificial Sequence
  Description of Artificial Sequence: Synthetic peptide
  Seed: YERMCNILKGKFQTA
YERMFNIIKAKFKTA

SEQ ID NO: 134244 - protein, 15 aa, Artificial Sequence
  Description of Artificial Sequence: Synthetic peptide
  Seed: YERMCNILKGKFQTA
YERMFNIIKAKFLTA

SEQ ID NO: 134245 - protein, 15 aa, Artificial Sequence
  Description of Artificial Sequence: Synthetic peptide
  Seed: YERMCNILKGKFQTA
YERMFNIIKAKFMTA

SEQ ID NO: 134246 - protein, 15 aa, Artificial Sequence
  Description of Artificial Sequence: Synthetic peptide
  Seed: YERMCNILKGKFQTA
YERMFNIIKAKFNTA

SEQ ID NO: 134247 - protein, 15 aa, Artificial Sequence
  Description of Artificial Sequence: Synthetic peptide
  Seed: YERMCNILKGKFQTA
YERMFNIIKAKFPTA

SEQ ID NO: 134248 - protein, 15 aa, Artificial Sequence
  Description of Artificial Sequence: Synthetic peptide
  Seed: YERMCNILKGKFQTA
YERMFNIIKAKFQTA

SEQ ID NO: 134249 - protein, 15 aa, Artificial Sequence
  Description of Artificial Sequence: Synthetic peptide
  Seed: YERMCNILKGKFQTA
YERMFNIIKAKFRTA

SEQ ID NO: 134250 - protein, 15 aa, Artificial Sequence
  Description of Artificial Sequence: Synthetic peptide
  Seed: YERMCNILKGKFQTA
YERMFNIIKAKFSTA

SEQ ID NO: 134251 - protein, 15 aa, Artificial Sequence
  Description of Artificial Sequence: Synthetic peptide
  Seed: YERMCNILKGKFQTA
YERMFNIIKAKFTTA

SEQ ID NO: 134252 - protein, 15 aa, Artificial Sequence
  Description of Artificial Sequence: Synthetic peptide
  Seed: YERMCNILKGKFQTA
YERMFNIIKAKFVTA

SEQ ID NO: 134253 - protein, 15 aa, Artificial Sequence
  Description of Artificial Sequence: Synthetic peptide
  Seed: YERMCNILKGKFQTA
YERMFNIIKAKFWTA

SEQ ID NO: 134254 - protein, 15 aa, Artificial Sequence
  Description of Artificial Sequence: Synthetic peptide
  Seed: YERMCNILKGKFQTA
YERMFNIIKAKFYTA

SEQ ID NO: 134255 - protein, 15 aa, Artificial Sequence
  Description of Artificial Sequence: Synthetic peptide
  Seed: YERMCNILKGKFQTA
YERMFNIIKCKFVTA

SEQ ID NO: 134256 - protein, 15 aa, Artificial Sequence
  Description of Artificial Sequence: Synthetic peptide
  Seed: YERMCNILKGKFQTA
YERMFNIIKDKFVTA

SEQ ID NO: 134257 - protein, 15 aa, Artificial Sequence
  Description of Artificial Sequence: Synthetic peptide
  Seed: YERMCNILKGKFQTA
YERMFNIIKGKFATA

SEQ ID NO: 134258 - protein, 15 aa, Artificial Sequence
  Description of Artificial Sequence: Synthetic peptide
  Seed: YERMCNILKGKFQTA
YERMFNIIKGKFCTA

SEQ ID NO: 134259 - protein, 15 aa, Artificial Sequence
  Description of Artificial Sequence: Synthetic peptide
  Seed: YERMCNILKGKFQTA
YERMFNIIKGKFFTA

SEQ ID NO: 134260 - protein, 15 aa, Artificial Sequence
  Description of Artificial Sequence: Synthetic peptide
  Seed: YERMCNILKGKFQTA
YERMFNIIKGKFGTA

SEQ ID NO: 134261 - protein, 15 aa, Artificial Sequence
  Description of Artificial Sequence: Synthetic peptide
  Seed: YERMCNILKGKFQTA
YERMFNIIKGKFHTA

SEQ ID NO: 134262 - protein, 15 aa, Artificial Sequence
  Description of Artificial Sequence: Synthetic peptide
  Seed: YERMCNILKGKFQTA
YERMFNIIKGKFITA

SEQ ID NO: 134263 - protein, 15 aa, Artificial Sequence
  Description of Artificial Sequence: Synthetic peptide
  Seed: YERMCNILKGKFQTA
YERMFNIIKGKFLTA

SEQ ID NO: 134264 - protein, 15 aa, Artificial Sequence
  Description of Artificial Sequence: Synthetic peptide
  Seed: YERMCNILKGKFQTA
YERMFNIIKGKFMTA

SEQ ID NO: 134265 - protein, 15 aa, Artificial Sequence
  Description of Artificial Sequence: Synthetic peptide
  Seed: YERMCNILKGKFQTA
YERMFNIIKGKFNTA

SEQ ID NO: 134266 - protein, 15 aa, Artificial Sequence
  Description of Artificial Sequence: Synthetic peptide
  Seed: YERMCNILKGKFQTA
YERMFNIIKGKFPTA

SEQ ID NO: 134267 - protein, 15 aa, Artificial Sequence
  Description of Artificial Sequence: Synthetic peptide
  Seed: YERMCNILKGKFQTA
YERMFNIIKGKFQTA

SEQ ID NO: 134268 - protein, 15 aa, Artificial Sequence
  Description of Artificial Sequence: Synthetic peptide
  Seed: YERMCNILKGKFQTA
YERMFNIIKGKFSTA

SEQ ID NO: 134269 - protein, 15 aa, Artificial Sequence
  Description of Artificial Sequence: Synthetic peptide
  Seed: YERMCNILKGKFQTA
YERMFNIIKGKFTTA

SEQ ID NO: 134270 - protein, 15 aa, Artificial Sequence
  Description of Artificial Sequence: Synthetic peptide
  Seed: YERMCNILKGKFQTA
YERMFNIIKGKFVTA

SEQ ID NO: 134271 - protein, 15 aa, Artificial Sequence
  Description of Artificial Sequence: Synthetic peptide
  Seed: YERMCNILKGKFQTA
YERMFNIIKGKFYTA

SEQ ID NO: 134272 - protein, 15 aa, Artificial Sequence
  Description of Artificial Sequence: Synthetic peptide
  Seed: YERMCNILKGKFQTA
YERMFNIIKHKFATA

SEQ ID NO: 134273 - protein, 15 aa, Artificial Sequence
  Description of Artificial Sequence: Synthetic peptide
  Seed: YERMCNILKGKFQTA
YERMFNIIKHKFITA

SEQ ID NO: 134274 - protein, 15 aa, Artificial Sequence
  Description of Artificial Sequence: Synthetic peptide
  Seed: YERMCNILKGKFQTA
YERMFNIIKHKFLTA

SEQ ID NO: 134275 - protein, 15 aa, Artificial Sequence
  Description of Artificial Sequence: Synthetic peptide
  Seed: YERMCNILKGKFQTA
YERMFNIIKHKFVTA

SEQ ID NO: 134276 - protein, 15 aa, Artificial Sequence
  Description of Artificial Sequence: Synthetic peptide
  Seed: YERMCNILKGKFQTA
YERMFNIIKIKFATA

SEQ ID NO: 134277 - protein, 15 aa, Artificial Sequence
  Description of Artificial Sequence: Synthetic peptide
  Seed: YERMCNILKGKFQTA
YERMFNIIKIKFITA

SEQ ID NO: 134278 - protein, 15 aa, Artificial Sequence
  Description of Artificial Sequence: Synthetic peptide
  Seed: YERMCNILKGKFQTA
YERMFNIIKIKFLTA

SEQ ID NO: 134279 - protein, 15 aa, Artificial Sequence
  Description of Artificial Sequence: Synthetic peptide
  Seed: YERMCNILKGKFQTA
YERMFNIIKIKFNTA

SEQ ID NO: 134280 - protein, 15 aa, Artificial Sequence
  Description of Artificial Sequence: Synthetic peptide
  Seed: YERMCNILKGKFQTA
YERMFNIIKIKFSTA

SEQ ID NO: 134281 - protein, 15 aa, Artificial Sequence
  Description of Artificial Sequence: Synthetic peptide
  Seed: YERMCNILKGKFQTA
YERMFNIIKIKFTTA

SEQ ID NO: 134282 - protein, 15 aa, Artificial Sequence
  Description of Artificial Sequence: Synthetic peptide
  Seed: YERMCNILKGKFQTA
YERMFNIIKIKFVTA

SEQ ID NO: 134283 - protein, 15 aa, Artificial Sequence
  Description of Artificial Sequence: Synthetic peptide
  Seed: YERMCNILKGKFQTA
YERMFNIIKLKFNTA

SEQ ID NO: 134284 - protein, 15 aa, Artificial Sequence
  Description of Artificial Sequence: Synthetic peptide
  Seed: YERMCNILKGKFQTA
YERMFNIIKMKFATA

SEQ ID NO: 134285 - protein, 15 aa, Artificial Sequence
  Description of Artificial Sequence: Synthetic peptide
  Seed: YERMCNILKGKFQTA
YERMFNIIKMKFITA

SEQ ID NO: 134286 - protein, 15 aa, Artificial Sequence
  Description of Artificial Sequence: Synthetic peptide
  Seed: YERMCNILKGKFQTA
YERMFNIIKMKFLTA

SEQ ID NO: 134287 - protein, 15 aa, Artificial Sequence
  Description of Artificial Sequence: Synthetic peptide
  Seed: YERMCNILKGKFQTA
YERMFNIIKMKFNTA

SEQ ID NO: 134288 - protein, 15 aa, Artificial Sequence
  Description of Artificial Sequence: Synthetic peptide
  Seed: YERMCNILKGKFQTA
YERMFNIIKMKFSTA

SEQ ID NO: 134289 - protein, 15 aa, Artificial Sequence
  Description of Artificial Sequence: Synthetic peptide
  Seed: YERMCNILKGKFQTA
YERMFNIIKMKFVTA

SEQ ID NO: 134290 - protein, 15 aa, Artificial Sequence
  Description of Artificial Sequence: Synthetic peptide
  Seed: YERMCNILKGKFQTA
YERMFNIIKNKFATA

SEQ ID NO: 134291 - protein, 15 aa, Artificial Sequence
  Description of Artificial Sequence: Synthetic peptide
  Seed: YERMCNILKGKFQTA
YERMFNIIKNKFCTA

SEQ ID NO: 134292 - protein, 15 aa, Artificial Sequence
  Description of Artificial Sequence: Synthetic peptide
  Seed: YERMCNILKGKFQTA
YERMFNIIKNKFFTA

SEQ ID NO: 134293 - protein, 15 aa, Artificial Sequence
  Description of Artificial Sequence: Synthetic peptide
  Seed: YERMCNILKGKFQTA
YERMFNIIKNKFGTA

SEQ ID NO: 134294 - protein, 15 aa, Artificial Sequence
  Description of Artificial Sequence: Synthetic peptide
  Seed: YERMCNILKGKFQTA
YERMFNIIKNKFITA

SEQ ID NO: 134295 - protein, 15 aa, Artificial Sequence
  Description of Artificial Sequence: Synthetic peptide
  Seed: YERMCNILKGKFQTA
YERMFNIIKNKFLTA

SEQ ID NO: 134296 - protein, 15 aa, Artificial Sequence
  Description of Artificial Sequence: Synthetic peptide
  Seed: YERMCNILKGKFQTA
YERMFNIIKNKFMTA

SEQ ID NO: 134297 - protein, 15 aa, Artificial Sequence
  Description of Artificial Sequence: Synthetic peptide
  Seed: YERMCNILKGKFQTA
YERMFNIIKNKFNTA

SEQ ID NO: 134298 - protein, 15 aa, Artificial Sequence
  Description of Artificial Sequence: Synthetic peptide
  Seed: YERMCNILKGKFQTA
YERMFNIIKNKFSTA

SEQ ID NO: 134299 - protein, 15 aa, Artificial Sequence
  Description of Artificial Sequence: Synthetic peptide
  Seed: YERMCNILKGKFQTA
YERMFNIIKNKFTTA

SEQ ID NO: 134300 - protein, 15 aa, Artificial Sequence
  Description of Artificial Sequence: Synthetic peptide
  Seed: YERMCNILKGKFQTA
YERMFNIIKNKFVTA

SEQ ID NO: 134301 - protein, 15 aa, Artificial Sequence
  Description of Artificial Sequence: Synthetic peptide
  Seed: YERMCNILKGKFQTA
YERMFNIIKPKFATA

SEQ ID NO: 134302 - protein, 15 aa, Artificial Sequence
  Description of Artificial Sequence: Synthetic peptide
  Seed: YERMCNILKGKFQTA
YERMFNIIKPKFCTA

SEQ ID NO: 134303 - protein, 15 aa, Artificial Sequence
  Description of Artificial Sequence: Synthetic peptide
  Seed: YERMCNILKGKFQTA
YERMFNIIKPKFFTA

SEQ ID NO: 134304 - protein, 15 aa, Artificial Sequence
  Description of Artificial Sequence: Synthetic peptide
  Seed: YERMCNILKGKFQTA
YERMFNIIKPKFGTA

SEQ ID NO: 134305 - protein, 15 aa, Artificial Sequence
  Description of Artificial Sequence: Synthetic peptide
  Seed: YERMCNILKGKFQTA
YERMFNIIKPKFHTA

SEQ ID NO: 134306 - protein, 15 aa, Artificial Sequence
  Description of Artificial Sequence: Synthetic peptide
  Seed: YERMCNILKGKFQTA
YERMFNIIKPKFITA

SEQ ID NO: 134307 - protein, 15 aa, Artificial Sequence
  Description of Artificial Sequence: Synthetic peptide
  Seed: YERMCNILKGKFQTA
YERMFNIIKPKFLTA

SEQ ID NO: 134308 - protein, 15 aa, Artificial Sequence
  Description of Artificial Sequence: Synthetic peptide
  Seed: YERMCNILKGKFQTA
YERMFNIIKPKFMTA

SEQ ID NO: 134309 - protein, 15 aa, Artificial Sequence
  Description of Artificial Sequence: Synthetic peptide
  Seed: YERMCNILKGKFQTA
YERMFNIIKPKFNTA

SEQ ID NO: 134310 - protein, 15 aa, Artificial Sequence
  Description of Artificial Sequence: Synthetic peptide
  Seed: YERMCNILKGKFQTA
YERMFNIIKPKFPTA

SEQ ID NO: 134311 - protein, 15 aa, Artificial Sequence
  Description of Artificial Sequence: Synthetic peptide
  Seed: YERMCNILKGKFQTA
YERMFNIIKPKFQTA

SEQ ID NO: 134312 - protein, 15 aa, Artificial Sequence
  Description of Artificial Sequence: Synthetic peptide
  Seed: YERMCNILKGKFQTA
YERMFNIIKPKFSTA

SEQ ID NO: 134313 - protein, 15 aa, Artificial Sequence
  Description of Artificial Sequence: Synthetic peptide
  Seed: YERMCNILKGKFQTA
YERMFNIIKPKFTTA

SEQ ID NO: 134314 - protein, 15 aa, Artificial Sequence
  Description of Artificial Sequence: Synthetic peptide
  Seed: YERMCNILKGKFQTA
YERMFNIIKPKFVTA

SEQ ID NO: 134315 - protein, 15 aa, Artificial Sequence
  Description of Artificial Sequence: Synthetic peptide
  Seed: YERMCNILKGKFQTA
YERMFNIIKQKFLTA

SEQ ID NO: 134316 - protein, 15 aa, Artificial Sequence
  Description of Artificial Sequence: Synthetic peptide
  Seed: YERMCNILKGKFQTA
YERMFNIIKQKFVTA

SEQ ID NO: 134317 - protein, 15 aa, Artificial Sequence
  Description of Artificial Sequence: Synthetic peptide
  Seed: YERMCNILKGKFQTA
YERMFNIIKSKFATA

SEQ ID NO: 134318 - protein, 15 aa, Artificial Sequence
  Description of Artificial Sequence: Synthetic peptide
  Seed: YERMCNILKGKFQTA
YERMFNIIKSKFCTA

SEQ ID NO: 134319 - protein, 15 aa, Artificial Sequence
  Description of Artificial Sequence: Synthetic peptide
  Seed: YERMCNILKGKFQTA
YERMFNIIKSKFFTA

SEQ ID NO: 134320 - protein, 15 aa, Artificial Sequence
  Description of Artificial Sequence: Synthetic peptide
  Seed: YERMCNILKGKFQTA
YERMFNIIKSKFGTA

SEQ ID NO: 134321 - protein, 15 aa, Artificial Sequence
  Description of Artificial Sequence: Synthetic peptide
  Seed: YERMCNILKGKFQTA
YERMFNIIKSKFHTA

SEQ ID NO: 134322 - protein, 15 aa, Artificial Sequence
  Description of Artificial Sequence: Synthetic peptide
  Seed: YERMCNILKGKFQTA
YERMFNIIKSKFITA

SEQ ID NO: 134323 - protein, 15 aa, Artificial Sequence
  Description of Artificial Sequence: Synthetic peptide
  Seed: YERMCNILKGKFQTA
YERMFNIIKSKFLTA

SEQ ID NO: 134324 - protein, 15 aa, Artificial Sequence
  Description of Artificial Sequence: Synthetic peptide
  Seed: YERMCNILKGKFQTA
YERMFNIIKSKFMTA

SEQ ID NO: 134325 - protein, 15 aa, Artificial Sequence
  Description of Artificial Sequence: Synthetic peptide
  Seed: YERMCNILKGKFQTA
YERMFNIIKSKFNTA

SEQ ID NO: 134326 - protein, 15 aa, Artificial Sequence
  Description of Artificial Sequence: Synthetic peptide
  Seed: YERMCNILKGKFQTA
YERMFNIIKSKFPTA

SEQ ID NO: 134327 - protein, 15 aa, Artificial Sequence
  Description of Artificial Sequence: Synthetic peptide
  Seed: YERMCNILKGKFQTA
YERMFNIIKSKFQTA

SEQ ID NO: 134328 - protein, 15 aa, Artificial Sequence
  Description of Artificial Sequence: Synthetic peptide
  Seed: YERMCNILKGKFQTA
YERMFNIIKSKFRTA

SEQ ID NO: 134329 - protein, 15 aa, Artificial Sequence
  Description of Artificial Sequence: Synthetic peptide
  Seed: YERMCNILKGKFQTA
YERMFNIIKSKFSTA

SEQ ID NO: 134330 - protein, 15 aa, Artificial Sequence
  Description of Artificial Sequence: Synthetic peptide
  Seed: YERMCNILKGKFQTA
YERMFNIIKSKFTTA

SEQ ID NO: 134331 - protein, 15 aa, Artificial Sequence
  Description of Artificial Sequence: Synthetic peptide
  Seed: YERMCNILKGKFQTA
YERMFNIIKSKFVTA

SEQ ID NO: 134332 - protein, 15 aa, Artificial Sequence
  Description of Artificial Sequence: Synthetic peptide
  Seed: YERMCNILKGKFQTA
YERMFNIIKSKFYTA

SEQ ID NO: 134333 - protein, 15 aa, Artificial Sequence
  Description of Artificial Sequence: Synthetic peptide
  Seed: YERMCNILKGKFQTA
YERMFNIIKTKFATA

SEQ ID NO: 134334 - protein, 15 aa, Artificial Sequence
  Description of Artificial Sequence: Synthetic peptide
  Seed: YERMCNILKGKFQTA
YERMFNIIKTKFCTA

SEQ ID NO: 134335 - protein, 15 aa, Artificial Sequence
  Description of Artificial Sequence: Synthetic peptide
  Seed: YERMCNILKGKFQTA
YERMFNIIKTKFFTA

SEQ ID NO: 134336 - protein, 15 aa, Artificial Sequence
  Description of Artificial Sequence: Synthetic peptide
  Seed: YERMCNILKGKFQTA
YERMFNIIKTKFGTA

SEQ ID NO: 134337 - protein, 15 aa, Artificial Sequence
  Description of Artificial Sequence: Synthetic peptide
  Seed: YERMCNILKGKFQTA
YERMFNIIKTKFHTA

SEQ ID NO: 134338 - protein, 15 aa, Artificial Sequence
  Description of Artificial Sequence: Synthetic peptide
  Seed: YERMCNILKGKFQTA
YERMFNIIKTKFITA

SEQ ID NO: 134339 - protein, 15 aa, Artificial Sequence
  Description of Artificial Sequence: Synthetic peptide
  Seed: YERMCNILKGKFQTA
YERMFNIIKTKFLTA

SEQ ID NO: 134340 - protein, 15 aa, Artificial Sequence
  Description of Artificial Sequence: Synthetic peptide
  Seed: YERMCNILKGKFQTA
YERMFNIIKTKFMTA

SEQ ID NO: 134341 - protein, 15 aa, Artificial Sequence
  Description of Artificial Sequence: Synthetic peptide
  Seed: YERMCNILKGKFQTA
YERMFNIIKTKFNTA

SEQ ID NO: 134342 - protein, 15 aa, Artificial Sequence
  Description of Artificial Sequence: Synthetic peptide
  Seed: YERMCNILKGKFQTA
YERMFNIIKTKFSTA

SEQ ID NO: 134343 - protein, 15 aa, Artificial Sequence
  Description of Artificial Sequence: Synthetic peptide
  Seed: YERMCNILKGKFQTA
YERMFNIIKTKFTTA

SEQ ID NO: 134344 - protein, 15 aa, Artificial Sequence
  Description of Artificial Sequence: Synthetic peptide
  Seed: YERMCNILKGKFQTA
YERMFNIIKTKFVTA

SEQ ID NO: 134345 - protein, 15 aa, Artificial Sequence
  Description of Artificial Sequence: Synthetic peptide
  Seed: YERMCNILKGKFQTA
YERMFNIIKVKFATA

SEQ ID NO: 134346 - protein, 15 aa, Artificial Sequence
  Description of Artificial Sequence: Synthetic peptide
  Seed: YERMCNILKGKFQTA
YERMFNIIKVKFGTA

SEQ ID NO: 134347 - protein, 15 aa, Artificial Sequence
  Description of Artificial Sequence: Synthetic peptide
  Seed: YERMCNILKGKFQTA
YERMFNIIKVKFHTA

SEQ ID NO: 134348 - protein, 15 aa, Artificial Sequence
  Description of Artificial Sequence: Synthetic peptide
  Seed: YERMCNILKGKFQTA
YERMFNIIKVKFITA

SEQ ID NO: 134349 - protein, 15 aa, Artificial Sequence
  Description of Artificial Sequence: Synthetic peptide
  Seed: YERMCNILKGKFQTA
YERMFNIIKVKFLTA

SEQ ID NO: 134350 - protein, 15 aa, Artificial Sequence
  Description of Artificial Sequence: Synthetic peptide
  Seed: YERMCNILKGKFQTA
YERMFNIIKVKFMTA

SEQ ID NO: 134351 - protein, 15 aa, Artificial Sequence
  Description of Artificial Sequence: Synthetic peptide
  Seed: YERMCNILKGKFQTA
YERMFNIIKVKFNTA

SEQ ID NO: 134352 - protein, 15 aa, Artificial Sequence
  Description of Artificial Sequence: Synthetic peptide
  Seed: YERMCNILKGKFQTA
YERMFNIIKVKFSTA

SEQ ID NO: 134353 - protein, 15 aa, Artificial Sequence
  Description of Artificial Sequence: Synthetic peptide
  Seed: YERMCNILKGKFQTA
YERMFNIIKVKFTTA

SEQ ID NO: 134354 - protein, 15 aa, Artificial Sequence
  Description of Artificial Sequence: Synthetic peptide
  Seed: YERMCNILKGKFQTA
YERMFNIIKVKFVTA

SEQ ID NO: 134355 - protein, 15 aa, Artificial Sequence
  Description of Artificial Sequence: Synthetic peptide
  Seed: YERMCNILKGKFQTA
YERMFNIKKAKFLTA

SEQ ID NO: 134356 - protein, 15 aa, Artificial Sequence
  Description of Artificial Sequence: Synthetic peptide
  Seed: YERMCNILKGKFQTA
YERMFNIKKAKFVTA

SEQ ID NO: 134357 - protein, 15 aa, Artificial Sequence
  Description of Artificial Sequence: Synthetic peptide
  Seed: YERMCNILKGKFQTA
YERMFNIKKSKFLTA

SEQ ID NO: 134358 - protein, 15 aa, Artificial Sequence
  Description of Artificial Sequence: Synthetic peptide
  Seed: YERMCNILKGKFQTA
YERMFNILKAKFATA

SEQ ID NO: 134359 - protein, 15 aa, Artificial Sequence
  Description of Artificial Sequence: Synthetic peptide
  Seed: YERMCNILKGKFQTA
YERMFNILKAKFCTA

SEQ ID NO: 134360 - protein, 15 aa, Artificial Sequence
  Description of Artificial Sequence: Synthetic peptide
  Seed: YERMCNILKGKFQTA
YERMFNILKAKFDTA

SEQ ID NO: 134361 - protein, 15 aa, Artificial Sequence
  Description of Artificial Sequence: Synthetic peptide
  Seed: YERMCNILKGKFQTA
YERMFNILKAKFETA

SEQ ID NO: 134362 - protein, 15 aa, Artificial Sequence
  Description of Artificial Sequence: Synthetic peptide
  Seed: YERMCNILKGKFQTA
YERMFNILKAKFFTA

SEQ ID NO: 134363 - protein, 15 aa, Artificial Sequence
  Description of Artificial Sequence: Synthetic peptide
  Seed: YERMCNILKGKFQTA
YERMFNILKAKFGTA

SEQ ID NO: 134364 - protein, 15 aa, Artificial Sequence
  Description of Artificial Sequence: Synthetic peptide
  Seed: YERMCNILKGKFQTA
YERMFNILKAKFHTA

SEQ ID NO: 134365 - protein, 15 aa, Artificial Sequence
  Description of Artificial Sequence: Synthetic peptide
  Seed: YERMCNILKGKFQTA
YERMFNILKAKFITA

SEQ ID NO: 134366 - protein, 15 aa, Artificial Sequence
  Description of Artificial Sequence: Synthetic peptide
  Seed: YERMCNILKGKFQTA
YERMFNILKAKFKTA

SEQ ID NO: 134367 - protein, 15 aa, Artificial Sequence
  Description of Artificial Sequence: Synthetic peptide
  Seed: YERMCNILKGKFQTA
YERMFNILKAKFLTA

SEQ ID NO: 134368 - protein, 15 aa, Artificial Sequence
  Description of Artificial Sequence: Synthetic peptide
  Seed: YERMCNILKGKFQTA
YERMFNILKAKFMTA

SEQ ID NO: 134369 - protein, 15 aa, Artificial Sequence
  Description of Artificial Sequence: Synthetic peptide
  Seed: YERMCNILKGKFQTA
YERMFNILKAKFNTA

SEQ ID NO: 134370 - protein, 15 aa, Artificial Sequence
  Description of Artificial Sequence: Synthetic peptide
  Seed: YERMCNILKGKFQTA
YERMFNILKAKFPTA

SEQ ID NO: 134371 - protein, 15 aa, Artificial Sequence
  Description of Artificial Sequence: Synthetic peptide
  Seed: YERMCNILKGKFQTA
YERMFNILKAKFQTA

SEQ ID NO: 134372 - protein, 15 aa, Artificial Sequence
  Description of Artificial Sequence: Synthetic peptide
  Seed: YERMCNILKGKFQTA
YERMFNILKAKFRTA

SEQ ID NO: 134373 - protein, 15 aa, Artificial Sequence
  Description of Artificial Sequence: Synthetic peptide
  Seed: YERMCNILKGKFQTA
YERMFNILKAKFSTA

SEQ ID NO: 134374 - protein, 15 aa, Artificial Sequence
  Description of Artificial Sequence: Synthetic peptide
  Seed: YERMCNILKGKFQTA
YERMFNILKAKFTTA

SEQ ID NO: 134375 - protein, 15 aa, Artificial Sequence
  Description of Artificial Sequence: Synthetic peptide
  Seed: YERMCNILKGKFQTA
YERMFNILKAKFVTA

SEQ ID NO: 134376 - protein, 15 aa, Artificial Sequence
  Description of Artificial Sequence: Synthetic peptide
  Seed: YERMCNILKGKFQTA
YERMFNILKAKFWTA

SEQ ID NO: 134377 - protein, 15 aa, Artificial Sequence
  Description of Artificial Sequence: Synthetic peptide
  Seed: YERMCNILKGKFQTA
YERMFNILKAKFYTA

SEQ ID NO: 134378 - protein, 15 aa, Artificial Sequence
  Description of Artificial Sequence: Synthetic peptide
  Seed: YERMCNILKGKFQTA
YERMFNILKCKFATA

SEQ ID NO: 134379 - protein, 15 aa, Artificial Sequence
  Description of Artificial Sequence: Synthetic peptide
  Seed: YERMCNILKGKFQTA
YERMFNILKCKFITA

SEQ ID NO: 134380 - protein, 15 aa, Artificial Sequence
  Description of Artificial Sequence: Synthetic peptide
  Seed: YERMCNILKGKFQTA
YERMFNILKCKFLTA

SEQ ID NO: 134381 - protein, 15 aa, Artificial Sequence
  Description of Artificial Sequence: Synthetic peptide
  Seed: YERMCNILKGKFQTA
YERMFNILKCKFTTA

SEQ ID NO: 134382 - protein, 15 aa, Artificial Sequence
  Description of Artificial Sequence: Synthetic peptide
  Seed: YERMCNILKGKFQTA
YERMFNILKCKFVTA

SEQ ID NO: 134383 - protein, 15 aa, Artificial Sequence
  Description of Artificial Sequence: Synthetic peptide
  Seed: YERMCNILKGKFQTA
YERMFNILKDKFATA

SEQ ID NO: 134384 - protein, 15 aa, Artificial Sequence
  Description of Artificial Sequence: Synthetic peptide
  Seed: YERMCNILKGKFQTA
YERMFNILKDKFITA

SEQ ID NO: 134385 - protein, 15 aa, Artificial Sequence
  Description of Artificial Sequence: Synthetic peptide
  Seed: YERMCNILKGKFQTA
YERMFNILKDKFLTA

SEQ ID NO: 134386 - protein, 15 aa, Artificial Sequence
  Description of Artificial Sequence: Synthetic peptide
  Seed: YERMCNILKGKFQTA
YERMFNILKDKFVTA

SEQ ID NO: 134387 - protein, 15 aa, Artificial Sequence
  Description of Artificial Sequence: Synthetic peptide
  Seed: YERMCNILKGKFQTA
YERMFNILKEKFATA

SEQ ID NO: 134388 - protein, 15 aa, Artificial Sequence
  Description of Artificial Sequence: Synthetic peptide
  Seed: YERMCNILKGKFQTA
YERMFNILKEKFITA

SEQ ID NO: 134389 - protein, 15 aa, Artificial Sequence
  Description of Artificial Sequence: Synthetic peptide
  Seed: YERMCNILKGKFQTA
YERMFNILKEKFLTA

SEQ ID NO: 134390 - protein, 15 aa, Artificial Sequence
  Description of Artificial Sequence: Synthetic peptide
  Seed: YERMCNILKGKFQTA
YERMFNILKEKFVTA

SEQ ID NO: 134391 - protein, 15 aa, Artificial Sequence
  Description of Artificial Sequence: Synthetic peptide
  Seed: YERMCNILKGKFQTA
YERMFNILKGKFATA

SEQ ID NO: 134392 - protein, 15 aa, Artificial Sequence
  Description of Artificial Sequence: Synthetic peptide
  Seed: YERMCNILKGKFQTA
YERMFNILKGKFCTA

SEQ ID NO: 134393 - protein, 15 aa, Artificial Sequence
  Description of Artificial Sequence: Synthetic peptide
  Seed: YERMCNILKGKFQTA
YERMFNILKGKFDTA

SEQ ID NO: 134394 - protein, 15 aa, Artificial Sequence
  Description of Artificial Sequence: Synthetic peptide
  Seed: YERMCNILKGKFQTA
YERMFNILKGKFETA

SEQ ID NO: 134395 - protein, 15 aa, Artificial Sequence
  Description of Artificial Sequence: Synthetic peptide
  Seed: YERMCNILKGKFQTA
YERMFNILKGKFFTA

SEQ ID NO: 134396 - protein, 15 aa, Artificial Sequence
  Description of Artificial Sequence: Synthetic peptide
  Seed: YERMCNILKGKFQTA
YERMFNILKGKFGTA

SEQ ID NO: 134397 - protein, 15 aa, Artificial Sequence
  Description of Artificial Sequence: Synthetic peptide
  Seed: YERMCNILKGKFQTA
YERMFNILKGKFHTA

SEQ ID NO: 134398 - protein, 15 aa, Artificial Sequence
  Description of Artificial Sequence: Synthetic peptide
  Seed: YERMCNILKGKFQTA
YERMFNILKGKFITA

SEQ ID NO: 134399 - protein, 15 aa, Artificial Sequence
  Description of Artificial Sequence: Synthetic peptide
  Seed: YERMCNILKGKFQTA
YERMFNILKGKFKTA

SEQ ID NO: 134400 - protein, 15 aa, Artificial Sequence
  Description of Artificial Sequence: Synthetic peptide
  Seed: YERMCNILKGKFQTA
YERMFNILKGKFLTA

SEQ ID NO: 134401 - protein, 15 aa, Artificial Sequence
  Description of Artificial Sequence: Synthetic peptide
  Seed: YERMCNILKGKFQTA
YERMFNILKGKFMTA

SEQ ID NO: 134402 - protein, 15 aa, Artificial Sequence
  Description of Artificial Sequence: Synthetic peptide
  Seed: YERMCNILKGKFQTA
YERMFNILKGKFNTA

SEQ ID NO: 134403 - protein, 15 aa, Artificial Sequence
  Description of Artificial Sequence: Synthetic peptide
  Seed: YERMCNILKGKFQTA
YERMFNILKGKFPTA

SEQ ID NO: 134404 - protein, 15 aa, Artificial Sequence
  Description of Artificial Sequence: Synthetic peptide
  Seed: YERMCNILKGKFQTA
YERMFNILKGKFQTA

SEQ ID NO: 134405 - protein, 15 aa, Artificial Sequence
  Description of Artificial Sequence: Synthetic peptide
  Seed: YERMCNILKGKFQTA
YERMFNILKGKFRTA

SEQ ID NO: 134406 - protein, 15 aa, Artificial Sequence
  Description of Artificial Sequence: Synthetic peptide
  Seed: YERMCNILKGKFQTA
YERMFNILKGKFSTA

SEQ ID NO: 134407 - protein, 15 aa, Artificial Sequence
  Description of Artificial Sequence: Synthetic peptide
  Seed: YERMCNILKGKFQTA
YERMFNILKGKFTTA

SEQ ID NO: 134408 - protein, 15 aa, Artificial Sequence
  Description of Artificial Sequence: Synthetic peptide
  Seed: YERMCNILKGKFQTA
YERMFNILKGKFVTA

SEQ ID NO: 134409 - protein, 15 aa, Artificial Sequence
  Description of Artificial Sequence: Synthetic peptide
  Seed: YERMCNILKGKFQTA
YERMFNILKGKFWTA

SEQ ID NO: 134410 - protein, 15 aa, Artificial Sequence
  Description of Artificial Sequence: Synthetic peptide
  Seed: YERMCNILKGKFQTA
YERMFNILKGKFYTA

SEQ ID NO: 134411 - protein, 15 aa, Artificial Sequence
  Description of Artificial Sequence: Synthetic peptide
  Seed: YERMCNILKGKFQTA
YERMFNILKHKFATA

SEQ ID NO: 134412 - protein, 15 aa, Artificial Sequence
  Description of Artificial Sequence: Synthetic peptide
  Seed: YERMCNILKGKFQTA
YERMFNILKHKFITA

SEQ ID NO: 134413 - protein, 15 aa, Artificial Sequence
  Description of Artificial Sequence: Synthetic peptide
  Seed: YERMCNILKGKFQTA
YERMFNILKHKFLTA

SEQ ID NO: 134414 - protein, 15 aa, Artificial Sequence
  Description of Artificial Sequence: Synthetic peptide
  Seed: YERMCNILKGKFQTA
YERMFNILKHKFMTA

SEQ ID NO: 134415 - protein, 15 aa, Artificial Sequence
  Description of Artificial Sequence: Synthetic peptide
  Seed: YERMCNILKGKFQTA
YERMFNILKHKFVTA

SEQ ID NO: 134416 - protein, 15 aa, Artificial Sequence
  Description of Artificial Sequence: Synthetic peptide
  Seed: YERMCNILKGKFQTA
YERMFNILKIKFATA

SEQ ID NO: 134417 - protein, 15 aa, Artificial Sequence
  Description of Artificial Sequence: Synthetic peptide
  Seed: YERMCNILKGKFQTA
YERMFNILKIKFGTA

SEQ ID NO: 134418 - protein, 15 aa, Artificial Sequence
  Description of Artificial Sequence: Synthetic peptide
  Seed: YERMCNILKGKFQTA
YERMFNILKIKFHTA

SEQ ID NO: 134419 - protein, 15 aa, Artificial Sequence
  Description of Artificial Sequence: Synthetic peptide
  Seed: YERMCNILKGKFQTA
YERMFNILKIKFITA

SEQ ID NO: 134420 - protein, 15 aa, Artificial Sequence
  Description of Artificial Sequence: Synthetic peptide
  Seed: YERMCNILKGKFQTA
YERMFNILKIKFLTA

SEQ ID NO: 134421 - protein, 15 aa, Artificial Sequence
  Description of Artificial Sequence: Synthetic peptide
  Seed: YERMCNILKGKFQTA
YERMFNILKIKFMTA

SEQ ID NO: 134422 - protein, 15 aa, Artificial Sequence
  Description of Artificial Sequence: Synthetic peptide
  Seed: YERMCNILKGKFQTA
YERMFNILKIKFNTA

SEQ ID NO: 134423 - protein, 15 aa, Artificial Sequence
  Description of Artificial Sequence: Synthetic peptide
  Seed: YERMCNILKGKFQTA
YERMFNILKIKFSTA

SEQ ID NO: 134424 - protein, 15 aa, Artificial Sequence
  Description of Artificial Sequence: Synthetic peptide
  Seed: YERMCNILKGKFQTA
YERMFNILKIKFTTA

SEQ ID NO: 134425 - protein, 15 aa, Artificial Sequence
  Description of Artificial Sequence: Synthetic peptide
  Seed: YERMCNILKGKFQTA
YERMFNILKIKFVTA

SEQ ID NO: 134426 - protein, 15 aa, Artificial Sequence
  Description of Artificial Sequence: Synthetic peptide
  Seed: YERMCNILKGKFQTA
YERMFNILKLKFATA

SEQ ID NO: 134427 - protein, 15 aa, Artificial Sequence
  Description of Artificial Sequence: Synthetic peptide
  Seed: YERMCNILKGKFQTA
YERMFNILKLKFITA

SEQ ID NO: 134428 - protein, 15 aa, Artificial Sequence
  Description of Artificial Sequence: Synthetic peptide
  Seed: YERMCNILKGKFQTA
YERMFNILKLKFLTA

SEQ ID NO: 134429 - protein, 15 aa, Artificial Sequence
  Description of Artificial Sequence: Synthetic peptide
  Seed: YERMCNILKGKFQTA
YERMFNILKLKFNTA

SEQ ID NO: 134430 - protein, 15 aa, Artificial Sequence
  Description of Artificial Sequence: Synthetic peptide
  Seed: YERMCNILKGKFQTA
YERMFNILKLKFSTA

SEQ ID NO: 134431 - protein, 15 aa, Artificial Sequence
  Description of Artificial Sequence: Synthetic peptide
  Seed: YERMCNILKGKFQTA
YERMFNILKLKFVTA

SEQ ID NO: 134432 - protein, 15 aa, Artificial Sequence
  Description of Artificial Sequence: Synthetic peptide
  Seed: YERMCNILKGKFQTA
YERMFNILKMKFATA

SEQ ID NO: 134433 - protein, 15 aa, Artificial Sequence
  Description of Artificial Sequence: Synthetic peptide
  Seed: YERMCNILKGKFQTA
YERMFNILKMKFITA

SEQ ID NO: 134434 - protein, 15 aa, Artificial Sequence
  Description of Artificial Sequence: Synthetic peptide
  Seed: YERMCNILKGKFQTA
YERMFNILKMKFLTA

SEQ ID NO: 134435 - protein, 15 aa, Artificial Sequence
  Description of Artificial Sequence: Synthetic peptide
  Seed: YERMCNILKGKFQTA
YERMFNILKMKFMTA

SEQ ID NO: 134436 - protein, 15 aa, Artificial Sequence
  Description of Artificial Sequence: Synthetic peptide
  Seed: YERMCNILKGKFQTA
YERMFNILKMKFNTA

SEQ ID NO: 134437 - protein, 15 aa, Artificial Sequence
  Description of Artificial Sequence: Synthetic peptide
  Seed: YERMCNILKGKFQTA
YERMFNILKMKFSTA

SEQ ID NO: 134438 - protein, 15 aa, Artificial Sequence
  Description of Artificial Sequence: Synthetic peptide
  Seed: YERMCNILKGKFQTA
YERMFNILKMKFTTA

SEQ ID NO: 134439 - protein, 15 aa, Artificial Sequence
  Description of Artificial Sequence: Synthetic peptide
  Seed: YERMCNILKGKFQTA
YERMFNILKMKFVTA

SEQ ID NO: 134440 - protein, 15 aa, Artificial Sequence
  Description of Artificial Sequence: Synthetic peptide
  Seed: YERMCNILKGKFQTA
YERMFNILKNKFATA

SEQ ID NO: 134441 - protein, 15 aa, Artificial Sequence
  Description of Artificial Sequence: Synthetic peptide
  Seed: YERMCNILKGKFQTA
YERMFNILKNKFCTA

SEQ ID NO: 134442 - protein, 15 aa, Artificial Sequence
  Description of Artificial Sequence: Synthetic peptide
  Seed: YERMCNILKGKFQTA
YERMFNILKNKFFTA

SEQ ID NO: 134443 - protein, 15 aa, Artificial Sequence
  Description of Artificial Sequence: Synthetic peptide
  Seed: YERMCNILKGKFQTA
YERMFNILKNKFGTA

SEQ ID NO: 134444 - protein, 15 aa, Artificial Sequence
  Description of Artificial Sequence: Synthetic peptide
  Seed: YERMCNILKGKFQTA
YERMFNILKNKFHTA

SEQ ID NO: 134445 - protein, 15 aa, Artificial Sequence
  Description of Artificial Sequence: Synthetic peptide
  Seed: YERMCNILKGKFQTA
YERMFNILKNKFITA

SEQ ID NO: 134446 - protein, 15 aa, Artificial Sequence
  Description of Artificial Sequence: Synthetic peptide
  Seed: YERMCNILKGKFQTA
YERMFNILKNKFLTA

SEQ ID NO: 134447 - protein, 15 aa, Artificial Sequence
  Description of Artificial Sequence: Synthetic peptide
  Seed: YERMCNILKGKFQTA
YERMFNILKNKFMTA

SEQ ID NO: 134448 - protein, 15 aa, Artificial Sequence
  Description of Artificial Sequence: Synthetic peptide
  Seed: YERMCNILKGKFQTA
YERMFNILKNKFNTA

SEQ ID NO: 134449 - protein, 15 aa, Artificial Sequence
  Description of Artificial Sequence: Synthetic peptide
  Seed: YERMCNILKGKFQTA
YERMFNILKNKFPTA

SEQ ID NO: 134450 - protein, 15 aa, Artificial Sequence
  Description of Artificial Sequence: Synthetic peptide
  Seed: YERMCNILKGKFQTA
YERMFNILKNKFQTA

SEQ ID NO: 134451 - protein, 15 aa, Artificial Sequence
  Description of Artificial Sequence: Synthetic peptide
  Seed: YERMCNILKGKFQTA
YERMFNILKNKFSTA

SEQ ID NO: 134452 - protein, 15 aa, Artificial Sequence
  Description of Artificial Sequence: Synthetic peptide
  Seed: YERMCNILKGKFQTA
YERMFNILKNKFTTA

SEQ ID NO: 134453 - protein, 15 aa, Artificial Sequence
  Description of Artificial Sequence: Synthetic peptide
  Seed: YERMCNILKGKFQTA
YERMFNILKNKFVTA

SEQ ID NO: 134454 - protein, 15 aa, Artificial Sequence
  Description of Artificial Sequence: Synthetic peptide
  Seed: YERMCNILKGKFQTA
YERMFNILKNKFYTA

SEQ ID NO: 134455 - protein, 15 aa, Artificial Sequence
  Description of Artificial Sequence: Synthetic peptide
  Seed: YERMCNILKGKFQTA
YERMFNILKPKFATA

SEQ ID NO: 134456 - protein, 15 aa, Artificial Sequence
  Description of Artificial Sequence: Synthetic peptide
  Seed: YERMCNILKGKFQTA
YERMFNILKPKFCTA

SEQ ID NO: 134457 - protein, 15 aa, Artificial Sequence
  Description of Artificial Sequence: Synthetic peptide
  Seed: YERMCNILKGKFQTA
YERMFNILKPKFDTA

SEQ ID NO: 134458 - protein, 15 aa, Artificial Sequence
  Description of Artificial Sequence: Synthetic peptide
  Seed: YERMCNILKGKFQTA
YERMFNILKPKFFTA

SEQ ID NO: 134459 - protein, 15 aa, Artificial Sequence
  Description of Artificial Sequence: Synthetic peptide
  Seed: YERMCNILKGKFQTA
YERMFNILKPKFGTA

SEQ ID NO: 134460 - protein, 15 aa, Artificial Sequence
  Description of Artificial Sequence: Synthetic peptide
  Seed: YERMCNILKGKFQTA
YERMFNILKPKFHTA

SEQ ID NO: 134461 - protein, 15 aa, Artificial Sequence
  Description of Artificial Sequence: Synthetic peptide
  Seed: YERMCNILKGKFQTA
YERMFNILKPKFITA

SEQ ID NO: 134462 - protein, 15 aa, Artificial Sequence
  Description of Artificial Sequence: Synthetic peptide
  Seed: YERMCNILKGKFQTA
YERMFNILKPKFKTA

SEQ ID NO: 134463 - protein, 15 aa, Artificial Sequence
  Description of Artificial Sequence: Synthetic peptide
  Seed: YERMCNILKGKFQTA
YERMFNILKPKFLTA

SEQ ID NO: 134464 - protein, 15 aa, Artificial Sequence
  Description of Artificial Sequence: Synthetic peptide
  Seed: YERMCNILKGKFQTA
YERMFNILKPKFMTA

SEQ ID NO: 134465 - protein, 15 aa, Artificial Sequence
  Description of Artificial Sequence: Synthetic peptide
  Seed: YERMCNILKGKFQTA
YERMFNILKPKFNTA

SEQ ID NO: 134466 - protein, 15 aa, Artificial Sequence
  Description of Artificial Sequence: Synthetic peptide
  Seed: YERMCNILKGKFQTA
YERMFNILKPKFPTA

SEQ ID NO: 134467 - protein, 15 aa, Artificial Sequence
  Description of Artificial Sequence: Synthetic peptide
  Seed: YERMCNILKGKFQTA
YERMFNILKPKFQTA

SEQ ID NO: 134468 - protein, 15 aa, Artificial Sequence
  Description of Artificial Sequence: Synthetic peptide
  Seed: YERMCNILKGKFQTA
YERMFNILKPKFRTA

SEQ ID NO: 134469 - protein, 15 aa, Artificial Sequence
  Description of Artificial Sequence: Synthetic peptide
  Seed: YERMCNILKGKFQTA
YERMFNILKPKFSTA

SEQ ID NO: 134470 - protein, 15 aa, Artificial Sequence
  Description of Artificial Sequence: Synthetic peptide
  Seed: YERMCNILKGKFQTA
YERMFNILKPKFTTA

SEQ ID NO: 134471 - protein, 15 aa, Artificial Sequence
  Description of Artificial Sequence: Synthetic peptide
  Seed: YERMCNILKGKFQTA
YERMFNILKPKFVTA

SEQ ID NO: 134472 - protein, 15 aa, Artificial Sequence
  Description of Artificial Sequence: Synthetic peptide
  Seed: YERMCNILKGKFQTA
YERMFNILKPKFWTA

SEQ ID NO: 134473 - protein, 15 aa, Artificial Sequence
  Description of Artificial Sequence: Synthetic peptide
  Seed: YERMCNILKGKFQTA
YERMFNILKPKFYTA

SEQ ID NO: 134474 - protein, 15 aa, Artificial Sequence
  Description of Artificial Sequence: Synthetic peptide
  Seed: YERMCNILKGKFQTA
YERMFNILKQKFATA

SEQ ID NO: 134475 - protein, 15 aa, Artificial Sequence
  Description of Artificial Sequence: Synthetic peptide
  Seed: YERMCNILKGKFQTA
YERMFNILKQKFITA

SEQ ID NO: 134476 - protein, 15 aa, Artificial Sequence
  Description of Artificial Sequence: Synthetic peptide
  Seed: YERMCNILKGKFQTA
YERMFNILKQKFLTA

SEQ ID NO: 134477 - protein, 15 aa, Artificial Sequence
  Description of Artificial Sequence: Synthetic peptide
  Seed: YERMCNILKGKFQTA
YERMFNILKQKFVTA

SEQ ID NO: 134478 - protein, 15 aa, Artificial Sequence
  Description of Artificial Sequence: Synthetic peptide
  Seed: YERMCNILKGKFQTA
YERMFNILKSKFATA

SEQ ID NO: 134479 - protein, 15 aa, Artificial Sequence
  Description of Artificial Sequence: Synthetic peptide
  Seed: YERMCNILKGKFQTA
YERMFNILKSKFCTA

SEQ ID NO: 134480 - protein, 15 aa, Artificial Sequence
  Description of Artificial Sequence: Synthetic peptide
  Seed: YERMCNILKGKFQTA
YERMFNILKSKFDTA

SEQ ID NO: 134481 - protein, 15 aa, Artificial Sequence
  Description of Artificial Sequence: Synthetic peptide
  Seed: YERMCNILKGKFQTA
YERMFNILKSKFETA

SEQ ID NO: 134482 - protein, 15 aa, Artificial Sequence
  Description of Artificial Sequence: Synthetic peptide
  Seed: YERMCNILKGKFQTA
YERMFNILKSKFFTA

SEQ ID NO: 134483 - protein, 15 aa, Artificial Sequence
  Description of Artificial Sequence: Synthetic peptide
  Seed: YERMCNILKGKFQTA
YERMFNILKSKFGTA

SEQ ID NO: 134484 - protein, 15 aa, Artificial Sequence
  Description of Artificial Sequence: Synthetic peptide
  Seed: YERMCNILKGKFQTA
YERMFNILKSKFHTA

SEQ ID NO: 134485 - protein, 15 aa, Artificial Sequence
  Description of Artificial Sequence: Synthetic peptide
  Seed: YERMCNILKGKFQTA
YERMFNILKSKFITA

SEQ ID NO: 134486 - protein, 15 aa, Artificial Sequence
  Description of Artificial Sequence: Synthetic peptide
  Seed: YERMCNILKGKFQTA
YERMFNILKSKFKTA

SEQ ID NO: 134487 - protein, 15 aa, Artificial Sequence
  Description of Artificial Sequence: Synthetic peptide
  Seed: YERMCNILKGKFQTA
YERMFNILKSKFLTA

SEQ ID NO: 134488 - protein, 15 aa, Artificial Sequence
  Description of Artificial Sequence: Synthetic peptide
  Seed: YERMCNILKGKFQTA
YERMFNILKSKFMTA

SEQ ID NO: 134489 - protein, 15 aa, Artificial Sequence
  Description of Artificial Sequence: Synthetic peptide
  Seed: YERMCNILKGKFQTA
YERMFNILKSKFNTA

SEQ ID NO: 134490 - protein, 15 aa, Artificial Sequence
  Description of Artificial Sequence: Synthetic peptide
  Seed: YERMCNILKGKFQTA
YERMFNILKSKFPTA

SEQ ID NO: 134491 - protein, 15 aa, Artificial Sequence
  Description of Artificial Sequence: Synthetic peptide
  Seed: YERMCNILKGKFQTA
YERMFNILKSKFQTA

SEQ ID NO: 134492 - protein, 15 aa, Artificial Sequence
  Description of Artificial Sequence: Synthetic peptide
  Seed: YERMCNILKGKFQTA
YERMFNILKSKFRTA

SEQ ID NO: 134493 - protein, 15 aa, Artificial Sequence
  Description of Artificial Sequence: Synthetic peptide
  Seed: YERMCNILKGKFQTA
YERMFNILKSKFSTA

SEQ ID NO: 134494 - protein, 15 aa, Artificial Sequence
  Description of Artificial Sequence: Synthetic peptide
  Seed: YERMCNILKGKFQTA
YERMFNILKSKFTTA

SEQ ID NO: 134495 - protein, 15 aa, Artificial Sequence
  Description of Artificial Sequence: Synthetic peptide
  Seed: YERMCNILKGKFQTA
YERMFNILKSKFVTA

SEQ ID NO: 134496 - protein, 15 aa, Artificial Sequence
  Description of Artificial Sequence: Synthetic peptide
  Seed: YERMCNILKGKFQTA
YERMFNILKSKFWTA

SEQ ID NO: 134497 - protein, 15 aa, Artificial Sequence
  Description of Artificial Sequence: Synthetic peptide
  Seed: YERMCNILKGKFQTA
YERMFNILKSKFYTA

SEQ ID NO: 134498 - protein, 15 aa, Artificial Sequence
  Description of Artificial Sequence: Synthetic peptide
  Seed: YERMCNILKGKFQTA
YERMFNILKTKFATA

SEQ ID NO: 134499 - protein, 15 aa, Artificial Sequence
  Description of Artificial Sequence: Synthetic peptide
  Seed: YERMCNILKGKFQTA
YERMFNILKTKFCTA

SEQ ID NO: 134500 - protein, 15 aa, Artificial Sequence
  Description of Artificial Sequence: Synthetic peptide
  Seed: YERMCNILKGKFQTA
YERMFNILKTKFFTA

SEQ ID NO: 134501 - protein, 15 aa, Artificial Sequence
  Description of Artificial Sequence: Synthetic peptide
  Seed: YERMCNILKGKFQTA
YERMFNILKTKFGTA

SEQ ID NO: 134502 - protein, 15 aa, Artificial Sequence
  Description of Artificial Sequence: Synthetic peptide
  Seed: YERMCNILKGKFQTA
YERMFNILKTKFHTA

SEQ ID NO: 134503 - protein, 15 aa, Artificial Sequence
  Description of Artificial Sequence: Synthetic peptide
  Seed: YERMCNILKGKFQTA
YERMFNILKTKFITA

SEQ ID NO: 134504 - protein, 15 aa, Artificial Sequence
  Description of Artificial Sequence: Synthetic peptide
  Seed: YERMCNILKGKFQTA
YERMFNILKTKFLTA

SEQ ID NO: 134505 - protein, 15 aa, Artificial Sequence
  Description of Artificial Sequence: Synthetic peptide
  Seed: YERMCNILKGKFQTA
YERMFNILKTKFMTA

SEQ ID NO: 134506 - protein, 15 aa, Artificial Sequence
  Description of Artificial Sequence: Synthetic peptide
  Seed: YERMCNILKGKFQTA
YERMFNILKTKFNTA

SEQ ID NO: 134507 - protein, 15 aa, Artificial Sequence
  Description of Artificial Sequence: Synthetic peptide
  Seed: YERMCNILKGKFQTA
YERMFNILKTKFPTA

SEQ ID NO: 134508 - protein, 15 aa, Artificial Sequence
  Description of Artificial Sequence: Synthetic peptide
  Seed: YERMCNILKGKFQTA
YERMFNILKTKFQTA

SEQ ID NO: 134509 - protein, 15 aa, Artificial Sequence
  Description of Artificial Sequence: Synthetic peptide
  Seed: YERMCNILKGKFQTA
YERMFNILKTKFRTA

SEQ ID NO: 134510 - protein, 15 aa, Artificial Sequence
  Description of Artificial Sequence: Synthetic peptide
  Seed: YERMCNILKGKFQTA
YERMFNILKTKFSTA

SEQ ID NO: 134511 - protein, 15 aa, Artificial Sequence
  Description of Artificial Sequence: Synthetic peptide
  Seed: YERMCNILKGKFQTA
YERMFNILKTKFTTA

SEQ ID NO: 134512 - protein, 15 aa, Artificial Sequence
  Description of Artificial Sequence: Synthetic peptide
  Seed: YERMCNILKGKFQTA
YERMFNILKTKFVTA

SEQ ID NO: 134513 - protein, 15 aa, Artificial Sequence
  Description of Artificial Sequence: Synthetic peptide
  Seed: YERMCNILKGKFQTA
YERMFNILKTKFYTA

SEQ ID NO: 134514 - protein, 15 aa, Artificial Sequence
  Description of Artificial Sequence: Synthetic peptide
  Seed: YERMCNILKGKFQTA
YERMFNILKVKFATA

SEQ ID NO: 134515 - protein, 15 aa, Artificial Sequence
  Description of Artificial Sequence: Synthetic peptide
  Seed: YERMCNILKGKFQTA
YERMFNILKVKFCTA

SEQ ID NO: 134516 - protein, 15 aa, Artificial Sequence
  Description of Artificial Sequence: Synthetic peptide
  Seed: YERMCNILKGKFQTA
YERMFNILKVKFDTA

SEQ ID NO: 134517 - protein, 15 aa, Artificial Sequence
  Description of Artificial Sequence: Synthetic peptide
  Seed: YERMCNILKGKFQTA
YERMFNILKVKFFTA

SEQ ID NO: 134518 - protein, 15 aa, Artificial Sequence
  Description of Artificial Sequence: Synthetic peptide
  Seed: YERMCNILKGKFQTA
YERMFNILKVKFGTA

SEQ ID NO: 134519 - protein, 15 aa, Artificial Sequence
  Description of Artificial Sequence: Synthetic peptide
  Seed: YERMCNILKGKFQTA
YERMFNILKVKFHTA

SEQ ID NO: 134520 - protein, 15 aa, Artificial Sequence
  Description of Artificial Sequence: Synthetic peptide
  Seed: YERMCNILKGKFQTA
YERMFNILKVKFITA

SEQ ID NO: 134521 - protein, 15 aa, Artificial Sequence
  Description of Artificial Sequence: Synthetic peptide
  Seed: YERMCNILKGKFQTA
YERMFNILKVKFLTA

SEQ ID NO: 134522 - protein, 15 aa, Artificial Sequence
  Description of Artificial Sequence: Synthetic peptide
  Seed: YERMCNILKGKFQTA
YERMFNILKVKFMTA

SEQ ID NO: 134523 - protein, 15 aa, Artificial Sequence
  Description of Artificial Sequence: Synthetic peptide
  Seed: YERMCNILKGKFQTA
YERMFNILKVKFNTA

SEQ ID NO: 134524 - protein, 15 aa, Artificial Sequence
  Description of Artificial Sequence: Synthetic peptide
  Seed: YERMCNILKGKFQTA
YERMFNILKVKFPTA

SEQ ID NO: 134525 - protein, 15 aa, Artificial Sequence
  Description of Artificial Sequence: Synthetic peptide
  Seed: YERMCNILKGKFQTA
YERMFNILKVKFQTA

SEQ ID NO: 134526 - protein, 15 aa, Artificial Sequence
  Description of Artificial Sequence: Synthetic peptide
  Seed: YERMCNILKGKFQTA
YERMFNILKVKFSTA

SEQ ID NO: 134527 - protein, 15 aa, Artificial Sequence
  Description of Artificial Sequence: Synthetic peptide
  Seed: YERMCNILKGKFQTA
YERMFNILKVKFTTA

SEQ ID NO: 134528 - protein, 15 aa, Artificial Sequence
  Description of Artificial Sequence: Synthetic peptide
  Seed: YERMCNILKGKFQTA
YERMFNILKVKFVTA

SEQ ID NO: 134529 - protein, 15 aa, Artificial Sequence
  Description of Artificial Sequence: Synthetic peptide
  Seed: YERMCNILKGKFQTA
YERMFNIMKAKFATA

SEQ ID NO: 134530 - protein, 15 aa, Artificial Sequence
  Description of Artificial Sequence: Synthetic peptide
  Seed: YERMCNILKGKFQTA
YERMFNIMKAKFCTA

SEQ ID NO: 134531 - protein, 15 aa, Artificial Sequence
  Description of Artificial Sequence: Synthetic peptide
  Seed: YERMCNILKGKFQTA
YERMFNIMKAKFDTA

SEQ ID NO: 134532 - protein, 15 aa, Artificial Sequence
  Description of Artificial Sequence: Synthetic peptide
  Seed: YERMCNILKGKFQTA
YERMFNIMKAKFETA

SEQ ID NO: 134533 - protein, 15 aa, Artificial Sequence
  Description of Artificial Sequence: Synthetic peptide
  Seed: YERMCNILKGKFQTA
YERMFNIMKAKFFTA

SEQ ID NO: 134534 - protein, 15 aa, Artificial Sequence
  Description of Artificial Sequence: Synthetic peptide
  Seed: YERMCNILKGKFQTA
YERMFNIMKAKFGTA

SEQ ID NO: 134535 - protein, 15 aa, Artificial Sequence
  Description of Artificial Sequence: Synthetic peptide
  Seed: YERMCNILKGKFQTA
YERMFNIMKAKFHTA

SEQ ID NO: 134536 - protein, 15 aa, Artificial Sequence
  Description of Artificial Sequence: Synthetic peptide
  Seed: YERMCNILKGKFQTA
YERMFNIMKAKFITA

SEQ ID NO: 134537 - protein, 15 aa, Artificial Sequence
  Description of Artificial Sequence: Synthetic peptide
  Seed: YERMCNILKGKFQTA
YERMFNIMKAKFKTA

SEQ ID NO: 134538 - protein, 15 aa, Artificial Sequence
  Description of Artificial Sequence: Synthetic peptide
  Seed: YERMCNILKGKFQTA
YERMFNIMKAKFLTA

SEQ ID NO: 134539 - protein, 15 aa, Artificial Sequence
  Description of Artificial Sequence: Synthetic peptide
  Seed: YERMCNILKGKFQTA
YERMFNIMKAKFMTA

SEQ ID NO: 134540 - protein, 15 aa, Artificial Sequence
  Description of Artificial Sequence: Synthetic peptide
  Seed: YERMCNILKGKFQTA
YERMFNIMKAKFNTA

SEQ ID NO: 134541 - protein, 15 aa, Artificial Sequence
  Description of Artificial Sequence: Synthetic peptide
  Seed: YERMCNILKGKFQTA
YERMFNIMKAKFPTA

SEQ ID NO: 134542 - protein, 15 aa, Artificial Sequence
  Description of Artificial Sequence: Synthetic peptide
  Seed: YERMCNILKGKFQTA
YERMFNIMKAKFQTA

SEQ ID NO: 134543 - protein, 15 aa, Artificial Sequence
  Description of Artificial Sequence: Synthetic peptide
  Seed: YERMCNILKGKFQTA
YERMFNIMKAKFRTA

SEQ ID NO: 134544 - protein, 15 aa, Artificial Sequence
  Description of Artificial Sequence: Synthetic peptide
  Seed: YERMCNILKGKFQTA
YERMFNIMKAKFSTA

SEQ ID NO: 134545 - protein, 15 aa, Artificial Sequence
  Description of Artificial Sequence: Synthetic peptide
  Seed: YERMCNILKGKFQTA
YERMFNIMKAKFTTA

SEQ ID NO: 134546 - protein, 15 aa, Artificial Sequence
  Description of Artificial Sequence: Synthetic peptide
  Seed: YERMCNILKGKFQTA
YERMFNIMKAKFVTA

SEQ ID NO: 134547 - protein, 15 aa, Artificial Sequence
  Description of Artificial Sequence: Synthetic peptide
  Seed: YERMCNILKGKFQTA
YERMFNIMKAKFWTA

SEQ ID NO: 134548 - protein, 15 aa, Artificial Sequence
  Description of Artificial Sequence: Synthetic peptide
  Seed: YERMCNILKGKFQTA
YERMFNIMKAKFYTA

SEQ ID NO: 134549 - protein, 15 aa, Artificial Sequence
  Description of Artificial Sequence: Synthetic peptide
  Seed: YERMCNILKGKFQTA
YERMFNIMKCKFATA

SEQ ID NO: 134550 - protein, 15 aa, Artificial Sequence
  Description of Artificial Sequence: Synthetic peptide
  Seed: YERMCNILKGKFQTA
YERMFNIMKCKFITA

SEQ ID NO: 134551 - protein, 15 aa, Artificial Sequence
  Description of Artificial Sequence: Synthetic peptide
  Seed: YERMCNILKGKFQTA
YERMFNIMKCKFLTA

SEQ ID NO: 134552 - protein, 15 aa, Artificial Sequence
  Description of Artificial Sequence: Synthetic peptide
  Seed: YERMCNILKGKFQTA
YERMFNIMKCKFMTA

SEQ ID NO: 134553 - protein, 15 aa, Artificial Sequence
  Description of Artificial Sequence: Synthetic peptide
  Seed: YERMCNILKGKFQTA
YERMFNIMKCKFTTA

SEQ ID NO: 134554 - protein, 15 aa, Artificial Sequence
  Description of Artificial Sequence: Synthetic peptide
  Seed: YERMCNILKGKFQTA
YERMFNIMKCKFVTA

SEQ ID NO: 134555 - protein, 15 aa, Artificial Sequence
  Description of Artificial Sequence: Synthetic peptide
  Seed: YERMCNILKGKFQTA
YERMFNIMKDKFATA

SEQ ID NO: 134556 - protein, 15 aa, Artificial Sequence
  Description of Artificial Sequence: Synthetic peptide
  Seed: YERMCNILKGKFQTA
YERMFNIMKDKFITA

SEQ ID NO: 134557 - protein, 15 aa, Artificial Sequence
  Description of Artificial Sequence: Synthetic peptide
  Seed: YERMCNILKGKFQTA
YERMFNIMKDKFLTA

SEQ ID NO: 134558 - protein, 15 aa, Artificial Sequence
  Description of Artificial Sequence: Synthetic peptide
  Seed: YERMCNILKGKFQTA
YERMFNIMKDKFVTA

SEQ ID NO: 134559 - protein, 15 aa, Artificial Sequence
  Description of Artificial Sequence: Synthetic peptide
  Seed: YERMCNILKGKFQTA
YERMFNIMKEKFATA

SEQ ID NO: 134560 - protein, 15 aa, Artificial Sequence
  Description of Artificial Sequence: Synthetic peptide
  Seed: YERMCNILKGKFQTA
YERMFNIMKEKFITA

SEQ ID NO: 134561 - protein, 15 aa, Artificial Sequence
  Description of Artificial Sequence: Synthetic peptide
  Seed: YERMCNILKGKFQTA
YERMFNIMKEKFLTA

SEQ ID NO: 134562 - protein, 15 aa, Artificial Sequence
  Description of Artificial Sequence: Synthetic peptide
  Seed: YERMCNILKGKFQTA
YERMFNIMKEKFVTA

SEQ ID NO: 134563 - protein, 15 aa, Artificial Sequence
  Description of Artificial Sequence: Synthetic peptide
  Seed: YERMCNILKGKFQTA
YERMFNIMKGKFATA

SEQ ID NO: 134564 - protein, 15 aa, Artificial Sequence
  Description of Artificial Sequence: Synthetic peptide
  Seed: YERMCNILKGKFQTA
YERMFNIMKGKFCTA

SEQ ID NO: 134565 - protein, 15 aa, Artificial Sequence
  Description of Artificial Sequence: Synthetic peptide
  Seed: YERMCNILKGKFQTA
YERMFNIMKGKFDTA

SEQ ID NO: 134566 - protein, 15 aa, Artificial Sequence
  Description of Artificial Sequence: Synthetic peptide
  Seed: YERMCNILKGKFQTA
YERMFNIMKGKFETA

SEQ ID NO: 134567 - protein, 15 aa, Artificial Sequence
  Description of Artificial Sequence: Synthetic peptide
  Seed: YERMCNILKGKFQTA
YERMFNIMKGKFFTA

SEQ ID NO: 134568 - protein, 15 aa, Artificial Sequence
  Description of Artificial Sequence: Synthetic peptide
  Seed: YERMCNILKGKFQTA
YERMFNIMKGKFGTA

SEQ ID NO: 134569 - protein, 15 aa, Artificial Sequence
  Description of Artificial Sequence: Synthetic peptide
  Seed: YERMCNILKGKFQTA
YERMFNIMKGKFHTA

SEQ ID NO: 134570 - protein, 15 aa, Artificial Sequence
  Description of Artificial Sequence: Synthetic peptide
  Seed: YERMCNILKGKFQTA
YERMFNIMKGKFITA

SEQ ID NO: 134571 - protein, 15 aa, Artificial Sequence
  Description of Artificial Sequence: Synthetic peptide
  Seed: YERMCNILKGKFQTA
YERMFNIMKGKFKTA

SEQ ID NO: 134572 - protein, 15 aa, Artificial Sequence
  Description of Artificial Sequence: Synthetic peptide
  Seed: YERMCNILKGKFQTA
YERMFNIMKGKFLTA

SEQ ID NO: 134573 - protein, 15 aa, Artificial Sequence
  Description of Artificial Sequence: Synthetic peptide
  Seed: YERMCNILKGKFQTA
YERMFNIMKGKFMTA

SEQ ID NO: 134574 - protein, 15 aa, Artificial Sequence
  Description of Artificial Sequence: Synthetic peptide
  Seed: YERMCNILKGKFQTA
YERMFNIMKGKFNTA

SEQ ID NO: 134575 - protein, 15 aa, Artificial Sequence
  Description of Artificial Sequence: Synthetic peptide
  Seed: YERMCNILKGKFQTA
YERMFNIMKGKFPTA

SEQ ID NO: 134576 - protein, 15 aa, Artificial Sequence
  Description of Artificial Sequence: Synthetic peptide
  Seed: YERMCNILKGKFQTA
YERMFNIMKGKFQTA

SEQ ID NO: 134577 - protein, 15 aa, Artificial Sequence
  Description of Artificial Sequence: Synthetic peptide
  Seed: YERMCNILKGKFQTA
YERMFNIMKGKFRTA

SEQ ID NO: 134578 - protein, 15 aa, Artificial Sequence
  Description of Artificial Sequence: Synthetic peptide
  Seed: YERMCNILKGKFQTA
YERMFNIMKGKFSTA

SEQ ID NO: 134579 - protein, 15 aa, Artificial Sequence
  Description of Artificial Sequence: Synthetic peptide
  Seed: YERMCNILKGKFQTA
YERMFNIMKGKFTTA

SEQ ID NO: 134580 - protein, 15 aa, Artificial Sequence
  Description of Artificial Sequence: Synthetic peptide
  Seed: YERMCNILKGKFQTA
YERMFNIMKGKFVTA

SEQ ID NO: 134581 - protein, 15 aa, Artificial Sequence
  Description of Artificial Sequence: Synthetic peptide
  Seed: YERMCNILKGKFQTA
YERMFNIMKGKFWTA

SEQ ID NO: 134582 - protein, 15 aa, Artificial Sequence
  Description of Artificial Sequence: Synthetic peptide
  Seed: YERMCNILKGKFQTA
YERMFNIMKGKFYTA

SEQ ID NO: 134583 - protein, 15 aa, Artificial Sequence
  Description of Artificial Sequence: Synthetic peptide
  Seed: YERMCNILKGKFQTA
YERMFNIMKHKFATA

SEQ ID NO: 134584 - protein, 15 aa, Artificial Sequence
  Description of Artificial Sequence: Synthetic peptide
  Seed: YERMCNILKGKFQTA
YERMFNIMKHKFITA

SEQ ID NO: 134585 - protein, 15 aa, Artificial Sequence
  Description of Artificial Sequence: Synthetic peptide
  Seed: YERMCNILKGKFQTA
YERMFNIMKHKFLTA

SEQ ID NO: 134586 - protein, 15 aa, Artificial Sequence
  Description of Artificial Sequence: Synthetic peptide
  Seed: YERMCNILKGKFQTA
YERMFNIMKHKFMTA

SEQ ID NO: 134587 - protein, 15 aa, Artificial Sequence
  Description of Artificial Sequence: Synthetic peptide
  Seed: YERMCNILKGKFQTA
YERMFNIMKHKFTTA

SEQ ID NO: 134588 - protein, 15 aa, Artificial Sequence
  Description of Artificial Sequence: Synthetic peptide
  Seed: YERMCNILKGKFQTA
YERMFNIMKHKFVTA

SEQ ID NO: 134589 - protein, 15 aa, Artificial Sequence
  Description of Artificial Sequence: Synthetic peptide
  Seed: YERMCNILKGKFQTA
YERMFNIMKIKFATA

SEQ ID NO: 134590 - protein, 15 aa, Artificial Sequence
  Description of Artificial Sequence: Synthetic peptide
  Seed: YERMCNILKGKFQTA
YERMFNIMKIKFGTA

SEQ ID NO: 134591 - protein, 15 aa, Artificial Sequence
  Description of Artificial Sequence: Synthetic peptide
  Seed: YERMCNILKGKFQTA
YERMFNIMKIKFHTA

SEQ ID NO: 134592 - protein, 15 aa, Artificial Sequence
  Description of Artificial Sequence: Synthetic peptide
  Seed: YERMCNILKGKFQTA
YERMFNIMKIKFITA

SEQ ID NO: 134593 - protein, 15 aa, Artificial Sequence
  Description of Artificial Sequence: Synthetic peptide
  Seed: YERMCNILKGKFQTA
YERMFNIMKIKFLTA

SEQ ID NO: 134594 - protein, 15 aa, Artificial Sequence
  Description of Artificial Sequence: Synthetic peptide
  Seed: YERMCNILKGKFQTA
YERMFNIMKIKFMTA

SEQ ID NO: 134595 - protein, 15 aa, Artificial Sequence
  Description of Artificial Sequence: Synthetic peptide
  Seed: YERMCNILKGKFQTA
YERMFNIMKIKFNTA

SEQ ID NO: 134596 - protein, 15 aa, Artificial Sequence
  Description of Artificial Sequence: Synthetic peptide
  Seed: YERMCNILKGKFQTA
YERMFNIMKIKFQTA

SEQ ID NO: 134597 - protein, 15 aa, Artificial Sequence
  Description of Artificial Sequence: Synthetic peptide
  Seed: YERMCNILKGKFQTA
YERMFNIMKIKFSTA

SEQ ID NO: 134598 - protein, 15 aa, Artificial Sequence
  Description of Artificial Sequence: Synthetic peptide
  Seed: YERMCNILKGKFQTA
YERMFNIMKIKFTTA

SEQ ID NO: 134599 - protein, 15 aa, Artificial Sequence
  Description of Artificial Sequence: Synthetic peptide
  Seed: YERMCNILKGKFQTA
YERMFNIMKIKFVTA

SEQ ID NO: 134600 - protein, 15 aa, Artificial Sequence
  Description of Artificial Sequence: Synthetic peptide
  Seed: YERMCNILKGKFQTA
YERMFNIMKLKFATA

SEQ ID NO: 134601 - protein, 15 aa, Artificial Sequence
  Description of Artificial Sequence: Synthetic peptide
  Seed: YERMCNILKGKFQTA
YERMFNIMKLKFITA

SEQ ID NO: 134602 - protein, 15 aa, Artificial Sequence
  Description of Artificial Sequence: Synthetic peptide
  Seed: YERMCNILKGKFQTA
YERMFNIMKLKFLTA

SEQ ID NO: 134603 - protein, 15 aa, Artificial Sequence
  Description of Artificial Sequence: Synthetic peptide
  Seed: YERMCNILKGKFQTA
YERMFNIMKLKFMTA

SEQ ID NO: 134604 - protein, 15 aa, Artificial Sequence
  Description of Artificial Sequence: Synthetic peptide
  Seed: YERMCNILKGKFQTA
YERMFNIMKLKFNTA

SEQ ID NO: 134605 - protein, 15 aa, Artificial Sequence
  Description of Artificial Sequence: Synthetic peptide
  Seed: YERMCNILKGKFQTA
YERMFNIMKLKFSTA

SEQ ID NO: 134606 - protein, 15 aa, Artificial Sequence
  Description of Artificial Sequence: Synthetic peptide
  Seed: YERMCNILKGKFQTA
YERMFNIMKLKFTTA

SEQ ID NO: 134607 - protein, 15 aa, Artificial Sequence
  Description of Artificial Sequence: Synthetic peptide
  Seed: YERMCNILKGKFQTA
YERMFNIMKLKFVTA

SEQ ID NO: 134608 - protein, 15 aa, Artificial Sequence
  Description of Artificial Sequence: Synthetic peptide
  Seed: YERMCNILKGKFQTA
YERMFNIMKMKFATA

SEQ ID NO: 134609 - protein, 15 aa, Artificial Sequence
  Description of Artificial Sequence: Synthetic peptide
  Seed: YERMCNILKGKFQTA
YERMFNIMKMKFITA

SEQ ID NO: 134610 - protein, 15 aa, Artificial Sequence
  Description of Artificial Sequence: Synthetic peptide
  Seed: YERMCNILKGKFQTA
YERMFNIMKMKFLTA

SEQ ID NO: 134611 - protein, 15 aa, Artificial Sequence
  Description of Artificial Sequence: Synthetic peptide
  Seed: YERMCNILKGKFQTA
YERMFNIMKMKFMTA

SEQ ID NO: 134612 - protein, 15 aa, Artificial Sequence
  Description of Artificial Sequence: Synthetic peptide
  Seed: YERMCNILKGKFQTA
YERMFNIMKMKFNTA

SEQ ID NO: 134613 - protein, 15 aa, Artificial Sequence
  Description of Artificial Sequence: Synthetic peptide
  Seed: YERMCNILKGKFQTA
YERMFNIMKMKFSTA

SEQ ID NO: 134614 - protein, 15 aa, Artificial Sequence
  Description of Artificial Sequence: Synthetic peptide
  Seed: YERMCNILKGKFQTA
YERMFNIMKMKFTTA

SEQ ID NO: 134615 - protein, 15 aa, Artificial Sequence
  Description of Artificial Sequence: Synthetic peptide
  Seed: YERMCNILKGKFQTA
YERMFNIMKMKFVTA

SEQ ID NO: 134616 - protein, 15 aa, Artificial Sequence
  Description of Artificial Sequence: Synthetic peptide
  Seed: YERMCNILKGKFQTA
YERMFNIMKNKFATA

SEQ ID NO: 134617 - protein, 15 aa, Artificial Sequence
  Description of Artificial Sequence: Synthetic peptide
  Seed: YERMCNILKGKFQTA
YERMFNIMKNKFCTA

SEQ ID NO: 134618 - protein, 15 aa, Artificial Sequence
  Description of Artificial Sequence: Synthetic peptide
  Seed: YERMCNILKGKFQTA
YERMFNIMKNKFFTA

SEQ ID NO: 134619 - protein, 15 aa, Artificial Sequence
  Description of Artificial Sequence: Synthetic peptide
  Seed: YERMCNILKGKFQTA
YERMFNIMKNKFGTA

SEQ ID NO: 134620 - protein, 15 aa, Artificial Sequence
  Description of Artificial Sequence: Synthetic peptide
  Seed: YERMCNILKGKFQTA
YERMFNIMKNKFHTA

SEQ ID NO: 134621 - protein, 15 aa, Artificial Sequence
  Description of Artificial Sequence: Synthetic peptide
  Seed: YERMCNILKGKFQTA
YERMFNIMKNKFITA

SEQ ID NO: 134622 - protein, 15 aa, Artificial Sequence
  Description of Artificial Sequence: Synthetic peptide
  Seed: YERMCNILKGKFQTA
YERMFNIMKNKFLTA

SEQ ID NO: 134623 - protein, 15 aa, Artificial Sequence
  Description of Artificial Sequence: Synthetic peptide
  Seed: YERMCNILKGKFQTA
YERMFNIMKNKFMTA

SEQ ID NO: 134624 - protein, 15 aa, Artificial Sequence
  Description of Artificial Sequence: Synthetic peptide
  Seed: YERMCNILKGKFQTA
YERMFNIMKNKFNTA

SEQ ID NO: 134625 - protein, 15 aa, Artificial Sequence
  Description of Artificial Sequence: Synthetic peptide
  Seed: YERMCNILKGKFQTA
YERMFNIMKNKFPTA

SEQ ID NO: 134626 - protein, 15 aa, Artificial Sequence
  Description of Artificial Sequence: Synthetic peptide
  Seed: YERMCNILKGKFQTA
YERMFNIMKNKFQTA

SEQ ID NO: 134627 - protein, 15 aa, Artificial Sequence
  Description of Artificial Sequence: Synthetic peptide
  Seed: YERMCNILKGKFQTA
YERMFNIMKNKFSTA

SEQ ID NO: 134628 - protein, 15 aa, Artificial Sequence
  Description of Artificial Sequence: Synthetic peptide
  Seed: YERMCNILKGKFQTA
YERMFNIMKNKFTTA

SEQ ID NO: 134629 - protein, 15 aa, Artificial Sequence
  Description of Artificial Sequence: Synthetic peptide
  Seed: YERMCNILKGKFQTA
YERMFNIMKNKFVTA

SEQ ID NO: 134630 - protein, 15 aa, Artificial Sequence
  Description of Artificial Sequence: Synthetic peptide
  Seed: YERMCNILKGKFQTA
YERMFNIMKNKFWTA

SEQ ID NO: 134631 - protein, 15 aa, Artificial Sequence
  Description of Artificial Sequence: Synthetic peptide
  Seed: YERMCNILKGKFQTA
YERMFNIMKNKFYTA

SEQ ID NO: 134632 - protein, 15 aa, Artificial Sequence
  Description of Artificial Sequence: Synthetic peptide
  Seed: YERMCNILKGKFQTA
YERMFNIMKPKFATA

SEQ ID NO: 134633 - protein, 15 aa, Artificial Sequence
  Description of Artificial Sequence: Synthetic peptide
  Seed: YERMCNILKGKFQTA
YERMFNIMKPKFCTA

SEQ ID NO: 134634 - protein, 15 aa, Artificial Sequence
  Description of Artificial Sequence: Synthetic peptide
  Seed: YERMCNILKGKFQTA
YERMFNIMKPKFDTA

SEQ ID NO: 134635 - protein, 15 aa, Artificial Sequence
  Description of Artificial Sequence: Synthetic peptide
  Seed: YERMCNILKGKFQTA
YERMFNIMKPKFETA

SEQ ID NO: 134636 - protein, 15 aa, Artificial Sequence
  Description of Artificial Sequence: Synthetic peptide
  Seed: YERMCNILKGKFQTA
YERMFNIMKPKFFTA

SEQ ID NO: 134637 - protein, 15 aa, Artificial Sequence
  Description of Artificial Sequence: Synthetic peptide
  Seed: YERMCNILKGKFQTA
YERMFNIMKPKFGTA

SEQ ID NO: 134638 - protein, 15 aa, Artificial Sequence
  Description of Artificial Sequence: Synthetic peptide
  Seed: YERMCNILKGKFQTA
YERMFNIMKPKFHTA

SEQ ID NO: 134639 - protein, 15 aa, Artificial Sequence
  Description of Artificial Sequence: Synthetic peptide
  Seed: YERMCNILKGKFQTA
YERMFNIMKPKFITA

SEQ ID NO: 134640 - protein, 15 aa, Artificial Sequence
  Description of Artificial Sequence: Synthetic peptide
  Seed: YERMCNILKGKFQTA
YERMFNIMKPKFKTA

SEQ ID NO: 134641 - protein, 15 aa, Artificial Sequence
  Description of Artificial Sequence: Synthetic peptide
  Seed: YERMCNILKGKFQTA
YERMFNIMKPKFLTA

SEQ ID NO: 134642 - protein, 15 aa, Artificial Sequence
  Description of Artificial Sequence: Synthetic peptide
  Seed: YERMCNILKGKFQTA
YERMFNIMKPKFMTA

SEQ ID NO: 134643 - protein, 15 aa, Artificial Sequence
  Description of Artificial Sequence: Synthetic peptide
  Seed: YERMCNILKGKFQTA
YERMFNIMKPKFNTA

SEQ ID NO: 134644 - protein, 15 aa, Artificial Sequence
  Description of Artificial Sequence: Synthetic peptide
  Seed: YERMCNILKGKFQTA
YERMFNIMKPKFPTA

SEQ ID NO: 134645 - protein, 15 aa, Artificial Sequence
  Description of Artificial Sequence: Synthetic peptide
  Seed: YERMCNILKGKFQTA
YERMFNIMKPKFQTA

SEQ ID NO: 134646 - protein, 15 aa, Artificial Sequence
  Description of Artificial Sequence: Synthetic peptide
  Seed: YERMCNILKGKFQTA
YERMFNIMKPKFRTA

SEQ ID NO: 134647 - protein, 15 aa, Artificial Sequence
  Description of Artificial Sequence: Synthetic peptide
  Seed: YERMCNILKGKFQTA
YERMFNIMKPKFSTA

SEQ ID NO: 134648 - protein, 15 aa, Artificial Sequence
  Description of Artificial Sequence: Synthetic peptide
  Seed: YERMCNILKGKFQTA
YERMFNIMKPKFTTA

SEQ ID NO: 134649 - protein, 15 aa, Artificial Sequence
  Description of Artificial Sequence: Synthetic peptide
  Seed: YERMCNILKGKFQTA
YERMFNIMKPKFVTA

SEQ ID NO: 134650 - protein, 15 aa, Artificial Sequence
  Description of Artificial Sequence: Synthetic peptide
  Seed: YERMCNILKGKFQTA
YERMFNIMKPKFWTA

SEQ ID NO: 134651 - protein, 15 aa, Artificial Sequence
  Description of Artificial Sequence: Synthetic peptide
  Seed: YERMCNILKGKFQTA
YERMFNIMKPKFYTA

SEQ ID NO: 134652 - protein, 15 aa, Artificial Sequence
  Description of Artificial Sequence: Synthetic peptide
  Seed: YERMCNILKGKFQTA
YERMFNIMKQKFATA

SEQ ID NO: 134653 - protein, 15 aa, Artificial Sequence
  Description of Artificial Sequence: Synthetic peptide
  Seed: YERMCNILKGKFQTA
YERMFNIMKQKFITA

SEQ ID NO: 134654 - protein, 15 aa, Artificial Sequence
  Description of Artificial Sequence: Synthetic peptide
  Seed: YERMCNILKGKFQTA
YERMFNIMKQKFLTA

SEQ ID NO: 134655 - protein, 15 aa, Artificial Sequence
  Description of Artificial Sequence: Synthetic peptide
  Seed: YERMCNILKGKFQTA
YERMFNIMKQKFMTA

SEQ ID NO: 134656 - protein, 15 aa, Artificial Sequence
  Description of Artificial Sequence: Synthetic peptide
  Seed: YERMCNILKGKFQTA
YERMFNIMKQKFTTA

SEQ ID NO: 134657 - protein, 15 aa, Artificial Sequence
  Description of Artificial Sequence: Synthetic peptide
  Seed: YERMCNILKGKFQTA
YERMFNIMKQKFVTA

SEQ ID NO: 134658 - protein, 15 aa, Artificial Sequence
  Description of Artificial Sequence: Synthetic peptide
  Seed: YERMCNILKGKFQTA
YERMFNIMKSKFATA

SEQ ID NO: 134659 - protein, 15 aa, Artificial Sequence
  Description of Artificial Sequence: Synthetic peptide
  Seed: YERMCNILKGKFQTA
YERMFNIMKSKFCTA

SEQ ID NO: 134660 - protein, 15 aa, Artificial Sequence
  Description of Artificial Sequence: Synthetic peptide
  Seed: YERMCNILKGKFQTA
YERMFNIMKSKFDTA

SEQ ID NO: 134661 - protein, 15 aa, Artificial Sequence
  Description of Artificial Sequence: Synthetic peptide
  Seed: YERMCNILKGKFQTA
YERMFNIMKSKFETA

SEQ ID NO: 134662 - protein, 15 aa, Artificial Sequence
  Description of Artificial Sequence: Synthetic peptide
  Seed: YERMCNILKGKFQTA
YERMFNIMKSKFFTA

SEQ ID NO: 134663 - protein, 15 aa, Artificial Sequence
  Description of Artificial Sequence: Synthetic peptide
  Seed: YERMCNILKGKFQTA
YERMFNIMKSKFGTA

SEQ ID NO: 134664 - protein, 15 aa, Artificial Sequence
  Description of Artificial Sequence: Synthetic peptide
  Seed: YERMCNILKGKFQTA
YERMFNIMKSKFHTA

SEQ ID NO: 134665 - protein, 15 aa, Artificial Sequence
  Description of Artificial Sequence: Synthetic peptide
  Seed: YERMCNILKGKFQTA
YERMFNIMKSKFITA

SEQ ID NO: 134666 - protein, 15 aa, Artificial Sequence
  Description of Artificial Sequence: Synthetic peptide
  Seed: YERMCNILKGKFQTA
YERMFNIMKSKFKTA

SEQ ID NO: 134667 - protein, 15 aa, Artificial Sequence
  Description of Artificial Sequence: Synthetic peptide
  Seed: YERMCNILKGKFQTA
YERMFNIMKSKFLTA

SEQ ID NO: 134668 - protein, 15 aa, Artificial Sequence
  Description of Artificial Sequence: Synthetic peptide
  Seed: YERMCNILKGKFQTA
YERMFNIMKSKFMTA

SEQ ID NO: 134669 - protein, 15 aa, Artificial Sequence
  Description of Artificial Sequence: Synthetic peptide
  Seed: YERMCNILKGKFQTA
YERMFNIMKSKFNTA

SEQ ID NO: 134670 - protein, 15 aa, Artificial Sequence
  Description of Artificial Sequence: Synthetic peptide
  Seed: YERMCNILKGKFQTA
YERMFNIMKSKFPTA

SEQ ID NO: 134671 - protein, 15 aa, Artificial Sequence
  Description of Artificial Sequence: Synthetic peptide
  Seed: YERMCNILKGKFQTA
YERMFNIMKSKFQTA

SEQ ID NO: 134672 - protein, 15 aa, Artificial Sequence
  Description of Artificial Sequence: Synthetic peptide
  Seed: YERMCNILKGKFQTA
YERMFNIMKSKFRTA

SEQ ID NO: 134673 - protein, 15 aa, Artificial Sequence
  Description of Artificial Sequence: Synthetic peptide
  Seed: YERMCNILKGKFQTA
YERMFNIMKSKFSTA

SEQ ID NO: 134674 - protein, 15 aa, Artificial Sequence
  Description of Artificial Sequence: Synthetic peptide
  Seed: YERMCNILKGKFQTA
YERMFNIMKSKFTTA

SEQ ID NO: 134675 - protein, 15 aa, Artificial Sequence
  Description of Artificial Sequence: Synthetic peptide
  Seed: YERMCNILKGKFQTA
YERMFNIMKSKFVTA

SEQ ID NO: 134676 - protein, 15 aa, Artificial Sequence
  Description of Artificial Sequence: Synthetic peptide
  Seed: YERMCNILKGKFQTA
YERMFNIMKSKFWTA

SEQ ID NO: 134677 - protein, 15 aa, Artificial Sequence
  Description of Artificial Sequence: Synthetic peptide
  Seed: YERMCNILKGKFQTA
YERMFNIMKSKFYTA

SEQ ID NO: 134678 - protein, 15 aa, Artificial Sequence
  Description of Artificial Sequence: Synthetic peptide
  Seed: YERMCNILKGKFQTA
YERMFNIMKTKFATA

SEQ ID NO: 134679 - protein, 15 aa, Artificial Sequence
  Description of Artificial Sequence: Synthetic peptide
  Seed: YERMCNILKGKFQTA
YERMFNIMKTKFCTA

SEQ ID NO: 134680 - protein, 15 aa, Artificial Sequence
  Description of Artificial Sequence: Synthetic peptide
  Seed: YERMCNILKGKFQTA
YERMFNIMKTKFDTA

SEQ ID NO: 134681 - protein, 15 aa, Artificial Sequence
  Description of Artificial Sequence: Synthetic peptide
  Seed: YERMCNILKGKFQTA
YERMFNIMKTKFFTA

SEQ ID NO: 134682 - protein, 15 aa, Artificial Sequence
  Description of Artificial Sequence: Synthetic peptide
  Seed: YERMCNILKGKFQTA
YERMFNIMKTKFGTA

SEQ ID NO: 134683 - protein, 15 aa, Artificial Sequence
  Description of Artificial Sequence: Synthetic peptide
  Seed: YERMCNILKGKFQTA
YERMFNIMKTKFHTA

SEQ ID NO: 134684 - protein, 15 aa, Artificial Sequence
  Description of Artificial Sequence: Synthetic peptide
  Seed: YERMCNILKGKFQTA
YERMFNIMKTKFITA

SEQ ID NO: 134685 - protein, 15 aa, Artificial Sequence
  Description of Artificial Sequence: Synthetic peptide
  Seed: YERMCNILKGKFQTA
YERMFNIMKTKFLTA

SEQ ID NO: 134686 - protein, 15 aa, Artificial Sequence
  Description of Artificial Sequence: Synthetic peptide
  Seed: YERMCNILKGKFQTA
YERMFNIMKTKFMTA

SEQ ID NO: 134687 - protein, 15 aa, Artificial Sequence
  Description of Artificial Sequence: Synthetic peptide
  Seed: YERMCNILKGKFQTA
YERMFNIMKTKFNTA

SEQ ID NO: 134688 - protein, 15 aa, Artificial Sequence
  Description of Artificial Sequence: Synthetic peptide
  Seed: YERMCNILKGKFQTA
YERMFNIMKTKFPTA

SEQ ID NO: 134689 - protein, 15 aa, Artificial Sequence
  Description of Artificial Sequence: Synthetic peptide
  Seed: YERMCNILKGKFQTA
YERMFNIMKTKFQTA

SEQ ID NO: 134690 - protein, 15 aa, Artificial Sequence
  Description of Artificial Sequence: Synthetic peptide
  Seed: YERMCNILKGKFQTA
YERMFNIMKTKFRTA

SEQ ID NO: 134691 - protein, 15 aa, Artificial Sequence
  Description of Artificial Sequence: Synthetic peptide
  Seed: YERMCNILKGKFQTA
YERMFNIMKTKFSTA

SEQ ID NO: 134692 - protein, 15 aa, Artificial Sequence
  Description of Artificial Sequence: Synthetic peptide
  Seed: YERMCNILKGKFQTA
YERMFNIMKTKFTTA

SEQ ID NO: 134693 - protein, 15 aa, Artificial Sequence
  Description of Artificial Sequence: Synthetic peptide
  Seed: YERMCNILKGKFQTA
YERMFNIMKTKFVTA

SEQ ID NO: 134694 - protein, 15 aa, Artificial Sequence
  Description of Artificial Sequence: Synthetic peptide
  Seed: YERMCNILKGKFQTA
YERMFNIMKTKFWTA

SEQ ID NO: 134695 - protein, 15 aa, Artificial Sequence
  Description of Artificial Sequence: Synthetic peptide
  Seed: YERMCNILKGKFQTA
YERMFNIMKTKFYTA

SEQ ID NO: 134696 - protein, 15 aa, Artificial Sequence
  Description of Artificial Sequence: Synthetic peptide
  Seed: YERMCNILKGKFQTA
YERMFNIMKVKFATA

SEQ ID NO: 134697 - protein, 15 aa, Artificial Sequence
  Description of Artificial Sequence: Synthetic peptide
  Seed: YERMCNILKGKFQTA
YERMFNIMKVKFCTA

SEQ ID NO: 134698 - protein, 15 aa, Artificial Sequence
  Description of Artificial Sequence: Synthetic peptide
  Seed: YERMCNILKGKFQTA
YERMFNIMKVKFDTA

SEQ ID NO: 134699 - protein, 15 aa, Artificial Sequence
  Description of Artificial Sequence: Synthetic peptide
  Seed: YERMCNILKGKFQTA
YERMFNIMKVKFETA

SEQ ID NO: 134700 - protein, 15 aa, Artificial Sequence
  Description of Artificial Sequence: Synthetic peptide
  Seed: YERMCNILKGKFQTA
YERMFNIMKVKFFTA

SEQ ID NO: 134701 - protein, 15 aa, Artificial Sequence
  Description of Artificial Sequence: Synthetic peptide
  Seed: YERMCNILKGKFQTA
YERMFNIMKVKFGTA

SEQ ID NO: 134702 - protein, 15 aa, Artificial Sequence
  Description of Artificial Sequence: Synthetic peptide
  Seed: YERMCNILKGKFQTA
YERMFNIMKVKFHTA

SEQ ID NO: 134703 - protein, 15 aa, Artificial Sequence
  Description of Artificial Sequence: Synthetic peptide
  Seed: YERMCNILKGKFQTA
YERMFNIMKVKFITA

SEQ ID NO: 134704 - protein, 15 aa, Artificial Sequence
  Description of Artificial Sequence: Synthetic peptide
  Seed: YERMCNILKGKFQTA
YERMFNIMKVKFLTA

SEQ ID NO: 134705 - protein, 15 aa, Artificial Sequence
  Description of Artificial Sequence: Synthetic peptide
  Seed: YERMCNILKGKFQTA
YERMFNIMKVKFMTA

SEQ ID NO: 134706 - protein, 15 aa, Artificial Sequence
  Description of Artificial Sequence: Synthetic peptide
  Seed: YERMCNILKGKFQTA
YERMFNIMKVKFNTA

SEQ ID NO: 134707 - protein, 15 aa, Artificial Sequence
  Description of Artificial Sequence: Synthetic peptide
  Seed: YERMCNILKGKFQTA
YERMFNIMKVKFPTA

SEQ ID NO: 134708 - protein, 15 aa, Artificial Sequence
  Description of Artificial Sequence: Synthetic peptide
  Seed: YERMCNILKGKFQTA
YERMFNIMKVKFQTA

SEQ ID NO: 134709 - protein, 15 aa, Artificial Sequence
  Description of Artificial Sequence: Synthetic peptide
  Seed: YERMCNILKGKFQTA
YERMFNIMKVKFSTA

SEQ ID NO: 134710 - protein, 15 aa, Artificial Sequence
  Description of Artificial Sequence: Synthetic peptide
  Seed: YERMCNILKGKFQTA
YERMFNIMKVKFTTA

SEQ ID NO: 134711 - protein, 15 aa, Artificial Sequence
  Description of Artificial Sequence: Synthetic peptide
  Seed: YERMCNILKGKFQTA
YERMFNIMKVKFVTA

SEQ ID NO: 134712 - protein, 15 aa, Artificial Sequence
  Description of Artificial Sequence: Synthetic peptide
  Seed: YERMCNILKGKFQTA
YERMFNIMKWKFVTA

SEQ ID NO: 134713 - protein, 15 aa, Artificial Sequence
  Description of Artificial Sequence: Synthetic peptide
  Seed: YERMCNILKGKFQTA
YERMFNINKAKFATA

SEQ ID NO: 134714 - protein, 15 aa, Artificial Sequence
  Description of Artificial Sequence: Synthetic peptide
  Seed: YERMCNILKGKFQTA
YERMFNINKAKFITA

SEQ ID NO: 134715 - protein, 15 aa, Artificial Sequence
  Description of Artificial Sequence: Synthetic peptide
  Seed: YERMCNILKGKFQTA
YERMFNINKAKFLTA

SEQ ID NO: 134716 - protein, 15 aa, Artificial Sequence
  Description of Artificial Sequence: Synthetic peptide
  Seed: YERMCNILKGKFQTA
YERMFNINKAKFMTA

SEQ ID NO: 134717 - protein, 15 aa, Artificial Sequence
  Description of Artificial Sequence: Synthetic peptide
  Seed: YERMCNILKGKFQTA
YERMFNINKAKFSTA

SEQ ID NO: 134718 - protein, 15 aa, Artificial Sequence
  Description of Artificial Sequence: Synthetic peptide
  Seed: YERMCNILKGKFQTA
YERMFNINKAKFTTA

SEQ ID NO: 134719 - protein, 15 aa, Artificial Sequence
  Description of Artificial Sequence: Synthetic peptide
  Seed: YERMCNILKGKFQTA
YERMFNINKAKFVTA

SEQ ID NO: 134720 - protein, 15 aa, Artificial Sequence
  Description of Artificial Sequence: Synthetic peptide
  Seed: YERMCNILKGKFQTA
YERMFNINKGKFATA

SEQ ID NO: 134721 - protein, 15 aa, Artificial Sequence
  Description of Artificial Sequence: Synthetic peptide
  Seed: YERMCNILKGKFQTA
YERMFNINKGKFITA

SEQ ID NO: 134722 - protein, 15 aa, Artificial Sequence
  Description of Artificial Sequence: Synthetic peptide
  Seed: YERMCNILKGKFQTA
YERMFNINKGKFLTA

SEQ ID NO: 134723 - protein, 15 aa, Artificial Sequence
  Description of Artificial Sequence: Synthetic peptide
  Seed: YERMCNILKGKFQTA
YERMFNINKGKFVTA

SEQ ID NO: 134724 - protein, 15 aa, Artificial Sequence
  Description of Artificial Sequence: Synthetic peptide
  Seed: YERMCNILKGKFQTA
YERMFNINKNKFLTA

SEQ ID NO: 134725 - protein, 15 aa, Artificial Sequence
  Description of Artificial Sequence: Synthetic peptide
  Seed: YERMCNILKGKFQTA
YERMFNINKPKFITA

SEQ ID NO: 134726 - protein, 15 aa, Artificial Sequence
  Description of Artificial Sequence: Synthetic peptide
  Seed: YERMCNILKGKFQTA
YERMFNINKPKFLTA

SEQ ID NO: 134727 - protein, 15 aa, Artificial Sequence
  Description of Artificial Sequence: Synthetic peptide
  Seed: YERMCNILKGKFQTA
YERMFNINKPKFVTA

SEQ ID NO: 134728 - protein, 15 aa, Artificial Sequence
  Description of Artificial Sequence: Synthetic peptide
  Seed: YERMCNILKGKFQTA
YERMFNINKSKFATA

SEQ ID NO: 134729 - protein, 15 aa, Artificial Sequence
  Description of Artificial Sequence: Synthetic peptide
  Seed: YERMCNILKGKFQTA
YERMFNINKSKFITA

SEQ ID NO: 134730 - protein, 15 aa, Artificial Sequence
  Description of Artificial Sequence: Synthetic peptide
  Seed: YERMCNILKGKFQTA
YERMFNINKSKFLTA

SEQ ID NO: 134731 - protein, 15 aa, Artificial Sequence
  Description of Artificial Sequence: Synthetic peptide
  Seed: YERMCNILKGKFQTA
YERMFNINKSKFVTA

SEQ ID NO: 134732 - protein, 15 aa, Artificial Sequence
  Description of Artificial Sequence: Synthetic peptide
  Seed: YERMCNILKGKFQTA
YERMFNIQKAKFATA

SEQ ID NO: 134733 - protein, 15 aa, Artificial Sequence
  Description of Artificial Sequence: Synthetic peptide
  Seed: YERMCNILKGKFQTA
YERMFNIQKAKFCTA

SEQ ID NO: 134734 - protein, 15 aa, Artificial Sequence
  Description of Artificial Sequence: Synthetic peptide
  Seed: YERMCNILKGKFQTA
YERMFNIQKAKFFTA

SEQ ID NO: 134735 - protein, 15 aa, Artificial Sequence
  Description of Artificial Sequence: Synthetic peptide
  Seed: YERMCNILKGKFQTA
YERMFNIQKAKFGTA

SEQ ID NO: 134736 - protein, 15 aa, Artificial Sequence
  Description of Artificial Sequence: Synthetic peptide
  Seed: YERMCNILKGKFQTA
YERMFNIQKAKFHTA

SEQ ID NO: 134737 - protein, 15 aa, Artificial Sequence
  Description of Artificial Sequence: Synthetic peptide
  Seed: YERMCNILKGKFQTA
YERMFNIQKAKFITA

SEQ ID NO: 134738 - protein, 15 aa, Artificial Sequence
  Description of Artificial Sequence: Synthetic peptide
  Seed: YERMCNILKGKFQTA
YERMFNIQKAKFLTA

SEQ ID NO: 134739 - protein, 15 aa, Artificial Sequence
  Description of Artificial Sequence: Synthetic peptide
  Seed: YERMCNILKGKFQTA
YERMFNIQKAKFMTA

SEQ ID NO: 134740 - protein, 15 aa, Artificial Sequence
  Description of Artificial Sequence: Synthetic peptide
  Seed: YERMCNILKGKFQTA
YERMFNIQKAKFNTA

SEQ ID NO: 134741 - protein, 15 aa, Artificial Sequence
  Description of Artificial Sequence: Synthetic peptide
  Seed: YERMCNILKGKFQTA
YERMFNIQKAKFPTA

SEQ ID NO: 134742 - protein, 15 aa, Artificial Sequence
  Description of Artificial Sequence: Synthetic peptide
  Seed: YERMCNILKGKFQTA
YERMFNIQKAKFQTA

SEQ ID NO: 134743 - protein, 15 aa, Artificial Sequence
  Description of Artificial Sequence: Synthetic peptide
  Seed: YERMCNILKGKFQTA
YERMFNIQKAKFSTA

SEQ ID NO: 134744 - protein, 15 aa, Artificial Sequence
  Description of Artificial Sequence: Synthetic peptide
  Seed: YERMCNILKGKFQTA
YERMFNIQKAKFTTA

SEQ ID NO: 134745 - protein, 15 aa, Artificial Sequence
  Description of Artificial Sequence: Synthetic peptide
  Seed: YERMCNILKGKFQTA
YERMFNIQKAKFVTA

SEQ ID NO: 134746 - protein, 15 aa, Artificial Sequence
  Description of Artificial Sequence: Synthetic peptide
  Seed: YERMCNILKGKFQTA
YERMFNIQKAKFWTA

SEQ ID NO: 134747 - protein, 15 aa, Artificial Sequence
  Description of Artificial Sequence: Synthetic peptide
  Seed: YERMCNILKGKFQTA
YERMFNIQKAKFYTA

SEQ ID NO: 134748 - protein, 15 aa, Artificial Sequence
  Description of Artificial Sequence: Synthetic peptide
  Seed: YERMCNILKGKFQTA
YERMFNIQKGKFATA

SEQ ID NO: 134749 - protein, 15 aa, Artificial Sequence
  Description of Artificial Sequence: Synthetic peptide
  Seed: YERMCNILKGKFQTA
YERMFNIQKGKFCTA

SEQ ID NO: 134750 - protein, 15 aa, Artificial Sequence
  Description of Artificial Sequence: Synthetic peptide
  Seed: YERMCNILKGKFQTA
YERMFNIQKGKFFTA

SEQ ID NO: 134751 - protein, 15 aa, Artificial Sequence
  Description of Artificial Sequence: Synthetic peptide
  Seed: YERMCNILKGKFQTA
YERMFNIQKGKFGTA

SEQ ID NO: 134752 - protein, 15 aa, Artificial Sequence
  Description of Artificial Sequence: Synthetic peptide
  Seed: YERMCNILKGKFQTA
YERMFNIQKGKFITA

SEQ ID NO: 134753 - protein, 15 aa, Artificial Sequence
  Description of Artificial Sequence: Synthetic peptide
  Seed: YERMCNILKGKFQTA
YERMFNIQKGKFLTA

SEQ ID NO: 134754 - protein, 15 aa, Artificial Sequence
  Description of Artificial Sequence: Synthetic peptide
  Seed: YERMCNILKGKFQTA
YERMFNIQKGKFMTA

SEQ ID NO: 134755 - protein, 15 aa, Artificial Sequence
  Description of Artificial Sequence: Synthetic peptide
  Seed: YERMCNILKGKFQTA
YERMFNIQKGKFNTA

SEQ ID NO: 134756 - protein, 15 aa, Artificial Sequence
  Description of Artificial Sequence: Synthetic peptide
  Seed: YERMCNILKGKFQTA
YERMFNIQKGKFSTA

SEQ ID NO: 134757 - protein, 15 aa, Artificial Sequence
  Description of Artificial Sequence: Synthetic peptide
  Seed: YERMCNILKGKFQTA
YERMFNIQKGKFTTA

SEQ ID NO: 134758 - protein, 15 aa, Artificial Sequence
  Description of Artificial Sequence: Synthetic peptide
  Seed: YERMCNILKGKFQTA
YERMFNIQKGKFVTA

SEQ ID NO: 134759 - protein, 15 aa, Artificial Sequence
  Description of Artificial Sequence: Synthetic peptide
  Seed: YERMCNILKGKFQTA
YERMFNIQKIKFATA

SEQ ID NO: 134760 - protein, 15 aa, Artificial Sequence
  Description of Artificial Sequence: Synthetic peptide
  Seed: YERMCNILKGKFQTA
YERMFNIQKIKFITA

SEQ ID NO: 134761 - protein, 15 aa, Artificial Sequence
  Description of Artificial Sequence: Synthetic peptide
  Seed: YERMCNILKGKFQTA
YERMFNIQKIKFLTA

SEQ ID NO: 134762 - protein, 15 aa, Artificial Sequence
  Description of Artificial Sequence: Synthetic peptide
  Seed: YERMCNILKGKFQTA
YERMFNIQKIKFVTA

SEQ ID NO: 134763 - protein, 15 aa, Artificial Sequence
  Description of Artificial Sequence: Synthetic peptide
  Seed: YERMCNILKGKFQTA
YERMFNIQKNKFATA

SEQ ID NO: 134764 - protein, 15 aa, Artificial Sequence
  Description of Artificial Sequence: Synthetic peptide
  Seed: YERMCNILKGKFQTA
YERMFNIQKNKFITA

SEQ ID NO: 134765 - protein, 15 aa, Artificial Sequence
  Description of Artificial Sequence: Synthetic peptide
  Seed: YERMCNILKGKFQTA
YERMFNIQKNKFLTA

SEQ ID NO: 134766 - protein, 15 aa, Artificial Sequence
  Description of Artificial Sequence: Synthetic peptide
  Seed: YERMCNILKGKFQTA
YERMFNIQKNKFMTA

SEQ ID NO: 134767 - protein, 15 aa, Artificial Sequence
  Description of Artificial Sequence: Synthetic peptide
  Seed: YERMCNILKGKFQTA
YERMFNIQKNKFSTA

SEQ ID NO: 134768 - protein, 15 aa, Artificial Sequence
  Description of Artificial Sequence: Synthetic peptide
  Seed: YERMCNILKGKFQTA
YERMFNIQKNKFTTA

SEQ ID NO: 134769 - protein, 15 aa, Artificial Sequence
  Description of Artificial Sequence: Synthetic peptide
  Seed: YERMCNILKGKFQTA
YERMFNIQKNKFVTA

SEQ ID NO: 134770 - protein, 15 aa, Artificial Sequence
  Description of Artificial Sequence: Synthetic peptide
  Seed: YERMCNILKGKFQTA
YERMFNIQKPKFATA

SEQ ID NO: 134771 - protein, 15 aa, Artificial Sequence
  Description of Artificial Sequence: Synthetic peptide
  Seed: YERMCNILKGKFQTA
YERMFNIQKPKFITA

SEQ ID NO: 134772 - protein, 15 aa, Artificial Sequence
  Description of Artificial Sequence: Synthetic peptide
  Seed: YERMCNILKGKFQTA
YERMFNIQKPKFLTA

SEQ ID NO: 134773 - protein, 15 aa, Artificial Sequence
  Description of Artificial Sequence: Synthetic peptide
  Seed: YERMCNILKGKFQTA
YERMFNIQKPKFMTA

SEQ ID NO: 134774 - protein, 15 aa, Artificial Sequence
  Description of Artificial Sequence: Synthetic peptide
  Seed: YERMCNILKGKFQTA
YERMFNIQKPKFSTA

SEQ ID NO: 134775 - protein, 15 aa, Artificial Sequence
  Description of Artificial Sequence: Synthetic peptide
  Seed: YERMCNILKGKFQTA
YERMFNIQKPKFTTA

SEQ ID NO: 134776 - protein, 15 aa, Artificial Sequence
  Description of Artificial Sequence: Synthetic peptide
  Seed: YERMCNILKGKFQTA
YERMFNIQKPKFVTA

SEQ ID NO: 134777 - protein, 15 aa, Artificial Sequence
  Description of Artificial Sequence: Synthetic peptide
  Seed: YERMCNILKGKFQTA
YERMFNIQKSKFATA

SEQ ID NO: 134778 - protein, 15 aa, Artificial Sequence
  Description of Artificial Sequence: Synthetic peptide
  Seed: YERMCNILKGKFQTA
YERMFNIQKSKFCTA

SEQ ID NO: 134779 - protein, 15 aa, Artificial Sequence
  Description of Artificial Sequence: Synthetic peptide
  Seed: YERMCNILKGKFQTA
YERMFNIQKSKFFTA

SEQ ID NO: 134780 - protein, 15 aa, Artificial Sequence
  Description of Artificial Sequence: Synthetic peptide
  Seed: YERMCNILKGKFQTA
YERMFNIQKSKFGTA

SEQ ID NO: 134781 - protein, 15 aa, Artificial Sequence
  Description of Artificial Sequence: Synthetic peptide
  Seed: YERMCNILKGKFQTA
YERMFNIQKSKFITA

SEQ ID NO: 134782 - protein, 15 aa, Artificial Sequence
  Description of Artificial Sequence: Synthetic peptide
  Seed: YERMCNILKGKFQTA
YERMFNIQKSKFLTA

SEQ ID NO: 134783 - protein, 15 aa, Artificial Sequence
  Description of Artificial Sequence: Synthetic peptide
  Seed: YERMCNILKGKFQTA
YERMFNIQKSKFMTA

SEQ ID NO: 134784 - protein, 15 aa, Artificial Sequence
  Description of Artificial Sequence: Synthetic peptide
  Seed: YERMCNILKGKFQTA
YERMFNIQKSKFNTA

SEQ ID NO: 134785 - protein, 15 aa, Artificial Sequence
  Description of Artificial Sequence: Synthetic peptide
  Seed: YERMCNILKGKFQTA
YERMFNIQKSKFSTA

SEQ ID NO: 134786 - protein, 15 aa, Artificial Sequence
  Description of Artificial Sequence: Synthetic peptide
  Seed: YERMCNILKGKFQTA
YERMFNIQKSKFTTA

SEQ ID NO: 134787 - protein, 15 aa, Artificial Sequence
  Description of Artificial Sequence: Synthetic peptide
  Seed: YERMCNILKGKFQTA
YERMFNIQKSKFVTA

SEQ ID NO: 134788 - protein, 15 aa, Artificial Sequence
  Description of Artificial Sequence: Synthetic peptide
  Seed: YERMCNILKGKFQTA
YERMFNIQKTKFATA

SEQ ID NO: 134789 - protein, 15 aa, Artificial Sequence
  Description of Artificial Sequence: Synthetic peptide
  Seed: YERMCNILKGKFQTA
YERMFNIQKTKFITA

SEQ ID NO: 134790 - protein, 15 aa, Artificial Sequence
  Description of Artificial Sequence: Synthetic peptide
  Seed: YERMCNILKGKFQTA
YERMFNIQKTKFLTA

SEQ ID NO: 134791 - protein, 15 aa, Artificial Sequence
  Description of Artificial Sequence: Synthetic peptide
  Seed: YERMCNILKGKFQTA
YERMFNIQKTKFMTA

SEQ ID NO: 134792 - protein, 15 aa, Artificial Sequence
  Description of Artificial Sequence: Synthetic peptide
  Seed: YERMCNILKGKFQTA
YERMFNIQKTKFNTA

SEQ ID NO: 134793 - protein, 15 aa, Artificial Sequence
  Description of Artificial Sequence: Synthetic peptide
  Seed: YERMCNILKGKFQTA
YERMFNIQKTKFSTA

SEQ ID NO: 134794 - protein, 15 aa, Artificial Sequence
  Description of Artificial Sequence: Synthetic peptide
  Seed: YERMCNILKGKFQTA
YERMFNIQKTKFTTA

SEQ ID NO: 134795 - protein, 15 aa, Artificial Sequence
  Description of Artificial Sequence: Synthetic peptide
  Seed: YERMCNILKGKFQTA
YERMFNIQKTKFVTA

SEQ ID NO: 134796 - protein, 15 aa, Artificial Sequence
  Description of Artificial Sequence: Synthetic peptide
  Seed: YERMCNILKGKFQTA
YERMFNIQKVKFATA

SEQ ID NO: 134797 - protein, 15 aa, Artificial Sequence
  Description of Artificial Sequence: Synthetic peptide
  Seed: YERMCNILKGKFQTA
YERMFNIQKVKFITA

SEQ ID NO: 134798 - protein, 15 aa, Artificial Sequence
  Description of Artificial Sequence: Synthetic peptide
  Seed: YERMCNILKGKFQTA
YERMFNIQKVKFLTA

SEQ ID NO: 134799 - protein, 15 aa, Artificial Sequence
  Description of Artificial Sequence: Synthetic peptide
  Seed: YERMCNILKGKFQTA
YERMFNIQKVKFMTA

SEQ ID NO: 134800 - protein, 15 aa, Artificial Sequence
  Description of Artificial Sequence: Synthetic peptide
  Seed: YERMCNILKGKFQTA
YERMFNIQKVKFNTA

SEQ ID NO: 134801 - protein, 15 aa, Artificial Sequence
  Description of Artificial Sequence: Synthetic peptide
  Seed: YERMCNILKGKFQTA
YERMFNIQKVKFSTA

SEQ ID NO: 134802 - protein, 15 aa, Artificial Sequence
  Description of Artificial Sequence: Synthetic peptide
  Seed: YERMCNILKGKFQTA
YERMFNIQKVKFTTA

SEQ ID NO: 134803 - protein, 15 aa, Artificial Sequence
  Description of Artificial Sequence: Synthetic peptide
  Seed: YERMCNILKGKFQTA
YERMFNIQKVKFVTA

SEQ ID NO: 134804 - protein, 15 aa, Artificial Sequence
  Description of Artificial Sequence: Synthetic peptide
  Seed: YERMCNILKGKFQTA
YERMFNISKAKFATA

SEQ ID NO: 134805 - protein, 15 aa, Artificial Sequence
  Description of Artificial Sequence: Synthetic peptide
  Seed: YERMCNILKGKFQTA
YERMFNISKAKFCTA

SEQ ID NO: 134806 - protein, 15 aa, Artificial Sequence
  Description of Artificial Sequence: Synthetic peptide
  Seed: YERMCNILKGKFQTA
YERMFNISKAKFFTA

SEQ ID NO: 134807 - protein, 15 aa, Artificial Sequence
  Description of Artificial Sequence: Synthetic peptide
  Seed: YERMCNILKGKFQTA
YERMFNISKAKFGTA

SEQ ID NO: 134808 - protein, 15 aa, Artificial Sequence
  Description of Artificial Sequence: Synthetic peptide
  Seed: YERMCNILKGKFQTA
YERMFNISKAKFITA

SEQ ID NO: 134809 - protein, 15 aa, Artificial Sequence
  Description of Artificial Sequence: Synthetic peptide
  Seed: YERMCNILKGKFQTA
YERMFNISKAKFLTA

SEQ ID NO: 134810 - protein, 15 aa, Artificial Sequence
  Description of Artificial Sequence: Synthetic peptide
  Seed: YERMCNILKGKFQTA
YERMFNISKAKFMTA

SEQ ID NO: 134811 - protein, 15 aa, Artificial Sequence
  Description of Artificial Sequence: Synthetic peptide
  Seed: YERMCNILKGKFQTA
YERMFNISKAKFNTA

SEQ ID NO: 134812 - protein, 15 aa, Artificial Sequence
  Description of Artificial Sequence: Synthetic peptide
  Seed: YERMCNILKGKFQTA
YERMFNISKAKFSTA

SEQ ID NO: 134813 - protein, 15 aa, Artificial Sequence
  Description of Artificial Sequence: Synthetic peptide
  Seed: YERMCNILKGKFQTA
YERMFNISKAKFTTA

SEQ ID NO: 134814 - protein, 15 aa, Artificial Sequence
  Description of Artificial Sequence: Synthetic peptide
  Seed: YERMCNILKGKFQTA
YERMFNISKAKFVTA

SEQ ID NO: 134815 - protein, 15 aa, Artificial Sequence
  Description of Artificial Sequence: Synthetic peptide
  Seed: YERMCNILKGKFQTA
YERMFNISKGKFATA

SEQ ID NO: 134816 - protein, 15 aa, Artificial Sequence
  Description of Artificial Sequence: Synthetic peptide
  Seed: YERMCNILKGKFQTA
YERMFNISKGKFFTA

SEQ ID NO: 134817 - protein, 15 aa, Artificial Sequence
  Description of Artificial Sequence: Synthetic peptide
  Seed: YERMCNILKGKFQTA
YERMFNISKGKFITA

SEQ ID NO: 134818 - protein, 15 aa, Artificial Sequence
  Description of Artificial Sequence: Synthetic peptide
  Seed: YERMCNILKGKFQTA
YERMFNISKGKFLTA

SEQ ID NO: 134819 - protein, 15 aa, Artificial Sequence
  Description of Artificial Sequence: Synthetic peptide
  Seed: YERMCNILKGKFQTA
YERMFNISKGKFMTA

SEQ ID NO: 134820 - protein, 15 aa, Artificial Sequence
  Description of Artificial Sequence: Synthetic peptide
  Seed: YERMCNILKGKFQTA
YERMFNISKGKFSTA

SEQ ID NO: 134821 - protein, 15 aa, Artificial Sequence
  Description of Artificial Sequence: Synthetic peptide
  Seed: YERMCNILKGKFQTA
YERMFNISKGKFTTA

SEQ ID NO: 134822 - protein, 15 aa, Artificial Sequence
  Description of Artificial Sequence: Synthetic peptide
  Seed: YERMCNILKGKFQTA
YERMFNISKGKFVTA

SEQ ID NO: 134823 - protein, 15 aa, Artificial Sequence
  Description of Artificial Sequence: Synthetic peptide
  Seed: YERMCNILKGKFQTA
YERMFNISKNKFATA

SEQ ID NO: 134824 - protein, 15 aa, Artificial Sequence
  Description of Artificial Sequence: Synthetic peptide
  Seed: YERMCNILKGKFQTA
YERMFNISKNKFITA

SEQ ID NO: 134825 - protein, 15 aa, Artificial Sequence
  Description of Artificial Sequence: Synthetic peptide
  Seed: YERMCNILKGKFQTA
YERMFNISKNKFLTA

SEQ ID NO: 134826 - protein, 15 aa, Artificial Sequence
  Description of Artificial Sequence: Synthetic peptide
  Seed: YERMCNILKGKFQTA
YERMFNISKNKFMTA

SEQ ID NO: 134827 - protein, 15 aa, Artificial Sequence
  Description of Artificial Sequence: Synthetic peptide
  Seed: YERMCNILKGKFQTA
YERMFNISKNKFTTA

SEQ ID NO: 134828 - protein, 15 aa, Artificial Sequence
  Description of Artificial Sequence: Synthetic peptide
  Seed: YERMCNILKGKFQTA
YERMFNISKNKFVTA

SEQ ID NO: 134829 - protein, 15 aa, Artificial Sequence
  Description of Artificial Sequence: Synthetic peptide
  Seed: YERMCNILKGKFQTA
YERMFNISKPKFATA

SEQ ID NO: 134830 - protein, 15 aa, Artificial Sequence
  Description of Artificial Sequence: Synthetic peptide
  Seed: YERMCNILKGKFQTA
YERMFNISKPKFITA

SEQ ID NO: 134831 - protein, 15 aa, Artificial Sequence
  Description of Artificial Sequence: Synthetic peptide
  Seed: YERMCNILKGKFQTA
YERMFNISKPKFLTA

SEQ ID NO: 134832 - protein, 15 aa, Artificial Sequence
  Description of Artificial Sequence: Synthetic peptide
  Seed: YERMCNILKGKFQTA
YERMFNISKPKFMTA

SEQ ID NO: 134833 - protein, 15 aa, Artificial Sequence
  Description of Artificial Sequence: Synthetic peptide
  Seed: YERMCNILKGKFQTA
YERMFNISKPKFSTA

SEQ ID NO: 134834 - protein, 15 aa, Artificial Sequence
  Description of Artificial Sequence: Synthetic peptide
  Seed: YERMCNILKGKFQTA
YERMFNISKPKFTTA

SEQ ID NO: 134835 - protein, 15 aa, Artificial Sequence
  Description of Artificial Sequence: Synthetic peptide
  Seed: YERMCNILKGKFQTA
YERMFNISKPKFVTA

SEQ ID NO: 134836 - protein, 15 aa, Artificial Sequence
  Description of Artificial Sequence: Synthetic peptide
  Seed: YERMCNILKGKFQTA
YERMFNISKSKFATA

SEQ ID NO: 134837 - protein, 15 aa, Artificial Sequence
  Description of Artificial Sequence: Synthetic peptide
  Seed: YERMCNILKGKFQTA
YERMFNISKSKFGTA

SEQ ID NO: 134838 - protein, 15 aa, Artificial Sequence
  Description of Artificial Sequence: Synthetic peptide
  Seed: YERMCNILKGKFQTA
YERMFNISKSKFITA

SEQ ID NO: 134839 - protein, 15 aa, Artificial Sequence
  Description of Artificial Sequence: Synthetic peptide
  Seed: YERMCNILKGKFQTA
YERMFNISKSKFLTA

SEQ ID NO: 134840 - protein, 15 aa, Artificial Sequence
  Description of Artificial Sequence: Synthetic peptide
  Seed: YERMCNILKGKFQTA
YERMFNISKSKFMTA

SEQ ID NO: 134841 - protein, 15 aa, Artificial Sequence
  Description of Artificial Sequence: Synthetic peptide
  Seed: YERMCNILKGKFQTA
YERMFNISKSKFSTA

SEQ ID NO: 134842 - protein, 15 aa, Artificial Sequence
  Description of Artificial Sequence: Synthetic peptide
  Seed: YERMCNILKGKFQTA
YERMFNISKSKFTTA

SEQ ID NO: 134843 - protein, 15 aa, Artificial Sequence
  Description of Artificial Sequence: Synthetic peptide
  Seed: YERMCNILKGKFQTA
YERMFNISKSKFVTA

SEQ ID NO: 134844 - protein, 15 aa, Artificial Sequence
  Description of Artificial Sequence: Synthetic peptide
  Seed: YERMCNILKGKFQTA
YERMFNISKTKFATA

SEQ ID NO: 134845 - protein, 15 aa, Artificial Sequence
  Description of Artificial Sequence: Synthetic peptide
  Seed: YERMCNILKGKFQTA
YERMFNISKTKFITA

SEQ ID NO: 134846 - protein, 15 aa, Artificial Sequence
  Description of Artificial Sequence: Synthetic peptide
  Seed: YERMCNILKGKFQTA
YERMFNISKTKFLTA

SEQ ID NO: 134847 - protein, 15 aa, Artificial Sequence
  Description of Artificial Sequence: Synthetic peptide
  Seed: YERMCNILKGKFQTA
YERMFNISKTKFMTA

SEQ ID NO: 134848 - protein, 15 aa, Artificial Sequence
  Description of Artificial Sequence: Synthetic peptide
  Seed: YERMCNILKGKFQTA
YERMFNISKTKFSTA

SEQ ID NO: 134849 - protein, 15 aa, Artificial Sequence
  Description of Artificial Sequence: Synthetic peptide
  Seed: YERMCNILKGKFQTA
YERMFNISKTKFTTA

SEQ ID NO: 134850 - protein, 15 aa, Artificial Sequence
  Description of Artificial Sequence: Synthetic peptide
  Seed: YERMCNILKGKFQTA
YERMFNISKTKFVTA

SEQ ID NO: 134851 - protein, 15 aa, Artificial Sequence
  Description of Artificial Sequence: Synthetic peptide
  Seed: YERMCNILKGKFQTA
YERMFNISKVKFATA

SEQ ID NO: 134852 - protein, 15 aa, Artificial Sequence
  Description of Artificial Sequence: Synthetic peptide
  Seed: YERMCNILKGKFQTA
YERMFNISKVKFITA

SEQ ID NO: 134853 - protein, 15 aa, Artificial Sequence
  Description of Artificial Sequence: Synthetic peptide
  Seed: YERMCNILKGKFQTA
YERMFNISKVKFLTA

SEQ ID NO: 134854 - protein, 15 aa, Artificial Sequence
  Description of Artificial Sequence: Synthetic peptide
  Seed: YERMCNILKGKFQTA
YERMFNISKVKFNTA

SEQ ID NO: 134855 - protein, 15 aa, Artificial Sequence
  Description of Artificial Sequence: Synthetic peptide
  Seed: YERMCNILKGKFQTA
YERMFNISKVKFVTA

SEQ ID NO: 134856 - protein, 15 aa, Artificial Sequence
  Description of Artificial Sequence: Synthetic peptide
  Seed: YERMCNILKGKFQTA
YERMFNITKAKFATA

SEQ ID NO: 134857 - protein, 15 aa, Artificial Sequence
  Description of Artificial Sequence: Synthetic peptide
  Seed: YERMCNILKGKFQTA
YERMFNITKAKFFTA

SEQ ID NO: 134858 - protein, 15 aa, Artificial Sequence
  Description of Artificial Sequence: Synthetic peptide
  Seed: YERMCNILKGKFQTA
YERMFNITKAKFGTA

SEQ ID NO: 134859 - protein, 15 aa, Artificial Sequence
  Description of Artificial Sequence: Synthetic peptide
  Seed: YERMCNILKGKFQTA
YERMFNITKAKFITA

SEQ ID NO: 134860 - protein, 15 aa, Artificial Sequence
  Description of Artificial Sequence: Synthetic peptide
  Seed: YERMCNILKGKFQTA
YERMFNITKAKFLTA

SEQ ID NO: 134861 - protein, 15 aa, Artificial Sequence
  Description of Artificial Sequence: Synthetic peptide
  Seed: YERMCNILKGKFQTA
YERMFNITKAKFMTA

SEQ ID NO: 134862 - protein, 15 aa, Artificial Sequence
  Description of Artificial Sequence: Synthetic peptide
  Seed: YERMCNILKGKFQTA
YERMFNITKAKFNTA

SEQ ID NO: 134863 - protein, 15 aa, Artificial Sequence
  Description of Artificial Sequence: Synthetic peptide
  Seed: YERMCNILKGKFQTA
YERMFNITKAKFSTA

SEQ ID NO: 134864 - protein, 15 aa, Artificial Sequence
  Description of Artificial Sequence: Synthetic peptide
  Seed: YERMCNILKGKFQTA
YERMFNITKAKFTTA

SEQ ID NO: 134865 - protein, 15 aa, Artificial Sequence
  Description of Artificial Sequence: Synthetic peptide
  Seed: YERMCNILKGKFQTA
YERMFNITKAKFVTA

SEQ ID NO: 134866 - protein, 15 aa, Artificial Sequence
  Description of Artificial Sequence: Synthetic peptide
  Seed: YERMCNILKGKFQTA
YERMFNITKGKFATA

SEQ ID NO: 134867 - protein, 15 aa, Artificial Sequence
  Description of Artificial Sequence: Synthetic peptide
  Seed: YERMCNILKGKFQTA
YERMFNITKGKFITA

SEQ ID NO: 134868 - protein, 15 aa, Artificial Sequence
  Description of Artificial Sequence: Synthetic peptide
  Seed: YERMCNILKGKFQTA
YERMFNITKGKFLTA

SEQ ID NO: 134869 - protein, 15 aa, Artificial Sequence
  Description of Artificial Sequence: Synthetic peptide
  Seed: YERMCNILKGKFQTA
YERMFNITKGKFMTA

SEQ ID NO: 134870 - protein, 15 aa, Artificial Sequence
  Description of Artificial Sequence: Synthetic peptide
  Seed: YERMCNILKGKFQTA
YERMFNITKGKFSTA

SEQ ID NO: 134871 - protein, 15 aa, Artificial Sequence
  Description of Artificial Sequence: Synthetic peptide
  Seed: YERMCNILKGKFQTA
YERMFNITKGKFTTA

SEQ ID NO: 134872 - protein, 15 aa, Artificial Sequence
  Description of Artificial Sequence: Synthetic peptide
  Seed: YERMCNILKGKFQTA
YERMFNITKGKFVTA

SEQ ID NO: 134873 - protein, 15 aa, Artificial Sequence
  Description of Artificial Sequence: Synthetic peptide
  Seed: YERMCNILKGKFQTA
YERMFNITKNKFATA

SEQ ID NO: 134874 - protein, 15 aa, Artificial Sequence
  Description of Artificial Sequence: Synthetic peptide
  Seed: YERMCNILKGKFQTA
YERMFNITKNKFITA

SEQ ID NO: 134875 - protein, 15 aa, Artificial Sequence
  Description of Artificial Sequence: Synthetic peptide
  Seed: YERMCNILKGKFQTA
YERMFNITKNKFLTA

SEQ ID NO: 134876 - protein, 15 aa, Artificial Sequence
  Description of Artificial Sequence: Synthetic peptide
  Seed: YERMCNILKGKFQTA
YERMFNITKNKFVTA

SEQ ID NO: 134877 - protein, 15 aa, Artificial Sequence
  Description of Artificial Sequence: Synthetic peptide
  Seed: YERMCNILKGKFQTA
YERMFNITKPKFATA

SEQ ID NO: 134878 - protein, 15 aa, Artificial Sequence
  Description of Artificial Sequence: Synthetic peptide
  Seed: YERMCNILKGKFQTA
YERMFNITKPKFITA

SEQ ID NO: 134879 - protein, 15 aa, Artificial Sequence
  Description of Artificial Sequence: Synthetic peptide
  Seed: YERMCNILKGKFQTA
YERMFNITKPKFLTA

SEQ ID NO: 134880 - protein, 15 aa, Artificial Sequence
  Description of Artificial Sequence: Synthetic peptide
  Seed: YERMCNILKGKFQTA
YERMFNITKPKFMTA

SEQ ID NO: 134881 - protein, 15 aa, Artificial Sequence
  Description of Artificial Sequence: Synthetic peptide
  Seed: YERMCNILKGKFQTA
YERMFNITKPKFTTA

SEQ ID NO: 134882 - protein, 15 aa, Artificial Sequence
  Description of Artificial Sequence: Synthetic peptide
  Seed: YERMCNILKGKFQTA
YERMFNITKPKFVTA

SEQ ID NO: 134883 - protein, 15 aa, Artificial Sequence
  Description of Artificial Sequence: Synthetic peptide
  Seed: YERMCNILKGKFQTA
YERMFNITKSKFATA

SEQ ID NO: 134884 - protein, 15 aa, Artificial Sequence
  Description of Artificial Sequence: Synthetic peptide
  Seed: YERMCNILKGKFQTA
YERMFNITKSKFITA

SEQ ID NO: 134885 - protein, 15 aa, Artificial Sequence
  Description of Artificial Sequence: Synthetic peptide
  Seed: YERMCNILKGKFQTA
YERMFNITKSKFLTA

SEQ ID NO: 134886 - protein, 15 aa, Artificial Sequence
  Description of Artificial Sequence: Synthetic peptide
  Seed: YERMCNILKGKFQTA
YERMFNITKSKFMTA

SEQ ID NO: 134887 - protein, 15 aa, Artificial Sequence
  Description of Artificial Sequence: Synthetic peptide
  Seed: YERMCNILKGKFQTA
YERMFNITKSKFSTA

SEQ ID NO: 134888 - protein, 15 aa, Artificial Sequence
  Description of Artificial Sequence: Synthetic peptide
  Seed: YERMCNILKGKFQTA
YERMFNITKSKFTTA

SEQ ID NO: 134889 - protein, 15 aa, Artificial Sequence
  Description of Artificial Sequence: Synthetic peptide
  Seed: YERMCNILKGKFQTA
YERMFNITKSKFVTA

SEQ ID NO: 134890 - protein, 15 aa, Artificial Sequence
  Description of Artificial Sequence: Synthetic peptide
  Seed: YERMCNILKGKFQTA
YERMFNITKTKFATA

SEQ ID NO: 134891 - protein, 15 aa, Artificial Sequence
  Description of Artificial Sequence: Synthetic peptide
  Seed: YERMCNILKGKFQTA
YERMFNITKTKFITA

SEQ ID NO: 134892 - protein, 15 aa, Artificial Sequence
  Description of Artificial Sequence: Synthetic peptide
  Seed: YERMCNILKGKFQTA
YERMFNITKTKFLTA

SEQ ID NO: 134893 - protein, 15 aa, Artificial Sequence
  Description of Artificial Sequence: Synthetic peptide
  Seed: YERMCNILKGKFQTA
YERMFNITKTKFVTA

SEQ ID NO: 134894 - protein, 15 aa, Artificial Sequence
  Description of Artificial Sequence: Synthetic peptide
  Seed: YERMCNILKGKFQTA
YERMFNITKVKFITA

SEQ ID NO: 134895 - protein, 15 aa, Artificial Sequence
  Description of Artificial Sequence: Synthetic peptide
  Seed: YERMCNILKGKFQTA
YERMFNITKVKFLTA

SEQ ID NO: 134896 - protein, 15 aa, Artificial Sequence
  Description of Artificial Sequence: Synthetic peptide
  Seed: YERMCNILKGKFQTA
YERMFNITKVKFVTA

SEQ ID NO: 134897 - protein, 15 aa, Artificial Sequence
  Description of Artificial Sequence: Synthetic peptide
  Seed: YERMCNILKGKFQTA
YERMFNIVKAKFATA

SEQ ID NO: 134898 - protein, 15 aa, Artificial Sequence
  Description of Artificial Sequence: Synthetic peptide
  Seed: YERMCNILKGKFQTA
YERMFNIVKAKFCTA

SEQ ID NO: 134899 - protein, 15 aa, Artificial Sequence
  Description of Artificial Sequence: Synthetic peptide
  Seed: YERMCNILKGKFQTA
YERMFNIVKAKFFTA

SEQ ID NO: 134900 - protein, 15 aa, Artificial Sequence
  Description of Artificial Sequence: Synthetic peptide
  Seed: YERMCNILKGKFQTA
YERMFNIVKAKFGTA

SEQ ID NO: 134901 - protein, 15 aa, Artificial Sequence
  Description of Artificial Sequence: Synthetic peptide
  Seed: YERMCNILKGKFQTA
YERMFNIVKAKFHTA

SEQ ID NO: 134902 - protein, 15 aa, Artificial Sequence
  Description of Artificial Sequence: Synthetic peptide
  Seed: YERMCNILKGKFQTA
YERMFNIVKAKFITA

SEQ ID NO: 134903 - protein, 15 aa, Artificial Sequence
  Description of Artificial Sequence: Synthetic peptide
  Seed: YERMCNILKGKFQTA
YERMFNIVKAKFLTA

SEQ ID NO: 134904 - protein, 15 aa, Artificial Sequence
  Description of Artificial Sequence: Synthetic peptide
  Seed: YERMCNILKGKFQTA
YERMFNIVKAKFMTA

SEQ ID NO: 134905 - protein, 15 aa, Artificial Sequence
  Description of Artificial Sequence: Synthetic peptide
  Seed: YERMCNILKGKFQTA
YERMFNIVKAKFNTA

SEQ ID NO: 134906 - protein, 15 aa, Artificial Sequence
  Description of Artificial Sequence: Synthetic peptide
  Seed: YERMCNILKGKFQTA
YERMFNIVKAKFPTA

SEQ ID NO: 134907 - protein, 15 aa, Artificial Sequence
  Description of Artificial Sequence: Synthetic peptide
  Seed: YERMCNILKGKFQTA
YERMFNIVKAKFQTA

SEQ ID NO: 134908 - protein, 15 aa, Artificial Sequence
  Description of Artificial Sequence: Synthetic peptide
  Seed: YERMCNILKGKFQTA
YERMFNIVKAKFRTA

SEQ ID NO: 134909 - protein, 15 aa, Artificial Sequence
  Description of Artificial Sequence: Synthetic peptide
  Seed: YERMCNILKGKFQTA
YERMFNIVKAKFSTA

SEQ ID NO: 134910 - protein, 15 aa, Artificial Sequence
  Description of Artificial Sequence: Synthetic peptide
  Seed: YERMCNILKGKFQTA
YERMFNIVKAKFTTA

SEQ ID NO: 134911 - protein, 15 aa, Artificial Sequence
  Description of Artificial Sequence: Synthetic peptide
  Seed: YERMCNILKGKFQTA
YERMFNIVKAKFVTA

SEQ ID NO: 134912 - protein, 15 aa, Artificial Sequence
  Description of Artificial Sequence: Synthetic peptide
  Seed: YERMCNILKGKFQTA
YERMFNIVKAKFYTA

SEQ ID NO: 134913 - protein, 15 aa, Artificial Sequence
  Description of Artificial Sequence: Synthetic peptide
  Seed: YERMCNILKGKFQTA
YERMFNIVKGKFATA

SEQ ID NO: 134914 - protein, 15 aa, Artificial Sequence
  Description of Artificial Sequence: Synthetic peptide
  Seed: YERMCNILKGKFQTA
YERMFNIVKGKFCTA

SEQ ID NO: 134915 - protein, 15 aa, Artificial Sequence
  Description of Artificial Sequence: Synthetic peptide
  Seed: YERMCNILKGKFQTA
YERMFNIVKGKFFTA

SEQ ID NO: 134916 - protein, 15 aa, Artificial Sequence
  Description of Artificial Sequence: Synthetic peptide
  Seed: YERMCNILKGKFQTA
YERMFNIVKGKFGTA

SEQ ID NO: 134917 - protein, 15 aa, Artificial Sequence
  Description of Artificial Sequence: Synthetic peptide
  Seed: YERMCNILKGKFQTA
YERMFNIVKGKFITA

SEQ ID NO: 134918 - protein, 15 aa, Artificial Sequence
  Description of Artificial Sequence: Synthetic peptide
  Seed: YERMCNILKGKFQTA
YERMFNIVKGKFLTA

SEQ ID NO: 134919 - protein, 15 aa, Artificial Sequence
  Description of Artificial Sequence: Synthetic peptide
  Seed: YERMCNILKGKFQTA
YERMFNIVKGKFMTA

SEQ ID NO: 134920 - protein, 15 aa, Artificial Sequence
  Description of Artificial Sequence: Synthetic peptide
  Seed: YERMCNILKGKFQTA
YERMFNIVKGKFNTA

SEQ ID NO: 134921 - protein, 15 aa, Artificial Sequence
  Description of Artificial Sequence: Synthetic peptide
  Seed: YERMCNILKGKFQTA
YERMFNIVKGKFPTA

SEQ ID NO: 134922 - protein, 15 aa, Artificial Sequence
  Description of Artificial Sequence: Synthetic peptide
  Seed: YERMCNILKGKFQTA
YERMFNIVKGKFSTA

SEQ ID NO: 134923 - protein, 15 aa, Artificial Sequence
  Description of Artificial Sequence: Synthetic peptide
  Seed: YERMCNILKGKFQTA
YERMFNIVKGKFTTA

SEQ ID NO: 134924 - protein, 15 aa, Artificial Sequence
  Description of Artificial Sequence: Synthetic peptide
  Seed: YERMCNILKGKFQTA
YERMFNIVKGKFVTA

SEQ ID NO: 134925 - protein, 15 aa, Artificial Sequence
  Description of Artificial Sequence: Synthetic peptide
  Seed: YERMCNILKGKFQTA
YERMFNIVKIKFATA

SEQ ID NO: 134926 - protein, 15 aa, Artificial Sequence
  Description of Artificial Sequence: Synthetic peptide
  Seed: YERMCNILKGKFQTA
YERMFNIVKIKFNTA

SEQ ID NO: 134927 - protein, 15 aa, Artificial Sequence
  Description of Artificial Sequence: Synthetic peptide
  Seed: YERMCNILKGKFQTA
YERMFNIVKIKFSTA

SEQ ID NO: 134928 - protein, 15 aa, Artificial Sequence
  Description of Artificial Sequence: Synthetic peptide
  Seed: YERMCNILKGKFQTA
YERMFNIVKIKFVTA

SEQ ID NO: 134929 - protein, 15 aa, Artificial Sequence
  Description of Artificial Sequence: Synthetic peptide
  Seed: YERMCNILKGKFQTA
YERMFNIVKNKFATA

SEQ ID NO: 134930 - protein, 15 aa, Artificial Sequence
  Description of Artificial Sequence: Synthetic peptide
  Seed: YERMCNILKGKFQTA
YERMFNIVKNKFGTA

SEQ ID NO: 134931 - protein, 15 aa, Artificial Sequence
  Description of Artificial Sequence: Synthetic peptide
  Seed: YERMCNILKGKFQTA
YERMFNIVKNKFITA

SEQ ID NO: 134932 - protein, 15 aa, Artificial Sequence
  Description of Artificial Sequence: Synthetic peptide
  Seed: YERMCNILKGKFQTA
YERMFNIVKNKFLTA

SEQ ID NO: 134933 - protein, 15 aa, Artificial Sequence
  Description of Artificial Sequence: Synthetic peptide
  Seed: YERMCNILKGKFQTA
YERMFNIVKNKFMTA

SEQ ID NO: 134934 - protein, 15 aa, Artificial Sequence
  Description of Artificial Sequence: Synthetic peptide
  Seed: YERMCNILKGKFQTA
YERMFNIVKNKFNTA

SEQ ID NO: 134935 - protein, 15 aa, Artificial Sequence
  Description of Artificial Sequence: Synthetic peptide
  Seed: YERMCNILKGKFQTA
YERMFNIVKNKFSTA

SEQ ID NO: 134936 - protein, 15 aa, Artificial Sequence
  Description of Artificial Sequence: Synthetic peptide
  Seed: YERMCNILKGKFQTA
YERMFNIVKNKFTTA

SEQ ID NO: 134937 - protein, 15 aa, Artificial Sequence
  Description of Artificial Sequence: Synthetic peptide
  Seed: YERMCNILKGKFQTA
YERMFNIVKNKFVTA

SEQ ID NO: 134938 - protein, 15 aa, Artificial Sequence
  Description of Artificial Sequence: Synthetic peptide
  Seed: YERMCNILKGKFQTA
YERMFNIVKPKFATA

SEQ ID NO: 134939 - protein, 15 aa, Artificial Sequence
  Description of Artificial Sequence: Synthetic peptide
  Seed: YERMCNILKGKFQTA
YERMFNIVKPKFCTA

SEQ ID NO: 134940 - protein, 15 aa, Artificial Sequence
  Description of Artificial Sequence: Synthetic peptide
  Seed: YERMCNILKGKFQTA
YERMFNIVKPKFFTA

SEQ ID NO: 134941 - protein, 15 aa, Artificial Sequence
  Description of Artificial Sequence: Synthetic peptide
  Seed: YERMCNILKGKFQTA
YERMFNIVKPKFGTA

SEQ ID NO: 134942 - protein, 15 aa, Artificial Sequence
  Description of Artificial Sequence: Synthetic peptide
  Seed: YERMCNILKGKFQTA
YERMFNIVKPKFITA

SEQ ID NO: 134943 - protein, 15 aa, Artificial Sequence
  Description of Artificial Sequence: Synthetic peptide
  Seed: YERMCNILKGKFQTA
YERMFNIVKPKFLTA

SEQ ID NO: 134944 - protein, 15 aa, Artificial Sequence
  Description of Artificial Sequence: Synthetic peptide
  Seed: YERMCNILKGKFQTA
YERMFNIVKPKFMTA

SEQ ID NO: 134945 - protein, 15 aa, Artificial Sequence
  Description of Artificial Sequence: Synthetic peptide
  Seed: YERMCNILKGKFQTA
YERMFNIVKPKFNTA

SEQ ID NO: 134946 - protein, 15 aa, Artificial Sequence
  Description of Artificial Sequence: Synthetic peptide
  Seed: YERMCNILKGKFQTA
YERMFNIVKPKFSTA

SEQ ID NO: 134947 - protein, 15 aa, Artificial Sequence
  Description of Artificial Sequence: Synthetic peptide
  Seed: YERMCNILKGKFQTA
YERMFNIVKPKFTTA

SEQ ID NO: 134948 - protein, 15 aa, Artificial Sequence
  Description of Artificial Sequence: Synthetic peptide
  Seed: YERMCNILKGKFQTA
YERMFNIVKPKFVTA

SEQ ID NO: 134949 - protein, 15 aa, Artificial Sequence
  Description of Artificial Sequence: Synthetic peptide
  Seed: YERMCNILKGKFQTA
YERMFNIVKSKFATA

SEQ ID NO: 134950 - protein, 15 aa, Artificial Sequence
  Description of Artificial Sequence: Synthetic peptide
  Seed: YERMCNILKGKFQTA
YERMFNIVKSKFCTA

SEQ ID NO: 134951 - protein, 15 aa, Artificial Sequence
  Description of Artificial Sequence: Synthetic peptide
  Seed: YERMCNILKGKFQTA
YERMFNIVKSKFFTA

SEQ ID NO: 134952 - protein, 15 aa, Artificial Sequence
  Description of Artificial Sequence: Synthetic peptide
  Seed: YERMCNILKGKFQTA
YERMFNIVKSKFGTA

SEQ ID NO: 134953 - protein, 15 aa, Artificial Sequence
  Description of Artificial Sequence: Synthetic peptide
  Seed: YERMCNILKGKFQTA
YERMFNIVKSKFITA

SEQ ID NO: 134954 - protein, 15 aa, Artificial Sequence
  Description of Artificial Sequence: Synthetic peptide
  Seed: YERMCNILKGKFQTA
YERMFNIVKSKFLTA

SEQ ID NO: 134955 - protein, 15 aa, Artificial Sequence
  Description of Artificial Sequence: Synthetic peptide
  Seed: YERMCNILKGKFQTA
YERMFNIVKSKFMTA

SEQ ID NO: 134956 - protein, 15 aa, Artificial Sequence
  Description of Artificial Sequence: Synthetic peptide
  Seed: YERMCNILKGKFQTA
YERMFNIVKSKFNTA

SEQ ID NO: 134957 - protein, 15 aa, Artificial Sequence
  Description of Artificial Sequence: Synthetic peptide
  Seed: YERMCNILKGKFQTA
YERMFNIVKSKFSTA

SEQ ID NO: 134958 - protein, 15 aa, Artificial Sequence
  Description of Artificial Sequence: Synthetic peptide
  Seed: YERMCNILKGKFQTA
YERMFNIVKSKFTTA

SEQ ID NO: 134959 - protein, 15 aa, Artificial Sequence
  Description of Artificial Sequence: Synthetic peptide
  Seed: YERMCNILKGKFQTA
YERMFNIVKSKFVTA

SEQ ID NO: 134960 - protein, 15 aa, Artificial Sequence
  Description of Artificial Sequence: Synthetic peptide
  Seed: YERMCNILKGKFQTA
YERMFNIVKTKFATA

SEQ ID NO: 134961 - protein, 15 aa, Artificial Sequence
  Description of Artificial Sequence: Synthetic peptide
  Seed: YERMCNILKGKFQTA
YERMFNIVKTKFCTA

SEQ ID NO: 134962 - protein, 15 aa, Artificial Sequence
  Description of Artificial Sequence: Synthetic peptide
  Seed: YERMCNILKGKFQTA
YERMFNIVKTKFGTA

SEQ ID NO: 134963 - protein, 15 aa, Artificial Sequence
  Description of Artificial Sequence: Synthetic peptide
  Seed: YERMCNILKGKFQTA
YERMFNIVKTKFITA

SEQ ID NO: 134964 - protein, 15 aa, Artificial Sequence
  Description of Artificial Sequence: Synthetic peptide
  Seed: YERMCNILKGKFQTA
YERMFNIVKTKFLTA

SEQ ID NO: 134965 - protein, 15 aa, Artificial Sequence
  Description of Artificial Sequence: Synthetic peptide
  Seed: YERMCNILKGKFQTA
YERMFNIVKTKFMTA

SEQ ID NO: 134966 - protein, 15 aa, Artificial Sequence
  Description of Artificial Sequence: Synthetic peptide
  Seed: YERMCNILKGKFQTA
YERMFNIVKTKFNTA

SEQ ID NO: 134967 - protein, 15 aa, Artificial Sequence
  Description of Artificial Sequence: Synthetic peptide
  Seed: YERMCNILKGKFQTA
YERMFNIVKTKFSTA

SEQ ID NO: 134968 - protein, 15 aa, Artificial Sequence
  Description of Artificial Sequence: Synthetic peptide
  Seed: YERMCNILKGKFQTA
YERMFNIVKTKFTTA

SEQ ID NO: 134969 - protein, 15 aa, Artificial Sequence
  Description of Artificial Sequence: Synthetic peptide
  Seed: YERMCNILKGKFQTA
YERMFNIVKTKFVTA

SEQ ID NO: 134970 - protein, 15 aa, Artificial Sequence
  Description of Artificial Sequence: Synthetic peptide
  Seed: YERMCNILKGKFQTA
YERMFNIVKVKFATA

SEQ ID NO: 134971 - protein, 15 aa, Artificial Sequence
  Description of Artificial Sequence: Synthetic peptide
  Seed: YERMCNILKGKFQTA
YERMFNIVKVKFITA

SEQ ID NO: 134972 - protein, 15 aa, Artificial Sequence
  Description of Artificial Sequence: Synthetic peptide
  Seed: YERMCNILKGKFQTA
YERMFNIVKVKFLTA

SEQ ID NO: 134973 - protein, 15 aa, Artificial Sequence
  Description of Artificial Sequence: Synthetic peptide
  Seed: YERMCNILKGKFQTA
YERMFNIVKVKFMTA

SEQ ID NO: 134974 - protein, 15 aa, Artificial Sequence
  Description of Artificial Sequence: Synthetic peptide
  Seed: YERMCNILKGKFQTA
YERMFNIVKVKFNTA

SEQ ID NO: 134975 - protein, 15 aa, Artificial Sequence
  Description of Artificial Sequence: Synthetic peptide
  Seed: YERMCNILKGKFQTA
YERMFNIVKVKFSTA

SEQ ID NO: 134976 - protein, 15 aa, Artificial Sequence
  Description of Artificial Sequence: Synthetic peptide
  Seed: YERMCNILKGKFQTA
YERMFNIVKVKFTTA

SEQ ID NO: 134977 - protein, 15 aa, Artificial Sequence
  Description of Artificial Sequence: Synthetic peptide
  Seed: YERMCNILKGKFQTA
YERMFNIVKVKFVTA

SEQ ID NO: 134978 - protein, 15 aa, Artificial Sequence
  Description of Artificial Sequence: Synthetic peptide
  Seed: YERMCNILKGKFQTA
YERMFNIWKAKFATA

SEQ ID NO: 134979 - protein, 15 aa, Artificial Sequence
  Description of Artificial Sequence: Synthetic peptide
  Seed: YERMCNILKGKFQTA
YERMFNIWKAKFITA

SEQ ID NO: 134980 - protein, 15 aa, Artificial Sequence
  Description of Artificial Sequence: Synthetic peptide
  Seed: YERMCNILKGKFQTA
YERMFNIWKAKFLTA

SEQ ID NO: 134981 - protein, 15 aa, Artificial Sequence
  Description of Artificial Sequence: Synthetic peptide
  Seed: YERMCNILKGKFQTA
YERMFNIWKAKFVTA

SEQ ID NO: 134982 - protein, 15 aa, Artificial Sequence
  Description of Artificial Sequence: Synthetic peptide
  Seed: YERMCNILKGKFQTA
YERMHNILKAKFITA

SEQ ID NO: 134983 - protein, 15 aa, Artificial Sequence
  Description of Artificial Sequence: Synthetic peptide
  Seed: YERMCNILKGKFQTA
YERMHNILKAKFLTA

SEQ ID NO: 134984 - protein, 15 aa, Artificial Sequence
  Description of Artificial Sequence: Synthetic peptide
  Seed: YERMCNILKGKFQTA
YERMHNILKAKFVTA

SEQ ID NO: 134985 - protein, 15 aa, Artificial Sequence
  Description of Artificial Sequence: Synthetic peptide
  Seed: YERMCNILKGKFQTA
YERMHNIMKAKFITA

SEQ ID NO: 134986 - protein, 15 aa, Artificial Sequence
  Description of Artificial Sequence: Synthetic peptide
  Seed: YERMCNILKGKFQTA
YERMHNIMKAKFLTA

SEQ ID NO: 134987 - protein, 15 aa, Artificial Sequence
  Description of Artificial Sequence: Synthetic peptide
  Seed: YERMCNILKGKFQTA
YERMHNIMKAKFVTA

SEQ ID NO: 134988 - protein, 15 aa, Artificial Sequence
  Description of Artificial Sequence: Synthetic peptide
  Seed: YERMCNILKGKFQTA
YERMHNIMKGKFLTA

SEQ ID NO: 134989 - protein, 15 aa, Artificial Sequence
  Description of Artificial Sequence: Synthetic peptide
  Seed: YERMCNILKGKFQTA
YERMINIAKAKFATA

SEQ ID NO: 134990 - protein, 15 aa, Artificial Sequence
  Description of Artificial Sequence: Synthetic peptide
  Seed: YERMCNILKGKFQTA
YERMINIAKAKFCTA

SEQ ID NO: 134991 - protein, 15 aa, Artificial Sequence
  Description of Artificial Sequence: Synthetic peptide
  Seed: YERMCNILKGKFQTA
YERMINIAKAKFFTA

SEQ ID NO: 134992 - protein, 15 aa, Artificial Sequence
  Description of Artificial Sequence: Synthetic peptide
  Seed: YERMCNILKGKFQTA
YERMINIAKAKFGTA

SEQ ID NO: 134993 - protein, 15 aa, Artificial Sequence
  Description of Artificial Sequence: Synthetic peptide
  Seed: YERMCNILKGKFQTA
YERMINIAKAKFITA

SEQ ID NO: 134994 - protein, 15 aa, Artificial Sequence
  Description of Artificial Sequence: Synthetic peptide
  Seed: YERMCNILKGKFQTA
YERMINIAKAKFLTA

SEQ ID NO: 134995 - protein, 15 aa, Artificial Sequence
  Description of Artificial Sequence: Synthetic peptide
  Seed: YERMCNILKGKFQTA
YERMINIAKAKFMTA

SEQ ID NO: 134996 - protein, 15 aa, Artificial Sequence
  Description of Artificial Sequence: Synthetic peptide
  Seed: YERMCNILKGKFQTA
YERMINIAKAKFSTA

SEQ ID NO: 134997 - protein, 15 aa, Artificial Sequence
  Description of Artificial Sequence: Synthetic peptide
  Seed: YERMCNILKGKFQTA
YERMINIAKAKFTTA

SEQ ID NO: 134998 - protein, 15 aa, Artificial Sequence
  Description of Artificial Sequence: Synthetic peptide
  Seed: YERMCNILKGKFQTA
YERMINIAKAKFVTA

SEQ ID NO: 134999 - protein, 15 aa, Artificial Sequence
  Description of Artificial Sequence: Synthetic peptide
  Seed: YERMCNILKGKFQTA
YERMINIAKGKFATA

SEQ ID NO: 135000 - protein, 15 aa, Artificial Sequence
  Description of Artificial Sequence: Synthetic peptide
  Seed: YERMCNILKGKFQTA
YERMINIAKGKFITA

SEQ ID NO: 135001 - protein, 15 aa, Artificial Sequence
  Description of Artificial Sequence: Synthetic peptide
  Seed: YERMCNILKGKFQTA
YERMINIAKGKFLTA

SEQ ID NO: 135002 - protein, 15 aa, Artificial Sequence
  Description of Artificial Sequence: Synthetic peptide
  Seed: YERMCNILKGKFQTA
YERMINIAKGKFMTA

SEQ ID NO: 135003 - protein, 15 aa, Artificial Sequence
  Description of Artificial Sequence: Synthetic peptide
  Seed: YERMCNILKGKFQTA
YERMINIAKGKFSTA

SEQ ID NO: 135004 - protein, 15 aa, Artificial Sequence
  Description of Artificial Sequence: Synthetic peptide
  Seed: YERMCNILKGKFQTA
YERMINIAKGKFTTA

SEQ ID NO: 135005 - protein, 15 aa, Artificial Sequence
  Description of Artificial Sequence: Synthetic peptide
  Seed: YERMCNILKGKFQTA
YERMINIAKGKFVTA

SEQ ID NO: 135006 - protein, 15 aa, Artificial Sequence
  Description of Artificial Sequence: Synthetic peptide
  Seed: YERMCNILKGKFQTA
YERMINIAKNKFATA

SEQ ID NO: 135007 - protein, 15 aa, Artificial Sequence
  Description of Artificial Sequence: Synthetic peptide
  Seed: YERMCNILKGKFQTA
YERMINIAKNKFITA

SEQ ID NO: 135008 - protein, 15 aa, Artificial Sequence
  Description of Artificial Sequence: Synthetic peptide
  Seed: YERMCNILKGKFQTA
YERMINIAKNKFLTA

SEQ ID NO: 135009 - protein, 15 aa, Artificial Sequence
  Description of Artificial Sequence: Synthetic peptide
  Seed: YERMCNILKGKFQTA
YERMINIAKNKFVTA

SEQ ID NO: 135010 - protein, 15 aa, Artificial Sequence
  Description of Artificial Sequence: Synthetic peptide
  Seed: YERMCNILKGKFQTA
YERMINIAKPKFATA

SEQ ID NO: 135011 - protein, 15 aa, Artificial Sequence
  Description of Artificial Sequence: Synthetic peptide
  Seed: YERMCNILKGKFQTA
YERMINIAKPKFITA

SEQ ID NO: 135012 - protein, 15 aa, Artificial Sequence
  Description of Artificial Sequence: Synthetic peptide
  Seed: YERMCNILKGKFQTA
YERMINIAKPKFLTA

SEQ ID NO: 135013 - protein, 15 aa, Artificial Sequence
  Description of Artificial Sequence: Synthetic peptide
  Seed: YERMCNILKGKFQTA
YERMINIAKPKFMTA

SEQ ID NO: 135014 - protein, 15 aa, Artificial Sequence
  Description of Artificial Sequence: Synthetic peptide
  Seed: YERMCNILKGKFQTA
YERMINIAKPKFTTA

SEQ ID NO: 135015 - protein, 15 aa, Artificial Sequence
  Description of Artificial Sequence: Synthetic peptide
  Seed: YERMCNILKGKFQTA
YERMINIAKPKFVTA

SEQ ID NO: 135016 - protein, 15 aa, Artificial Sequence
  Description of Artificial Sequence: Synthetic peptide
  Seed: YERMCNILKGKFQTA
YERMINIAKSKFATA

SEQ ID NO: 135017 - protein, 15 aa, Artificial Sequence
  Description of Artificial Sequence: Synthetic peptide
  Seed: YERMCNILKGKFQTA
YERMINIAKSKFITA

SEQ ID NO: 135018 - protein, 15 aa, Artificial Sequence
  Description of Artificial Sequence: Synthetic peptide
  Seed: YERMCNILKGKFQTA
YERMINIAKSKFLTA

SEQ ID NO: 135019 - protein, 15 aa, Artificial Sequence
  Description of Artificial Sequence: Synthetic peptide
  Seed: YERMCNILKGKFQTA
YERMINIAKSKFMTA

SEQ ID NO: 135020 - protein, 15 aa, Artificial Sequence
  Description of Artificial Sequence: Synthetic peptide
  Seed: YERMCNILKGKFQTA
YERMINIAKSKFSTA

SEQ ID NO: 135021 - protein, 15 aa, Artificial Sequence
  Description of Artificial Sequence: Synthetic peptide
  Seed: YERMCNILKGKFQTA
YERMINIAKSKFTTA

SEQ ID NO: 135022 - protein, 15 aa, Artificial Sequence
  Description of Artificial Sequence: Synthetic peptide
  Seed: YERMCNILKGKFQTA
YERMINIAKSKFVTA

SEQ ID NO: 135023 - protein, 15 aa, Artificial Sequence
  Description of Artificial Sequence: Synthetic peptide
  Seed: YERMCNILKGKFQTA
YERMINIAKTKFATA

SEQ ID NO: 135024 - protein, 15 aa, Artificial Sequence
  Description of Artificial Sequence: Synthetic peptide
  Seed: YERMCNILKGKFQTA
YERMINIAKTKFITA

SEQ ID NO: 135025 - protein, 15 aa, Artificial Sequence
  Description of Artificial Sequence: Synthetic peptide
  Seed: YERMCNILKGKFQTA
YERMINIAKTKFLTA

SEQ ID NO: 135026 - protein, 15 aa, Artificial Sequence
  Description of Artificial Sequence: Synthetic peptide
  Seed: YERMCNILKGKFQTA
YERMINIAKTKFVTA

SEQ ID NO: 135027 - protein, 15 aa, Artificial Sequence
  Description of Artificial Sequence: Synthetic peptide
  Seed: YERMCNILKGKFQTA
YERMINIAKVKFLTA

SEQ ID NO: 135028 - protein, 15 aa, Artificial Sequence
  Description of Artificial Sequence: Synthetic peptide
  Seed: YERMCNILKGKFQTA
YERMINIAKVKFVTA

SEQ ID NO: 135029 - protein, 15 aa, Artificial Sequence
  Description of Artificial Sequence: Synthetic peptide
  Seed: YERMCNILKGKFQTA
YERMINICKAKFLTA

SEQ ID NO: 135030 - protein, 15 aa, Artificial Sequence
  Description of Artificial Sequence: Synthetic peptide
  Seed: YERMCNILKGKFQTA
YERMINICKAKFVTA

SEQ ID NO: 135031 - protein, 15 aa, Artificial Sequence
  Description of Artificial Sequence: Synthetic peptide
  Seed: YERMCNILKGKFQTA
YERMINIEKAKFATA

SEQ ID NO: 135032 - protein, 15 aa, Artificial Sequence
  Description of Artificial Sequence: Synthetic peptide
  Seed: YERMCNILKGKFQTA
YERMINIEKAKFITA

SEQ ID NO: 135033 - protein, 15 aa, Artificial Sequence
  Description of Artificial Sequence: Synthetic peptide
  Seed: YERMCNILKGKFQTA
YERMINIEKAKFLTA

SEQ ID NO: 135034 - protein, 15 aa, Artificial Sequence
  Description of Artificial Sequence: Synthetic peptide
  Seed: YERMCNILKGKFQTA
YERMINIEKAKFVTA

SEQ ID NO: 135035 - protein, 15 aa, Artificial Sequence
  Description of Artificial Sequence: Synthetic peptide
  Seed: YERMCNILKGKFQTA
YERMINIEKGKFATA

SEQ ID NO: 135036 - protein, 15 aa, Artificial Sequence
  Description of Artificial Sequence: Synthetic peptide
  Seed: YERMCNILKGKFQTA
YERMINIEKGKFITA

SEQ ID NO: 135037 - protein, 15 aa, Artificial Sequence
  Description of Artificial Sequence: Synthetic peptide
  Seed: YERMCNILKGKFQTA
YERMINIEKGKFLTA

SEQ ID NO: 135038 - protein, 15 aa, Artificial Sequence
  Description of Artificial Sequence: Synthetic peptide
  Seed: YERMCNILKGKFQTA
YERMINIEKGKFVTA

SEQ ID NO: 135039 - protein, 15 aa, Artificial Sequence
  Description of Artificial Sequence: Synthetic peptide
  Seed: YERMCNILKGKFQTA
YERMINIEKSKFLTA

SEQ ID NO: 135040 - protein, 15 aa, Artificial Sequence
  Description of Artificial Sequence: Synthetic peptide
  Seed: YERMCNILKGKFQTA
YERMINIEKSKFVTA

SEQ ID NO: 135041 - protein, 15 aa, Artificial Sequence
  Description of Artificial Sequence: Synthetic peptide
  Seed: YERMCNILKGKFQTA
YERMINIGKAKFATA

SEQ ID NO: 135042 - protein, 15 aa, Artificial Sequence
  Description of Artificial Sequence: Synthetic peptide
  Seed: YERMCNILKGKFQTA
YERMINIGKAKFITA

SEQ ID NO: 135043 - protein, 15 aa, Artificial Sequence
  Description of Artificial Sequence: Synthetic peptide
  Seed: YERMCNILKGKFQTA
YERMINIGKAKFLTA

SEQ ID NO: 135044 - protein, 15 aa, Artificial Sequence
  Description of Artificial Sequence: Synthetic peptide
  Seed: YERMCNILKGKFQTA
YERMINIGKAKFVTA

SEQ ID NO: 135045 - protein, 15 aa, Artificial Sequence
  Description of Artificial Sequence: Synthetic peptide
  Seed: YERMCNILKGKFQTA
YERMINIGKGKFLTA

SEQ ID NO: 135046 - protein, 15 aa, Artificial Sequence
  Description of Artificial Sequence: Synthetic peptide
  Seed: YERMCNILKGKFQTA
YERMINIGKSKFLTA

SEQ ID NO: 135047 - protein, 15 aa, Artificial Sequence
  Description of Artificial Sequence: Synthetic peptide
  Seed: YERMCNILKGKFQTA
YERMINIIKAKFATA

SEQ ID NO: 135048 - protein, 15 aa, Artificial Sequence
  Description of Artificial Sequence: Synthetic peptide
  Seed: YERMCNILKGKFQTA
YERMINIIKAKFCTA

SEQ ID NO: 135049 - protein, 15 aa, Artificial Sequence
  Description of Artificial Sequence: Synthetic peptide
  Seed: YERMCNILKGKFQTA
YERMINIIKAKFGTA

SEQ ID NO: 135050 - protein, 15 aa, Artificial Sequence
  Description of Artificial Sequence: Synthetic peptide
  Seed: YERMCNILKGKFQTA
YERMINIIKAKFITA

SEQ ID NO: 135051 - protein, 15 aa, Artificial Sequence
  Description of Artificial Sequence: Synthetic peptide
  Seed: YERMCNILKGKFQTA
YERMINIIKAKFLTA

SEQ ID NO: 135052 - protein, 15 aa, Artificial Sequence
  Description of Artificial Sequence: Synthetic peptide
  Seed: YERMCNILKGKFQTA
YERMINIIKAKFMTA

SEQ ID NO: 135053 - protein, 15 aa, Artificial Sequence
  Description of Artificial Sequence: Synthetic peptide
  Seed: YERMCNILKGKFQTA
YERMINIIKAKFSTA

SEQ ID NO: 135054 - protein, 15 aa, Artificial Sequence
  Description of Artificial Sequence: Synthetic peptide
  Seed: YERMCNILKGKFQTA
YERMINIIKAKFTTA

SEQ ID NO: 135055 - protein, 15 aa, Artificial Sequence
  Description of Artificial Sequence: Synthetic peptide
  Seed: YERMCNILKGKFQTA
YERMINIIKAKFVTA

SEQ ID NO: 135056 - protein, 15 aa, Artificial Sequence
  Description of Artificial Sequence: Synthetic peptide
  Seed: YERMCNILKGKFQTA
YERMINIIKGKFATA

SEQ ID NO: 135057 - protein, 15 aa, Artificial Sequence
  Description of Artificial Sequence: Synthetic peptide
  Seed: YERMCNILKGKFQTA
YERMINIIKGKFITA

SEQ ID NO: 135058 - protein, 15 aa, Artificial Sequence
  Description of Artificial Sequence: Synthetic peptide
  Seed: YERMCNILKGKFQTA
YERMINIIKGKFLTA

SEQ ID NO: 135059 - protein, 15 aa, Artificial Sequence
  Description of Artificial Sequence: Synthetic peptide
  Seed: YERMCNILKGKFQTA
YERMINIIKGKFMTA

SEQ ID NO: 135060 - protein, 15 aa, Artificial Sequence
  Description of Artificial Sequence: Synthetic peptide
  Seed: YERMCNILKGKFQTA
YERMINIIKGKFSTA

SEQ ID NO: 135061 - protein, 15 aa, Artificial Sequence
  Description of Artificial Sequence: Synthetic peptide
  Seed: YERMCNILKGKFQTA
YERMINIIKGKFTTA

SEQ ID NO: 135062 - protein, 15 aa, Artificial Sequence
  Description of Artificial Sequence: Synthetic peptide
  Seed: YERMCNILKGKFQTA
YERMINIIKGKFVTA

SEQ ID NO: 135063 - protein, 15 aa, Artificial Sequence
  Description of Artificial Sequence: Synthetic peptide
  Seed: YERMCNILKGKFQTA
YERMINIIKNKFATA

SEQ ID NO: 135064 - protein, 15 aa, Artificial Sequence
  Description of Artificial Sequence: Synthetic peptide
  Seed: YERMCNILKGKFQTA
YERMINIIKNKFITA

SEQ ID NO: 135065 - protein, 15 aa, Artificial Sequence
  Description of Artificial Sequence: Synthetic peptide
  Seed: YERMCNILKGKFQTA
YERMINIIKNKFLTA

SEQ ID NO: 135066 - protein, 15 aa, Artificial Sequence
  Description of Artificial Sequence: Synthetic peptide
  Seed: YERMCNILKGKFQTA
YERMINIIKNKFVTA

SEQ ID NO: 135067 - protein, 15 aa, Artificial Sequence
  Description of Artificial Sequence: Synthetic peptide
  Seed: YERMCNILKGKFQTA
YERMINIIKPKFATA

SEQ ID NO: 135068 - protein, 15 aa, Artificial Sequence
  Description of Artificial Sequence: Synthetic peptide
  Seed: YERMCNILKGKFQTA
YERMINIIKPKFITA

SEQ ID NO: 135069 - protein, 15 aa, Artificial Sequence
  Description of Artificial Sequence: Synthetic peptide
  Seed: YERMCNILKGKFQTA
YERMINIIKPKFLTA

SEQ ID NO: 135070 - protein, 15 aa, Artificial Sequence
  Description of Artificial Sequence: Synthetic peptide
  Seed: YERMCNILKGKFQTA
YERMINIIKPKFMTA

SEQ ID NO: 135071 - protein, 15 aa, Artificial Sequence
  Description of Artificial Sequence: Synthetic peptide
  Seed: YERMCNILKGKFQTA
YERMINIIKPKFSTA

SEQ ID NO: 135072 - protein, 15 aa, Artificial Sequence
  Description of Artificial Sequence: Synthetic peptide
  Seed: YERMCNILKGKFQTA
YERMINIIKPKFTTA

SEQ ID NO: 135073 - protein, 15 aa, Artificial Sequence
  Description of Artificial Sequence: Synthetic peptide
  Seed: YERMCNILKGKFQTA
YERMINIIKPKFVTA

SEQ ID NO: 135074 - protein, 15 aa, Artificial Sequence
  Description of Artificial Sequence: Synthetic peptide
  Seed: YERMCNILKGKFQTA
YERMINIIKSKFATA

SEQ ID NO: 135075 - protein, 15 aa, Artificial Sequence
  Description of Artificial Sequence: Synthetic peptide
  Seed: YERMCNILKGKFQTA
YERMINIIKSKFITA

SEQ ID NO: 135076 - protein, 15 aa, Artificial Sequence
  Description of Artificial Sequence: Synthetic peptide
  Seed: YERMCNILKGKFQTA
YERMINIIKSKFLTA

SEQ ID NO: 135077 - protein, 15 aa, Artificial Sequence
  Description of Artificial Sequence: Synthetic peptide
  Seed: YERMCNILKGKFQTA
YERMINIIKSKFMTA

SEQ ID NO: 135078 - protein, 15 aa, Artificial Sequence
  Description of Artificial Sequence: Synthetic peptide
  Seed: YERMCNILKGKFQTA
YERMINIIKSKFSTA

SEQ ID NO: 135079 - protein, 15 aa, Artificial Sequence
  Description of Artificial Sequence: Synthetic peptide
  Seed: YERMCNILKGKFQTA
YERMINIIKSKFTTA

SEQ ID NO: 135080 - protein, 15 aa, Artificial Sequence
  Description of Artificial Sequence: Synthetic peptide
  Seed: YERMCNILKGKFQTA
YERMINIIKSKFVTA

SEQ ID NO: 135081 - protein, 15 aa, Artificial Sequence
  Description of Artificial Sequence: Synthetic peptide
  Seed: YERMCNILKGKFQTA
YERMINIIKTKFATA

SEQ ID NO: 135082 - protein, 15 aa, Artificial Sequence
  Description of Artificial Sequence: Synthetic peptide
  Seed: YERMCNILKGKFQTA
YERMINIIKTKFITA

SEQ ID NO: 135083 - protein, 15 aa, Artificial Sequence
  Description of Artificial Sequence: Synthetic peptide
  Seed: YERMCNILKGKFQTA
YERMINIIKTKFLTA

SEQ ID NO: 135084 - protein, 15 aa, Artificial Sequence
  Description of Artificial Sequence: Synthetic peptide
  Seed: YERMCNILKGKFQTA
YERMINIIKTKFTTA

SEQ ID NO: 135085 - protein, 15 aa, Artificial Sequence
  Description of Artificial Sequence: Synthetic peptide
  Seed: YERMCNILKGKFQTA
YERMINIIKTKFVTA

SEQ ID NO: 135086 - protein, 15 aa, Artificial Sequence
  Description of Artificial Sequence: Synthetic peptide
  Seed: YERMCNILKGKFQTA
YERMINILKAKFATA

SEQ ID NO: 135087 - protein, 15 aa, Artificial Sequence
  Description of Artificial Sequence: Synthetic peptide
  Seed: YERMCNILKGKFQTA
YERMINILKAKFCTA

SEQ ID NO: 135088 - protein, 15 aa, Artificial Sequence
  Description of Artificial Sequence: Synthetic peptide
  Seed: YERMCNILKGKFQTA
YERMINILKAKFFTA

SEQ ID NO: 135089 - protein, 15 aa, Artificial Sequence
  Description of Artificial Sequence: Synthetic peptide
  Seed: YERMCNILKGKFQTA
YERMINILKAKFGTA

SEQ ID NO: 135090 - protein, 15 aa, Artificial Sequence
  Description of Artificial Sequence: Synthetic peptide
  Seed: YERMCNILKGKFQTA
YERMINILKAKFHTA

SEQ ID NO: 135091 - protein, 15 aa, Artificial Sequence
  Description of Artificial Sequence: Synthetic peptide
  Seed: YERMCNILKGKFQTA
YERMINILKAKFITA

SEQ ID NO: 135092 - protein, 15 aa, Artificial Sequence
  Description of Artificial Sequence: Synthetic peptide
  Seed: YERMCNILKGKFQTA
YERMINILKAKFLTA

SEQ ID NO: 135093 - protein, 15 aa, Artificial Sequence
  Description of Artificial Sequence: Synthetic peptide
  Seed: YERMCNILKGKFQTA
YERMINILKAKFMTA

SEQ ID NO: 135094 - protein, 15 aa, Artificial Sequence
  Description of Artificial Sequence: Synthetic peptide
  Seed: YERMCNILKGKFQTA
YERMINILKAKFNTA

SEQ ID NO: 135095 - protein, 15 aa, Artificial Sequence
  Description of Artificial Sequence: Synthetic peptide
  Seed: YERMCNILKGKFQTA
YERMINILKAKFPTA

SEQ ID NO: 135096 - protein, 15 aa, Artificial Sequence
  Description of Artificial Sequence: Synthetic peptide
  Seed: YERMCNILKGKFQTA
YERMINILKAKFSTA

SEQ ID NO: 135097 - protein, 15 aa, Artificial Sequence
  Description of Artificial Sequence: Synthetic peptide
  Seed: YERMCNILKGKFQTA
YERMINILKAKFTTA

SEQ ID NO: 135098 - protein, 15 aa, Artificial Sequence
  Description of Artificial Sequence: Synthetic peptide
  Seed: YERMCNILKGKFQTA
YERMINILKAKFVTA

SEQ ID NO: 135099 - protein, 15 aa, Artificial Sequence
  Description of Artificial Sequence: Synthetic peptide
  Seed: YERMCNILKGKFQTA
YERMINILKGKFATA

SEQ ID NO: 135100 - protein, 15 aa, Artificial Sequence
  Description of Artificial Sequence: Synthetic peptide
  Seed: YERMCNILKGKFQTA
YERMINILKGKFCTA

SEQ ID NO: 135101 - protein, 15 aa, Artificial Sequence
  Description of Artificial Sequence: Synthetic peptide
  Seed: YERMCNILKGKFQTA
YERMINILKGKFFTA

SEQ ID NO: 135102 - protein, 15 aa, Artificial Sequence
  Description of Artificial Sequence: Synthetic peptide
  Seed: YERMCNILKGKFQTA
YERMINILKGKFGTA

SEQ ID NO: 135103 - protein, 15 aa, Artificial Sequence
  Description of Artificial Sequence: Synthetic peptide
  Seed: YERMCNILKGKFQTA
YERMINILKGKFITA

SEQ ID NO: 135104 - protein, 15 aa, Artificial Sequence
  Description of Artificial Sequence: Synthetic peptide
  Seed: YERMCNILKGKFQTA
YERMINILKGKFLTA

SEQ ID NO: 135105 - protein, 15 aa, Artificial Sequence
  Description of Artificial Sequence: Synthetic peptide
  Seed: YERMCNILKGKFQTA
YERMINILKGKFMTA

SEQ ID NO: 135106 - protein, 15 aa, Artificial Sequence
  Description of Artificial Sequence: Synthetic peptide
  Seed: YERMCNILKGKFQTA
YERMINILKGKFNTA

SEQ ID NO: 135107 - protein, 15 aa, Artificial Sequence
  Description of Artificial Sequence: Synthetic peptide
  Seed: YERMCNILKGKFQTA
YERMINILKGKFSTA

SEQ ID NO: 135108 - protein, 15 aa, Artificial Sequence
  Description of Artificial Sequence: Synthetic peptide
  Seed: YERMCNILKGKFQTA
YERMINILKGKFTTA

SEQ ID NO: 135109 - protein, 15 aa, Artificial Sequence
  Description of Artificial Sequence: Synthetic peptide
  Seed: YERMCNILKGKFQTA
YERMINILKGKFVTA

SEQ ID NO: 135110 - protein, 15 aa, Artificial Sequence
  Description of Artificial Sequence: Synthetic peptide
  Seed: YERMCNILKGKFQTA
YERMINILKIKFVTA

SEQ ID NO: 135111 - protein, 15 aa, Artificial Sequence
  Description of Artificial Sequence: Synthetic peptide
  Seed: YERMCNILKGKFQTA
YERMINILKNKFATA

SEQ ID NO: 135112 - protein, 15 aa, Artificial Sequence
  Description of Artificial Sequence: Synthetic peptide
  Seed: YERMCNILKGKFQTA
YERMINILKNKFITA

SEQ ID NO: 135113 - protein, 15 aa, Artificial Sequence
  Description of Artificial Sequence: Synthetic peptide
  Seed: YERMCNILKGKFQTA
YERMINILKNKFLTA

SEQ ID NO: 135114 - protein, 15 aa, Artificial Sequence
  Description of Artificial Sequence: Synthetic peptide
  Seed: YERMCNILKGKFQTA
YERMINILKNKFMTA

SEQ ID NO: 135115 - protein, 15 aa, Artificial Sequence
  Description of Artificial Sequence: Synthetic peptide
  Seed: YERMCNILKGKFQTA
YERMINILKNKFSTA

SEQ ID NO: 135116 - protein, 15 aa, Artificial Sequence
  Description of Artificial Sequence: Synthetic peptide
  Seed: YERMCNILKGKFQTA
YERMINILKNKFTTA

SEQ ID NO: 135117 - protein, 15 aa, Artificial Sequence
  Description of Artificial Sequence: Synthetic peptide
  Seed: YERMCNILKGKFQTA
YERMINILKNKFVTA

SEQ ID NO: 135118 - protein, 15 aa, Artificial Sequence
  Description of Artificial Sequence: Synthetic peptide
  Seed: YERMCNILKGKFQTA
YERMINILKPKFATA

SEQ ID NO: 135119 - protein, 15 aa, Artificial Sequence
  Description of Artificial Sequence: Synthetic peptide
  Seed: YERMCNILKGKFQTA
YERMINILKPKFCTA

SEQ ID NO: 135120 - protein, 15 aa, Artificial Sequence
  Description of Artificial Sequence: Synthetic peptide
  Seed: YERMCNILKGKFQTA
YERMINILKPKFGTA

SEQ ID NO: 135121 - protein, 15 aa, Artificial Sequence
  Description of Artificial Sequence: Synthetic peptide
  Seed: YERMCNILKGKFQTA
YERMINILKPKFITA

SEQ ID NO: 135122 - protein, 15 aa, Artificial Sequence
  Description of Artificial Sequence: Synthetic peptide
  Seed: YERMCNILKGKFQTA
YERMINILKPKFLTA

SEQ ID NO: 135123 - protein, 15 aa, Artificial Sequence
  Description of Artificial Sequence: Synthetic peptide
  Seed: YERMCNILKGKFQTA
YERMINILKPKFMTA

SEQ ID NO: 135124 - protein, 15 aa, Artificial Sequence
  Description of Artificial Sequence: Synthetic peptide
  Seed: YERMCNILKGKFQTA
YERMINILKPKFSTA

SEQ ID NO: 135125 - protein, 15 aa, Artificial Sequence
  Description of Artificial Sequence: Synthetic peptide
  Seed: YERMCNILKGKFQTA
YERMINILKPKFTTA

SEQ ID NO: 135126 - protein, 15 aa, Artificial Sequence
  Description of Artificial Sequence: Synthetic peptide
  Seed: YERMCNILKGKFQTA
YERMINILKPKFVTA

SEQ ID NO: 135127 - protein, 15 aa, Artificial Sequence
  Description of Artificial Sequence: Synthetic peptide
  Seed: YERMCNILKGKFQTA
YERMINILKSKFATA

SEQ ID NO: 135128 - protein, 15 aa, Artificial Sequence
  Description of Artificial Sequence: Synthetic peptide
  Seed: YERMCNILKGKFQTA
YERMINILKSKFCTA

SEQ ID NO: 135129 - protein, 15 aa, Artificial Sequence
  Description of Artificial Sequence: Synthetic peptide
  Seed: YERMCNILKGKFQTA
YERMINILKSKFFTA

SEQ ID NO: 135130 - protein, 15 aa, Artificial Sequence
  Description of Artificial Sequence: Synthetic peptide
  Seed: YERMCNILKGKFQTA
YERMINILKSKFGTA

SEQ ID NO: 135131 - protein, 15 aa, Artificial Sequence
  Description of Artificial Sequence: Synthetic peptide
  Seed: YERMCNILKGKFQTA
YERMINILKSKFITA

SEQ ID NO: 135132 - protein, 15 aa, Artificial Sequence
  Description of Artificial Sequence: Synthetic peptide
  Seed: YERMCNILKGKFQTA
YERMINILKSKFLTA

SEQ ID NO: 135133 - protein, 15 aa, Artificial Sequence
  Description of Artificial Sequence: Synthetic peptide
  Seed: YERMCNILKGKFQTA
YERMINILKSKFMTA

SEQ ID NO: 135134 - protein, 15 aa, Artificial Sequence
  Description of Artificial Sequence: Synthetic peptide
  Seed: YERMCNILKGKFQTA
YERMINILKSKFNTA

SEQ ID NO: 135135 - protein, 15 aa, Artificial Sequence
  Description of Artificial Sequence: Synthetic peptide
  Seed: YERMCNILKGKFQTA
YERMINILKSKFSTA

SEQ ID NO: 135136 - protein, 15 aa, Artificial Sequence
  Description of Artificial Sequence: Synthetic peptide
  Seed: YERMCNILKGKFQTA
YERMINILKSKFTTA

SEQ ID NO: 135137 - protein, 15 aa, Artificial Sequence
  Description of Artificial Sequence: Synthetic peptide
  Seed: YERMCNILKGKFQTA
YERMINILKSKFVTA

SEQ ID NO: 135138 - protein, 15 aa, Artificial Sequence
  Description of Artificial Sequence: Synthetic peptide
  Seed: YERMCNILKGKFQTA
YERMINILKTKFATA

SEQ ID NO: 135139 - protein, 15 aa, Artificial Sequence
  Description of Artificial Sequence: Synthetic peptide
  Seed: YERMCNILKGKFQTA
YERMINILKTKFITA

SEQ ID NO: 135140 - protein, 15 aa, Artificial Sequence
  Description of Artificial Sequence: Synthetic peptide
  Seed: YERMCNILKGKFQTA
YERMINILKTKFLTA

SEQ ID NO: 135141 - protein, 15 aa, Artificial Sequence
  Description of Artificial Sequence: Synthetic peptide
  Seed: YERMCNILKGKFQTA
YERMINILKTKFMTA

SEQ ID NO: 135142 - protein, 15 aa, Artificial Sequence
  Description of Artificial Sequence: Synthetic peptide
  Seed: YERMCNILKGKFQTA
YERMINILKTKFSTA

SEQ ID NO: 135143 - protein, 15 aa, Artificial Sequence
  Description of Artificial Sequence: Synthetic peptide
  Seed: YERMCNILKGKFQTA
YERMINILKTKFTTA

SEQ ID NO: 135144 - protein, 15 aa, Artificial Sequence
  Description of Artificial Sequence: Synthetic peptide
  Seed: YERMCNILKGKFQTA
YERMINILKTKFVTA

SEQ ID NO: 135145 - protein, 15 aa, Artificial Sequence
  Description of Artificial Sequence: Synthetic peptide
  Seed: YERMCNILKGKFQTA
YERMINILKVKFATA

SEQ ID NO: 135146 - protein, 15 aa, Artificial Sequence
  Description of Artificial Sequence: Synthetic peptide
  Seed: YERMCNILKGKFQTA
YERMINILKVKFITA

SEQ ID NO: 135147 - protein, 15 aa, Artificial Sequence
  Description of Artificial Sequence: Synthetic peptide
  Seed: YERMCNILKGKFQTA
YERMINILKVKFLTA

SEQ ID NO: 135148 - protein, 15 aa, Artificial Sequence
  Description of Artificial Sequence: Synthetic peptide
  Seed: YERMCNILKGKFQTA
YERMINILKVKFSTA

SEQ ID NO: 135149 - protein, 15 aa, Artificial Sequence
  Description of Artificial Sequence: Synthetic peptide
  Seed: YERMCNILKGKFQTA
YERMINILKVKFTTA

SEQ ID NO: 135150 - protein, 15 aa, Artificial Sequence
  Description of Artificial Sequence: Synthetic peptide
  Seed: YERMCNILKGKFQTA
YERMINILKVKFVTA

SEQ ID NO: 135151 - protein, 15 aa, Artificial Sequence
  Description of Artificial Sequence: Synthetic peptide
  Seed: YERMCNILKGKFQTA
YERMINIMKAKFATA

SEQ ID NO: 135152 - protein, 15 aa, Artificial Sequence
  Description of Artificial Sequence: Synthetic peptide
  Seed: YERMCNILKGKFQTA
YERMINIMKAKFCTA

SEQ ID NO: 135153 - protein, 15 aa, Artificial Sequence
  Description of Artificial Sequence: Synthetic peptide
  Seed: YERMCNILKGKFQTA
YERMINIMKAKFFTA

SEQ ID NO: 135154 - protein, 15 aa, Artificial Sequence
  Description of Artificial Sequence: Synthetic peptide
  Seed: YERMCNILKGKFQTA
YERMINIMKAKFGTA

SEQ ID NO: 135155 - protein, 15 aa, Artificial Sequence
  Description of Artificial Sequence: Synthetic peptide
  Seed: YERMCNILKGKFQTA
YERMINIMKAKFHTA

SEQ ID NO: 135156 - protein, 15 aa, Artificial Sequence
  Description of Artificial Sequence: Synthetic peptide
  Seed: YERMCNILKGKFQTA
YERMINIMKAKFITA

SEQ ID NO: 135157 - protein, 15 aa, Artificial Sequence
  Description of Artificial Sequence: Synthetic peptide
  Seed: YERMCNILKGKFQTA
YERMINIMKAKFLTA

SEQ ID NO: 135158 - protein, 15 aa, Artificial Sequence
  Description of Artificial Sequence: Synthetic peptide
  Seed: YERMCNILKGKFQTA
YERMINIMKAKFMTA

SEQ ID NO: 135159 - protein, 15 aa, Artificial Sequence
  Description of Artificial Sequence: Synthetic peptide
  Seed: YERMCNILKGKFQTA
YERMINIMKAKFNTA

SEQ ID NO: 135160 - protein, 15 aa, Artificial Sequence
  Description of Artificial Sequence: Synthetic peptide
  Seed: YERMCNILKGKFQTA
YERMINIMKAKFPTA

SEQ ID NO: 135161 - protein, 15 aa, Artificial Sequence
  Description of Artificial Sequence: Synthetic peptide
  Seed: YERMCNILKGKFQTA
YERMINIMKAKFSTA

SEQ ID NO: 135162 - protein, 15 aa, Artificial Sequence
  Description of Artificial Sequence: Synthetic peptide
  Seed: YERMCNILKGKFQTA
YERMINIMKAKFTTA

SEQ ID NO: 135163 - protein, 15 aa, Artificial Sequence
  Description of Artificial Sequence: Synthetic peptide
  Seed: YERMCNILKGKFQTA
YERMINIMKAKFVTA

SEQ ID NO: 135164 - protein, 15 aa, Artificial Sequence
  Description of Artificial Sequence: Synthetic peptide
  Seed: YERMCNILKGKFQTA
YERMINIMKGKFATA

SEQ ID NO: 135165 - protein, 15 aa, Artificial Sequence
  Description of Artificial Sequence: Synthetic peptide
  Seed: YERMCNILKGKFQTA
YERMINIMKGKFCTA

SEQ ID NO: 135166 - protein, 15 aa, Artificial Sequence
  Description of Artificial Sequence: Synthetic peptide
  Seed: YERMCNILKGKFQTA
YERMINIMKGKFFTA

SEQ ID NO: 135167 - protein, 15 aa, Artificial Sequence
  Description of Artificial Sequence: Synthetic peptide
  Seed: YERMCNILKGKFQTA
YERMINIMKGKFGTA

SEQ ID NO: 135168 - protein, 15 aa, Artificial Sequence
  Description of Artificial Sequence: Synthetic peptide
  Seed: YERMCNILKGKFQTA
YERMINIMKGKFITA

SEQ ID NO: 135169 - protein, 15 aa, Artificial Sequence
  Description of Artificial Sequence: Synthetic peptide
  Seed: YERMCNILKGKFQTA
YERMINIMKGKFLTA

SEQ ID NO: 135170 - protein, 15 aa, Artificial Sequence
  Description of Artificial Sequence: Synthetic peptide
  Seed: YERMCNILKGKFQTA
YERMINIMKGKFMTA

SEQ ID NO: 135171 - protein, 15 aa, Artificial Sequence
  Description of Artificial Sequence: Synthetic peptide
  Seed: YERMCNILKGKFQTA
YERMINIMKGKFNTA

SEQ ID NO: 135172 - protein, 15 aa, Artificial Sequence
  Description of Artificial Sequence: Synthetic peptide
  Seed: YERMCNILKGKFQTA
YERMINIMKGKFSTA

SEQ ID NO: 135173 - protein, 15 aa, Artificial Sequence
  Description of Artificial Sequence: Synthetic peptide
  Seed: YERMCNILKGKFQTA
YERMINIMKGKFTTA

SEQ ID NO: 135174 - protein, 15 aa, Artificial Sequence
  Description of Artificial Sequence: Synthetic peptide
  Seed: YERMCNILKGKFQTA
YERMINIMKGKFVTA

SEQ ID NO: 135175 - protein, 15 aa, Artificial Sequence
  Description of Artificial Sequence: Synthetic peptide
  Seed: YERMCNILKGKFQTA
YERMINIMKIKFATA

SEQ ID NO: 135176 - protein, 15 aa, Artificial Sequence
  Description of Artificial Sequence: Synthetic peptide
  Seed: YERMCNILKGKFQTA
YERMINIMKIKFLTA

SEQ ID NO: 135177 - protein, 15 aa, Artificial Sequence
  Description of Artificial Sequence: Synthetic peptide
  Seed: YERMCNILKGKFQTA
YERMINIMKIKFVTA

SEQ ID NO: 135178 - protein, 15 aa, Artificial Sequence
  Description of Artificial Sequence: Synthetic peptide
  Seed: YERMCNILKGKFQTA
YERMINIMKNKFATA

SEQ ID NO: 135179 - protein, 15 aa, Artificial Sequence
  Description of Artificial Sequence: Synthetic peptide
  Seed: YERMCNILKGKFQTA
YERMINIMKNKFITA

SEQ ID NO: 135180 - protein, 15 aa, Artificial Sequence
  Description of Artificial Sequence: Synthetic peptide
  Seed: YERMCNILKGKFQTA
YERMINIMKNKFLTA

SEQ ID NO: 135181 - protein, 15 aa, Artificial Sequence
  Description of Artificial Sequence: Synthetic peptide
  Seed: YERMCNILKGKFQTA
YERMINIMKNKFMTA

SEQ ID NO: 135182 - protein, 15 aa, Artificial Sequence
  Description of Artificial Sequence: Synthetic peptide
  Seed: YERMCNILKGKFQTA
YERMINIMKNKFSTA

SEQ ID NO: 135183 - protein, 15 aa, Artificial Sequence
  Description of Artificial Sequence: Synthetic peptide
  Seed: YERMCNILKGKFQTA
YERMINIMKNKFTTA

SEQ ID NO: 135184 - protein, 15 aa, Artificial Sequence
  Description of Artificial Sequence: Synthetic peptide
  Seed: YERMCNILKGKFQTA
YERMINIMKNKFVTA

SEQ ID NO: 135185 - protein, 15 aa, Artificial Sequence
  Description of Artificial Sequence: Synthetic peptide
  Seed: YERMCNILKGKFQTA
YERMINIMKPKFATA

SEQ ID NO: 135186 - protein, 15 aa, Artificial Sequence
  Description of Artificial Sequence: Synthetic peptide
  Seed: YERMCNILKGKFQTA
YERMINIMKPKFITA

SEQ ID NO: 135187 - protein, 15 aa, Artificial Sequence
  Description of Artificial Sequence: Synthetic peptide
  Seed: YERMCNILKGKFQTA
YERMINIMKPKFLTA

SEQ ID NO: 135188 - protein, 15 aa, Artificial Sequence
  Description of Artificial Sequence: Synthetic peptide
  Seed: YERMCNILKGKFQTA
YERMINIMKPKFMTA

SEQ ID NO: 135189 - protein, 15 aa, Artificial Sequence
  Description of Artificial Sequence: Synthetic peptide
  Seed: YERMCNILKGKFQTA
YERMINIMKPKFSTA

SEQ ID NO: 135190 - protein, 15 aa, Artificial Sequence
  Description of Artificial Sequence: Synthetic peptide
  Seed: YERMCNILKGKFQTA
YERMINIMKPKFTTA

SEQ ID NO: 135191 - protein, 15 aa, Artificial Sequence
  Description of Artificial Sequence: Synthetic peptide
  Seed: YERMCNILKGKFQTA
YERMINIMKPKFVTA

SEQ ID NO: 135192 - protein, 15 aa, Artificial Sequence
  Description of Artificial Sequence: Synthetic peptide
  Seed: YERMCNILKGKFQTA
YERMINIMKSKFATA

SEQ ID NO: 135193 - protein, 15 aa, Artificial Sequence
  Description of Artificial Sequence: Synthetic peptide
  Seed: YERMCNILKGKFQTA
YERMINIMKSKFCTA

SEQ ID NO: 135194 - protein, 15 aa, Artificial Sequence
  Description of Artificial Sequence: Synthetic peptide
  Seed: YERMCNILKGKFQTA
YERMINIMKSKFFTA

SEQ ID NO: 135195 - protein, 15 aa, Artificial Sequence
  Description of Artificial Sequence: Synthetic peptide
  Seed: YERMCNILKGKFQTA
YERMINIMKSKFGTA

SEQ ID NO: 135196 - protein, 15 aa, Artificial Sequence
  Description of Artificial Sequence: Synthetic peptide
  Seed: YERMCNILKGKFQTA
YERMINIMKSKFITA

SEQ ID NO: 135197 - protein, 15 aa, Artificial Sequence
  Description of Artificial Sequence: Synthetic peptide
  Seed: YERMCNILKGKFQTA
YERMINIMKSKFLTA

SEQ ID NO: 135198 - protein, 15 aa, Artificial Sequence
  Description of Artificial Sequence: Synthetic peptide
  Seed: YERMCNILKGKFQTA
YERMINIMKSKFMTA

SEQ ID NO: 135199 - protein, 15 aa, Artificial Sequence
  Description of Artificial Sequence: Synthetic peptide
  Seed: YERMCNILKGKFQTA
YERMINIMKSKFNTA

SEQ ID NO: 135200 - protein, 15 aa, Artificial Sequence
  Description of Artificial Sequence: Synthetic peptide
  Seed: YERMCNILKGKFQTA
YERMINIMKSKFSTA

SEQ ID NO: 135201 - protein, 15 aa, Artificial Sequence
  Description of Artificial Sequence: Synthetic peptide
  Seed: YERMCNILKGKFQTA
YERMINIMKSKFTTA

SEQ ID NO: 135202 - protein, 15 aa, Artificial Sequence
  Description of Artificial Sequence: Synthetic peptide
  Seed: YERMCNILKGKFQTA
YERMINIMKSKFVTA

SEQ ID NO: 135203 - protein, 15 aa, Artificial Sequence
  Description of Artificial Sequence: Synthetic peptide
  Seed: YERMCNILKGKFQTA
YERMINIMKTKFATA

SEQ ID NO: 135204 - protein, 15 aa, Artificial Sequence
  Description of Artificial Sequence: Synthetic peptide
  Seed: YERMCNILKGKFQTA
YERMINIMKTKFITA

SEQ ID NO: 135205 - protein, 15 aa, Artificial Sequence
  Description of Artificial Sequence: Synthetic peptide
  Seed: YERMCNILKGKFQTA
YERMINIMKTKFLTA

SEQ ID NO: 135206 - protein, 15 aa, Artificial Sequence
  Description of Artificial Sequence: Synthetic peptide
  Seed: YERMCNILKGKFQTA
YERMINIMKTKFMTA

SEQ ID NO: 135207 - protein, 15 aa, Artificial Sequence
  Description of Artificial Sequence: Synthetic peptide
  Seed: YERMCNILKGKFQTA
YERMINIMKTKFSTA

SEQ ID NO: 135208 - protein, 15 aa, Artificial Sequence
  Description of Artificial Sequence: Synthetic peptide
  Seed: YERMCNILKGKFQTA
YERMINIMKTKFTTA

SEQ ID NO: 135209 - protein, 15 aa, Artificial Sequence
  Description of Artificial Sequence: Synthetic peptide
  Seed: YERMCNILKGKFQTA
YERMINIMKTKFVTA

SEQ ID NO: 135210 - protein, 15 aa, Artificial Sequence
  Description of Artificial Sequence: Synthetic peptide
  Seed: YERMCNILKGKFQTA
YERMINIMKVKFATA

SEQ ID NO: 135211 - protein, 15 aa, Artificial Sequence
  Description of Artificial Sequence: Synthetic peptide
  Seed: YERMCNILKGKFQTA
YERMINIMKVKFITA

SEQ ID NO: 135212 - protein, 15 aa, Artificial Sequence
  Description of Artificial Sequence: Synthetic peptide
  Seed: YERMCNILKGKFQTA
YERMINIMKVKFLTA

SEQ ID NO: 135213 - protein, 15 aa, Artificial Sequence
  Description of Artificial Sequence: Synthetic peptide
  Seed: YERMCNILKGKFQTA
YERMINIMKVKFMTA

SEQ ID NO: 135214 - protein, 15 aa, Artificial Sequence
  Description of Artificial Sequence: Synthetic peptide
  Seed: YERMCNILKGKFQTA
YERMINIMKVKFSTA

SEQ ID NO: 135215 - protein, 15 aa, Artificial Sequence
  Description of Artificial Sequence: Synthetic peptide
  Seed: YERMCNILKGKFQTA
YERMINIMKVKFTTA

SEQ ID NO: 135216 - protein, 15 aa, Artificial Sequence
  Description of Artificial Sequence: Synthetic peptide
  Seed: YERMCNILKGKFQTA
YERMINIMKVKFVTA

SEQ ID NO: 135217 - protein, 15 aa, Artificial Sequence
  Description of Artificial Sequence: Synthetic peptide
  Seed: YERMCNILKGKFQTA
YERMINIQKAKFATA

SEQ ID NO: 135218 - protein, 15 aa, Artificial Sequence
  Description of Artificial Sequence: Synthetic peptide
  Seed: YERMCNILKGKFQTA
YERMINIQKAKFITA

SEQ ID NO: 135219 - protein, 15 aa, Artificial Sequence
  Description of Artificial Sequence: Synthetic peptide
  Seed: YERMCNILKGKFQTA
YERMINIQKAKFLTA

SEQ ID NO: 135220 - protein, 15 aa, Artificial Sequence
  Description of Artificial Sequence: Synthetic peptide
  Seed: YERMCNILKGKFQTA
YERMINIQKAKFMTA

SEQ ID NO: 135221 - protein, 15 aa, Artificial Sequence
  Description of Artificial Sequence: Synthetic peptide
  Seed: YERMCNILKGKFQTA
YERMINIQKAKFSTA

SEQ ID NO: 135222 - protein, 15 aa, Artificial Sequence
  Description of Artificial Sequence: Synthetic peptide
  Seed: YERMCNILKGKFQTA
YERMINIQKAKFTTA

SEQ ID NO: 135223 - protein, 15 aa, Artificial Sequence
  Description of Artificial Sequence: Synthetic peptide
  Seed: YERMCNILKGKFQTA
YERMINIQKAKFVTA

SEQ ID NO: 135224 - protein, 15 aa, Artificial Sequence
  Description of Artificial Sequence: Synthetic peptide
  Seed: YERMCNILKGKFQTA
YERMINIQKGKFATA

SEQ ID NO: 135225 - protein, 15 aa, Artificial Sequence
  Description of Artificial Sequence: Synthetic peptide
  Seed: YERMCNILKGKFQTA
YERMINIQKGKFITA

SEQ ID NO: 135226 - protein, 15 aa, Artificial Sequence
  Description of Artificial Sequence: Synthetic peptide
  Seed: YERMCNILKGKFQTA
YERMINIQKGKFLTA

SEQ ID NO: 135227 - protein, 15 aa, Artificial Sequence
  Description of Artificial Sequence: Synthetic peptide
  Seed: YERMCNILKGKFQTA
YERMINIQKGKFMTA

SEQ ID NO: 135228 - protein, 15 aa, Artificial Sequence
  Description of Artificial Sequence: Synthetic peptide
  Seed: YERMCNILKGKFQTA
YERMINIQKGKFVTA

SEQ ID NO: 135229 - protein, 15 aa, Artificial Sequence
  Description of Artificial Sequence: Synthetic peptide
  Seed: YERMCNILKGKFQTA
YERMINIQKNKFLTA

SEQ ID NO: 135230 - protein, 15 aa, Artificial Sequence
  Description of Artificial Sequence: Synthetic peptide
  Seed: YERMCNILKGKFQTA
YERMINIQKPKFATA

SEQ ID NO: 135231 - protein, 15 aa, Artificial Sequence
  Description of Artificial Sequence: Synthetic peptide
  Seed: YERMCNILKGKFQTA
YERMINIQKPKFITA

SEQ ID NO: 135232 - protein, 15 aa, Artificial Sequence
  Description of Artificial Sequence: Synthetic peptide
  Seed: YERMCNILKGKFQTA
YERMINIQKPKFLTA

SEQ ID NO: 135233 - protein, 15 aa, Artificial Sequence
  Description of Artificial Sequence: Synthetic peptide
  Seed: YERMCNILKGKFQTA
YERMINIQKPKFVTA

SEQ ID NO: 135234 - protein, 15 aa, Artificial Sequence
  Description of Artificial Sequence: Synthetic peptide
  Seed: YERMCNILKGKFQTA
YERMINIQKSKFATA

SEQ ID NO: 135235 - protein, 15 aa, Artificial Sequence
  Description of Artificial Sequence: Synthetic peptide
  Seed: YERMCNILKGKFQTA
YERMINIQKSKFITA

SEQ ID NO: 135236 - protein, 15 aa, Artificial Sequence
  Description of Artificial Sequence: Synthetic peptide
  Seed: YERMCNILKGKFQTA
YERMINIQKSKFLTA

SEQ ID NO: 135237 - protein, 15 aa, Artificial Sequence
  Description of Artificial Sequence: Synthetic peptide
  Seed: YERMCNILKGKFQTA
YERMINIQKSKFMTA

SEQ ID NO: 135238 - protein, 15 aa, Artificial Sequence
  Description of Artificial Sequence: Synthetic peptide
  Seed: YERMCNILKGKFQTA
YERMINIQKSKFVTA

SEQ ID NO: 135239 - protein, 15 aa, Artificial Sequence
  Description of Artificial Sequence: Synthetic peptide
  Seed: YERMCNILKGKFQTA
YERMINIQKTKFLTA

SEQ ID NO: 135240 - protein, 15 aa, Artificial Sequence
  Description of Artificial Sequence: Synthetic peptide
  Seed: YERMCNILKGKFQTA
YERMINIQKTKFVTA

SEQ ID NO: 135241 - protein, 15 aa, Artificial Sequence
  Description of Artificial Sequence: Synthetic peptide
  Seed: YERMCNILKGKFQTA
YERMINISKAKFATA

SEQ ID NO: 135242 - protein, 15 aa, Artificial Sequence
  Description of Artificial Sequence: Synthetic peptide
  Seed: YERMCNILKGKFQTA
YERMINISKAKFITA

SEQ ID NO: 135243 - protein, 15 aa, Artificial Sequence
  Description of Artificial Sequence: Synthetic peptide
  Seed: YERMCNILKGKFQTA
YERMINISKAKFLTA

SEQ ID NO: 135244 - protein, 15 aa, Artificial Sequence
  Description of Artificial Sequence: Synthetic peptide
  Seed: YERMCNILKGKFQTA
YERMINISKAKFMTA

SEQ ID NO: 135245 - protein, 15 aa, Artificial Sequence
  Description of Artificial Sequence: Synthetic peptide
  Seed: YERMCNILKGKFQTA
YERMINISKAKFTTA

SEQ ID NO: 135246 - protein, 15 aa, Artificial Sequence
  Description of Artificial Sequence: Synthetic peptide
  Seed: YERMCNILKGKFQTA
YERMINISKAKFVTA

SEQ ID NO: 135247 - protein, 15 aa, Artificial Sequence
  Description of Artificial Sequence: Synthetic peptide
  Seed: YERMCNILKGKFQTA
YERMINISKGKFATA

SEQ ID NO: 135248 - protein, 15 aa, Artificial Sequence
  Description of Artificial Sequence: Synthetic peptide
  Seed: YERMCNILKGKFQTA
YERMINISKGKFITA

SEQ ID NO: 135249 - protein, 15 aa, Artificial Sequence
  Description of Artificial Sequence: Synthetic peptide
  Seed: YERMCNILKGKFQTA
YERMINISKGKFLTA

SEQ ID NO: 135250 - protein, 15 aa, Artificial Sequence
  Description of Artificial Sequence: Synthetic peptide
  Seed: YERMCNILKGKFQTA
YERMINISKGKFVTA

SEQ ID NO: 135251 - protein, 15 aa, Artificial Sequence
  Description of Artificial Sequence: Synthetic peptide
  Seed: YERMCNILKGKFQTA
YERMINISKPKFLTA

SEQ ID NO: 135252 - protein, 15 aa, Artificial Sequence
  Description of Artificial Sequence: Synthetic peptide
  Seed: YERMCNILKGKFQTA
YERMINISKSKFITA

SEQ ID NO: 135253 - protein, 15 aa, Artificial Sequence
  Description of Artificial Sequence: Synthetic peptide
  Seed: YERMCNILKGKFQTA
YERMINISKSKFLTA

SEQ ID NO: 135254 - protein, 15 aa, Artificial Sequence
  Description of Artificial Sequence: Synthetic peptide
  Seed: YERMCNILKGKFQTA
YERMINISKSKFVTA

SEQ ID NO: 135255 - protein, 15 aa, Artificial Sequence
  Description of Artificial Sequence: Synthetic peptide
  Seed: YERMCNILKGKFQTA
YERMINITKAKFATA

SEQ ID NO: 135256 - protein, 15 aa, Artificial Sequence
  Description of Artificial Sequence: Synthetic peptide
  Seed: YERMCNILKGKFQTA
YERMINITKAKFITA

SEQ ID NO: 135257 - protein, 15 aa, Artificial Sequence
  Description of Artificial Sequence: Synthetic peptide
  Seed: YERMCNILKGKFQTA
YERMINITKAKFLTA

SEQ ID NO: 135258 - protein, 15 aa, Artificial Sequence
  Description of Artificial Sequence: Synthetic peptide
  Seed: YERMCNILKGKFQTA
YERMINITKAKFVTA

SEQ ID NO: 135259 - protein, 15 aa, Artificial Sequence
  Description of Artificial Sequence: Synthetic peptide
  Seed: YERMCNILKGKFQTA
YERMINITKGKFLTA

SEQ ID NO: 135260 - protein, 15 aa, Artificial Sequence
  Description of Artificial Sequence: Synthetic peptide
  Seed: YERMCNILKGKFQTA
YERMINIVKAKFATA

SEQ ID NO: 135261 - protein, 15 aa, Artificial Sequence
  Description of Artificial Sequence: Synthetic peptide
  Seed: YERMCNILKGKFQTA
YERMINIVKAKFITA

SEQ ID NO: 135262 - protein, 15 aa, Artificial Sequence
  Description of Artificial Sequence: Synthetic peptide
  Seed: YERMCNILKGKFQTA
YERMINIVKAKFLTA

SEQ ID NO: 135263 - protein, 15 aa, Artificial Sequence
  Description of Artificial Sequence: Synthetic peptide
  Seed: YERMCNILKGKFQTA
YERMINIVKAKFMTA

SEQ ID NO: 135264 - protein, 15 aa, Artificial Sequence
  Description of Artificial Sequence: Synthetic peptide
  Seed: YERMCNILKGKFQTA
YERMINIVKAKFSTA

SEQ ID NO: 135265 - protein, 15 aa, Artificial Sequence
  Description of Artificial Sequence: Synthetic peptide
  Seed: YERMCNILKGKFQTA
YERMINIVKAKFTTA

SEQ ID NO: 135266 - protein, 15 aa, Artificial Sequence
  Description of Artificial Sequence: Synthetic peptide
  Seed: YERMCNILKGKFQTA
YERMINIVKAKFVTA

SEQ ID NO: 135267 - protein, 15 aa, Artificial Sequence
  Description of Artificial Sequence: Synthetic peptide
  Seed: YERMCNILKGKFQTA
YERMINIVKGKFATA

SEQ ID NO: 135268 - protein, 15 aa, Artificial Sequence
  Description of Artificial Sequence: Synthetic peptide
  Seed: YERMCNILKGKFQTA
YERMINIVKGKFITA

SEQ ID NO: 135269 - protein, 15 aa, Artificial Sequence
  Description of Artificial Sequence: Synthetic peptide
  Seed: YERMCNILKGKFQTA
YERMINIVKGKFLTA

SEQ ID NO: 135270 - protein, 15 aa, Artificial Sequence
  Description of Artificial Sequence: Synthetic peptide
  Seed: YERMCNILKGKFQTA
YERMINIVKGKFMTA

SEQ ID NO: 135271 - protein, 15 aa, Artificial Sequence
  Description of Artificial Sequence: Synthetic peptide
  Seed: YERMCNILKGKFQTA
YERMINIVKGKFSTA

SEQ ID NO: 135272 - protein, 15 aa, Artificial Sequence
  Description of Artificial Sequence: Synthetic peptide
  Seed: YERMCNILKGKFQTA
YERMINIVKGKFTTA

SEQ ID NO: 135273 - protein, 15 aa, Artificial Sequence
  Description of Artificial Sequence: Synthetic peptide
  Seed: YERMCNILKGKFQTA
YERMINIVKGKFVTA

SEQ ID NO: 135274 - protein, 15 aa, Artificial Sequence
  Description of Artificial Sequence: Synthetic peptide
  Seed: YERMCNILKGKFQTA
YERMINIVKNKFLTA

SEQ ID NO: 135275 - protein, 15 aa, Artificial Sequence
  Description of Artificial Sequence: Synthetic peptide
  Seed: YERMCNILKGKFQTA
YERMINIVKNKFVTA

SEQ ID NO: 135276 - protein, 15 aa, Artificial Sequence
  Description of Artificial Sequence: Synthetic peptide
  Seed: YERMCNILKGKFQTA
YERMINIVKPKFATA

SEQ ID NO: 135277 - protein, 15 aa, Artificial Sequence
  Description of Artificial Sequence: Synthetic peptide
  Seed: YERMCNILKGKFQTA
YERMINIVKPKFITA

SEQ ID NO: 135278 - protein, 15 aa, Artificial Sequence
  Description of Artificial Sequence: Synthetic peptide
  Seed: YERMCNILKGKFQTA
YERMINIVKPKFLTA

SEQ ID NO: 135279 - protein, 15 aa, Artificial Sequence
  Description of Artificial Sequence: Synthetic peptide
  Seed: YERMCNILKGKFQTA
YERMINIVKPKFVTA

SEQ ID NO: 135280 - protein, 15 aa, Artificial Sequence
  Description of Artificial Sequence: Synthetic peptide
  Seed: YERMCNILKGKFQTA
YERMINIVKSKFATA

SEQ ID NO: 135281 - protein, 15 aa, Artificial Sequence
  Description of Artificial Sequence: Synthetic peptide
  Seed: YERMCNILKGKFQTA
YERMINIVKSKFITA

SEQ ID NO: 135282 - protein, 15 aa, Artificial Sequence
  Description of Artificial Sequence: Synthetic peptide
  Seed: YERMCNILKGKFQTA
YERMINIVKSKFLTA

SEQ ID NO: 135283 - protein, 15 aa, Artificial Sequence
  Description of Artificial Sequence: Synthetic peptide
  Seed: YERMCNILKGKFQTA
YERMINIVKSKFMTA

SEQ ID NO: 135284 - protein, 15 aa, Artificial Sequence
  Description of Artificial Sequence: Synthetic peptide
  Seed: YERMCNILKGKFQTA
YERMINIVKSKFSTA

SEQ ID NO: 135285 - protein, 15 aa, Artificial Sequence
  Description of Artificial Sequence: Synthetic peptide
  Seed: YERMCNILKGKFQTA
YERMINIVKSKFTTA

SEQ ID NO: 135286 - protein, 15 aa, Artificial Sequence
  Description of Artificial Sequence: Synthetic peptide
  Seed: YERMCNILKGKFQTA
YERMINIVKSKFVTA

SEQ ID NO: 135287 - protein, 15 aa, Artificial Sequence
  Description of Artificial Sequence: Synthetic peptide
  Seed: YERMCNILKGKFQTA
YERMINIVKTKFITA

SEQ ID NO: 135288 - protein, 15 aa, Artificial Sequence
  Description of Artificial Sequence: Synthetic peptide
  Seed: YERMCNILKGKFQTA
YERMINIVKTKFLTA

SEQ ID NO: 135289 - protein, 15 aa, Artificial Sequence
  Description of Artificial Sequence: Synthetic peptide
  Seed: YERMCNILKGKFQTA
YERMINIVKTKFVTA

SEQ ID NO: 135290 - protein, 15 aa, Artificial Sequence
  Description of Artificial Sequence: Synthetic peptide
  Seed: YERMCNILKGKFQTA
YERMLNIAKAKFATA

SEQ ID NO: 135291 - protein, 15 aa, Artificial Sequence
  Description of Artificial Sequence: Synthetic peptide
  Seed: YERMCNILKGKFQTA
YERMLNIAKAKFCTA

SEQ ID NO: 135292 - protein, 15 aa, Artificial Sequence
  Description of Artificial Sequence: Synthetic peptide
  Seed: YERMCNILKGKFQTA
YERMLNIAKAKFGTA

SEQ ID NO: 135293 - protein, 15 aa, Artificial Sequence
  Description of Artificial Sequence: Synthetic peptide
  Seed: YERMCNILKGKFQTA
YERMLNIAKAKFITA

SEQ ID NO: 135294 - protein, 15 aa, Artificial Sequence
  Description of Artificial Sequence: Synthetic peptide
  Seed: YERMCNILKGKFQTA
YERMLNIAKAKFLTA

SEQ ID NO: 135295 - protein, 15 aa, Artificial Sequence
  Description of Artificial Sequence: Synthetic peptide
  Seed: YERMCNILKGKFQTA
YERMLNIAKAKFMTA

SEQ ID NO: 135296 - protein, 15 aa, Artificial Sequence
  Description of Artificial Sequence: Synthetic peptide
  Seed: YERMCNILKGKFQTA
YERMLNIAKAKFSTA

SEQ ID NO: 135297 - protein, 15 aa, Artificial Sequence
  Description of Artificial Sequence: Synthetic peptide
  Seed: YERMCNILKGKFQTA
YERMLNIAKAKFTTA

SEQ ID NO: 135298 - protein, 15 aa, Artificial Sequence
  Description of Artificial Sequence: Synthetic peptide
  Seed: YERMCNILKGKFQTA
YERMLNIAKAKFVTA

SEQ ID NO: 135299 - protein, 15 aa, Artificial Sequence
  Description of Artificial Sequence: Synthetic peptide
  Seed: YERMCNILKGKFQTA
YERMLNIAKGKFATA

SEQ ID NO: 135300 - protein, 15 aa, Artificial Sequence
  Description of Artificial Sequence: Synthetic peptide
  Seed: YERMCNILKGKFQTA
YERMLNIAKGKFITA

SEQ ID NO: 135301 - protein, 15 aa, Artificial Sequence
  Description of Artificial Sequence: Synthetic peptide
  Seed: YERMCNILKGKFQTA
YERMLNIAKGKFLTA

SEQ ID NO: 135302 - protein, 15 aa, Artificial Sequence
  Description of Artificial Sequence: Synthetic peptide
  Seed: YERMCNILKGKFQTA
YERMLNIAKGKFMTA

SEQ ID NO: 135303 - protein, 15 aa, Artificial Sequence
  Description of Artificial Sequence: Synthetic peptide
  Seed: YERMCNILKGKFQTA
YERMLNIAKGKFSTA

SEQ ID NO: 135304 - protein, 15 aa, Artificial Sequence
  Description of Artificial Sequence: Synthetic peptide
  Seed: YERMCNILKGKFQTA
YERMLNIAKGKFTTA

SEQ ID NO: 135305 - protein, 15 aa, Artificial Sequence
  Description of Artificial Sequence: Synthetic peptide
  Seed: YERMCNILKGKFQTA
YERMLNIAKGKFVTA

SEQ ID NO: 135306 - protein, 15 aa, Artificial Sequence
  Description of Artificial Sequence: Synthetic peptide
  Seed: YERMCNILKGKFQTA
YERMLNIAKNKFATA

SEQ ID NO: 135307 - protein, 15 aa, Artificial Sequence
  Description of Artificial Sequence: Synthetic peptide
  Seed: YERMCNILKGKFQTA
YERMLNIAKNKFITA

SEQ ID NO: 135308 - protein, 15 aa, Artificial Sequence
  Description of Artificial Sequence: Synthetic peptide
  Seed: YERMCNILKGKFQTA
YERMLNIAKNKFLTA

SEQ ID NO: 135309 - protein, 15 aa, Artificial Sequence
  Description of Artificial Sequence: Synthetic peptide
  Seed: YERMCNILKGKFQTA
YERMLNIAKNKFVTA

SEQ ID NO: 135310 - protein, 15 aa, Artificial Sequence
  Description of Artificial Sequence: Synthetic peptide
  Seed: YERMCNILKGKFQTA
YERMLNIAKPKFATA

SEQ ID NO: 135311 - protein, 15 aa, Artificial Sequence
  Description of Artificial Sequence: Synthetic peptide
  Seed: YERMCNILKGKFQTA
YERMLNIAKPKFITA

SEQ ID NO: 135312 - protein, 15 aa, Artificial Sequence
  Description of Artificial Sequence: Synthetic peptide
  Seed: YERMCNILKGKFQTA
YERMLNIAKPKFLTA

SEQ ID NO: 135313 - protein, 15 aa, Artificial Sequence
  Description of Artificial Sequence: Synthetic peptide
  Seed: YERMCNILKGKFQTA
YERMLNIAKPKFMTA

SEQ ID NO: 135314 - protein, 15 aa, Artificial Sequence
  Description of Artificial Sequence: Synthetic peptide
  Seed: YERMCNILKGKFQTA
YERMLNIAKPKFVTA

SEQ ID NO: 135315 - protein, 15 aa, Artificial Sequence
  Description of Artificial Sequence: Synthetic peptide
  Seed: YERMCNILKGKFQTA
YERMLNIAKSKFATA

SEQ ID NO: 135316 - protein, 15 aa, Artificial Sequence
  Description of Artificial Sequence: Synthetic peptide
  Seed: YERMCNILKGKFQTA
YERMLNIAKSKFITA

SEQ ID NO: 135317 - protein, 15 aa, Artificial Sequence
  Description of Artificial Sequence: Synthetic peptide
  Seed: YERMCNILKGKFQTA
YERMLNIAKSKFLTA

SEQ ID NO: 135318 - protein, 15 aa, Artificial Sequence
  Description of Artificial Sequence: Synthetic peptide
  Seed: YERMCNILKGKFQTA
YERMLNIAKSKFMTA

SEQ ID NO: 135319 - protein, 15 aa, Artificial Sequence
  Description of Artificial Sequence: Synthetic peptide
  Seed: YERMCNILKGKFQTA
YERMLNIAKSKFSTA

SEQ ID NO: 135320 - protein, 15 aa, Artificial Sequence
  Description of Artificial Sequence: Synthetic peptide
  Seed: YERMCNILKGKFQTA
YERMLNIAKSKFTTA

SEQ ID NO: 135321 - protein, 15 aa, Artificial Sequence
  Description of Artificial Sequence: Synthetic peptide
  Seed: YERMCNILKGKFQTA
YERMLNIAKSKFVTA

SEQ ID NO: 135322 - protein, 15 aa, Artificial Sequence
  Description of Artificial Sequence: Synthetic peptide
  Seed: YERMCNILKGKFQTA
YERMLNIAKTKFATA

SEQ ID NO: 135323 - protein, 15 aa, Artificial Sequence
  Description of Artificial Sequence: Synthetic peptide
  Seed: YERMCNILKGKFQTA
YERMLNIAKTKFITA

SEQ ID NO: 135324 - protein, 15 aa, Artificial Sequence
  Description of Artificial Sequence: Synthetic peptide
  Seed: YERMCNILKGKFQTA
YERMLNIAKTKFLTA

SEQ ID NO: 135325 - protein, 15 aa, Artificial Sequence
  Description of Artificial Sequence: Synthetic peptide
  Seed: YERMCNILKGKFQTA
YERMLNIAKTKFVTA

SEQ ID NO: 135326 - protein, 15 aa, Artificial Sequence
  Description of Artificial Sequence: Synthetic peptide
  Seed: YERMCNILKGKFQTA
YERMLNIAKVKFVTA

SEQ ID NO: 135327 - protein, 15 aa, Artificial Sequence
  Description of Artificial Sequence: Synthetic peptide
  Seed: YERMCNILKGKFQTA
YERMLNIEKAKFATA

SEQ ID NO: 135328 - protein, 15 aa, Artificial Sequence
  Description of Artificial Sequence: Synthetic peptide
  Seed: YERMCNILKGKFQTA
YERMLNIEKAKFITA

SEQ ID NO: 135329 - protein, 15 aa, Artificial Sequence
  Description of Artificial Sequence: Synthetic peptide
  Seed: YERMCNILKGKFQTA
YERMLNIEKAKFLTA

SEQ ID NO: 135330 - protein, 15 aa, Artificial Sequence
  Description of Artificial Sequence: Synthetic peptide
  Seed: YERMCNILKGKFQTA
YERMLNIEKAKFVTA

SEQ ID NO: 135331 - protein, 15 aa, Artificial Sequence
  Description of Artificial Sequence: Synthetic peptide
  Seed: YERMCNILKGKFQTA
YERMLNIEKGKFLTA

SEQ ID NO: 135332 - protein, 15 aa, Artificial Sequence
  Description of Artificial Sequence: Synthetic peptide
  Seed: YERMCNILKGKFQTA
YERMLNIEKGKFVTA

SEQ ID NO: 135333 - protein, 15 aa, Artificial Sequence
  Description of Artificial Sequence: Synthetic peptide
  Seed: YERMCNILKGKFQTA
YERMLNIGKAKFITA

SEQ ID NO: 135334 - protein, 15 aa, Artificial Sequence
  Description of Artificial Sequence: Synthetic peptide
  Seed: YERMCNILKGKFQTA
YERMLNIGKAKFLTA

SEQ ID NO: 135335 - protein, 15 aa, Artificial Sequence
  Description of Artificial Sequence: Synthetic peptide
  Seed: YERMCNILKGKFQTA
YERMLNIGKAKFVTA

SEQ ID NO: 135336 - protein, 15 aa, Artificial Sequence
  Description of Artificial Sequence: Synthetic peptide
  Seed: YERMCNILKGKFQTA
YERMLNIGKGKFLTA

SEQ ID NO: 135337 - protein, 15 aa, Artificial Sequence
  Description of Artificial Sequence: Synthetic peptide
  Seed: YERMCNILKGKFQTA
YERMLNIGKSKFLTA

SEQ ID NO: 135338 - protein, 15 aa, Artificial Sequence
  Description of Artificial Sequence: Synthetic peptide
  Seed: YERMCNILKGKFQTA
YERMLNIIKAKFATA

SEQ ID NO: 135339 - protein, 15 aa, Artificial Sequence
  Description of Artificial Sequence: Synthetic peptide
  Seed: YERMCNILKGKFQTA
YERMLNIIKAKFCTA

SEQ ID NO: 135340 - protein, 15 aa, Artificial Sequence
  Description of Artificial Sequence: Synthetic peptide
  Seed: YERMCNILKGKFQTA
YERMLNIIKAKFGTA

SEQ ID NO: 135341 - protein, 15 aa, Artificial Sequence
  Description of Artificial Sequence: Synthetic peptide
  Seed: YERMCNILKGKFQTA
YERMLNIIKAKFITA

SEQ ID NO: 135342 - protein, 15 aa, Artificial Sequence
  Description of Artificial Sequence: Synthetic peptide
  Seed: YERMCNILKGKFQTA
YERMLNIIKAKFLTA

SEQ ID NO: 135343 - protein, 15 aa, Artificial Sequence
  Description of Artificial Sequence: Synthetic peptide
  Seed: YERMCNILKGKFQTA
YERMLNIIKAKFMTA

SEQ ID NO: 135344 - protein, 15 aa, Artificial Sequence
  Description of Artificial Sequence: Synthetic peptide
  Seed: YERMCNILKGKFQTA
YERMLNIIKAKFSTA

SEQ ID NO: 135345 - protein, 15 aa, Artificial Sequence
  Description of Artificial Sequence: Synthetic peptide
  Seed: YERMCNILKGKFQTA
YERMLNIIKAKFTTA

SEQ ID NO: 135346 - protein, 15 aa, Artificial Sequence
  Description of Artificial Sequence: Synthetic peptide
  Seed: YERMCNILKGKFQTA
YERMLNIIKAKFVTA

SEQ ID NO: 135347 - protein, 15 aa, Artificial Sequence
  Description of Artificial Sequence: Synthetic peptide
  Seed: YERMCNILKGKFQTA
YERMLNIIKGKFATA

SEQ ID NO: 135348 - protein, 15 aa, Artificial Sequence
  Description of Artificial Sequence: Synthetic peptide
  Seed: YERMCNILKGKFQTA
YERMLNIIKGKFITA

SEQ ID NO: 135349 - protein, 15 aa, Artificial Sequence
  Description of Artificial Sequence: Synthetic peptide
  Seed: YERMCNILKGKFQTA
YERMLNIIKGKFLTA

SEQ ID NO: 135350 - protein, 15 aa, Artificial Sequence
  Description of Artificial Sequence: Synthetic peptide
  Seed: YERMCNILKGKFQTA
YERMLNIIKGKFMTA

SEQ ID NO: 135351 - protein, 15 aa, Artificial Sequence
  Description of Artificial Sequence: Synthetic peptide
  Seed: YERMCNILKGKFQTA
YERMLNIIKGKFSTA

SEQ ID NO: 135352 - protein, 15 aa, Artificial Sequence
  Description of Artificial Sequence: Synthetic peptide
  Seed: YERMCNILKGKFQTA
YERMLNIIKGKFTTA

SEQ ID NO: 135353 - protein, 15 aa, Artificial Sequence
  Description of Artificial Sequence: Synthetic peptide
  Seed: YERMCNILKGKFQTA
YERMLNIIKGKFVTA

SEQ ID NO: 135354 - protein, 15 aa, Artificial Sequence
  Description of Artificial Sequence: Synthetic peptide
  Seed: YERMCNILKGKFQTA
YERMLNIIKNKFATA

SEQ ID NO: 135355 - protein, 15 aa, Artificial Sequence
  Description of Artificial Sequence: Synthetic peptide
  Seed: YERMCNILKGKFQTA
YERMLNIIKNKFITA

SEQ ID NO: 135356 - protein, 15 aa, Artificial Sequence
  Description of Artificial Sequence: Synthetic peptide
  Seed: YERMCNILKGKFQTA
YERMLNIIKNKFLTA

SEQ ID NO: 135357 - protein, 15 aa, Artificial Sequence
  Description of Artificial Sequence: Synthetic peptide
  Seed: YERMCNILKGKFQTA
YERMLNIIKNKFVTA

SEQ ID NO: 135358 - protein, 15 aa, Artificial Sequence
  Description of Artificial Sequence: Synthetic peptide
  Seed: YERMCNILKGKFQTA
YERMLNIIKPKFATA

SEQ ID NO: 135359 - protein, 15 aa, Artificial Sequence
  Description of Artificial Sequence: Synthetic peptide
  Seed: YERMCNILKGKFQTA
YERMLNIIKPKFITA

SEQ ID NO: 135360 - protein, 15 aa, Artificial Sequence
  Description of Artificial Sequence: Synthetic peptide
  Seed: YERMCNILKGKFQTA
YERMLNIIKPKFLTA

SEQ ID NO: 135361 - protein, 15 aa, Artificial Sequence
  Description of Artificial Sequence: Synthetic peptide
  Seed: YERMCNILKGKFQTA
YERMLNIIKPKFMTA

SEQ ID NO: 135362 - protein, 15 aa, Artificial Sequence
  Description of Artificial Sequence: Synthetic peptide
  Seed: YERMCNILKGKFQTA
YERMLNIIKPKFTTA

SEQ ID NO: 135363 - protein, 15 aa, Artificial Sequence
  Description of Artificial Sequence: Synthetic peptide
  Seed: YERMCNILKGKFQTA
YERMLNIIKPKFVTA

SEQ ID NO: 135364 - protein, 15 aa, Artificial Sequence
  Description of Artificial Sequence: Synthetic peptide
  Seed: YERMCNILKGKFQTA
YERMLNIIKSKFATA

SEQ ID NO: 135365 - protein, 15 aa, Artificial Sequence
  Description of Artificial Sequence: Synthetic peptide
  Seed: YERMCNILKGKFQTA
YERMLNIIKSKFITA

SEQ ID NO: 135366 - protein, 15 aa, Artificial Sequence
  Description of Artificial Sequence: Synthetic peptide
  Seed: YERMCNILKGKFQTA
YERMLNIIKSKFLTA

SEQ ID NO: 135367 - protein, 15 aa, Artificial Sequence
  Description of Artificial Sequence: Synthetic peptide
  Seed: YERMCNILKGKFQTA
YERMLNIIKSKFMTA

SEQ ID NO: 135368 - protein, 15 aa, Artificial Sequence
  Description of Artificial Sequence: Synthetic peptide
  Seed: YERMCNILKGKFQTA
YERMLNIIKSKFSTA

SEQ ID NO: 135369 - protein, 15 aa, Artificial Sequence
  Description of Artificial Sequence: Synthetic peptide
  Seed: YERMCNILKGKFQTA
YERMLNIIKSKFTTA

SEQ ID NO: 135370 - protein, 15 aa, Artificial Sequence
  Description of Artificial Sequence: Synthetic peptide
  Seed: YERMCNILKGKFQTA
YERMLNIIKSKFVTA

SEQ ID NO: 135371 - protein, 15 aa, Artificial Sequence
  Description of Artificial Sequence: Synthetic peptide
  Seed: YERMCNILKGKFQTA
YERMLNIIKTKFATA

SEQ ID NO: 135372 - protein, 15 aa, Artificial Sequence
  Description of Artificial Sequence: Synthetic peptide
  Seed: YERMCNILKGKFQTA
YERMLNIIKTKFITA

SEQ ID NO: 135373 - protein, 15 aa, Artificial Sequence
  Description of Artificial Sequence: Synthetic peptide
  Seed: YERMCNILKGKFQTA
YERMLNIIKTKFLTA

SEQ ID NO: 135374 - protein, 15 aa, Artificial Sequence
  Description of Artificial Sequence: Synthetic peptide
  Seed: YERMCNILKGKFQTA
YERMLNIIKTKFVTA

SEQ ID NO: 135375 - protein, 15 aa, Artificial Sequence
  Description of Artificial Sequence: Synthetic peptide
  Seed: YERMCNILKGKFQTA
YERMLNILKAKFATA

SEQ ID NO: 135376 - protein, 15 aa, Artificial Sequence
  Description of Artificial Sequence: Synthetic peptide
  Seed: YERMCNILKGKFQTA
YERMLNILKAKFCTA

SEQ ID NO: 135377 - protein, 15 aa, Artificial Sequence
  Description of Artificial Sequence: Synthetic peptide
  Seed: YERMCNILKGKFQTA
YERMLNILKAKFFTA

SEQ ID NO: 135378 - protein, 15 aa, Artificial Sequence
  Description of Artificial Sequence: Synthetic peptide
  Seed: YERMCNILKGKFQTA
YERMLNILKAKFGTA

SEQ ID NO: 135379 - protein, 15 aa, Artificial Sequence
  Description of Artificial Sequence: Synthetic peptide
  Seed: YERMCNILKGKFQTA
YERMLNILKAKFITA

SEQ ID NO: 135380 - protein, 15 aa, Artificial Sequence
  Description of Artificial Sequence: Synthetic peptide
  Seed: YERMCNILKGKFQTA
YERMLNILKAKFLTA

SEQ ID NO: 135381 - protein, 15 aa, Artificial Sequence
  Description of Artificial Sequence: Synthetic peptide
  Seed: YERMCNILKGKFQTA
YERMLNILKAKFMTA

SEQ ID NO: 135382 - protein, 15 aa, Artificial Sequence
  Description of Artificial Sequence: Synthetic peptide
  Seed: YERMCNILKGKFQTA
YERMLNILKAKFNTA

SEQ ID NO: 135383 - protein, 15 aa, Artificial Sequence
  Description of Artificial Sequence: Synthetic peptide
  Seed: YERMCNILKGKFQTA
YERMLNILKAKFPTA

SEQ ID NO: 135384 - protein, 15 aa, Artificial Sequence
  Description of Artificial Sequence: Synthetic peptide
  Seed: YERMCNILKGKFQTA
YERMLNILKAKFSTA

SEQ ID NO: 135385 - protein, 15 aa, Artificial Sequence
  Description of Artificial Sequence: Synthetic peptide
  Seed: YERMCNILKGKFQTA
YERMLNILKAKFTTA

SEQ ID NO: 135386 - protein, 15 aa, Artificial Sequence
  Description of Artificial Sequence: Synthetic peptide
  Seed: YERMCNILKGKFQTA
YERMLNILKAKFVTA

SEQ ID NO: 135387 - protein, 15 aa, Artificial Sequence
  Description of Artificial Sequence: Synthetic peptide
  Seed: YERMCNILKGKFQTA
YERMLNILKGKFATA

SEQ ID NO: 135388 - protein, 15 aa, Artificial Sequence
  Description of Artificial Sequence: Synthetic peptide
  Seed: YERMCNILKGKFQTA
YERMLNILKGKFCTA

SEQ ID NO: 135389 - protein, 15 aa, Artificial Sequence
  Description of Artificial Sequence: Synthetic peptide
  Seed: YERMCNILKGKFQTA
YERMLNILKGKFFTA

SEQ ID NO: 135390 - protein, 15 aa, Artificial Sequence
  Description of Artificial Sequence: Synthetic peptide
  Seed: YERMCNILKGKFQTA
YERMLNILKGKFGTA

SEQ ID NO: 135391 - protein, 15 aa, Artificial Sequence
  Description of Artificial Sequence: Synthetic peptide
  Seed: YERMCNILKGKFQTA
YERMLNILKGKFITA

SEQ ID NO: 135392 - protein, 15 aa, Artificial Sequence
  Description of Artificial Sequence: Synthetic peptide
  Seed: YERMCNILKGKFQTA
YERMLNILKGKFLTA

SEQ ID NO: 135393 - protein, 15 aa, Artificial Sequence
  Description of Artificial Sequence: Synthetic peptide
  Seed: YERMCNILKGKFQTA
YERMLNILKGKFMTA

SEQ ID NO: 135394 - protein, 15 aa, Artificial Sequence
  Description of Artificial Sequence: Synthetic peptide
  Seed: YERMCNILKGKFQTA
YERMLNILKGKFNTA

SEQ ID NO: 135395 - protein, 15 aa, Artificial Sequence
  Description of Artificial Sequence: Synthetic peptide
  Seed: YERMCNILKGKFQTA
YERMLNILKGKFSTA

SEQ ID NO: 135396 - protein, 15 aa, Artificial Sequence
  Description of Artificial Sequence: Synthetic peptide
  Seed: YERMCNILKGKFQTA
YERMLNILKGKFTTA

SEQ ID NO: 135397 - protein, 15 aa, Artificial Sequence
  Description of Artificial Sequence: Synthetic peptide
  Seed: YERMCNILKGKFQTA
YERMLNILKGKFVTA

SEQ ID NO: 135398 - protein, 15 aa, Artificial Sequence
  Description of Artificial Sequence: Synthetic peptide
  Seed: YERMCNILKGKFQTA
YERMLNILKIKFVTA

SEQ ID NO: 135399 - protein, 15 aa, Artificial Sequence
  Description of Artificial Sequence: Synthetic peptide
  Seed: YERMCNILKGKFQTA
YERMLNILKNKFATA

SEQ ID NO: 135400 - protein, 15 aa, Artificial Sequence
  Description of Artificial Sequence: Synthetic peptide
  Seed: YERMCNILKGKFQTA
YERMLNILKNKFITA

SEQ ID NO: 135401 - protein, 15 aa, Artificial Sequence
  Description of Artificial Sequence: Synthetic peptide
  Seed: YERMCNILKGKFQTA
YERMLNILKNKFLTA

SEQ ID NO: 135402 - protein, 15 aa, Artificial Sequence
  Description of Artificial Sequence: Synthetic peptide
  Seed: YERMCNILKGKFQTA
YERMLNILKNKFMTA

SEQ ID NO: 135403 - protein, 15 aa, Artificial Sequence
  Description of Artificial Sequence: Synthetic peptide
  Seed: YERMCNILKGKFQTA
YERMLNILKNKFSTA

SEQ ID NO: 135404 - protein, 15 aa, Artificial Sequence
  Description of Artificial Sequence: Synthetic peptide
  Seed: YERMCNILKGKFQTA
YERMLNILKNKFTTA

SEQ ID NO: 135405 - protein, 15 aa, Artificial Sequence
  Description of Artificial Sequence: Synthetic peptide
  Seed: YERMCNILKGKFQTA
YERMLNILKNKFVTA

SEQ ID NO: 135406 - protein, 15 aa, Artificial Sequence
  Description of Artificial Sequence: Synthetic peptide
  Seed: YERMCNILKGKFQTA
YERMLNILKPKFATA

SEQ ID NO: 135407 - protein, 15 aa, Artificial Sequence
  Description of Artificial Sequence: Synthetic peptide
  Seed: YERMCNILKGKFQTA
YERMLNILKPKFITA

SEQ ID NO: 135408 - protein, 15 aa, Artificial Sequence
  Description of Artificial Sequence: Synthetic peptide
  Seed: YERMCNILKGKFQTA
YERMLNILKPKFLTA

SEQ ID NO: 135409 - protein, 15 aa, Artificial Sequence
  Description of Artificial Sequence: Synthetic peptide
  Seed: YERMCNILKGKFQTA
YERMLNILKPKFMTA

SEQ ID NO: 135410 - protein, 15 aa, Artificial Sequence
  Description of Artificial Sequence: Synthetic peptide
  Seed: YERMCNILKGKFQTA
YERMLNILKPKFSTA

SEQ ID NO: 135411 - protein, 15 aa, Artificial Sequence
  Description of Artificial Sequence: Synthetic peptide
  Seed: YERMCNILKGKFQTA
YERMLNILKPKFTTA

SEQ ID NO: 135412 - protein, 15 aa, Artificial Sequence
  Description of Artificial Sequence: Synthetic peptide
  Seed: YERMCNILKGKFQTA
YERMLNILKPKFVTA

SEQ ID NO: 135413 - protein, 15 aa, Artificial Sequence
  Description of Artificial Sequence: Synthetic peptide
  Seed: YERMCNILKGKFQTA
YERMLNILKSKFATA

SEQ ID NO: 135414 - protein, 15 aa, Artificial Sequence
  Description of Artificial Sequence: Synthetic peptide
  Seed: YERMCNILKGKFQTA
YERMLNILKSKFCTA

SEQ ID NO: 135415 - protein, 15 aa, Artificial Sequence
  Description of Artificial Sequence: Synthetic peptide
  Seed: YERMCNILKGKFQTA
YERMLNILKSKFGTA

SEQ ID NO: 135416 - protein, 15 aa, Artificial Sequence
  Description of Artificial Sequence: Synthetic peptide
  Seed: YERMCNILKGKFQTA
YERMLNILKSKFITA

SEQ ID NO: 135417 - protein, 15 aa, Artificial Sequence
  Description of Artificial Sequence: Synthetic peptide
  Seed: YERMCNILKGKFQTA
YERMLNILKSKFLTA

SEQ ID NO: 135418 - protein, 15 aa, Artificial Sequence
  Description of Artificial Sequence: Synthetic peptide
  Seed: YERMCNILKGKFQTA
YERMLNILKSKFMTA

SEQ ID NO: 135419 - protein, 15 aa, Artificial Sequence
  Description of Artificial Sequence: Synthetic peptide
  Seed: YERMCNILKGKFQTA
YERMLNILKSKFNTA

SEQ ID NO: 135420 - protein, 15 aa, Artificial Sequence
  Description of Artificial Sequence: Synthetic peptide
  Seed: YERMCNILKGKFQTA
YERMLNILKSKFSTA

SEQ ID NO: 135421 - protein, 15 aa, Artificial Sequence
  Description of Artificial Sequence: Synthetic peptide
  Seed: YERMCNILKGKFQTA
YERMLNILKSKFTTA

SEQ ID NO: 135422 - protein, 15 aa, Artificial Sequence
  Description of Artificial Sequence: Synthetic peptide
  Seed: YERMCNILKGKFQTA
YERMLNILKSKFVTA

SEQ ID NO: 135423 - protein, 15 aa, Artificial Sequence
  Description of Artificial Sequence: Synthetic peptide
  Seed: YERMCNILKGKFQTA
YERMLNILKTKFATA

SEQ ID NO: 135424 - protein, 15 aa, Artificial Sequence
  Description of Artificial Sequence: Synthetic peptide
  Seed: YERMCNILKGKFQTA
YERMLNILKTKFITA

SEQ ID NO: 135425 - protein, 15 aa, Artificial Sequence
  Description of Artificial Sequence: Synthetic peptide
  Seed: YERMCNILKGKFQTA
YERMLNILKTKFLTA

SEQ ID NO: 135426 - protein, 15 aa, Artificial Sequence
  Description of Artificial Sequence: Synthetic peptide
  Seed: YERMCNILKGKFQTA
YERMLNILKTKFMTA

SEQ ID NO: 135427 - protein, 15 aa, Artificial Sequence
  Description of Artificial Sequence: Synthetic peptide
  Seed: YERMCNILKGKFQTA
YERMLNILKTKFSTA

SEQ ID NO: 135428 - protein, 15 aa, Artificial Sequence
  Description of Artificial Sequence: Synthetic peptide
  Seed: YERMCNILKGKFQTA
YERMLNILKTKFTTA

SEQ ID NO: 135429 - protein, 15 aa, Artificial Sequence
  Description of Artificial Sequence: Synthetic peptide
  Seed: YERMCNILKGKFQTA
YERMLNILKTKFVTA

SEQ ID NO: 135430 - protein, 15 aa, Artificial Sequence
  Description of Artificial Sequence: Synthetic peptide
  Seed: YERMCNILKGKFQTA
YERMLNILKVKFATA

SEQ ID NO: 135431 - protein, 15 aa, Artificial Sequence
  Description of Artificial Sequence: Synthetic peptide
  Seed: YERMCNILKGKFQTA
YERMLNILKVKFITA

SEQ ID NO: 135432 - protein, 15 aa, Artificial Sequence
  Description of Artificial Sequence: Synthetic peptide
  Seed: YERMCNILKGKFQTA
YERMLNILKVKFLTA

SEQ ID NO: 135433 - protein, 15 aa, Artificial Sequence
  Description of Artificial Sequence: Synthetic peptide
  Seed: YERMCNILKGKFQTA
YERMLNILKVKFTTA

SEQ ID NO: 135434 - protein, 15 aa, Artificial Sequence
  Description of Artificial Sequence: Synthetic peptide
  Seed: YERMCNILKGKFQTA
YERMLNILKVKFVTA

SEQ ID NO: 135435 - protein, 15 aa, Artificial Sequence
  Description of Artificial Sequence: Synthetic peptide
  Seed: YERMCNILKGKFQTA
YERMLNIMKAKFATA

SEQ ID NO: 135436 - protein, 15 aa, Artificial Sequence
  Description of Artificial Sequence: Synthetic peptide
  Seed: YERMCNILKGKFQTA
YERMLNIMKAKFCTA

SEQ ID NO: 135437 - protein, 15 aa, Artificial Sequence
  Description of Artificial Sequence: Synthetic peptide
  Seed: YERMCNILKGKFQTA
YERMLNIMKAKFFTA

SEQ ID NO: 135438 - protein, 15 aa, Artificial Sequence
  Description of Artificial Sequence: Synthetic peptide
  Seed: YERMCNILKGKFQTA
YERMLNIMKAKFGTA

SEQ ID NO: 135439 - protein, 15 aa, Artificial Sequence
  Description of Artificial Sequence: Synthetic peptide
  Seed: YERMCNILKGKFQTA
YERMLNIMKAKFHTA

SEQ ID NO: 135440 - protein, 15 aa, Artificial Sequence
  Description of Artificial Sequence: Synthetic peptide
  Seed: YERMCNILKGKFQTA
YERMLNIMKAKFITA

SEQ ID NO: 135441 - protein, 15 aa, Artificial Sequence
  Description of Artificial Sequence: Synthetic peptide
  Seed: YERMCNILKGKFQTA
YERMLNIMKAKFLTA

SEQ ID NO: 135442 - protein, 15 aa, Artificial Sequence
  Description of Artificial Sequence: Synthetic peptide
  Seed: YERMCNILKGKFQTA
YERMLNIMKAKFMTA

SEQ ID NO: 135443 - protein, 15 aa, Artificial Sequence
  Description of Artificial Sequence: Synthetic peptide
  Seed: YERMCNILKGKFQTA
YERMLNIMKAKFNTA

SEQ ID NO: 135444 - protein, 15 aa, Artificial Sequence
  Description of Artificial Sequence: Synthetic peptide
  Seed: YERMCNILKGKFQTA
YERMLNIMKAKFPTA

SEQ ID NO: 135445 - protein, 15 aa, Artificial Sequence
  Description of Artificial Sequence: Synthetic peptide
  Seed: YERMCNILKGKFQTA
YERMLNIMKAKFSTA

SEQ ID NO: 135446 - protein, 15 aa, Artificial Sequence
  Description of Artificial Sequence: Synthetic peptide
  Seed: YERMCNILKGKFQTA
YERMLNIMKAKFTTA

SEQ ID NO: 135447 - protein, 15 aa, Artificial Sequence
  Description of Artificial Sequence: Synthetic peptide
  Seed: YERMCNILKGKFQTA
YERMLNIMKAKFVTA

SEQ ID NO: 135448 - protein, 15 aa, Artificial Sequence
  Description of Artificial Sequence: Synthetic peptide
  Seed: YERMCNILKGKFQTA
YERMLNIMKGKFATA

SEQ ID NO: 135449 - protein, 15 aa, Artificial Sequence
  Description of Artificial Sequence: Synthetic peptide
  Seed: YERMCNILKGKFQTA
YERMLNIMKGKFCTA

SEQ ID NO: 135450 - protein, 15 aa, Artificial Sequence
  Description of Artificial Sequence: Synthetic peptide
  Seed: YERMCNILKGKFQTA
YERMLNIMKGKFFTA

SEQ ID NO: 135451 - protein, 15 aa, Artificial Sequence
  Description of Artificial Sequence: Synthetic peptide
  Seed: YERMCNILKGKFQTA
YERMLNIMKGKFGTA

SEQ ID NO: 135452 - protein, 15 aa, Artificial Sequence
  Description of Artificial Sequence: Synthetic peptide
  Seed: YERMCNILKGKFQTA
YERMLNIMKGKFITA

SEQ ID NO: 135453 - protein, 15 aa, Artificial Sequence
  Description of Artificial Sequence: Synthetic peptide
  Seed: YERMCNILKGKFQTA
YERMLNIMKGKFLTA

SEQ ID NO: 135454 - protein, 15 aa, Artificial Sequence
  Description of Artificial Sequence: Synthetic peptide
  Seed: YERMCNILKGKFQTA
YERMLNIMKGKFMTA

SEQ ID NO: 135455 - protein, 15 aa, Artificial Sequence
  Description of Artificial Sequence: Synthetic peptide
  Seed: YERMCNILKGKFQTA
YERMLNIMKGKFNTA

SEQ ID NO: 135456 - protein, 15 aa, Artificial Sequence
  Description of Artificial Sequence: Synthetic peptide
  Seed: YERMCNILKGKFQTA
YERMLNIMKGKFSTA

SEQ ID NO: 135457 - protein, 15 aa, Artificial Sequence
  Description of Artificial Sequence: Synthetic peptide
  Seed: YERMCNILKGKFQTA
YERMLNIMKGKFTTA

SEQ ID NO: 135458 - protein, 15 aa, Artificial Sequence
  Description of Artificial Sequence: Synthetic peptide
  Seed: YERMCNILKGKFQTA
YERMLNIMKGKFVTA

SEQ ID NO: 135459 - protein, 15 aa, Artificial Sequence
  Description of Artificial Sequence: Synthetic peptide
  Seed: YERMCNILKGKFQTA
YERMLNIMKIKFLTA

SEQ ID NO: 135460 - protein, 15 aa, Artificial Sequence
  Description of Artificial Sequence: Synthetic peptide
  Seed: YERMCNILKGKFQTA
YERMLNIMKIKFVTA

SEQ ID NO: 135461 - protein, 15 aa, Artificial Sequence
  Description of Artificial Sequence: Synthetic peptide
  Seed: YERMCNILKGKFQTA
YERMLNIMKNKFATA

SEQ ID NO: 135462 - protein, 15 aa, Artificial Sequence
  Description of Artificial Sequence: Synthetic peptide
  Seed: YERMCNILKGKFQTA
YERMLNIMKNKFITA

SEQ ID NO: 135463 - protein, 15 aa, Artificial Sequence
  Description of Artificial Sequence: Synthetic peptide
  Seed: YERMCNILKGKFQTA
YERMLNIMKNKFLTA

SEQ ID NO: 135464 - protein, 15 aa, Artificial Sequence
  Description of Artificial Sequence: Synthetic peptide
  Seed: YERMCNILKGKFQTA
YERMLNIMKNKFMTA

SEQ ID NO: 135465 - protein, 15 aa, Artificial Sequence
  Description of Artificial Sequence: Synthetic peptide
  Seed: YERMCNILKGKFQTA
YERMLNIMKNKFSTA

SEQ ID NO: 135466 - protein, 15 aa, Artificial Sequence
  Description of Artificial Sequence: Synthetic peptide
  Seed: YERMCNILKGKFQTA
YERMLNIMKNKFTTA

SEQ ID NO: 135467 - protein, 15 aa, Artificial Sequence
  Description of Artificial Sequence: Synthetic peptide
  Seed: YERMCNILKGKFQTA
YERMLNIMKNKFVTA

SEQ ID NO: 135468 - protein, 15 aa, Artificial Sequence
  Description of Artificial Sequence: Synthetic peptide
  Seed: YERMCNILKGKFQTA
YERMLNIMKPKFATA

SEQ ID NO: 135469 - protein, 15 aa, Artificial Sequence
  Description of Artificial Sequence: Synthetic peptide
  Seed: YERMCNILKGKFQTA
YERMLNIMKPKFITA

SEQ ID NO: 135470 - protein, 15 aa, Artificial Sequence
  Description of Artificial Sequence: Synthetic peptide
  Seed: YERMCNILKGKFQTA
YERMLNIMKPKFLTA

SEQ ID NO: 135471 - protein, 15 aa, Artificial Sequence
  Description of Artificial Sequence: Synthetic peptide
  Seed: YERMCNILKGKFQTA
YERMLNIMKPKFMTA

SEQ ID NO: 135472 - protein, 15 aa, Artificial Sequence
  Description of Artificial Sequence: Synthetic peptide
  Seed: YERMCNILKGKFQTA
YERMLNIMKPKFSTA

SEQ ID NO: 135473 - protein, 15 aa, Artificial Sequence
  Description of Artificial Sequence: Synthetic peptide
  Seed: YERMCNILKGKFQTA
YERMLNIMKPKFTTA

SEQ ID NO: 135474 - protein, 15 aa, Artificial Sequence
  Description of Artificial Sequence: Synthetic peptide
  Seed: YERMCNILKGKFQTA
YERMLNIMKPKFVTA

SEQ ID NO: 135475 - protein, 15 aa, Artificial Sequence
  Description of Artificial Sequence: Synthetic peptide
  Seed: YERMCNILKGKFQTA
YERMLNIMKSKFATA

SEQ ID NO: 135476 - protein, 15 aa, Artificial Sequence
  Description of Artificial Sequence: Synthetic peptide
  Seed: YERMCNILKGKFQTA
YERMLNIMKSKFCTA

SEQ ID NO: 135477 - protein, 15 aa, Artificial Sequence
  Description of Artificial Sequence: Synthetic peptide
  Seed: YERMCNILKGKFQTA
YERMLNIMKSKFFTA

SEQ ID NO: 135478 - protein, 15 aa, Artificial Sequence
  Description of Artificial Sequence: Synthetic peptide
  Seed: YERMCNILKGKFQTA
YERMLNIMKSKFGTA

SEQ ID NO: 135479 - protein, 15 aa, Artificial Sequence
  Description of Artificial Sequence: Synthetic peptide
  Seed: YERMCNILKGKFQTA
YERMLNIMKSKFITA

SEQ ID NO: 135480 - protein, 15 aa, Artificial Sequence
  Description of Artificial Sequence: Synthetic peptide
  Seed: YERMCNILKGKFQTA
YERMLNIMKSKFLTA

SEQ ID NO: 135481 - protein, 15 aa, Artificial Sequence
  Description of Artificial Sequence: Synthetic peptide
  Seed: YERMCNILKGKFQTA
YERMLNIMKSKFMTA

SEQ ID NO: 135482 - protein, 15 aa, Artificial Sequence
  Description of Artificial Sequence: Synthetic peptide
  Seed: YERMCNILKGKFQTA
YERMLNIMKSKFNTA

SEQ ID NO: 135483 - protein, 15 aa, Artificial Sequence
  Description of Artificial Sequence: Synthetic peptide
  Seed: YERMCNILKGKFQTA
YERMLNIMKSKFSTA

SEQ ID NO: 135484 - protein, 15 aa, Artificial Sequence
  Description of Artificial Sequence: Synthetic peptide
  Seed: YERMCNILKGKFQTA
YERMLNIMKSKFTTA

SEQ ID NO: 135485 - protein, 15 aa, Artificial Sequence
  Description of Artificial Sequence: Synthetic peptide
  Seed: YERMCNILKGKFQTA
YERMLNIMKSKFVTA

SEQ ID NO: 135486 - protein, 15 aa, Artificial Sequence
  Description of Artificial Sequence: Synthetic peptide
  Seed: YERMCNILKGKFQTA
YERMLNIMKTKFATA

SEQ ID NO: 135487 - protein, 15 aa, Artificial Sequence
  Description of Artificial Sequence: Synthetic peptide
  Seed: YERMCNILKGKFQTA
YERMLNIMKTKFITA

SEQ ID NO: 135488 - protein, 15 aa, Artificial Sequence
  Description of Artificial Sequence: Synthetic peptide
  Seed: YERMCNILKGKFQTA
YERMLNIMKTKFLTA

SEQ ID NO: 135489 - protein, 15 aa, Artificial Sequence
  Description of Artificial Sequence: Synthetic peptide
  Seed: YERMCNILKGKFQTA
YERMLNIMKTKFMTA

SEQ ID NO: 135490 - protein, 15 aa, Artificial Sequence
  Description of Artificial Sequence: Synthetic peptide
  Seed: YERMCNILKGKFQTA
YERMLNIMKTKFSTA

SEQ ID NO: 135491 - protein, 15 aa, Artificial Sequence
  Description of Artificial Sequence: Synthetic peptide
  Seed: YERMCNILKGKFQTA
YERMLNIMKTKFTTA

SEQ ID NO: 135492 - protein, 15 aa, Artificial Sequence
  Description of Artificial Sequence: Synthetic peptide
  Seed: YERMCNILKGKFQTA
YERMLNIMKTKFVTA

SEQ ID NO: 135493 - protein, 15 aa, Artificial Sequence
  Description of Artificial Sequence: Synthetic peptide
  Seed: YERMCNILKGKFQTA
YERMLNIMKVKFATA

SEQ ID NO: 135494 - protein, 15 aa, Artificial Sequence
  Description of Artificial Sequence: Synthetic peptide
  Seed: YERMCNILKGKFQTA
YERMLNIMKVKFITA

SEQ ID NO: 135495 - protein, 15 aa, Artificial Sequence
  Description of Artificial Sequence: Synthetic peptide
  Seed: YERMCNILKGKFQTA
YERMLNIMKVKFLTA

SEQ ID NO: 135496 - protein, 15 aa, Artificial Sequence
  Description of Artificial Sequence: Synthetic peptide
  Seed: YERMCNILKGKFQTA
YERMLNIMKVKFMTA

SEQ ID NO: 135497 - protein, 15 aa, Artificial Sequence
  Description of Artificial Sequence: Synthetic peptide
  Seed: YERMCNILKGKFQTA
YERMLNIMKVKFSTA

SEQ ID NO: 135498 - protein, 15 aa, Artificial Sequence
  Description of Artificial Sequence: Synthetic peptide
  Seed: YERMCNILKGKFQTA
YERMLNIMKVKFTTA

SEQ ID NO: 135499 - protein, 15 aa, Artificial Sequence
  Description of Artificial Sequence: Synthetic peptide
  Seed: YERMCNILKGKFQTA
YERMLNIMKVKFVTA

SEQ ID NO: 135500 - protein, 15 aa, Artificial Sequence
  Description of Artificial Sequence: Synthetic peptide
  Seed: YERMCNILKGKFQTA
YERMLNIQKAKFATA

SEQ ID NO: 135501 - protein, 15 aa, Artificial Sequence
  Description of Artificial Sequence: Synthetic peptide
  Seed: YERMCNILKGKFQTA
YERMLNIQKAKFITA

SEQ ID NO: 135502 - protein, 15 aa, Artificial Sequence
  Description of Artificial Sequence: Synthetic peptide
  Seed: YERMCNILKGKFQTA
YERMLNIQKAKFLTA

SEQ ID NO: 135503 - protein, 15 aa, Artificial Sequence
  Description of Artificial Sequence: Synthetic peptide
  Seed: YERMCNILKGKFQTA
YERMLNIQKAKFMTA

SEQ ID NO: 135504 - protein, 15 aa, Artificial Sequence
  Description of Artificial Sequence: Synthetic peptide
  Seed: YERMCNILKGKFQTA
YERMLNIQKAKFSTA

SEQ ID NO: 135505 - protein, 15 aa, Artificial Sequence
  Description of Artificial Sequence: Synthetic peptide
  Seed: YERMCNILKGKFQTA
YERMLNIQKAKFTTA

SEQ ID NO: 135506 - protein, 15 aa, Artificial Sequence
  Description of Artificial Sequence: Synthetic peptide
  Seed: YERMCNILKGKFQTA
YERMLNIQKAKFVTA

SEQ ID NO: 135507 - protein, 15 aa, Artificial Sequence
  Description of Artificial Sequence: Synthetic peptide
  Seed: YERMCNILKGKFQTA
YERMLNIQKGKFATA

SEQ ID NO: 135508 - protein, 15 aa, Artificial Sequence
  Description of Artificial Sequence: Synthetic peptide
  Seed: YERMCNILKGKFQTA
YERMLNIQKGKFITA

SEQ ID NO: 135509 - protein, 15 aa, Artificial Sequence
  Description of Artificial Sequence: Synthetic peptide
  Seed: YERMCNILKGKFQTA
YERMLNIQKGKFLTA

SEQ ID NO: 135510 - protein, 15 aa, Artificial Sequence
  Description of Artificial Sequence: Synthetic peptide
  Seed: YERMCNILKGKFQTA
YERMLNIQKGKFMTA

SEQ ID NO: 135511 - protein, 15 aa, Artificial Sequence
  Description of Artificial Sequence: Synthetic peptide
  Seed: YERMCNILKGKFQTA
YERMLNIQKGKFVTA

SEQ ID NO: 135512 - protein, 15 aa, Artificial Sequence
  Description of Artificial Sequence: Synthetic peptide
  Seed: YERMCNILKGKFQTA
YERMLNIQKPKFITA

SEQ ID NO: 135513 - protein, 15 aa, Artificial Sequence
  Description of Artificial Sequence: Synthetic peptide
  Seed: YERMCNILKGKFQTA
YERMLNIQKPKFLTA

SEQ ID NO: 135514 - protein, 15 aa, Artificial Sequence
  Description of Artificial Sequence: Synthetic peptide
  Seed: YERMCNILKGKFQTA
YERMLNIQKPKFVTA

SEQ ID NO: 135515 - protein, 15 aa, Artificial Sequence
  Description of Artificial Sequence: Synthetic peptide
  Seed: YERMCNILKGKFQTA
YERMLNIQKSKFATA

SEQ ID NO: 135516 - protein, 15 aa, Artificial Sequence
  Description of Artificial Sequence: Synthetic peptide
  Seed: YERMCNILKGKFQTA
YERMLNIQKSKFITA

SEQ ID NO: 135517 - protein, 15 aa, Artificial Sequence
  Description of Artificial Sequence: Synthetic peptide
  Seed: YERMCNILKGKFQTA
YERMLNIQKSKFLTA

SEQ ID NO: 135518 - protein, 15 aa, Artificial Sequence
  Description of Artificial Sequence: Synthetic peptide
  Seed: YERMCNILKGKFQTA
YERMLNIQKSKFVTA

SEQ ID NO: 135519 - protein, 15 aa, Artificial Sequence
  Description of Artificial Sequence: Synthetic peptide
  Seed: YERMCNILKGKFQTA
YERMLNISKAKFATA

SEQ ID NO: 135520 - protein, 15 aa, Artificial Sequence
  Description of Artificial Sequence: Synthetic peptide
  Seed: YERMCNILKGKFQTA
YERMLNISKAKFITA

SEQ ID NO: 135521 - protein, 15 aa, Artificial Sequence
  Description of Artificial Sequence: Synthetic peptide
  Seed: YERMCNILKGKFQTA
YERMLNISKAKFLTA

SEQ ID NO: 135522 - protein, 15 aa, Artificial Sequence
  Description of Artificial Sequence: Synthetic peptide
  Seed: YERMCNILKGKFQTA
YERMLNISKAKFMTA

SEQ ID NO: 135523 - protein, 15 aa, Artificial Sequence
  Description of Artificial Sequence: Synthetic peptide
  Seed: YERMCNILKGKFQTA
YERMLNISKAKFVTA

SEQ ID NO: 135524 - protein, 15 aa, Artificial Sequence
  Description of Artificial Sequence: Synthetic peptide
  Seed: YERMCNILKGKFQTA
YERMLNISKGKFITA

SEQ ID NO: 135525 - protein, 15 aa, Artificial Sequence
  Description of Artificial Sequence: Synthetic peptide
  Seed: YERMCNILKGKFQTA
YERMLNISKGKFLTA

SEQ ID NO: 135526 - protein, 15 aa, Artificial Sequence
  Description of Artificial Sequence: Synthetic peptide
  Seed: YERMCNILKGKFQTA
YERMLNISKGKFVTA

SEQ ID NO: 135527 - protein, 15 aa, Artificial Sequence
  Description of Artificial Sequence: Synthetic peptide
  Seed: YERMCNILKGKFQTA
YERMLNISKSKFITA

SEQ ID NO: 135528 - protein, 15 aa, Artificial Sequence
  Description of Artificial Sequence: Synthetic peptide
  Seed: YERMCNILKGKFQTA
YERMLNISKSKFLTA

SEQ ID NO: 135529 - protein, 15 aa, Artificial Sequence
  Description of Artificial Sequence: Synthetic peptide
  Seed: YERMCNILKGKFQTA
YERMLNISKSKFVTA

SEQ ID NO: 135530 - protein, 15 aa, Artificial Sequence
  Description of Artificial Sequence: Synthetic peptide
  Seed: YERMCNILKGKFQTA
YERMLNITKAKFITA

SEQ ID NO: 135531 - protein, 15 aa, Artificial Sequence
  Description of Artificial Sequence: Synthetic peptide
  Seed: YERMCNILKGKFQTA
YERMLNITKAKFLTA

SEQ ID NO: 135532 - protein, 15 aa, Artificial Sequence
  Description of Artificial Sequence: Synthetic peptide
  Seed: YERMCNILKGKFQTA
YERMLNITKAKFVTA

SEQ ID NO: 135533 - protein, 15 aa, Artificial Sequence
  Description of Artificial Sequence: Synthetic peptide
  Seed: YERMCNILKGKFQTA
YERMLNIVKAKFATA

SEQ ID NO: 135534 - protein, 15 aa, Artificial Sequence
  Description of Artificial Sequence: Synthetic peptide
  Seed: YERMCNILKGKFQTA
YERMLNIVKAKFITA

SEQ ID NO: 135535 - protein, 15 aa, Artificial Sequence
  Description of Artificial Sequence: Synthetic peptide
  Seed: YERMCNILKGKFQTA
YERMLNIVKAKFLTA

SEQ ID NO: 135536 - protein, 15 aa, Artificial Sequence
  Description of Artificial Sequence: Synthetic peptide
  Seed: YERMCNILKGKFQTA
YERMLNIVKAKFMTA

SEQ ID NO: 135537 - protein, 15 aa, Artificial Sequence
  Description of Artificial Sequence: Synthetic peptide
  Seed: YERMCNILKGKFQTA
YERMLNIVKAKFSTA

SEQ ID NO: 135538 - protein, 15 aa, Artificial Sequence
  Description of Artificial Sequence: Synthetic peptide
  Seed: YERMCNILKGKFQTA
YERMLNIVKAKFTTA

SEQ ID NO: 135539 - protein, 15 aa, Artificial Sequence
  Description of Artificial Sequence: Synthetic peptide
  Seed: YERMCNILKGKFQTA
YERMLNIVKAKFVTA

SEQ ID NO: 135540 - protein, 15 aa, Artificial Sequence
  Description of Artificial Sequence: Synthetic peptide
  Seed: YERMCNILKGKFQTA
YERMLNIVKGKFATA

SEQ ID NO: 135541 - protein, 15 aa, Artificial Sequence
  Description of Artificial Sequence: Synthetic peptide
  Seed: YERMCNILKGKFQTA
YERMLNIVKGKFITA

SEQ ID NO: 135542 - protein, 15 aa, Artificial Sequence
  Description of Artificial Sequence: Synthetic peptide
  Seed: YERMCNILKGKFQTA
YERMLNIVKGKFLTA

SEQ ID NO: 135543 - protein, 15 aa, Artificial Sequence
  Description of Artificial Sequence: Synthetic peptide
  Seed: YERMCNILKGKFQTA
YERMLNIVKGKFMTA

SEQ ID NO: 135544 - protein, 15 aa, Artificial Sequence
  Description of Artificial Sequence: Synthetic peptide
  Seed: YERMCNILKGKFQTA
YERMLNIVKGKFSTA

SEQ ID NO: 135545 - protein, 15 aa, Artificial Sequence
  Description of Artificial Sequence: Synthetic peptide
  Seed: YERMCNILKGKFQTA
YERMLNIVKGKFTTA

SEQ ID NO: 135546 - protein, 15 aa, Artificial Sequence
  Description of Artificial Sequence: Synthetic peptide
  Seed: YERMCNILKGKFQTA
YERMLNIVKGKFVTA

SEQ ID NO: 135547 - protein, 15 aa, Artificial Sequence
  Description of Artificial Sequence: Synthetic peptide
  Seed: YERMCNILKGKFQTA
YERMLNIVKPKFATA

SEQ ID NO: 135548 - protein, 15 aa, Artificial Sequence
  Description of Artificial Sequence: Synthetic peptide
  Seed: YERMCNILKGKFQTA
YERMLNIVKPKFITA

SEQ ID NO: 135549 - protein, 15 aa, Artificial Sequence
  Description of Artificial Sequence: Synthetic peptide
  Seed: YERMCNILKGKFQTA
YERMLNIVKPKFLTA

SEQ ID NO: 135550 - protein, 15 aa, Artificial Sequence
  Description of Artificial Sequence: Synthetic peptide
  Seed: YERMCNILKGKFQTA
YERMLNIVKPKFVTA

SEQ ID NO: 135551 - protein, 15 aa, Artificial Sequence
  Description of Artificial Sequence: Synthetic peptide
  Seed: YERMCNILKGKFQTA
YERMLNIVKSKFATA

SEQ ID NO: 135552 - protein, 15 aa, Artificial Sequence
  Description of Artificial Sequence: Synthetic peptide
  Seed: YERMCNILKGKFQTA
YERMLNIVKSKFITA

SEQ ID NO: 135553 - protein, 15 aa, Artificial Sequence
  Description of Artificial Sequence: Synthetic peptide
  Seed: YERMCNILKGKFQTA
YERMLNIVKSKFLTA

SEQ ID NO: 135554 - protein, 15 aa, Artificial Sequence
  Description of Artificial Sequence: Synthetic peptide
  Seed: YERMCNILKGKFQTA
YERMLNIVKSKFTTA

SEQ ID NO: 135555 - protein, 15 aa, Artificial Sequence
  Description of Artificial Sequence: Synthetic peptide
  Seed: YERMCNILKGKFQTA
YERMLNIVKSKFVTA

SEQ ID NO: 135556 - protein, 15 aa, Artificial Sequence
  Description of Artificial Sequence: Synthetic peptide
  Seed: YERMCNILKGKFQTA
YERMLNIVKTKFLTA

SEQ ID NO: 135557 - protein, 15 aa, Artificial Sequence
  Description of Artificial Sequence: Synthetic peptide
  Seed: YERMCNILKGKFQTA
YERMLNIVKTKFVTA

SEQ ID NO: 135558 - protein, 15 aa, Artificial Sequence
  Description of Artificial Sequence: Synthetic peptide
  Seed: YERMCNILKGKFQTA
YERMMNIAKAKFATA

SEQ ID NO: 135559 - protein, 15 aa, Artificial Sequence
  Description of Artificial Sequence: Synthetic peptide
  Seed: YERMCNILKGKFQTA
YERMMNIAKAKFITA

SEQ ID NO: 135560 - protein, 15 aa, Artificial Sequence
  Description of Artificial Sequence: Synthetic peptide
  Seed: YERMCNILKGKFQTA
YERMMNIAKAKFLTA

SEQ ID NO: 135561 - protein, 15 aa, Artificial Sequence
  Description of Artificial Sequence: Synthetic peptide
  Seed: YERMCNILKGKFQTA
YERMMNIAKAKFMTA

SEQ ID NO: 135562 - protein, 15 aa, Artificial Sequence
  Description of Artificial Sequence: Synthetic peptide
  Seed: YERMCNILKGKFQTA
YERMMNIAKAKFSTA

SEQ ID NO: 135563 - protein, 15 aa, Artificial Sequence
  Description of Artificial Sequence: Synthetic peptide
  Seed: YERMCNILKGKFQTA
YERMMNIAKAKFTTA

SEQ ID NO: 135564 - protein, 15 aa, Artificial Sequence
  Description of Artificial Sequence: Synthetic peptide
  Seed: YERMCNILKGKFQTA
YERMMNIAKAKFVTA

SEQ ID NO: 135565 - protein, 15 aa, Artificial Sequence
  Description of Artificial Sequence: Synthetic peptide
  Seed: YERMCNILKGKFQTA
YERMMNIAKGKFATA

SEQ ID NO: 135566 - protein, 15 aa, Artificial Sequence
  Description of Artificial Sequence: Synthetic peptide
  Seed: YERMCNILKGKFQTA
YERMMNIAKGKFITA

SEQ ID NO: 135567 - protein, 15 aa, Artificial Sequence
  Description of Artificial Sequence: Synthetic peptide
  Seed: YERMCNILKGKFQTA
YERMMNIAKGKFLTA

SEQ ID NO: 135568 - protein, 15 aa, Artificial Sequence
  Description of Artificial Sequence: Synthetic peptide
  Seed: YERMCNILKGKFQTA
YERMMNIAKGKFMTA

SEQ ID NO: 135569 - protein, 15 aa, Artificial Sequence
  Description of Artificial Sequence: Synthetic peptide
  Seed: YERMCNILKGKFQTA
YERMMNIAKGKFVTA

SEQ ID NO: 135570 - protein, 15 aa, Artificial Sequence
  Description of Artificial Sequence: Synthetic peptide
  Seed: YERMCNILKGKFQTA
YERMMNIAKPKFITA

SEQ ID NO: 135571 - protein, 15 aa, Artificial Sequence
  Description of Artificial Sequence: Synthetic peptide
  Seed: YERMCNILKGKFQTA
YERMMNIAKPKFLTA

SEQ ID NO: 135572 - protein, 15 aa, Artificial Sequence
  Description of Artificial Sequence: Synthetic peptide
  Seed: YERMCNILKGKFQTA
YERMMNIAKPKFVTA

SEQ ID NO: 135573 - protein, 15 aa, Artificial Sequence
  Description of Artificial Sequence: Synthetic peptide
  Seed: YERMCNILKGKFQTA
YERMMNIAKSKFATA

SEQ ID NO: 135574 - protein, 15 aa, Artificial Sequence
  Description of Artificial Sequence: Synthetic peptide
  Seed: YERMCNILKGKFQTA
YERMMNIAKSKFITA

SEQ ID NO: 135575 - protein, 15 aa, Artificial Sequence
  Description of Artificial Sequence: Synthetic peptide
  Seed: YERMCNILKGKFQTA
YERMMNIAKSKFLTA

SEQ ID NO: 135576 - protein, 15 aa, Artificial Sequence
  Description of Artificial Sequence: Synthetic peptide
  Seed: YERMCNILKGKFQTA
YERMMNIAKSKFVTA

SEQ ID NO: 135577 - protein, 15 aa, Artificial Sequence
  Description of Artificial Sequence: Synthetic peptide
  Seed: YERMCNILKGKFQTA
YERMMNIAKTKFLTA

SEQ ID NO: 135578 - protein, 15 aa, Artificial Sequence
  Description of Artificial Sequence: Synthetic peptide
  Seed: YERMCNILKGKFQTA
YERMMNIAKTKFVTA

SEQ ID NO: 135579 - protein, 15 aa, Artificial Sequence
  Description of Artificial Sequence: Synthetic peptide
  Seed: YERMCNILKGKFQTA
YERMMNIEKAKFLTA

SEQ ID NO: 135580 - protein, 15 aa, Artificial Sequence
  Description of Artificial Sequence: Synthetic peptide
  Seed: YERMCNILKGKFQTA
YERMMNIGKAKFLTA

SEQ ID NO: 135581 - protein, 15 aa, Artificial Sequence
  Description of Artificial Sequence: Synthetic peptide
  Seed: YERMCNILKGKFQTA
YERMMNIIKAKFATA

SEQ ID NO: 135582 - protein, 15 aa, Artificial Sequence
  Description of Artificial Sequence: Synthetic peptide
  Seed: YERMCNILKGKFQTA
YERMMNIIKAKFITA

SEQ ID NO: 135583 - protein, 15 aa, Artificial Sequence
  Description of Artificial Sequence: Synthetic peptide
  Seed: YERMCNILKGKFQTA
YERMMNIIKAKFLTA

SEQ ID NO: 135584 - protein, 15 aa, Artificial Sequence
  Description of Artificial Sequence: Synthetic peptide
  Seed: YERMCNILKGKFQTA
YERMMNIIKAKFMTA

SEQ ID NO: 135585 - protein, 15 aa, Artificial Sequence
  Description of Artificial Sequence: Synthetic peptide
  Seed: YERMCNILKGKFQTA
YERMMNIIKAKFSTA

SEQ ID NO: 135586 - protein, 15 aa, Artificial Sequence
  Description of Artificial Sequence: Synthetic peptide
  Seed: YERMCNILKGKFQTA
YERMMNIIKAKFTTA

SEQ ID NO: 135587 - protein, 15 aa, Artificial Sequence
  Description of Artificial Sequence: Synthetic peptide
  Seed: YERMCNILKGKFQTA
YERMMNIIKAKFVTA

SEQ ID NO: 135588 - protein, 15 aa, Artificial Sequence
  Description of Artificial Sequence: Synthetic peptide
  Seed: YERMCNILKGKFQTA
YERMMNIIKGKFATA

SEQ ID NO: 135589 - protein, 15 aa, Artificial Sequence
  Description of Artificial Sequence: Synthetic peptide
  Seed: YERMCNILKGKFQTA
YERMMNIIKGKFITA

SEQ ID NO: 135590 - protein, 15 aa, Artificial Sequence
  Description of Artificial Sequence: Synthetic peptide
  Seed: YERMCNILKGKFQTA
YERMMNIIKGKFLTA

SEQ ID NO: 135591 - protein, 15 aa, Artificial Sequence
  Description of Artificial Sequence: Synthetic peptide
  Seed: YERMCNILKGKFQTA
YERMMNIIKGKFMTA

SEQ ID NO: 135592 - protein, 15 aa, Artificial Sequence
  Description of Artificial Sequence: Synthetic peptide
  Seed: YERMCNILKGKFQTA
YERMMNIIKGKFSTA

SEQ ID NO: 135593 - protein, 15 aa, Artificial Sequence
  Description of Artificial Sequence: Synthetic peptide
  Seed: YERMCNILKGKFQTA
YERMMNIIKGKFTTA

SEQ ID NO: 135594 - protein, 15 aa, Artificial Sequence
  Description of Artificial Sequence: Synthetic peptide
  Seed: YERMCNILKGKFQTA
YERMMNIIKGKFVTA

SEQ ID NO: 135595 - protein, 15 aa, Artificial Sequence
  Description of Artificial Sequence: Synthetic peptide
  Seed: YERMCNILKGKFQTA
YERMMNIIKPKFATA

SEQ ID NO: 135596 - protein, 15 aa, Artificial Sequence
  Description of Artificial Sequence: Synthetic peptide
  Seed: YERMCNILKGKFQTA
YERMMNIIKPKFITA

SEQ ID NO: 135597 - protein, 15 aa, Artificial Sequence
  Description of Artificial Sequence: Synthetic peptide
  Seed: YERMCNILKGKFQTA
YERMMNIIKPKFLTA

SEQ ID NO: 135598 - protein, 15 aa, Artificial Sequence
  Description of Artificial Sequence: Synthetic peptide
  Seed: YERMCNILKGKFQTA
YERMMNIIKPKFVTA

SEQ ID NO: 135599 - protein, 15 aa, Artificial Sequence
  Description of Artificial Sequence: Synthetic peptide
  Seed: YERMCNILKGKFQTA
YERMMNIIKSKFATA

SEQ ID NO: 135600 - protein, 15 aa, Artificial Sequence
  Description of Artificial Sequence: Synthetic peptide
  Seed: YERMCNILKGKFQTA
YERMMNIIKSKFITA

SEQ ID NO: 135601 - protein, 15 aa, Artificial Sequence
  Description of Artificial Sequence: Synthetic peptide
  Seed: YERMCNILKGKFQTA
YERMMNIIKSKFLTA

SEQ ID NO: 135602 - protein, 15 aa, Artificial Sequence
  Description of Artificial Sequence: Synthetic peptide
  Seed: YERMCNILKGKFQTA
YERMMNIIKSKFMTA

SEQ ID NO: 135603 - protein, 15 aa, Artificial Sequence
  Description of Artificial Sequence: Synthetic peptide
  Seed: YERMCNILKGKFQTA
YERMMNIIKSKFTTA

SEQ ID NO: 135604 - protein, 15 aa, Artificial Sequence
  Description of Artificial Sequence: Synthetic peptide
  Seed: YERMCNILKGKFQTA
YERMMNIIKSKFVTA

SEQ ID NO: 135605 - protein, 15 aa, Artificial Sequence
  Description of Artificial Sequence: Synthetic peptide
  Seed: YERMCNILKGKFQTA
YERMMNIIKTKFLTA

SEQ ID NO: 135606 - protein, 15 aa, Artificial Sequence
  Description of Artificial Sequence: Synthetic peptide
  Seed: YERMCNILKGKFQTA
YERMMNIIKTKFVTA

SEQ ID NO: 135607 - protein, 15 aa, Artificial Sequence
  Description of Artificial Sequence: Synthetic peptide
  Seed: YERMCNILKGKFQTA
YERMMNILKAKFATA

SEQ ID NO: 135608 - protein, 15 aa, Artificial Sequence
  Description of Artificial Sequence: Synthetic peptide
  Seed: YERMCNILKGKFQTA
YERMMNILKAKFCTA

SEQ ID NO: 135609 - protein, 15 aa, Artificial Sequence
  Description of Artificial Sequence: Synthetic peptide
  Seed: YERMCNILKGKFQTA
YERMMNILKAKFFTA

SEQ ID NO: 135610 - protein, 15 aa, Artificial Sequence
  Description of Artificial Sequence: Synthetic peptide
  Seed: YERMCNILKGKFQTA
YERMMNILKAKFGTA

SEQ ID NO: 135611 - protein, 15 aa, Artificial Sequence
  Description of Artificial Sequence: Synthetic peptide
  Seed: YERMCNILKGKFQTA
YERMMNILKAKFITA

SEQ ID NO: 135612 - protein, 15 aa, Artificial Sequence
  Description of Artificial Sequence: Synthetic peptide
  Seed: YERMCNILKGKFQTA
YERMMNILKAKFLTA

SEQ ID NO: 135613 - protein, 15 aa, Artificial Sequence
  Description of Artificial Sequence: Synthetic peptide
  Seed: YERMCNILKGKFQTA
YERMMNILKAKFMTA

SEQ ID NO: 135614 - protein, 15 aa, Artificial Sequence
  Description of Artificial Sequence: Synthetic peptide
  Seed: YERMCNILKGKFQTA
YERMMNILKAKFNTA

SEQ ID NO: 135615 - protein, 15 aa, Artificial Sequence
  Description of Artificial Sequence: Synthetic peptide
  Seed: YERMCNILKGKFQTA
YERMMNILKAKFSTA

SEQ ID NO: 135616 - protein, 15 aa, Artificial Sequence
  Description of Artificial Sequence: Synthetic peptide
  Seed: YERMCNILKGKFQTA
YERMMNILKAKFTTA

SEQ ID NO: 135617 - protein, 15 aa, Artificial Sequence
  Description of Artificial Sequence: Synthetic peptide
  Seed: YERMCNILKGKFQTA
YERMMNILKAKFVTA

SEQ ID NO: 135618 - protein, 15 aa, Artificial Sequence
  Description of Artificial Sequence: Synthetic peptide
  Seed: YERMCNILKGKFQTA
YERMMNILKGKFATA

SEQ ID NO: 135619 - protein, 15 aa, Artificial Sequence
  Description of Artificial Sequence: Synthetic peptide
  Seed: YERMCNILKGKFQTA
YERMMNILKGKFGTA

SEQ ID NO: 135620 - protein, 15 aa, Artificial Sequence
  Description of Artificial Sequence: Synthetic peptide
  Seed: YERMCNILKGKFQTA
YERMMNILKGKFITA

SEQ ID NO: 135621 - protein, 15 aa, Artificial Sequence
  Description of Artificial Sequence: Synthetic peptide
  Seed: YERMCNILKGKFQTA
YERMMNILKGKFLTA

SEQ ID NO: 135622 - protein, 15 aa, Artificial Sequence
  Description of Artificial Sequence: Synthetic peptide
  Seed: YERMCNILKGKFQTA
YERMMNILKGKFMTA

SEQ ID NO: 135623 - protein, 15 aa, Artificial Sequence
  Description of Artificial Sequence: Synthetic peptide
  Seed: YERMCNILKGKFQTA
YERMMNILKGKFSTA

SEQ ID NO: 135624 - protein, 15 aa, Artificial Sequence
  Description of Artificial Sequence: Synthetic peptide
  Seed: YERMCNILKGKFQTA
YERMMNILKGKFTTA

SEQ ID NO: 135625 - protein, 15 aa, Artificial Sequence
  Description of Artificial Sequence: Synthetic peptide
  Seed: YERMCNILKGKFQTA
YERMMNILKGKFVTA

SEQ ID NO: 135626 - protein, 15 aa, Artificial Sequence
  Description of Artificial Sequence: Synthetic peptide
  Seed: YERMCNILKGKFQTA
YERMMNILKNKFATA

SEQ ID NO: 135627 - protein, 15 aa, Artificial Sequence
  Description of Artificial Sequence: Synthetic peptide
  Seed: YERMCNILKGKFQTA
YERMMNILKNKFITA

SEQ ID NO: 135628 - protein, 15 aa, Artificial Sequence
  Description of Artificial Sequence: Synthetic peptide
  Seed: YERMCNILKGKFQTA
YERMMNILKNKFLTA

SEQ ID NO: 135629 - protein, 15 aa, Artificial Sequence
  Description of Artificial Sequence: Synthetic peptide
  Seed: YERMCNILKGKFQTA
YERMMNILKNKFTTA

SEQ ID NO: 135630 - protein, 15 aa, Artificial Sequence
  Description of Artificial Sequence: Synthetic peptide
  Seed: YERMCNILKGKFQTA
YERMMNILKNKFVTA

SEQ ID NO: 135631 - protein, 15 aa, Artificial Sequence
  Description of Artificial Sequence: Synthetic peptide
  Seed: YERMCNILKGKFQTA
YERMMNILKPKFATA

SEQ ID NO: 135632 - protein, 15 aa, Artificial Sequence
  Description of Artificial Sequence: Synthetic peptide
  Seed: YERMCNILKGKFQTA
YERMMNILKPKFITA

SEQ ID NO: 135633 - protein, 15 aa, Artificial Sequence
  Description of Artificial Sequence: Synthetic peptide
  Seed: YERMCNILKGKFQTA
YERMMNILKPKFLTA

SEQ ID NO: 135634 - protein, 15 aa, Artificial Sequence
  Description of Artificial Sequence: Synthetic peptide
  Seed: YERMCNILKGKFQTA
YERMMNILKPKFMTA

SEQ ID NO: 135635 - protein, 15 aa, Artificial Sequence
  Description of Artificial Sequence: Synthetic peptide
  Seed: YERMCNILKGKFQTA
YERMMNILKPKFSTA

SEQ ID NO: 135636 - protein, 15 aa, Artificial Sequence
  Description of Artificial Sequence: Synthetic peptide
  Seed: YERMCNILKGKFQTA
YERMMNILKPKFTTA

SEQ ID NO: 135637 - protein, 15 aa, Artificial Sequence
  Description of Artificial Sequence: Synthetic peptide
  Seed: YERMCNILKGKFQTA
YERMMNILKPKFVTA

SEQ ID NO: 135638 - protein, 15 aa, Artificial Sequence
  Description of Artificial Sequence: Synthetic peptide
  Seed: YERMCNILKGKFQTA
YERMMNILKSKFATA

SEQ ID NO: 135639 - protein, 15 aa, Artificial Sequence
  Description of Artificial Sequence: Synthetic peptide
  Seed: YERMCNILKGKFQTA
YERMMNILKSKFITA

SEQ ID NO: 135640 - protein, 15 aa, Artificial Sequence
  Description of Artificial Sequence: Synthetic peptide
  Seed: YERMCNILKGKFQTA
YERMMNILKSKFLTA

SEQ ID NO: 135641 - protein, 15 aa, Artificial Sequence
  Description of Artificial Sequence: Synthetic peptide
  Seed: YERMCNILKGKFQTA
YERMMNILKSKFMTA

SEQ ID NO: 135642 - protein, 15 aa, Artificial Sequence
  Description of Artificial Sequence: Synthetic peptide
  Seed: YERMCNILKGKFQTA
YERMMNILKSKFSTA

SEQ ID NO: 135643 - protein, 15 aa, Artificial Sequence
  Description of Artificial Sequence: Synthetic peptide
  Seed: YERMCNILKGKFQTA
YERMMNILKSKFTTA

SEQ ID NO: 135644 - protein, 15 aa, Artificial Sequence
  Description of Artificial Sequence: Synthetic peptide
  Seed: YERMCNILKGKFQTA
YERMMNILKSKFVTA

SEQ ID NO: 135645 - protein, 15 aa, Artificial Sequence
  Description of Artificial Sequence: Synthetic peptide
  Seed: YERMCNILKGKFQTA
YERMMNILKTKFATA

SEQ ID NO: 135646 - protein, 15 aa, Artificial Sequence
  Description of Artificial Sequence: Synthetic peptide
  Seed: YERMCNILKGKFQTA
YERMMNILKTKFITA

SEQ ID NO: 135647 - protein, 15 aa, Artificial Sequence
  Description of Artificial Sequence: Synthetic peptide
  Seed: YERMCNILKGKFQTA
YERMMNILKTKFLTA

SEQ ID NO: 135648 - protein, 15 aa, Artificial Sequence
  Description of Artificial Sequence: Synthetic peptide
  Seed: YERMCNILKGKFQTA
YERMMNILKTKFMTA

SEQ ID NO: 135649 - protein, 15 aa, Artificial Sequence
  Description of Artificial Sequence: Synthetic peptide
  Seed: YERMCNILKGKFQTA
YERMMNILKTKFSTA

SEQ ID NO: 135650 - protein, 15 aa, Artificial Sequence
  Description of Artificial Sequence: Synthetic peptide
  Seed: YERMCNILKGKFQTA
YERMMNILKTKFTTA

SEQ ID NO: 135651 - protein, 15 aa, Artificial Sequence
  Description of Artificial Sequence: Synthetic peptide
  Seed: YERMCNILKGKFQTA
YERMMNILKTKFVTA

SEQ ID NO: 135652 - protein, 15 aa, Artificial Sequence
  Description of Artificial Sequence: Synthetic peptide
  Seed: YERMCNILKGKFQTA
YERMMNILKVKFATA

SEQ ID NO: 135653 - protein, 15 aa, Artificial Sequence
  Description of Artificial Sequence: Synthetic peptide
  Seed: YERMCNILKGKFQTA
YERMMNILKVKFITA

SEQ ID NO: 135654 - protein, 15 aa, Artificial Sequence
  Description of Artificial Sequence: Synthetic peptide
  Seed: YERMCNILKGKFQTA
YERMMNILKVKFLTA

SEQ ID NO: 135655 - protein, 15 aa, Artificial Sequence
  Description of Artificial Sequence: Synthetic peptide
  Seed: YERMCNILKGKFQTA
YERMMNILKVKFTTA

SEQ ID NO: 135656 - protein, 15 aa, Artificial Sequence
  Description of Artificial Sequence: Synthetic peptide
  Seed: YERMCNILKGKFQTA
YERMMNILKVKFVTA

SEQ ID NO: 135657 - protein, 15 aa, Artificial Sequence
  Description of Artificial Sequence: Synthetic peptide
  Seed: YERMCNILKGKFQTA
YERMMNIMKAKFATA

SEQ ID NO: 135658 - protein, 15 aa, Artificial Sequence
  Description of Artificial Sequence: Synthetic peptide
  Seed: YERMCNILKGKFQTA
YERMMNIMKAKFCTA

SEQ ID NO: 135659 - protein, 15 aa, Artificial Sequence
  Description of Artificial Sequence: Synthetic peptide
  Seed: YERMCNILKGKFQTA
YERMMNIMKAKFFTA

SEQ ID NO: 135660 - protein, 15 aa, Artificial Sequence
  Description of Artificial Sequence: Synthetic peptide
  Seed: YERMCNILKGKFQTA
YERMMNIMKAKFGTA

SEQ ID NO: 135661 - protein, 15 aa, Artificial Sequence
  Description of Artificial Sequence: Synthetic peptide
  Seed: YERMCNILKGKFQTA
YERMMNIMKAKFITA

SEQ ID NO: 135662 - protein, 15 aa, Artificial Sequence
  Description of Artificial Sequence: Synthetic peptide
  Seed: YERMCNILKGKFQTA
YERMMNIMKAKFLTA

SEQ ID NO: 135663 - protein, 15 aa, Artificial Sequence
  Description of Artificial Sequence: Synthetic peptide
  Seed: YERMCNILKGKFQTA
YERMMNIMKAKFMTA

SEQ ID NO: 135664 - protein, 15 aa, Artificial Sequence
  Description of Artificial Sequence: Synthetic peptide
  Seed: YERMCNILKGKFQTA
YERMMNIMKAKFNTA

SEQ ID NO: 135665 - protein, 15 aa, Artificial Sequence
  Description of Artificial Sequence: Synthetic peptide
  Seed: YERMCNILKGKFQTA
YERMMNIMKAKFSTA

SEQ ID NO: 135666 - protein, 15 aa, Artificial Sequence
  Description of Artificial Sequence: Synthetic peptide
  Seed: YERMCNILKGKFQTA
YERMMNIMKAKFTTA

SEQ ID NO: 135667 - protein, 15 aa, Artificial Sequence
  Description of Artificial Sequence: Synthetic peptide
  Seed: YERMCNILKGKFQTA
YERMMNIMKAKFVTA

SEQ ID NO: 135668 - protein, 15 aa, Artificial Sequence
  Description of Artificial Sequence: Synthetic peptide
  Seed: YERMCNILKGKFQTA
YERMMNIMKGKFATA

SEQ ID NO: 135669 - protein, 15 aa, Artificial Sequence
  Description of Artificial Sequence: Synthetic peptide
  Seed: YERMCNILKGKFQTA
YERMMNIMKGKFITA

SEQ ID NO: 135670 - protein, 15 aa, Artificial Sequence
  Description of Artificial Sequence: Synthetic peptide
  Seed: YERMCNILKGKFQTA
YERMMNIMKGKFLTA

SEQ ID NO: 135671 - protein, 15 aa, Artificial Sequence
  Description of Artificial Sequence: Synthetic peptide
  Seed: YERMCNILKGKFQTA
YERMMNIMKGKFMTA

SEQ ID NO: 135672 - protein, 15 aa, Artificial Sequence
  Description of Artificial Sequence: Synthetic peptide
  Seed: YERMCNILKGKFQTA
YERMMNIMKGKFSTA

SEQ ID NO: 135673 - protein, 15 aa, Artificial Sequence
  Description of Artificial Sequence: Synthetic peptide
  Seed: YERMCNILKGKFQTA
YERMMNIMKGKFTTA

SEQ ID NO: 135674 - protein, 15 aa, Artificial Sequence
  Description of Artificial Sequence: Synthetic peptide
  Seed: YERMCNILKGKFQTA
YERMMNIMKGKFVTA

SEQ ID NO: 135675 - protein, 15 aa, Artificial Sequence
  Description of Artificial Sequence: Synthetic peptide
  Seed: YERMCNILKGKFQTA
YERMMNIMKIKFVTA

SEQ ID NO: 135676 - protein, 15 aa, Artificial Sequence
  Description of Artificial Sequence: Synthetic peptide
  Seed: YERMCNILKGKFQTA
YERMMNIMKNKFATA

SEQ ID NO: 135677 - protein, 15 aa, Artificial Sequence
  Description of Artificial Sequence: Synthetic peptide
  Seed: YERMCNILKGKFQTA
YERMMNIMKNKFITA

SEQ ID NO: 135678 - protein, 15 aa, Artificial Sequence
  Description of Artificial Sequence: Synthetic peptide
  Seed: YERMCNILKGKFQTA
YERMMNIMKNKFLTA

SEQ ID NO: 135679 - protein, 15 aa, Artificial Sequence
  Description of Artificial Sequence: Synthetic peptide
  Seed: YERMCNILKGKFQTA
YERMMNIMKNKFTTA

SEQ ID NO: 135680 - protein, 15 aa, Artificial Sequence
  Description of Artificial Sequence: Synthetic peptide
  Seed: YERMCNILKGKFQTA
YERMMNIMKNKFVTA

SEQ ID NO: 135681 - protein, 15 aa, Artificial Sequence
  Description of Artificial Sequence: Synthetic peptide
  Seed: YERMCNILKGKFQTA
YERMMNIMKPKFATA

SEQ ID NO: 135682 - protein, 15 aa, Artificial Sequence
  Description of Artificial Sequence: Synthetic peptide
  Seed: YERMCNILKGKFQTA
YERMMNIMKPKFITA

SEQ ID NO: 135683 - protein, 15 aa, Artificial Sequence
  Description of Artificial Sequence: Synthetic peptide
  Seed: YERMCNILKGKFQTA
YERMMNIMKPKFLTA

SEQ ID NO: 135684 - protein, 15 aa, Artificial Sequence
  Description of Artificial Sequence: Synthetic peptide
  Seed: YERMCNILKGKFQTA
YERMMNIMKPKFMTA

SEQ ID NO: 135685 - protein, 15 aa, Artificial Sequence
  Description of Artificial Sequence: Synthetic peptide
  Seed: YERMCNILKGKFQTA
YERMMNIMKPKFSTA

SEQ ID NO: 135686 - protein, 15 aa, Artificial Sequence
  Description of Artificial Sequence: Synthetic peptide
  Seed: YERMCNILKGKFQTA
YERMMNIMKPKFTTA

SEQ ID NO: 135687 - protein, 15 aa, Artificial Sequence
  Description of Artificial Sequence: Synthetic peptide
  Seed: YERMCNILKGKFQTA
YERMMNIMKPKFVTA

SEQ ID NO: 135688 - protein, 15 aa, Artificial Sequence
  Description of Artificial Sequence: Synthetic peptide
  Seed: YERMCNILKGKFQTA
YERMMNIMKSKFATA

SEQ ID NO: 135689 - protein, 15 aa, Artificial Sequence
  Description of Artificial Sequence: Synthetic peptide
  Seed: YERMCNILKGKFQTA
YERMMNIMKSKFITA

SEQ ID NO: 135690 - protein, 15 aa, Artificial Sequence
  Description of Artificial Sequence: Synthetic peptide
  Seed: YERMCNILKGKFQTA
YERMMNIMKSKFLTA

SEQ ID NO: 135691 - protein, 15 aa, Artificial Sequence
  Description of Artificial Sequence: Synthetic peptide
  Seed: YERMCNILKGKFQTA
YERMMNIMKSKFMTA

SEQ ID NO: 135692 - protein, 15 aa, Artificial Sequence
  Description of Artificial Sequence: Synthetic peptide
  Seed: YERMCNILKGKFQTA
YERMMNIMKSKFSTA

SEQ ID NO: 135693 - protein, 15 aa, Artificial Sequence
  Description of Artificial Sequence: Synthetic peptide
  Seed: YERMCNILKGKFQTA
YERMMNIMKSKFTTA

SEQ ID NO: 135694 - protein, 15 aa, Artificial Sequence
  Description of Artificial Sequence: Synthetic peptide
  Seed: YERMCNILKGKFQTA
YERMMNIMKSKFVTA

SEQ ID NO: 135695 - protein, 15 aa, Artificial Sequence
  Description of Artificial Sequence: Synthetic peptide
  Seed: YERMCNILKGKFQTA
YERMMNIMKTKFATA

SEQ ID NO: 135696 - protein, 15 aa, Artificial Sequence
  Description of Artificial Sequence: Synthetic peptide
  Seed: YERMCNILKGKFQTA
YERMMNIMKTKFITA

SEQ ID NO: 135697 - protein, 15 aa, Artificial Sequence
  Description of Artificial Sequence: Synthetic peptide
  Seed: YERMCNILKGKFQTA
YERMMNIMKTKFLTA

SEQ ID NO: 135698 - protein, 15 aa, Artificial Sequence
  Description of Artificial Sequence: Synthetic peptide
  Seed: YERMCNILKGKFQTA
YERMMNIMKTKFMTA

SEQ ID NO: 135699 - protein, 15 aa, Artificial Sequence
  Description of Artificial Sequence: Synthetic peptide
  Seed: YERMCNILKGKFQTA
YERMMNIMKTKFSTA

SEQ ID NO: 135700 - protein, 15 aa, Artificial Sequence
  Description of Artificial Sequence: Synthetic peptide
  Seed: YERMCNILKGKFQTA
YERMMNIMKTKFTTA

SEQ ID NO: 135701 - protein, 15 aa, Artificial Sequence
  Description of Artificial Sequence: Synthetic peptide
  Seed: YERMCNILKGKFQTA
YERMMNIMKTKFVTA

SEQ ID NO: 135702 - protein, 15 aa, Artificial Sequence
  Description of Artificial Sequence: Synthetic peptide
  Seed: YERMCNILKGKFQTA
YERMMNIMKVKFATA

SEQ ID NO: 135703 - protein, 15 aa, Artificial Sequence
  Description of Artificial Sequence: Synthetic peptide
  Seed: YERMCNILKGKFQTA
YERMMNIMKVKFITA

SEQ ID NO: 135704 - protein, 15 aa, Artificial Sequence
  Description of Artificial Sequence: Synthetic peptide
  Seed: YERMCNILKGKFQTA
YERMMNIMKVKFLTA

SEQ ID NO: 135705 - protein, 15 aa, Artificial Sequence
  Description of Artificial Sequence: Synthetic peptide
  Seed: YERMCNILKGKFQTA
YERMMNIMKVKFTTA

SEQ ID NO: 135706 - protein, 15 aa, Artificial Sequence
  Description of Artificial Sequence: Synthetic peptide
  Seed: YERMCNILKGKFQTA
YERMMNIMKVKFVTA

SEQ ID NO: 135707 - protein, 15 aa, Artificial Sequence
  Description of Artificial Sequence: Synthetic peptide
  Seed: YERMCNILKGKFQTA
YERMMNIQKAKFATA

SEQ ID NO: 135708 - protein, 15 aa, Artificial Sequence
  Description of Artificial Sequence: Synthetic peptide
  Seed: YERMCNILKGKFQTA
YERMMNIQKAKFITA

SEQ ID NO: 135709 - protein, 15 aa, Artificial Sequence
  Description of Artificial Sequence: Synthetic peptide
  Seed: YERMCNILKGKFQTA
YERMMNIQKAKFLTA

SEQ ID NO: 135710 - protein, 15 aa, Artificial Sequence
  Description of Artificial Sequence: Synthetic peptide
  Seed: YERMCNILKGKFQTA
YERMMNIQKAKFVTA

SEQ ID NO: 135711 - protein, 15 aa, Artificial Sequence
  Description of Artificial Sequence: Synthetic peptide
  Seed: YERMCNILKGKFQTA
YERMMNIQKGKFITA

SEQ ID NO: 135712 - protein, 15 aa, Artificial Sequence
  Description of Artificial Sequence: Synthetic peptide
  Seed: YERMCNILKGKFQTA
YERMMNIQKGKFLTA

SEQ ID NO: 135713 - protein, 15 aa, Artificial Sequence
  Description of Artificial Sequence: Synthetic peptide
  Seed: YERMCNILKGKFQTA
YERMMNIQKGKFVTA

SEQ ID NO: 135714 - protein, 15 aa, Artificial Sequence
  Description of Artificial Sequence: Synthetic peptide
  Seed: YERMCNILKGKFQTA
YERMMNIQKSKFLTA

SEQ ID NO: 135715 - protein, 15 aa, Artificial Sequence
  Description of Artificial Sequence: Synthetic peptide
  Seed: YERMCNILKGKFQTA
YERMMNIQKSKFVTA

SEQ ID NO: 135716 - protein, 15 aa, Artificial Sequence
  Description of Artificial Sequence: Synthetic peptide
  Seed: YERMCNILKGKFQTA
YERMMNISKAKFITA

SEQ ID NO: 135717 - protein, 15 aa, Artificial Sequence
  Description of Artificial Sequence: Synthetic peptide
  Seed: YERMCNILKGKFQTA
YERMMNISKAKFLTA

SEQ ID NO: 135718 - protein, 15 aa, Artificial Sequence
  Description of Artificial Sequence: Synthetic peptide
  Seed: YERMCNILKGKFQTA
YERMMNISKAKFVTA

SEQ ID NO: 135719 - protein, 15 aa, Artificial Sequence
  Description of Artificial Sequence: Synthetic peptide
  Seed: YERMCNILKGKFQTA
YERMMNIVKAKFATA

SEQ ID NO: 135720 - protein, 15 aa, Artificial Sequence
  Description of Artificial Sequence: Synthetic peptide
  Seed: YERMCNILKGKFQTA
YERMMNIVKAKFITA

SEQ ID NO: 135721 - protein, 15 aa, Artificial Sequence
  Description of Artificial Sequence: Synthetic peptide
  Seed: YERMCNILKGKFQTA
YERMMNIVKAKFLTA

SEQ ID NO: 135722 - protein, 15 aa, Artificial Sequence
  Description of Artificial Sequence: Synthetic peptide
  Seed: YERMCNILKGKFQTA
YERMMNIVKAKFTTA

SEQ ID NO: 135723 - protein, 15 aa, Artificial Sequence
  Description of Artificial Sequence: Synthetic peptide
  Seed: YERMCNILKGKFQTA
YERMMNIVKAKFVTA

SEQ ID NO: 135724 - protein, 15 aa, Artificial Sequence
  Description of Artificial Sequence: Synthetic peptide
  Seed: YERMCNILKGKFQTA
YERMMNIVKGKFATA

SEQ ID NO: 135725 - protein, 15 aa, Artificial Sequence
  Description of Artificial Sequence: Synthetic peptide
  Seed: YERMCNILKGKFQTA
YERMMNIVKGKFITA

SEQ ID NO: 135726 - protein, 15 aa, Artificial Sequence
  Description of Artificial Sequence: Synthetic peptide
  Seed: YERMCNILKGKFQTA
YERMMNIVKGKFLTA

SEQ ID NO: 135727 - protein, 15 aa, Artificial Sequence
  Description of Artificial Sequence: Synthetic peptide
  Seed: YERMCNILKGKFQTA
YERMMNIVKGKFVTA

SEQ ID NO: 135728 - protein, 15 aa, Artificial Sequence
  Description of Artificial Sequence: Synthetic peptide
  Seed: YERMCNILKGKFQTA
YERMMNIVKSKFATA

SEQ ID NO: 135729 - protein, 15 aa, Artificial Sequence
  Description of Artificial Sequence: Synthetic peptide
  Seed: YERMCNILKGKFQTA
YERMMNIVKSKFITA

SEQ ID NO: 135730 - protein, 15 aa, Artificial Sequence
  Description of Artificial Sequence: Synthetic peptide
  Seed: YERMCNILKGKFQTA
YERMMNIVKSKFLTA

SEQ ID NO: 135731 - protein, 15 aa, Artificial Sequence
  Description of Artificial Sequence: Synthetic peptide
  Seed: YERMCNILKGKFQTA
YERMMNIVKSKFVTA

SEQ ID NO: 135732 - protein, 15 aa, Artificial Sequence
  Description of Artificial Sequence: Synthetic peptide
  Seed: YERMCNILKGKFQTA
YERMTNILKAKFLTA

SEQ ID NO: 135733 - protein, 15 aa, Artificial Sequence
  Description of Artificial Sequence: Synthetic peptide
  Seed: YERMCNILKGKFQTA
YERMTNILKAKFVTA

SEQ ID NO: 135734 - protein, 15 aa, Artificial Sequence
  Description of Artificial Sequence: Synthetic peptide
  Seed: YERMCNILKGKFQTA
YERMTNIMKAKFLTA

SEQ ID NO: 135735 - protein, 15 aa, Artificial Sequence
  Description of Artificial Sequence: Synthetic peptide
  Seed: YERMCNILKGKFQTA
YERMTNIMKAKFVTA

SEQ ID NO: 135736 - protein, 15 aa, Artificial Sequence
  Description of Artificial Sequence: Synthetic peptide
  Seed: YERMCNILKGKFQTA
YERMVNIAKAKFATA

SEQ ID NO: 135737 - protein, 15 aa, Artificial Sequence
  Description of Artificial Sequence: Synthetic peptide
  Seed: YERMCNILKGKFQTA
YERMVNIAKAKFITA

SEQ ID NO: 135738 - protein, 15 aa, Artificial Sequence
  Description of Artificial Sequence: Synthetic peptide
  Seed: YERMCNILKGKFQTA
YERMVNIAKAKFLTA

SEQ ID NO: 135739 - protein, 15 aa, Artificial Sequence
  Description of Artificial Sequence: Synthetic peptide
  Seed: YERMCNILKGKFQTA
YERMVNIAKAKFMTA

SEQ ID NO: 135740 - protein, 15 aa, Artificial Sequence
  Description of Artificial Sequence: Synthetic peptide
  Seed: YERMCNILKGKFQTA
YERMVNIAKAKFTTA

SEQ ID NO: 135741 - protein, 15 aa, Artificial Sequence
  Description of Artificial Sequence: Synthetic peptide
  Seed: YERMCNILKGKFQTA
YERMVNIAKAKFVTA

SEQ ID NO: 135742 - protein, 15 aa, Artificial Sequence
  Description of Artificial Sequence: Synthetic peptide
  Seed: YERMCNILKGKFQTA
YERMVNIAKGKFATA

SEQ ID NO: 135743 - protein, 15 aa, Artificial Sequence
  Description of Artificial Sequence: Synthetic peptide
  Seed: YERMCNILKGKFQTA
YERMVNIAKGKFITA

SEQ ID NO: 135744 - protein, 15 aa, Artificial Sequence
  Description of Artificial Sequence: Synthetic peptide
  Seed: YERMCNILKGKFQTA
YERMVNIAKGKFLTA

SEQ ID NO: 135745 - protein, 15 aa, Artificial Sequence
  Description of Artificial Sequence: Synthetic peptide
  Seed: YERMCNILKGKFQTA
YERMVNIAKGKFMTA

SEQ ID NO: 135746 - protein, 15 aa, Artificial Sequence
  Description of Artificial Sequence: Synthetic peptide
  Seed: YERMCNILKGKFQTA
YERMVNIAKGKFVTA

SEQ ID NO: 135747 - protein, 15 aa, Artificial Sequence
  Description of Artificial Sequence: Synthetic peptide
  Seed: YERMCNILKGKFQTA
YERMVNIAKPKFITA

SEQ ID NO: 135748 - protein, 15 aa, Artificial Sequence
  Description of Artificial Sequence: Synthetic peptide
  Seed: YERMCNILKGKFQTA
YERMVNIAKPKFLTA

SEQ ID NO: 135749 - protein, 15 aa, Artificial Sequence
  Description of Artificial Sequence: Synthetic peptide
  Seed: YERMCNILKGKFQTA
YERMVNIAKPKFVTA

SEQ ID NO: 135750 - protein, 15 aa, Artificial Sequence
  Description of Artificial Sequence: Synthetic peptide
  Seed: YERMCNILKGKFQTA
YERMVNIAKSKFATA

SEQ ID NO: 135751 - protein, 15 aa, Artificial Sequence
  Description of Artificial Sequence: Synthetic peptide
  Seed: YERMCNILKGKFQTA
YERMVNIAKSKFITA

SEQ ID NO: 135752 - protein, 15 aa, Artificial Sequence
  Description of Artificial Sequence: Synthetic peptide
  Seed: YERMCNILKGKFQTA
YERMVNIAKSKFLTA

SEQ ID NO: 135753 - protein, 15 aa, Artificial Sequence
  Description of Artificial Sequence: Synthetic peptide
  Seed: YERMCNILKGKFQTA
YERMVNIAKSKFVTA

SEQ ID NO: 135754 - protein, 15 aa, Artificial Sequence
  Description of Artificial Sequence: Synthetic peptide
  Seed: YERMCNILKGKFQTA
YERMVNIIKAKFATA

SEQ ID NO: 135755 - protein, 15 aa, Artificial Sequence
  Description of Artificial Sequence: Synthetic peptide
  Seed: YERMCNILKGKFQTA
YERMVNIIKAKFITA

SEQ ID NO: 135756 - protein, 15 aa, Artificial Sequence
  Description of Artificial Sequence: Synthetic peptide
  Seed: YERMCNILKGKFQTA
YERMVNIIKAKFLTA

SEQ ID NO: 135757 - protein, 15 aa, Artificial Sequence
  Description of Artificial Sequence: Synthetic peptide
  Seed: YERMCNILKGKFQTA
YERMVNIIKAKFMTA

SEQ ID NO: 135758 - protein, 15 aa, Artificial Sequence
  Description of Artificial Sequence: Synthetic peptide
  Seed: YERMCNILKGKFQTA
YERMVNIIKAKFSTA

SEQ ID NO: 135759 - protein, 15 aa, Artificial Sequence
  Description of Artificial Sequence: Synthetic peptide
  Seed: YERMCNILKGKFQTA
YERMVNIIKAKFTTA

SEQ ID NO: 135760 - protein, 15 aa, Artificial Sequence
  Description of Artificial Sequence: Synthetic peptide
  Seed: YERMCNILKGKFQTA
YERMVNIIKAKFVTA

SEQ ID NO: 135761 - protein, 15 aa, Artificial Sequence
  Description of Artificial Sequence: Synthetic peptide
  Seed: YERMCNILKGKFQTA
YERMVNIIKGKFATA

SEQ ID NO: 135762 - protein, 15 aa, Artificial Sequence
  Description of Artificial Sequence: Synthetic peptide
  Seed: YERMCNILKGKFQTA
YERMVNIIKGKFITA

SEQ ID NO: 135763 - protein, 15 aa, Artificial Sequence
  Description of Artificial Sequence: Synthetic peptide
  Seed: YERMCNILKGKFQTA
YERMVNIIKGKFLTA

SEQ ID NO: 135764 - protein, 15 aa, Artificial Sequence
  Description of Artificial Sequence: Synthetic peptide
  Seed: YERMCNILKGKFQTA
YERMVNIIKGKFMTA

SEQ ID NO: 135765 - protein, 15 aa, Artificial Sequence
  Description of Artificial Sequence: Synthetic peptide
  Seed: YERMCNILKGKFQTA
YERMVNIIKGKFTTA

SEQ ID NO: 135766 - protein, 15 aa, Artificial Sequence
  Description of Artificial Sequence: Synthetic peptide
  Seed: YERMCNILKGKFQTA
YERMVNIIKGKFVTA

SEQ ID NO: 135767 - protein, 15 aa, Artificial Sequence
  Description of Artificial Sequence: Synthetic peptide
  Seed: YERMCNILKGKFQTA
YERMVNIIKPKFITA

SEQ ID NO: 135768 - protein, 15 aa, Artificial Sequence
  Description of Artificial Sequence: Synthetic peptide
  Seed: YERMCNILKGKFQTA
YERMVNIIKPKFLTA

SEQ ID NO: 135769 - protein, 15 aa, Artificial Sequence
  Description of Artificial Sequence: Synthetic peptide
  Seed: YERMCNILKGKFQTA
YERMVNIIKPKFVTA

SEQ ID NO: 135770 - protein, 15 aa, Artificial Sequence
  Description of Artificial Sequence: Synthetic peptide
  Seed: YERMCNILKGKFQTA
YERMVNIIKSKFATA

SEQ ID NO: 135771 - protein, 15 aa, Artificial Sequence
  Description of Artificial Sequence: Synthetic peptide
  Seed: YERMCNILKGKFQTA
YERMVNIIKSKFITA

SEQ ID NO: 135772 - protein, 15 aa, Artificial Sequence
  Description of Artificial Sequence: Synthetic peptide
  Seed: YERMCNILKGKFQTA
YERMVNIIKSKFLTA

SEQ ID NO: 135773 - protein, 15 aa, Artificial Sequence
  Description of Artificial Sequence: Synthetic peptide
  Seed: YERMCNILKGKFQTA
YERMVNIIKSKFTTA

SEQ ID NO: 135774 - protein, 15 aa, Artificial Sequence
  Description of Artificial Sequence: Synthetic peptide
  Seed: YERMCNILKGKFQTA
YERMVNIIKSKFVTA

SEQ ID NO: 135775 - protein, 15 aa, Artificial Sequence
  Description of Artificial Sequence: Synthetic peptide
  Seed: YERMCNILKGKFQTA
YERMVNIIKTKFVTA

SEQ ID NO: 135776 - protein, 15 aa, Artificial Sequence
  Description of Artificial Sequence: Synthetic peptide
  Seed: YERMCNILKGKFQTA
YERMVNILKAKFATA

SEQ ID NO: 135777 - protein, 15 aa, Artificial Sequence
  Description of Artificial Sequence: Synthetic peptide
  Seed: YERMCNILKGKFQTA
YERMVNILKAKFGTA

SEQ ID NO: 135778 - protein, 15 aa, Artificial Sequence
  Description of Artificial Sequence: Synthetic peptide
  Seed: YERMCNILKGKFQTA
YERMVNILKAKFITA

SEQ ID NO: 135779 - protein, 15 aa, Artificial Sequence
  Description of Artificial Sequence: Synthetic peptide
  Seed: YERMCNILKGKFQTA
YERMVNILKAKFLTA

SEQ ID NO: 135780 - protein, 15 aa, Artificial Sequence
  Description of Artificial Sequence: Synthetic peptide
  Seed: YERMCNILKGKFQTA
YERMVNILKAKFMTA

SEQ ID NO: 135781 - protein, 15 aa, Artificial Sequence
  Description of Artificial Sequence: Synthetic peptide
  Seed: YERMCNILKGKFQTA
YERMVNILKAKFSTA

SEQ ID NO: 135782 - protein, 15 aa, Artificial Sequence
  Description of Artificial Sequence: Synthetic peptide
  Seed: YERMCNILKGKFQTA
YERMVNILKAKFTTA

SEQ ID NO: 135783 - protein, 15 aa, Artificial Sequence
  Description of Artificial Sequence: Synthetic peptide
  Seed: YERMCNILKGKFQTA
YERMVNILKAKFVTA

SEQ ID NO: 135784 - protein, 15 aa, Artificial Sequence
  Description of Artificial Sequence: Synthetic peptide
  Seed: YERMCNILKGKFQTA
YERMVNILKGKFATA

SEQ ID NO: 135785 - protein, 15 aa, Artificial Sequence
  Description of Artificial Sequence: Synthetic peptide
  Seed: YERMCNILKGKFQTA
YERMVNILKGKFITA

SEQ ID NO: 135786 - protein, 15 aa, Artificial Sequence
  Description of Artificial Sequence: Synthetic peptide
  Seed: YERMCNILKGKFQTA
YERMVNILKGKFLTA

SEQ ID NO: 135787 - protein, 15 aa, Artificial Sequence
  Description of Artificial Sequence: Synthetic peptide
  Seed: YERMCNILKGKFQTA
YERMVNILKGKFMTA

SEQ ID NO: 135788 - protein, 15 aa, Artificial Sequence
  Description of Artificial Sequence: Synthetic peptide
  Seed: YERMCNILKGKFQTA
YERMVNILKGKFSTA

SEQ ID NO: 135789 - protein, 15 aa, Artificial Sequence
  Description of Artificial Sequence: Synthetic peptide
  Seed: YERMCNILKGKFQTA
YERMVNILKGKFTTA

SEQ ID NO: 135790 - protein, 15 aa, Artificial Sequence
  Description of Artificial Sequence: Synthetic peptide
  Seed: YERMCNILKGKFQTA
YERMVNILKGKFVTA

SEQ ID NO: 135791 - protein, 15 aa, Artificial Sequence
  Description of Artificial Sequence: Synthetic peptide
  Seed: YERMCNILKGKFQTA
YERMVNILKNKFATA

SEQ ID NO: 135792 - protein, 15 aa, Artificial Sequence
  Description of Artificial Sequence: Synthetic peptide
  Seed: YERMCNILKGKFQTA
YERMVNILKNKFITA

SEQ ID NO: 135793 - protein, 15 aa, Artificial Sequence
  Description of Artificial Sequence: Synthetic peptide
  Seed: YERMCNILKGKFQTA
YERMVNILKNKFLTA

SEQ ID NO: 135794 - protein, 15 aa, Artificial Sequence
  Description of Artificial Sequence: Synthetic peptide
  Seed: YERMCNILKGKFQTA
YERMVNILKNKFVTA

SEQ ID NO: 135795 - protein, 15 aa, Artificial Sequence
  Description of Artificial Sequence: Synthetic peptide
  Seed: YERMCNILKGKFQTA
YERMVNILKPKFATA

SEQ ID NO: 135796 - protein, 15 aa, Artificial Sequence
  Description of Artificial Sequence: Synthetic peptide
  Seed: YERMCNILKGKFQTA
YERMVNILKPKFITA

SEQ ID NO: 135797 - protein, 15 aa, Artificial Sequence
  Description of Artificial Sequence: Synthetic peptide
  Seed: YERMCNILKGKFQTA
YERMVNILKPKFLTA

SEQ ID NO: 135798 - protein, 15 aa, Artificial Sequence
  Description of Artificial Sequence: Synthetic peptide
  Seed: YERMCNILKGKFQTA
YERMVNILKPKFMTA

SEQ ID NO: 135799 - protein, 15 aa, Artificial Sequence
  Description of Artificial Sequence: Synthetic peptide
  Seed: YERMCNILKGKFQTA
YERMVNILKPKFSTA

SEQ ID NO: 135800 - protein, 15 aa, Artificial Sequence
  Description of Artificial Sequence: Synthetic peptide
  Seed: YERMCNILKGKFQTA
YERMVNILKPKFTTA

SEQ ID NO: 135801 - protein, 15 aa, Artificial Sequence
  Description of Artificial Sequence: Synthetic peptide
  Seed: YERMCNILKGKFQTA
YERMVNILKPKFVTA

SEQ ID NO: 135802 - protein, 15 aa, Artificial Sequence
  Description of Artificial Sequence: Synthetic peptide
  Seed: YERMCNILKGKFQTA
YERMVNILKSKFATA

SEQ ID NO: 135803 - protein, 15 aa, Artificial Sequence
  Description of Artificial Sequence: Synthetic peptide
  Seed: YERMCNILKGKFQTA
YERMVNILKSKFITA

SEQ ID NO: 135804 - protein, 15 aa, Artificial Sequence
  Description of Artificial Sequence: Synthetic peptide
  Seed: YERMCNILKGKFQTA
YERMVNILKSKFLTA

SEQ ID NO: 135805 - protein, 15 aa, Artificial Sequence
  Description of Artificial Sequence: Synthetic peptide
  Seed: YERMCNILKGKFQTA
YERMVNILKSKFMTA

SEQ ID NO: 135806 - protein, 15 aa, Artificial Sequence
  Description of Artificial Sequence: Synthetic peptide
  Seed: YERMCNILKGKFQTA
YERMVNILKSKFSTA

SEQ ID NO: 135807 - protein, 15 aa, Artificial Sequence
  Description of Artificial Sequence: Synthetic peptide
  Seed: YERMCNILKGKFQTA
YERMVNILKSKFTTA

SEQ ID NO: 135808 - protein, 15 aa, Artificial Sequence
  Description of Artificial Sequence: Synthetic peptide
  Seed: YERMCNILKGKFQTA
YERMVNILKSKFVTA

SEQ ID NO: 135809 - protein, 15 aa, Artificial Sequence
  Description of Artificial Sequence: Synthetic peptide
  Seed: YERMCNILKGKFQTA
YERMVNILKTKFATA

SEQ ID NO: 135810 - protein, 15 aa, Artificial Sequence
  Description of Artificial Sequence: Synthetic peptide
  Seed: YERMCNILKGKFQTA
YERMVNILKTKFITA

SEQ ID NO: 135811 - protein, 15 aa, Artificial Sequence
  Description of Artificial Sequence: Synthetic peptide
  Seed: YERMCNILKGKFQTA
YERMVNILKTKFLTA

SEQ ID NO: 135812 - protein, 15 aa, Artificial Sequence
  Description of Artificial Sequence: Synthetic peptide
  Seed: YERMCNILKGKFQTA
YERMVNILKTKFTTA

SEQ ID NO: 135813 - protein, 15 aa, Artificial Sequence
  Description of Artificial Sequence: Synthetic peptide
  Seed: YERMCNILKGKFQTA
YERMVNILKTKFVTA

SEQ ID NO: 135814 - protein, 15 aa, Artificial Sequence
  Description of Artificial Sequence: Synthetic peptide
  Seed: YERMCNILKGKFQTA
YERMVNILKVKFVTA

SEQ ID NO: 135815 - protein, 15 aa, Artificial Sequence
  Description of Artificial Sequence: Synthetic peptide
  Seed: YERMCNILKGKFQTA
YERMVNIMKAKFATA

SEQ ID NO: 135816 - protein, 15 aa, Artificial Sequence
  Description of Artificial Sequence: Synthetic peptide
  Seed: YERMCNILKGKFQTA
YERMVNIMKAKFGTA

SEQ ID NO: 135817 - protein, 15 aa, Artificial Sequence
  Description of Artificial Sequence: Synthetic peptide
  Seed: YERMCNILKGKFQTA
YERMVNIMKAKFITA

SEQ ID NO: 135818 - protein, 15 aa, Artificial Sequence
  Description of Artificial Sequence: Synthetic peptide
  Seed: YERMCNILKGKFQTA
YERMVNIMKAKFLTA

SEQ ID NO: 135819 - protein, 15 aa, Artificial Sequence
  Description of Artificial Sequence: Synthetic peptide
  Seed: YERMCNILKGKFQTA
YERMVNIMKAKFMTA

SEQ ID NO: 135820 - protein, 15 aa, Artificial Sequence
  Description of Artificial Sequence: Synthetic peptide
  Seed: YERMCNILKGKFQTA
YERMVNIMKAKFSTA

SEQ ID NO: 135821 - protein, 15 aa, Artificial Sequence
  Description of Artificial Sequence: Synthetic peptide
  Seed: YERMCNILKGKFQTA
YERMVNIMKAKFTTA

SEQ ID NO: 135822 - protein, 15 aa, Artificial Sequence
  Description of Artificial Sequence: Synthetic peptide
  Seed: YERMCNILKGKFQTA
YERMVNIMKAKFVTA

SEQ ID NO: 135823 - protein, 15 aa, Artificial Sequence
  Description of Artificial Sequence: Synthetic peptide
  Seed: YERMCNILKGKFQTA
YERMVNIMKGKFATA

SEQ ID NO: 135824 - protein, 15 aa, Artificial Sequence
  Description of Artificial Sequence: Synthetic peptide
  Seed: YERMCNILKGKFQTA
YERMVNIMKGKFITA

SEQ ID NO: 135825 - protein, 15 aa, Artificial Sequence
  Description of Artificial Sequence: Synthetic peptide
  Seed: YERMCNILKGKFQTA
YERMVNIMKGKFLTA

SEQ ID NO: 135826 - protein, 15 aa, Artificial Sequence
  Description of Artificial Sequence: Synthetic peptide
  Seed: YERMCNILKGKFQTA
YERMVNIMKGKFMTA

SEQ ID NO: 135827 - protein, 15 aa, Artificial Sequence
  Description of Artificial Sequence: Synthetic peptide
  Seed: YERMCNILKGKFQTA
YERMVNIMKGKFSTA

SEQ ID NO: 135828 - protein, 15 aa, Artificial Sequence
  Description of Artificial Sequence: Synthetic peptide
  Seed: YERMCNILKGKFQTA
YERMVNIMKGKFTTA

SEQ ID NO: 135829 - protein, 15 aa, Artificial Sequence
  Description of Artificial Sequence: Synthetic peptide
  Seed: YERMCNILKGKFQTA
YERMVNIMKGKFVTA

SEQ ID NO: 135830 - protein, 15 aa, Artificial Sequence
  Description of Artificial Sequence: Synthetic peptide
  Seed: YERMCNILKGKFQTA
YERMVNIMKNKFATA

SEQ ID NO: 135831 - protein, 15 aa, Artificial Sequence
  Description of Artificial Sequence: Synthetic peptide
  Seed: YERMCNILKGKFQTA
YERMVNIMKNKFITA

SEQ ID NO: 135832 - protein, 15 aa, Artificial Sequence
  Description of Artificial Sequence: Synthetic peptide
  Seed: YERMCNILKGKFQTA
YERMVNIMKNKFLTA

SEQ ID NO: 135833 - protein, 15 aa, Artificial Sequence
  Description of Artificial Sequence: Synthetic peptide
  Seed: YERMCNILKGKFQTA
YERMVNIMKNKFVTA

SEQ ID NO: 135834 - protein, 15 aa, Artificial Sequence
  Description of Artificial Sequence: Synthetic peptide
  Seed: YERMCNILKGKFQTA
YERMVNIMKPKFATA

SEQ ID NO: 135835 - protein, 15 aa, Artificial Sequence
  Description of Artificial Sequence: Synthetic peptide
  Seed: YERMCNILKGKFQTA
YERMVNIMKPKFITA

SEQ ID NO: 135836 - protein, 15 aa, Artificial Sequence
  Description of Artificial Sequence: Synthetic peptide
  Seed: YERMCNILKGKFQTA
YERMVNIMKPKFLTA

SEQ ID NO: 135837 - protein, 15 aa, Artificial Sequence
  Description of Artificial Sequence: Synthetic peptide
  Seed: YERMCNILKGKFQTA
YERMVNIMKPKFMTA

SEQ ID NO: 135838 - protein, 15 aa, Artificial Sequence
  Description of Artificial Sequence: Synthetic peptide
  Seed: YERMCNILKGKFQTA
YERMVNIMKPKFTTA

SEQ ID NO: 135839 - protein, 15 aa, Artificial Sequence
  Description of Artificial Sequence: Synthetic peptide
  Seed: YERMCNILKGKFQTA
YERMVNIMKPKFVTA

SEQ ID NO: 135840 - protein, 15 aa, Artificial Sequence
  Description of Artificial Sequence: Synthetic peptide
  Seed: YERMCNILKGKFQTA
YERMVNIMKSKFATA

SEQ ID NO: 135841 - protein, 15 aa, Artificial Sequence
  Description of Artificial Sequence: Synthetic peptide
  Seed: YERMCNILKGKFQTA
YERMVNIMKSKFITA

SEQ ID NO: 135842 - protein, 15 aa, Artificial Sequence
  Description of Artificial Sequence: Synthetic peptide
  Seed: YERMCNILKGKFQTA
YERMVNIMKSKFLTA

SEQ ID NO: 135843 - protein, 15 aa, Artificial Sequence
  Description of Artificial Sequence: Synthetic peptide
  Seed: YERMCNILKGKFQTA
YERMVNIMKSKFMTA

SEQ ID NO: 135844 - protein, 15 aa, Artificial Sequence
  Description of Artificial Sequence: Synthetic peptide
  Seed: YERMCNILKGKFQTA
YERMVNIMKSKFSTA

SEQ ID NO: 135845 - protein, 15 aa, Artificial Sequence
  Description of Artificial Sequence: Synthetic peptide
  Seed: YERMCNILKGKFQTA
YERMVNIMKSKFTTA

SEQ ID NO: 135846 - protein, 15 aa, Artificial Sequence
  Description of Artificial Sequence: Synthetic peptide
  Seed: YERMCNILKGKFQTA
YERMVNIMKSKFVTA

SEQ ID NO: 135847 - protein, 15 aa, Artificial Sequence
  Description of Artificial Sequence: Synthetic peptide
  Seed: YERMCNILKGKFQTA
YERMVNIMKTKFATA

SEQ ID NO: 135848 - protein, 15 aa, Artificial Sequence
  Description of Artificial Sequence: Synthetic peptide
  Seed: YERMCNILKGKFQTA
YERMVNIMKTKFITA

SEQ ID NO: 135849 - protein, 15 aa, Artificial Sequence
  Description of Artificial Sequence: Synthetic peptide
  Seed: YERMCNILKGKFQTA
YERMVNIMKTKFLTA

SEQ ID NO: 135850 - protein, 15 aa, Artificial Sequence
  Description of Artificial Sequence: Synthetic peptide
  Seed: YERMCNILKGKFQTA
YERMVNIMKTKFMTA

SEQ ID NO: 135851 - protein, 15 aa, Artificial Sequence
  Description of Artificial Sequence: Synthetic peptide
  Seed: YERMCNILKGKFQTA
YERMVNIMKTKFTTA

SEQ ID NO: 135852 - protein, 15 aa, Artificial Sequence
  Description of Artificial Sequence: Synthetic peptide
  Seed: YERMCNILKGKFQTA
YERMVNIMKTKFVTA

SEQ ID NO: 135853 - protein, 15 aa, Artificial Sequence
  Description of Artificial Sequence: Synthetic peptide
  Seed: YERMCNILKGKFQTA
YERMVNIMKVKFLTA

SEQ ID NO: 135854 - protein, 15 aa, Artificial Sequence
  Description of Artificial Sequence: Synthetic peptide
  Seed: YERMCNILKGKFQTA
YERMVNIMKVKFVTA

SEQ ID NO: 135855 - protein, 15 aa, Artificial Sequence
  Description of Artificial Sequence: Synthetic peptide
  Seed: YERMCNILKGKFQTA
YERMVNIQKAKFATA

SEQ ID NO: 135856 - protein, 15 aa, Artificial Sequence
  Description of Artificial Sequence: Synthetic peptide
  Seed: YERMCNILKGKFQTA
YERMVNIQKAKFITA

SEQ ID NO: 135857 - protein, 15 aa, Artificial Sequence
  Description of Artificial Sequence: Synthetic peptide
  Seed: YERMCNILKGKFQTA
YERMVNIQKAKFLTA

SEQ ID NO: 135858 - protein, 15 aa, Artificial Sequence
  Description of Artificial Sequence: Synthetic peptide
  Seed: YERMCNILKGKFQTA
YERMVNIQKAKFVTA

SEQ ID NO: 135859 - protein, 15 aa, Artificial Sequence
  Description of Artificial Sequence: Synthetic peptide
  Seed: YERMCNILKGKFQTA
YERMVNIQKGKFITA

SEQ ID NO: 135860 - protein, 15 aa, Artificial Sequence
  Description of Artificial Sequence: Synthetic peptide
  Seed: YERMCNILKGKFQTA
YERMVNIQKGKFLTA

SEQ ID NO: 135861 - protein, 15 aa, Artificial Sequence
  Description of Artificial Sequence: Synthetic peptide
  Seed: YERMCNILKGKFQTA
YERMVNIQKGKFVTA

SEQ ID NO: 135862 - protein, 15 aa, Artificial Sequence
  Description of Artificial Sequence: Synthetic peptide
  Seed: YERMCNILKGKFQTA
YERMVNIQKSKFLTA

SEQ ID NO: 135863 - protein, 15 aa, Artificial Sequence
  Description of Artificial Sequence: Synthetic peptide
  Seed: YERMCNILKGKFQTA
YERMVNIQKSKFVTA

SEQ ID NO: 135864 - protein, 15 aa, Artificial Sequence
  Description of Artificial Sequence: Synthetic peptide
  Seed: YERMCNILKGKFQTA
YERMVNISKAKFITA

SEQ ID NO: 135865 - protein, 15 aa, Artificial Sequence
  Description of Artificial Sequence: Synthetic peptide
  Seed: YERMCNILKGKFQTA
YERMVNISKAKFLTA

SEQ ID NO: 135866 - protein, 15 aa, Artificial Sequence
  Description of Artificial Sequence: Synthetic peptide
  Seed: YERMCNILKGKFQTA
YERMVNISKAKFVTA

SEQ ID NO: 135867 - protein, 15 aa, Artificial Sequence
  Description of Artificial Sequence: Synthetic peptide
  Seed: YERMCNILKGKFQTA
YERMVNIVKAKFATA

SEQ ID NO: 135868 - protein, 15 aa, Artificial Sequence
  Description of Artificial Sequence: Synthetic peptide
  Seed: YERMCNILKGKFQTA
YERMVNIVKAKFITA

SEQ ID NO: 135869 - protein, 15 aa, Artificial Sequence
  Description of Artificial Sequence: Synthetic peptide
  Seed: YERMCNILKGKFQTA
YERMVNIVKAKFLTA

SEQ ID NO: 135870 - protein, 15 aa, Artificial Sequence
  Description of Artificial Sequence: Synthetic peptide
  Seed: YERMCNILKGKFQTA
YERMVNIVKAKFVTA

SEQ ID NO: 135871 - protein, 15 aa, Artificial Sequence
  Description of Artificial Sequence: Synthetic peptide
  Seed: YERMCNILKGKFQTA
YERMVNIVKGKFATA

SEQ ID NO: 135872 - protein, 15 aa, Artificial Sequence
  Description of Artificial Sequence: Synthetic peptide
  Seed: YERMCNILKGKFQTA
YERMVNIVKGKFITA

SEQ ID NO: 135873 - protein, 15 aa, Artificial Sequence
  Description of Artificial Sequence: Synthetic peptide
  Seed: YERMCNILKGKFQTA
YERMVNIVKGKFLTA

SEQ ID NO: 135874 - protein, 15 aa, Artificial Sequence
  Description of Artificial Sequence: Synthetic peptide
  Seed: YERMCNILKGKFQTA
YERMVNIVKGKFVTA

SEQ ID NO: 135875 - protein, 15 aa, Artificial Sequence
  Description of Artificial Sequence: Synthetic peptide
  Seed: YERMCNILKGKFQTA
YERMVNIVKSKFITA

SEQ ID NO: 135876 - protein, 15 aa, Artificial Sequence
  Description of Artificial Sequence: Synthetic peptide
  Seed: YERMCNILKGKFQTA
YERMVNIVKSKFLTA

SEQ ID NO: 135877 - protein, 15 aa, Artificial Sequence
  Description of Artificial Sequence: Synthetic peptide
  Seed: YERMCNILKGKFQTA
YERMVNIVKSKFVTA

SEQ ID NO: 135878 - protein, 15 aa, Artificial Sequence
  Description of Artificial Sequence: Synthetic peptide
  Seed: YERMCNILKGKFQTA
YERMWNIAKAKFATA

SEQ ID NO: 135879 - protein, 15 aa, Artificial Sequence
  Description of Artificial Sequence: Synthetic peptide
  Seed: YERMCNILKGKFQTA
YERMWNIAKAKFCTA

SEQ ID NO: 135880 - protein, 15 aa, Artificial Sequence
  Description of Artificial Sequence: Synthetic peptide
  Seed: YERMCNILKGKFQTA
YERMWNIAKAKFFTA

SEQ ID NO: 135881 - protein, 15 aa, Artificial Sequence
  Description of Artificial Sequence: Synthetic peptide
  Seed: YERMCNILKGKFQTA
YERMWNIAKAKFGTA

SEQ ID NO: 135882 - protein, 15 aa, Artificial Sequence
  Description of Artificial Sequence: Synthetic peptide
  Seed: YERMCNILKGKFQTA
YERMWNIAKAKFITA

SEQ ID NO: 135883 - protein, 15 aa, Artificial Sequence
  Description of Artificial Sequence: Synthetic peptide
  Seed: YERMCNILKGKFQTA
YERMWNIAKAKFLTA

SEQ ID NO: 135884 - protein, 15 aa, Artificial Sequence
  Description of Artificial Sequence: Synthetic peptide
  Seed: YERMCNILKGKFQTA
YERMWNIAKAKFMTA

SEQ ID NO: 135885 - protein, 15 aa, Artificial Sequence
  Description of Artificial Sequence: Synthetic peptide
  Seed: YERMCNILKGKFQTA
YERMWNIAKAKFNTA

SEQ ID NO: 135886 - protein, 15 aa, Artificial Sequence
  Description of Artificial Sequence: Synthetic peptide
  Seed: YERMCNILKGKFQTA
YERMWNIAKAKFSTA

SEQ ID NO: 135887 - protein, 15 aa, Artificial Sequence
  Description of Artificial Sequence: Synthetic peptide
  Seed: YERMCNILKGKFQTA
YERMWNIAKAKFTTA

SEQ ID NO: 135888 - protein, 15 aa, Artificial Sequence
  Description of Artificial Sequence: Synthetic peptide
  Seed: YERMCNILKGKFQTA
YERMWNIAKAKFVTA

SEQ ID NO: 135889 - protein, 15 aa, Artificial Sequence
  Description of Artificial Sequence: Synthetic peptide
  Seed: YERMCNILKGKFQTA
YERMWNIAKGKFATA

SEQ ID NO: 135890 - protein, 15 aa, Artificial Sequence
  Description of Artificial Sequence: Synthetic peptide
  Seed: YERMCNILKGKFQTA
YERMWNIAKGKFITA

SEQ ID NO: 135891 - protein, 15 aa, Artificial Sequence
  Description of Artificial Sequence: Synthetic peptide
  Seed: YERMCNILKGKFQTA
YERMWNIAKGKFLTA

SEQ ID NO: 135892 - protein, 15 aa, Artificial Sequence
  Description of Artificial Sequence: Synthetic peptide
  Seed: YERMCNILKGKFQTA
YERMWNIAKGKFMTA

SEQ ID NO: 135893 - protein, 15 aa, Artificial Sequence
  Description of Artificial Sequence: Synthetic peptide
  Seed: YERMCNILKGKFQTA
YERMWNIAKGKFSTA

SEQ ID NO: 135894 - protein, 15 aa, Artificial Sequence
  Description of Artificial Sequence: Synthetic peptide
  Seed: YERMCNILKGKFQTA
YERMWNIAKGKFTTA

SEQ ID NO: 135895 - protein, 15 aa, Artificial Sequence
  Description of Artificial Sequence: Synthetic peptide
  Seed: YERMCNILKGKFQTA
YERMWNIAKGKFVTA

SEQ ID NO: 135896 - protein, 15 aa, Artificial Sequence
  Description of Artificial Sequence: Synthetic peptide
  Seed: YERMCNILKGKFQTA
YERMWNIAKNKFATA

SEQ ID NO: 135897 - protein, 15 aa, Artificial Sequence
  Description of Artificial Sequence: Synthetic peptide
  Seed: YERMCNILKGKFQTA
YERMWNIAKNKFITA

SEQ ID NO: 135898 - protein, 15 aa, Artificial Sequence
  Description of Artificial Sequence: Synthetic peptide
  Seed: YERMCNILKGKFQTA
YERMWNIAKNKFLTA

SEQ ID NO: 135899 - protein, 15 aa, Artificial Sequence
  Description of Artificial Sequence: Synthetic peptide
  Seed: YERMCNILKGKFQTA
YERMWNIAKNKFMTA

SEQ ID NO: 135900 - protein, 15 aa, Artificial Sequence
  Description of Artificial Sequence: Synthetic peptide
  Seed: YERMCNILKGKFQTA
YERMWNIAKNKFTTA

SEQ ID NO: 135901 - protein, 15 aa, Artificial Sequence
  Description of Artificial Sequence: Synthetic peptide
  Seed: YERMCNILKGKFQTA
YERMWNIAKNKFVTA

SEQ ID NO: 135902 - protein, 15 aa, Artificial Sequence
  Description of Artificial Sequence: Synthetic peptide
  Seed: YERMCNILKGKFQTA
YERMWNIAKPKFATA

SEQ ID NO: 135903 - protein, 15 aa, Artificial Sequence
  Description of Artificial Sequence: Synthetic peptide
  Seed: YERMCNILKGKFQTA
YERMWNIAKPKFITA

SEQ ID NO: 135904 - protein, 15 aa, Artificial Sequence
  Description of Artificial Sequence: Synthetic peptide
  Seed: YERMCNILKGKFQTA
YERMWNIAKPKFLTA

SEQ ID NO: 135905 - protein, 15 aa, Artificial Sequence
  Description of Artificial Sequence: Synthetic peptide
  Seed: YERMCNILKGKFQTA
YERMWNIAKPKFMTA

SEQ ID NO: 135906 - protein, 15 aa, Artificial Sequence
  Description of Artificial Sequence: Synthetic peptide
  Seed: YERMCNILKGKFQTA
YERMWNIAKPKFSTA

SEQ ID NO: 135907 - protein, 15 aa, Artificial Sequence
  Description of Artificial Sequence: Synthetic peptide
  Seed: YERMCNILKGKFQTA
YERMWNIAKPKFTTA

SEQ ID NO: 135908 - protein, 15 aa, Artificial Sequence
  Description of Artificial Sequence: Synthetic peptide
  Seed: YERMCNILKGKFQTA
YERMWNIAKPKFVTA

SEQ ID NO: 135909 - protein, 15 aa, Artificial Sequence
  Description of Artificial Sequence: Synthetic peptide
  Seed: YERMCNILKGKFQTA
YERMWNIAKSKFATA

SEQ ID NO: 135910 - protein, 15 aa, Artificial Sequence
  Description of Artificial Sequence: Synthetic peptide
  Seed: YERMCNILKGKFQTA
YERMWNIAKSKFITA

SEQ ID NO: 135911 - protein, 15 aa, Artificial Sequence
  Description of Artificial Sequence: Synthetic peptide
  Seed: YERMCNILKGKFQTA
YERMWNIAKSKFLTA

SEQ ID NO: 135912 - protein, 15 aa, Artificial Sequence
  Description of Artificial Sequence: Synthetic peptide
  Seed: YERMCNILKGKFQTA
YERMWNIAKSKFMTA

SEQ ID NO: 135913 - protein, 15 aa, Artificial Sequence
  Description of Artificial Sequence: Synthetic peptide
  Seed: YERMCNILKGKFQTA
YERMWNIAKSKFSTA

SEQ ID NO: 135914 - protein, 15 aa, Artificial Sequence
  Description of Artificial Sequence: Synthetic peptide
  Seed: YERMCNILKGKFQTA
YERMWNIAKSKFTTA

SEQ ID NO: 135915 - protein, 15 aa, Artificial Sequence
  Description of Artificial Sequence: Synthetic peptide
  Seed: YERMCNILKGKFQTA
YERMWNIAKSKFVTA

SEQ ID NO: 135916 - protein, 15 aa, Artificial Sequence
  Description of Artificial Sequence: Synthetic peptide
  Seed: YERMCNILKGKFQTA
YERMWNIAKTKFATA

SEQ ID NO: 135917 - protein, 15 aa, Artificial Sequence
  Description of Artificial Sequence: Synthetic peptide
  Seed: YERMCNILKGKFQTA
YERMWNIAKTKFITA

SEQ ID NO: 135918 - protein, 15 aa, Artificial Sequence
  Description of Artificial Sequence: Synthetic peptide
  Seed: YERMCNILKGKFQTA
YERMWNIAKTKFLTA

SEQ ID NO: 135919 - protein, 15 aa, Artificial Sequence
  Description of Artificial Sequence: Synthetic peptide
  Seed: YERMCNILKGKFQTA
YERMWNIAKTKFMTA

SEQ ID NO: 135920 - protein, 15 aa, Artificial Sequence
  Description of Artificial Sequence: Synthetic peptide
  Seed: YERMCNILKGKFQTA
YERMWNIAKTKFTTA

SEQ ID NO: 135921 - protein, 15 aa, Artificial Sequence
  Description of Artificial Sequence: Synthetic peptide
  Seed: YERMCNILKGKFQTA
YERMWNIAKTKFVTA

SEQ ID NO: 135922 - protein, 15 aa, Artificial Sequence
  Description of Artificial Sequence: Synthetic peptide
  Seed: YERMCNILKGKFQTA
YERMWNIAKVKFATA

SEQ ID NO: 135923 - protein, 15 aa, Artificial Sequence
  Description of Artificial Sequence: Synthetic peptide
  Seed: YERMCNILKGKFQTA
YERMWNIAKVKFITA

SEQ ID NO: 135924 - protein, 15 aa, Artificial Sequence
  Description of Artificial Sequence: Synthetic peptide
  Seed: YERMCNILKGKFQTA
YERMWNIAKVKFLTA

SEQ ID NO: 135925 - protein, 15 aa, Artificial Sequence
  Description of Artificial Sequence: Synthetic peptide
  Seed: YERMCNILKGKFQTA
YERMWNIAKVKFNTA

SEQ ID NO: 135926 - protein, 15 aa, Artificial Sequence
  Description of Artificial Sequence: Synthetic peptide
  Seed: YERMCNILKGKFQTA
YERMWNIAKVKFVTA

SEQ ID NO: 135927 - protein, 15 aa, Artificial Sequence
  Description of Artificial Sequence: Synthetic peptide
  Seed: YERMCNILKGKFQTA
YERMWNICKAKFITA

SEQ ID NO: 135928 - protein, 15 aa, Artificial Sequence
  Description of Artificial Sequence: Synthetic peptide
  Seed: YERMCNILKGKFQTA
YERMWNICKAKFLTA

SEQ ID NO: 135929 - protein, 15 aa, Artificial Sequence
  Description of Artificial Sequence: Synthetic peptide
  Seed: YERMCNILKGKFQTA
YERMWNICKAKFVTA

SEQ ID NO: 135930 - protein, 15 aa, Artificial Sequence
  Description of Artificial Sequence: Synthetic peptide
  Seed: YERMCNILKGKFQTA
YERMWNIEKAKFATA

SEQ ID NO: 135931 - protein, 15 aa, Artificial Sequence
  Description of Artificial Sequence: Synthetic peptide
  Seed: YERMCNILKGKFQTA
YERMWNIEKAKFITA

SEQ ID NO: 135932 - protein, 15 aa, Artificial Sequence
  Description of Artificial Sequence: Synthetic peptide
  Seed: YERMCNILKGKFQTA
YERMWNIEKAKFLTA

SEQ ID NO: 135933 - protein, 15 aa, Artificial Sequence
  Description of Artificial Sequence: Synthetic peptide
  Seed: YERMCNILKGKFQTA
YERMWNIEKAKFMTA

SEQ ID NO: 135934 - protein, 15 aa, Artificial Sequence
  Description of Artificial Sequence: Synthetic peptide
  Seed: YERMCNILKGKFQTA
YERMWNIEKAKFVTA

SEQ ID NO: 135935 - protein, 15 aa, Artificial Sequence
  Description of Artificial Sequence: Synthetic peptide
  Seed: YERMCNILKGKFQTA
YERMWNIEKGKFATA

SEQ ID NO: 135936 - protein, 15 aa, Artificial Sequence
  Description of Artificial Sequence: Synthetic peptide
  Seed: YERMCNILKGKFQTA
YERMWNIEKGKFITA

SEQ ID NO: 135937 - protein, 15 aa, Artificial Sequence
  Description of Artificial Sequence: Synthetic peptide
  Seed: YERMCNILKGKFQTA
YERMWNIEKGKFLTA

SEQ ID NO: 135938 - protein, 15 aa, Artificial Sequence
  Description of Artificial Sequence: Synthetic peptide
  Seed: YERMCNILKGKFQTA
YERMWNIEKGKFVTA

SEQ ID NO: 135939 - protein, 15 aa, Artificial Sequence
  Description of Artificial Sequence: Synthetic peptide
  Seed: YERMCNILKGKFQTA
YERMWNIEKSKFATA

SEQ ID NO: 135940 - protein, 15 aa, Artificial Sequence
  Description of Artificial Sequence: Synthetic peptide
  Seed: YERMCNILKGKFQTA
YERMWNIEKSKFITA

SEQ ID NO: 135941 - protein, 15 aa, Artificial Sequence
  Description of Artificial Sequence: Synthetic peptide
  Seed: YERMCNILKGKFQTA
YERMWNIEKSKFLTA

SEQ ID NO: 135942 - protein, 15 aa, Artificial Sequence
  Description of Artificial Sequence: Synthetic peptide
  Seed: YERMCNILKGKFQTA
YERMWNIEKSKFVTA

SEQ ID NO: 135943 - protein, 15 aa, Artificial Sequence
  Description of Artificial Sequence: Synthetic peptide
  Seed: YERMCNILKGKFQTA
YERMWNIFKAKFATA

SEQ ID NO: 135944 - protein, 15 aa, Artificial Sequence
  Description of Artificial Sequence: Synthetic peptide
  Seed: YERMCNILKGKFQTA
YERMWNIFKAKFITA

SEQ ID NO: 135945 - protein, 15 aa, Artificial Sequence
  Description of Artificial Sequence: Synthetic peptide
  Seed: YERMCNILKGKFQTA
YERMWNIFKAKFLTA

SEQ ID NO: 135946 - protein, 15 aa, Artificial Sequence
  Description of Artificial Sequence: Synthetic peptide
  Seed: YERMCNILKGKFQTA
YERMWNIFKAKFVTA

SEQ ID NO: 135947 - protein, 15 aa, Artificial Sequence
  Description of Artificial Sequence: Synthetic peptide
  Seed: YERMCNILKGKFQTA
YERMWNIGKAKFATA

SEQ ID NO: 135948 - protein, 15 aa, Artificial Sequence
  Description of Artificial Sequence: Synthetic peptide
  Seed: YERMCNILKGKFQTA
YERMWNIGKAKFITA

SEQ ID NO: 135949 - protein, 15 aa, Artificial Sequence
  Description of Artificial Sequence: Synthetic peptide
  Seed: YERMCNILKGKFQTA
YERMWNIGKAKFLTA

SEQ ID NO: 135950 - protein, 15 aa, Artificial Sequence
  Description of Artificial Sequence: Synthetic peptide
  Seed: YERMCNILKGKFQTA
YERMWNIGKAKFMTA

SEQ ID NO: 135951 - protein, 15 aa, Artificial Sequence
  Description of Artificial Sequence: Synthetic peptide
  Seed: YERMCNILKGKFQTA
YERMWNIGKAKFVTA

SEQ ID NO: 135952 - protein, 15 aa, Artificial Sequence
  Description of Artificial Sequence: Synthetic peptide
  Seed: YERMCNILKGKFQTA
YERMWNIGKGKFITA

SEQ ID NO: 135953 - protein, 15 aa, Artificial Sequence
  Description of Artificial Sequence: Synthetic peptide
  Seed: YERMCNILKGKFQTA
YERMWNIGKGKFLTA

SEQ ID NO: 135954 - protein, 15 aa, Artificial Sequence
  Description of Artificial Sequence: Synthetic peptide
  Seed: YERMCNILKGKFQTA
YERMWNIGKGKFVTA

SEQ ID NO: 135955 - protein, 15 aa, Artificial Sequence
  Description of Artificial Sequence: Synthetic peptide
  Seed: YERMCNILKGKFQTA
YERMWNIGKSKFITA

SEQ ID NO: 135956 - protein, 15 aa, Artificial Sequence
  Description of Artificial Sequence: Synthetic peptide
  Seed: YERMCNILKGKFQTA
YERMWNIGKSKFLTA

SEQ ID NO: 135957 - protein, 15 aa, Artificial Sequence
  Description of Artificial Sequence: Synthetic peptide
  Seed: YERMCNILKGKFQTA
YERMWNIGKSKFVTA

SEQ ID NO: 135958 - protein, 15 aa, Artificial Sequence
  Description of Artificial Sequence: Synthetic peptide
  Seed: YERMCNILKGKFQTA
YERMWNIIKAKFATA

SEQ ID NO: 135959 - protein, 15 aa, Artificial Sequence
  Description of Artificial Sequence: Synthetic peptide
  Seed: YERMCNILKGKFQTA
YERMWNIIKAKFCTA

SEQ ID NO: 135960 - protein, 15 aa, Artificial Sequence
  Description of Artificial Sequence: Synthetic peptide
  Seed: YERMCNILKGKFQTA
YERMWNIIKAKFFTA

SEQ ID NO: 135961 - protein, 15 aa, Artificial Sequence
  Description of Artificial Sequence: Synthetic peptide
  Seed: YERMCNILKGKFQTA
YERMWNIIKAKFGTA

SEQ ID NO: 135962 - protein, 15 aa, Artificial Sequence
  Description of Artificial Sequence: Synthetic peptide
  Seed: YERMCNILKGKFQTA
YERMWNIIKAKFITA

SEQ ID NO: 135963 - protein, 15 aa, Artificial Sequence
  Description of Artificial Sequence: Synthetic peptide
  Seed: YERMCNILKGKFQTA
YERMWNIIKAKFLTA

SEQ ID NO: 135964 - protein, 15 aa, Artificial Sequence
  Description of Artificial Sequence: Synthetic peptide
  Seed: YERMCNILKGKFQTA
YERMWNIIKAKFMTA

SEQ ID NO: 135965 - protein, 15 aa, Artificial Sequence
  Description of Artificial Sequence: Synthetic peptide
  Seed: YERMCNILKGKFQTA
YERMWNIIKAKFNTA

SEQ ID NO: 135966 - protein, 15 aa, Artificial Sequence
  Description of Artificial Sequence: Synthetic peptide
  Seed: YERMCNILKGKFQTA
YERMWNIIKAKFSTA

SEQ ID NO: 135967 - protein, 15 aa, Artificial Sequence
  Description of Artificial Sequence: Synthetic peptide
  Seed: YERMCNILKGKFQTA
YERMWNIIKAKFTTA

SEQ ID NO: 135968 - protein, 15 aa, Artificial Sequence
  Description of Artificial Sequence: Synthetic peptide
  Seed: YERMCNILKGKFQTA
YERMWNIIKAKFVTA

SEQ ID NO: 135969 - protein, 15 aa, Artificial Sequence
  Description of Artificial Sequence: Synthetic peptide
  Seed: YERMCNILKGKFQTA
YERMWNIIKGKFATA

SEQ ID NO: 135970 - protein, 15 aa, Artificial Sequence
  Description of Artificial Sequence: Synthetic peptide
  Seed: YERMCNILKGKFQTA
YERMWNIIKGKFGTA

SEQ ID NO: 135971 - protein, 15 aa, Artificial Sequence
  Description of Artificial Sequence: Synthetic peptide
  Seed: YERMCNILKGKFQTA
YERMWNIIKGKFITA

SEQ ID NO: 135972 - protein, 15 aa, Artificial Sequence
  Description of Artificial Sequence: Synthetic peptide
  Seed: YERMCNILKGKFQTA
YERMWNIIKGKFLTA

SEQ ID NO: 135973 - protein, 15 aa, Artificial Sequence
  Description of Artificial Sequence: Synthetic peptide
  Seed: YERMCNILKGKFQTA
YERMWNIIKGKFMTA

SEQ ID NO: 135974 - protein, 15 aa, Artificial Sequence
  Description of Artificial Sequence: Synthetic peptide
  Seed: YERMCNILKGKFQTA
YERMWNIIKGKFSTA

SEQ ID NO: 135975 - protein, 15 aa, Artificial Sequence
  Description of Artificial Sequence: Synthetic peptide
  Seed: YERMCNILKGKFQTA
YERMWNIIKGKFTTA

SEQ ID NO: 135976 - protein, 15 aa, Artificial Sequence
  Description of Artificial Sequence: Synthetic peptide
  Seed: YERMCNILKGKFQTA
YERMWNIIKGKFVTA

SEQ ID NO: 135977 - protein, 15 aa, Artificial Sequence
  Description of Artificial Sequence: Synthetic peptide
  Seed: YERMCNILKGKFQTA
YERMWNIIKNKFATA

SEQ ID NO: 135978 - protein, 15 aa, Artificial Sequence
  Description of Artificial Sequence: Synthetic peptide
  Seed: YERMCNILKGKFQTA
YERMWNIIKNKFITA

SEQ ID NO: 135979 - protein, 15 aa, Artificial Sequence
  Description of Artificial Sequence: Synthetic peptide
  Seed: YERMCNILKGKFQTA
YERMWNIIKNKFLTA

SEQ ID NO: 135980 - protein, 15 aa, Artificial Sequence
  Description of Artificial Sequence: Synthetic peptide
  Seed: YERMCNILKGKFQTA
YERMWNIIKNKFMTA

SEQ ID NO: 135981 - protein, 15 aa, Artificial Sequence
  Description of Artificial Sequence: Synthetic peptide
  Seed: YERMCNILKGKFQTA
YERMWNIIKNKFSTA

SEQ ID NO: 135982 - protein, 15 aa, Artificial Sequence
  Description of Artificial Sequence: Synthetic peptide
  Seed: YERMCNILKGKFQTA
YERMWNIIKNKFTTA

SEQ ID NO: 135983 - protein, 15 aa, Artificial Sequence
  Description of Artificial Sequence: Synthetic peptide
  Seed: YERMCNILKGKFQTA
YERMWNIIKNKFVTA

SEQ ID NO: 135984 - protein, 15 aa, Artificial Sequence
  Description of Artificial Sequence: Synthetic peptide
  Seed: YERMCNILKGKFQTA
YERMWNIIKPKFATA

SEQ ID NO: 135985 - protein, 15 aa, Artificial Sequence
  Description of Artificial Sequence: Synthetic peptide
  Seed: YERMCNILKGKFQTA
YERMWNIIKPKFITA

SEQ ID NO: 135986 - protein, 15 aa, Artificial Sequence
  Description of Artificial Sequence: Synthetic peptide
  Seed: YERMCNILKGKFQTA
YERMWNIIKPKFLTA

SEQ ID NO: 135987 - protein, 15 aa, Artificial Sequence
  Description of Artificial Sequence: Synthetic peptide
  Seed: YERMCNILKGKFQTA
YERMWNIIKPKFMTA

SEQ ID NO: 135988 - protein, 15 aa, Artificial Sequence
  Description of Artificial Sequence: Synthetic peptide
  Seed: YERMCNILKGKFQTA
YERMWNIIKPKFNTA

SEQ ID NO: 135989 - protein, 15 aa, Artificial Sequence
  Description of Artificial Sequence: Synthetic peptide
  Seed: YERMCNILKGKFQTA
YERMWNIIKPKFSTA

SEQ ID NO: 135990 - protein, 15 aa, Artificial Sequence
  Description of Artificial Sequence: Synthetic peptide
  Seed: YERMCNILKGKFQTA
YERMWNIIKPKFTTA

SEQ ID NO: 135991 - protein, 15 aa, Artificial Sequence
  Description of Artificial Sequence: Synthetic peptide
  Seed: YERMCNILKGKFQTA
YERMWNIIKPKFVTA

SEQ ID NO: 135992 - protein, 15 aa, Artificial Sequence
  Description of Artificial Sequence: Synthetic peptide
  Seed: YERMCNILKGKFQTA
YERMWNIIKSKFATA

SEQ ID NO: 135993 - protein, 15 aa, Artificial Sequence
  Description of Artificial Sequence: Synthetic peptide
  Seed: YERMCNILKGKFQTA
YERMWNIIKSKFGTA

SEQ ID NO: 135994 - protein, 15 aa, Artificial Sequence
  Description of Artificial Sequence: Synthetic peptide
  Seed: YERMCNILKGKFQTA
YERMWNIIKSKFITA

SEQ ID NO: 135995 - protein, 15 aa, Artificial Sequence
  Description of Artificial Sequence: Synthetic peptide
  Seed: YERMCNILKGKFQTA
YERMWNIIKSKFLTA

SEQ ID NO: 135996 - protein, 15 aa, Artificial Sequence
  Description of Artificial Sequence: Synthetic peptide
  Seed: YERMCNILKGKFQTA
YERMWNIIKSKFMTA

SEQ ID NO: 135997 - protein, 15 aa, Artificial Sequence
  Description of Artificial Sequence: Synthetic peptide
  Seed: YERMCNILKGKFQTA
YERMWNIIKSKFNTA

SEQ ID NO: 135998 - protein, 15 aa, Artificial Sequence
  Description of Artificial Sequence: Synthetic peptide
  Seed: YERMCNILKGKFQTA
YERMWNIIKSKFSTA

SEQ ID NO: 135999 - protein, 15 aa, Artificial Sequence
  Description of Artificial Sequence: Synthetic peptide
  Seed: YERMCNILKGKFQTA
YERMWNIIKSKFTTA

SEQ ID NO: 136000 - protein, 15 aa, Artificial Sequence
  Description of Artificial Sequence: Synthetic peptide
  Seed: YERMCNILKGKFQTA
YERMWNIIKSKFVTA

SEQ ID NO: 136001 - protein, 15 aa, Artificial Sequence
  Description of Artificial Sequence: Synthetic peptide
  Seed: YERMCNILKGKFQTA
YERMWNIIKTKFATA

SEQ ID NO: 136002 - protein, 15 aa, Artificial Sequence
  Description of Artificial Sequence: Synthetic peptide
  Seed: YERMCNILKGKFQTA
YERMWNIIKTKFITA

SEQ ID NO: 136003 - protein, 15 aa, Artificial Sequence
  Description of Artificial Sequence: Synthetic peptide
  Seed: YERMCNILKGKFQTA
YERMWNIIKTKFLTA

SEQ ID NO: 136004 - protein, 15 aa, Artificial Sequence
  Description of Artificial Sequence: Synthetic peptide
  Seed: YERMCNILKGKFQTA
YERMWNIIKTKFMTA

SEQ ID NO: 136005 - protein, 15 aa, Artificial Sequence
  Description of Artificial Sequence: Synthetic peptide
  Seed: YERMCNILKGKFQTA
YERMWNIIKTKFNTA

SEQ ID NO: 136006 - protein, 15 aa, Artificial Sequence
  Description of Artificial Sequence: Synthetic peptide
  Seed: YERMCNILKGKFQTA
YERMWNIIKTKFSTA

SEQ ID NO: 136007 - protein, 15 aa, Artificial Sequence
  Description of Artificial Sequence: Synthetic peptide
  Seed: YERMCNILKGKFQTA
YERMWNIIKTKFTTA

SEQ ID NO: 136008 - protein, 15 aa, Artificial Sequence
  Description of Artificial Sequence: Synthetic peptide
  Seed: YERMCNILKGKFQTA
YERMWNIIKTKFVTA

SEQ ID NO: 136009 - protein, 15 aa, Artificial Sequence
  Description of Artificial Sequence: Synthetic peptide
  Seed: YERMCNILKGKFQTA
YERMWNIIKVKFATA

SEQ ID NO: 136010 - protein, 15 aa, Artificial Sequence
  Description of Artificial Sequence: Synthetic peptide
  Seed: YERMCNILKGKFQTA
YERMWNIIKVKFLTA

SEQ ID NO: 136011 - protein, 15 aa, Artificial Sequence
  Description of Artificial Sequence: Synthetic peptide
  Seed: YERMCNILKGKFQTA
YERMWNIIKVKFNTA

SEQ ID NO: 136012 - protein, 15 aa, Artificial Sequence
  Description of Artificial Sequence: Synthetic peptide
  Seed: YERMCNILKGKFQTA
YERMWNIIKVKFSTA

SEQ ID NO: 136013 - protein, 15 aa, Artificial Sequence
  Description of Artificial Sequence: Synthetic peptide
  Seed: YERMCNILKGKFQTA
YERMWNIIKVKFVTA

SEQ ID NO: 136014 - protein, 15 aa, Artificial Sequence
  Description of Artificial Sequence: Synthetic peptide
  Seed: YERMCNILKGKFQTA
YERMWNILKAKFATA

SEQ ID NO: 136015 - protein, 15 aa, Artificial Sequence
  Description of Artificial Sequence: Synthetic peptide
  Seed: YERMCNILKGKFQTA
YERMWNILKAKFCTA

SEQ ID NO: 136016 - protein, 15 aa, Artificial Sequence
  Description of Artificial Sequence: Synthetic peptide
  Seed: YERMCNILKGKFQTA
YERMWNILKAKFFTA

SEQ ID NO: 136017 - protein, 15 aa, Artificial Sequence
  Description of Artificial Sequence: Synthetic peptide
  Seed: YERMCNILKGKFQTA
YERMWNILKAKFGTA

SEQ ID NO: 136018 - protein, 15 aa, Artificial Sequence
  Description of Artificial Sequence: Synthetic peptide
  Seed: YERMCNILKGKFQTA
YERMWNILKAKFHTA

SEQ ID NO: 136019 - protein, 15 aa, Artificial Sequence
  Description of Artificial Sequence: Synthetic peptide
  Seed: YERMCNILKGKFQTA
YERMWNILKAKFITA

SEQ ID NO: 136020 - protein, 15 aa, Artificial Sequence
  Description of Artificial Sequence: Synthetic peptide
  Seed: YERMCNILKGKFQTA
YERMWNILKAKFLTA

SEQ ID NO: 136021 - protein, 15 aa, Artificial Sequence
  Description of Artificial Sequence: Synthetic peptide
  Seed: YERMCNILKGKFQTA
YERMWNILKAKFMTA

SEQ ID NO: 136022 - protein, 15 aa, Artificial Sequence
  Description of Artificial Sequence: Synthetic peptide
  Seed: YERMCNILKGKFQTA
YERMWNILKAKFNTA

SEQ ID NO: 136023 - protein, 15 aa, Artificial Sequence
  Description of Artificial Sequence: Synthetic peptide
  Seed: YERMCNILKGKFQTA
YERMWNILKAKFPTA

SEQ ID NO: 136024 - protein, 15 aa, Artificial Sequence
  Description of Artificial Sequence: Synthetic peptide
  Seed: YERMCNILKGKFQTA
YERMWNILKAKFQTA

SEQ ID NO: 136025 - protein, 15 aa, Artificial Sequence
  Description of Artificial Sequence: Synthetic peptide
  Seed: YERMCNILKGKFQTA
YERMWNILKAKFSTA

SEQ ID NO: 136026 - protein, 15 aa, Artificial Sequence
  Description of Artificial Sequence: Synthetic peptide
  Seed: YERMCNILKGKFQTA
YERMWNILKAKFTTA

SEQ ID NO: 136027 - protein, 15 aa, Artificial Sequence
  Description of Artificial Sequence: Synthetic peptide
  Seed: YERMCNILKGKFQTA
YERMWNILKAKFVTA

SEQ ID NO: 136028 - protein, 15 aa, Artificial Sequence
  Description of Artificial Sequence: Synthetic peptide
  Seed: YERMCNILKGKFQTA
YERMWNILKGKFATA

SEQ ID NO: 136029 - protein, 15 aa, Artificial Sequence
  Description of Artificial Sequence: Synthetic peptide
  Seed: YERMCNILKGKFQTA
YERMWNILKGKFCTA

SEQ ID NO: 136030 - protein, 15 aa, Artificial Sequence
  Description of Artificial Sequence: Synthetic peptide
  Seed: YERMCNILKGKFQTA
YERMWNILKGKFFTA

SEQ ID NO: 136031 - protein, 15 aa, Artificial Sequence
  Description of Artificial Sequence: Synthetic peptide
  Seed: YERMCNILKGKFQTA
YERMWNILKGKFGTA

SEQ ID NO: 136032 - protein, 15 aa, Artificial Sequence
  Description of Artificial Sequence: Synthetic peptide
  Seed: YERMCNILKGKFQTA
YERMWNILKGKFITA

SEQ ID NO: 136033 - protein, 15 aa, Artificial Sequence
  Description of Artificial Sequence: Synthetic peptide
  Seed: YERMCNILKGKFQTA
YERMWNILKGKFLTA

SEQ ID NO: 136034 - protein, 15 aa, Artificial Sequence
  Description of Artificial Sequence: Synthetic peptide
  Seed: YERMCNILKGKFQTA
YERMWNILKGKFMTA

SEQ ID NO: 136035 - protein, 15 aa, Artificial Sequence
  Description of Artificial Sequence: Synthetic peptide
  Seed: YERMCNILKGKFQTA
YERMWNILKGKFNTA

SEQ ID NO: 136036 - protein, 15 aa, Artificial Sequence
  Description of Artificial Sequence: Synthetic peptide
  Seed: YERMCNILKGKFQTA
YERMWNILKGKFPTA

SEQ ID NO: 136037 - protein, 15 aa, Artificial Sequence
  Description of Artificial Sequence: Synthetic peptide
  Seed: YERMCNILKGKFQTA
YERMWNILKGKFSTA

SEQ ID NO: 136038 - protein, 15 aa, Artificial Sequence
  Description of Artificial Sequence: Synthetic peptide
  Seed: YERMCNILKGKFQTA
YERMWNILKGKFTTA

SEQ ID NO: 136039 - protein, 15 aa, Artificial Sequence
  Description of Artificial Sequence: Synthetic peptide
  Seed: YERMCNILKGKFQTA
YERMWNILKGKFVTA

SEQ ID NO: 136040 - protein, 15 aa, Artificial Sequence
  Description of Artificial Sequence: Synthetic peptide
  Seed: YERMCNILKGKFQTA
YERMWNILKIKFNTA

SEQ ID NO: 136041 - protein, 15 aa, Artificial Sequence
  Description of Artificial Sequence: Synthetic peptide
  Seed: YERMCNILKGKFQTA
YERMWNILKIKFVTA

SEQ ID NO: 136042 - protein, 15 aa, Artificial Sequence
  Description of Artificial Sequence: Synthetic peptide
  Seed: YERMCNILKGKFQTA
YERMWNILKNKFATA

SEQ ID NO: 136043 - protein, 15 aa, Artificial Sequence
  Description of Artificial Sequence: Synthetic peptide
  Seed: YERMCNILKGKFQTA
YERMWNILKNKFGTA

SEQ ID NO: 136044 - protein, 15 aa, Artificial Sequence
  Description of Artificial Sequence: Synthetic peptide
  Seed: YERMCNILKGKFQTA
YERMWNILKNKFITA

SEQ ID NO: 136045 - protein, 15 aa, Artificial Sequence
  Description of Artificial Sequence: Synthetic peptide
  Seed: YERMCNILKGKFQTA
YERMWNILKNKFLTA

SEQ ID NO: 136046 - protein, 15 aa, Artificial Sequence
  Description of Artificial Sequence: Synthetic peptide
  Seed: YERMCNILKGKFQTA
YERMWNILKNKFMTA

SEQ ID NO: 136047 - protein, 15 aa, Artificial Sequence
  Description of Artificial Sequence: Synthetic peptide
  Seed: YERMCNILKGKFQTA
YERMWNILKNKFSTA

SEQ ID NO: 136048 - protein, 15 aa, Artificial Sequence
  Description of Artificial Sequence: Synthetic peptide
  Seed: YERMCNILKGKFQTA
YERMWNILKNKFTTA

SEQ ID NO: 136049 - protein, 15 aa, Artificial Sequence
  Description of Artificial Sequence: Synthetic peptide
  Seed: YERMCNILKGKFQTA
YERMWNILKNKFVTA

SEQ ID NO: 136050 - protein, 15 aa, Artificial Sequence
  Description of Artificial Sequence: Synthetic peptide
  Seed: YERMCNILKGKFQTA
YERMWNILKPKFATA

SEQ ID NO: 136051 - protein, 15 aa, Artificial Sequence
  Description of Artificial Sequence: Synthetic peptide
  Seed: YERMCNILKGKFQTA
YERMWNILKPKFGTA

SEQ ID NO: 136052 - protein, 15 aa, Artificial Sequence
  Description of Artificial Sequence: Synthetic peptide
  Seed: YERMCNILKGKFQTA
YERMWNILKPKFITA

SEQ ID NO: 136053 - protein, 15 aa, Artificial Sequence
  Description of Artificial Sequence: Synthetic peptide
  Seed: YERMCNILKGKFQTA
YERMWNILKPKFLTA

SEQ ID NO: 136054 - protein, 15 aa, Artificial Sequence
  Description of Artificial Sequence: Synthetic peptide
  Seed: YERMCNILKGKFQTA
YERMWNILKPKFMTA

SEQ ID NO: 136055 - protein, 15 aa, Artificial Sequence
  Description of Artificial Sequence: Synthetic peptide
  Seed: YERMCNILKGKFQTA
YERMWNILKPKFNTA

SEQ ID NO: 136056 - protein, 15 aa, Artificial Sequence
  Description of Artificial Sequence: Synthetic peptide
  Seed: YERMCNILKGKFQTA
YERMWNILKPKFSTA

SEQ ID NO: 136057 - protein, 15 aa, Artificial Sequence
  Description of Artificial Sequence: Synthetic peptide
  Seed: YERMCNILKGKFQTA
YERMWNILKPKFTTA

SEQ ID NO: 136058 - protein, 15 aa, Artificial Sequence
  Description of Artificial Sequence: Synthetic peptide
  Seed: YERMCNILKGKFQTA
YERMWNILKPKFVTA

SEQ ID NO: 136059 - protein, 15 aa, Artificial Sequence
  Description of Artificial Sequence: Synthetic peptide
  Seed: YERMCNILKGKFQTA
YERMWNILKSKFATA

SEQ ID NO: 136060 - protein, 15 aa, Artificial Sequence
  Description of Artificial Sequence: Synthetic peptide
  Seed: YERMCNILKGKFQTA
YERMWNILKSKFCTA

SEQ ID NO: 136061 - protein, 15 aa, Artificial Sequence
  Description of Artificial Sequence: Synthetic peptide
  Seed: YERMCNILKGKFQTA
YERMWNILKSKFFTA

SEQ ID NO: 136062 - protein, 15 aa, Artificial Sequence
  Description of Artificial Sequence: Synthetic peptide
  Seed: YERMCNILKGKFQTA
YERMWNILKSKFGTA

SEQ ID NO: 136063 - protein, 15 aa, Artificial Sequence
  Description of Artificial Sequence: Synthetic peptide
  Seed: YERMCNILKGKFQTA
YERMWNILKSKFITA

SEQ ID NO: 136064 - protein, 15 aa, Artificial Sequence
  Description of Artificial Sequence: Synthetic peptide
  Seed: YERMCNILKGKFQTA
YERMWNILKSKFLTA

SEQ ID NO: 136065 - protein, 15 aa, Artificial Sequence
  Description of Artificial Sequence: Synthetic peptide
  Seed: YERMCNILKGKFQTA
YERMWNILKSKFMTA

SEQ ID NO: 136066 - protein, 15 aa, Artificial Sequence
  Description of Artificial Sequence: Synthetic peptide
  Seed: YERMCNILKGKFQTA
YERMWNILKSKFNTA

SEQ ID NO: 136067 - protein, 15 aa, Artificial Sequence
  Description of Artificial Sequence: Synthetic peptide
  Seed: YERMCNILKGKFQTA
YERMWNILKSKFPTA

SEQ ID NO: 136068 - protein, 15 aa, Artificial Sequence
  Description of Artificial Sequence: Synthetic peptide
  Seed: YERMCNILKGKFQTA
YERMWNILKSKFSTA

SEQ ID NO: 136069 - protein, 15 aa, Artificial Sequence
  Description of Artificial Sequence: Synthetic peptide
  Seed: YERMCNILKGKFQTA
YERMWNILKSKFTTA

SEQ ID NO: 136070 - protein, 15 aa, Artificial Sequence
  Description of Artificial Sequence: Synthetic peptide
  Seed: YERMCNILKGKFQTA
YERMWNILKSKFVTA

SEQ ID NO: 136071 - protein, 15 aa, Artificial Sequence
  Description of Artificial Sequence: Synthetic peptide
  Seed: YERMCNILKGKFQTA
YERMWNILKTKFATA

SEQ ID NO: 136072 - protein, 15 aa, Artificial Sequence
  Description of Artificial Sequence: Synthetic peptide
  Seed: YERMCNILKGKFQTA
YERMWNILKTKFGTA

SEQ ID NO: 136073 - protein, 15 aa, Artificial Sequence
  Description of Artificial Sequence: Synthetic peptide
  Seed: YERMCNILKGKFQTA
YERMWNILKTKFITA

SEQ ID NO: 136074 - protein, 15 aa, Artificial Sequence
  Description of Artificial Sequence: Synthetic peptide
  Seed: YERMCNILKGKFQTA
YERMWNILKTKFLTA

SEQ ID NO: 136075 - protein, 15 aa, Artificial Sequence
  Description of Artificial Sequence: Synthetic peptide
  Seed: YERMCNILKGKFQTA
YERMWNILKTKFMTA

SEQ ID NO: 136076 - protein, 15 aa, Artificial Sequence
  Description of Artificial Sequence: Synthetic peptide
  Seed: YERMCNILKGKFQTA
YERMWNILKTKFNTA

SEQ ID NO: 136077 - protein, 15 aa, Artificial Sequence
  Description of Artificial Sequence: Synthetic peptide
  Seed: YERMCNILKGKFQTA
YERMWNILKTKFSTA

SEQ ID NO: 136078 - protein, 15 aa, Artificial Sequence
  Description of Artificial Sequence: Synthetic peptide
  Seed: YERMCNILKGKFQTA
YERMWNILKTKFTTA

SEQ ID NO: 136079 - protein, 15 aa, Artificial Sequence
  Description of Artificial Sequence: Synthetic peptide
  Seed: YERMCNILKGKFQTA
YERMWNILKTKFVTA

SEQ ID NO: 136080 - protein, 15 aa, Artificial Sequence
  Description of Artificial Sequence: Synthetic peptide
  Seed: YERMCNILKGKFQTA
YERMWNILKVKFATA

SEQ ID NO: 136081 - protein, 15 aa, Artificial Sequence
  Description of Artificial Sequence: Synthetic peptide
  Seed: YERMCNILKGKFQTA
YERMWNILKVKFITA

SEQ ID NO: 136082 - protein, 15 aa, Artificial Sequence
  Description of Artificial Sequence: Synthetic peptide
  Seed: YERMCNILKGKFQTA
YERMWNILKVKFLTA

SEQ ID NO: 136083 - protein, 15 aa, Artificial Sequence
  Description of Artificial Sequence: Synthetic peptide
  Seed: YERMCNILKGKFQTA
YERMWNILKVKFMTA

SEQ ID NO: 136084 - protein, 15 aa, Artificial Sequence
  Description of Artificial Sequence: Synthetic peptide
  Seed: YERMCNILKGKFQTA
YERMWNILKVKFNTA

SEQ ID NO: 136085 - protein, 15 aa, Artificial Sequence
  Description of Artificial Sequence: Synthetic peptide
  Seed: YERMCNILKGKFQTA
YERMWNILKVKFSTA

SEQ ID NO: 136086 - protein, 15 aa, Artificial Sequence
  Description of Artificial Sequence: Synthetic peptide
  Seed: YERMCNILKGKFQTA
YERMWNILKVKFTTA

SEQ ID NO: 136087 - protein, 15 aa, Artificial Sequence
  Description of Artificial Sequence: Synthetic peptide
  Seed: YERMCNILKGKFQTA
YERMWNILKVKFVTA

SEQ ID NO: 136088 - protein, 15 aa, Artificial Sequence
  Description of Artificial Sequence: Synthetic peptide
  Seed: YERMCNILKGKFQTA
YERMWNIMKAKFATA

SEQ ID NO: 136089 - protein, 15 aa, Artificial Sequence
  Description of Artificial Sequence: Synthetic peptide
  Seed: YERMCNILKGKFQTA
YERMWNIMKAKFCTA

SEQ ID NO: 136090 - protein, 15 aa, Artificial Sequence
  Description of Artificial Sequence: Synthetic peptide
  Seed: YERMCNILKGKFQTA
YERMWNIMKAKFFTA

SEQ ID NO: 136091 - protein, 15 aa, Artificial Sequence
  Description of Artificial Sequence: Synthetic peptide
  Seed: YERMCNILKGKFQTA
YERMWNIMKAKFGTA

SEQ ID NO: 136092 - protein, 15 aa, Artificial Sequence
  Description of Artificial Sequence: Synthetic peptide
  Seed: YERMCNILKGKFQTA
YERMWNIMKAKFHTA

SEQ ID NO: 136093 - protein, 15 aa, Artificial Sequence
  Description of Artificial Sequence: Synthetic peptide
  Seed: YERMCNILKGKFQTA
YERMWNIMKAKFITA

SEQ ID NO: 136094 - protein, 15 aa, Artificial Sequence
  Description of Artificial Sequence: Synthetic peptide
  Seed: YERMCNILKGKFQTA
YERMWNIMKAKFLTA

SEQ ID NO: 136095 - protein, 15 aa, Artificial Sequence
  Description of Artificial Sequence: Synthetic peptide
  Seed: YERMCNILKGKFQTA
YERMWNIMKAKFMTA

SEQ ID NO: 136096 - protein, 15 aa, Artificial Sequence
  Description of Artificial Sequence: Synthetic peptide
  Seed: YERMCNILKGKFQTA
YERMWNIMKAKFNTA

SEQ ID NO: 136097 - protein, 15 aa, Artificial Sequence
  Description of Artificial Sequence: Synthetic peptide
  Seed: YERMCNILKGKFQTA
YERMWNIMKAKFPTA

SEQ ID NO: 136098 - protein, 15 aa, Artificial Sequence
  Description of Artificial Sequence: Synthetic peptide
  Seed: YERMCNILKGKFQTA
YERMWNIMKAKFQTA

SEQ ID NO: 136099 - protein, 15 aa, Artificial Sequence
  Description of Artificial Sequence: Synthetic peptide
  Seed: YERMCNILKGKFQTA
YERMWNIMKAKFSTA

SEQ ID NO: 136100 - protein, 15 aa, Artificial Sequence
  Description of Artificial Sequence: Synthetic peptide
  Seed: YERMCNILKGKFQTA
YERMWNIMKAKFTTA

SEQ ID NO: 136101 - protein, 15 aa, Artificial Sequence
  Description of Artificial Sequence: Synthetic peptide
  Seed: YERMCNILKGKFQTA
YERMWNIMKAKFVTA

SEQ ID NO: 136102 - protein, 15 aa, Artificial Sequence
  Description of Artificial Sequence: Synthetic peptide
  Seed: YERMCNILKGKFQTA
YERMWNIMKAKFYTA

SEQ ID NO: 136103 - protein, 15 aa, Artificial Sequence
  Description of Artificial Sequence: Synthetic peptide
  Seed: YERMCNILKGKFQTA
YERMWNIMKGKFATA

SEQ ID NO: 136104 - protein, 15 aa, Artificial Sequence
  Description of Artificial Sequence: Synthetic peptide
  Seed: YERMCNILKGKFQTA
YERMWNIMKGKFCTA

SEQ ID NO: 136105 - protein, 15 aa, Artificial Sequence
  Description of Artificial Sequence: Synthetic peptide
  Seed: YERMCNILKGKFQTA
YERMWNIMKGKFFTA

SEQ ID NO: 136106 - protein, 15 aa, Artificial Sequence
  Description of Artificial Sequence: Synthetic peptide
  Seed: YERMCNILKGKFQTA
YERMWNIMKGKFGTA

SEQ ID NO: 136107 - protein, 15 aa, Artificial Sequence
  Description of Artificial Sequence: Synthetic peptide
  Seed: YERMCNILKGKFQTA
YERMWNIMKGKFITA

SEQ ID NO: 136108 - protein, 15 aa, Artificial Sequence
  Description of Artificial Sequence: Synthetic peptide
  Seed: YERMCNILKGKFQTA
YERMWNIMKGKFLTA

SEQ ID NO: 136109 - protein, 15 aa, Artificial Sequence
  Description of Artificial Sequence: Synthetic peptide
  Seed: YERMCNILKGKFQTA
YERMWNIMKGKFMTA

SEQ ID NO: 136110 - protein, 15 aa, Artificial Sequence
  Description of Artificial Sequence: Synthetic peptide
  Seed: YERMCNILKGKFQTA
YERMWNIMKGKFNTA

SEQ ID NO: 136111 - protein, 15 aa, Artificial Sequence
  Description of Artificial Sequence: Synthetic peptide
  Seed: YERMCNILKGKFQTA
YERMWNIMKGKFSTA

SEQ ID NO: 136112 - protein, 15 aa, Artificial Sequence
  Description of Artificial Sequence: Synthetic peptide
  Seed: YERMCNILKGKFQTA
YERMWNIMKGKFTTA

SEQ ID NO: 136113 - protein, 15 aa, Artificial Sequence
  Description of Artificial Sequence: Synthetic peptide
  Seed: YERMCNILKGKFQTA
YERMWNIMKGKFVTA

SEQ ID NO: 136114 - protein, 15 aa, Artificial Sequence
  Description of Artificial Sequence: Synthetic peptide
  Seed: YERMCNILKGKFQTA
YERMWNIMKIKFATA

SEQ ID NO: 136115 - protein, 15 aa, Artificial Sequence
  Description of Artificial Sequence: Synthetic peptide
  Seed: YERMCNILKGKFQTA
YERMWNIMKIKFITA

SEQ ID NO: 136116 - protein, 15 aa, Artificial Sequence
  Description of Artificial Sequence: Synthetic peptide
  Seed: YERMCNILKGKFQTA
YERMWNIMKIKFLTA

SEQ ID NO: 136117 - protein, 15 aa, Artificial Sequence
  Description of Artificial Sequence: Synthetic peptide
  Seed: YERMCNILKGKFQTA
YERMWNIMKIKFNTA

SEQ ID NO: 136118 - protein, 15 aa, Artificial Sequence
  Description of Artificial Sequence: Synthetic peptide
  Seed: YERMCNILKGKFQTA
YERMWNIMKIKFSTA

SEQ ID NO: 136119 - protein, 15 aa, Artificial Sequence
  Description of Artificial Sequence: Synthetic peptide
  Seed: YERMCNILKGKFQTA
YERMWNIMKIKFVTA

SEQ ID NO: 136120 - protein, 15 aa, Artificial Sequence
  Description of Artificial Sequence: Synthetic peptide
  Seed: YERMCNILKGKFQTA
YERMWNIMKNKFATA

SEQ ID NO: 136121 - protein, 15 aa, Artificial Sequence
  Description of Artificial Sequence: Synthetic peptide
  Seed: YERMCNILKGKFQTA
YERMWNIMKNKFGTA

SEQ ID NO: 136122 - protein, 15 aa, Artificial Sequence
  Description of Artificial Sequence: Synthetic peptide
  Seed: YERMCNILKGKFQTA
YERMWNIMKNKFITA

SEQ ID NO: 136123 - protein, 15 aa, Artificial Sequence
  Description of Artificial Sequence: Synthetic peptide
  Seed: YERMCNILKGKFQTA
YERMWNIMKNKFLTA

SEQ ID NO: 136124 - protein, 15 aa, Artificial Sequence
  Description of Artificial Sequence: Synthetic peptide
  Seed: YERMCNILKGKFQTA
YERMWNIMKNKFMTA

SEQ ID NO: 136125 - protein, 15 aa, Artificial Sequence
  Description of Artificial Sequence: Synthetic peptide
  Seed: YERMCNILKGKFQTA
YERMWNIMKNKFSTA

SEQ ID NO: 136126 - protein, 15 aa, Artificial Sequence
  Description of Artificial Sequence: Synthetic peptide
  Seed: YERMCNILKGKFQTA
YERMWNIMKNKFTTA

SEQ ID NO: 136127 - protein, 15 aa, Artificial Sequence
  Description of Artificial Sequence: Synthetic peptide
  Seed: YERMCNILKGKFQTA
YERMWNIMKNKFVTA

SEQ ID NO: 136128 - protein, 15 aa, Artificial Sequence
  Description of Artificial Sequence: Synthetic peptide
  Seed: YERMCNILKGKFQTA
YERMWNIMKPKFATA

SEQ ID NO: 136129 - protein, 15 aa, Artificial Sequence
  Description of Artificial Sequence: Synthetic peptide
  Seed: YERMCNILKGKFQTA
YERMWNIMKPKFGTA

SEQ ID NO: 136130 - protein, 15 aa, Artificial Sequence
  Description of Artificial Sequence: Synthetic peptide
  Seed: YERMCNILKGKFQTA
YERMWNIMKPKFITA

SEQ ID NO: 136131 - protein, 15 aa, Artificial Sequence
  Description of Artificial Sequence: Synthetic peptide
  Seed: YERMCNILKGKFQTA
YERMWNIMKPKFLTA

SEQ ID NO: 136132 - protein, 15 aa, Artificial Sequence
  Description of Artificial Sequence: Synthetic peptide
  Seed: YERMCNILKGKFQTA
YERMWNIMKPKFMTA

SEQ ID NO: 136133 - protein, 15 aa, Artificial Sequence
  Description of Artificial Sequence: Synthetic peptide
  Seed: YERMCNILKGKFQTA
YERMWNIMKPKFNTA

SEQ ID NO: 136134 - protein, 15 aa, Artificial Sequence
  Description of Artificial Sequence: Synthetic peptide
  Seed: YERMCNILKGKFQTA
YERMWNIMKPKFSTA

SEQ ID NO: 136135 - protein, 15 aa, Artificial Sequence
  Description of Artificial Sequence: Synthetic peptide
  Seed: YERMCNILKGKFQTA
YERMWNIMKPKFTTA

SEQ ID NO: 136136 - protein, 15 aa, Artificial Sequence
  Description of Artificial Sequence: Synthetic peptide
  Seed: YERMCNILKGKFQTA
YERMWNIMKPKFVTA

SEQ ID NO: 136137 - protein, 15 aa, Artificial Sequence
  Description of Artificial Sequence: Synthetic peptide
  Seed: YERMCNILKGKFQTA
YERMWNIMKSKFATA

SEQ ID NO: 136138 - protein, 15 aa, Artificial Sequence
  Description of Artificial Sequence: Synthetic peptide
  Seed: YERMCNILKGKFQTA
YERMWNIMKSKFCTA

SEQ ID NO: 136139 - protein, 15 aa, Artificial Sequence
  Description of Artificial Sequence: Synthetic peptide
  Seed: YERMCNILKGKFQTA
YERMWNIMKSKFFTA

SEQ ID NO: 136140 - protein, 15 aa, Artificial Sequence
  Description of Artificial Sequence: Synthetic peptide
  Seed: YERMCNILKGKFQTA
YERMWNIMKSKFGTA

SEQ ID NO: 136141 - protein, 15 aa, Artificial Sequence
  Description of Artificial Sequence: Synthetic peptide
  Seed: YERMCNILKGKFQTA
YERMWNIMKSKFITA

SEQ ID NO: 136142 - protein, 15 aa, Artificial Sequence
  Description of Artificial Sequence: Synthetic peptide
  Seed: YERMCNILKGKFQTA
YERMWNIMKSKFLTA

SEQ ID NO: 136143 - protein, 15 aa, Artificial Sequence
  Description of Artificial Sequence: Synthetic peptide
  Seed: YERMCNILKGKFQTA
YERMWNIMKSKFMTA

SEQ ID NO: 136144 - protein, 15 aa, Artificial Sequence
  Description of Artificial Sequence: Synthetic peptide
  Seed: YERMCNILKGKFQTA
YERMWNIMKSKFNTA

SEQ ID NO: 136145 - protein, 15 aa, Artificial Sequence
  Description of Artificial Sequence: Synthetic peptide
  Seed: YERMCNILKGKFQTA
YERMWNIMKSKFSTA

SEQ ID NO: 136146 - protein, 15 aa, Artificial Sequence
  Description of Artificial Sequence: Synthetic peptide
  Seed: YERMCNILKGKFQTA
YERMWNIMKSKFTTA

SEQ ID NO: 136147 - protein, 15 aa, Artificial Sequence
  Description of Artificial Sequence: Synthetic peptide
  Seed: YERMCNILKGKFQTA
YERMWNIMKSKFVTA

SEQ ID NO: 136148 - protein, 15 aa, Artificial Sequence
  Description of Artificial Sequence: Synthetic peptide
  Seed: YERMCNILKGKFQTA
YERMWNIMKTKFATA

SEQ ID NO: 136149 - protein, 15 aa, Artificial Sequence
  Description of Artificial Sequence: Synthetic peptide
  Seed: YERMCNILKGKFQTA
YERMWNIMKTKFGTA

SEQ ID NO: 136150 - protein, 15 aa, Artificial Sequence
  Description of Artificial Sequence: Synthetic peptide
  Seed: YERMCNILKGKFQTA
YERMWNIMKTKFITA

SEQ ID NO: 136151 - protein, 15 aa, Artificial Sequence
  Description of Artificial Sequence: Synthetic peptide
  Seed: YERMCNILKGKFQTA
YERMWNIMKTKFLTA

SEQ ID NO: 136152 - protein, 15 aa, Artificial Sequence
  Description of Artificial Sequence: Synthetic peptide
  Seed: YERMCNILKGKFQTA
YERMWNIMKTKFMTA

SEQ ID NO: 136153 - protein, 15 aa, Artificial Sequence
  Description of Artificial Sequence: Synthetic peptide
  Seed: YERMCNILKGKFQTA
YERMWNIMKTKFNTA

SEQ ID NO: 136154 - protein, 15 aa, Artificial Sequence
  Description of Artificial Sequence: Synthetic peptide
  Seed: YERMCNILKGKFQTA
YERMWNIMKTKFSTA

SEQ ID NO: 136155 - protein, 15 aa, Artificial Sequence
  Description of Artificial Sequence: Synthetic peptide
  Seed: YERMCNILKGKFQTA
YERMWNIMKTKFTTA

SEQ ID NO: 136156 - protein, 15 aa, Artificial Sequence
  Description of Artificial Sequence: Synthetic peptide
  Seed: YERMCNILKGKFQTA
YERMWNIMKTKFVTA

SEQ ID NO: 136157 - protein, 15 aa, Artificial Sequence
  Description of Artificial Sequence: Synthetic peptide
  Seed: YERMCNILKGKFQTA
YERMWNIMKVKFATA

SEQ ID NO: 136158 - protein, 15 aa, Artificial Sequence
  Description of Artificial Sequence: Synthetic peptide
  Seed: YERMCNILKGKFQTA
YERMWNIMKVKFITA

SEQ ID NO: 136159 - protein, 15 aa, Artificial Sequence
  Description of Artificial Sequence: Synthetic peptide
  Seed: YERMCNILKGKFQTA
YERMWNIMKVKFLTA

SEQ ID NO: 136160 - protein, 15 aa, Artificial Sequence
  Description of Artificial Sequence: Synthetic peptide
  Seed: YERMCNILKGKFQTA
YERMWNIMKVKFMTA

SEQ ID NO: 136161 - protein, 15 aa, Artificial Sequence
  Description of Artificial Sequence: Synthetic peptide
  Seed: YERMCNILKGKFQTA
YERMWNIMKVKFNTA

SEQ ID NO: 136162 - protein, 15 aa, Artificial Sequence
  Description of Artificial Sequence: Synthetic peptide
  Seed: YERMCNILKGKFQTA
YERMWNIMKVKFSTA

SEQ ID NO: 136163 - protein, 15 aa, Artificial Sequence
  Description of Artificial Sequence: Synthetic peptide
  Seed: YERMCNILKGKFQTA
YERMWNIMKVKFTTA

SEQ ID NO: 136164 - protein, 15 aa, Artificial Sequence
  Description of Artificial Sequence: Synthetic peptide
  Seed: YERMCNILKGKFQTA
YERMWNIMKVKFVTA

SEQ ID NO: 136165 - protein, 15 aa, Artificial Sequence
  Description of Artificial Sequence: Synthetic peptide
  Seed: YERMCNILKGKFQTA
YERMWNINKAKFLTA

SEQ ID NO: 136166 - protein, 15 aa, Artificial Sequence
  Description of Artificial Sequence: Synthetic peptide
  Seed: YERMCNILKGKFQTA
YERMWNINKAKFVTA

SEQ ID NO: 136167 - protein, 15 aa, Artificial Sequence
  Description of Artificial Sequence: Synthetic peptide
  Seed: YERMCNILKGKFQTA
YERMWNIQKAKFATA

SEQ ID NO: 136168 - protein, 15 aa, Artificial Sequence
  Description of Artificial Sequence: Synthetic peptide
  Seed: YERMCNILKGKFQTA
YERMWNIQKAKFITA

SEQ ID NO: 136169 - protein, 15 aa, Artificial Sequence
  Description of Artificial Sequence: Synthetic peptide
  Seed: YERMCNILKGKFQTA
YERMWNIQKAKFLTA

SEQ ID NO: 136170 - protein, 15 aa, Artificial Sequence
  Description of Artificial Sequence: Synthetic peptide
  Seed: YERMCNILKGKFQTA
YERMWNIQKAKFMTA

SEQ ID NO: 136171 - protein, 15 aa, Artificial Sequence
  Description of Artificial Sequence: Synthetic peptide
  Seed: YERMCNILKGKFQTA
YERMWNIQKAKFSTA

SEQ ID NO: 136172 - protein, 15 aa, Artificial Sequence
  Description of Artificial Sequence: Synthetic peptide
  Seed: YERMCNILKGKFQTA
YERMWNIQKAKFTTA

SEQ ID NO: 136173 - protein, 15 aa, Artificial Sequence
  Description of Artificial Sequence: Synthetic peptide
  Seed: YERMCNILKGKFQTA
YERMWNIQKAKFVTA

SEQ ID NO: 136174 - protein, 15 aa, Artificial Sequence
  Description of Artificial Sequence: Synthetic peptide
  Seed: YERMCNILKGKFQTA
YERMWNIQKGKFATA

SEQ ID NO: 136175 - protein, 15 aa, Artificial Sequence
  Description of Artificial Sequence: Synthetic peptide
  Seed: YERMCNILKGKFQTA
YERMWNIQKGKFITA

SEQ ID NO: 136176 - protein, 15 aa, Artificial Sequence
  Description of Artificial Sequence: Synthetic peptide
  Seed: YERMCNILKGKFQTA
YERMWNIQKGKFLTA

SEQ ID NO: 136177 - protein, 15 aa, Artificial Sequence
  Description of Artificial Sequence: Synthetic peptide
  Seed: YERMCNILKGKFQTA
YERMWNIQKGKFMTA

SEQ ID NO: 136178 - protein, 15 aa, Artificial Sequence
  Description of Artificial Sequence: Synthetic peptide
  Seed: YERMCNILKGKFQTA
YERMWNIQKGKFVTA

SEQ ID NO: 136179 - protein, 15 aa, Artificial Sequence
  Description of Artificial Sequence: Synthetic peptide
  Seed: YERMCNILKGKFQTA
YERMWNIQKNKFITA

SEQ ID NO: 136180 - protein, 15 aa, Artificial Sequence
  Description of Artificial Sequence: Synthetic peptide
  Seed: YERMCNILKGKFQTA
YERMWNIQKNKFLTA

SEQ ID NO: 136181 - protein, 15 aa, Artificial Sequence
  Description of Artificial Sequence: Synthetic peptide
  Seed: YERMCNILKGKFQTA
YERMWNIQKNKFVTA

SEQ ID NO: 136182 - protein, 15 aa, Artificial Sequence
  Description of Artificial Sequence: Synthetic peptide
  Seed: YERMCNILKGKFQTA
YERMWNIQKPKFATA

SEQ ID NO: 136183 - protein, 15 aa, Artificial Sequence
  Description of Artificial Sequence: Synthetic peptide
  Seed: YERMCNILKGKFQTA
YERMWNIQKPKFITA

SEQ ID NO: 136184 - protein, 15 aa, Artificial Sequence
  Description of Artificial Sequence: Synthetic peptide
  Seed: YERMCNILKGKFQTA
YERMWNIQKPKFLTA

SEQ ID NO: 136185 - protein, 15 aa, Artificial Sequence
  Description of Artificial Sequence: Synthetic peptide
  Seed: YERMCNILKGKFQTA
YERMWNIQKPKFVTA

SEQ ID NO: 136186 - protein, 15 aa, Artificial Sequence
  Description of Artificial Sequence: Synthetic peptide
  Seed: YERMCNILKGKFQTA
YERMWNIQKSKFATA

SEQ ID NO: 136187 - protein, 15 aa, Artificial Sequence
  Description of Artificial Sequence: Synthetic peptide
  Seed: YERMCNILKGKFQTA
YERMWNIQKSKFITA

SEQ ID NO: 136188 - protein, 15 aa, Artificial Sequence
  Description of Artificial Sequence: Synthetic peptide
  Seed: YERMCNILKGKFQTA
YERMWNIQKSKFLTA

SEQ ID NO: 136189 - protein, 15 aa, Artificial Sequence
  Description of Artificial Sequence: Synthetic peptide
  Seed: YERMCNILKGKFQTA
YERMWNIQKSKFMTA

SEQ ID NO: 136190 - protein, 15 aa, Artificial Sequence
  Description of Artificial Sequence: Synthetic peptide
  Seed: YERMCNILKGKFQTA
YERMWNIQKSKFTTA

SEQ ID NO: 136191 - protein, 15 aa, Artificial Sequence
  Description of Artificial Sequence: Synthetic peptide
  Seed: YERMCNILKGKFQTA
YERMWNIQKSKFVTA

SEQ ID NO: 136192 - protein, 15 aa, Artificial Sequence
  Description of Artificial Sequence: Synthetic peptide
  Seed: YERMCNILKGKFQTA
YERMWNIQKTKFATA

SEQ ID NO: 136193 - protein, 15 aa, Artificial Sequence
  Description of Artificial Sequence: Synthetic peptide
  Seed: YERMCNILKGKFQTA
YERMWNIQKTKFITA

SEQ ID NO: 136194 - protein, 15 aa, Artificial Sequence
  Description of Artificial Sequence: Synthetic peptide
  Seed: YERMCNILKGKFQTA
YERMWNIQKTKFLTA

SEQ ID NO: 136195 - protein, 15 aa, Artificial Sequence
  Description of Artificial Sequence: Synthetic peptide
  Seed: YERMCNILKGKFQTA
YERMWNIQKTKFVTA

SEQ ID NO: 136196 - protein, 15 aa, Artificial Sequence
  Description of Artificial Sequence: Synthetic peptide
  Seed: YERMCNILKGKFQTA
YERMWNISKAKFATA

SEQ ID NO: 136197 - protein, 15 aa, Artificial Sequence
  Description of Artificial Sequence: Synthetic peptide
  Seed: YERMCNILKGKFQTA
YERMWNISKAKFITA

SEQ ID NO: 136198 - protein, 15 aa, Artificial Sequence
  Description of Artificial Sequence: Synthetic peptide
  Seed: YERMCNILKGKFQTA
YERMWNISKAKFLTA

SEQ ID NO: 136199 - protein, 15 aa, Artificial Sequence
  Description of Artificial Sequence: Synthetic peptide
  Seed: YERMCNILKGKFQTA
YERMWNISKAKFMTA

SEQ ID NO: 136200 - protein, 15 aa, Artificial Sequence
  Description of Artificial Sequence: Synthetic peptide
  Seed: YERMCNILKGKFQTA
YERMWNISKAKFSTA

SEQ ID NO: 136201 - protein, 15 aa, Artificial Sequence
  Description of Artificial Sequence: Synthetic peptide
  Seed: YERMCNILKGKFQTA
YERMWNISKAKFTTA

SEQ ID NO: 136202 - protein, 15 aa, Artificial Sequence
  Description of Artificial Sequence: Synthetic peptide
  Seed: YERMCNILKGKFQTA
YERMWNISKAKFVTA

SEQ ID NO: 136203 - protein, 15 aa, Artificial Sequence
  Description of Artificial Sequence: Synthetic peptide
  Seed: YERMCNILKGKFQTA
YERMWNISKGKFATA

SEQ ID NO: 136204 - protein, 15 aa, Artificial Sequence
  Description of Artificial Sequence: Synthetic peptide
  Seed: YERMCNILKGKFQTA
YERMWNISKGKFITA

SEQ ID NO: 136205 - protein, 15 aa, Artificial Sequence
  Description of Artificial Sequence: Synthetic peptide
  Seed: YERMCNILKGKFQTA
YERMWNISKGKFLTA

SEQ ID NO: 136206 - protein, 15 aa, Artificial Sequence
  Description of Artificial Sequence: Synthetic peptide
  Seed: YERMCNILKGKFQTA
YERMWNISKGKFMTA

SEQ ID NO: 136207 - protein, 15 aa, Artificial Sequence
  Description of Artificial Sequence: Synthetic peptide
  Seed: YERMCNILKGKFQTA
YERMWNISKGKFVTA

SEQ ID NO: 136208 - protein, 15 aa, Artificial Sequence
  Description of Artificial Sequence: Synthetic peptide
  Seed: YERMCNILKGKFQTA
YERMWNISKPKFITA

SEQ ID NO: 136209 - protein, 15 aa, Artificial Sequence
  Description of Artificial Sequence: Synthetic peptide
  Seed: YERMCNILKGKFQTA
YERMWNISKPKFLTA

SEQ ID NO: 136210 - protein, 15 aa, Artificial Sequence
  Description of Artificial Sequence: Synthetic peptide
  Seed: YERMCNILKGKFQTA
YERMWNISKPKFVTA

SEQ ID NO: 136211 - protein, 15 aa, Artificial Sequence
  Description of Artificial Sequence: Synthetic peptide
  Seed: YERMCNILKGKFQTA
YERMWNISKSKFATA

SEQ ID NO: 136212 - protein, 15 aa, Artificial Sequence
  Description of Artificial Sequence: Synthetic peptide
  Seed: YERMCNILKGKFQTA
YERMWNISKSKFITA

SEQ ID NO: 136213 - protein, 15 aa, Artificial Sequence
  Description of Artificial Sequence: Synthetic peptide
  Seed: YERMCNILKGKFQTA
YERMWNISKSKFLTA

SEQ ID NO: 136214 - protein, 15 aa, Artificial Sequence
  Description of Artificial Sequence: Synthetic peptide
  Seed: YERMCNILKGKFQTA
YERMWNISKSKFVTA

SEQ ID NO: 136215 - protein, 15 aa, Artificial Sequence
  Description of Artificial Sequence: Synthetic peptide
  Seed: YERMCNILKGKFQTA
YERMWNISKTKFLTA

SEQ ID NO: 136216 - protein, 15 aa, Artificial Sequence
  Description of Artificial Sequence: Synthetic peptide
  Seed: YERMCNILKGKFQTA
YERMWNITKAKFATA

SEQ ID NO: 136217 - protein, 15 aa, Artificial Sequence
  Description of Artificial Sequence: Synthetic peptide
  Seed: YERMCNILKGKFQTA
YERMWNITKAKFITA

SEQ ID NO: 136218 - protein, 15 aa, Artificial Sequence
  Description of Artificial Sequence: Synthetic peptide
  Seed: YERMCNILKGKFQTA
YERMWNITKAKFLTA

SEQ ID NO: 136219 - protein, 15 aa, Artificial Sequence
  Description of Artificial Sequence: Synthetic peptide
  Seed: YERMCNILKGKFQTA
YERMWNITKAKFMTA

SEQ ID NO: 136220 - protein, 15 aa, Artificial Sequence
  Description of Artificial Sequence: Synthetic peptide
  Seed: YERMCNILKGKFQTA
YERMWNITKAKFVTA

SEQ ID NO: 136221 - protein, 15 aa, Artificial Sequence
  Description of Artificial Sequence: Synthetic peptide
  Seed: YERMCNILKGKFQTA
YERMWNITKGKFLTA

SEQ ID NO: 136222 - protein, 15 aa, Artificial Sequence
  Description of Artificial Sequence: Synthetic peptide
  Seed: YERMCNILKGKFQTA
YERMWNITKGKFVTA

SEQ ID NO: 136223 - protein, 15 aa, Artificial Sequence
  Description of Artificial Sequence: Synthetic peptide
  Seed: YERMCNILKGKFQTA
YERMWNITKSKFLTA

SEQ ID NO: 136224 - protein, 15 aa, Artificial Sequence
  Description of Artificial Sequence: Synthetic peptide
  Seed: YERMCNILKGKFQTA
YERMWNITKSKFVTA

SEQ ID NO: 136225 - protein, 15 aa, Artificial Sequence
  Description of Artificial Sequence: Synthetic peptide
  Seed: YERMCNILKGKFQTA
YERMWNIVKAKFATA

SEQ ID NO: 136226 - protein, 15 aa, Artificial Sequence
  Description of Artificial Sequence: Synthetic peptide
  Seed: YERMCNILKGKFQTA
YERMWNIVKAKFITA

SEQ ID NO: 136227 - protein, 15 aa, Artificial Sequence
  Description of Artificial Sequence: Synthetic peptide
  Seed: YERMCNILKGKFQTA
YERMWNIVKAKFLTA

SEQ ID NO: 136228 - protein, 15 aa, Artificial Sequence
  Description of Artificial Sequence: Synthetic peptide
  Seed: YERMCNILKGKFQTA
YERMWNIVKAKFMTA

SEQ ID NO: 136229 - protein, 15 aa, Artificial Sequence
  Description of Artificial Sequence: Synthetic peptide
  Seed: YERMCNILKGKFQTA
YERMWNIVKAKFSTA

SEQ ID NO: 136230 - protein, 15 aa, Artificial Sequence
  Description of Artificial Sequence: Synthetic peptide
  Seed: YERMCNILKGKFQTA
YERMWNIVKAKFTTA

SEQ ID NO: 136231 - protein, 15 aa, Artificial Sequence
  Description of Artificial Sequence: Synthetic peptide
  Seed: YERMCNILKGKFQTA
YERMWNIVKAKFVTA

SEQ ID NO: 136232 - protein, 15 aa, Artificial Sequence
  Description of Artificial Sequence: Synthetic peptide
  Seed: YERMCNILKGKFQTA
YERMWNIVKGKFATA

SEQ ID NO: 136233 - protein, 15 aa, Artificial Sequence
  Description of Artificial Sequence: Synthetic peptide
  Seed: YERMCNILKGKFQTA
YERMWNIVKGKFITA

SEQ ID NO: 136234 - protein, 15 aa, Artificial Sequence
  Description of Artificial Sequence: Synthetic peptide
  Seed: YERMCNILKGKFQTA
YERMWNIVKGKFLTA

SEQ ID NO: 136235 - protein, 15 aa, Artificial Sequence
  Description of Artificial Sequence: Synthetic peptide
  Seed: YERMCNILKGKFQTA
YERMWNIVKGKFMTA

SEQ ID NO: 136236 - protein, 15 aa, Artificial Sequence
  Description of Artificial Sequence: Synthetic peptide
  Seed: YERMCNILKGKFQTA
YERMWNIVKGKFSTA

SEQ ID NO: 136237 - protein, 15 aa, Artificial Sequence
  Description of Artificial Sequence: Synthetic peptide
  Seed: YERMCNILKGKFQTA
YERMWNIVKGKFTTA

SEQ ID NO: 136238 - protein, 15 aa, Artificial Sequence
  Description of Artificial Sequence: Synthetic peptide
  Seed: YERMCNILKGKFQTA
YERMWNIVKGKFVTA

SEQ ID NO: 136239 - protein, 15 aa, Artificial Sequence
  Description of Artificial Sequence: Synthetic peptide
  Seed: YERMCNILKGKFQTA
YERMWNIVKNKFATA

SEQ ID NO: 136240 - protein, 15 aa, Artificial Sequence
  Description of Artificial Sequence: Synthetic peptide
  Seed: YERMCNILKGKFQTA
YERMWNIVKNKFITA

SEQ ID NO: 136241 - protein, 15 aa, Artificial Sequence
  Description of Artificial Sequence: Synthetic peptide
  Seed: YERMCNILKGKFQTA
YERMWNIVKNKFLTA

SEQ ID NO: 136242 - protein, 15 aa, Artificial Sequence
  Description of Artificial Sequence: Synthetic peptide
  Seed: YERMCNILKGKFQTA
YERMWNIVKNKFVTA

SEQ ID NO: 136243 - protein, 15 aa, Artificial Sequence
  Description of Artificial Sequence: Synthetic peptide
  Seed: YERMCNILKGKFQTA
YERMWNIVKPKFATA

SEQ ID NO: 136244 - protein, 15 aa, Artificial Sequence
  Description of Artificial Sequence: Synthetic peptide
  Seed: YERMCNILKGKFQTA
YERMWNIVKPKFITA

SEQ ID NO: 136245 - protein, 15 aa, Artificial Sequence
  Description of Artificial Sequence: Synthetic peptide
  Seed: YERMCNILKGKFQTA
YERMWNIVKPKFLTA

SEQ ID NO: 136246 - protein, 15 aa, Artificial Sequence
  Description of Artificial Sequence: Synthetic peptide
  Seed: YERMCNILKGKFQTA
YERMWNIVKPKFMTA

SEQ ID NO: 136247 - protein, 15 aa, Artificial Sequence
  Description of Artificial Sequence: Synthetic peptide
  Seed: YERMCNILKGKFQTA
YERMWNIVKPKFVTA

SEQ ID NO: 136248 - protein, 15 aa, Artificial Sequence
  Description of Artificial Sequence: Synthetic peptide
  Seed: YERMCNILKGKFQTA
YERMWNIVKSKFATA

SEQ ID NO: 136249 - protein, 15 aa, Artificial Sequence
  Description of Artificial Sequence: Synthetic peptide
  Seed: YERMCNILKGKFQTA
YERMWNIVKSKFITA

SEQ ID NO: 136250 - protein, 15 aa, Artificial Sequence
  Description of Artificial Sequence: Synthetic peptide
  Seed: YERMCNILKGKFQTA
YERMWNIVKSKFLTA

SEQ ID NO: 136251 - protein, 15 aa, Artificial Sequence
  Description of Artificial Sequence: Synthetic peptide
  Seed: YERMCNILKGKFQTA
YERMWNIVKSKFMTA

SEQ ID NO: 136252 - protein, 15 aa, Artificial Sequence
  Description of Artificial Sequence: Synthetic peptide
  Seed: YERMCNILKGKFQTA
YERMWNIVKSKFSTA

SEQ ID NO: 136253 - protein, 15 aa, Artificial Sequence
  Description of Artificial Sequence: Synthetic peptide
  Seed: YERMCNILKGKFQTA
YERMWNIVKSKFTTA

SEQ ID NO: 136254 - protein, 15 aa, Artificial Sequence
  Description of Artificial Sequence: Synthetic peptide
  Seed: YERMCNILKGKFQTA
YERMWNIVKSKFVTA

SEQ ID NO: 136255 - protein, 15 aa, Artificial Sequence
  Description of Artificial Sequence: Synthetic peptide
  Seed: YERMCNILKGKFQTA
YERMWNIVKTKFATA

SEQ ID NO: 136256 - protein, 15 aa, Artificial Sequence
  Description of Artificial Sequence: Synthetic peptide
  Seed: YERMCNILKGKFQTA
YERMWNIVKTKFITA

SEQ ID NO: 136257 - protein, 15 aa, Artificial Sequence
  Description of Artificial Sequence: Synthetic peptide
  Seed: YERMCNILKGKFQTA
YERMWNIVKTKFLTA

SEQ ID NO: 136258 - protein, 15 aa, Artificial Sequence
  Description of Artificial Sequence: Synthetic peptide
  Seed: YERMCNILKGKFQTA
YERMWNIVKTKFVTA

SEQ ID NO: 136259 - protein, 15 aa, Artificial Sequence
  Description of Artificial Sequence: Synthetic peptide
  Seed: YERMCNILKGKFQTA
YERMYNIAKAKFATA

SEQ ID NO: 136260 - protein, 15 aa, Artificial Sequence
  Description of Artificial Sequence: Synthetic peptide
  Seed: YERMCNILKGKFQTA
YERMYNIAKAKFCTA

SEQ ID NO: 136261 - protein, 15 aa, Artificial Sequence
  Description of Artificial Sequence: Synthetic peptide
  Seed: YERMCNILKGKFQTA
YERMYNIAKAKFFTA

SEQ ID NO: 136262 - protein, 15 aa, Artificial Sequence
  Description of Artificial Sequence: Synthetic peptide
  Seed: YERMCNILKGKFQTA
YERMYNIAKAKFGTA

SEQ ID NO: 136263 - protein, 15 aa, Artificial Sequence
  Description of Artificial Sequence: Synthetic peptide
  Seed: YERMCNILKGKFQTA
YERMYNIAKAKFHTA

SEQ ID NO: 136264 - protein, 15 aa, Artificial Sequence
  Description of Artificial Sequence: Synthetic peptide
  Seed: YERMCNILKGKFQTA
YERMYNIAKAKFITA

SEQ ID NO: 136265 - protein, 15 aa, Artificial Sequence
  Description of Artificial Sequence: Synthetic peptide
  Seed: YERMCNILKGKFQTA
YERMYNIAKAKFLTA

SEQ ID NO: 136266 - protein, 15 aa, Artificial Sequence
  Description of Artificial Sequence: Synthetic peptide
  Seed: YERMCNILKGKFQTA
YERMYNIAKAKFMTA

SEQ ID NO: 136267 - protein, 15 aa, Artificial Sequence
  Description of Artificial Sequence: Synthetic peptide
  Seed: YERMCNILKGKFQTA
YERMYNIAKAKFNTA

SEQ ID NO: 136268 - protein, 15 aa, Artificial Sequence
  Description of Artificial Sequence: Synthetic peptide
  Seed: YERMCNILKGKFQTA
YERMYNIAKAKFPTA

SEQ ID NO: 136269 - protein, 15 aa, Artificial Sequence
  Description of Artificial Sequence: Synthetic peptide
  Seed: YERMCNILKGKFQTA
YERMYNIAKAKFQTA

SEQ ID NO: 136270 - protein, 15 aa, Artificial Sequence
  Description of Artificial Sequence: Synthetic peptide
  Seed: YERMCNILKGKFQTA
YERMYNIAKAKFSTA

SEQ ID NO: 136271 - protein, 15 aa, Artificial Sequence
  Description of Artificial Sequence: Synthetic peptide
  Seed: YERMCNILKGKFQTA
YERMYNIAKAKFTTA

SEQ ID NO: 136272 - protein, 15 aa, Artificial Sequence
  Description of Artificial Sequence: Synthetic peptide
  Seed: YERMCNILKGKFQTA
YERMYNIAKAKFVTA

SEQ ID NO: 136273 - protein, 15 aa, Artificial Sequence
  Description of Artificial Sequence: Synthetic peptide
  Seed: YERMCNILKGKFQTA
YERMYNIAKAKFWTA

SEQ ID NO: 136274 - protein, 15 aa, Artificial Sequence
  Description of Artificial Sequence: Synthetic peptide
  Seed: YERMCNILKGKFQTA
YERMYNIAKAKFYTA

SEQ ID NO: 136275 - protein, 15 aa, Artificial Sequence
  Description of Artificial Sequence: Synthetic peptide
  Seed: YERMCNILKGKFQTA
YERMYNIAKGKFATA

SEQ ID NO: 136276 - protein, 15 aa, Artificial Sequence
  Description of Artificial Sequence: Synthetic peptide
  Seed: YERMCNILKGKFQTA
YERMYNIAKGKFCTA

SEQ ID NO: 136277 - protein, 15 aa, Artificial Sequence
  Description of Artificial Sequence: Synthetic peptide
  Seed: YERMCNILKGKFQTA
YERMYNIAKGKFFTA

SEQ ID NO: 136278 - protein, 15 aa, Artificial Sequence
  Description of Artificial Sequence: Synthetic peptide
  Seed: YERMCNILKGKFQTA
YERMYNIAKGKFGTA

SEQ ID NO: 136279 - protein, 15 aa, Artificial Sequence
  Description of Artificial Sequence: Synthetic peptide
  Seed: YERMCNILKGKFQTA
YERMYNIAKGKFITA

SEQ ID NO: 136280 - protein, 15 aa, Artificial Sequence
  Description of Artificial Sequence: Synthetic peptide
  Seed: YERMCNILKGKFQTA
YERMYNIAKGKFLTA

SEQ ID NO: 136281 - protein, 15 aa, Artificial Sequence
  Description of Artificial Sequence: Synthetic peptide
  Seed: YERMCNILKGKFQTA
YERMYNIAKGKFMTA

SEQ ID NO: 136282 - protein, 15 aa, Artificial Sequence
  Description of Artificial Sequence: Synthetic peptide
  Seed: YERMCNILKGKFQTA
YERMYNIAKGKFNTA

SEQ ID NO: 136283 - protein, 15 aa, Artificial Sequence
  Description of Artificial Sequence: Synthetic peptide
  Seed: YERMCNILKGKFQTA
YERMYNIAKGKFSTA

SEQ ID NO: 136284 - protein, 15 aa, Artificial Sequence
  Description of Artificial Sequence: Synthetic peptide
  Seed: YERMCNILKGKFQTA
YERMYNIAKGKFTTA

SEQ ID NO: 136285 - protein, 15 aa, Artificial Sequence
  Description of Artificial Sequence: Synthetic peptide
  Seed: YERMCNILKGKFQTA
YERMYNIAKGKFVTA

SEQ ID NO: 136286 - protein, 15 aa, Artificial Sequence
  Description of Artificial Sequence: Synthetic peptide
  Seed: YERMCNILKGKFQTA
YERMYNIAKIKFATA

SEQ ID NO: 136287 - protein, 15 aa, Artificial Sequence
  Description of Artificial Sequence: Synthetic peptide
  Seed: YERMCNILKGKFQTA
YERMYNIAKIKFITA

SEQ ID NO: 136288 - protein, 15 aa, Artificial Sequence
  Description of Artificial Sequence: Synthetic peptide
  Seed: YERMCNILKGKFQTA
YERMYNIAKIKFLTA

SEQ ID NO: 136289 - protein, 15 aa, Artificial Sequence
  Description of Artificial Sequence: Synthetic peptide
  Seed: YERMCNILKGKFQTA
YERMYNIAKIKFMTA

SEQ ID NO: 136290 - protein, 15 aa, Artificial Sequence
  Description of Artificial Sequence: Synthetic peptide
  Seed: YERMCNILKGKFQTA
YERMYNIAKIKFNTA

SEQ ID NO: 136291 - protein, 15 aa, Artificial Sequence
  Description of Artificial Sequence: Synthetic peptide
  Seed: YERMCNILKGKFQTA
YERMYNIAKIKFSTA

SEQ ID NO: 136292 - protein, 15 aa, Artificial Sequence
  Description of Artificial Sequence: Synthetic peptide
  Seed: YERMCNILKGKFQTA
YERMYNIAKIKFTTA

SEQ ID NO: 136293 - protein, 15 aa, Artificial Sequence
  Description of Artificial Sequence: Synthetic peptide
  Seed: YERMCNILKGKFQTA
YERMYNIAKIKFVTA

SEQ ID NO: 136294 - protein, 15 aa, Artificial Sequence
  Description of Artificial Sequence: Synthetic peptide
  Seed: YERMCNILKGKFQTA
YERMYNIAKMKFITA

SEQ ID NO: 136295 - protein, 15 aa, Artificial Sequence
  Description of Artificial Sequence: Synthetic peptide
  Seed: YERMCNILKGKFQTA
YERMYNIAKMKFLTA

SEQ ID NO: 136296 - protein, 15 aa, Artificial Sequence
  Description of Artificial Sequence: Synthetic peptide
  Seed: YERMCNILKGKFQTA
YERMYNIAKMKFVTA

SEQ ID NO: 136297 - protein, 15 aa, Artificial Sequence
  Description of Artificial Sequence: Synthetic peptide
  Seed: YERMCNILKGKFQTA
YERMYNIAKNKFATA

SEQ ID NO: 136298 - protein, 15 aa, Artificial Sequence
  Description of Artificial Sequence: Synthetic peptide
  Seed: YERMCNILKGKFQTA
YERMYNIAKNKFFTA

SEQ ID NO: 136299 - protein, 15 aa, Artificial Sequence
  Description of Artificial Sequence: Synthetic peptide
  Seed: YERMCNILKGKFQTA
YERMYNIAKNKFITA

SEQ ID NO: 136300 - protein, 15 aa, Artificial Sequence
  Description of Artificial Sequence: Synthetic peptide
  Seed: YERMCNILKGKFQTA
YERMYNIAKNKFLTA

SEQ ID NO: 136301 - protein, 15 aa, Artificial Sequence
  Description of Artificial Sequence: Synthetic peptide
  Seed: YERMCNILKGKFQTA
YERMYNIAKNKFMTA

SEQ ID NO: 136302 - protein, 15 aa, Artificial Sequence
  Description of Artificial Sequence: Synthetic peptide
  Seed: YERMCNILKGKFQTA
YERMYNIAKNKFSTA

SEQ ID NO: 136303 - protein, 15 aa, Artificial Sequence
  Description of Artificial Sequence: Synthetic peptide
  Seed: YERMCNILKGKFQTA
YERMYNIAKNKFTTA

SEQ ID NO: 136304 - protein, 15 aa, Artificial Sequence
  Description of Artificial Sequence: Synthetic peptide
  Seed: YERMCNILKGKFQTA
YERMYNIAKNKFVTA

SEQ ID NO: 136305 - protein, 15 aa, Artificial Sequence
  Description of Artificial Sequence: Synthetic peptide
  Seed: YERMCNILKGKFQTA
YERMYNIAKPKFATA

SEQ ID NO: 136306 - protein, 15 aa, Artificial Sequence
  Description of Artificial Sequence: Synthetic peptide
  Seed: YERMCNILKGKFQTA
YERMYNIAKPKFFTA

SEQ ID NO: 136307 - protein, 15 aa, Artificial Sequence
  Description of Artificial Sequence: Synthetic peptide
  Seed: YERMCNILKGKFQTA
YERMYNIAKPKFGTA

SEQ ID NO: 136308 - protein, 15 aa, Artificial Sequence
  Description of Artificial Sequence: Synthetic peptide
  Seed: YERMCNILKGKFQTA
YERMYNIAKPKFITA

SEQ ID NO: 136309 - protein, 15 aa, Artificial Sequence
  Description of Artificial Sequence: Synthetic peptide
  Seed: YERMCNILKGKFQTA
YERMYNIAKPKFLTA

SEQ ID NO: 136310 - protein, 15 aa, Artificial Sequence
  Description of Artificial Sequence: Synthetic peptide
  Seed: YERMCNILKGKFQTA
YERMYNIAKPKFMTA

SEQ ID NO: 136311 - protein, 15 aa, Artificial Sequence
  Description of Artificial Sequence: Synthetic peptide
  Seed: YERMCNILKGKFQTA
YERMYNIAKPKFNTA

SEQ ID NO: 136312 - protein, 15 aa, Artificial Sequence
  Description of Artificial Sequence: Synthetic peptide
  Seed: YERMCNILKGKFQTA
YERMYNIAKPKFSTA

SEQ ID NO: 136313 - protein, 15 aa, Artificial Sequence
  Description of Artificial Sequence: Synthetic peptide
  Seed: YERMCNILKGKFQTA
YERMYNIAKPKFTTA

SEQ ID NO: 136314 - protein, 15 aa, Artificial Sequence
  Description of Artificial Sequence: Synthetic peptide
  Seed: YERMCNILKGKFQTA
YERMYNIAKPKFVTA

SEQ ID NO: 136315 - protein, 15 aa, Artificial Sequence
  Description of Artificial Sequence: Synthetic peptide
  Seed: YERMCNILKGKFQTA
YERMYNIAKSKFATA

SEQ ID NO: 136316 - protein, 15 aa, Artificial Sequence
  Description of Artificial Sequence: Synthetic peptide
  Seed: YERMCNILKGKFQTA
YERMYNIAKSKFCTA

SEQ ID NO: 136317 - protein, 15 aa, Artificial Sequence
  Description of Artificial Sequence: Synthetic peptide
  Seed: YERMCNILKGKFQTA
YERMYNIAKSKFFTA

SEQ ID NO: 136318 - protein, 15 aa, Artificial Sequence
  Description of Artificial Sequence: Synthetic peptide
  Seed: YERMCNILKGKFQTA
YERMYNIAKSKFGTA

SEQ ID NO: 136319 - protein, 15 aa, Artificial Sequence
  Description of Artificial Sequence: Synthetic peptide
  Seed: YERMCNILKGKFQTA
YERMYNIAKSKFITA

SEQ ID NO: 136320 - protein, 15 aa, Artificial Sequence
  Description of Artificial Sequence: Synthetic peptide
  Seed: YERMCNILKGKFQTA
YERMYNIAKSKFLTA

SEQ ID NO: 136321 - protein, 15 aa, Artificial Sequence
  Description of Artificial Sequence: Synthetic peptide
  Seed: YERMCNILKGKFQTA
YERMYNIAKSKFMTA

SEQ ID NO: 136322 - protein, 15 aa, Artificial Sequence
  Description of Artificial Sequence: Synthetic peptide
  Seed: YERMCNILKGKFQTA
YERMYNIAKSKFNTA

SEQ ID NO: 136323 - protein, 15 aa, Artificial Sequence
  Description of Artificial Sequence: Synthetic peptide
  Seed: YERMCNILKGKFQTA
YERMYNIAKSKFSTA

SEQ ID NO: 136324 - protein, 15 aa, Artificial Sequence
  Description of Artificial Sequence: Synthetic peptide
  Seed: YERMCNILKGKFQTA
YERMYNIAKSKFTTA

SEQ ID NO: 136325 - protein, 15 aa, Artificial Sequence
  Description of Artificial Sequence: Synthetic peptide
  Seed: YERMCNILKGKFQTA
YERMYNIAKSKFVTA

SEQ ID NO: 136326 - protein, 15 aa, Artificial Sequence
  Description of Artificial Sequence: Synthetic peptide
  Seed: YERMCNILKGKFQTA
YERMYNIAKTKFATA

SEQ ID NO: 136327 - protein, 15 aa, Artificial Sequence
  Description of Artificial Sequence: Synthetic peptide
  Seed: YERMCNILKGKFQTA
YERMYNIAKTKFITA

SEQ ID NO: 136328 - protein, 15 aa, Artificial Sequence
  Description of Artificial Sequence: Synthetic peptide
  Seed: YERMCNILKGKFQTA
YERMYNIAKTKFLTA

SEQ ID NO: 136329 - protein, 15 aa, Artificial Sequence
  Description of Artificial Sequence: Synthetic peptide
  Seed: YERMCNILKGKFQTA
YERMYNIAKTKFMTA

SEQ ID NO: 136330 - protein, 15 aa, Artificial Sequence
  Description of Artificial Sequence: Synthetic peptide
  Seed: YERMCNILKGKFQTA
YERMYNIAKTKFNTA

SEQ ID NO: 136331 - protein, 15 aa, Artificial Sequence
  Description of Artificial Sequence: Synthetic peptide
  Seed: YERMCNILKGKFQTA
YERMYNIAKTKFSTA

SEQ ID NO: 136332 - protein, 15 aa, Artificial Sequence
  Description of Artificial Sequence: Synthetic peptide
  Seed: YERMCNILKGKFQTA
YERMYNIAKTKFTTA

SEQ ID NO: 136333 - protein, 15 aa, Artificial Sequence
  Description of Artificial Sequence: Synthetic peptide
  Seed: YERMCNILKGKFQTA
YERMYNIAKTKFVTA

SEQ ID NO: 136334 - protein, 15 aa, Artificial Sequence
  Description of Artificial Sequence: Synthetic peptide
  Seed: YERMCNILKGKFQTA
YERMYNIAKVKFATA

SEQ ID NO: 136335 - protein, 15 aa, Artificial Sequence
  Description of Artificial Sequence: Synthetic peptide
  Seed: YERMCNILKGKFQTA
YERMYNIAKVKFITA

SEQ ID NO: 136336 - protein, 15 aa, Artificial Sequence
  Description of Artificial Sequence: Synthetic peptide
  Seed: YERMCNILKGKFQTA
YERMYNIAKVKFLTA

SEQ ID NO: 136337 - protein, 15 aa, Artificial Sequence
  Description of Artificial Sequence: Synthetic peptide
  Seed: YERMCNILKGKFQTA
YERMYNIAKVKFMTA

SEQ ID NO: 136338 - protein, 15 aa, Artificial Sequence
  Description of Artificial Sequence: Synthetic peptide
  Seed: YERMCNILKGKFQTA
YERMYNIAKVKFNTA

SEQ ID NO: 136339 - protein, 15 aa, Artificial Sequence
  Description of Artificial Sequence: Synthetic peptide
  Seed: YERMCNILKGKFQTA
YERMYNIAKVKFSTA

SEQ ID NO: 136340 - protein, 15 aa, Artificial Sequence
  Description of Artificial Sequence: Synthetic peptide
  Seed: YERMCNILKGKFQTA
YERMYNIAKVKFTTA

SEQ ID NO: 136341 - protein, 15 aa, Artificial Sequence
  Description of Artificial Sequence: Synthetic peptide
  Seed: YERMCNILKGKFQTA
YERMYNIAKVKFVTA

SEQ ID NO: 136342 - protein, 15 aa, Artificial Sequence
  Description of Artificial Sequence: Synthetic peptide
  Seed: YERMCNILKGKFQTA
YERMYNICKAKFATA

SEQ ID NO: 136343 - protein, 15 aa, Artificial Sequence
  Description of Artificial Sequence: Synthetic peptide
  Seed: YERMCNILKGKFQTA
YERMYNICKAKFITA

SEQ ID NO: 136344 - protein, 15 aa, Artificial Sequence
  Description of Artificial Sequence: Synthetic peptide
  Seed: YERMCNILKGKFQTA
YERMYNICKAKFLTA

SEQ ID NO: 136345 - protein, 15 aa, Artificial Sequence
  Description of Artificial Sequence: Synthetic peptide
  Seed: YERMCNILKGKFQTA
YERMYNICKAKFVTA

SEQ ID NO: 136346 - protein, 15 aa, Artificial Sequence
  Description of Artificial Sequence: Synthetic peptide
  Seed: YERMCNILKGKFQTA
YERMYNICKGKFITA

SEQ ID NO: 136347 - protein, 15 aa, Artificial Sequence
  Description of Artificial Sequence: Synthetic peptide
  Seed: YERMCNILKGKFQTA
YERMYNICKGKFLTA

SEQ ID NO: 136348 - protein, 15 aa, Artificial Sequence
  Description of Artificial Sequence: Synthetic peptide
  Seed: YERMCNILKGKFQTA
YERMYNICKGKFVTA

SEQ ID NO: 136349 - protein, 15 aa, Artificial Sequence
  Description of Artificial Sequence: Synthetic peptide
  Seed: YERMCNILKGKFQTA
YERMYNICKSKFITA

SEQ ID NO: 136350 - protein, 15 aa, Artificial Sequence
  Description of Artificial Sequence: Synthetic peptide
  Seed: YERMCNILKGKFQTA
YERMYNICKSKFLTA

SEQ ID NO: 136351 - protein, 15 aa, Artificial Sequence
  Description of Artificial Sequence: Synthetic peptide
  Seed: YERMCNILKGKFQTA
YERMYNICKSKFVTA

SEQ ID NO: 136352 - protein, 15 aa, Artificial Sequence
  Description of Artificial Sequence: Synthetic peptide
  Seed: YERMCNILKGKFQTA
YERMYNIDKAKFLTA

SEQ ID NO: 136353 - protein, 15 aa, Artificial Sequence
  Description of Artificial Sequence: Synthetic peptide
  Seed: YERMCNILKGKFQTA
YERMYNIEKAKFATA

SEQ ID NO: 136354 - protein, 15 aa, Artificial Sequence
  Description of Artificial Sequence: Synthetic peptide
  Seed: YERMCNILKGKFQTA
YERMYNIEKAKFITA

SEQ ID NO: 136355 - protein, 15 aa, Artificial Sequence
  Description of Artificial Sequence: Synthetic peptide
  Seed: YERMCNILKGKFQTA
YERMYNIEKAKFLTA

SEQ ID NO: 136356 - protein, 15 aa, Artificial Sequence
  Description of Artificial Sequence: Synthetic peptide
  Seed: YERMCNILKGKFQTA
YERMYNIEKAKFMTA

SEQ ID NO: 136357 - protein, 15 aa, Artificial Sequence
  Description of Artificial Sequence: Synthetic peptide
  Seed: YERMCNILKGKFQTA
YERMYNIEKAKFSTA

SEQ ID NO: 136358 - protein, 15 aa, Artificial Sequence
  Description of Artificial Sequence: Synthetic peptide
  Seed: YERMCNILKGKFQTA
YERMYNIEKAKFTTA

SEQ ID NO: 136359 - protein, 15 aa, Artificial Sequence
  Description of Artificial Sequence: Synthetic peptide
  Seed: YERMCNILKGKFQTA
YERMYNIEKAKFVTA

SEQ ID NO: 136360 - protein, 15 aa, Artificial Sequence
  Description of Artificial Sequence: Synthetic peptide
  Seed: YERMCNILKGKFQTA
YERMYNIEKGKFATA

SEQ ID NO: 136361 - protein, 15 aa, Artificial Sequence
  Description of Artificial Sequence: Synthetic peptide
  Seed: YERMCNILKGKFQTA
YERMYNIEKGKFITA

SEQ ID NO: 136362 - protein, 15 aa, Artificial Sequence
  Description of Artificial Sequence: Synthetic peptide
  Seed: YERMCNILKGKFQTA
YERMYNIEKGKFLTA

SEQ ID NO: 136363 - protein, 15 aa, Artificial Sequence
  Description of Artificial Sequence: Synthetic peptide
  Seed: YERMCNILKGKFQTA
YERMYNIEKGKFMTA

SEQ ID NO: 136364 - protein, 15 aa, Artificial Sequence
  Description of Artificial Sequence: Synthetic peptide
  Seed: YERMCNILKGKFQTA
YERMYNIEKGKFTTA

SEQ ID NO: 136365 - protein, 15 aa, Artificial Sequence
  Description of Artificial Sequence: Synthetic peptide
  Seed: YERMCNILKGKFQTA
YERMYNIEKGKFVTA

SEQ ID NO: 136366 - protein, 15 aa, Artificial Sequence
  Description of Artificial Sequence: Synthetic peptide
  Seed: YERMCNILKGKFQTA
YERMYNIEKNKFITA

SEQ ID NO: 136367 - protein, 15 aa, Artificial Sequence
  Description of Artificial Sequence: Synthetic peptide
  Seed: YERMCNILKGKFQTA
YERMYNIEKNKFLTA

SEQ ID NO: 136368 - protein, 15 aa, Artificial Sequence
  Description of Artificial Sequence: Synthetic peptide
  Seed: YERMCNILKGKFQTA
YERMYNIEKNKFVTA

SEQ ID NO: 136369 - protein, 15 aa, Artificial Sequence
  Description of Artificial Sequence: Synthetic peptide
  Seed: YERMCNILKGKFQTA
YERMYNIEKPKFATA

SEQ ID NO: 136370 - protein, 15 aa, Artificial Sequence
  Description of Artificial Sequence: Synthetic peptide
  Seed: YERMCNILKGKFQTA
YERMYNIEKPKFITA

SEQ ID NO: 136371 - protein, 15 aa, Artificial Sequence
  Description of Artificial Sequence: Synthetic peptide
  Seed: YERMCNILKGKFQTA
YERMYNIEKPKFLTA

SEQ ID NO: 136372 - protein, 15 aa, Artificial Sequence
  Description of Artificial Sequence: Synthetic peptide
  Seed: YERMCNILKGKFQTA
YERMYNIEKPKFVTA

SEQ ID NO: 136373 - protein, 15 aa, Artificial Sequence
  Description of Artificial Sequence: Synthetic peptide
  Seed: YERMCNILKGKFQTA
YERMYNIEKSKFATA

SEQ ID NO: 136374 - protein, 15 aa, Artificial Sequence
  Description of Artificial Sequence: Synthetic peptide
  Seed: YERMCNILKGKFQTA
YERMYNIEKSKFITA

SEQ ID NO: 136375 - protein, 15 aa, Artificial Sequence
  Description of Artificial Sequence: Synthetic peptide
  Seed: YERMCNILKGKFQTA
YERMYNIEKSKFLTA

SEQ ID NO: 136376 - protein, 15 aa, Artificial Sequence
  Description of Artificial Sequence: Synthetic peptide
  Seed: YERMCNILKGKFQTA
YERMYNIEKSKFMTA

SEQ ID NO: 136377 - protein, 15 aa, Artificial Sequence
  Description of Artificial Sequence: Synthetic peptide
  Seed: YERMCNILKGKFQTA
YERMYNIEKSKFTTA

SEQ ID NO: 136378 - protein, 15 aa, Artificial Sequence
  Description of Artificial Sequence: Synthetic peptide
  Seed: YERMCNILKGKFQTA
YERMYNIEKSKFVTA

SEQ ID NO: 136379 - protein, 15 aa, Artificial Sequence
  Description of Artificial Sequence: Synthetic peptide
  Seed: YERMCNILKGKFQTA
YERMYNIEKTKFATA

SEQ ID NO: 136380 - protein, 15 aa, Artificial Sequence
  Description of Artificial Sequence: Synthetic peptide
  Seed: YERMCNILKGKFQTA
YERMYNIEKTKFITA

SEQ ID NO: 136381 - protein, 15 aa, Artificial Sequence
  Description of Artificial Sequence: Synthetic peptide
  Seed: YERMCNILKGKFQTA
YERMYNIEKTKFLTA

SEQ ID NO: 136382 - protein, 15 aa, Artificial Sequence
  Description of Artificial Sequence: Synthetic peptide
  Seed: YERMCNILKGKFQTA
YERMYNIEKTKFVTA

SEQ ID NO: 136383 - protein, 15 aa, Artificial Sequence
  Description of Artificial Sequence: Synthetic peptide
  Seed: YERMCNILKGKFQTA
YERMYNIFKAKFATA

SEQ ID NO: 136384 - protein, 15 aa, Artificial Sequence
  Description of Artificial Sequence: Synthetic peptide
  Seed: YERMCNILKGKFQTA
YERMYNIFKAKFITA

SEQ ID NO: 136385 - protein, 15 aa, Artificial Sequence
  Description of Artificial Sequence: Synthetic peptide
  Seed: YERMCNILKGKFQTA
YERMYNIFKAKFLTA

SEQ ID NO: 136386 - protein, 15 aa, Artificial Sequence
  Description of Artificial Sequence: Synthetic peptide
  Seed: YERMCNILKGKFQTA
YERMYNIFKAKFMTA

SEQ ID NO: 136387 - protein, 15 aa, Artificial Sequence
  Description of Artificial Sequence: Synthetic peptide
  Seed: YERMCNILKGKFQTA
YERMYNIFKAKFSTA

SEQ ID NO: 136388 - protein, 15 aa, Artificial Sequence
  Description of Artificial Sequence: Synthetic peptide
  Seed: YERMCNILKGKFQTA
YERMYNIFKAKFTTA

SEQ ID NO: 136389 - protein, 15 aa, Artificial Sequence
  Description of Artificial Sequence: Synthetic peptide
  Seed: YERMCNILKGKFQTA
YERMYNIFKAKFVTA

SEQ ID NO: 136390 - protein, 15 aa, Artificial Sequence
  Description of Artificial Sequence: Synthetic peptide
  Seed: YERMCNILKGKFQTA
YERMYNIFKGKFATA

SEQ ID NO: 136391 - protein, 15 aa, Artificial Sequence
  Description of Artificial Sequence: Synthetic peptide
  Seed: YERMCNILKGKFQTA
YERMYNIFKGKFITA

SEQ ID NO: 136392 - protein, 15 aa, Artificial Sequence
  Description of Artificial Sequence: Synthetic peptide
  Seed: YERMCNILKGKFQTA
YERMYNIFKGKFLTA

SEQ ID NO: 136393 - protein, 15 aa, Artificial Sequence
  Description of Artificial Sequence: Synthetic peptide
  Seed: YERMCNILKGKFQTA
YERMYNIFKGKFMTA

SEQ ID NO: 136394 - protein, 15 aa, Artificial Sequence
  Description of Artificial Sequence: Synthetic peptide
  Seed: YERMCNILKGKFQTA
YERMYNIFKGKFVTA

SEQ ID NO: 136395 - protein, 15 aa, Artificial Sequence
  Description of Artificial Sequence: Synthetic peptide
  Seed: YERMCNILKGKFQTA
YERMYNIFKNKFVTA

SEQ ID NO: 136396 - protein, 15 aa, Artificial Sequence
  Description of Artificial Sequence: Synthetic peptide
  Seed: YERMCNILKGKFQTA
YERMYNIFKPKFATA

SEQ ID NO: 136397 - protein, 15 aa, Artificial Sequence
  Description of Artificial Sequence: Synthetic peptide
  Seed: YERMCNILKGKFQTA
YERMYNIFKPKFITA

SEQ ID NO: 136398 - protein, 15 aa, Artificial Sequence
  Description of Artificial Sequence: Synthetic peptide
  Seed: YERMCNILKGKFQTA
YERMYNIFKPKFLTA

SEQ ID NO: 136399 - protein, 15 aa, Artificial Sequence
  Description of Artificial Sequence: Synthetic peptide
  Seed: YERMCNILKGKFQTA
YERMYNIFKPKFVTA

SEQ ID NO: 136400 - protein, 15 aa, Artificial Sequence
  Description of Artificial Sequence: Synthetic peptide
  Seed: YERMCNILKGKFQTA
YERMYNIFKSKFATA

SEQ ID NO: 136401 - protein, 15 aa, Artificial Sequence
  Description of Artificial Sequence: Synthetic peptide
  Seed: YERMCNILKGKFQTA
YERMYNIFKSKFITA

SEQ ID NO: 136402 - protein, 15 aa, Artificial Sequence
  Description of Artificial Sequence: Synthetic peptide
  Seed: YERMCNILKGKFQTA
YERMYNIFKSKFLTA

SEQ ID NO: 136403 - protein, 15 aa, Artificial Sequence
  Description of Artificial Sequence: Synthetic peptide
  Seed: YERMCNILKGKFQTA
YERMYNIFKSKFMTA

SEQ ID NO: 136404 - protein, 15 aa, Artificial Sequence
  Description of Artificial Sequence: Synthetic peptide
  Seed: YERMCNILKGKFQTA
YERMYNIFKSKFVTA

SEQ ID NO: 136405 - protein, 15 aa, Artificial Sequence
  Description of Artificial Sequence: Synthetic peptide
  Seed: YERMCNILKGKFQTA
YERMYNIFKTKFATA

SEQ ID NO: 136406 - protein, 15 aa, Artificial Sequence
  Description of Artificial Sequence: Synthetic peptide
  Seed: YERMCNILKGKFQTA
YERMYNIFKTKFITA

SEQ ID NO: 136407 - protein, 15 aa, Artificial Sequence
  Description of Artificial Sequence: Synthetic peptide
  Seed: YERMCNILKGKFQTA
YERMYNIFKTKFLTA

SEQ ID NO: 136408 - protein, 15 aa, Artificial Sequence
  Description of Artificial Sequence: Synthetic peptide
  Seed: YERMCNILKGKFQTA
YERMYNIFKTKFVTA

SEQ ID NO: 136409 - protein, 15 aa, Artificial Sequence
  Description of Artificial Sequence: Synthetic peptide
  Seed: YERMCNILKGKFQTA
YERMYNIGKAKFATA

SEQ ID NO: 136410 - protein, 15 aa, Artificial Sequence
  Description of Artificial Sequence: Synthetic peptide
  Seed: YERMCNILKGKFQTA
YERMYNIGKAKFITA

SEQ ID NO: 136411 - protein, 15 aa, Artificial Sequence
  Description of Artificial Sequence: Synthetic peptide
  Seed: YERMCNILKGKFQTA
YERMYNIGKAKFLTA

SEQ ID NO: 136412 - protein, 15 aa, Artificial Sequence
  Description of Artificial Sequence: Synthetic peptide
  Seed: YERMCNILKGKFQTA
YERMYNIGKAKFMTA

SEQ ID NO: 136413 - protein, 15 aa, Artificial Sequence
  Description of Artificial Sequence: Synthetic peptide
  Seed: YERMCNILKGKFQTA
YERMYNIGKAKFSTA

SEQ ID NO: 136414 - protein, 15 aa, Artificial Sequence
  Description of Artificial Sequence: Synthetic peptide
  Seed: YERMCNILKGKFQTA
YERMYNIGKAKFTTA

SEQ ID NO: 136415 - protein, 15 aa, Artificial Sequence
  Description of Artificial Sequence: Synthetic peptide
  Seed: YERMCNILKGKFQTA
YERMYNIGKAKFVTA

SEQ ID NO: 136416 - protein, 15 aa, Artificial Sequence
  Description of Artificial Sequence: Synthetic peptide
  Seed: YERMCNILKGKFQTA
YERMYNIGKGKFATA

SEQ ID NO: 136417 - protein, 15 aa, Artificial Sequence
  Description of Artificial Sequence: Synthetic peptide
  Seed: YERMCNILKGKFQTA
YERMYNIGKGKFITA

SEQ ID NO: 136418 - protein, 15 aa, Artificial Sequence
  Description of Artificial Sequence: Synthetic peptide
  Seed: YERMCNILKGKFQTA
YERMYNIGKGKFLTA

SEQ ID NO: 136419 - protein, 15 aa, Artificial Sequence
  Description of Artificial Sequence: Synthetic peptide
  Seed: YERMCNILKGKFQTA
YERMYNIGKGKFMTA

SEQ ID NO: 136420 - protein, 15 aa, Artificial Sequence
  Description of Artificial Sequence: Synthetic peptide
  Seed: YERMCNILKGKFQTA
YERMYNIGKGKFVTA

SEQ ID NO: 136421 - protein, 15 aa, Artificial Sequence
  Description of Artificial Sequence: Synthetic peptide
  Seed: YERMCNILKGKFQTA
YERMYNIGKNKFITA

SEQ ID NO: 136422 - protein, 15 aa, Artificial Sequence
  Description of Artificial Sequence: Synthetic peptide
  Seed: YERMCNILKGKFQTA
YERMYNIGKNKFLTA

SEQ ID NO: 136423 - protein, 15 aa, Artificial Sequence
  Description of Artificial Sequence: Synthetic peptide
  Seed: YERMCNILKGKFQTA
YERMYNIGKNKFVTA

SEQ ID NO: 136424 - protein, 15 aa, Artificial Sequence
  Description of Artificial Sequence: Synthetic peptide
  Seed: YERMCNILKGKFQTA
YERMYNIGKPKFATA

SEQ ID NO: 136425 - protein, 15 aa, Artificial Sequence
  Description of Artificial Sequence: Synthetic peptide
  Seed: YERMCNILKGKFQTA
YERMYNIGKPKFITA

SEQ ID NO: 136426 - protein, 15 aa, Artificial Sequence
  Description of Artificial Sequence: Synthetic peptide
  Seed: YERMCNILKGKFQTA
YERMYNIGKPKFLTA

SEQ ID NO: 136427 - protein, 15 aa, Artificial Sequence
  Description of Artificial Sequence: Synthetic peptide
  Seed: YERMCNILKGKFQTA
YERMYNIGKPKFMTA

SEQ ID NO: 136428 - protein, 15 aa, Artificial Sequence
  Description of Artificial Sequence: Synthetic peptide
  Seed: YERMCNILKGKFQTA
YERMYNIGKPKFVTA

SEQ ID NO: 136429 - protein, 15 aa, Artificial Sequence
  Description of Artificial Sequence: Synthetic peptide
  Seed: YERMCNILKGKFQTA
YERMYNIGKSKFATA

SEQ ID NO: 136430 - protein, 15 aa, Artificial Sequence
  Description of Artificial Sequence: Synthetic peptide
  Seed: YERMCNILKGKFQTA
YERMYNIGKSKFITA

SEQ ID NO: 136431 - protein, 15 aa, Artificial Sequence
  Description of Artificial Sequence: Synthetic peptide
  Seed: YERMCNILKGKFQTA
YERMYNIGKSKFLTA

SEQ ID NO: 136432 - protein, 15 aa, Artificial Sequence
  Description of Artificial Sequence: Synthetic peptide
  Seed: YERMCNILKGKFQTA
YERMYNIGKSKFMTA

SEQ ID NO: 136433 - protein, 15 aa, Artificial Sequence
  Description of Artificial Sequence: Synthetic peptide
  Seed: YERMCNILKGKFQTA
YERMYNIGKSKFVTA

SEQ ID NO: 136434 - protein, 15 aa, Artificial Sequence
  Description of Artificial Sequence: Synthetic peptide
  Seed: YERMCNILKGKFQTA
YERMYNIGKTKFITA

SEQ ID NO: 136435 - protein, 15 aa, Artificial Sequence
  Description of Artificial Sequence: Synthetic peptide
  Seed: YERMCNILKGKFQTA
YERMYNIGKTKFLTA

SEQ ID NO: 136436 - protein, 15 aa, Artificial Sequence
  Description of Artificial Sequence: Synthetic peptide
  Seed: YERMCNILKGKFQTA
YERMYNIGKTKFVTA

SEQ ID NO: 136437 - protein, 15 aa, Artificial Sequence
  Description of Artificial Sequence: Synthetic peptide
  Seed: YERMCNILKGKFQTA
YERMYNIGKVKFITA

SEQ ID NO: 136438 - protein, 15 aa, Artificial Sequence
  Description of Artificial Sequence: Synthetic peptide
  Seed: YERMCNILKGKFQTA
YERMYNIGKVKFLTA

SEQ ID NO: 136439 - protein, 15 aa, Artificial Sequence
  Description of Artificial Sequence: Synthetic peptide
  Seed: YERMCNILKGKFQTA
YERMYNIGKVKFVTA

SEQ ID NO: 136440 - protein, 15 aa, Artificial Sequence
  Description of Artificial Sequence: Synthetic peptide
  Seed: YERMCNILKGKFQTA
YERMYNIHKAKFATA

SEQ ID NO: 136441 - protein, 15 aa, Artificial Sequence
  Description of Artificial Sequence: Synthetic peptide
  Seed: YERMCNILKGKFQTA
YERMYNIHKAKFITA

SEQ ID NO: 136442 - protein, 15 aa, Artificial Sequence
  Description of Artificial Sequence: Synthetic peptide
  Seed: YERMCNILKGKFQTA
YERMYNIHKAKFLTA

SEQ ID NO: 136443 - protein, 15 aa, Artificial Sequence
  Description of Artificial Sequence: Synthetic peptide
  Seed: YERMCNILKGKFQTA
YERMYNIHKAKFVTA

SEQ ID NO: 136444 - protein, 15 aa, Artificial Sequence
  Description of Artificial Sequence: Synthetic peptide
  Seed: YERMCNILKGKFQTA
YERMYNIHKGKFLTA

SEQ ID NO: 136445 - protein, 15 aa, Artificial Sequence
  Description of Artificial Sequence: Synthetic peptide
  Seed: YERMCNILKGKFQTA
YERMYNIHKGKFVTA

SEQ ID NO: 136446 - protein, 15 aa, Artificial Sequence
  Description of Artificial Sequence: Synthetic peptide
  Seed: YERMCNILKGKFQTA
YERMYNIHKSKFLTA

SEQ ID NO: 136447 - protein, 15 aa, Artificial Sequence
  Description of Artificial Sequence: Synthetic peptide
  Seed: YERMCNILKGKFQTA
YERMYNIHKSKFVTA

SEQ ID NO: 136448 - protein, 15 aa, Artificial Sequence
  Description of Artificial Sequence: Synthetic peptide
  Seed: YERMCNILKGKFQTA
YERMYNIIKAKFATA

SEQ ID NO: 136449 - protein, 15 aa, Artificial Sequence
  Description of Artificial Sequence: Synthetic peptide
  Seed: YERMCNILKGKFQTA
YERMYNIIKAKFCTA

SEQ ID NO: 136450 - protein, 15 aa, Artificial Sequence
  Description of Artificial Sequence: Synthetic peptide
  Seed: YERMCNILKGKFQTA
YERMYNIIKAKFFTA

SEQ ID NO: 136451 - protein, 15 aa, Artificial Sequence
  Description of Artificial Sequence: Synthetic peptide
  Seed: YERMCNILKGKFQTA
YERMYNIIKAKFGTA

SEQ ID NO: 136452 - protein, 15 aa, Artificial Sequence
  Description of Artificial Sequence: Synthetic peptide
  Seed: YERMCNILKGKFQTA
YERMYNIIKAKFHTA

SEQ ID NO: 136453 - protein, 15 aa, Artificial Sequence
  Description of Artificial Sequence: Synthetic peptide
  Seed: YERMCNILKGKFQTA
YERMYNIIKAKFITA

SEQ ID NO: 136454 - protein, 15 aa, Artificial Sequence
  Description of Artificial Sequence: Synthetic peptide
  Seed: YERMCNILKGKFQTA
YERMYNIIKAKFLTA

SEQ ID NO: 136455 - protein, 15 aa, Artificial Sequence
  Description of Artificial Sequence: Synthetic peptide
  Seed: YERMCNILKGKFQTA
YERMYNIIKAKFMTA

SEQ ID NO: 136456 - protein, 15 aa, Artificial Sequence
  Description of Artificial Sequence: Synthetic peptide
  Seed: YERMCNILKGKFQTA
YERMYNIIKAKFNTA

SEQ ID NO: 136457 - protein, 15 aa, Artificial Sequence
  Description of Artificial Sequence: Synthetic peptide
  Seed: YERMCNILKGKFQTA
YERMYNIIKAKFPTA

SEQ ID NO: 136458 - protein, 15 aa, Artificial Sequence
  Description of Artificial Sequence: Synthetic peptide
  Seed: YERMCNILKGKFQTA
YERMYNIIKAKFQTA

SEQ ID NO: 136459 - protein, 15 aa, Artificial Sequence
  Description of Artificial Sequence: Synthetic peptide
  Seed: YERMCNILKGKFQTA
YERMYNIIKAKFRTA

SEQ ID NO: 136460 - protein, 15 aa, Artificial Sequence
  Description of Artificial Sequence: Synthetic peptide
  Seed: YERMCNILKGKFQTA
YERMYNIIKAKFSTA

SEQ ID NO: 136461 - protein, 15 aa, Artificial Sequence
  Description of Artificial Sequence: Synthetic peptide
  Seed: YERMCNILKGKFQTA
YERMYNIIKAKFTTA

SEQ ID NO: 136462 - protein, 15 aa, Artificial Sequence
  Description of Artificial Sequence: Synthetic peptide
  Seed: YERMCNILKGKFQTA
YERMYNIIKAKFVTA

SEQ ID NO: 136463 - protein, 15 aa, Artificial Sequence
  Description of Artificial Sequence: Synthetic peptide
  Seed: YERMCNILKGKFQTA
YERMYNIIKAKFWTA

SEQ ID NO: 136464 - protein, 15 aa, Artificial Sequence
  Description of Artificial Sequence: Synthetic peptide
  Seed: YERMCNILKGKFQTA
YERMYNIIKAKFYTA

SEQ ID NO: 136465 - protein, 15 aa, Artificial Sequence
  Description of Artificial Sequence: Synthetic peptide
  Seed: YERMCNILKGKFQTA
YERMYNIIKGKFATA

SEQ ID NO: 136466 - protein, 15 aa, Artificial Sequence
  Description of Artificial Sequence: Synthetic peptide
  Seed: YERMCNILKGKFQTA
YERMYNIIKGKFCTA

SEQ ID NO: 136467 - protein, 15 aa, Artificial Sequence
  Description of Artificial Sequence: Synthetic peptide
  Seed: YERMCNILKGKFQTA
YERMYNIIKGKFFTA

SEQ ID NO: 136468 - protein, 15 aa, Artificial Sequence
  Description of Artificial Sequence: Synthetic peptide
  Seed: YERMCNILKGKFQTA
YERMYNIIKGKFGTA

SEQ ID NO: 136469 - protein, 15 aa, Artificial Sequence
  Description of Artificial Sequence: Synthetic peptide
  Seed: YERMCNILKGKFQTA
YERMYNIIKGKFITA

SEQ ID NO: 136470 - protein, 15 aa, Artificial Sequence
  Description of Artificial Sequence: Synthetic peptide
  Seed: YERMCNILKGKFQTA
YERMYNIIKGKFLTA

SEQ ID NO: 136471 - protein, 15 aa, Artificial Sequence
  Description of Artificial Sequence: Synthetic peptide
  Seed: YERMCNILKGKFQTA
YERMYNIIKGKFMTA

SEQ ID NO: 136472 - protein, 15 aa, Artificial Sequence
  Description of Artificial Sequence: Synthetic peptide
  Seed: YERMCNILKGKFQTA
YERMYNIIKGKFNTA

SEQ ID NO: 136473 - protein, 15 aa, Artificial Sequence
  Description of Artificial Sequence: Synthetic peptide
  Seed: YERMCNILKGKFQTA
YERMYNIIKGKFPTA

SEQ ID NO: 136474 - protein, 15 aa, Artificial Sequence
  Description of Artificial Sequence: Synthetic peptide
  Seed: YERMCNILKGKFQTA
YERMYNIIKGKFSTA

SEQ ID NO: 136475 - protein, 15 aa, Artificial Sequence
  Description of Artificial Sequence: Synthetic peptide
  Seed: YERMCNILKGKFQTA
YERMYNIIKGKFTTA

SEQ ID NO: 136476 - protein, 15 aa, Artificial Sequence
  Description of Artificial Sequence: Synthetic peptide
  Seed: YERMCNILKGKFQTA
YERMYNIIKGKFVTA

SEQ ID NO: 136477 - protein, 15 aa, Artificial Sequence
  Description of Artificial Sequence: Synthetic peptide
  Seed: YERMCNILKGKFQTA
YERMYNIIKIKFATA

SEQ ID NO: 136478 - protein, 15 aa, Artificial Sequence
  Description of Artificial Sequence: Synthetic peptide
  Seed: YERMCNILKGKFQTA
YERMYNIIKIKFITA

SEQ ID NO: 136479 - protein, 15 aa, Artificial Sequence
  Description of Artificial Sequence: Synthetic peptide
  Seed: YERMCNILKGKFQTA
YERMYNIIKIKFLTA

SEQ ID NO: 136480 - protein, 15 aa, Artificial Sequence
  Description of Artificial Sequence: Synthetic peptide
  Seed: YERMCNILKGKFQTA
YERMYNIIKIKFNTA

SEQ ID NO: 136481 - protein, 15 aa, Artificial Sequence
  Description of Artificial Sequence: Synthetic peptide
  Seed: YERMCNILKGKFQTA
YERMYNIIKIKFSTA

SEQ ID NO: 136482 - protein, 15 aa, Artificial Sequence
  Description of Artificial Sequence: Synthetic peptide
  Seed: YERMCNILKGKFQTA
YERMYNIIKIKFTTA

SEQ ID NO: 136483 - protein, 15 aa, Artificial Sequence
  Description of Artificial Sequence: Synthetic peptide
  Seed: YERMCNILKGKFQTA
YERMYNIIKIKFVTA

SEQ ID NO: 136484 - protein, 15 aa, Artificial Sequence
  Description of Artificial Sequence: Synthetic peptide
  Seed: YERMCNILKGKFQTA
YERMYNIIKMKFLTA

SEQ ID NO: 136485 - protein, 15 aa, Artificial Sequence
  Description of Artificial Sequence: Synthetic peptide
  Seed: YERMCNILKGKFQTA
YERMYNIIKMKFVTA

SEQ ID NO: 136486 - protein, 15 aa, Artificial Sequence
  Description of Artificial Sequence: Synthetic peptide
  Seed: YERMCNILKGKFQTA
YERMYNIIKNKFATA

SEQ ID NO: 136487 - protein, 15 aa, Artificial Sequence
  Description of Artificial Sequence: Synthetic peptide
  Seed: YERMCNILKGKFQTA
YERMYNIIKNKFFTA

SEQ ID NO: 136488 - protein, 15 aa, Artificial Sequence
  Description of Artificial Sequence: Synthetic peptide
  Seed: YERMCNILKGKFQTA
YERMYNIIKNKFGTA

SEQ ID NO: 136489 - protein, 15 aa, Artificial Sequence
  Description of Artificial Sequence: Synthetic peptide
  Seed: YERMCNILKGKFQTA
YERMYNIIKNKFITA

SEQ ID NO: 136490 - protein, 15 aa, Artificial Sequence
  Description of Artificial Sequence: Synthetic peptide
  Seed: YERMCNILKGKFQTA
YERMYNIIKNKFLTA

SEQ ID NO: 136491 - protein, 15 aa, Artificial Sequence
  Description of Artificial Sequence: Synthetic peptide
  Seed: YERMCNILKGKFQTA
YERMYNIIKNKFMTA

SEQ ID NO: 136492 - protein, 15 aa, Artificial Sequence
  Description of Artificial Sequence: Synthetic peptide
  Seed: YERMCNILKGKFQTA
YERMYNIIKNKFNTA

SEQ ID NO: 136493 - protein, 15 aa, Artificial Sequence
  Description of Artificial Sequence: Synthetic peptide
  Seed: YERMCNILKGKFQTA
YERMYNIIKNKFSTA

SEQ ID NO: 136494 - protein, 15 aa, Artificial Sequence
  Description of Artificial Sequence: Synthetic peptide
  Seed: YERMCNILKGKFQTA
YERMYNIIKNKFTTA

SEQ ID NO: 136495 - protein, 15 aa, Artificial Sequence
  Description of Artificial Sequence: Synthetic peptide
  Seed: YERMCNILKGKFQTA
YERMYNIIKNKFVTA

SEQ ID NO: 136496 - protein, 15 aa, Artificial Sequence
  Description of Artificial Sequence: Synthetic peptide
  Seed: YERMCNILKGKFQTA
YERMYNIIKPKFATA

SEQ ID NO: 136497 - protein, 15 aa, Artificial Sequence
  Description of Artificial Sequence: Synthetic peptide
  Seed: YERMCNILKGKFQTA
YERMYNIIKPKFCTA

SEQ ID NO: 136498 - protein, 15 aa, Artificial Sequence
  Description of Artificial Sequence: Synthetic peptide
  Seed: YERMCNILKGKFQTA
YERMYNIIKPKFFTA

SEQ ID NO: 136499 - protein, 15 aa, Artificial Sequence
  Description of Artificial Sequence: Synthetic peptide
  Seed: YERMCNILKGKFQTA
YERMYNIIKPKFGTA

SEQ ID NO: 136500 - protein, 15 aa, Artificial Sequence
  Description of Artificial Sequence: Synthetic peptide
  Seed: YERMCNILKGKFQTA
YERMYNIIKPKFITA

SEQ ID NO: 136501 - protein, 15 aa, Artificial Sequence
  Description of Artificial Sequence: Synthetic peptide
  Seed: YERMCNILKGKFQTA
YERMYNIIKPKFLTA

SEQ ID NO: 136502 - protein, 15 aa, Artificial Sequence
  Description of Artificial Sequence: Synthetic peptide
  Seed: YERMCNILKGKFQTA
YERMYNIIKPKFMTA

SEQ ID NO: 136503 - protein, 15 aa, Artificial Sequence
  Description of Artificial Sequence: Synthetic peptide
  Seed: YERMCNILKGKFQTA
YERMYNIIKPKFNTA

SEQ ID NO: 136504 - protein, 15 aa, Artificial Sequence
  Description of Artificial Sequence: Synthetic peptide
  Seed: YERMCNILKGKFQTA
YERMYNIIKPKFSTA

SEQ ID NO: 136505 - protein, 15 aa, Artificial Sequence
  Description of Artificial Sequence: Synthetic peptide
  Seed: YERMCNILKGKFQTA
YERMYNIIKPKFTTA

SEQ ID NO: 136506 - protein, 15 aa, Artificial Sequence
  Description of Artificial Sequence: Synthetic peptide
  Seed: YERMCNILKGKFQTA
YERMYNIIKPKFVTA

SEQ ID NO: 136507 - protein, 15 aa, Artificial Sequence
  Description of Artificial Sequence: Synthetic peptide
  Seed: YERMCNILKGKFQTA
YERMYNIIKSKFATA

SEQ ID NO: 136508 - protein, 15 aa, Artificial Sequence
  Description of Artificial Sequence: Synthetic peptide
  Seed: YERMCNILKGKFQTA
YERMYNIIKSKFCTA

SEQ ID NO: 136509 - protein, 15 aa, Artificial Sequence
  Description of Artificial Sequence: Synthetic peptide
  Seed: YERMCNILKGKFQTA
YERMYNIIKSKFFTA

SEQ ID NO: 136510 - protein, 15 aa, Artificial Sequence
  Description of Artificial Sequence: Synthetic peptide
  Seed: YERMCNILKGKFQTA
YERMYNIIKSKFGTA

SEQ ID NO: 136511 - protein, 15 aa, Artificial Sequence
  Description of Artificial Sequence: Synthetic peptide
  Seed: YERMCNILKGKFQTA
YERMYNIIKSKFITA

SEQ ID NO: 136512 - protein, 15 aa, Artificial Sequence
  Description of Artificial Sequence: Synthetic peptide
  Seed: YERMCNILKGKFQTA
YERMYNIIKSKFLTA

SEQ ID NO: 136513 - protein, 15 aa, Artificial Sequence
  Description of Artificial Sequence: Synthetic peptide
  Seed: YERMCNILKGKFQTA
YERMYNIIKSKFMTA

SEQ ID NO: 136514 - protein, 15 aa, Artificial Sequence
  Description of Artificial Sequence: Synthetic peptide
  Seed: YERMCNILKGKFQTA
YERMYNIIKSKFNTA

SEQ ID NO: 136515 - protein, 15 aa, Artificial Sequence
  Description of Artificial Sequence: Synthetic peptide
  Seed: YERMCNILKGKFQTA
YERMYNIIKSKFPTA

SEQ ID NO: 136516 - protein, 15 aa, Artificial Sequence
  Description of Artificial Sequence: Synthetic peptide
  Seed: YERMCNILKGKFQTA
YERMYNIIKSKFSTA

SEQ ID NO: 136517 - protein, 15 aa, Artificial Sequence
  Description of Artificial Sequence: Synthetic peptide
  Seed: YERMCNILKGKFQTA
YERMYNIIKSKFTTA

SEQ ID NO: 136518 - protein, 15 aa, Artificial Sequence
  Description of Artificial Sequence: Synthetic peptide
  Seed: YERMCNILKGKFQTA
YERMYNIIKSKFVTA

SEQ ID NO: 136519 - protein, 15 aa, Artificial Sequence
  Description of Artificial Sequence: Synthetic peptide
  Seed: YERMCNILKGKFQTA
YERMYNIIKSKFYTA

SEQ ID NO: 136520 - protein, 15 aa, Artificial Sequence
  Description of Artificial Sequence: Synthetic peptide
  Seed: YERMCNILKGKFQTA
YERMYNIIKTKFATA

SEQ ID NO: 136521 - protein, 15 aa, Artificial Sequence
  Description of Artificial Sequence: Synthetic peptide
  Seed: YERMCNILKGKFQTA
YERMYNIIKTKFCTA

SEQ ID NO: 136522 - protein, 15 aa, Artificial Sequence
  Description of Artificial Sequence: Synthetic peptide
  Seed: YERMCNILKGKFQTA
YERMYNIIKTKFGTA

SEQ ID NO: 136523 - protein, 15 aa, Artificial Sequence
  Description of Artificial Sequence: Synthetic peptide
  Seed: YERMCNILKGKFQTA
YERMYNIIKTKFITA

SEQ ID NO: 136524 - protein, 15 aa, Artificial Sequence
  Description of Artificial Sequence: Synthetic peptide
  Seed: YERMCNILKGKFQTA
YERMYNIIKTKFLTA

SEQ ID NO: 136525 - protein, 15 aa, Artificial Sequence
  Description of Artificial Sequence: Synthetic peptide
  Seed: YERMCNILKGKFQTA
YERMYNIIKTKFMTA

SEQ ID NO: 136526 - protein, 15 aa, Artificial Sequence
  Description of Artificial Sequence: Synthetic peptide
  Seed: YERMCNILKGKFQTA
YERMYNIIKTKFNTA

SEQ ID NO: 136527 - protein, 15 aa, Artificial Sequence
  Description of Artificial Sequence: Synthetic peptide
  Seed: YERMCNILKGKFQTA
YERMYNIIKTKFSTA

SEQ ID NO: 136528 - protein, 15 aa, Artificial Sequence
  Description of Artificial Sequence: Synthetic peptide
  Seed: YERMCNILKGKFQTA
YERMYNIIKTKFTTA

SEQ ID NO: 136529 - protein, 15 aa, Artificial Sequence
  Description of Artificial Sequence: Synthetic peptide
  Seed: YERMCNILKGKFQTA
YERMYNIIKTKFVTA

SEQ ID NO: 136530 - protein, 15 aa, Artificial Sequence
  Description of Artificial Sequence: Synthetic peptide
  Seed: YERMCNILKGKFQTA
YERMYNIIKVKFATA

SEQ ID NO: 136531 - protein, 15 aa, Artificial Sequence
  Description of Artificial Sequence: Synthetic peptide
  Seed: YERMCNILKGKFQTA
YERMYNIIKVKFITA

SEQ ID NO: 136532 - protein, 15 aa, Artificial Sequence
  Description of Artificial Sequence: Synthetic peptide
  Seed: YERMCNILKGKFQTA
YERMYNIIKVKFLTA

SEQ ID NO: 136533 - protein, 15 aa, Artificial Sequence
  Description of Artificial Sequence: Synthetic peptide
  Seed: YERMCNILKGKFQTA
YERMYNIIKVKFMTA

SEQ ID NO: 136534 - protein, 15 aa, Artificial Sequence
  Description of Artificial Sequence: Synthetic peptide
  Seed: YERMCNILKGKFQTA
YERMYNIIKVKFNTA

SEQ ID NO: 136535 - protein, 15 aa, Artificial Sequence
  Description of Artificial Sequence: Synthetic peptide
  Seed: YERMCNILKGKFQTA
YERMYNIIKVKFSTA

SEQ ID NO: 136536 - protein, 15 aa, Artificial Sequence
  Description of Artificial Sequence: Synthetic peptide
  Seed: YERMCNILKGKFQTA
YERMYNIIKVKFTTA

SEQ ID NO: 136537 - protein, 15 aa, Artificial Sequence
  Description of Artificial Sequence: Synthetic peptide
  Seed: YERMCNILKGKFQTA
YERMYNIIKVKFVTA

SEQ ID NO: 136538 - protein, 15 aa, Artificial Sequence
  Description of Artificial Sequence: Synthetic peptide
  Seed: YERMCNILKGKFQTA
YERMYNILKAKFATA

SEQ ID NO: 136539 - protein, 15 aa, Artificial Sequence
  Description of Artificial Sequence: Synthetic peptide
  Seed: YERMCNILKGKFQTA
YERMYNILKAKFCTA

SEQ ID NO: 136540 - protein, 15 aa, Artificial Sequence
  Description of Artificial Sequence: Synthetic peptide
  Seed: YERMCNILKGKFQTA
YERMYNILKAKFDTA

SEQ ID NO: 136541 - protein, 15 aa, Artificial Sequence
  Description of Artificial Sequence: Synthetic peptide
  Seed: YERMCNILKGKFQTA
YERMYNILKAKFETA

SEQ ID NO: 136542 - protein, 15 aa, Artificial Sequence
  Description of Artificial Sequence: Synthetic peptide
  Seed: YERMCNILKGKFQTA
YERMYNILKAKFFTA

SEQ ID NO: 136543 - protein, 15 aa, Artificial Sequence
  Description of Artificial Sequence: Synthetic peptide
  Seed: YERMCNILKGKFQTA
YERMYNILKAKFGTA

SEQ ID NO: 136544 - protein, 15 aa, Artificial Sequence
  Description of Artificial Sequence: Synthetic peptide
  Seed: YERMCNILKGKFQTA
YERMYNILKAKFHTA

SEQ ID NO: 136545 - protein, 15 aa, Artificial Sequence
  Description of Artificial Sequence: Synthetic peptide
  Seed: YERMCNILKGKFQTA
YERMYNILKAKFITA

SEQ ID NO: 136546 - protein, 15 aa, Artificial Sequence
  Description of Artificial Sequence: Synthetic peptide
  Seed: YERMCNILKGKFQTA
YERMYNILKAKFKTA

SEQ ID NO: 136547 - protein, 15 aa, Artificial Sequence
  Description of Artificial Sequence: Synthetic peptide
  Seed: YERMCNILKGKFQTA
YERMYNILKAKFLTA

SEQ ID NO: 136548 - protein, 15 aa, Artificial Sequence
  Description of Artificial Sequence: Synthetic peptide
  Seed: YERMCNILKGKFQTA
YERMYNILKAKFMTA

SEQ ID NO: 136549 - protein, 15 aa, Artificial Sequence
  Description of Artificial Sequence: Synthetic peptide
  Seed: YERMCNILKGKFQTA
YERMYNILKAKFNTA

SEQ ID NO: 136550 - protein, 15 aa, Artificial Sequence
  Description of Artificial Sequence: Synthetic peptide
  Seed: YERMCNILKGKFQTA
YERMYNILKAKFPTA

SEQ ID NO: 136551 - protein, 15 aa, Artificial Sequence
  Description of Artificial Sequence: Synthetic peptide
  Seed: YERMCNILKGKFQTA
YERMYNILKAKFQTA

SEQ ID NO: 136552 - protein, 15 aa, Artificial Sequence
  Description of Artificial Sequence: Synthetic peptide
  Seed: YERMCNILKGKFQTA
YERMYNILKAKFRTA

SEQ ID NO: 136553 - protein, 15 aa, Artificial Sequence
  Description of Artificial Sequence: Synthetic peptide
  Seed: YERMCNILKGKFQTA
YERMYNILKAKFSTA

SEQ ID NO: 136554 - protein, 15 aa, Artificial Sequence
  Description of Artificial Sequence: Synthetic peptide
  Seed: YERMCNILKGKFQTA
YERMYNILKAKFTTA

SEQ ID NO: 136555 - protein, 15 aa, Artificial Sequence
  Description of Artificial Sequence: Synthetic peptide
  Seed: YERMCNILKGKFQTA
YERMYNILKAKFVTA

SEQ ID NO: 136556 - protein, 15 aa, Artificial Sequence
  Description of Artificial Sequence: Synthetic peptide
  Seed: YERMCNILKGKFQTA
YERMYNILKAKFWTA

SEQ ID NO: 136557 - protein, 15 aa, Artificial Sequence
  Description of Artificial Sequence: Synthetic peptide
  Seed: YERMCNILKGKFQTA
YERMYNILKAKFYTA

SEQ ID NO: 136558 - protein, 15 aa, Artificial Sequence
  Description of Artificial Sequence: Synthetic peptide
  Seed: YERMCNILKGKFQTA
YERMYNILKCKFATA

SEQ ID NO: 136559 - protein, 15 aa, Artificial Sequence
  Description of Artificial Sequence: Synthetic peptide
  Seed: YERMCNILKGKFQTA
YERMYNILKCKFITA

SEQ ID NO: 136560 - protein, 15 aa, Artificial Sequence
  Description of Artificial Sequence: Synthetic peptide
  Seed: YERMCNILKGKFQTA
YERMYNILKCKFLTA

SEQ ID NO: 136561 - protein, 15 aa, Artificial Sequence
  Description of Artificial Sequence: Synthetic peptide
  Seed: YERMCNILKGKFQTA
YERMYNILKCKFVTA

SEQ ID NO: 136562 - protein, 15 aa, Artificial Sequence
  Description of Artificial Sequence: Synthetic peptide
  Seed: YERMCNILKGKFQTA
YERMYNILKGKFATA

SEQ ID NO: 136563 - protein, 15 aa, Artificial Sequence
  Description of Artificial Sequence: Synthetic peptide
  Seed: YERMCNILKGKFQTA
YERMYNILKGKFCTA

SEQ ID NO: 136564 - protein, 15 aa, Artificial Sequence
  Description of Artificial Sequence: Synthetic peptide
  Seed: YERMCNILKGKFQTA
YERMYNILKGKFFTA

SEQ ID NO: 136565 - protein, 15 aa, Artificial Sequence
  Description of Artificial Sequence: Synthetic peptide
  Seed: YERMCNILKGKFQTA
YERMYNILKGKFGTA

SEQ ID NO: 136566 - protein, 15 aa, Artificial Sequence
  Description of Artificial Sequence: Synthetic peptide
  Seed: YERMCNILKGKFQTA
YERMYNILKGKFHTA

SEQ ID NO: 136567 - protein, 15 aa, Artificial Sequence
  Description of Artificial Sequence: Synthetic peptide
  Seed: YERMCNILKGKFQTA
YERMYNILKGKFITA

SEQ ID NO: 136568 - protein, 15 aa, Artificial Sequence
  Description of Artificial Sequence: Synthetic peptide
  Seed: YERMCNILKGKFQTA
YERMYNILKGKFLTA

SEQ ID NO: 136569 - protein, 15 aa, Artificial Sequence
  Description of Artificial Sequence: Synthetic peptide
  Seed: YERMCNILKGKFQTA
YERMYNILKGKFMTA

SEQ ID NO: 136570 - protein, 15 aa, Artificial Sequence
  Description of Artificial Sequence: Synthetic peptide
  Seed: YERMCNILKGKFQTA
YERMYNILKGKFNTA

SEQ ID NO: 136571 - protein, 15 aa, Artificial Sequence
  Description of Artificial Sequence: Synthetic peptide
  Seed: YERMCNILKGKFQTA
YERMYNILKGKFPTA

SEQ ID NO: 136572 - protein, 15 aa, Artificial Sequence
  Description of Artificial Sequence: Synthetic peptide
  Seed: YERMCNILKGKFQTA
YERMYNILKGKFQTA

SEQ ID NO: 136573 - protein, 15 aa, Artificial Sequence
  Description of Artificial Sequence: Synthetic peptide
  Seed: YERMCNILKGKFQTA
YERMYNILKGKFSTA

SEQ ID NO: 136574 - protein, 15 aa, Artificial Sequence
  Description of Artificial Sequence: Synthetic peptide
  Seed: YERMCNILKGKFQTA
YERMYNILKGKFTTA

SEQ ID NO: 136575 - protein, 15 aa, Artificial Sequence
  Description of Artificial Sequence: Synthetic peptide
  Seed: YERMCNILKGKFQTA
YERMYNILKGKFVTA

SEQ ID NO: 136576 - protein, 15 aa, Artificial Sequence
  Description of Artificial Sequence: Synthetic peptide
  Seed: YERMCNILKGKFQTA
YERMYNILKGKFWTA

SEQ ID NO: 136577 - protein, 15 aa, Artificial Sequence
  Description of Artificial Sequence: Synthetic peptide
  Seed: YERMCNILKGKFQTA
YERMYNILKGKFYTA

SEQ ID NO: 136578 - protein, 15 aa, Artificial Sequence
  Description of Artificial Sequence: Synthetic peptide
  Seed: YERMCNILKGKFQTA
YERMYNILKHKFATA

SEQ ID NO: 136579 - protein, 15 aa, Artificial Sequence
  Description of Artificial Sequence: Synthetic peptide
  Seed: YERMCNILKGKFQTA
YERMYNILKHKFITA

SEQ ID NO: 136580 - protein, 15 aa, Artificial Sequence
  Description of Artificial Sequence: Synthetic peptide
  Seed: YERMCNILKGKFQTA
YERMYNILKHKFLTA

SEQ ID NO: 136581 - protein, 15 aa, Artificial Sequence
  Description of Artificial Sequence: Synthetic peptide
  Seed: YERMCNILKGKFQTA
YERMYNILKHKFVTA

SEQ ID NO: 136582 - protein, 15 aa, Artificial Sequence
  Description of Artificial Sequence: Synthetic peptide
  Seed: YERMCNILKGKFQTA
YERMYNILKIKFATA

SEQ ID NO: 136583 - protein, 15 aa, Artificial Sequence
  Description of Artificial Sequence: Synthetic peptide
  Seed: YERMCNILKGKFQTA
YERMYNILKIKFITA

SEQ ID NO: 136584 - protein, 15 aa, Artificial Sequence
  Description of Artificial Sequence: Synthetic peptide
  Seed: YERMCNILKGKFQTA
YERMYNILKIKFLTA

SEQ ID NO: 136585 - protein, 15 aa, Artificial Sequence
  Description of Artificial Sequence: Synthetic peptide
  Seed: YERMCNILKGKFQTA
YERMYNILKIKFMTA

SEQ ID NO: 136586 - protein, 15 aa, Artificial Sequence
  Description of Artificial Sequence: Synthetic peptide
  Seed: YERMCNILKGKFQTA
YERMYNILKIKFNTA

SEQ ID NO: 136587 - protein, 15 aa, Artificial Sequence
  Description of Artificial Sequence: Synthetic peptide
  Seed: YERMCNILKGKFQTA
YERMYNILKIKFSTA

SEQ ID NO: 136588 - protein, 15 aa, Artificial Sequence
  Description of Artificial Sequence: Synthetic peptide
  Seed: YERMCNILKGKFQTA
YERMYNILKIKFTTA

SEQ ID NO: 136589 - protein, 15 aa, Artificial Sequence
  Description of Artificial Sequence: Synthetic peptide
  Seed: YERMCNILKGKFQTA
YERMYNILKIKFVTA

SEQ ID NO: 136590 - protein, 15 aa, Artificial Sequence
  Description of Artificial Sequence: Synthetic peptide
  Seed: YERMCNILKGKFQTA
YERMYNILKLKFATA

SEQ ID NO: 136591 - protein, 15 aa, Artificial Sequence
  Description of Artificial Sequence: Synthetic peptide
  Seed: YERMCNILKGKFQTA
YERMYNILKLKFITA

SEQ ID NO: 136592 - protein, 15 aa, Artificial Sequence
  Description of Artificial Sequence: Synthetic peptide
  Seed: YERMCNILKGKFQTA
YERMYNILKLKFLTA

SEQ ID NO: 136593 - protein, 15 aa, Artificial Sequence
  Description of Artificial Sequence: Synthetic peptide
  Seed: YERMCNILKGKFQTA
YERMYNILKLKFNTA

SEQ ID NO: 136594 - protein, 15 aa, Artificial Sequence
  Description of Artificial Sequence: Synthetic peptide
  Seed: YERMCNILKGKFQTA
YERMYNILKLKFVTA

SEQ ID NO: 136595 - protein, 15 aa, Artificial Sequence
  Description of Artificial Sequence: Synthetic peptide
  Seed: YERMCNILKGKFQTA
YERMYNILKMKFATA

SEQ ID NO: 136596 - protein, 15 aa, Artificial Sequence
  Description of Artificial Sequence: Synthetic peptide
  Seed: YERMCNILKGKFQTA
YERMYNILKMKFITA

SEQ ID NO: 136597 - protein, 15 aa, Artificial Sequence
  Description of Artificial Sequence: Synthetic peptide
  Seed: YERMCNILKGKFQTA
YERMYNILKMKFLTA

SEQ ID NO: 136598 - protein, 15 aa, Artificial Sequence
  Description of Artificial Sequence: Synthetic peptide
  Seed: YERMCNILKGKFQTA
YERMYNILKMKFMTA

SEQ ID NO: 136599 - protein, 15 aa, Artificial Sequence
  Description of Artificial Sequence: Synthetic peptide
  Seed: YERMCNILKGKFQTA
YERMYNILKMKFNTA

SEQ ID NO: 136600 - protein, 15 aa, Artificial Sequence
  Description of Artificial Sequence: Synthetic peptide
  Seed: YERMCNILKGKFQTA
YERMYNILKMKFTTA

SEQ ID NO: 136601 - protein, 15 aa, Artificial Sequence
  Description of Artificial Sequence: Synthetic peptide
  Seed: YERMCNILKGKFQTA
YERMYNILKMKFVTA

SEQ ID NO: 136602 - protein, 15 aa, Artificial Sequence
  Description of Artificial Sequence: Synthetic peptide
  Seed: YERMCNILKGKFQTA
YERMYNILKNKFATA

SEQ ID NO: 136603 - protein, 15 aa, Artificial Sequence
  Description of Artificial Sequence: Synthetic peptide
  Seed: YERMCNILKGKFQTA
YERMYNILKNKFCTA

SEQ ID NO: 136604 - protein, 15 aa, Artificial Sequence
  Description of Artificial Sequence: Synthetic peptide
  Seed: YERMCNILKGKFQTA
YERMYNILKNKFFTA

SEQ ID NO: 136605 - protein, 15 aa, Artificial Sequence
  Description of Artificial Sequence: Synthetic peptide
  Seed: YERMCNILKGKFQTA
YERMYNILKNKFGTA

SEQ ID NO: 136606 - protein, 15 aa, Artificial Sequence
  Description of Artificial Sequence: Synthetic peptide
  Seed: YERMCNILKGKFQTA
YERMYNILKNKFITA

SEQ ID NO: 136607 - protein, 15 aa, Artificial Sequence
  Description of Artificial Sequence: Synthetic peptide
  Seed: YERMCNILKGKFQTA
YERMYNILKNKFLTA

SEQ ID NO: 136608 - protein, 15 aa, Artificial Sequence
  Description of Artificial Sequence: Synthetic peptide
  Seed: YERMCNILKGKFQTA
YERMYNILKNKFMTA

SEQ ID NO: 136609 - protein, 15 aa, Artificial Sequence
  Description of Artificial Sequence: Synthetic peptide
  Seed: YERMCNILKGKFQTA
YERMYNILKNKFNTA

SEQ ID NO: 136610 - protein, 15 aa, Artificial Sequence
  Description of Artificial Sequence: Synthetic peptide
  Seed: YERMCNILKGKFQTA
YERMYNILKNKFPTA

SEQ ID NO: 136611 - protein, 15 aa, Artificial Sequence
  Description of Artificial Sequence: Synthetic peptide
  Seed: YERMCNILKGKFQTA
YERMYNILKNKFSTA

SEQ ID NO: 136612 - protein, 15 aa, Artificial Sequence
  Description of Artificial Sequence: Synthetic peptide
  Seed: YERMCNILKGKFQTA
YERMYNILKNKFTTA

SEQ ID NO: 136613 - protein, 15 aa, Artificial Sequence
  Description of Artificial Sequence: Synthetic peptide
  Seed: YERMCNILKGKFQTA
YERMYNILKNKFVTA

SEQ ID NO: 136614 - protein, 15 aa, Artificial Sequence
  Description of Artificial Sequence: Synthetic peptide
  Seed: YERMCNILKGKFQTA
YERMYNILKPKFATA

SEQ ID NO: 136615 - protein, 15 aa, Artificial Sequence
  Description of Artificial Sequence: Synthetic peptide
  Seed: YERMCNILKGKFQTA
YERMYNILKPKFCTA

SEQ ID NO: 136616 - protein, 15 aa, Artificial Sequence
  Description of Artificial Sequence: Synthetic peptide
  Seed: YERMCNILKGKFQTA
YERMYNILKPKFFTA

SEQ ID NO: 136617 - protein, 15 aa, Artificial Sequence
  Description of Artificial Sequence: Synthetic peptide
  Seed: YERMCNILKGKFQTA
YERMYNILKPKFGTA

SEQ ID NO: 136618 - protein, 15 aa, Artificial Sequence
  Description of Artificial Sequence: Synthetic peptide
  Seed: YERMCNILKGKFQTA
YERMYNILKPKFHTA

SEQ ID NO: 136619 - protein, 15 aa, Artificial Sequence
  Description of Artificial Sequence: Synthetic peptide
  Seed: YERMCNILKGKFQTA
YERMYNILKPKFITA

SEQ ID NO: 136620 - protein, 15 aa, Artificial Sequence
  Description of Artificial Sequence: Synthetic peptide
  Seed: YERMCNILKGKFQTA
YERMYNILKPKFLTA

SEQ ID NO: 136621 - protein, 15 aa, Artificial Sequence
  Description of Artificial Sequence: Synthetic peptide
  Seed: YERMCNILKGKFQTA
YERMYNILKPKFMTA

SEQ ID NO: 136622 - protein, 15 aa, Artificial Sequence
  Description of Artificial Sequence: Synthetic peptide
  Seed: YERMCNILKGKFQTA
YERMYNILKPKFNTA

SEQ ID NO: 136623 - protein, 15 aa, Artificial Sequence
  Description of Artificial Sequence: Synthetic peptide
  Seed: YERMCNILKGKFQTA
YERMYNILKPKFPTA

SEQ ID NO: 136624 - protein, 15 aa, Artificial Sequence
  Description of Artificial Sequence: Synthetic peptide
  Seed: YERMCNILKGKFQTA
YERMYNILKPKFQTA

SEQ ID NO: 136625 - protein, 15 aa, Artificial Sequence
  Description of Artificial Sequence: Synthetic peptide
  Seed: YERMCNILKGKFQTA
YERMYNILKPKFSTA

SEQ ID NO: 136626 - protein, 15 aa, Artificial Sequence
  Description of Artificial Sequence: Synthetic peptide
  Seed: YERMCNILKGKFQTA
YERMYNILKPKFTTA

SEQ ID NO: 136627 - protein, 15 aa, Artificial Sequence
  Description of Artificial Sequence: Synthetic peptide
  Seed: YERMCNILKGKFQTA
YERMYNILKPKFVTA

SEQ ID NO: 136628 - protein, 15 aa, Artificial Sequence
  Description of Artificial Sequence: Synthetic peptide
  Seed: YERMCNILKGKFQTA
YERMYNILKPKFWTA

SEQ ID NO: 136629 - protein, 15 aa, Artificial Sequence
  Description of Artificial Sequence: Synthetic peptide
  Seed: YERMCNILKGKFQTA
YERMYNILKPKFYTA

SEQ ID NO: 136630 - protein, 15 aa, Artificial Sequence
  Description of Artificial Sequence: Synthetic peptide
  Seed: YERMCNILKGKFQTA
YERMYNILKQKFATA

SEQ ID NO: 136631 - protein, 15 aa, Artificial Sequence
  Description of Artificial Sequence: Synthetic peptide
  Seed: YERMCNILKGKFQTA
YERMYNILKQKFLTA

SEQ ID NO: 136632 - protein, 15 aa, Artificial Sequence
  Description of Artificial Sequence: Synthetic peptide
  Seed: YERMCNILKGKFQTA
YERMYNILKQKFVTA

SEQ ID NO: 136633 - protein, 15 aa, Artificial Sequence
  Description of Artificial Sequence: Synthetic peptide
  Seed: YERMCNILKGKFQTA
YERMYNILKSKFATA

SEQ ID NO: 136634 - protein, 15 aa, Artificial Sequence
  Description of Artificial Sequence: Synthetic peptide
  Seed: YERMCNILKGKFQTA
YERMYNILKSKFCTA

SEQ ID NO: 136635 - protein, 15 aa, Artificial Sequence
  Description of Artificial Sequence: Synthetic peptide
  Seed: YERMCNILKGKFQTA
YERMYNILKSKFFTA

SEQ ID NO: 136636 - protein, 15 aa, Artificial Sequence
  Description of Artificial Sequence: Synthetic peptide
  Seed: YERMCNILKGKFQTA
YERMYNILKSKFGTA

SEQ ID NO: 136637 - protein, 15 aa, Artificial Sequence
  Description of Artificial Sequence: Synthetic peptide
  Seed: YERMCNILKGKFQTA
YERMYNILKSKFHTA

SEQ ID NO: 136638 - protein, 15 aa, Artificial Sequence
  Description of Artificial Sequence: Synthetic peptide
  Seed: YERMCNILKGKFQTA
YERMYNILKSKFITA

SEQ ID NO: 136639 - protein, 15 aa, Artificial Sequence
  Description of Artificial Sequence: Synthetic peptide
  Seed: YERMCNILKGKFQTA
YERMYNILKSKFLTA

SEQ ID NO: 136640 - protein, 15 aa, Artificial Sequence
  Description of Artificial Sequence: Synthetic peptide
  Seed: YERMCNILKGKFQTA
YERMYNILKSKFMTA

SEQ ID NO: 136641 - protein, 15 aa, Artificial Sequence
  Description of Artificial Sequence: Synthetic peptide
  Seed: YERMCNILKGKFQTA
YERMYNILKSKFNTA

SEQ ID NO: 136642 - protein, 15 aa, Artificial Sequence
  Description of Artificial Sequence: Synthetic peptide
  Seed: YERMCNILKGKFQTA
YERMYNILKSKFPTA

SEQ ID NO: 136643 - protein, 15 aa, Artificial Sequence
  Description of Artificial Sequence: Synthetic peptide
  Seed: YERMCNILKGKFQTA
YERMYNILKSKFQTA

SEQ ID NO: 136644 - protein, 15 aa, Artificial Sequence
  Description of Artificial Sequence: Synthetic peptide
  Seed: YERMCNILKGKFQTA
YERMYNILKSKFRTA

SEQ ID NO: 136645 - protein, 15 aa, Artificial Sequence
  Description of Artificial Sequence: Synthetic peptide
  Seed: YERMCNILKGKFQTA
YERMYNILKSKFSTA

SEQ ID NO: 136646 - protein, 15 aa, Artificial Sequence
  Description of Artificial Sequence: Synthetic peptide
  Seed: YERMCNILKGKFQTA
YERMYNILKSKFTTA

SEQ ID NO: 136647 - protein, 15 aa, Artificial Sequence
  Description of Artificial Sequence: Synthetic peptide
  Seed: YERMCNILKGKFQTA
YERMYNILKSKFVTA

SEQ ID NO: 136648 - protein, 15 aa, Artificial Sequence
  Description of Artificial Sequence: Synthetic peptide
  Seed: YERMCNILKGKFQTA
YERMYNILKSKFWTA

SEQ ID NO: 136649 - protein, 15 aa, Artificial Sequence
  Description of Artificial Sequence: Synthetic peptide
  Seed: YERMCNILKGKFQTA
YERMYNILKSKFYTA

SEQ ID NO: 136650 - protein, 15 aa, Artificial Sequence
  Description of Artificial Sequence: Synthetic peptide
  Seed: YERMCNILKGKFQTA
YERMYNILKTKFATA

SEQ ID NO: 136651 - protein, 15 aa, Artificial Sequence
  Description of Artificial Sequence: Synthetic peptide
  Seed: YERMCNILKGKFQTA
YERMYNILKTKFCTA

SEQ ID NO: 136652 - protein, 15 aa, Artificial Sequence
  Description of Artificial Sequence: Synthetic peptide
  Seed: YERMCNILKGKFQTA
YERMYNILKTKFFTA

SEQ ID NO: 136653 - protein, 15 aa, Artificial Sequence
  Description of Artificial Sequence: Synthetic peptide
  Seed: YERMCNILKGKFQTA
YERMYNILKTKFGTA

SEQ ID NO: 136654 - protein, 15 aa, Artificial Sequence
  Description of Artificial Sequence: Synthetic peptide
  Seed: YERMCNILKGKFQTA
YERMYNILKTKFHTA

SEQ ID NO: 136655 - protein, 15 aa, Artificial Sequence
  Description of Artificial Sequence: Synthetic peptide
  Seed: YERMCNILKGKFQTA
YERMYNILKTKFITA

SEQ ID NO: 136656 - protein, 15 aa, Artificial Sequence
  Description of Artificial Sequence: Synthetic peptide
  Seed: YERMCNILKGKFQTA
YERMYNILKTKFLTA

SEQ ID NO: 136657 - protein, 15 aa, Artificial Sequence
  Description of Artificial Sequence: Synthetic peptide
  Seed: YERMCNILKGKFQTA
YERMYNILKTKFMTA

SEQ ID NO: 136658 - protein, 15 aa, Artificial Sequence
  Description of Artificial Sequence: Synthetic peptide
  Seed: YERMCNILKGKFQTA
YERMYNILKTKFNTA

SEQ ID NO: 136659 - protein, 15 aa, Artificial Sequence
  Description of Artificial Sequence: Synthetic peptide
  Seed: YERMCNILKGKFQTA
YERMYNILKTKFPTA

SEQ ID NO: 136660 - protein, 15 aa, Artificial Sequence
  Description of Artificial Sequence: Synthetic peptide
  Seed: YERMCNILKGKFQTA
YERMYNILKTKFSTA

SEQ ID NO: 136661 - protein, 15 aa, Artificial Sequence
  Description of Artificial Sequence: Synthetic peptide
  Seed: YERMCNILKGKFQTA
YERMYNILKTKFTTA

SEQ ID NO: 136662 - protein, 15 aa, Artificial Sequence
  Description of Artificial Sequence: Synthetic peptide
  Seed: YERMCNILKGKFQTA
YERMYNILKTKFVTA

SEQ ID NO: 136663 - protein, 15 aa, Artificial Sequence
  Description of Artificial Sequence: Synthetic peptide
  Seed: YERMCNILKGKFQTA
YERMYNILKTKFYTA

SEQ ID NO: 136664 - protein, 15 aa, Artificial Sequence
  Description of Artificial Sequence: Synthetic peptide
  Seed: YERMCNILKGKFQTA
YERMYNILKVKFATA

SEQ ID NO: 136665 - protein, 15 aa, Artificial Sequence
  Description of Artificial Sequence: Synthetic peptide
  Seed: YERMCNILKGKFQTA
YERMYNILKVKFGTA

SEQ ID NO: 136666 - protein, 15 aa, Artificial Sequence
  Description of Artificial Sequence: Synthetic peptide
  Seed: YERMCNILKGKFQTA
YERMYNILKVKFHTA

SEQ ID NO: 136667 - protein, 15 aa, Artificial Sequence
  Description of Artificial Sequence: Synthetic peptide
  Seed: YERMCNILKGKFQTA
YERMYNILKVKFITA

SEQ ID NO: 136668 - protein, 15 aa, Artificial Sequence
  Description of Artificial Sequence: Synthetic peptide
  Seed: YERMCNILKGKFQTA
YERMYNILKVKFLTA

SEQ ID NO: 136669 - protein, 15 aa, Artificial Sequence
  Description of Artificial Sequence: Synthetic peptide
  Seed: YERMCNILKGKFQTA
YERMYNILKVKFMTA

SEQ ID NO: 136670 - protein, 15 aa, Artificial Sequence
  Description of Artificial Sequence: Synthetic peptide
  Seed: YERMCNILKGKFQTA
YERMYNILKVKFNTA

SEQ ID NO: 136671 - protein, 15 aa, Artificial Sequence
  Description of Artificial Sequence: Synthetic peptide
  Seed: YERMCNILKGKFQTA
YERMYNILKVKFSTA

SEQ ID NO: 136672 - protein, 15 aa, Artificial Sequence
  Description of Artificial Sequence: Synthetic peptide
  Seed: YERMCNILKGKFQTA
YERMYNILKVKFTTA

SEQ ID NO: 136673 - protein, 15 aa, Artificial Sequence
  Description of Artificial Sequence: Synthetic peptide
  Seed: YERMCNILKGKFQTA
YERMYNILKVKFVTA

SEQ ID NO: 136674 - protein, 15 aa, Artificial Sequence
  Description of Artificial Sequence: Synthetic peptide
  Seed: YERMCNILKGKFQTA
YERMYNIMKAKFATA

SEQ ID NO: 136675 - protein, 15 aa, Artificial Sequence
  Description of Artificial Sequence: Synthetic peptide
  Seed: YERMCNILKGKFQTA
YERMYNIMKAKFCTA

SEQ ID NO: 136676 - protein, 15 aa, Artificial Sequence
  Description of Artificial Sequence: Synthetic peptide
  Seed: YERMCNILKGKFQTA
YERMYNIMKAKFDTA

SEQ ID NO: 136677 - protein, 15 aa, Artificial Sequence
  Description of Artificial Sequence: Synthetic peptide
  Seed: YERMCNILKGKFQTA
YERMYNIMKAKFETA

SEQ ID NO: 136678 - protein, 15 aa, Artificial Sequence
  Description of Artificial Sequence: Synthetic peptide
  Seed: YERMCNILKGKFQTA
YERMYNIMKAKFFTA

SEQ ID NO: 136679 - protein, 15 aa, Artificial Sequence
  Description of Artificial Sequence: Synthetic peptide
  Seed: YERMCNILKGKFQTA
YERMYNIMKAKFGTA

SEQ ID NO: 136680 - protein, 15 aa, Artificial Sequence
  Description of Artificial Sequence: Synthetic peptide
  Seed: YERMCNILKGKFQTA
YERMYNIMKAKFHTA

SEQ ID NO: 136681 - protein, 15 aa, Artificial Sequence
  Description of Artificial Sequence: Synthetic peptide
  Seed: YERMCNILKGKFQTA
YERMYNIMKAKFITA

SEQ ID NO: 136682 - protein, 15 aa, Artificial Sequence
  Description of Artificial Sequence: Synthetic peptide
  Seed: YERMCNILKGKFQTA
YERMYNIMKAKFKTA

SEQ ID NO: 136683 - protein, 15 aa, Artificial Sequence
  Description of Artificial Sequence: Synthetic peptide
  Seed: YERMCNILKGKFQTA
YERMYNIMKAKFLTA

SEQ ID NO: 136684 - protein, 15 aa, Artificial Sequence
  Description of Artificial Sequence: Synthetic peptide
  Seed: YERMCNILKGKFQTA
YERMYNIMKAKFMTA

SEQ ID NO: 136685 - protein, 15 aa, Artificial Sequence
  Description of Artificial Sequence: Synthetic peptide
  Seed: YERMCNILKGKFQTA
YERMYNIMKAKFNTA

SEQ ID NO: 136686 - protein, 15 aa, Artificial Sequence
  Description of Artificial Sequence: Synthetic peptide
  Seed: YERMCNILKGKFQTA
YERMYNIMKAKFPTA

SEQ ID NO: 136687 - protein, 15 aa, Artificial Sequence
  Description of Artificial Sequence: Synthetic peptide
  Seed: YERMCNILKGKFQTA
YERMYNIMKAKFQTA

SEQ ID NO: 136688 - protein, 15 aa, Artificial Sequence
  Description of Artificial Sequence: Synthetic peptide
  Seed: YERMCNILKGKFQTA
YERMYNIMKAKFRTA

SEQ ID NO: 136689 - protein, 15 aa, Artificial Sequence
  Description of Artificial Sequence: Synthetic peptide
  Seed: YERMCNILKGKFQTA
YERMYNIMKAKFSTA

SEQ ID NO: 136690 - protein, 15 aa, Artificial Sequence
  Description of Artificial Sequence: Synthetic peptide
  Seed: YERMCNILKGKFQTA
YERMYNIMKAKFTTA

SEQ ID NO: 136691 - protein, 15 aa, Artificial Sequence
  Description of Artificial Sequence: Synthetic peptide
  Seed: YERMCNILKGKFQTA
YERMYNIMKAKFVTA

SEQ ID NO: 136692 - protein, 15 aa, Artificial Sequence
  Description of Artificial Sequence: Synthetic peptide
  Seed: YERMCNILKGKFQTA
YERMYNIMKAKFWTA

SEQ ID NO: 136693 - protein, 15 aa, Artificial Sequence
  Description of Artificial Sequence: Synthetic peptide
  Seed: YERMCNILKGKFQTA
YERMYNIMKAKFYTA

SEQ ID NO: 136694 - protein, 15 aa, Artificial Sequence
  Description of Artificial Sequence: Synthetic peptide
  Seed: YERMCNILKGKFQTA
YERMYNIMKCKFATA

SEQ ID NO: 136695 - protein, 15 aa, Artificial Sequence
  Description of Artificial Sequence: Synthetic peptide
  Seed: YERMCNILKGKFQTA
YERMYNIMKCKFITA

SEQ ID NO: 136696 - protein, 15 aa, Artificial Sequence
  Description of Artificial Sequence: Synthetic peptide
  Seed: YERMCNILKGKFQTA
YERMYNIMKCKFLTA

SEQ ID NO: 136697 - protein, 15 aa, Artificial Sequence
  Description of Artificial Sequence: Synthetic peptide
  Seed: YERMCNILKGKFQTA
YERMYNIMKCKFVTA

SEQ ID NO: 136698 - protein, 15 aa, Artificial Sequence
  Description of Artificial Sequence: Synthetic peptide
  Seed: YERMCNILKGKFQTA
YERMYNIMKEKFLTA

SEQ ID NO: 136699 - protein, 15 aa, Artificial Sequence
  Description of Artificial Sequence: Synthetic peptide
  Seed: YERMCNILKGKFQTA
YERMYNIMKEKFVTA

SEQ ID NO: 136700 - protein, 15 aa, Artificial Sequence
  Description of Artificial Sequence: Synthetic peptide
  Seed: YERMCNILKGKFQTA
YERMYNIMKGKFATA

SEQ ID NO: 136701 - protein, 15 aa, Artificial Sequence
  Description of Artificial Sequence: Synthetic peptide
  Seed: YERMCNILKGKFQTA
YERMYNIMKGKFCTA

SEQ ID NO: 136702 - protein, 15 aa, Artificial Sequence
  Description of Artificial Sequence: Synthetic peptide
  Seed: YERMCNILKGKFQTA
YERMYNIMKGKFFTA

SEQ ID NO: 136703 - protein, 15 aa, Artificial Sequence
  Description of Artificial Sequence: Synthetic peptide
  Seed: YERMCNILKGKFQTA
YERMYNIMKGKFGTA

SEQ ID NO: 136704 - protein, 15 aa, Artificial Sequence
  Description of Artificial Sequence: Synthetic peptide
  Seed: YERMCNILKGKFQTA
YERMYNIMKGKFHTA

SEQ ID NO: 136705 - protein, 15 aa, Artificial Sequence
  Description of Artificial Sequence: Synthetic peptide
  Seed: YERMCNILKGKFQTA
YERMYNIMKGKFITA

SEQ ID NO: 136706 - protein, 15 aa, Artificial Sequence
  Description of Artificial Sequence: Synthetic peptide
  Seed: YERMCNILKGKFQTA
YERMYNIMKGKFLTA

SEQ ID NO: 136707 - protein, 15 aa, Artificial Sequence
  Description of Artificial Sequence: Synthetic peptide
  Seed: YERMCNILKGKFQTA
YERMYNIMKGKFMTA

SEQ ID NO: 136708 - protein, 15 aa, Artificial Sequence
  Description of Artificial Sequence: Synthetic peptide
  Seed: YERMCNILKGKFQTA
YERMYNIMKGKFNTA

SEQ ID NO: 136709 - protein, 15 aa, Artificial Sequence
  Description of Artificial Sequence: Synthetic peptide
  Seed: YERMCNILKGKFQTA
YERMYNIMKGKFPTA

SEQ ID NO: 136710 - protein, 15 aa, Artificial Sequence
  Description of Artificial Sequence: Synthetic peptide
  Seed: YERMCNILKGKFQTA
YERMYNIMKGKFQTA

SEQ ID NO: 136711 - protein, 15 aa, Artificial Sequence
  Description of Artificial Sequence: Synthetic peptide
  Seed: YERMCNILKGKFQTA
YERMYNIMKGKFSTA

SEQ ID NO: 136712 - protein, 15 aa, Artificial Sequence
  Description of Artificial Sequence: Synthetic peptide
  Seed: YERMCNILKGKFQTA
YERMYNIMKGKFTTA

SEQ ID NO: 136713 - protein, 15 aa, Artificial Sequence
  Description of Artificial Sequence: Synthetic peptide
  Seed: YERMCNILKGKFQTA
YERMYNIMKGKFVTA

SEQ ID NO: 136714 - protein, 15 aa, Artificial Sequence
  Description of Artificial Sequence: Synthetic peptide
  Seed: YERMCNILKGKFQTA
YERMYNIMKGKFWTA

SEQ ID NO: 136715 - protein, 15 aa, Artificial Sequence
  Description of Artificial Sequence: Synthetic peptide
  Seed: YERMCNILKGKFQTA
YERMYNIMKGKFYTA

SEQ ID NO: 136716 - protein, 15 aa, Artificial Sequence
  Description of Artificial Sequence: Synthetic peptide
  Seed: YERMCNILKGKFQTA
YERMYNIMKHKFATA

SEQ ID NO: 136717 - protein, 15 aa, Artificial Sequence
  Description of Artificial Sequence: Synthetic peptide
  Seed: YERMCNILKGKFQTA
YERMYNIMKHKFITA

SEQ ID NO: 136718 - protein, 15 aa, Artificial Sequence
  Description of Artificial Sequence: Synthetic peptide
  Seed: YERMCNILKGKFQTA
YERMYNIMKHKFLTA

SEQ ID NO: 136719 - protein, 15 aa, Artificial Sequence
  Description of Artificial Sequence: Synthetic peptide
  Seed: YERMCNILKGKFQTA
YERMYNIMKHKFVTA

SEQ ID NO: 136720 - protein, 15 aa, Artificial Sequence
  Description of Artificial Sequence: Synthetic peptide
  Seed: YERMCNILKGKFQTA
YERMYNIMKIKFATA

SEQ ID NO: 136721 - protein, 15 aa, Artificial Sequence
  Description of Artificial Sequence: Synthetic peptide
  Seed: YERMCNILKGKFQTA
YERMYNIMKIKFHTA

SEQ ID NO: 136722 - protein, 15 aa, Artificial Sequence
  Description of Artificial Sequence: Synthetic peptide
  Seed: YERMCNILKGKFQTA
YERMYNIMKIKFITA

SEQ ID NO: 136723 - protein, 15 aa, Artificial Sequence
  Description of Artificial Sequence: Synthetic peptide
  Seed: YERMCNILKGKFQTA
YERMYNIMKIKFLTA

SEQ ID NO: 136724 - protein, 15 aa, Artificial Sequence
  Description of Artificial Sequence: Synthetic peptide
  Seed: YERMCNILKGKFQTA
YERMYNIMKIKFMTA

SEQ ID NO: 136725 - protein, 15 aa, Artificial Sequence
  Description of Artificial Sequence: Synthetic peptide
  Seed: YERMCNILKGKFQTA
YERMYNIMKIKFNTA

SEQ ID NO: 136726 - protein, 15 aa, Artificial Sequence
  Description of Artificial Sequence: Synthetic peptide
  Seed: YERMCNILKGKFQTA
YERMYNIMKIKFSTA

SEQ ID NO: 136727 - protein, 15 aa, Artificial Sequence
  Description of Artificial Sequence: Synthetic peptide
  Seed: YERMCNILKGKFQTA
YERMYNIMKIKFTTA

SEQ ID NO: 136728 - protein, 15 aa, Artificial Sequence
  Description of Artificial Sequence: Synthetic peptide
  Seed: YERMCNILKGKFQTA
YERMYNIMKIKFVTA

SEQ ID NO: 136729 - protein, 15 aa, Artificial Sequence
  Description of Artificial Sequence: Synthetic peptide
  Seed: YERMCNILKGKFQTA
YERMYNIMKLKFATA

SEQ ID NO: 136730 - protein, 15 aa, Artificial Sequence
  Description of Artificial Sequence: Synthetic peptide
  Seed: YERMCNILKGKFQTA
YERMYNIMKLKFITA

SEQ ID NO: 136731 - protein, 15 aa, Artificial Sequence
  Description of Artificial Sequence: Synthetic peptide
  Seed: YERMCNILKGKFQTA
YERMYNIMKLKFLTA

SEQ ID NO: 136732 - protein, 15 aa, Artificial Sequence
  Description of Artificial Sequence: Synthetic peptide
  Seed: YERMCNILKGKFQTA
YERMYNIMKLKFNTA

SEQ ID NO: 136733 - protein, 15 aa, Artificial Sequence
  Description of Artificial Sequence: Synthetic peptide
  Seed: YERMCNILKGKFQTA
YERMYNIMKLKFSTA

SEQ ID NO: 136734 - protein, 15 aa, Artificial Sequence
  Description of Artificial Sequence: Synthetic peptide
  Seed: YERMCNILKGKFQTA
YERMYNIMKLKFVTA

SEQ ID NO: 136735 - protein, 15 aa, Artificial Sequence
  Description of Artificial Sequence: Synthetic peptide
  Seed: YERMCNILKGKFQTA
YERMYNIMKMKFATA

SEQ ID NO: 136736 - protein, 15 aa, Artificial Sequence
  Description of Artificial Sequence: Synthetic peptide
  Seed: YERMCNILKGKFQTA
YERMYNIMKMKFITA

SEQ ID NO: 136737 - protein, 15 aa, Artificial Sequence
  Description of Artificial Sequence: Synthetic peptide
  Seed: YERMCNILKGKFQTA
YERMYNIMKMKFLTA

SEQ ID NO: 136738 - protein, 15 aa, Artificial Sequence
  Description of Artificial Sequence: Synthetic peptide
  Seed: YERMCNILKGKFQTA
YERMYNIMKMKFMTA

SEQ ID NO: 136739 - protein, 15 aa, Artificial Sequence
  Description of Artificial Sequence: Synthetic peptide
  Seed: YERMCNILKGKFQTA
YERMYNIMKMKFNTA

SEQ ID NO: 136740 - protein, 15 aa, Artificial Sequence
  Description of Artificial Sequence: Synthetic peptide
  Seed: YERMCNILKGKFQTA
YERMYNIMKMKFSTA

SEQ ID NO: 136741 - protein, 15 aa, Artificial Sequence
  Description of Artificial Sequence: Synthetic peptide
  Seed: YERMCNILKGKFQTA
YERMYNIMKMKFTTA

SEQ ID NO: 136742 - protein, 15 aa, Artificial Sequence
  Description of Artificial Sequence: Synthetic peptide
  Seed: YERMCNILKGKFQTA
YERMYNIMKMKFVTA

SEQ ID NO: 136743 - protein, 15 aa, Artificial Sequence
  Description of Artificial Sequence: Synthetic peptide
  Seed: YERMCNILKGKFQTA
YERMYNIMKNKFATA

SEQ ID NO: 136744 - protein, 15 aa, Artificial Sequence
  Description of Artificial Sequence: Synthetic peptide
  Seed: YERMCNILKGKFQTA
YERMYNIMKNKFCTA

SEQ ID NO: 136745 - protein, 15 aa, Artificial Sequence
  Description of Artificial Sequence: Synthetic peptide
  Seed: YERMCNILKGKFQTA
YERMYNIMKNKFFTA

SEQ ID NO: 136746 - protein, 15 aa, Artificial Sequence
  Description of Artificial Sequence: Synthetic peptide
  Seed: YERMCNILKGKFQTA
YERMYNIMKNKFGTA

SEQ ID NO: 136747 - protein, 15 aa, Artificial Sequence
  Description of Artificial Sequence: Synthetic peptide
  Seed: YERMCNILKGKFQTA
YERMYNIMKNKFITA

SEQ ID NO: 136748 - protein, 15 aa, Artificial Sequence
  Description of Artificial Sequence: Synthetic peptide
  Seed: YERMCNILKGKFQTA
YERMYNIMKNKFLTA

SEQ ID NO: 136749 - protein, 15 aa, Artificial Sequence
  Description of Artificial Sequence: Synthetic peptide
  Seed: YERMCNILKGKFQTA
YERMYNIMKNKFMTA

SEQ ID NO: 136750 - protein, 15 aa, Artificial Sequence
  Description of Artificial Sequence: Synthetic peptide
  Seed: YERMCNILKGKFQTA
YERMYNIMKNKFNTA

SEQ ID NO: 136751 - protein, 15 aa, Artificial Sequence
  Description of Artificial Sequence: Synthetic peptide
  Seed: YERMCNILKGKFQTA
YERMYNIMKNKFSTA

SEQ ID NO: 136752 - protein, 15 aa, Artificial Sequence
  Description of Artificial Sequence: Synthetic peptide
  Seed: YERMCNILKGKFQTA
YERMYNIMKNKFTTA

SEQ ID NO: 136753 - protein, 15 aa, Artificial Sequence
  Description of Artificial Sequence: Synthetic peptide
  Seed: YERMCNILKGKFQTA
YERMYNIMKNKFVTA

SEQ ID NO: 136754 - protein, 15 aa, Artificial Sequence
  Description of Artificial Sequence: Synthetic peptide
  Seed: YERMCNILKGKFQTA
YERMYNIMKPKFATA

SEQ ID NO: 136755 - protein, 15 aa, Artificial Sequence
  Description of Artificial Sequence: Synthetic peptide
  Seed: YERMCNILKGKFQTA
YERMYNIMKPKFCTA

SEQ ID NO: 136756 - protein, 15 aa, Artificial Sequence
  Description of Artificial Sequence: Synthetic peptide
  Seed: YERMCNILKGKFQTA
YERMYNIMKPKFFTA

SEQ ID NO: 136757 - protein, 15 aa, Artificial Sequence
  Description of Artificial Sequence: Synthetic peptide
  Seed: YERMCNILKGKFQTA
YERMYNIMKPKFGTA

SEQ ID NO: 136758 - protein, 15 aa, Artificial Sequence
  Description of Artificial Sequence: Synthetic peptide
  Seed: YERMCNILKGKFQTA
YERMYNIMKPKFHTA

SEQ ID NO: 136759 - protein, 15 aa, Artificial Sequence
  Description of Artificial Sequence: Synthetic peptide
  Seed: YERMCNILKGKFQTA
YERMYNIMKPKFITA

SEQ ID NO: 136760 - protein, 15 aa, Artificial Sequence
  Description of Artificial Sequence: Synthetic peptide
  Seed: YERMCNILKGKFQTA
YERMYNIMKPKFLTA

SEQ ID NO: 136761 - protein, 15 aa, Artificial Sequence
  Description of Artificial Sequence: Synthetic peptide
  Seed: YERMCNILKGKFQTA
YERMYNIMKPKFMTA

SEQ ID NO: 136762 - protein, 15 aa, Artificial Sequence
  Description of Artificial Sequence: Synthetic peptide
  Seed: YERMCNILKGKFQTA
YERMYNIMKPKFNTA

SEQ ID NO: 136763 - protein, 15 aa, Artificial Sequence
  Description of Artificial Sequence: Synthetic peptide
  Seed: YERMCNILKGKFQTA
YERMYNIMKPKFPTA

SEQ ID NO: 136764 - protein, 15 aa, Artificial Sequence
  Description of Artificial Sequence: Synthetic peptide
  Seed: YERMCNILKGKFQTA
YERMYNIMKPKFSTA

SEQ ID NO: 136765 - protein, 15 aa, Artificial Sequence
  Description of Artificial Sequence: Synthetic peptide
  Seed: YERMCNILKGKFQTA
YERMYNIMKPKFTTA

SEQ ID NO: 136766 - protein, 15 aa, Artificial Sequence
  Description of Artificial Sequence: Synthetic peptide
  Seed: YERMCNILKGKFQTA
YERMYNIMKPKFVTA

SEQ ID NO: 136767 - protein, 15 aa, Artificial Sequence
  Description of Artificial Sequence: Synthetic peptide
  Seed: YERMCNILKGKFQTA
YERMYNIMKPKFWTA

SEQ ID NO: 136768 - protein, 15 aa, Artificial Sequence
  Description of Artificial Sequence: Synthetic peptide
  Seed: YERMCNILKGKFQTA
YERMYNIMKPKFYTA

SEQ ID NO: 136769 - protein, 15 aa, Artificial Sequence
  Description of Artificial Sequence: Synthetic peptide
  Seed: YERMCNILKGKFQTA
YERMYNIMKQKFATA

SEQ ID NO: 136770 - protein, 15 aa, Artificial Sequence
  Description of Artificial Sequence: Synthetic peptide
  Seed: YERMCNILKGKFQTA
YERMYNIMKQKFITA

SEQ ID NO: 136771 - protein, 15 aa, Artificial Sequence
  Description of Artificial Sequence: Synthetic peptide
  Seed: YERMCNILKGKFQTA
YERMYNIMKQKFLTA

SEQ ID NO: 136772 - protein, 15 aa, Artificial Sequence
  Description of Artificial Sequence: Synthetic peptide
  Seed: YERMCNILKGKFQTA
YERMYNIMKQKFVTA

SEQ ID NO: 136773 - protein, 15 aa, Artificial Sequence
  Description of Artificial Sequence: Synthetic peptide
  Seed: YERMCNILKGKFQTA
YERMYNIMKSKFATA

SEQ ID NO: 136774 - protein, 15 aa, Artificial Sequence
  Description of Artificial Sequence: Synthetic peptide
  Seed: YERMCNILKGKFQTA
YERMYNIMKSKFCTA

SEQ ID NO: 136775 - protein, 15 aa, Artificial Sequence
  Description of Artificial Sequence: Synthetic peptide
  Seed: YERMCNILKGKFQTA
YERMYNIMKSKFFTA

SEQ ID NO: 136776 - protein, 15 aa, Artificial Sequence
  Description of Artificial Sequence: Synthetic peptide
  Seed: YERMCNILKGKFQTA
YERMYNIMKSKFGTA

SEQ ID NO: 136777 - protein, 15 aa, Artificial Sequence
  Description of Artificial Sequence: Synthetic peptide
  Seed: YERMCNILKGKFQTA
YERMYNIMKSKFHTA

SEQ ID NO: 136778 - protein, 15 aa, Artificial Sequence
  Description of Artificial Sequence: Synthetic peptide
  Seed: YERMCNILKGKFQTA
YERMYNIMKSKFITA

SEQ ID NO: 136779 - protein, 15 aa, Artificial Sequence
  Description of Artificial Sequence: Synthetic peptide
  Seed: YERMCNILKGKFQTA
YERMYNIMKSKFLTA

SEQ ID NO: 136780 - protein, 15 aa, Artificial Sequence
  Description of Artificial Sequence: Synthetic peptide
  Seed: YERMCNILKGKFQTA
YERMYNIMKSKFMTA

SEQ ID NO: 136781 - protein, 15 aa, Artificial Sequence
  Description of Artificial Sequence: Synthetic peptide
  Seed: YERMCNILKGKFQTA
YERMYNIMKSKFNTA

SEQ ID NO: 136782 - protein, 15 aa, Artificial Sequence
  Description of Artificial Sequence: Synthetic peptide
  Seed: YERMCNILKGKFQTA
YERMYNIMKSKFPTA

SEQ ID NO: 136783 - protein, 15 aa, Artificial Sequence
  Description of Artificial Sequence: Synthetic peptide
  Seed: YERMCNILKGKFQTA
YERMYNIMKSKFQTA

SEQ ID NO: 136784 - protein, 15 aa, Artificial Sequence
  Description of Artificial Sequence: Synthetic peptide
  Seed: YERMCNILKGKFQTA
YERMYNIMKSKFRTA

SEQ ID NO: 136785 - protein, 15 aa, Artificial Sequence
  Description of Artificial Sequence: Synthetic peptide
  Seed: YERMCNILKGKFQTA
YERMYNIMKSKFSTA

SEQ ID NO: 136786 - protein, 15 aa, Artificial Sequence
  Description of Artificial Sequence: Synthetic peptide
  Seed: YERMCNILKGKFQTA
YERMYNIMKSKFTTA

SEQ ID NO: 136787 - protein, 15 aa, Artificial Sequence
  Description of Artificial Sequence: Synthetic peptide
  Seed: YERMCNILKGKFQTA
YERMYNIMKSKFVTA

SEQ ID NO: 136788 - protein, 15 aa, Artificial Sequence
  Description of Artificial Sequence: Synthetic peptide
  Seed: YERMCNILKGKFQTA
YERMYNIMKSKFWTA

SEQ ID NO: 136789 - protein, 15 aa, Artificial Sequence
  Description of Artificial Sequence: Synthetic peptide
  Seed: YERMCNILKGKFQTA
YERMYNIMKSKFYTA

SEQ ID NO: 136790 - protein, 15 aa, Artificial Sequence
  Description of Artificial Sequence: Synthetic peptide
  Seed: YERMCNILKGKFQTA
YERMYNIMKTKFATA

SEQ ID NO: 136791 - protein, 15 aa, Artificial Sequence
  Description of Artificial Sequence: Synthetic peptide
  Seed: YERMCNILKGKFQTA
YERMYNIMKTKFCTA

SEQ ID NO: 136792 - protein, 15 aa, Artificial Sequence
  Description of Artificial Sequence: Synthetic peptide
  Seed: YERMCNILKGKFQTA
YERMYNIMKTKFFTA

SEQ ID NO: 136793 - protein, 15 aa, Artificial Sequence
  Description of Artificial Sequence: Synthetic peptide
  Seed: YERMCNILKGKFQTA
YERMYNIMKTKFGTA

SEQ ID NO: 136794 - protein, 15 aa, Artificial Sequence
  Description of Artificial Sequence: Synthetic peptide
  Seed: YERMCNILKGKFQTA
YERMYNIMKTKFITA

SEQ ID NO: 136795 - protein, 15 aa, Artificial Sequence
  Description of Artificial Sequence: Synthetic peptide
  Seed: YERMCNILKGKFQTA
YERMYNIMKTKFLTA

SEQ ID NO: 136796 - protein, 15 aa, Artificial Sequence
  Description of Artificial Sequence: Synthetic peptide
  Seed: YERMCNILKGKFQTA
YERMYNIMKTKFMTA

SEQ ID NO: 136797 - protein, 15 aa, Artificial Sequence
  Description of Artificial Sequence: Synthetic peptide
  Seed: YERMCNILKGKFQTA
YERMYNIMKTKFNTA

SEQ ID NO: 136798 - protein, 15 aa, Artificial Sequence
  Description of Artificial Sequence: Synthetic peptide
  Seed: YERMCNILKGKFQTA
YERMYNIMKTKFSTA

SEQ ID NO: 136799 - protein, 15 aa, Artificial Sequence
  Description of Artificial Sequence: Synthetic peptide
  Seed: YERMCNILKGKFQTA
YERMYNIMKTKFTTA

SEQ ID NO: 136800 - protein, 15 aa, Artificial Sequence
  Description of Artificial Sequence: Synthetic peptide
  Seed: YERMCNILKGKFQTA
YERMYNIMKTKFVTA

SEQ ID NO: 136801 - protein, 15 aa, Artificial Sequence
  Description of Artificial Sequence: Synthetic peptide
  Seed: YERMCNILKGKFQTA
YERMYNIMKTKFYTA

SEQ ID NO: 136802 - protein, 15 aa, Artificial Sequence
  Description of Artificial Sequence: Synthetic peptide
  Seed: YERMCNILKGKFQTA
YERMYNIMKVKFATA

SEQ ID NO: 136803 - protein, 15 aa, Artificial Sequence
  Description of Artificial Sequence: Synthetic peptide
  Seed: YERMCNILKGKFQTA
YERMYNIMKVKFGTA

SEQ ID NO: 136804 - protein, 15 aa, Artificial Sequence
  Description of Artificial Sequence: Synthetic peptide
  Seed: YERMCNILKGKFQTA
YERMYNIMKVKFHTA

SEQ ID NO: 136805 - protein, 15 aa, Artificial Sequence
  Description of Artificial Sequence: Synthetic peptide
  Seed: YERMCNILKGKFQTA
YERMYNIMKVKFITA

SEQ ID NO: 136806 - protein, 15 aa, Artificial Sequence
  Description of Artificial Sequence: Synthetic peptide
  Seed: YERMCNILKGKFQTA
YERMYNIMKVKFLTA

SEQ ID NO: 136807 - protein, 15 aa, Artificial Sequence
  Description of Artificial Sequence: Synthetic peptide
  Seed: YERMCNILKGKFQTA
YERMYNIMKVKFMTA

SEQ ID NO: 136808 - protein, 15 aa, Artificial Sequence
  Description of Artificial Sequence: Synthetic peptide
  Seed: YERMCNILKGKFQTA
YERMYNIMKVKFNTA

SEQ ID NO: 136809 - protein, 15 aa, Artificial Sequence
  Description of Artificial Sequence: Synthetic peptide
  Seed: YERMCNILKGKFQTA
YERMYNIMKVKFPTA

SEQ ID NO: 136810 - protein, 15 aa, Artificial Sequence
  Description of Artificial Sequence: Synthetic peptide
  Seed: YERMCNILKGKFQTA
YERMYNIMKVKFQTA

SEQ ID NO: 136811 - protein, 15 aa, Artificial Sequence
  Description of Artificial Sequence: Synthetic peptide
  Seed: YERMCNILKGKFQTA
YERMYNIMKVKFSTA

SEQ ID NO: 136812 - protein, 15 aa, Artificial Sequence
  Description of Artificial Sequence: Synthetic peptide
  Seed: YERMCNILKGKFQTA
YERMYNIMKVKFTTA

SEQ ID NO: 136813 - protein, 15 aa, Artificial Sequence
  Description of Artificial Sequence: Synthetic peptide
  Seed: YERMCNILKGKFQTA
YERMYNIMKVKFVTA

SEQ ID NO: 136814 - protein, 15 aa, Artificial Sequence
  Description of Artificial Sequence: Synthetic peptide
  Seed: YERMCNILKGKFQTA
YERMYNINKAKFATA

SEQ ID NO: 136815 - protein, 15 aa, Artificial Sequence
  Description of Artificial Sequence: Synthetic peptide
  Seed: YERMCNILKGKFQTA
YERMYNINKAKFITA

SEQ ID NO: 136816 - protein, 15 aa, Artificial Sequence
  Description of Artificial Sequence: Synthetic peptide
  Seed: YERMCNILKGKFQTA
YERMYNINKAKFLTA

SEQ ID NO: 136817 - protein, 15 aa, Artificial Sequence
  Description of Artificial Sequence: Synthetic peptide
  Seed: YERMCNILKGKFQTA
YERMYNINKAKFMTA

SEQ ID NO: 136818 - protein, 15 aa, Artificial Sequence
  Description of Artificial Sequence: Synthetic peptide
  Seed: YERMCNILKGKFQTA
YERMYNINKAKFVTA

SEQ ID NO: 136819 - protein, 15 aa, Artificial Sequence
  Description of Artificial Sequence: Synthetic peptide
  Seed: YERMCNILKGKFQTA
YERMYNINKGKFITA

SEQ ID NO: 136820 - protein, 15 aa, Artificial Sequence
  Description of Artificial Sequence: Synthetic peptide
  Seed: YERMCNILKGKFQTA
YERMYNINKGKFLTA

SEQ ID NO: 136821 - protein, 15 aa, Artificial Sequence
  Description of Artificial Sequence: Synthetic peptide
  Seed: YERMCNILKGKFQTA
YERMYNINKGKFVTA

SEQ ID NO: 136822 - protein, 15 aa, Artificial Sequence
  Description of Artificial Sequence: Synthetic peptide
  Seed: YERMCNILKGKFQTA
YERMYNINKPKFLTA

SEQ ID NO: 136823 - protein, 15 aa, Artificial Sequence
  Description of Artificial Sequence: Synthetic peptide
  Seed: YERMCNILKGKFQTA
YERMYNINKSKFITA

SEQ ID NO: 136824 - protein, 15 aa, Artificial Sequence
  Description of Artificial Sequence: Synthetic peptide
  Seed: YERMCNILKGKFQTA
YERMYNINKSKFLTA

SEQ ID NO: 136825 - protein, 15 aa, Artificial Sequence
  Description of Artificial Sequence: Synthetic peptide
  Seed: YERMCNILKGKFQTA
YERMYNINKSKFVTA

SEQ ID NO: 136826 - protein, 15 aa, Artificial Sequence
  Description of Artificial Sequence: Synthetic peptide
  Seed: YERMCNILKGKFQTA
YERMYNIQKAKFATA

SEQ ID NO: 136827 - protein, 15 aa, Artificial Sequence
  Description of Artificial Sequence: Synthetic peptide
  Seed: YERMCNILKGKFQTA
YERMYNIQKAKFCTA

SEQ ID NO: 136828 - protein, 15 aa, Artificial Sequence
  Description of Artificial Sequence: Synthetic peptide
  Seed: YERMCNILKGKFQTA
YERMYNIQKAKFFTA

SEQ ID NO: 136829 - protein, 15 aa, Artificial Sequence
  Description of Artificial Sequence: Synthetic peptide
  Seed: YERMCNILKGKFQTA
YERMYNIQKAKFGTA

SEQ ID NO: 136830 - protein, 15 aa, Artificial Sequence
  Description of Artificial Sequence: Synthetic peptide
  Seed: YERMCNILKGKFQTA
YERMYNIQKAKFITA

SEQ ID NO: 136831 - protein, 15 aa, Artificial Sequence
  Description of Artificial Sequence: Synthetic peptide
  Seed: YERMCNILKGKFQTA
YERMYNIQKAKFLTA

SEQ ID NO: 136832 - protein, 15 aa, Artificial Sequence
  Description of Artificial Sequence: Synthetic peptide
  Seed: YERMCNILKGKFQTA
YERMYNIQKAKFMTA

SEQ ID NO: 136833 - protein, 15 aa, Artificial Sequence
  Description of Artificial Sequence: Synthetic peptide
  Seed: YERMCNILKGKFQTA
YERMYNIQKAKFNTA

SEQ ID NO: 136834 - protein, 15 aa, Artificial Sequence
  Description of Artificial Sequence: Synthetic peptide
  Seed: YERMCNILKGKFQTA
YERMYNIQKAKFSTA

SEQ ID NO: 136835 - protein, 15 aa, Artificial Sequence
  Description of Artificial Sequence: Synthetic peptide
  Seed: YERMCNILKGKFQTA
YERMYNIQKAKFTTA

SEQ ID NO: 136836 - protein, 15 aa, Artificial Sequence
  Description of Artificial Sequence: Synthetic peptide
  Seed: YERMCNILKGKFQTA
YERMYNIQKAKFVTA

SEQ ID NO: 136837 - protein, 15 aa, Artificial Sequence
  Description of Artificial Sequence: Synthetic peptide
  Seed: YERMCNILKGKFQTA
YERMYNIQKGKFATA

SEQ ID NO: 136838 - protein, 15 aa, Artificial Sequence
  Description of Artificial Sequence: Synthetic peptide
  Seed: YERMCNILKGKFQTA
YERMYNIQKGKFITA

SEQ ID NO: 136839 - protein, 15 aa, Artificial Sequence
  Description of Artificial Sequence: Synthetic peptide
  Seed: YERMCNILKGKFQTA
YERMYNIQKGKFLTA

SEQ ID NO: 136840 - protein, 15 aa, Artificial Sequence
  Description of Artificial Sequence: Synthetic peptide
  Seed: YERMCNILKGKFQTA
YERMYNIQKGKFMTA

SEQ ID NO: 136841 - protein, 15 aa, Artificial Sequence
  Description of Artificial Sequence: Synthetic peptide
  Seed: YERMCNILKGKFQTA
YERMYNIQKGKFSTA

SEQ ID NO: 136842 - protein, 15 aa, Artificial Sequence
  Description of Artificial Sequence: Synthetic peptide
  Seed: YERMCNILKGKFQTA
YERMYNIQKGKFTTA

SEQ ID NO: 136843 - protein, 15 aa, Artificial Sequence
  Description of Artificial Sequence: Synthetic peptide
  Seed: YERMCNILKGKFQTA
YERMYNIQKGKFVTA

SEQ ID NO: 136844 - protein, 15 aa, Artificial Sequence
  Description of Artificial Sequence: Synthetic peptide
  Seed: YERMCNILKGKFQTA
YERMYNIQKIKFLTA

SEQ ID NO: 136845 - protein, 15 aa, Artificial Sequence
  Description of Artificial Sequence: Synthetic peptide
  Seed: YERMCNILKGKFQTA
YERMYNIQKIKFVTA

SEQ ID NO: 136846 - protein, 15 aa, Artificial Sequence
  Description of Artificial Sequence: Synthetic peptide
  Seed: YERMCNILKGKFQTA
YERMYNIQKNKFATA

SEQ ID NO: 136847 - protein, 15 aa, Artificial Sequence
  Description of Artificial Sequence: Synthetic peptide
  Seed: YERMCNILKGKFQTA
YERMYNIQKNKFITA

SEQ ID NO: 136848 - protein, 15 aa, Artificial Sequence
  Description of Artificial Sequence: Synthetic peptide
  Seed: YERMCNILKGKFQTA
YERMYNIQKNKFLTA

SEQ ID NO: 136849 - protein, 15 aa, Artificial Sequence
  Description of Artificial Sequence: Synthetic peptide
  Seed: YERMCNILKGKFQTA
YERMYNIQKNKFMTA

SEQ ID NO: 136850 - protein, 15 aa, Artificial Sequence
  Description of Artificial Sequence: Synthetic peptide
  Seed: YERMCNILKGKFQTA
YERMYNIQKNKFSTA

SEQ ID NO: 136851 - protein, 15 aa, Artificial Sequence
  Description of Artificial Sequence: Synthetic peptide
  Seed: YERMCNILKGKFQTA
YERMYNIQKNKFTTA

SEQ ID NO: 136852 - protein, 15 aa, Artificial Sequence
  Description of Artificial Sequence: Synthetic peptide
  Seed: YERMCNILKGKFQTA
YERMYNIQKNKFVTA

SEQ ID NO: 136853 - protein, 15 aa, Artificial Sequence
  Description of Artificial Sequence: Synthetic peptide
  Seed: YERMCNILKGKFQTA
YERMYNIQKPKFATA

SEQ ID NO: 136854 - protein, 15 aa, Artificial Sequence
  Description of Artificial Sequence: Synthetic peptide
  Seed: YERMCNILKGKFQTA
YERMYNIQKPKFITA

SEQ ID NO: 136855 - protein, 15 aa, Artificial Sequence
  Description of Artificial Sequence: Synthetic peptide
  Seed: YERMCNILKGKFQTA
YERMYNIQKPKFLTA

SEQ ID NO: 136856 - protein, 15 aa, Artificial Sequence
  Description of Artificial Sequence: Synthetic peptide
  Seed: YERMCNILKGKFQTA
YERMYNIQKPKFMTA

SEQ ID NO: 136857 - protein, 15 aa, Artificial Sequence
  Description of Artificial Sequence: Synthetic peptide
  Seed: YERMCNILKGKFQTA
YERMYNIQKPKFTTA

SEQ ID NO: 136858 - protein, 15 aa, Artificial Sequence
  Description of Artificial Sequence: Synthetic peptide
  Seed: YERMCNILKGKFQTA
YERMYNIQKPKFVTA

SEQ ID NO: 136859 - protein, 15 aa, Artificial Sequence
  Description of Artificial Sequence: Synthetic peptide
  Seed: YERMCNILKGKFQTA
YERMYNIQKSKFATA

SEQ ID NO: 136860 - protein, 15 aa, Artificial Sequence
  Description of Artificial Sequence: Synthetic peptide
  Seed: YERMCNILKGKFQTA
YERMYNIQKSKFITA

SEQ ID NO: 136861 - protein, 15 aa, Artificial Sequence
  Description of Artificial Sequence: Synthetic peptide
  Seed: YERMCNILKGKFQTA
YERMYNIQKSKFLTA

SEQ ID NO: 136862 - protein, 15 aa, Artificial Sequence
  Description of Artificial Sequence: Synthetic peptide
  Seed: YERMCNILKGKFQTA
YERMYNIQKSKFMTA

SEQ ID NO: 136863 - protein, 15 aa, Artificial Sequence
  Description of Artificial Sequence: Synthetic peptide
  Seed: YERMCNILKGKFQTA
YERMYNIQKSKFSTA

SEQ ID NO: 136864 - protein, 15 aa, Artificial Sequence
  Description of Artificial Sequence: Synthetic peptide
  Seed: YERMCNILKGKFQTA
YERMYNIQKSKFTTA

SEQ ID NO: 136865 - protein, 15 aa, Artificial Sequence
  Description of Artificial Sequence: Synthetic peptide
  Seed: YERMCNILKGKFQTA
YERMYNIQKSKFVTA

SEQ ID NO: 136866 - protein, 15 aa, Artificial Sequence
  Description of Artificial Sequence: Synthetic peptide
  Seed: YERMCNILKGKFQTA
YERMYNIQKTKFATA

SEQ ID NO: 136867 - protein, 15 aa, Artificial Sequence
  Description of Artificial Sequence: Synthetic peptide
  Seed: YERMCNILKGKFQTA
YERMYNIQKTKFITA

SEQ ID NO: 136868 - protein, 15 aa, Artificial Sequence
  Description of Artificial Sequence: Synthetic peptide
  Seed: YERMCNILKGKFQTA
YERMYNIQKTKFLTA

SEQ ID NO: 136869 - protein, 15 aa, Artificial Sequence
  Description of Artificial Sequence: Synthetic peptide
  Seed: YERMCNILKGKFQTA
YERMYNIQKTKFMTA

SEQ ID NO: 136870 - protein, 15 aa, Artificial Sequence
  Description of Artificial Sequence: Synthetic peptide
  Seed: YERMCNILKGKFQTA
YERMYNIQKTKFTTA

SEQ ID NO: 136871 - protein, 15 aa, Artificial Sequence
  Description of Artificial Sequence: Synthetic peptide
  Seed: YERMCNILKGKFQTA
YERMYNIQKTKFVTA

SEQ ID NO: 136872 - protein, 15 aa, Artificial Sequence
  Description of Artificial Sequence: Synthetic peptide
  Seed: YERMCNILKGKFQTA
YERMYNIQKVKFATA

SEQ ID NO: 136873 - protein, 15 aa, Artificial Sequence
  Description of Artificial Sequence: Synthetic peptide
  Seed: YERMCNILKGKFQTA
YERMYNIQKVKFITA

SEQ ID NO: 136874 - protein, 15 aa, Artificial Sequence
  Description of Artificial Sequence: Synthetic peptide
  Seed: YERMCNILKGKFQTA
YERMYNIQKVKFLTA

SEQ ID NO: 136875 - protein, 15 aa, Artificial Sequence
  Description of Artificial Sequence: Synthetic peptide
  Seed: YERMCNILKGKFQTA
YERMYNIQKVKFVTA

SEQ ID NO: 136876 - protein, 15 aa, Artificial Sequence
  Description of Artificial Sequence: Synthetic peptide
  Seed: YERMCNILKGKFQTA
YERMYNISKAKFATA

SEQ ID NO: 136877 - protein, 15 aa, Artificial Sequence
  Description of Artificial Sequence: Synthetic peptide
  Seed: YERMCNILKGKFQTA
YERMYNISKAKFFTA

SEQ ID NO: 136878 - protein, 15 aa, Artificial Sequence
  Description of Artificial Sequence: Synthetic peptide
  Seed: YERMCNILKGKFQTA
YERMYNISKAKFGTA

SEQ ID NO: 136879 - protein, 15 aa, Artificial Sequence
  Description of Artificial Sequence: Synthetic peptide
  Seed: YERMCNILKGKFQTA
YERMYNISKAKFITA

SEQ ID NO: 136880 - protein, 15 aa, Artificial Sequence
  Description of Artificial Sequence: Synthetic peptide
  Seed: YERMCNILKGKFQTA
YERMYNISKAKFLTA

SEQ ID NO: 136881 - protein, 15 aa, Artificial Sequence
  Description of Artificial Sequence: Synthetic peptide
  Seed: YERMCNILKGKFQTA
YERMYNISKAKFMTA

SEQ ID NO: 136882 - protein, 15 aa, Artificial Sequence
  Description of Artificial Sequence: Synthetic peptide
  Seed: YERMCNILKGKFQTA
YERMYNISKAKFSTA

SEQ ID NO: 136883 - protein, 15 aa, Artificial Sequence
  Description of Artificial Sequence: Synthetic peptide
  Seed: YERMCNILKGKFQTA
YERMYNISKAKFTTA

SEQ ID NO: 136884 - protein, 15 aa, Artificial Sequence
  Description of Artificial Sequence: Synthetic peptide
  Seed: YERMCNILKGKFQTA
YERMYNISKAKFVTA

SEQ ID NO: 136885 - protein, 15 aa, Artificial Sequence
  Description of Artificial Sequence: Synthetic peptide
  Seed: YERMCNILKGKFQTA
YERMYNISKGKFATA

SEQ ID NO: 136886 - protein, 15 aa, Artificial Sequence
  Description of Artificial Sequence: Synthetic peptide
  Seed: YERMCNILKGKFQTA
YERMYNISKGKFITA

SEQ ID NO: 136887 - protein, 15 aa, Artificial Sequence
  Description of Artificial Sequence: Synthetic peptide
  Seed: YERMCNILKGKFQTA
YERMYNISKGKFLTA

SEQ ID NO: 136888 - protein, 15 aa, Artificial Sequence
  Description of Artificial Sequence: Synthetic peptide
  Seed: YERMCNILKGKFQTA
YERMYNISKGKFMTA

SEQ ID NO: 136889 - protein, 15 aa, Artificial Sequence
  Description of Artificial Sequence: Synthetic peptide
  Seed: YERMCNILKGKFQTA
YERMYNISKGKFSTA

SEQ ID NO: 136890 - protein, 15 aa, Artificial Sequence
  Description of Artificial Sequence: Synthetic peptide
  Seed: YERMCNILKGKFQTA
YERMYNISKGKFTTA

SEQ ID NO: 136891 - protein, 15 aa, Artificial Sequence
  Description of Artificial Sequence: Synthetic peptide
  Seed: YERMCNILKGKFQTA
YERMYNISKGKFVTA

SEQ ID NO: 136892 - protein, 15 aa, Artificial Sequence
  Description of Artificial Sequence: Synthetic peptide
  Seed: YERMCNILKGKFQTA
YERMYNISKNKFATA

SEQ ID NO: 136893 - protein, 15 aa, Artificial Sequence
  Description of Artificial Sequence: Synthetic peptide
  Seed: YERMCNILKGKFQTA
YERMYNISKNKFITA

SEQ ID NO: 136894 - protein, 15 aa, Artificial Sequence
  Description of Artificial Sequence: Synthetic peptide
  Seed: YERMCNILKGKFQTA
YERMYNISKNKFLTA

SEQ ID NO: 136895 - protein, 15 aa, Artificial Sequence
  Description of Artificial Sequence: Synthetic peptide
  Seed: YERMCNILKGKFQTA
YERMYNISKNKFVTA

SEQ ID NO: 136896 - protein, 15 aa, Artificial Sequence
  Description of Artificial Sequence: Synthetic peptide
  Seed: YERMCNILKGKFQTA
YERMYNISKPKFATA

SEQ ID NO: 136897 - protein, 15 aa, Artificial Sequence
  Description of Artificial Sequence: Synthetic peptide
  Seed: YERMCNILKGKFQTA
YERMYNISKPKFITA

SEQ ID NO: 136898 - protein, 15 aa, Artificial Sequence
  Description of Artificial Sequence: Synthetic peptide
  Seed: YERMCNILKGKFQTA
YERMYNISKPKFLTA

SEQ ID NO: 136899 - protein, 15 aa, Artificial Sequence
  Description of Artificial Sequence: Synthetic peptide
  Seed: YERMCNILKGKFQTA
YERMYNISKPKFMTA

SEQ ID NO: 136900 - protein, 15 aa, Artificial Sequence
  Description of Artificial Sequence: Synthetic peptide
  Seed: YERMCNILKGKFQTA
YERMYNISKPKFTTA

SEQ ID NO: 136901 - protein, 15 aa, Artificial Sequence
  Description of Artificial Sequence: Synthetic peptide
  Seed: YERMCNILKGKFQTA
YERMYNISKPKFVTA

SEQ ID NO: 136902 - protein, 15 aa, Artificial Sequence
  Description of Artificial Sequence: Synthetic peptide
  Seed: YERMCNILKGKFQTA
YERMYNISKSKFATA

SEQ ID NO: 136903 - protein, 15 aa, Artificial Sequence
  Description of Artificial Sequence: Synthetic peptide
  Seed: YERMCNILKGKFQTA
YERMYNISKSKFITA

SEQ ID NO: 136904 - protein, 15 aa, Artificial Sequence
  Description of Artificial Sequence: Synthetic peptide
  Seed: YERMCNILKGKFQTA
YERMYNISKSKFLTA

SEQ ID NO: 136905 - protein, 15 aa, Artificial Sequence
  Description of Artificial Sequence: Synthetic peptide
  Seed: YERMCNILKGKFQTA
YERMYNISKSKFMTA

SEQ ID NO: 136906 - protein, 15 aa, Artificial Sequence
  Description of Artificial Sequence: Synthetic peptide
  Seed: YERMCNILKGKFQTA
YERMYNISKSKFSTA

SEQ ID NO: 136907 - protein, 15 aa, Artificial Sequence
  Description of Artificial Sequence: Synthetic peptide
  Seed: YERMCNILKGKFQTA
YERMYNISKSKFTTA

SEQ ID NO: 136908 - protein, 15 aa, Artificial Sequence
  Description of Artificial Sequence: Synthetic peptide
  Seed: YERMCNILKGKFQTA
YERMYNISKSKFVTA

SEQ ID NO: 136909 - protein, 15 aa, Artificial Sequence
  Description of Artificial Sequence: Synthetic peptide
  Seed: YERMCNILKGKFQTA
YERMYNISKTKFATA

SEQ ID NO: 136910 - protein, 15 aa, Artificial Sequence
  Description of Artificial Sequence: Synthetic peptide
  Seed: YERMCNILKGKFQTA
YERMYNISKTKFITA

SEQ ID NO: 136911 - protein, 15 aa, Artificial Sequence
  Description of Artificial Sequence: Synthetic peptide
  Seed: YERMCNILKGKFQTA
YERMYNISKTKFLTA

SEQ ID NO: 136912 - protein, 15 aa, Artificial Sequence
  Description of Artificial Sequence: Synthetic peptide
  Seed: YERMCNILKGKFQTA
YERMYNISKTKFMTA

SEQ ID NO: 136913 - protein, 15 aa, Artificial Sequence
  Description of Artificial Sequence: Synthetic peptide
  Seed: YERMCNILKGKFQTA
YERMYNISKTKFVTA

SEQ ID NO: 136914 - protein, 15 aa, Artificial Sequence
  Description of Artificial Sequence: Synthetic peptide
  Seed: YERMCNILKGKFQTA
YERMYNISKVKFATA

SEQ ID NO: 136915 - protein, 15 aa, Artificial Sequence
  Description of Artificial Sequence: Synthetic peptide
  Seed: YERMCNILKGKFQTA
YERMYNISKVKFITA

SEQ ID NO: 136916 - protein, 15 aa, Artificial Sequence
  Description of Artificial Sequence: Synthetic peptide
  Seed: YERMCNILKGKFQTA
YERMYNISKVKFLTA

SEQ ID NO: 136917 - protein, 15 aa, Artificial Sequence
  Description of Artificial Sequence: Synthetic peptide
  Seed: YERMCNILKGKFQTA
YERMYNISKVKFVTA

SEQ ID NO: 136918 - protein, 15 aa, Artificial Sequence
  Description of Artificial Sequence: Synthetic peptide
  Seed: YERMCNILKGKFQTA
YERMYNITKAKFATA

SEQ ID NO: 136919 - protein, 15 aa, Artificial Sequence
  Description of Artificial Sequence: Synthetic peptide
  Seed: YERMCNILKGKFQTA
YERMYNITKAKFITA

SEQ ID NO: 136920 - protein, 15 aa, Artificial Sequence
  Description of Artificial Sequence: Synthetic peptide
  Seed: YERMCNILKGKFQTA
YERMYNITKAKFLTA

SEQ ID NO: 136921 - protein, 15 aa, Artificial Sequence
  Description of Artificial Sequence: Synthetic peptide
  Seed: YERMCNILKGKFQTA
YERMYNITKAKFMTA

SEQ ID NO: 136922 - protein, 15 aa, Artificial Sequence
  Description of Artificial Sequence: Synthetic peptide
  Seed: YERMCNILKGKFQTA
YERMYNITKAKFSTA

SEQ ID NO: 136923 - protein, 15 aa, Artificial Sequence
  Description of Artificial Sequence: Synthetic peptide
  Seed: YERMCNILKGKFQTA
YERMYNITKAKFTTA

SEQ ID NO: 136924 - protein, 15 aa, Artificial Sequence
  Description of Artificial Sequence: Synthetic peptide
  Seed: YERMCNILKGKFQTA
YERMYNITKAKFVTA

SEQ ID NO: 136925 - protein, 15 aa, Artificial Sequence
  Description of Artificial Sequence: Synthetic peptide
  Seed: YERMCNILKGKFQTA
YERMYNITKGKFATA

SEQ ID NO: 136926 - protein, 15 aa, Artificial Sequence
  Description of Artificial Sequence: Synthetic peptide
  Seed: YERMCNILKGKFQTA
YERMYNITKGKFITA

SEQ ID NO: 136927 - protein, 15 aa, Artificial Sequence
  Description of Artificial Sequence: Synthetic peptide
  Seed: YERMCNILKGKFQTA
YERMYNITKGKFLTA

SEQ ID NO: 136928 - protein, 15 aa, Artificial Sequence
  Description of Artificial Sequence: Synthetic peptide
  Seed: YERMCNILKGKFQTA
YERMYNITKGKFMTA

SEQ ID NO: 136929 - protein, 15 aa, Artificial Sequence
  Description of Artificial Sequence: Synthetic peptide
  Seed: YERMCNILKGKFQTA
YERMYNITKGKFVTA

SEQ ID NO: 136930 - protein, 15 aa, Artificial Sequence
  Description of Artificial Sequence: Synthetic peptide
  Seed: YERMCNILKGKFQTA
YERMYNITKNKFLTA

SEQ ID NO: 136931 - protein, 15 aa, Artificial Sequence
  Description of Artificial Sequence: Synthetic peptide
  Seed: YERMCNILKGKFQTA
YERMYNITKNKFVTA

SEQ ID NO: 136932 - protein, 15 aa, Artificial Sequence
  Description of Artificial Sequence: Synthetic peptide
  Seed: YERMCNILKGKFQTA
YERMYNITKPKFATA

SEQ ID NO: 136933 - protein, 15 aa, Artificial Sequence
  Description of Artificial Sequence: Synthetic peptide
  Seed: YERMCNILKGKFQTA
YERMYNITKPKFITA

SEQ ID NO: 136934 - protein, 15 aa, Artificial Sequence
  Description of Artificial Sequence: Synthetic peptide
  Seed: YERMCNILKGKFQTA
YERMYNITKPKFLTA

SEQ ID NO: 136935 - protein, 15 aa, Artificial Sequence
  Description of Artificial Sequence: Synthetic peptide
  Seed: YERMCNILKGKFQTA
YERMYNITKPKFVTA

SEQ ID NO: 136936 - protein, 15 aa, Artificial Sequence
  Description of Artificial Sequence: Synthetic peptide
  Seed: YERMCNILKGKFQTA
YERMYNITKSKFATA

SEQ ID NO: 136937 - protein, 15 aa, Artificial Sequence
  Description of Artificial Sequence: Synthetic peptide
  Seed: YERMCNILKGKFQTA
YERMYNITKSKFITA

SEQ ID NO: 136938 - protein, 15 aa, Artificial Sequence
  Description of Artificial Sequence: Synthetic peptide
  Seed: YERMCNILKGKFQTA
YERMYNITKSKFLTA

SEQ ID NO: 136939 - protein, 15 aa, Artificial Sequence
  Description of Artificial Sequence: Synthetic peptide
  Seed: YERMCNILKGKFQTA
YERMYNITKSKFMTA

SEQ ID NO: 136940 - protein, 15 aa, Artificial Sequence
  Description of Artificial Sequence: Synthetic peptide
  Seed: YERMCNILKGKFQTA
YERMYNITKSKFTTA

SEQ ID NO: 136941 - protein, 15 aa, Artificial Sequence
  Description of Artificial Sequence: Synthetic peptide
  Seed: YERMCNILKGKFQTA
YERMYNITKSKFVTA

SEQ ID NO: 136942 - protein, 15 aa, Artificial Sequence
  Description of Artificial Sequence: Synthetic peptide
  Seed: YERMCNILKGKFQTA
YERMYNITKTKFITA

SEQ ID NO: 136943 - protein, 15 aa, Artificial Sequence
  Description of Artificial Sequence: Synthetic peptide
  Seed: YERMCNILKGKFQTA
YERMYNITKTKFLTA

SEQ ID NO: 136944 - protein, 15 aa, Artificial Sequence
  Description of Artificial Sequence: Synthetic peptide
  Seed: YERMCNILKGKFQTA
YERMYNITKTKFVTA

SEQ ID NO: 136945 - protein, 15 aa, Artificial Sequence
  Description of Artificial Sequence: Synthetic peptide
  Seed: YERMCNILKGKFQTA
YERMYNIVKAKFATA

SEQ ID NO: 136946 - protein, 15 aa, Artificial Sequence
  Description of Artificial Sequence: Synthetic peptide
  Seed: YERMCNILKGKFQTA
YERMYNIVKAKFCTA

SEQ ID NO: 136947 - protein, 15 aa, Artificial Sequence
  Description of Artificial Sequence: Synthetic peptide
  Seed: YERMCNILKGKFQTA
YERMYNIVKAKFFTA

SEQ ID NO: 136948 - protein, 15 aa, Artificial Sequence
  Description of Artificial Sequence: Synthetic peptide
  Seed: YERMCNILKGKFQTA
YERMYNIVKAKFGTA

SEQ ID NO: 136949 - protein, 15 aa, Artificial Sequence
  Description of Artificial Sequence: Synthetic peptide
  Seed: YERMCNILKGKFQTA
YERMYNIVKAKFITA

SEQ ID NO: 136950 - protein, 15 aa, Artificial Sequence
  Description of Artificial Sequence: Synthetic peptide
  Seed: YERMCNILKGKFQTA
YERMYNIVKAKFLTA

SEQ ID NO: 136951 - protein, 15 aa, Artificial Sequence
  Description of Artificial Sequence: Synthetic peptide
  Seed: YERMCNILKGKFQTA
YERMYNIVKAKFMTA

SEQ ID NO: 136952 - protein, 15 aa, Artificial Sequence
  Description of Artificial Sequence: Synthetic peptide
  Seed: YERMCNILKGKFQTA
YERMYNIVKAKFNTA

SEQ ID NO: 136953 - protein, 15 aa, Artificial Sequence
  Description of Artificial Sequence: Synthetic peptide
  Seed: YERMCNILKGKFQTA
YERMYNIVKAKFSTA

SEQ ID NO: 136954 - protein, 15 aa, Artificial Sequence
  Description of Artificial Sequence: Synthetic peptide
  Seed: YERMCNILKGKFQTA
YERMYNIVKAKFTTA

SEQ ID NO: 136955 - protein, 15 aa, Artificial Sequence
  Description of Artificial Sequence: Synthetic peptide
  Seed: YERMCNILKGKFQTA
YERMYNIVKAKFVTA

SEQ ID NO: 136956 - protein, 15 aa, Artificial Sequence
  Description of Artificial Sequence: Synthetic peptide
  Seed: YERMCNILKGKFQTA
YERMYNIVKGKFATA

SEQ ID NO: 136957 - protein, 15 aa, Artificial Sequence
  Description of Artificial Sequence: Synthetic peptide
  Seed: YERMCNILKGKFQTA
YERMYNIVKGKFCTA

SEQ ID NO: 136958 - protein, 15 aa, Artificial Sequence
  Description of Artificial Sequence: Synthetic peptide
  Seed: YERMCNILKGKFQTA
YERMYNIVKGKFFTA

SEQ ID NO: 136959 - protein, 15 aa, Artificial Sequence
  Description of Artificial Sequence: Synthetic peptide
  Seed: YERMCNILKGKFQTA
YERMYNIVKGKFGTA

SEQ ID NO: 136960 - protein, 15 aa, Artificial Sequence
  Description of Artificial Sequence: Synthetic peptide
  Seed: YERMCNILKGKFQTA
YERMYNIVKGKFITA

SEQ ID NO: 136961 - protein, 15 aa, Artificial Sequence
  Description of Artificial Sequence: Synthetic peptide
  Seed: YERMCNILKGKFQTA
YERMYNIVKGKFLTA

SEQ ID NO: 136962 - protein, 15 aa, Artificial Sequence
  Description of Artificial Sequence: Synthetic peptide
  Seed: YERMCNILKGKFQTA
YERMYNIVKGKFMTA

SEQ ID NO: 136963 - protein, 15 aa, Artificial Sequence
  Description of Artificial Sequence: Synthetic peptide
  Seed: YERMCNILKGKFQTA
YERMYNIVKGKFNTA

SEQ ID NO: 136964 - protein, 15 aa, Artificial Sequence
  Description of Artificial Sequence: Synthetic peptide
  Seed: YERMCNILKGKFQTA
YERMYNIVKGKFSTA

SEQ ID NO: 136965 - protein, 15 aa, Artificial Sequence
  Description of Artificial Sequence: Synthetic peptide
  Seed: YERMCNILKGKFQTA
YERMYNIVKGKFTTA

SEQ ID NO: 136966 - protein, 15 aa, Artificial Sequence
  Description of Artificial Sequence: Synthetic peptide
  Seed: YERMCNILKGKFQTA
YERMYNIVKGKFVTA

SEQ ID NO: 136967 - protein, 15 aa, Artificial Sequence
  Description of Artificial Sequence: Synthetic peptide
  Seed: YERMCNILKGKFQTA
YERMYNIVKIKFNTA

SEQ ID NO: 136968 - protein, 15 aa, Artificial Sequence
  Description of Artificial Sequence: Synthetic peptide
  Seed: YERMCNILKGKFQTA
YERMYNIVKIKFVTA

SEQ ID NO: 136969 - protein, 15 aa, Artificial Sequence
  Description of Artificial Sequence: Synthetic peptide
  Seed: YERMCNILKGKFQTA
YERMYNIVKNKFATA

SEQ ID NO: 136970 - protein, 15 aa, Artificial Sequence
  Description of Artificial Sequence: Synthetic peptide
  Seed: YERMCNILKGKFQTA
YERMYNIVKNKFITA

SEQ ID NO: 136971 - protein, 15 aa, Artificial Sequence
  Description of Artificial Sequence: Synthetic peptide
  Seed: YERMCNILKGKFQTA
YERMYNIVKNKFLTA

SEQ ID NO: 136972 - protein, 15 aa, Artificial Sequence
  Description of Artificial Sequence: Synthetic peptide
  Seed: YERMCNILKGKFQTA
YERMYNIVKNKFMTA

SEQ ID NO: 136973 - protein, 15 aa, Artificial Sequence
  Description of Artificial Sequence: Synthetic peptide
  Seed: YERMCNILKGKFQTA
YERMYNIVKNKFSTA

SEQ ID NO: 136974 - protein, 15 aa, Artificial Sequence
  Description of Artificial Sequence: Synthetic peptide
  Seed: YERMCNILKGKFQTA
YERMYNIVKNKFTTA

SEQ ID NO: 136975 - protein, 15 aa, Artificial Sequence
  Description of Artificial Sequence: Synthetic peptide
  Seed: YERMCNILKGKFQTA
YERMYNIVKNKFVTA

SEQ ID NO: 136976 - protein, 15 aa, Artificial Sequence
  Description of Artificial Sequence: Synthetic peptide
  Seed: YERMCNILKGKFQTA
YERMYNIVKPKFATA

SEQ ID NO: 136977 - protein, 15 aa, Artificial Sequence
  Description of Artificial Sequence: Synthetic peptide
  Seed: YERMCNILKGKFQTA
YERMYNIVKPKFITA

SEQ ID NO: 136978 - protein, 15 aa, Artificial Sequence
  Description of Artificial Sequence: Synthetic peptide
  Seed: YERMCNILKGKFQTA
YERMYNIVKPKFLTA

SEQ ID NO: 136979 - protein, 15 aa, Artificial Sequence
  Description of Artificial Sequence: Synthetic peptide
  Seed: YERMCNILKGKFQTA
YERMYNIVKPKFMTA

SEQ ID NO: 136980 - protein, 15 aa, Artificial Sequence
  Description of Artificial Sequence: Synthetic peptide
  Seed: YERMCNILKGKFQTA
YERMYNIVKPKFNTA

SEQ ID NO: 136981 - protein, 15 aa, Artificial Sequence
  Description of Artificial Sequence: Synthetic peptide
  Seed: YERMCNILKGKFQTA
YERMYNIVKPKFSTA

SEQ ID NO: 136982 - protein, 15 aa, Artificial Sequence
  Description of Artificial Sequence: Synthetic peptide
  Seed: YERMCNILKGKFQTA
YERMYNIVKPKFTTA

SEQ ID NO: 136983 - protein, 15 aa, Artificial Sequence
  Description of Artificial Sequence: Synthetic peptide
  Seed: YERMCNILKGKFQTA
YERMYNIVKPKFVTA

SEQ ID NO: 136984 - protein, 15 aa, Artificial Sequence
  Description of Artificial Sequence: Synthetic peptide
  Seed: YERMCNILKGKFQTA
YERMYNIVKSKFATA

SEQ ID NO: 136985 - protein, 15 aa, Artificial Sequence
  Description of Artificial Sequence: Synthetic peptide
  Seed: YERMCNILKGKFQTA
YERMYNIVKSKFCTA

SEQ ID NO: 136986 - protein, 15 aa, Artificial Sequence
  Description of Artificial Sequence: Synthetic peptide
  Seed: YERMCNILKGKFQTA
YERMYNIVKSKFFTA

SEQ ID NO: 136987 - protein, 15 aa, Artificial Sequence
  Description of Artificial Sequence: Synthetic peptide
  Seed: YERMCNILKGKFQTA
YERMYNIVKSKFGTA

SEQ ID NO: 136988 - protein, 15 aa, Artificial Sequence
  Description of Artificial Sequence: Synthetic peptide
  Seed: YERMCNILKGKFQTA
YERMYNIVKSKFITA

SEQ ID NO: 136989 - protein, 15 aa, Artificial Sequence
  Description of Artificial Sequence: Synthetic peptide
  Seed: YERMCNILKGKFQTA
YERMYNIVKSKFLTA

SEQ ID NO: 136990 - protein, 15 aa, Artificial Sequence
  Description of Artificial Sequence: Synthetic peptide
  Seed: YERMCNILKGKFQTA
YERMYNIVKSKFMTA

SEQ ID NO: 136991 - protein, 15 aa, Artificial Sequence
  Description of Artificial Sequence: Synthetic peptide
  Seed: YERMCNILKGKFQTA
YERMYNIVKSKFNTA

SEQ ID NO: 136992 - protein, 15 aa, Artificial Sequence
  Description of Artificial Sequence: Synthetic peptide
  Seed: YERMCNILKGKFQTA
YERMYNIVKSKFSTA

SEQ ID NO: 136993 - protein, 15 aa, Artificial Sequence
  Description of Artificial Sequence: Synthetic peptide
  Seed: YERMCNILKGKFQTA
YERMYNIVKSKFTTA

SEQ ID NO: 136994 - protein, 15 aa, Artificial Sequence
  Description of Artificial Sequence: Synthetic peptide
  Seed: YERMCNILKGKFQTA
YERMYNIVKSKFVTA

SEQ ID NO: 136995 - protein, 15 aa, Artificial Sequence
  Description of Artificial Sequence: Synthetic peptide
  Seed: YERMCNILKGKFQTA
YERMYNIVKTKFATA

SEQ ID NO: 136996 - protein, 15 aa, Artificial Sequence
  Description of Artificial Sequence: Synthetic peptide
  Seed: YERMCNILKGKFQTA
YERMYNIVKTKFITA

SEQ ID NO: 136997 - protein, 15 aa, Artificial Sequence
  Description of Artificial Sequence: Synthetic peptide
  Seed: YERMCNILKGKFQTA
YERMYNIVKTKFLTA

SEQ ID NO: 136998 - protein, 15 aa, Artificial Sequence
  Description of Artificial Sequence: Synthetic peptide
  Seed: YERMCNILKGKFQTA
YERMYNIVKTKFMTA

SEQ ID NO: 136999 - protein, 15 aa, Artificial Sequence
  Description of Artificial Sequence: Synthetic peptide
  Seed: YERMCNILKGKFQTA
YERMYNIVKTKFNTA

SEQ ID NO: 137000 - protein, 15 aa, Artificial Sequence
  Description of Artificial Sequence: Synthetic peptide
  Seed: YERMCNILKGKFQTA
YERMYNIVKTKFSTA

SEQ ID NO: 137001 - protein, 15 aa, Artificial Sequence
  Description of Artificial Sequence: Synthetic peptide
  Seed: YERMCNILKGKFQTA
YERMYNIVKTKFTTA

SEQ ID NO: 137002 - protein, 15 aa, Artificial Sequence
  Description of Artificial Sequence: Synthetic peptide
  Seed: YERMCNILKGKFQTA
YERMYNIVKTKFVTA

SEQ ID NO: 137003 - protein, 15 aa, Artificial Sequence
  Description of Artificial Sequence: Synthetic peptide
  Seed: YERMCNILKGKFQTA
YERMYNIVKVKFATA

SEQ ID NO: 137004 - protein, 15 aa, Artificial Sequence
  Description of Artificial Sequence: Synthetic peptide
  Seed: YERMCNILKGKFQTA
YERMYNIVKVKFITA

SEQ ID NO: 137005 - protein, 15 aa, Artificial Sequence
  Description of Artificial Sequence: Synthetic peptide
  Seed: YERMCNILKGKFQTA
YERMYNIVKVKFLTA

SEQ ID NO: 137006 - protein, 15 aa, Artificial Sequence
  Description of Artificial Sequence: Synthetic peptide
  Seed: YERMCNILKGKFQTA
YERMYNIVKVKFNTA

SEQ ID NO: 137007 - protein, 15 aa, Artificial Sequence
  Description of Artificial Sequence: Synthetic peptide
  Seed: YERMCNILKGKFQTA
YERMYNIVKVKFSTA

SEQ ID NO: 137008 - protein, 15 aa, Artificial Sequence
  Description of Artificial Sequence: Synthetic peptide
  Seed: YERMCNILKGKFQTA
YERMYNIVKVKFTTA

SEQ ID NO: 137009 - protein, 15 aa, Artificial Sequence
  Description of Artificial Sequence: Synthetic peptide
  Seed: YERMCNILKGKFQTA
YERMYNIVKVKFVTA

SEQ ID NO: 137010 - protein, 15 aa, Artificial Sequence
  Description of Artificial Sequence: Synthetic peptide
  Seed: YERMCNILKGKFQTA
YERMCNFLKAKFQTI

SEQ ID NO: 137011 - protein, 15 aa, Artificial Sequence
  Description of Artificial Sequence: Synthetic peptide
  Seed: YERMCNILKGKFQTA
YERMCNFLKAKFQTL

SEQ ID NO: 137012 - protein, 15 aa, Artificial Sequence
  Description of Artificial Sequence: Synthetic peptide
  Seed: YERMCNILKGKFQTA
YERMCNFLKAKFQTV

SEQ ID NO: 137013 - protein, 15 aa, Artificial Sequence
  Description of Artificial Sequence: Synthetic peptide
  Seed: YERMCNILKGKFQTA
YERMCNFLKEKFQTI

SEQ ID NO: 137014 - protein, 15 aa, Artificial Sequence
  Description of Artificial Sequence: Synthetic peptide
  Seed: YERMCNILKGKFQTA
YERMCNFLKEKFQTL

SEQ ID NO: 137015 - protein, 15 aa, Artificial Sequence
  Description of Artificial Sequence: Synthetic peptide
  Seed: YERMCNILKGKFQTA
YERMCNFLKEKFQTV

SEQ ID NO: 137016 - protein, 15 aa, Artificial Sequence
  Description of Artificial Sequence: Synthetic peptide
  Seed: YERMCNILKGKFQTA
YERMCNFLKFKFQTI

SEQ ID NO: 137017 - protein, 15 aa, Artificial Sequence
  Description of Artificial Sequence: Synthetic peptide
  Seed: YERMCNILKGKFQTA
YERMCNFLKFKFQTL

SEQ ID NO: 137018 - protein, 15 aa, Artificial Sequence
  Description of Artificial Sequence: Synthetic peptide
  Seed: YERMCNILKGKFQTA
YERMCNFLKFKFQTM

SEQ ID NO: 137019 - protein, 15 aa, Artificial Sequence
  Description of Artificial Sequence: Synthetic peptide
  Seed: YERMCNILKGKFQTA
YERMCNFLKFKFQTV

SEQ ID NO: 137020 - protein, 15 aa, Artificial Sequence
  Description of Artificial Sequence: Synthetic peptide
  Seed: YERMCNILKGKFQTA
YERMCNFLKHKFQTI

SEQ ID NO: 137021 - protein, 15 aa, Artificial Sequence
  Description of Artificial Sequence: Synthetic peptide
  Seed: YERMCNILKGKFQTA
YERMCNFLKHKFQTL

SEQ ID NO: 137022 - protein, 15 aa, Artificial Sequence
  Description of Artificial Sequence: Synthetic peptide
  Seed: YERMCNILKGKFQTA
YERMCNFLKHKFQTV

SEQ ID NO: 137023 - protein, 15 aa, Artificial Sequence
  Description of Artificial Sequence: Synthetic peptide
  Seed: YERMCNILKGKFQTA
YERMCNFLKIKFQTF

SEQ ID NO: 137024 - protein, 15 aa, Artificial Sequence
  Description of Artificial Sequence: Synthetic peptide
  Seed: YERMCNILKGKFQTA
YERMCNFLKIKFQTI

SEQ ID NO: 137025 - protein, 15 aa, Artificial Sequence
  Description of Artificial Sequence: Synthetic peptide
  Seed: YERMCNILKGKFQTA
YERMCNFLKIKFQTM

SEQ ID NO: 137026 - protein, 15 aa, Artificial Sequence
  Description of Artificial Sequence: Synthetic peptide
  Seed: YERMCNILKGKFQTA
YERMCNFLKIKFQTV

SEQ ID NO: 137027 - protein, 15 aa, Artificial Sequence
  Description of Artificial Sequence: Synthetic peptide
  Seed: YERMCNILKGKFQTA
YERMCNFLKIKLQTL

SEQ ID NO: 137028 - protein, 15 aa, Artificial Sequence
  Description of Artificial Sequence: Synthetic peptide
  Seed: YERMCNILKGKFQTA
YERMCNFLKLKFQTI

SEQ ID NO: 137029 - protein, 15 aa, Artificial Sequence
  Description of Artificial Sequence: Synthetic peptide
  Seed: YERMCNILKGKFQTA
YERMCNFLKLKFQTL

SEQ ID NO: 137030 - protein, 15 aa, Artificial Sequence
  Description of Artificial Sequence: Synthetic peptide
  Seed: YERMCNILKGKFQTA
YERMCNFLKLKFQTV

SEQ ID NO: 137031 - protein, 15 aa, Artificial Sequence
  Description of Artificial Sequence: Synthetic peptide
  Seed: YERMCNILKGKFQTA
YERMCNFLKMKFQTI

SEQ ID NO: 137032 - protein, 15 aa, Artificial Sequence
  Description of Artificial Sequence: Synthetic peptide
  Seed: YERMCNILKGKFQTA
YERMCNFLKMKFQTL

SEQ ID NO: 137033 - protein, 15 aa, Artificial Sequence
  Description of Artificial Sequence: Synthetic peptide
  Seed: YERMCNILKGKFQTA
YERMCNFLKMKFQTV

SEQ ID NO: 137034 - protein, 15 aa, Artificial Sequence
  Description of Artificial Sequence: Synthetic peptide
  Seed: YERMCNILKGKFQTA
YERMCNFLKSKFQTI

SEQ ID NO: 137035 - protein, 15 aa, Artificial Sequence
  Description of Artificial Sequence: Synthetic peptide
  Seed: YERMCNILKGKFQTA
YERMCNFLKSKFQTL

SEQ ID NO: 137036 - protein, 15 aa, Artificial Sequence
  Description of Artificial Sequence: Synthetic peptide
  Seed: YERMCNILKGKFQTA
YERMCNFLKSKFQTV

SEQ ID NO: 137037 - protein, 15 aa, Artificial Sequence
  Description of Artificial Sequence: Synthetic peptide
  Seed: YERMCNILKGKFQTA
YERMCNFLKTKFQTF

SEQ ID NO: 137038 - protein, 15 aa, Artificial Sequence
  Description of Artificial Sequence: Synthetic peptide
  Seed: YERMCNILKGKFQTA
YERMCNFLKTKFQTI

SEQ ID NO: 137039 - protein, 15 aa, Artificial Sequence
  Description of Artificial Sequence: Synthetic peptide
  Seed: YERMCNILKGKFQTA
YERMCNFLKTKFQTL

SEQ ID NO: 137040 - protein, 15 aa, Artificial Sequence
  Description of Artificial Sequence: Synthetic peptide
  Seed: YERMCNILKGKFQTA
YERMCNFLKTKFQTM

SEQ ID NO: 137041 - protein, 15 aa, Artificial Sequence
  Description of Artificial Sequence: Synthetic peptide
  Seed: YERMCNILKGKFQTA
YERMCNFLKTKFQTV

SEQ ID NO: 137042 - protein, 15 aa, Artificial Sequence
  Description of Artificial Sequence: Synthetic peptide
  Seed: YERMCNILKGKFQTA
YERMCNFLKVKFQTF

SEQ ID NO: 137043 - protein, 15 aa, Artificial Sequence
  Description of Artificial Sequence: Synthetic peptide
  Seed: YERMCNILKGKFQTA
YERMCNFLKVKFQTL

SEQ ID NO: 137044 - protein, 15 aa, Artificial Sequence
  Description of Artificial Sequence: Synthetic peptide
  Seed: YERMCNILKGKFQTA
YERMCNFLKVKFQTM

SEQ ID NO: 137045 - protein, 15 aa, Artificial Sequence
  Description of Artificial Sequence: Synthetic peptide
  Seed: YERMCNILKGKFQTA
YERMCNFLKVKFQTV

SEQ ID NO: 137046 - protein, 15 aa, Artificial Sequence
  Description of Artificial Sequence: Synthetic peptide
  Seed: YERMCNILKGKFQTA
YERMCNILKGKAQTA

SEQ ID NO: 137047 - protein, 15 aa, Artificial Sequence
  Description of Artificial Sequence: Synthetic peptide
  Seed: YERMCNILKGKFQTA
YERMCNILKGKSQTA

SEQ ID NO: 137048 - protein, 15 aa, Artificial Sequence
  Description of Artificial Sequence: Synthetic peptide
  Seed: YERMCNILKGKFQTA
YERMCNILKTKFQTI

SEQ ID NO: 137049 - protein, 15 aa, Artificial Sequence
  Description of Artificial Sequence: Synthetic peptide
  Seed: YERMCNILKGKFQTA
YERMCNILKTKFQTL

SEQ ID NO: 137050 - protein, 15 aa, Artificial Sequence
  Description of Artificial Sequence: Synthetic peptide
  Seed: YERMCNILKGKFQTA
YERMCNLLKGKAQTA

SEQ ID NO: 137051 - protein, 15 aa, Artificial Sequence
  Description of Artificial Sequence: Synthetic peptide
  Seed: YERMCNILKGKFQTA
YERMCNLLKIKFQTI

SEQ ID NO: 137052 - protein, 15 aa, Artificial Sequence
  Description of Artificial Sequence: Synthetic peptide
  Seed: YERMCNILKGKFQTA
YERMCNLLKIKFQTL

SEQ ID NO: 137053 - protein, 15 aa, Artificial Sequence
  Description of Artificial Sequence: Synthetic peptide
  Seed: YERMCNILKGKFQTA
YERMCNLLKIKFQTV

SEQ ID NO: 137054 - protein, 15 aa, Artificial Sequence
  Description of Artificial Sequence: Synthetic peptide
  Seed: YERMCNILKGKFQTA
YERMCNLLKTKFQTI

SEQ ID NO: 137055 - protein, 15 aa, Artificial Sequence
  Description of Artificial Sequence: Synthetic peptide
  Seed: YERMCNILKGKFQTA
YERMCNLLKTKFQTL

SEQ ID NO: 137056 - protein, 15 aa, Artificial Sequence
  Description of Artificial Sequence: Synthetic peptide
  Seed: YERMCNILKGKFQTA
YERMCNLLKVKFQTL

SEQ ID NO: 137057 - protein, 15 aa, Artificial Sequence
  Description of Artificial Sequence: Synthetic peptide
  Seed: YERMCNILKGKFQTA
YERMCNMLKGKAQTA

SEQ ID NO: 137058 - protein, 15 aa, Artificial Sequence
  Description of Artificial Sequence: Synthetic peptide
  Seed: YERMCNILKGKFQTA
YERMCNYLKIKFQTI

SEQ ID NO: 137059 - protein, 15 aa, Artificial Sequence
  Description of Artificial Sequence: Synthetic peptide
  Seed: YERMCNILKGKFQTA
YERMCNYLKIKFQTL

SEQ ID NO: 137060 - protein, 15 aa, Artificial Sequence
  Description of Artificial Sequence: Synthetic peptide
  Seed: YERMCNILKGKFQTA
YERMCNYLKIKFQTV

SEQ ID NO: 137061 - protein, 15 aa, Artificial Sequence
  Description of Artificial Sequence: Synthetic peptide
  Seed: YERMCNILKGKFQTA
YERMCNYLKVKFQTL

SEQ ID NO: 137062 - protein, 15 aa, Artificial Sequence
  Description of Artificial Sequence: Synthetic peptide
  Seed: YERMCNILKGKFQTA
YERFCNALKGKAQTA

SEQ ID NO: 137063 - protein, 15 aa, Artificial Sequence
  Description of Artificial Sequence: Synthetic peptide
  Seed: YERMCNILKGKFQTA
YERFCNALKGKSQTA

SEQ ID NO: 137064 - protein, 15 aa, Artificial Sequence
  Description of Artificial Sequence: Synthetic peptide
  Seed: YERMCNILKGKFQTA
YERFCNALRGKAQTA

SEQ ID NO: 137065 - protein, 15 aa, Artificial Sequence
  Description of Artificial Sequence: Synthetic peptide
  Seed: YERMCNILKGKFQTA
YERFCNALRGKSQTA

SEQ ID NO: 137066 - protein, 15 aa, Artificial Sequence
  Description of Artificial Sequence: Synthetic peptide
  Seed: YERMCNILKGKFQTA
YERFCNILKGKAQTA

SEQ ID NO: 137067 - protein, 15 aa, Artificial Sequence
  Description of Artificial Sequence: Synthetic peptide
  Seed: YERMCNILKGKFQTA
YERFCNILKGKGQTA

SEQ ID NO: 137068 - protein, 15 aa, Artificial Sequence
  Description of Artificial Sequence: Synthetic peptide
  Seed: YERMCNILKGKFQTA
YERFCNILKGKSQTA

SEQ ID NO: 137069 - protein, 15 aa, Artificial Sequence
  Description of Artificial Sequence: Synthetic peptide
  Seed: YERMCNILKGKFQTA
YERFCNILKGKTQTA

SEQ ID NO: 137070 - protein, 15 aa, Artificial Sequence
  Description of Artificial Sequence: Synthetic peptide
  Seed: YERMCNILKGKFQTA
YERFCNILKGKVQTA

SEQ ID NO: 137071 - protein, 15 aa, Artificial Sequence
  Description of Artificial Sequence: Synthetic peptide
  Seed: YERMCNILKGKFQTA
YERFCNILRGKAQTA

SEQ ID NO: 137072 - protein, 15 aa, Artificial Sequence
  Description of Artificial Sequence: Synthetic peptide
  Seed: YERMCNILKGKFQTA
YERFCNILRGKGQTA

SEQ ID NO: 137073 - protein, 15 aa, Artificial Sequence
  Description of Artificial Sequence: Synthetic peptide
  Seed: YERMCNILKGKFQTA
YERFCNILRGKHQTA

SEQ ID NO: 137074 - protein, 15 aa, Artificial Sequence
  Description of Artificial Sequence: Synthetic peptide
  Seed: YERMCNILKGKFQTA
YERFCNILRGKIQTA

SEQ ID NO: 137075 - protein, 15 aa, Artificial Sequence
  Description of Artificial Sequence: Synthetic peptide
  Seed: YERMCNILKGKFQTA
YERFCNILRGKMQTA

SEQ ID NO: 137076 - protein, 15 aa, Artificial Sequence
  Description of Artificial Sequence: Synthetic peptide
  Seed: YERMCNILKGKFQTA
YERFCNILRGKNQTA

SEQ ID NO: 137077 - protein, 15 aa, Artificial Sequence
  Description of Artificial Sequence: Synthetic peptide
  Seed: YERMCNILKGKFQTA
YERFCNILRGKQQTA

SEQ ID NO: 137078 - protein, 15 aa, Artificial Sequence
  Description of Artificial Sequence: Synthetic peptide
  Seed: YERMCNILKGKFQTA
YERFCNILRGKRQTA

SEQ ID NO: 137079 - protein, 15 aa, Artificial Sequence
  Description of Artificial Sequence: Synthetic peptide
  Seed: YERMCNILKGKFQTA
YERFCNILRGKSQTA

SEQ ID NO: 137080 - protein, 15 aa, Artificial Sequence
  Description of Artificial Sequence: Synthetic peptide
  Seed: YERMCNILKGKFQTA
YERFCNILRGKTQTA

SEQ ID NO: 137081 - protein, 15 aa, Artificial Sequence
  Description of Artificial Sequence: Synthetic peptide
  Seed: YERMCNILKGKFQTA
YERFCNILRGKVQTA

SEQ ID NO: 137082 - protein, 15 aa, Artificial Sequence
  Description of Artificial Sequence: Synthetic peptide
  Seed: YERMCNILKGKFQTA
YERFCNLLKGKAQTA

SEQ ID NO: 137083 - protein, 15 aa, Artificial Sequence
  Description of Artificial Sequence: Synthetic peptide
  Seed: YERMCNILKGKFQTA
YERFCNLLKGKGQTA

SEQ ID NO: 137084 - protein, 15 aa, Artificial Sequence
  Description of Artificial Sequence: Synthetic peptide
  Seed: YERMCNILKGKFQTA
YERFCNLLKGKSQTA

SEQ ID NO: 137085 - protein, 15 aa, Artificial Sequence
  Description of Artificial Sequence: Synthetic peptide
  Seed: YERMCNILKGKFQTA
YERFCNLLKGKTQTA

SEQ ID NO: 137086 - protein, 15 aa, Artificial Sequence
  Description of Artificial Sequence: Synthetic peptide
  Seed: YERMCNILKGKFQTA
YERFCNLLKGKVQTA

SEQ ID NO: 137087 - protein, 15 aa, Artificial Sequence
  Description of Artificial Sequence: Synthetic peptide
  Seed: YERMCNILKGKFQTA
YERFCNLLRGKAQTA

SEQ ID NO: 137088 - protein, 15 aa, Artificial Sequence
  Description of Artificial Sequence: Synthetic peptide
  Seed: YERMCNILKGKFQTA
YERFCNLLRGKGQTA

SEQ ID NO: 137089 - protein, 15 aa, Artificial Sequence
  Description of Artificial Sequence: Synthetic peptide
  Seed: YERMCNILKGKFQTA
YERFCNLLRGKHQTA

SEQ ID NO: 137090 - protein, 15 aa, Artificial Sequence
  Description of Artificial Sequence: Synthetic peptide
  Seed: YERMCNILKGKFQTA
YERFCNLLRGKMQTA

SEQ ID NO: 137091 - protein, 15 aa, Artificial Sequence
  Description of Artificial Sequence: Synthetic peptide
  Seed: YERMCNILKGKFQTA
YERFCNLLRGKNQTA

SEQ ID NO: 137092 - protein, 15 aa, Artificial Sequence
  Description of Artificial Sequence: Synthetic peptide
  Seed: YERMCNILKGKFQTA
YERFCNLLRGKQQTA

SEQ ID NO: 137093 - protein, 15 aa, Artificial Sequence
  Description of Artificial Sequence: Synthetic peptide
  Seed: YERMCNILKGKFQTA
YERFCNLLRGKSQTA

SEQ ID NO: 137094 - protein, 15 aa, Artificial Sequence
  Description of Artificial Sequence: Synthetic peptide
  Seed: YERMCNILKGKFQTA
YERFCNLLRGKTQTA

SEQ ID NO: 137095 - protein, 15 aa, Artificial Sequence
  Description of Artificial Sequence: Synthetic peptide
  Seed: YERMCNILKGKFQTA
YERFCNLLRGKVQTA

SEQ ID NO: 137096 - protein, 15 aa, Artificial Sequence
  Description of Artificial Sequence: Synthetic peptide
  Seed: YERMCNILKGKFQTA
YERFCNMLKGKAQTA

SEQ ID NO: 137097 - protein, 15 aa, Artificial Sequence
  Description of Artificial Sequence: Synthetic peptide
  Seed: YERMCNILKGKFQTA
YERFCNMLKGKGQTA

SEQ ID NO: 137098 - protein, 15 aa, Artificial Sequence
  Description of Artificial Sequence: Synthetic peptide
  Seed: YERMCNILKGKFQTA
YERFCNMLKGKSQTA

SEQ ID NO: 137099 - protein, 15 aa, Artificial Sequence
  Description of Artificial Sequence: Synthetic peptide
  Seed: YERMCNILKGKFQTA
YERFCNMLKGKTQTA

SEQ ID NO: 137100 - protein, 15 aa, Artificial Sequence
  Description of Artificial Sequence: Synthetic peptide
  Seed: YERMCNILKGKFQTA
YERFCNMLKGKVQTA

SEQ ID NO: 137101 - protein, 15 aa, Artificial Sequence
  Description of Artificial Sequence: Synthetic peptide
  Seed: YERMCNILKGKFQTA
YERFCNMLRGKAQTA

SEQ ID NO: 137102 - protein, 15 aa, Artificial Sequence
  Description of Artificial Sequence: Synthetic peptide
  Seed: YERMCNILKGKFQTA
YERFCNMLRGKGQTA

SEQ ID NO: 137103 - protein, 15 aa, Artificial Sequence
  Description of Artificial Sequence: Synthetic peptide
  Seed: YERMCNILKGKFQTA
YERFCNMLRGKHQTA

SEQ ID NO: 137104 - protein, 15 aa, Artificial Sequence
  Description of Artificial Sequence: Synthetic peptide
  Seed: YERMCNILKGKFQTA
YERFCNMLRGKIQTA

SEQ ID NO: 137105 - protein, 15 aa, Artificial Sequence
  Description of Artificial Sequence: Synthetic peptide
  Seed: YERMCNILKGKFQTA
YERFCNMLRGKLQTA

SEQ ID NO: 137106 - protein, 15 aa, Artificial Sequence
  Description of Artificial Sequence: Synthetic peptide
  Seed: YERMCNILKGKFQTA
YERFCNMLRGKMQTA

SEQ ID NO: 137107 - protein, 15 aa, Artificial Sequence
  Description of Artificial Sequence: Synthetic peptide
  Seed: YERMCNILKGKFQTA
YERFCNMLRGKNQTA

SEQ ID NO: 137108 - protein, 15 aa, Artificial Sequence
  Description of Artificial Sequence: Synthetic peptide
  Seed: YERMCNILKGKFQTA
YERFCNMLRGKQQTA

SEQ ID NO: 137109 - protein, 15 aa, Artificial Sequence
  Description of Artificial Sequence: Synthetic peptide
  Seed: YERMCNILKGKFQTA
YERFCNMLRGKSQTA

SEQ ID NO: 137110 - protein, 15 aa, Artificial Sequence
  Description of Artificial Sequence: Synthetic peptide
  Seed: YERMCNILKGKFQTA
YERFCNMLRGKTQTA

SEQ ID NO: 137111 - protein, 15 aa, Artificial Sequence
  Description of Artificial Sequence: Synthetic peptide
  Seed: YERMCNILKGKFQTA
YERFCNMLRGKVQTA

SEQ ID NO: 137112 - protein, 15 aa, Artificial Sequence
  Description of Artificial Sequence: Synthetic peptide
  Seed: YERMCNILKGKFQTA
YERFCNVLKGKAQTA

SEQ ID NO: 137113 - protein, 15 aa, Artificial Sequence
  Description of Artificial Sequence: Synthetic peptide
  Seed: YERMCNILKGKFQTA
YERFCNVLKGKGQTA

SEQ ID NO: 137114 - protein, 15 aa, Artificial Sequence
  Description of Artificial Sequence: Synthetic peptide
  Seed: YERMCNILKGKFQTA
YERFCNVLKGKSQTA

SEQ ID NO: 137115 - protein, 15 aa, Artificial Sequence
  Description of Artificial Sequence: Synthetic peptide
  Seed: YERMCNILKGKFQTA
YERFCNVLKGKTQTA

SEQ ID NO: 137116 - protein, 15 aa, Artificial Sequence
  Description of Artificial Sequence: Synthetic peptide
  Seed: YERMCNILKGKFQTA
YERFCNVLRGKAQTA

SEQ ID NO: 137117 - protein, 15 aa, Artificial Sequence
  Description of Artificial Sequence: Synthetic peptide
  Seed: YERMCNILKGKFQTA
YERFCNVLRGKGQTA

SEQ ID NO: 137118 - protein, 15 aa, Artificial Sequence
  Description of Artificial Sequence: Synthetic peptide
  Seed: YERMCNILKGKFQTA
YERFCNVLRGKSQTA

SEQ ID NO: 137119 - protein, 15 aa, Artificial Sequence
  Description of Artificial Sequence: Synthetic peptide
  Seed: YERMCNILKGKFQTA
YERFCNVLRGKTQTA

SEQ ID NO: 137120 - protein, 15 aa, Artificial Sequence
  Description of Artificial Sequence: Synthetic peptide
  Seed: YERMCNILKGKFQTA
YERFCNVLRGKVQTA

SEQ ID NO: 137121 - protein, 15 aa, Artificial Sequence
  Description of Artificial Sequence: Synthetic peptide
  Seed: YERMCNILKGKFQTA
YERICNALKGKAQTA

SEQ ID NO: 137122 - protein, 15 aa, Artificial Sequence
  Description of Artificial Sequence: Synthetic peptide
  Seed: YERMCNILKGKFQTA
YERICNALKGKSQTA

SEQ ID NO: 137123 - protein, 15 aa, Artificial Sequence
  Description of Artificial Sequence: Synthetic peptide
  Seed: YERMCNILKGKFQTA
YERICNALRGKAQTA

SEQ ID NO: 137124 - protein, 15 aa, Artificial Sequence
  Description of Artificial Sequence: Synthetic peptide
  Seed: YERMCNILKGKFQTA
YERICNALRGKQQTA

SEQ ID NO: 137125 - protein, 15 aa, Artificial Sequence
  Description of Artificial Sequence: Synthetic peptide
  Seed: YERMCNILKGKFQTA
YERICNALRGKSQTA

SEQ ID NO: 137126 - protein, 15 aa, Artificial Sequence
  Description of Artificial Sequence: Synthetic peptide
  Seed: YERMCNILKGKFQTA
YERICNFLKGKAQTA

SEQ ID NO: 137127 - protein, 15 aa, Artificial Sequence
  Description of Artificial Sequence: Synthetic peptide
  Seed: YERMCNILKGKFQTA
YERICNFLKGKSQTA

SEQ ID NO: 137128 - protein, 15 aa, Artificial Sequence
  Description of Artificial Sequence: Synthetic peptide
  Seed: YERMCNILKGKFQTA
YERICNFLRGKAQTA

SEQ ID NO: 137129 - protein, 15 aa, Artificial Sequence
  Description of Artificial Sequence: Synthetic peptide
  Seed: YERMCNILKGKFQTA
YERICNFLRGKRQTA

SEQ ID NO: 137130 - protein, 15 aa, Artificial Sequence
  Description of Artificial Sequence: Synthetic peptide
  Seed: YERMCNILKGKFQTA
YERICNFLRGKSQTA

SEQ ID NO: 137131 - protein, 15 aa, Artificial Sequence
  Description of Artificial Sequence: Synthetic peptide
  Seed: YERMCNILKGKFQTA
YERICNILKGKAQTA

SEQ ID NO: 137132 - protein, 15 aa, Artificial Sequence
  Description of Artificial Sequence: Synthetic peptide
  Seed: YERMCNILKGKFQTA
YERICNILKGKGQTA

SEQ ID NO: 137133 - protein, 15 aa, Artificial Sequence
  Description of Artificial Sequence: Synthetic peptide
  Seed: YERMCNILKGKFQTA
YERICNILKGKHQTA

SEQ ID NO: 137134 - protein, 15 aa, Artificial Sequence
  Description of Artificial Sequence: Synthetic peptide
  Seed: YERMCNILKGKFQTA
YERICNILKGKMQTA

SEQ ID NO: 137135 - protein, 15 aa, Artificial Sequence
  Description of Artificial Sequence: Synthetic peptide
  Seed: YERMCNILKGKFQTA
YERICNILKGKQQTA

SEQ ID NO: 137136 - protein, 15 aa, Artificial Sequence
  Description of Artificial Sequence: Synthetic peptide
  Seed: YERMCNILKGKFQTA
YERICNILKGKRQTA

SEQ ID NO: 137137 - protein, 15 aa, Artificial Sequence
  Description of Artificial Sequence: Synthetic peptide
  Seed: YERMCNILKGKFQTA
YERICNILKGKSQTA

SEQ ID NO: 137138 - protein, 15 aa, Artificial Sequence
  Description of Artificial Sequence: Synthetic peptide
  Seed: YERMCNILKGKFQTA
YERICNILKGKTQTA

SEQ ID NO: 137139 - protein, 15 aa, Artificial Sequence
  Description of Artificial Sequence: Synthetic peptide
  Seed: YERMCNILKGKFQTA
YERICNILKGKVQTA

SEQ ID NO: 137140 - protein, 15 aa, Artificial Sequence
  Description of Artificial Sequence: Synthetic peptide
  Seed: YERMCNILKGKFQTA
YERICNILRGKGQTA

SEQ ID NO: 137141 - protein, 15 aa, Artificial Sequence
  Description of Artificial Sequence: Synthetic peptide
  Seed: YERMCNILKGKFQTA
YERICNILRGKHQTA

SEQ ID NO: 137142 - protein, 15 aa, Artificial Sequence
  Description of Artificial Sequence: Synthetic peptide
  Seed: YERMCNILKGKFQTA
YERICNILRGKIQTA

SEQ ID NO: 137143 - protein, 15 aa, Artificial Sequence
  Description of Artificial Sequence: Synthetic peptide
  Seed: YERMCNILKGKFQTA
YERICNILRGKKQTA

SEQ ID NO: 137144 - protein, 15 aa, Artificial Sequence
  Description of Artificial Sequence: Synthetic peptide
  Seed: YERMCNILKGKFQTA
YERICNILRGKLQTA

SEQ ID NO: 137145 - protein, 15 aa, Artificial Sequence
  Description of Artificial Sequence: Synthetic peptide
  Seed: YERMCNILKGKFQTA
YERICNILRGKMQTA

SEQ ID NO: 137146 - protein, 15 aa, Artificial Sequence
  Description of Artificial Sequence: Synthetic peptide
  Seed: YERMCNILKGKFQTA
YERICNILRGKNQTA

SEQ ID NO: 137147 - protein, 15 aa, Artificial Sequence
  Description of Artificial Sequence: Synthetic peptide
  Seed: YERMCNILKGKFQTA
YERICNILRGKQQTA

SEQ ID NO: 137148 - protein, 15 aa, Artificial Sequence
  Description of Artificial Sequence: Synthetic peptide
  Seed: YERMCNILKGKFQTA
YERICNILRGKRQTA

SEQ ID NO: 137149 - protein, 15 aa, Artificial Sequence
  Description of Artificial Sequence: Synthetic peptide
  Seed: YERMCNILKGKFQTA
YERICNILRGKSQTA

SEQ ID NO: 137150 - protein, 15 aa, Artificial Sequence
  Description of Artificial Sequence: Synthetic peptide
  Seed: YERMCNILKGKFQTA
YERICNILRGKTQTA

SEQ ID NO: 137151 - protein, 15 aa, Artificial Sequence
  Description of Artificial Sequence: Synthetic peptide
  Seed: YERMCNILKGKFQTA
YERICNLLKGKAQTA

SEQ ID NO: 137152 - protein, 15 aa, Artificial Sequence
  Description of Artificial Sequence: Synthetic peptide
  Seed: YERMCNILKGKFQTA
YERICNLLKGKGQTA

SEQ ID NO: 137153 - protein, 15 aa, Artificial Sequence
  Description of Artificial Sequence: Synthetic peptide
  Seed: YERMCNILKGKFQTA
YERICNLLKGKHQTA

SEQ ID NO: 137154 - protein, 15 aa, Artificial Sequence
  Description of Artificial Sequence: Synthetic peptide
  Seed: YERMCNILKGKFQTA
YERICNLLKGKMQTA

SEQ ID NO: 137155 - protein, 15 aa, Artificial Sequence
  Description of Artificial Sequence: Synthetic peptide
  Seed: YERMCNILKGKFQTA
YERICNLLKGKQQTA

SEQ ID NO: 137156 - protein, 15 aa, Artificial Sequence
  Description of Artificial Sequence: Synthetic peptide
  Seed: YERMCNILKGKFQTA
YERICNLLKGKSQTA

SEQ ID NO: 137157 - protein, 15 aa, Artificial Sequence
  Description of Artificial Sequence: Synthetic peptide
  Seed: YERMCNILKGKFQTA
YERICNLLKGKTQTA

SEQ ID NO: 137158 - protein, 15 aa, Artificial Sequence
  Description of Artificial Sequence: Synthetic peptide
  Seed: YERMCNILKGKFQTA
YERICNLLKGKVQTA

SEQ ID NO: 137159 - protein, 15 aa, Artificial Sequence
  Description of Artificial Sequence: Synthetic peptide
  Seed: YERMCNILKGKFQTA
YERICNLLRGKAQTA

SEQ ID NO: 137160 - protein, 15 aa, Artificial Sequence
  Description of Artificial Sequence: Synthetic peptide
  Seed: YERMCNILKGKFQTA
YERICNLLRGKGQTA

SEQ ID NO: 137161 - protein, 15 aa, Artificial Sequence
  Description of Artificial Sequence: Synthetic peptide
  Seed: YERMCNILKGKFQTA
YERICNLLRGKHQTA

SEQ ID NO: 137162 - protein, 15 aa, Artificial Sequence
  Description of Artificial Sequence: Synthetic peptide
  Seed: YERMCNILKGKFQTA
YERICNLLRGKIQTA

SEQ ID NO: 137163 - protein, 15 aa, Artificial Sequence
  Description of Artificial Sequence: Synthetic peptide
  Seed: YERMCNILKGKFQTA
YERICNLLRGKKQTA

SEQ ID NO: 137164 - protein, 15 aa, Artificial Sequence
  Description of Artificial Sequence: Synthetic peptide
  Seed: YERMCNILKGKFQTA
YERICNLLRGKLQTA

SEQ ID NO: 137165 - protein, 15 aa, Artificial Sequence
  Description of Artificial Sequence: Synthetic peptide
  Seed: YERMCNILKGKFQTA
YERICNLLRGKMQTA

SEQ ID NO: 137166 - protein, 15 aa, Artificial Sequence
  Description of Artificial Sequence: Synthetic peptide
  Seed: YERMCNILKGKFQTA
YERICNLLRGKNQTA

SEQ ID NO: 137167 - protein, 15 aa, Artificial Sequence
  Description of Artificial Sequence: Synthetic peptide
  Seed: YERMCNILKGKFQTA
YERICNLLRGKQQTA

SEQ ID NO: 137168 - protein, 15 aa, Artificial Sequence
  Description of Artificial Sequence: Synthetic peptide
  Seed: YERMCNILKGKFQTA
YERICNLLRGKRQTA

SEQ ID NO: 137169 - protein, 15 aa, Artificial Sequence
  Description of Artificial Sequence: Synthetic peptide
  Seed: YERMCNILKGKFQTA
YERICNLLRGKSQTA

SEQ ID NO: 137170 - protein, 15 aa, Artificial Sequence
  Description of Artificial Sequence: Synthetic peptide
  Seed: YERMCNILKGKFQTA
YERICNLLRGKTQTA

SEQ ID NO: 137171 - protein, 15 aa, Artificial Sequence
  Description of Artificial Sequence: Synthetic peptide
  Seed: YERMCNILKGKFQTA
YERICNLLRGKVQTA

SEQ ID NO: 137172 - protein, 15 aa, Artificial Sequence
  Description of Artificial Sequence: Synthetic peptide
  Seed: YERMCNILKGKFQTA
YERICNMLKGKAQTA

SEQ ID NO: 137173 - protein, 15 aa, Artificial Sequence
  Description of Artificial Sequence: Synthetic peptide
  Seed: YERMCNILKGKFQTA
YERICNMLKGKGQTA

SEQ ID NO: 137174 - protein, 15 aa, Artificial Sequence
  Description of Artificial Sequence: Synthetic peptide
  Seed: YERMCNILKGKFQTA
YERICNMLKGKHQTA

SEQ ID NO: 137175 - protein, 15 aa, Artificial Sequence
  Description of Artificial Sequence: Synthetic peptide
  Seed: YERMCNILKGKFQTA
YERICNMLKGKIQTA

SEQ ID NO: 137176 - protein, 15 aa, Artificial Sequence
  Description of Artificial Sequence: Synthetic peptide
  Seed: YERMCNILKGKFQTA
YERICNMLKGKLQTA

SEQ ID NO: 137177 - protein, 15 aa, Artificial Sequence
  Description of Artificial Sequence: Synthetic peptide
  Seed: YERMCNILKGKFQTA
YERICNMLKGKMQTA

SEQ ID NO: 137178 - protein, 15 aa, Artificial Sequence
  Description of Artificial Sequence: Synthetic peptide
  Seed: YERMCNILKGKFQTA
YERICNMLKGKQQTA

SEQ ID NO: 137179 - protein, 15 aa, Artificial Sequence
  Description of Artificial Sequence: Synthetic peptide
  Seed: YERMCNILKGKFQTA
YERICNMLKGKSQTA

SEQ ID NO: 137180 - protein, 15 aa, Artificial Sequence
  Description of Artificial Sequence: Synthetic peptide
  Seed: YERMCNILKGKFQTA
YERICNMLKGKTQTA

SEQ ID NO: 137181 - protein, 15 aa, Artificial Sequence
  Description of Artificial Sequence: Synthetic peptide
  Seed: YERMCNILKGKFQTA
YERICNMLKGKVQTA

SEQ ID NO: 137182 - protein, 15 aa, Artificial Sequence
  Description of Artificial Sequence: Synthetic peptide
  Seed: YERMCNILKGKFQTA
YERICNMLRGKGQTA

SEQ ID NO: 137183 - protein, 15 aa, Artificial Sequence
  Description of Artificial Sequence: Synthetic peptide
  Seed: YERMCNILKGKFQTA
YERICNMLRGKHQTA

SEQ ID NO: 137184 - protein, 15 aa, Artificial Sequence
  Description of Artificial Sequence: Synthetic peptide
  Seed: YERMCNILKGKFQTA
YERICNMLRGKIQTA

SEQ ID NO: 137185 - protein, 15 aa, Artificial Sequence
  Description of Artificial Sequence: Synthetic peptide
  Seed: YERMCNILKGKFQTA
YERICNMLRGKKQTA

SEQ ID NO: 137186 - protein, 15 aa, Artificial Sequence
  Description of Artificial Sequence: Synthetic peptide
  Seed: YERMCNILKGKFQTA
YERICNMLRGKLQTA

SEQ ID NO: 137187 - protein, 15 aa, Artificial Sequence
  Description of Artificial Sequence: Synthetic peptide
  Seed: YERMCNILKGKFQTA
YERICNMLRGKNQTA

SEQ ID NO: 137188 - protein, 15 aa, Artificial Sequence
  Description of Artificial Sequence: Synthetic peptide
  Seed: YERMCNILKGKFQTA
YERICNMLRGKQQTA

SEQ ID NO: 137189 - protein, 15 aa, Artificial Sequence
  Description of Artificial Sequence: Synthetic peptide
  Seed: YERMCNILKGKFQTA
YERICNMLRGKRQTA

SEQ ID NO: 137190 - protein, 15 aa, Artificial Sequence
  Description of Artificial Sequence: Synthetic peptide
  Seed: YERMCNILKGKFQTA
YERICNMLRGKSQTA

SEQ ID NO: 137191 - protein, 15 aa, Artificial Sequence
  Description of Artificial Sequence: Synthetic peptide
  Seed: YERMCNILKGKFQTA
YERICNMLRGKTQTA

SEQ ID NO: 137192 - protein, 15 aa, Artificial Sequence
  Description of Artificial Sequence: Synthetic peptide
  Seed: YERMCNILKGKFQTA
YERICNVLKGKAQTA

SEQ ID NO: 137193 - protein, 15 aa, Artificial Sequence
  Description of Artificial Sequence: Synthetic peptide
  Seed: YERMCNILKGKFQTA
YERICNVLKGKGQTA

SEQ ID NO: 137194 - protein, 15 aa, Artificial Sequence
  Description of Artificial Sequence: Synthetic peptide
  Seed: YERMCNILKGKFQTA
YERICNVLKGKQQTA

SEQ ID NO: 137195 - protein, 15 aa, Artificial Sequence
  Description of Artificial Sequence: Synthetic peptide
  Seed: YERMCNILKGKFQTA
YERICNVLKGKSQTA

SEQ ID NO: 137196 - protein, 15 aa, Artificial Sequence
  Description of Artificial Sequence: Synthetic peptide
  Seed: YERMCNILKGKFQTA
YERICNVLKGKTQTA

SEQ ID NO: 137197 - protein, 15 aa, Artificial Sequence
  Description of Artificial Sequence: Synthetic peptide
  Seed: YERMCNILKGKFQTA
YERICNVLRGKAQTA

SEQ ID NO: 137198 - protein, 15 aa, Artificial Sequence
  Description of Artificial Sequence: Synthetic peptide
  Seed: YERMCNILKGKFQTA
YERICNVLRGKGQTA

SEQ ID NO: 137199 - protein, 15 aa, Artificial Sequence
  Description of Artificial Sequence: Synthetic peptide
  Seed: YERMCNILKGKFQTA
YERICNVLRGKHQTA

SEQ ID NO: 137200 - protein, 15 aa, Artificial Sequence
  Description of Artificial Sequence: Synthetic peptide
  Seed: YERMCNILKGKFQTA
YERICNVLRGKMQTA

SEQ ID NO: 137201 - protein, 15 aa, Artificial Sequence
  Description of Artificial Sequence: Synthetic peptide
  Seed: YERMCNILKGKFQTA
YERICNVLRGKQQTA

SEQ ID NO: 137202 - protein, 15 aa, Artificial Sequence
  Description of Artificial Sequence: Synthetic peptide
  Seed: YERMCNILKGKFQTA
YERICNVLRGKSQTA

SEQ ID NO: 137203 - protein, 15 aa, Artificial Sequence
  Description of Artificial Sequence: Synthetic peptide
  Seed: YERMCNILKGKFQTA
YERICNVLRGKTQTA

SEQ ID NO: 137204 - protein, 15 aa, Artificial Sequence
  Description of Artificial Sequence: Synthetic peptide
  Seed: YERMCNILKGKFQTA
YERICNVLRGKVQTA

SEQ ID NO: 137205 - protein, 15 aa, Artificial Sequence
  Description of Artificial Sequence: Synthetic peptide
  Seed: YERMCNILKGKFQTA
YERLCNALRGKAQTA

SEQ ID NO: 137206 - protein, 15 aa, Artificial Sequence
  Description of Artificial Sequence: Synthetic peptide
  Seed: YERMCNILKGKFQTA
YERLCNALRGKSQTA

SEQ ID NO: 137207 - protein, 15 aa, Artificial Sequence
  Description of Artificial Sequence: Synthetic peptide
  Seed: YERMCNILKGKFQTA
YERLCNFLRGKAQTA

SEQ ID NO: 137208 - protein, 15 aa, Artificial Sequence
  Description of Artificial Sequence: Synthetic peptide
  Seed: YERMCNILKGKFQTA
YERLCNILKGKAQTA

SEQ ID NO: 137209 - protein, 15 aa, Artificial Sequence
  Description of Artificial Sequence: Synthetic peptide
  Seed: YERMCNILKGKFQTA
YERLCNILKGKGQTA

SEQ ID NO: 137210 - protein, 15 aa, Artificial Sequence
  Description of Artificial Sequence: Synthetic peptide
  Seed: YERMCNILKGKFQTA
YERLCNILKGKQQTA

SEQ ID NO: 137211 - protein, 15 aa, Artificial Sequence
  Description of Artificial Sequence: Synthetic peptide
  Seed: YERMCNILKGKFQTA
YERLCNILKGKSQTA

SEQ ID NO: 137212 - protein, 15 aa, Artificial Sequence
  Description of Artificial Sequence: Synthetic peptide
  Seed: YERMCNILKGKFQTA
YERLCNILKGKTQTA

SEQ ID NO: 137213 - protein, 15 aa, Artificial Sequence
  Description of Artificial Sequence: Synthetic peptide
  Seed: YERMCNILKGKFQTA
YERLCNILRGKAQTA

SEQ ID NO: 137214 - protein, 15 aa, Artificial Sequence
  Description of Artificial Sequence: Synthetic peptide
  Seed: YERMCNILKGKFQTA
YERLCNILRGKGQTA

SEQ ID NO: 137215 - protein, 15 aa, Artificial Sequence
  Description of Artificial Sequence: Synthetic peptide
  Seed: YERMCNILKGKFQTA
YERLCNILRGKHQTA

SEQ ID NO: 137216 - protein, 15 aa, Artificial Sequence
  Description of Artificial Sequence: Synthetic peptide
  Seed: YERMCNILKGKFQTA
YERLCNILRGKMQTA

SEQ ID NO: 137217 - protein, 15 aa, Artificial Sequence
  Description of Artificial Sequence: Synthetic peptide
  Seed: YERMCNILKGKFQTA
YERLCNILRGKQQTA

SEQ ID NO: 137218 - protein, 15 aa, Artificial Sequence
  Description of Artificial Sequence: Synthetic peptide
  Seed: YERMCNILKGKFQTA
YERLCNILRGKRQTA

SEQ ID NO: 137219 - protein, 15 aa, Artificial Sequence
  Description of Artificial Sequence: Synthetic peptide
  Seed: YERMCNILKGKFQTA
YERLCNILRGKSQTA

SEQ ID NO: 137220 - protein, 15 aa, Artificial Sequence
  Description of Artificial Sequence: Synthetic peptide
  Seed: YERMCNILKGKFQTA
YERLCNILRGKTQTA

SEQ ID NO: 137221 - protein, 15 aa, Artificial Sequence
  Description of Artificial Sequence: Synthetic peptide
  Seed: YERMCNILKGKFQTA
YERLCNILRGKVQTA

SEQ ID NO: 137222 - protein, 15 aa, Artificial Sequence
  Description of Artificial Sequence: Synthetic peptide
  Seed: YERMCNILKGKFQTA
YERLCNLLKGKAQTA

SEQ ID NO: 137223 - protein, 15 aa, Artificial Sequence
  Description of Artificial Sequence: Synthetic peptide
  Seed: YERMCNILKGKFQTA
YERLCNLLKGKGQTA

SEQ ID NO: 137224 - protein, 15 aa, Artificial Sequence
  Description of Artificial Sequence: Synthetic peptide
  Seed: YERMCNILKGKFQTA
YERLCNLLKGKSQTA

SEQ ID NO: 137225 - protein, 15 aa, Artificial Sequence
  Description of Artificial Sequence: Synthetic peptide
  Seed: YERMCNILKGKFQTA
YERLCNLLRGKAQTA

SEQ ID NO: 137226 - protein, 15 aa, Artificial Sequence
  Description of Artificial Sequence: Synthetic peptide
  Seed: YERMCNILKGKFQTA
YERLCNLLRGKGQTA

SEQ ID NO: 137227 - protein, 15 aa, Artificial Sequence
  Description of Artificial Sequence: Synthetic peptide
  Seed: YERMCNILKGKFQTA
YERLCNLLRGKHQTA

SEQ ID NO: 137228 - protein, 15 aa, Artificial Sequence
  Description of Artificial Sequence: Synthetic peptide
  Seed: YERMCNILKGKFQTA
YERLCNLLRGKMQTA

SEQ ID NO: 137229 - protein, 15 aa, Artificial Sequence
  Description of Artificial Sequence: Synthetic peptide
  Seed: YERMCNILKGKFQTA
YERLCNLLRGKQQTA

SEQ ID NO: 137230 - protein, 15 aa, Artificial Sequence
  Description of Artificial Sequence: Synthetic peptide
  Seed: YERMCNILKGKFQTA
YERLCNLLRGKSQTA

SEQ ID NO: 137231 - protein, 15 aa, Artificial Sequence
  Description of Artificial Sequence: Synthetic peptide
  Seed: YERMCNILKGKFQTA
YERLCNLLRGKTQTA

SEQ ID NO: 137232 - protein, 15 aa, Artificial Sequence
  Description of Artificial Sequence: Synthetic peptide
  Seed: YERMCNILKGKFQTA
YERLCNLLRGKVQTA

SEQ ID NO: 137233 - protein, 15 aa, Artificial Sequence
  Description of Artificial Sequence: Synthetic peptide
  Seed: YERMCNILKGKFQTA
YERLCNMLKGKAQTA

SEQ ID NO: 137234 - protein, 15 aa, Artificial Sequence
  Description of Artificial Sequence: Synthetic peptide
  Seed: YERMCNILKGKFQTA
YERLCNMLKGKGQTA

SEQ ID NO: 137235 - protein, 15 aa, Artificial Sequence
  Description of Artificial Sequence: Synthetic peptide
  Seed: YERMCNILKGKFQTA
YERLCNMLKGKMQTA

SEQ ID NO: 137236 - protein, 15 aa, Artificial Sequence
  Description of Artificial Sequence: Synthetic peptide
  Seed: YERMCNILKGKFQTA
YERLCNMLKGKQQTA

SEQ ID NO: 137237 - protein, 15 aa, Artificial Sequence
  Description of Artificial Sequence: Synthetic peptide
  Seed: YERMCNILKGKFQTA
YERLCNMLKGKSQTA

SEQ ID NO: 137238 - protein, 15 aa, Artificial Sequence
  Description of Artificial Sequence: Synthetic peptide
  Seed: YERMCNILKGKFQTA
YERLCNMLKGKTQTA

SEQ ID NO: 137239 - protein, 15 aa, Artificial Sequence
  Description of Artificial Sequence: Synthetic peptide
  Seed: YERMCNILKGKFQTA
YERLCNMLKGKVQTA

SEQ ID NO: 137240 - protein, 15 aa, Artificial Sequence
  Description of Artificial Sequence: Synthetic peptide
  Seed: YERMCNILKGKFQTA
YERLCNMLRGKAQTA

SEQ ID NO: 137241 - protein, 15 aa, Artificial Sequence
  Description of Artificial Sequence: Synthetic peptide
  Seed: YERMCNILKGKFQTA
YERLCNMLRGKGQTA

SEQ ID NO: 137242 - protein, 15 aa, Artificial Sequence
  Description of Artificial Sequence: Synthetic peptide
  Seed: YERMCNILKGKFQTA
YERLCNMLRGKHQTA

SEQ ID NO: 137243 - protein, 15 aa, Artificial Sequence
  Description of Artificial Sequence: Synthetic peptide
  Seed: YERMCNILKGKFQTA
YERLCNMLRGKIQTA

SEQ ID NO: 137244 - protein, 15 aa, Artificial Sequence
  Description of Artificial Sequence: Synthetic peptide
  Seed: YERMCNILKGKFQTA
YERLCNMLRGKLQTA

SEQ ID NO: 137245 - protein, 15 aa, Artificial Sequence
  Description of Artificial Sequence: Synthetic peptide
  Seed: YERMCNILKGKFQTA
YERLCNMLRGKMQTA

SEQ ID NO: 137246 - protein, 15 aa, Artificial Sequence
  Description of Artificial Sequence: Synthetic peptide
  Seed: YERMCNILKGKFQTA
YERLCNMLRGKQQTA

SEQ ID NO: 137247 - protein, 15 aa, Artificial Sequence
  Description of Artificial Sequence: Synthetic peptide
  Seed: YERMCNILKGKFQTA
YERLCNMLRGKRQTA

SEQ ID NO: 137248 - protein, 15 aa, Artificial Sequence
  Description of Artificial Sequence: Synthetic peptide
  Seed: YERMCNILKGKFQTA
YERLCNMLRGKSQTA

SEQ ID NO: 137249 - protein, 15 aa, Artificial Sequence
  Description of Artificial Sequence: Synthetic peptide
  Seed: YERMCNILKGKFQTA
YERLCNMLRGKTQTA

SEQ ID NO: 137250 - protein, 15 aa, Artificial Sequence
  Description of Artificial Sequence: Synthetic peptide
  Seed: YERMCNILKGKFQTA
YERLCNMLRGKVQTA

SEQ ID NO: 137251 - protein, 15 aa, Artificial Sequence
  Description of Artificial Sequence: Synthetic peptide
  Seed: YERMCNILKGKFQTA
YERLCNVLKGKAQTA

SEQ ID NO: 137252 - protein, 15 aa, Artificial Sequence
  Description of Artificial Sequence: Synthetic peptide
  Seed: YERMCNILKGKFQTA
YERLCNVLKGKSQTA

SEQ ID NO: 137253 - protein, 15 aa, Artificial Sequence
  Description of Artificial Sequence: Synthetic peptide
  Seed: YERMCNILKGKFQTA
YERLCNVLRGKAQTA

SEQ ID NO: 137254 - protein, 15 aa, Artificial Sequence
  Description of Artificial Sequence: Synthetic peptide
  Seed: YERMCNILKGKFQTA
YERLCNVLRGKGQTA

SEQ ID NO: 137255 - protein, 15 aa, Artificial Sequence
  Description of Artificial Sequence: Synthetic peptide
  Seed: YERMCNILKGKFQTA
YERLCNVLRGKQQTA

SEQ ID NO: 137256 - protein, 15 aa, Artificial Sequence
  Description of Artificial Sequence: Synthetic peptide
  Seed: YERMCNILKGKFQTA
YERLCNVLRGKSQTA

SEQ ID NO: 137257 - protein, 15 aa, Artificial Sequence
  Description of Artificial Sequence: Synthetic peptide
  Seed: YERMCNILKGKFQTA
YERLCNVLRGKTQTA

SEQ ID NO: 137258 - protein, 15 aa, Artificial Sequence
  Description of Artificial Sequence: Synthetic peptide
  Seed: YERMCNILKGKFQTA
YERMCNILRGKAQTA

SEQ ID NO: 137259 - protein, 15 aa, Artificial Sequence
  Description of Artificial Sequence: Synthetic peptide
  Seed: YERMCNILKGKFQTA
YERMCNILRGKGQTA

SEQ ID NO: 137260 - protein, 15 aa, Artificial Sequence
  Description of Artificial Sequence: Synthetic peptide
  Seed: YERMCNILKGKFQTA
YERMCNILRGKSQTA

SEQ ID NO: 137261 - protein, 15 aa, Artificial Sequence
  Description of Artificial Sequence: Synthetic peptide
  Seed: YERMCNILKGKFQTA
YERMCNLLRGKAQTA

SEQ ID NO: 137262 - protein, 15 aa, Artificial Sequence
  Description of Artificial Sequence: Synthetic peptide
  Seed: YERMCNILKGKFQTA
YERMCNLLRGKSQTA

SEQ ID NO: 137263 - protein, 15 aa, Artificial Sequence
  Description of Artificial Sequence: Synthetic peptide
  Seed: YERMCNILKGKFQTA
YERMCNMLRGKAQTA

SEQ ID NO: 137264 - protein, 15 aa, Artificial Sequence
  Description of Artificial Sequence: Synthetic peptide
  Seed: YERMCNILKGKFQTA
YERMCNMLRGKQQTA

SEQ ID NO: 137265 - protein, 15 aa, Artificial Sequence
  Description of Artificial Sequence: Synthetic peptide
  Seed: YERMCNILKGKFQTA
YERMCNMLRGKSQTA

SEQ ID NO: 137266 - protein, 15 aa, Artificial Sequence
  Description of Artificial Sequence: Synthetic peptide
  Seed: YERMCNILKGKFQTA
YERMCNVLRGKAQTA

SEQ ID NO: 137267 - protein, 15 aa, Artificial Sequence
  Description of Artificial Sequence: Synthetic peptide
  Seed: YERMCNILKGKFQTA
YERVCNILKGKAQTA

SEQ ID NO: 137268 - protein, 15 aa, Artificial Sequence
  Description of Artificial Sequence: Synthetic peptide
  Seed: YERMCNILKGKFQTA
YERVCNILKGKSQTA

SEQ ID NO: 137269 - protein, 15 aa, Artificial Sequence
  Description of Artificial Sequence: Synthetic peptide
  Seed: YERMCNILKGKFQTA
YERVCNILRGKAQTA

SEQ ID NO: 137270 - protein, 15 aa, Artificial Sequence
  Description of Artificial Sequence: Synthetic peptide
  Seed: YERMCNILKGKFQTA
YERVCNILRGKGQTA

SEQ ID NO: 137271 - protein, 15 aa, Artificial Sequence
  Description of Artificial Sequence: Synthetic peptide
  Seed: YERMCNILKGKFQTA
YERVCNILRGKQQTA

SEQ ID NO: 137272 - protein, 15 aa, Artificial Sequence
  Description of Artificial Sequence: Synthetic peptide
  Seed: YERMCNILKGKFQTA
YERVCNILRGKSQTA

SEQ ID NO: 137273 - protein, 15 aa, Artificial Sequence
  Description of Artificial Sequence: Synthetic peptide
  Seed: YERMCNILKGKFQTA
YERVCNLLKGKAQTA

SEQ ID NO: 137274 - protein, 15 aa, Artificial Sequence
  Description of Artificial Sequence: Synthetic peptide
  Seed: YERMCNILKGKFQTA
YERVCNLLKGKSQTA

SEQ ID NO: 137275 - protein, 15 aa, Artificial Sequence
  Description of Artificial Sequence: Synthetic peptide
  Seed: YERMCNILKGKFQTA
YERVCNLLRGKAQTA

SEQ ID NO: 137276 - protein, 15 aa, Artificial Sequence
  Description of Artificial Sequence: Synthetic peptide
  Seed: YERMCNILKGKFQTA
YERVCNLLRGKGQTA

SEQ ID NO: 137277 - protein, 15 aa, Artificial Sequence
  Description of Artificial Sequence: Synthetic peptide
  Seed: YERMCNILKGKFQTA
YERVCNLLRGKQQTA

SEQ ID NO: 137278 - protein, 15 aa, Artificial Sequence
  Description of Artificial Sequence: Synthetic peptide
  Seed: YERMCNILKGKFQTA
YERVCNLLRGKSQTA

SEQ ID NO: 137279 - protein, 15 aa, Artificial Sequence
  Description of Artificial Sequence: Synthetic peptide
  Seed: YERMCNILKGKFQTA
YERVCNMLKGKAQTA

SEQ ID NO: 137280 - protein, 15 aa, Artificial Sequence
  Description of Artificial Sequence: Synthetic peptide
  Seed: YERMCNILKGKFQTA
YERVCNMLKGKSQTA

SEQ ID NO: 137281 - protein, 15 aa, Artificial Sequence
  Description of Artificial Sequence: Synthetic peptide
  Seed: YERMCNILKGKFQTA
YERVCNMLRGKAQTA

SEQ ID NO: 137282 - protein, 15 aa, Artificial Sequence
  Description of Artificial Sequence: Synthetic peptide
  Seed: YERMCNILKGKFQTA
YERVCNMLRGKGQTA

SEQ ID NO: 137283 - protein, 15 aa, Artificial Sequence
  Description of Artificial Sequence: Synthetic peptide
  Seed: YERMCNILKGKFQTA
YERVCNMLRGKMQTA

SEQ ID NO: 137284 - protein, 15 aa, Artificial Sequence
  Description of Artificial Sequence: Synthetic peptide
  Seed: YERMCNILKGKFQTA
YERVCNMLRGKQQTA

SEQ ID NO: 137285 - protein, 15 aa, Artificial Sequence
  Description of Artificial Sequence: Synthetic peptide
  Seed: YERMCNILKGKFQTA
YERVCNMLRGKSQTA

SEQ ID NO: 137286 - protein, 15 aa, Artificial Sequence
  Description of Artificial Sequence: Synthetic peptide
  Seed: YERMCNILKGKFQTA
YERVCNMLRGKTQTA

SEQ ID NO: 137287 - protein, 15 aa, Artificial Sequence
  Description of Artificial Sequence: Synthetic peptide
  Seed: YERMCNILKGKFQTA
YERVCNMLRGKVQTA

SEQ ID NO: 137288 - protein, 15 aa, Artificial Sequence
  Description of Artificial Sequence: Synthetic peptide
  Seed: YERMCNILKGKFQTA
YERVCNVLRGKAQTA

SEQ ID NO: 137289 - protein, 15 aa, Artificial Sequence
  Description of Artificial Sequence: Synthetic peptide
  Seed: YERMCNILKGKFQTA
YERVCNVLRGKSQTA

SEQ ID NO: 137290 - protein, 15 aa, Artificial Sequence
  Description of Artificial Sequence: Synthetic peptide
  Seed: YERMCNILKGKFQTA
YERYCNILKGKAQTA

SEQ ID NO: 137291 - protein, 15 aa, Artificial Sequence
  Description of Artificial Sequence: Synthetic peptide
  Seed: YERMCNILKGKFQTA
YERYCNILKGKSQTA

SEQ ID NO: 137292 - protein, 15 aa, Artificial Sequence
  Description of Artificial Sequence: Synthetic peptide
  Seed: YERMCNILKGKFQTA
YERYCNILRGKAQTA

SEQ ID NO: 137293 - protein, 15 aa, Artificial Sequence
  Description of Artificial Sequence: Synthetic peptide
  Seed: YERMCNILKGKFQTA
YERYCNILRGKGQTA

SEQ ID NO: 137294 - protein, 15 aa, Artificial Sequence
  Description of Artificial Sequence: Synthetic peptide
  Seed: YERMCNILKGKFQTA
YERYCNILRGKSQTA

SEQ ID NO: 137295 - protein, 15 aa, Artificial Sequence
  Description of Artificial Sequence: Synthetic peptide
  Seed: YERMCNILKGKFQTA
YERYCNILRGKTQTA

SEQ ID NO: 137296 - protein, 15 aa, Artificial Sequence
  Description of Artificial Sequence: Synthetic peptide
  Seed: YERMCNILKGKFQTA
YERYCNILRGKVQTA

SEQ ID NO: 137297 - protein, 15 aa, Artificial Sequence
  Description of Artificial Sequence: Synthetic peptide
  Seed: YERMCNILKGKFQTA
YERYCNLLKGKAQTA

SEQ ID NO: 137298 - protein, 15 aa, Artificial Sequence
  Description of Artificial Sequence: Synthetic peptide
  Seed: YERMCNILKGKFQTA
YERYCNLLKGKSQTA

SEQ ID NO: 137299 - protein, 15 aa, Artificial Sequence
  Description of Artificial Sequence: Synthetic peptide
  Seed: YERMCNILKGKFQTA
YERYCNLLRGKAQTA

SEQ ID NO: 137300 - protein, 15 aa, Artificial Sequence
  Description of Artificial Sequence: Synthetic peptide
  Seed: YERMCNILKGKFQTA
YERYCNLLRGKSQTA

SEQ ID NO: 137301 - protein, 15 aa, Artificial Sequence
  Description of Artificial Sequence: Synthetic peptide
  Seed: YERMCNILKGKFQTA
YERYCNLLRGKTQTA

SEQ ID NO: 137302 - protein, 15 aa, Artificial Sequence
  Description of Artificial Sequence: Synthetic peptide
  Seed: YERMCNILKGKFQTA
YERYCNMLKGKAQTA

SEQ ID NO: 137303 - protein, 15 aa, Artificial Sequence
  Description of Artificial Sequence: Synthetic peptide
  Seed: YERMCNILKGKFQTA
YERYCNMLKGKSQTA

SEQ ID NO: 137304 - protein, 15 aa, Artificial Sequence
  Description of Artificial Sequence: Synthetic peptide
  Seed: YERMCNILKGKFQTA
YERYCNMLRGKAQTA

SEQ ID NO: 137305 - protein, 15 aa, Artificial Sequence
  Description of Artificial Sequence: Synthetic peptide
  Seed: YERMCNILKGKFQTA
YERYCNMLRGKSQTA

SEQ ID NO: 137306 - protein, 15 aa, Artificial Sequence
  Description of Artificial Sequence: Synthetic peptide
  Seed: YERMCNILKGKFQTA
YERYCNMLRGKTQTA

SEQ ID NO: 137307 - protein, 15 aa, Artificial Sequence
  Description of Artificial Sequence: Synthetic peptide
  Seed: YERMCNILKGKFQTA
YERYCNMLRGKVQTA

SEQ ID NO: 137308 - protein, 15 aa, Artificial Sequence
  Description of Artificial Sequence: Synthetic peptide
  Seed: YERMCNILKGKFQTA
YERYCNVLKGKAQTA

SEQ ID NO: 137309 - protein, 15 aa, Artificial Sequence
  Description of Artificial Sequence: Synthetic peptide
  Seed: YERMCNILKGKFQTA
YERYCNVLRGKAQTA

SEQ ID NO: 137310 - protein, 15 aa, Artificial Sequence
  Description of Artificial Sequence: Synthetic peptide
  Seed: YERMCNILKGKFQTA
YERYCNVLRGKSQTA

SEQ ID NO: 137311 - protein, 14 aa, Artificial Sequence
  Description of Artificial Sequence: Synthetic peptide
  Seed: AYERMCNILKGKFQ
  Core: MCNILKGKF
  misc_feature (5)..(5): Xaa can be Cys, Phe, Ile, Leu, Met, Val, Trp, or Tyr
  misc_feature (8)..(8): Xaa can be Ala, Cys, Glu, Phe, Gly, His, Ile, Lys, Leu, Met, Asn, Gln, Arg, Ser, Thr, Val, Trp, or Ty r
  misc_feature (10)..(10): Xaa can be Ala, Gly, His, Ile, Lys, Leu, Met, Asn, Pro, Gln, Arg, Ser, Thr, Val, or Tyr
  misc_feature (13)..(13): Xaa can be Ala, Cys, Asp, Glu, Phe, Gly, His, Ile, Lys, Leu, Met, Asn, Pro, Gln, Arg, Ser, Thr, Val, Trp, or Tyr
AYERXCNXLXGKXQ

SEQ ID NO: 137312 - protein, 14 aa, Artificial Sequence
  Description of Artificial Sequence: Synthetic peptide
  Seed: AYERMCNILKGKFQ
  Core: YERMCNILK
  misc_feature (2)..(2): Xaa can be Ala, Cys, Asp, Glu, Phe, Gly, His, Ile, Lys, Leu, Met, Asn, Pro, Gln, Arg, Ser, Thr, Val, Trp, or Tyr
  misc_feature (5)..(5): Xaa can be Ala, Cys, Asp, Glu, Phe, Gly, His, Ile, Lys, Leu, Met, Asn, Pro, Gln, Arg, Ser, Thr, Val, Trp, or Tyr
  misc_feature (7)..(7): Xaa can be Ala, Cys, Asp, Glu, Phe, Gly, His, Ile, Lys, Leu, Met, Asn, Pro, Gln, Arg, Ser, Thr, Val, Trp, or Tyr
  misc_feature (10)..(10): Xaa can be Ala, Cys, Asp, Glu, Phe, Gly, His, Ile, Lys, Leu, Met, Asn, Pro, Gln, Arg, Ser, Thr, Val, Trp, or Tyr
AXERXCXILXGKFQ

SEQ ID NO: 137313 - protein, 15 aa, Artificial Sequence
  Description of Artificial Sequence: Synthetic peptide
  Seed: AYERMCNILKGKFQT
  Core: CNILKGKFQ
  misc_feature (6)..(6): Xaa can be Ala, Cys, Asp, Glu, Phe, Gly, His, Ile, Lys, Leu, Met, Asn, Pro, Gln, Arg, Ser, Thr, Val, Trp, or Tyr
  misc_feature (9)..(9): Xaa can be Ala, Cys, Asp, Glu, Phe, Gly, His, Ile, Lys, Leu, Met, Asn, Pro, Gln, Arg, Ser, Thr, Val, Trp, or Tyr
  misc_feature (11)..(11): Xaa can be Ala, Cys, Asp, Glu, Phe, Gly, His, Ile, Lys, Leu, Met, Asn, Pro, Gln, Arg, Ser, Thr, Val, Trp, or Tyr
  misc_feature (14)..(14): Xaa can be Ala, Cys, Asp, Glu, Phe, Gly, His, Ile, Lys, Leu, Met, Asn, Pro, Gln, Arg, Ser, Thr, Val, Trp, or Tyr
AYERMXNIXKXKFXT

SEQ ID NO: 137314 - protein, 15 aa, Artificial Sequence
  Description of Artificial Sequence: Synthetic peptide
  Seed: AYERMCNILKGKFQT
  Core: MCNILKGKF
  misc_feature (5)..(5): Xaa can be Ala, Cys, Asp, Glu, Phe, Gly, His, Ile, Lys, Leu, Met, Asn, Pro, Gln, Arg, Ser, Thr, Val, Trp, or Tyr
  misc_feature (8)..(8): Xaa can be Ala, Cys, Asp, Glu, Phe, Gly, His, Ile, Lys, Leu, Met, Asn, Pro, Gln, Arg, Ser, Thr, Val, Trp, or Tyr
  misc_feature (10)..(10): Xaa can be Ala, Cys, Asp, Glu, Phe, Gly, His, Ile, Lys, Leu, Met, Asn, Pro, Gln, Arg, Ser, Thr, Val, Trp, or Tyr
  misc_feature (13)..(13): Xaa can be Ala, Cys, Asp, Glu, Phe, Gly, His, Ile, Lys, Leu, Met, Asn, Pro, Gln, Arg, Ser, Thr, Val, Trp, or Tyr
AYERXCNXLXGKXQT

SEQ ID NO: 137315 - protein, 15 aa, Artificial Sequence
  Description of Artificial Sequence: Synthetic peptide
  Seed: AYERMCNILKGKFQT
  Core: YERMCNILK
  misc_feature (2)..(2): Xaa can be Ala, Cys, Asp, Glu, Phe, Gly, His, Ile, Lys, Leu, Met, Asn, Pro, Gln, Arg, Ser, Thr, Val, Trp, or Tyr
  misc_feature (5)..(5): Xaa can be Ala, Cys, Asp, Glu, Phe, Gly, His, Ile, Lys, Leu, Met, Asn, Pro, Gln, Arg, Ser, Thr, Val, Trp, or Tyr
  misc_feature (7)..(7): Xaa can be Ala, Cys, Asp, Glu, Phe, Gly, His, Ile, Lys, Leu, Met, Asn, Pro, Gln, Arg, Ser, Thr, Val, Trp, or Tyr
  misc_feature (10)..(10): Xaa can be Ala, Cys, Asp, Glu, Phe, Gly, His, Ile, Lys, Leu, Met, Asn, Pro, Gln, Arg, Ser, Thr, Val, Trp, or Tyr
AXERXCXILXGKFQT

SEQ ID NO: 137316 - protein, 16 aa, Artificial Sequence
  Description of Artificial Sequence: Synthetic peptide
  Seed: AYERMCNILKGKFQTA
  Core: CNILKGKFQ
  misc_feature (6)..(6): Xaa can be Ala, Cys, Asp, Glu, Phe, Gly, His, Ile, Lys, Leu, Met, Asn, Pro, Gln, Arg, Ser, Thr, Val, Trp, or Tyr
  misc_feature (9)..(9): Xaa can be Ala, Cys, Asp, Glu, Phe, Gly, His, Ile, Lys, Leu, Met, Asn, Pro, Gln, Arg, Ser, Thr, Val, Trp, or Tyr
  misc_feature (11)..(11): Xaa can be Ala, Cys, Asp, Glu, Phe, Gly, His, Ile, Lys, Leu, Met, Asn, Pro, Gln, Arg, Ser, Thr, Val, Trp, or Tyr
  misc_feature (14)..(14): Xaa can be Ala, Cys, Asp, Glu, Phe, Gly, His, Ile, Lys, Leu, Met, Asn, Pro, Gln, Arg, Ser, Thr, Val, Trp, or Tyr
AYERMXNIXKXKFXTA

SEQ ID NO: 137317 - protein, 16 aa, Artificial Sequence
  Description of Artificial Sequence: Synthetic peptide
  Seed: AYERMCNILKGKFQTA
  Core: ILKGKFQTA
  misc_feature (8)..(8): Xaa can be Ala, Cys, Asp, Glu, Phe, Gly, His, Ile, Lys, Leu, Met, Asn, Pro, Gln, Arg, Ser, Thr, Val, Trp, or Tyr
  misc_feature (11)..(11): Xaa can be Ala, Cys, Asp, Glu, Phe, Gly, His, Ile, Lys, Leu, Met, Asn, Pro, Gln, Arg, Ser, Thr, Val, Trp, or Tyr
  misc_feature (13)..(13): Xaa can be Ala, Cys, Glu, Phe, Gly, His, Ile, Leu, Met, Asn, Pro, Gln, Ser, Thr, Val, Trp, or Tyr
  misc_feature (16)..(16): Xaa can be Ala, Cys, Asp, Glu, Phe, Gly, His, Ile, Lys, Leu, Met, Asn, Pro, Gln, Arg, Ser, Thr, Val, Trp, or Tyr
AYERMCNXLKXKXQTX

SEQ ID NO: 137318 - protein, 16 aa, Artificial Sequence
  Description of Artificial Sequence: Synthetic peptide
  Seed: AYERMCNILKGKFQTA
  Core: MCNILKGKF
  misc_feature (5)..(5): Xaa can be Ala, Cys, Phe, His, Ile, Lys, Leu, Met, Asn, Gln, Arg, Ser, Thr, Val, Trp, or Tyr
  misc_feature (8)..(8): Xaa can be Ala, Cys, Asp, Glu, Phe, Gly, His, Ile, Lys, Leu, Met, Asn, Gln, Arg, Ser, Thr, Val, Trp, or Tyr
  misc_feature (10)..(10): Xaa can be Ala, Cys, Glu, Phe, Gly, His, Ile, Lys, Leu, Met, Asn, Pro, Gln, Arg, Ser, Thr, Val, Trp, or Tyr
  misc_feature (13)..(13): Xaa can be Ala, Cys, Asp, Glu, Phe, Gly, His, Ile, Lys, Leu, Met, Asn, Pro, Gln, Arg, Ser, Thr, Val, Trp, or Tyr
AYERXCNXLXGKXQTA

SEQ ID NO: 137319 - protein, 16 aa, Artificial Sequence
  Description of Artificial Sequence: Synthetic peptide
  Seed: AYERMCNILKGKFQTA
  Core: YERMCNILK
  misc_feature (2)..(2): Xaa can be Phe, Ile, Leu, Met, Arg, Val, Trp, or Tyr
  misc_feature (5)..(5): Xaa can be Ala, Cys, Asp, Glu, Phe, Gly, His, Ile, Lys, Leu, Met, Asn, Pro, Gln, Arg, Ser, Thr, Val, Trp, or Tyr
  misc_feature (7)..(7): Xaa can be Ala, Cys, Asp, Glu, Gly, His, Ile, Lys, Leu, Met, Asn, Pro, Gln, Arg, Ser, Thr, Val, or Tr p
  misc_feature (10)..(10): Xaa can be Ala, Cys, Asp, Glu, Phe, Gly, His, Ile, Lys, Leu, Met, Asn, Pro, Gln, Arg, Ser, Thr, Val, Trp, or Tyr
AXERXCXILXGKFQTA

SEQ ID NO: 137320 - protein, 14 aa, Artificial Sequence
  Description of Artificial Sequence: Synthetic peptide
  Seed: CSLMQGSTLPRRSG
  Core: QGSTLPRRS
  misc_feature (5)..(5): Xaa can be Ala, Cys, Asp, Glu, Phe, Gly, His, Ile, Lys, Leu, Met, Asn, Pro, Gln, Ser, Thr, Val, Trp, or Tyr
  misc_feature (8)..(8): Xaa can be Ala, Cys, Asp, Glu, Phe, Gly, His, Ile, Leu, Met, Asn, Pro, Gln, Ser, Thr, Val, Trp, or Ty r
  misc_feature (10)..(10): Xaa can be Ala, Cys, Asp, Glu, Phe, Gly, Ile, Lys, Leu, Met, Asn, Pro, Gln, Ser, Thr, Val, or Tyr
  misc_feature (13)..(13): Xaa can be Ala, Cys, Asp, Glu, Phe, Gly, His, Ile, Lys, Leu, Met, Asn, Pro, Gln, Arg, Ser, Thr, Val, Trp, or Tyr
CSLMXGSXLXRRXG

SEQ ID NO: 137321 - protein, 15 aa, Artificial Sequence
  Description of Artificial Sequence: Synthetic peptide
  Seed: CSLMQGSTLPRRSGA
  Core: GSTLPRRSG
  misc_feature (6)..(6): Xaa can be Ala, Cys, Asp, Glu, Phe, Gly, His, Ile, Leu, Met, Asn, Pro, Gln, Arg, Ser, Thr, Val, Trp, or Tyr
  misc_feature (9)..(9): Xaa can be Ala, Cys, Asp, Glu, Phe, Gly, His, Ile, Lys, Leu, Met, Asn, Gln, Arg, Ser, Thr, Val, Trp, or Tyr
  misc_feature (11)..(11): Xaa can be Ala, Cys, Asp, Glu, Phe, His, Ile, Lys, Leu, Met, Asn, Pro, Gln, Arg, Ser, Thr, Val, Trp, or Tyr
  misc_feature (14)..(14): Xaa can be Ala, Cys, Asp, Glu, Phe, Gly, His, Ile, Lys, Leu, Met, Asn, Pro, Gln, Arg, Ser, Thr, Val, Trp, or Tyr
CSLMQXSTXPXRSXA

SEQ ID NO: 137322 - protein, 15 aa, Artificial Sequence
  Description of Artificial Sequence: Synthetic peptide
  Seed: CSLMQGSTLPRRSGA
  Core: LMQGSTLPR
  misc_feature (3)..(3): Xaa can be Ala, Cys, Glu, Phe, Gly, His, Ile, Lys, Leu, Met, Asn, Pro, Gln, Arg, Ser, Thr, Val, Trp, or Tyr
  misc_feature (6)..(6): Xaa can be Ala, Cys, Asp, Glu, Phe, Gly, His, Ile, Lys, Leu, Met, Asn, Pro, Gln, Arg, Ser, Thr, Val, Trp, or Tyr
  misc_feature (8)..(8): Xaa can be Ala, Cys, Asp, Glu, Phe, Gly, His, Ile, Lys, Leu, Met, Asn, Pro, Gln, Arg, Ser, Thr, Val, Trp, or Tyr
  misc_feature (11)..(11): Xaa can be Ala, Cys, Asp, Glu, Phe, Gly, His, Ile, Lys, Leu, Met, Asn, Pro, Gln, Arg, Ser, Thr, Val, Trp, or Tyr
CSXMQXSXLPXRSGA

SEQ ID NO: 137323 - protein, 15 aa, Artificial Sequence
  Description of Artificial Sequence: Synthetic peptide
  Seed: CSLMQGSTLPRRSGA
  Core: MQGSTLPRR
  misc_feature (4)..(4): Xaa can be Ala, Cys, Asp, Glu, Phe, Gly, His, Ile, Lys, Leu, Met, Asn, Pro, Gln, Arg, Ser, Thr, Val, Trp, or Tyr
  misc_feature (7)..(7): Xaa can be Ala, Cys, Asp, Glu, Phe, Gly, His, Ile, Lys, Leu, Met, Asn, Pro, Gln, Arg, Ser, Thr, Val, Trp, or Tyr
  misc_feature (9)..(9): Xaa can be Ala, Cys, Asp, Glu, Phe, Gly, His, Ile, Lys, Leu, Met, Asn, Pro, Gln, Arg, Ser, Thr, Val, Trp, or Tyr
  misc_feature (12)..(12): Xaa can be Ala, Cys, Asp, Glu, Phe, Gly, His, Ile, Lys, Leu, Met, Asn, Pro, Gln, Arg, Ser, Thr, Val, Trp, or Tyr
CSLXQGXTXPRXSGA

SEQ ID NO: 137324 - protein, 15 aa, Artificial Sequence
  Description of Artificial Sequence: Synthetic peptide
  Seed: CSLMQGSTLPRRSGA
  Core: QGSTLPRRS
  misc_feature (5)..(5): Xaa can be Ala, Cys, Asp, Glu, Phe, Gly, His, Ile, Lys, Leu, Met, Asn, Pro, Gln, Arg, Ser, Thr, Val, Trp, or Tyr
  misc_feature (8)..(8): Xaa can be Ala, Cys, Asp, Glu, Phe, Gly, His, Ile, Lys, Leu, Met, Asn, Pro, Gln, Arg, Ser, Thr, Val, Trp, or Tyr
  misc_feature (10)..(10): Xaa can be Ala, Cys, Asp, Glu, Phe, Gly, His, Ile, Lys, Leu, Met, Asn, Pro, Gln, Arg, Ser, Thr, Val, Trp, or Tyr
  misc_feature (13)..(13): Xaa can be Ala, Cys, Asp, Glu, Phe, Gly, His, Ile, Lys, Leu, Met, Asn, Pro, Gln, Arg, Ser, Thr, Val, Trp, or Tyr
CSLMXGSXLXRRXGA

SEQ ID NO: 137325 - protein, 16 aa, Artificial Sequence
  Description of Artificial Sequence: Synthetic peptide
  Seed: CSLMQGSTLPRRSGAA
  Core: QGSTLPRRS
  misc_feature (5)..(5): Xaa can be Ala, Cys, Asp, Glu, Phe, Gly, His, Ile, Lys, Leu, Met, Asn, Pro, Gln, Arg, Ser, Thr, Val, Trp, or Tyr
  misc_feature (8)..(8): Xaa can be Ala, Cys, Asp, Glu, Phe, Gly, His, Ile, Lys, Leu, Met, Asn, Pro, Gln, Arg, Ser, Thr, Val, Trp, or Tyr
  misc_feature (10)..(10): Xaa can be Ala, Cys, Asp, Glu, Phe, Gly, His, Ile, Lys, Leu, Met, Asn, Pro, Gln, Arg, Ser, Thr, Val, Trp, or Tyr
  misc_feature (13)..(13): Xaa can be Ala, Cys, Asp, Glu, Phe, Gly, His, Ile, Lys, Leu, Met, Asn, Pro, Gln, Arg, Ser, Thr, Val, Trp, or Tyr
CSLMXGSXLXRRXGAA

SEQ ID NO: 137326 - protein, 17 aa, Artificial Sequence
  Description of Artificial Sequence: Synthetic peptide
  Seed: CSLMQGSTLPRRSGAAG
  Core: MQGSTLPRR
  misc_feature (4)..(4): Xaa can be Phe, Ile, Leu, Met, Val, Trp, or Tyr
  misc_feature (7)..(7): Xaa can be Ala, Cys, Asp, Glu, Phe, Gly, His, Ile, Lys, Leu, Met, Asn, Gln, Arg, Ser, Thr, Val, Trp, or Tyr
  misc_feature (9)..(9): Xaa can be Ala, Cys, Glu, Phe, Gly, His, Ile, Lys, Leu, Met, Asn, Pro, Gln, Arg, Ser, Thr, Val, Trp, or Tyr
  misc_feature (12)..(12): Xaa can be Ala, Cys, Asp, Glu, Phe, Gly, His, Ile, Lys, Leu, Met, Asn, Pro, Gln, Arg, Ser, Thr, Val, Trp, or Tyr
CSLXQGXTXPRXSGAAG

SEQ ID NO: 137327 - protein, 17 aa, Artificial Sequence
  Description of Artificial Sequence: Synthetic peptide
  Seed: CSLMQGSTLPRRSGAAG
  Core: QGSTLPRRS
  misc_feature (5)..(5): Xaa can be Ala, Cys, Asp, Glu, Phe, Gly, His, Ile, Lys, Leu, Met, Asn, Pro, Gln, Arg, Ser, Thr, Val, Trp, or Tyr
  misc_feature (8)..(8): Xaa can be Ala, Cys, Asp, Glu, Phe, Gly, His, Ile, Lys, Leu, Met, Asn, Pro, Gln, Arg, Ser, Thr, Val, Trp, or Tyr
  misc_feature (10)..(10): Xaa can be Ala, Cys, Asp, Glu, Phe, Gly, His, Ile, Lys, Leu, Met, Asn, Pro, Gln, Arg, Ser, Thr, Val, Trp, or Tyr
  misc_feature (13)..(13): Xaa can be Ala, Cys, Asp, Glu, Phe, Gly, His, Ile, Lys, Leu, Met, Asn, Pro, Gln, Arg, Ser, Thr, Val, Trp, or Tyr
CSLMXGSXLXRRXGAAG

SEQ ID NO: 137328 - protein, 18 aa, Artificial Sequence
  Description of Artificial Sequence: Synthetic peptide
  Seed: CSLMQGSTLPRRSGAAGA
  Core: PRRSGAAGA
  misc_feature (10)..(10): Xaa can be Ala, Cys, Phe, Gly, His, Ile, Leu, Met, Asn, Pro, Gln, Ser, Thr, Val, Trp, or Tyr
  misc_feature (13)..(13): Xaa can be Ala, Gly, Ile, Ser, Thr, or Val
  misc_feature (15)..(15): Xaa can be Ala, Cys, Gly, Ile, Leu, Met, Pro, Ser, Thr, or Val
  misc_feature (18)..(18): Xaa can be Ala, Cys, Asp, Glu, Phe, Gly, His, Ile, Leu, Met, Asn, Pro, Gln, Ser, Thr, Val, Trp, or Ty r
CSLMQGSTLXRRXGXAGX

SEQ ID NO: 137329 - protein, 18 aa, Artificial Sequence
  Description of Artificial Sequence: Synthetic peptide
  Seed: CSLMQGSTLPRRSGAAGA
  Core: QGSTLPRRS
  misc_feature (5)..(5): Xaa can be Ala, Cys, Asp, Glu, Phe, Gly, His, Ile, Lys, Leu, Met, Asn, Pro, Gln, Arg, Ser, Thr, Val, Trp, or Tyr
  misc_feature (8)..(8): Xaa can be Ala, Cys, Asp, Glu, Phe, Gly, His, Ile, Lys, Leu, Met, Asn, Pro, Gln, Ser, Thr, Val, Trp, or Tyr
  misc_feature (10)..(10): Xaa can be Ala, Cys, Asp, Glu, Phe, Gly, His, Ile, Lys, Leu, Met, Asn, Pro, Gln, Ser, Thr, Val, Trp, or Tyr
  misc_feature (13)..(13): Xaa can be Ala, Cys, Asp, Glu, Phe, Gly, His, Ile, Lys, Leu, Met, Asn, Pro, Gln, Arg, Ser, Thr, Val, Trp, or Tyr
CSLMXGSXLXRRXGAAGA

SEQ ID NO: 137330 - protein, 14 aa, Artificial Sequence
  Description of Artificial Sequence: Synthetic peptide
  Seed: DPRMCSLMQGSTLP
  Core: CSLMQGSTL
  misc_feature (5)..(5): Xaa can be Ala, Cys, Phe, Gly, His, Ile, Lys, Leu, Met, Asn, Gln, Ser, Thr, Val, Trp, or Tyr
  misc_feature (8)..(8): Xaa can be Ala, Cys, Asp, Glu, Phe, Gly, His, Ile, Lys, Leu, Met, Asn, Pro, Gln, Arg, Ser, Thr, Val, Trp, or Tyr
  misc_feature (10)..(10): Xaa can be Ala, Cys, Asp, Glu, Phe, Gly, His, Ile, Lys, Leu, Met, Asn, Pro, Gln, Arg, Ser, Thr, Val, Trp, or Tyr
  misc_feature (13)..(13): Xaa can be Ala, Cys, Asp, Glu, Phe, Gly, His, Ile, Lys, Leu, Met, Asn, Pro, Gln, Arg, Ser, Thr, Val, Trp, or Tyr
DPRMXSLXQXSTXP

SEQ ID NO: 137331 - protein, 15 aa, Artificial Sequence
  Description of Artificial Sequence: Synthetic peptide
  Seed: DPRMCSLMQGSTLPR
  Core: CSLMQGSTL
  misc_feature (5)..(5): Xaa can be Ala, Cys, Asp, Glu, Phe, Gly, His, Ile, Lys, Leu, Met, Asn, Pro, Gln, Arg, Ser, Thr, Val, Trp, or Tyr
  misc_feature (8)..(8): Xaa can be Ala, Cys, Asp, Glu, Phe, Gly, His, Ile, Lys, Leu, Met, Asn, Pro, Gln, Arg, Ser, Thr, Val, Trp, or Tyr
  misc_feature (10)..(10): Xaa can be Ala, Cys, Asp, Glu, Phe, Gly, His, Ile, Lys, Leu, Met, Asn, Pro, Gln, Arg, Ser, Thr, Val, Trp, or Tyr
  misc_feature (13)..(13): Xaa can be Ala, Cys, Asp, Glu, Phe, Gly, His, Ile, Lys, Leu, Met, Asn, Pro, Gln, Arg, Ser, Thr, Val, Trp, or Tyr
DPRMXSLXQXSTXPR

SEQ ID NO: 137332 - protein, 15 aa, Artificial Sequence
  Description of Artificial Sequence: Synthetic peptide
  Seed: DPRMCSLMQGSTLPR
  Core: LMQGSTLPR
  misc_feature (7)..(7): Xaa can be Ala, Cys, Phe, Ile, Leu, Met, Pro, Thr, Val, Trp, or Tyr
  misc_feature (10)..(10): Xaa can be Ala, Cys, Asp, Glu, Phe, Gly, His, Ile, Lys, Leu, Met, Asn, Gln, Arg, Ser, Thr, Val, Trp, or Tyr
  misc_feature (12)..(12): Xaa can be Ala, Cys, Asp, Glu, Phe, Gly, His, Ile, Lys, Leu, Met, Asn, Pro, Gln, Arg, Ser, Thr, Val, Trp, or Tyr
  misc_feature (15)..(15): Xaa can be Ala, Cys, Asp, Glu, Phe, Gly, His, Ile, Lys, Leu, Met, Asn, Pro, Gln, Arg, Ser, Thr, Val, Trp, or Tyr
DPRMCSXMQXSXLPX

SEQ ID NO: 137333 - protein, 15 aa, Artificial Sequence
  Description of Artificial Sequence: Synthetic peptide
  Seed: DPRMCSLMQGSTLPR
  Core: MCSLMQGST
  misc_feature (4)..(4): Xaa can be Ala, Cys, Asp, Glu, Phe, Gly, His, Ile, Lys, Leu, Met, Asn, Pro, Gln, Arg, Ser, Thr, Val, Trp, or Tyr
  misc_feature (7)..(7): Xaa can be Ala, Cys, Asp, Glu, Phe, Gly, His, Ile, Lys, Leu, Met, Asn, Pro, Gln, Arg, Ser, Thr, Val, Trp, or Tyr
  misc_feature (9)..(9): Xaa can be Ala, Cys, Asp, Glu, Phe, Gly, His, Ile, Lys, Leu, Met, Asn, Pro, Gln, Arg, Ser, Thr, Val, Trp, or Tyr
  misc_feature (12)..(12): Xaa can be Ala, Cys, Asp, Glu, Phe, Gly, His, Ile, Lys, Leu, Met, Asn, Pro, Gln, Arg, Ser, Thr, Val, Trp, or Tyr
DPRXCSXMXGSXLPR

SEQ ID NO: 137334 - protein, 16 aa, Artificial Sequence
  Description of Artificial Sequence: Synthetic peptide
  Seed: DPRMCSLMQGSTLPRR
  Core: CSLMQGSTL
  misc_feature (5)..(5): Xaa can be Ala, Cys, Asp, Glu, Phe, Gly, His, Ile, Lys, Leu, Met, Asn, Pro, Gln, Arg, Ser, Thr, Val, Trp, or Tyr
  misc_feature (8)..(8): Xaa can be Ala, Cys, Asp, Glu, Phe, Gly, His, Ile, Lys, Leu, Met, Asn, Pro, Gln, Arg, Ser, Thr, Val, Trp, or Tyr
  misc_feature (10)..(10): Xaa can be Ala, Cys, Asp, Glu, Phe, Gly, His, Ile, Lys, Leu, Met, Asn, Pro, Gln, Arg, Ser, Thr, Val, Trp, or Tyr
  misc_feature (13)..(13): Xaa can be Ala, Cys, Asp, Glu, Phe, Gly, His, Ile, Lys, Leu, Met, Asn, Pro, Gln, Arg, Ser, Thr, Val, Trp, or Tyr
DPRMXSLXQXSTXPRR

SEQ ID NO: 137335 - protein, 16 aa, Artificial Sequence
  Description of Artificial Sequence: Synthetic peptide
  Seed: DPRMCSLMQGSTLPRR
  Core: MQGSTLPRR
  misc_feature (8)..(8): Xaa can be Ala, Cys, Asp, Glu, Phe, Gly, His, Ile, Lys, Leu, Met, Asn, Pro, Gln, Arg, Ser, Thr, Val, Trp, or Tyr
  misc_feature (11)..(11): Xaa can be Ala, Cys, Phe, Gly, His, Ile, Lys, Leu, Met, Asn, Pro, Gln, Arg, Ser, Thr, Val, Trp, or Ty r
  misc_feature (13)..(13): Xaa can be Ala, Cys, Asp, Glu, Phe, Gly, His, Ile, Lys, Leu, Met, Asn, Pro, Gln, Ser, Thr, Val, Trp, or Tyr
  misc_feature (16)..(16): Xaa can be Ala, Cys, Asp, Glu, Phe, Gly, His, Ile, Lys, Leu, Met, Asn, Pro, Gln, Arg, Ser, Thr, Val, Trp, or Tyr
DPRMCSLXQGXTXPRX

SEQ ID NO: 137336 - protein, 16 aa, Artificial Sequence
  Description of Artificial Sequence: Synthetic peptide
  Seed: DPRMCSLMQGSTLPRR
  Core: RMCSLMQGS
  misc_feature (3)..(3): Xaa can be Ala, Cys, Asp, Glu, Phe, Gly, His, Ile, Lys, Leu, Met, Asn, Pro, Gln, Arg, Ser, Thr, Val, Trp, or Tyr
  misc_feature (6)..(6): Xaa can be Ala, Cys, Asp, Glu, Phe, Gly, His, Ile, Lys, Leu, Met, Asn, Pro, Gln, Arg, Ser, Thr, Val, Trp, or Tyr
  misc_feature (8)..(8): Xaa can be Ala, Cys, Glu, Phe, Gly, His, Ile, Lys, Leu, Met, Asn, Pro, Gln, Arg, Ser, Thr, Val, Trp, or Tyr
  misc_feature (11)..(11): Xaa can be Ala, Cys, Asp, Glu, Phe, Gly, His, Ile, Lys, Leu, Met, Asn, Pro, Gln, Arg, Ser, Thr, Val, Trp, or Tyr
DPXMCXLXQGXTLPRR

SEQ ID NO: 137337 - protein, 17 aa, Artificial Sequence
  Description of Artificial Sequence: Synthetic peptide
  Seed: DPRMCSLMQGSTLPRRS
  Core: CSLMQGSTL
  misc_feature (5)..(5): Xaa can be Ala, Cys, Asp, Glu, Phe, Gly, His, Ile, Lys, Leu, Met, Asn, Pro, Gln, Arg, Ser, Thr, Val, Trp, or Tyr
  misc_feature (8)..(8): Xaa can be Ala, Cys, Asp, Glu, Phe, Gly, His, Ile, Lys, Leu, Met, Asn, Pro, Gln, Arg, Ser, Thr, Val, Trp, or Tyr
  misc_feature (10)..(10): Xaa can be Ala, Cys, Asp, Glu, Phe, Gly, His, Ile, Lys, Leu, Met, Asn, Pro, Gln, Arg, Ser, Thr, Val, Trp, or Tyr
  misc_feature (13)..(13): Xaa can be Ala, Cys, Asp, Glu, Phe, Gly, His, Ile, Lys, Leu, Met, Asn, Pro, Gln, Arg, Ser, Thr, Val, Trp, or Tyr
DPRMXSLXQXSTXPRRS

SEQ ID NO: 137338 - protein, 17 aa, Artificial Sequence
  Description of Artificial Sequence: Synthetic peptide
  Seed: DPRMCSLMQGSTLPRRS
  Core: LMQGSTLPR
  misc_feature (7)..(7): Xaa can be Ala, Cys, Asp, Glu, Phe, Gly, His, Ile, Lys, Leu, Met, Asn, Pro, Gln, Arg, Ser, Thr, Val, Trp, or Tyr
  misc_feature (10)..(10): Xaa can be Ala, Cys, Asp, Glu, Phe, Gly, His, Ile, Lys, Leu, Met, Asn, Pro, Gln, Arg, Ser, Thr, Val, Trp, or Tyr
  misc_feature (12)..(12): Xaa can be Ala, Cys, Asp, Glu, Phe, Gly, His, Ile, Lys, Leu, Met, Asn, Pro, Gln, Arg, Ser, Thr, Val, Trp, or Tyr
  misc_feature (15)..(15): Xaa can be Ala, Cys, Asp, Glu, Phe, Gly, His, Ile, Lys, Leu, Met, Asn, Pro, Gln, Arg, Ser, Thr, Val, Trp, or Tyr
DPRMCSXMQXSXLPXRS

SEQ ID NO: 137339 - protein, 17 aa, Artificial Sequence
  Description of Artificial Sequence: Synthetic peptide
  Seed: DPRMCSLMQGSTLPRRS
  Core: MQGSTLPRR
  misc_feature (8)..(8): Xaa can be Ala, Cys, Asp, Glu, Phe, Gly, His, Ile, Lys, Leu, Met, Asn, Pro, Gln, Arg, Ser, Thr, Val, Trp, or Tyr
  misc_feature (11)..(11): Xaa can be Ala, Cys, Asp, Glu, Phe, Gly, His, Ile, Lys, Leu, Met, Asn, Pro, Gln, Arg, Ser, Thr, Val, Trp, or Tyr
  misc_feature (13)..(13): Xaa can be Ala, Cys, Asp, Glu, Phe, Gly, His, Ile, Lys, Leu, Met, Asn, Pro, Gln, Arg, Ser, Thr, Val, Trp, or Tyr
  misc_feature (16)..(16): Xaa can be Ala, Cys, Asp, Glu, Phe, Gly, His, Ile, Lys, Leu, Met, Asn, Pro, Gln, Arg, Ser, Thr, Val, Trp, or Tyr
DPRMCSLXQGXTXPRXS

SEQ ID NO: 137340 - protein, 17 aa, Artificial Sequence
  Description of Artificial Sequence: Synthetic peptide
  Seed: DPRMCSLMQGSTLPRRS
  Core: RMCSLMQGS
  misc_feature (3)..(3): Xaa can be Glu, Phe, Ile, Lys, Leu, Met, Arg, Val, Trp, or Tyr
  misc_feature (6)..(6): Xaa can be Ala, Cys, Asp, Glu, Phe, Gly, His, Ile, Lys, Leu, Met, Asn, Pro, Gln, Arg, Ser, Thr, Val, Trp, or Tyr
  misc_feature (8)..(8): Xaa can be Ala, Cys, Phe, Gly, His, Ile, Leu, Met, Asn, Pro, Gln, Ser, Thr, Val, Trp, or Tyr
  misc_feature (11)..(11): Xaa can be Ala, Cys, Asp, Glu, Phe, Gly, His, Ile, Lys, Leu, Met, Asn, Pro, Gln, Arg, Ser, Thr, Val, or Tyr
DPXMCXLXQGXTLPRRS

SEQ ID NO: 137341 - protein, 18 aa, Artificial Sequence
  Description of Artificial Sequence: Synthetic peptide
  Seed: DPRMCSLMQGSTLPRRSG
  Core: CSLMQGSTL
  misc_feature (5)..(5): Xaa can be Ala, Cys, Phe, His, Ile, Lys, Leu, Met, Thr, Val, Trp, or Tyr
  misc_feature (8)..(8): Xaa can be Ala, Cys, Asp, Glu, Phe, Gly, His, Ile, Lys, Leu, Met, Asn, Gln, Arg, Ser, Thr, Val, Trp, or Tyr
  misc_feature (10)..(10): Xaa can be Ala, Cys, Asp, Glu, Phe, Gly, His, Ile, Lys, Leu, Met, Asn, Pro, Gln, Arg, Ser, Thr, Val, Trp, or Tyr
  misc_feature (13)..(13): Xaa can be Ala, Cys, Asp, Glu, Phe, Gly, His, Ile, Lys, Leu, Met, Asn, Pro, Gln, Arg, Ser, Thr, Val, Trp, or Tyr
DPRMXSLXQXSTXPRRSG

SEQ ID NO: 137342 - protein, 19 aa, Artificial Sequence
  Description of Artificial Sequence: Synthetic peptide
  Seed: DPRMCSLMQGSTLPRRSGA
  Core: CSLMQGSTL
  misc_feature (5)..(5): Xaa can be Ala, Cys, Asp, Glu, Phe, Gly, His, Ile, Lys, Leu, Met, Asn, Pro, Gln, Arg, Ser, Thr, Val, Trp, or Tyr
  misc_feature (8)..(8): Xaa can be Ala, Cys, Asp, Glu, Phe, Gly, His, Ile, Lys, Leu, Met, Asn, Pro, Gln, Arg, Ser, Thr, Val, Trp, or Tyr
  misc_feature (10)..(10): Xaa can be Ala, Cys, Asp, Glu, Phe, Gly, His, Ile, Lys, Leu, Met, Asn, Pro, Gln, Arg, Ser, Thr, Val, Trp, or Tyr
  misc_feature (13)..(13): Xaa can be Ala, Cys, Asp, Glu, Phe, Gly, His, Ile, Lys, Leu, Met, Asn, Pro, Gln, Arg, Ser, Thr, Val, Trp, or Tyr
DPRMXSLXQXSTXPRRSGA

SEQ ID NO: 137343 - protein, 19 aa, Artificial Sequence
  Description of Artificial Sequence: Synthetic peptide
  Seed: DPRMCSLMQGSTLPRRSGA
  Core: LMQGSTLPR
  misc_feature (7)..(7): Xaa can be Phe, Ile, Leu, Met, Val, Trp, or Tyr
  misc_feature (10)..(10): Xaa can be Ala, Cys, Asp, Glu, Phe, Gly, His, Ile, Lys, Leu, Met, Asn, Gln, Arg, Ser, Thr, Val, Trp, or Tyr
  misc_feature (12)..(12): Xaa can be Ala, Cys, Asp, Glu, Phe, Gly, His, Ile, Lys, Leu, Met, Asn, Pro, Gln, Arg, Ser, Thr, Val, Trp, or Tyr
  misc_feature (15)..(15): Xaa can be Ala, Cys, Asp, Glu, Phe, Gly, His, Ile, Lys, Leu, Met, Asn, Pro, Gln, Arg, Ser, Thr, Val, Trp, or Tyr
DPRMCSXMQXSXLPXRSGA

SEQ ID NO: 137344 - protein, 19 aa, Artificial Sequence
  Description of Artificial Sequence: Synthetic peptide
  Seed: DPRMCSLMQGSTLPRRSGA
  Core: MQGSTLPRR
  misc_feature (8)..(8): Xaa can be Ala, Cys, Asp, Glu, Phe, Gly, His, Ile, Lys, Leu, Met, Asn, Pro, Gln, Arg, Ser, Thr, Val, Trp, or Tyr
  misc_feature (11)..(11): Xaa can be Ala, Cys, Asp, Glu, Phe, Gly, His, Ile, Lys, Leu, Met, Asn, Pro, Gln, Arg, Ser, Thr, Val, Trp, or Tyr
  misc_feature (13)..(13): Xaa can be Ala, Cys, Asp, Glu, Phe, Gly, His, Ile, Lys, Leu, Met, Asn, Pro, Gln, Arg, Ser, Thr, Val, Trp, or Tyr
  misc_feature (16)..(16): Xaa can be Ala, Cys, Asp, Glu, Phe, Gly, His, Ile, Lys, Leu, Met, Asn, Pro, Gln, Arg, Ser, Thr, Val, Trp, or Tyr
DPRMCSLXQGXTXPRXSGA

SEQ ID NO: 137345 - protein, 19 aa, Artificial Sequence
  Description of Artificial Sequence: Synthetic peptide
  Seed: DPRMCSLMQGSTLPRRSGA
  Core: QGSTLPRRS
  misc_feature (9)..(9): Xaa can be Ala, Cys, Asp, Glu, Phe, Gly, His, Ile, Lys, Leu, Met, Asn, Pro, Gln, Ser, Thr, Val, Trp, or Tyr
  misc_feature (12)..(12): Xaa can be Ala, Cys, Asp, Glu, Phe, Gly, His, Ile, Leu, Met, Asn, Pro, Gln, Arg, Ser, Thr, Val, Trp, or Tyr
  misc_feature (14)..(14): Xaa can be Ala, Cys, Asp, Glu, Phe, Gly, Ile, Lys, Leu, Met, Asn, Pro, Gln, Ser, Thr, Val, or Tyr
  misc_feature (17)..(17): Xaa can be Ala, Cys, Asp, Glu, Phe, Gly, His, Ile, Lys, Leu, Met, Asn, Pro, Gln, Arg, Ser, Thr, Val, Trp, or Tyr
DPRMCSLMXGSXLXRRXGA

SEQ ID NO: 137346 - protein, 20 aa, Artificial Sequence
  Description of Artificial Sequence: Synthetic peptide
  Seed: DPRMCSLMQGSTLPRRSGAA
  Core: CSLMQGSTL
  misc_feature (5)..(5): Xaa can be Ala, Cys, Asp, Glu, Phe, Gly, His, Ile, Lys, Leu, Met, Asn, Pro, Gln, Arg, Ser, Thr, Val, Trp, or Tyr
  misc_feature (8)..(8): Xaa can be Ala, Cys, Asp, Glu, Phe, Gly, His, Ile, Lys, Leu, Met, Asn, Pro, Gln, Arg, Ser, Thr, Val, Trp, or Tyr
  misc_feature (10)..(10): Xaa can be Ala, Cys, Asp, Glu, Phe, Gly, His, Ile, Lys, Leu, Met, Asn, Pro, Gln, Arg, Ser, Thr, Val, Trp, or Tyr
  misc_feature (13)..(13): Xaa can be Ala, Cys, Asp, Glu, Phe, Gly, His, Ile, Lys, Leu, Met, Asn, Pro, Gln, Arg, Ser, Thr, Val, Trp, or Tyr
DPRMXSLXQXSTXPRRSGAA

SEQ ID NO: 137347 - protein, 20 aa, Artificial Sequence
  Description of Artificial Sequence: Synthetic peptide
  Seed: DPRMCSLMQGSTLPRRSGAA
  Core: LMQGSTLPR
  misc_feature (7)..(7): Xaa can be Ala, Cys, Asp, Glu, Phe, Gly, His, Ile, Lys, Leu, Met, Asn, Pro, Gln, Arg, Ser, Thr, Val, Trp, or Tyr
  misc_feature (10)..(10): Xaa can be Ala, Cys, Asp, Glu, Phe, Gly, His, Ile, Lys, Leu, Met, Asn, Pro, Gln, Arg, Ser, Thr, Val, Trp, or Tyr
  misc_feature (12)..(12): Xaa can be Ala, Cys, Asp, Glu, Phe, Gly, His, Ile, Lys, Leu, Met, Asn, Pro, Gln, Arg, Ser, Thr, Val, Trp, or Tyr
  misc_feature (15)..(15): Xaa can be Ala, Cys, Asp, Glu, Phe, Gly, His, Ile, Lys, Leu, Met, Asn, Pro, Gln, Arg, Ser, Thr, Val, Trp, or Tyr
DPRMCSXMQXSXLPXRSGAA

SEQ ID NO: 137348 - protein, 20 aa, Artificial Sequence
  Description of Artificial Sequence: Synthetic peptide
  Seed: DPRMCSLMQGSTLPRRSGAA
  Core: MQGSTLPRR
  misc_feature (8)..(8): Xaa can be Ala, Cys, Glu, Phe, His, Ile, Lys, Leu, Met, Asn, Pro, Gln, Arg, Ser, Thr, Val, Trp, or Ty r
  misc_feature (11)..(11): Xaa can be Ala, Cys, Asp, Glu, Phe, Gly, His, Ile, Lys, Leu, Met, Asn, Pro, Gln, Arg, Ser, Thr, Val, Trp, or Tyr
  misc_feature (13)..(13): Xaa can be Ala, Cys, Asp, Glu, Phe, Gly, His, Ile, Lys, Leu, Met, Asn, Pro, Gln, Arg, Ser, Thr, Val, Trp, or Tyr
  misc_feature (16)..(16): Xaa can be Ala, Cys, Asp, Glu, Phe, Gly, His, Ile, Lys, Leu, Met, Asn, Pro, Gln, Arg, Ser, Thr, Val, Trp, or Tyr
DPRMCSLXQGXTXPRXSGAA

SEQ ID NO: 137349 - protein, 20 aa, Artificial Sequence
  Description of Artificial Sequence: Synthetic peptide
  Seed: DPRMCSLMQGSTLPRRSGAA
  Core: QGSTLPRRS
  misc_feature (9)..(9): Xaa can be Ala, Cys, Asp, Glu, Phe, Gly, His, Ile, Lys, Leu, Met, Asn, Pro, Gln, Arg, Ser, Thr, Val, Trp, or Tyr
  misc_feature (12)..(12): Xaa can be Ala, Cys, Asp, Glu, Phe, Gly, His, Ile, Lys, Leu, Met, Asn, Pro, Gln, Arg, Ser, Thr, Val, Trp, or Tyr
  misc_feature (14)..(14): Xaa can be Ala, Cys, Asp, Glu, Phe, Gly, His, Ile, Lys, Leu, Met, Asn, Pro, Gln, Arg, Ser, Thr, Val, Trp, or Tyr
  misc_feature (17)..(17): Xaa can be Ala, Cys, Asp, Glu, Phe, Gly, His, Ile, Lys, Leu, Met, Asn, Pro, Gln, Arg, Ser, Thr, Val, Trp, or Tyr
DPRMCSLMXGSXLXRRXGAA

SEQ ID NO: 137350 - protein, 21 aa, Artificial Sequence
  Description of Artificial Sequence: Synthetic peptide
  Seed: DPRMCSLMQGSTLPRRSGAAG
  Core: CSLMQGSTL
  misc_feature (5)..(5): Xaa can be Ala, Cys, Asp, Glu, Phe, Gly, His, Ile, Lys, Leu, Met, Asn, Pro, Gln, Arg, Ser, Thr, Val, Trp, or Tyr
  misc_feature (8)..(8): Xaa can be Ala, Cys, Asp, Glu, Phe, Gly, His, Ile, Lys, Leu, Met, Asn, Pro, Gln, Arg, Ser, Thr, Val, Trp, or Tyr
  misc_feature (10)..(10): Xaa can be Ala, Cys, Asp, Glu, Phe, Gly, His, Ile, Lys, Leu, Met, Asn, Pro, Gln, Arg, Ser, Thr, Val, Trp, or Tyr
  misc_feature (13)..(13): Xaa can be Ala, Cys, Asp, Glu, Phe, Gly, His, Ile, Lys, Leu, Met, Asn, Pro, Gln, Arg, Ser, Thr, Val, Trp, or Tyr
DPRMXSLXQXSTXPRRSGAAG

SEQ ID NO: 137351 - protein, 21 aa, Artificial Sequence
  Description of Artificial Sequence: Synthetic peptide
  Seed: DPRMCSLMQGSTLPRRSGAAG
  Core: LMQGSTLPR
  misc_feature (7)..(7): Xaa can be Ala, Cys, Asp, Glu, Phe, Gly, His, Ile, Lys, Leu, Met, Asn, Pro, Gln, Arg, Ser, Thr, Val, Trp, or Tyr
  misc_feature (10)..(10): Xaa can be Ala, Cys, Asp, Glu, Phe, Gly, His, Ile, Lys, Leu, Met, Asn, Pro, Gln, Arg, Ser, Thr, Val, Trp, or Tyr
  misc_feature (12)..(12): Xaa can be Ala, Cys, Asp, Glu, Phe, Gly, His, Ile, Lys, Leu, Met, Asn, Pro, Gln, Arg, Ser, Thr, Val, Trp, or Tyr
  misc_feature (15)..(15): Xaa can be Ala, Cys, Asp, Glu, Phe, Gly, His, Ile, Lys, Leu, Met, Asn, Pro, Gln, Arg, Ser, Thr, Val, Trp, or Tyr
DPRMCSXMQXSXLPXRSGAAG

SEQ ID NO: 137352 - protein, 21 aa, Artificial Sequence
  Description of Artificial Sequence: Synthetic peptide
  Seed: DPRMCSLMQGSTLPRRSGAAG
  Core: QGSTLPRRS
  misc_feature (9)..(9): Xaa can be Ala, Cys, Asp, Glu, Phe, Gly, His, Ile, Lys, Leu, Met, Asn, Pro, Gln, Arg, Ser, Thr, Val, Trp, or Tyr
  misc_feature (12)..(12): Xaa can be Ala, Cys, Asp, Glu, Phe, Gly, His, Ile, Lys, Leu, Met, Asn, Pro, Gln, Arg, Ser, Thr, Val, Trp, or Tyr
  misc_feature (14)..(14): Xaa can be Ala, Cys, Asp, Glu, Phe, Gly, His, Ile, Lys, Leu, Met, Asn, Pro, Gln, Arg, Ser, Thr, Val, Trp, or Tyr
  misc_feature (17)..(17): Xaa can be Ala, Cys, Asp, Glu, Phe, Gly, His, Ile, Lys, Leu, Met, Asn, Pro, Gln, Arg, Ser, Thr, Val, Trp, or Tyr
DPRMCSLMXGSXLXRRXGAAG

SEQ ID NO: 137353 - protein, 22 aa, Artificial Sequence
  Description of Artificial Sequence: Synthetic peptide
  Seed: DPRMCSLMQGSTLPRRSGAAGA
  Core: CSLMQGSTL
  misc_feature (5)..(5): Xaa can be Ala, Cys, Asp, Glu, Phe, Gly, His, Ile, Lys, Leu, Met, Asn, Pro, Gln, Arg, Ser, Thr, Val, Trp, or Tyr
  misc_feature (8)..(8): Xaa can be Ala, Cys, Asp, Glu, Phe, Gly, His, Ile, Lys, Leu, Met, Asn, Pro, Gln, Arg, Ser, Thr, Val, Trp, or Tyr
  misc_feature (10)..(10): Xaa can be Ala, Cys, Asp, Glu, Phe, Gly, His, Ile, Lys, Leu, Met, Asn, Pro, Gln, Arg, Ser, Thr, Val, Trp, or Tyr
  misc_feature (13)..(13): Xaa can be Ala, Cys, Asp, Glu, Phe, Gly, His, Ile, Lys, Leu, Met, Asn, Pro, Gln, Arg, Ser, Thr, Val, Trp, or Tyr
DPRMXSLXQXSTXPRRSGAAGA

SEQ ID NO: 137354 - protein, 22 aa, Artificial Sequence
  Description of Artificial Sequence: Synthetic peptide
  Seed: DPRMCSLMQGSTLPRRSGAAGA
  Core: LMQGSTLPR
  misc_feature (7)..(7): Xaa can be Ala, Cys, Asp, Glu, Phe, Gly, His, Ile, Lys, Leu, Met, Asn, Pro, Gln, Arg, Ser, Thr, Val, Trp, or Tyr
  misc_feature (10)..(10): Xaa can be Ala, Cys, Asp, Glu, Phe, Gly, His, Ile, Lys, Leu, Met, Asn, Pro, Gln, Arg, Ser, Thr, Val, Trp, or Tyr
  misc_feature (12)..(12): Xaa can be Ala, Cys, Asp, Glu, Phe, Gly, His, Ile, Lys, Leu, Met, Asn, Pro, Gln, Arg, Ser, Thr, Val, Trp, or Tyr
  misc_feature (15)..(15): Xaa can be Ala, Cys, Asp, Glu, Phe, Gly, His, Ile, Lys, Leu, Met, Asn, Pro, Gln, Arg, Ser, Thr, Val, Trp, or Tyr
DPRMCSXMQXSXLPXRSGAAGA

SEQ ID NO: 137355 - protein, 22 aa, Artificial Sequence
  Description of Artificial Sequence: Synthetic peptide
  Seed: DPRMCSLMQGSTLPRRSGAAGA
  Core: PRRSGAAGA
  misc_feature (14)..(14): Xaa can be Ala, Cys, Phe, Gly, His, Ile, Leu, Met, Asn, Pro, Gln, Ser, Thr, Val, Trp, or Tyr
  misc_feature (17)..(17): Xaa can be Ala, Gly, Ile, Met, Ser, Thr, or Val
  misc_feature (19)..(19): Xaa can be Ala, Cys, Gly, Ile, Leu, Met, Asn, Pro, Ser, Thr, or Val
  misc_feature (22)..(22): Xaa can be Ala, Cys, Asp, Glu, Phe, Gly, His, Ile, Leu, Met, Asn, Pro, Gln, Ser, Thr, Val, Trp, or Ty r
DPRMCSLMQGSTLXRRXGXAGX

SEQ ID NO: 137356 - protein, 22 aa, Artificial Sequence
  Description of Artificial Sequence: Synthetic peptide
  Seed: DPRMCSLMQGSTLPRRSGAAGA
  Core: QGSTLPRRS
  misc_feature (9)..(9): Xaa can be Ala, Cys, Asp, Glu, Phe, Gly, His, Ile, Lys, Leu, Met, Asn, Pro, Gln, Arg, Ser, Thr, Val, Trp, or Tyr
  misc_feature (12)..(12): Xaa can be Ala, Cys, Asp, Glu, Phe, Gly, His, Ile, Lys, Leu, Met, Asn, Pro, Gln, Arg, Ser, Thr, Val, Trp, or Tyr
  misc_feature (14)..(14): Xaa can be Ala, Cys, Asp, Glu, Phe, Gly, His, Ile, Lys, Leu, Met, Asn, Pro, Gln, Arg, Ser, Thr, Val, Trp, or Tyr
  misc_feature (17)..(17): Xaa can be Ala, Cys, Asp, Glu, Phe, Gly, His, Ile, Lys, Leu, Met, Asn, Pro, Gln, Arg, Ser, Thr, Val, Trp, or Tyr
DPRMCSLMXGSXLXRRXGAAGA

SEQ ID NO: 137357 - protein, 14 aa, Artificial Sequence
  Description of Artificial Sequence: Synthetic peptide
  Seed: ERMCNILKGKFQTA
  Core: MCNILKGKF
  misc_feature (3)..(3): Xaa can be Cys, Phe, Ile, Leu, Met, Val, Trp, or Tyr
  misc_feature (6)..(6): Xaa can be Ala, Cys, Glu, Phe, Gly, His, Ile, Lys, Leu, Met, Asn, Gln, Arg, Ser, Thr, Val, Trp, or Ty r
  misc_feature (8)..(8): Xaa can be Ala, Phe, Gly, His, Ile, Lys, Leu, Met, Asn, Pro, Gln, Arg, Ser, Thr, Val, Trp, or Tyr
  misc_feature (11)..(11): Xaa can be Ala, Cys, Asp, Glu, Phe, Gly, His, Ile, Lys, Leu, Met, Asn, Pro, Gln, Arg, Ser, Thr, Val, Trp, or Tyr
ERXCNXLXGKXQTA

SEQ ID NO: 137358 - protein, 15 aa, Artificial Sequence
  Description of Artificial Sequence: Synthetic peptide
  Seed: GMDPRMCSLMQGSTL
  Core: CSLMQGSTL
  misc_feature (7)..(7): Xaa can be Ala, Cys, Asp, Glu, Phe, His, Ile, Lys, Leu, Met, Pro, Gln, Arg, Thr, Val, Trp, or Tyr
  misc_feature (10)..(10): Xaa can be Ala, Cys, Asp, Glu, Phe, Gly, His, Ile, Lys, Leu, Met, Asn, Pro, Gln, Arg, Ser, Thr, Val, Trp, or Tyr
  misc_feature (12)..(12): Xaa can be Ala, Cys, Asp, Glu, Phe, Gly, His, Ile, Lys, Leu, Met, Asn, Pro, Gln, Arg, Ser, Thr, Val, Trp, or Tyr
  misc_feature (15)..(15): Xaa can be Ala, Cys, Asp, Glu, Phe, Gly, His, Ile, Lys, Leu, Met, Asn, Pro, Gln, Arg, Ser, Thr, Val, Trp, or Tyr
GMDPRMXSLXQXSTX

SEQ ID NO: 137359 - protein, 15 aa, Artificial Sequence
  Description of Artificial Sequence: Synthetic peptide
  Seed: GMDPRMCSLMQGSTL
  Core: MCSLMQGST
  misc_feature (6)..(6): Xaa can be Ala, Cys, Phe, Ile, Leu, Met, Pro, Gln, Val, Trp, or Tyr
  misc_feature (9)..(9): Xaa can be Ala, Cys, Glu, Phe, Gly, His, Ile, Lys, Leu, Met, Asn, Gln, Arg, Ser, Thr, Val, Trp, or Ty r
  misc_feature (11)..(11): Xaa can be Ala, Cys, Asp, Glu, Phe, Gly, His, Ile, Lys, Leu, Met, Asn, Pro, Gln, Arg, Ser, Thr, Val, Trp, or Tyr
  misc_feature (14)..(14): Xaa can be Ala, Cys, Asp, Glu, Phe, Gly, His, Ile, Lys, Leu, Met, Asn, Pro, Gln, Arg, Ser, Thr, Val, Trp, or Tyr
GMDPRXCSXMXGSXL

SEQ ID NO: 137360 - protein, 15 aa, Artificial Sequence
  Description of Artificial Sequence: Synthetic peptide
  Seed: GMDPRMCSLMQGSTL
  Core: PRMCSLMQG
  misc_feature (4)..(4): Xaa can be Ala, Cys, Asp, Glu, Phe, Gly, His, Ile, Lys, Leu, Met, Asn, Pro, Gln, Arg, Ser, Thr, Val, Trp, or Tyr
  misc_feature (7)..(7): Xaa can be Ala, Cys, Asp, Glu, Phe, Gly, His, Ile, Lys, Leu, Met, Asn, Pro, Gln, Arg, Ser, Thr, Val, Trp, or Tyr
  misc_feature (9)..(9): Xaa can be Ala, Cys, Asp, Glu, Phe, Gly, His, Ile, Lys, Leu, Met, Asn, Pro, Gln, Arg, Ser, Thr, Val, Trp, or Tyr
  misc_feature (12)..(12): Xaa can be Ala, Cys, Asp, Glu, Phe, Gly, His, Ile, Lys, Leu, Met, Asn, Pro, Gln, Arg, Ser, Thr, Val, Trp, or Tyr
GMDXRMXSXMQXSTL

SEQ ID NO: 137361 - protein, 16 aa, Artificial Sequence
  Description of Artificial Sequence: Synthetic peptide
  Seed: GMDPRMCSLMQGSTLP
  Core: CSLMQGSTL
  misc_feature (7)..(7): Xaa can be Ala, Cys, Phe, Gly, His, Ile, Lys, Leu, Met, Asn, Pro, Gln, Ser, Thr, Val, Trp, or Tyr
  misc_feature (10)..(10): Xaa can be Ala, Cys, Asp, Glu, Phe, Gly, His, Ile, Lys, Leu, Met, Asn, Pro, Gln, Arg, Ser, Thr, Val, Trp, or Tyr
  misc_feature (12)..(12): Xaa can be Ala, Cys, Asp, Glu, Phe, Gly, His, Ile, Lys, Leu, Met, Asn, Pro, Gln, Arg, Ser, Thr, Val, Trp, or Tyr
  misc_feature (15)..(15): Xaa can be Ala, Cys, Asp, Glu, Phe, Gly, His, Ile, Lys, Leu, Met, Asn, Pro, Gln, Arg, Ser, Thr, Val, Trp, or Tyr
GMDPRMXSLXQXSTXP

SEQ ID NO: 137362 - protein, 17 aa, Artificial Sequence
  Description of Artificial Sequence: Synthetic peptide
  Seed: GMDPRMCSLMQGSTLPR
  Core: CSLMQGSTL
  misc_feature (7)..(7): Xaa can be Ala, Cys, Asp, Glu, Phe, Gly, His, Ile, Lys, Leu, Met, Asn, Pro, Gln, Arg, Ser, Thr, Val, Trp, or Tyr
  misc_feature (10)..(10): Xaa can be Ala, Cys, Asp, Glu, Phe, Gly, His, Ile, Lys, Leu, Met, Asn, Pro, Gln, Arg, Ser, Thr, Val, Trp, or Tyr
  misc_feature (12)..(12): Xaa can be Ala, Cys, Asp, Glu, Phe, Gly, His, Ile, Lys, Leu, Met, Asn, Pro, Gln, Arg, Ser, Thr, Val, Trp, or Tyr
  misc_feature (15)..(15): Xaa can be Ala, Cys, Asp, Glu, Phe, Gly, His, Ile, Lys, Leu, Met, Asn, Pro, Gln, Arg, Ser, Thr, Val, Trp, or Tyr
GMDPRMXSLXQXSTXPR

SEQ ID NO: 137363 - protein, 18 aa, Artificial Sequence
  Description of Artificial Sequence: Synthetic peptide
  Seed: GMDPRMCSLMQGSTLPRR
  Core: CSLMQGSTL
  misc_feature (7)..(7): Xaa can be Ala, Cys, Phe, His, Ile, Leu, Met, Thr, Val, Trp, or Tyr
  misc_feature (10)..(10): Xaa can be Ala, Cys, Asp, Glu, Phe, Gly, His, Ile, Lys, Leu, Met, Asn, Gln, Arg, Ser, Thr, Val, Trp, or Tyr
  misc_feature (12)..(12): Xaa can be Ala, Cys, Asp, Glu, Phe, Gly, His, Ile, Lys, Leu, Met, Asn, Pro, Gln, Arg, Ser, Thr, Val, Trp, or Tyr
  misc_feature (15)..(15): Xaa can be Ala, Cys, Asp, Glu, Phe, Gly, His, Ile, Lys, Leu, Met, Asn, Pro, Gln, Arg, Ser, Thr, Val, Trp, or Tyr
GMDPRMXSLXQXSTXPRR

SEQ ID NO: 137364 - protein, 19 aa, Artificial Sequence
  Description of Artificial Sequence: Synthetic peptide
  Seed: GMDPRMCSLMQGSTLPRRS
  Core: CSLMQGSTL
  misc_feature (7)..(7): Xaa can be Ala, Cys, Asp, Glu, Phe, Gly, His, Ile, Lys, Leu, Met, Asn, Pro, Gln, Arg, Ser, Thr, Val, Trp, or Tyr
  misc_feature (10)..(10): Xaa can be Ala, Cys, Asp, Glu, Phe, Gly, His, Ile, Lys, Leu, Met, Asn, Pro, Gln, Arg, Ser, Thr, Val, Trp, or Tyr
  misc_feature (12)..(12): Xaa can be Ala, Cys, Asp, Glu, Phe, Gly, His, Ile, Lys, Leu, Met, Asn, Pro, Gln, Arg, Ser, Thr, Val, Trp, or Tyr
  misc_feature (15)..(15): Xaa can be Ala, Cys, Asp, Glu, Phe, Gly, His, Ile, Lys, Leu, Met, Asn, Pro, Gln, Arg, Ser, Thr, Val, Trp, or Tyr
GMDPRMXSLXQXSTXPRRS

SEQ ID NO: 137365 - protein, 19 aa, Artificial Sequence
  Description of Artificial Sequence: Synthetic peptide
  Seed: GMDPRMCSLMQGSTLPRRS
  Core: LMQGSTLPR
  misc_feature (9)..(9): Xaa can be Ala, Cys, Asp, Glu, Phe, Gly, His, Ile, Lys, Leu, Met, Asn, Pro, Gln, Arg, Ser, Thr, Val, Trp, or Tyr
  misc_feature (12)..(12): Xaa can be Ala, Cys, Asp, Glu, Phe, Gly, His, Ile, Lys, Leu, Met, Asn, Pro, Gln, Arg, Ser, Thr, Val, Trp, or Tyr
  misc_feature (14)..(14): Xaa can be Ala, Cys, Asp, Glu, Phe, Gly, His, Ile, Lys, Leu, Met, Asn, Pro, Gln, Arg, Ser, Thr, Val, Trp, or Tyr
  misc_feature (17)..(17): Xaa can be Ala, Cys, Asp, Glu, Phe, Gly, His, Ile, Lys, Leu, Met, Asn, Pro, Gln, Arg, Ser, Thr, Val, Trp, or Tyr
GMDPRMCSXMQXSXLPXRS

SEQ ID NO: 137366 - protein, 19 aa, Artificial Sequence
  Description of Artificial Sequence: Synthetic peptide
  Seed: GMDPRMCSLMQGSTLPRRS
  Core: MQGSTLPRR
  misc_feature (10)..(10): Xaa can be Ala, Cys, Asp, Glu, Phe, Gly, His, Ile, Lys, Leu, Met, Asn, Pro, Gln, Arg, Ser, Thr, Val, Trp, or Tyr
  misc_feature (13)..(13): Xaa can be Ala, Cys, Phe, Gly, His, Ile, Lys, Leu, Met, Asn, Pro, Gln, Arg, Ser, Thr, Val, Trp, or Ty r
  misc_feature (15)..(15): Xaa can be Ala, Cys, Asp, Glu, Phe, Gly, His, Ile, Leu, Met, Asn, Pro, Gln, Ser, Thr, Val, Trp, or Ty r
  misc_feature (18)..(18): Xaa can be Ala, Cys, Asp, Glu, Phe, Gly, His, Ile, Lys, Leu, Met, Asn, Pro, Gln, Arg, Ser, Thr, Val, Trp, or Tyr
GMDPRMCSLXQGXTXPRXS

SEQ ID NO: 137367 - protein, 19 aa, Artificial Sequence
  Description of Artificial Sequence: Synthetic peptide
  Seed: GMDPRMCSLMQGSTLPRRS
  Core: RMCSLMQGS
  misc_feature (5)..(5): Xaa can be Ala, Cys, Asp, Glu, Phe, Gly, His, Ile, Lys, Leu, Met, Asn, Pro, Gln, Arg, Ser, Thr, Val, Trp, or Tyr
  misc_feature (8)..(8): Xaa can be Ala, Cys, Asp, Glu, Phe, Gly, His, Ile, Lys, Leu, Met, Asn, Pro, Gln, Arg, Ser, Thr, Val, Trp, or Tyr
  misc_feature (10)..(10): Xaa can be Ala, Cys, Asp, Glu, Phe, Gly, His, Ile, Lys, Leu, Met, Asn, Pro, Gln, Arg, Ser, Thr, Val, Trp, or Tyr
  misc_feature (13)..(13): Xaa can be Ala, Cys, Asp, Glu, Phe, Gly, His, Ile, Lys, Leu, Met, Asn, Pro, Gln, Arg, Ser, Thr, Val, Trp, or Tyr
GMDPXMCXLXQGXTLPRRS

SEQ ID NO: 137368 - protein, 20 aa, Artificial Sequence
  Description of Artificial Sequence: Synthetic peptide
  Seed: GMDPRMCSLMQGSTLPRRSG
  Core: CSLMQGSTL
  misc_feature (7)..(7): Xaa can be Ala, Cys, Asp, Glu, Phe, Gly, His, Ile, Lys, Leu, Met, Asn, Pro, Gln, Arg, Ser, Thr, Val, Trp, or Tyr
  misc_feature (10)..(10): Xaa can be Ala, Cys, Asp, Glu, Phe, Gly, His, Ile, Lys, Leu, Met, Asn, Pro, Gln, Arg, Ser, Thr, Val, Trp, or Tyr
  misc_feature (12)..(12): Xaa can be Ala, Cys, Asp, Glu, Phe, Gly, His, Ile, Lys, Leu, Met, Asn, Pro, Gln, Arg, Ser, Thr, Val, Trp, or Tyr
  misc_feature (15)..(15): Xaa can be Ala, Cys, Asp, Glu, Phe, Gly, His, Ile, Lys, Leu, Met, Asn, Pro, Gln, Arg, Ser, Thr, Val, Trp, or Tyr
GMDPRMXSLXQXSTXPRRSG

SEQ ID NO: 137369 - protein, 20 aa, Artificial Sequence
  Description of Artificial Sequence: Synthetic peptide
  Seed: GMDPRMCSLMQGSTLPRRSG
  Core: LMQGSTLPR
  misc_feature (9)..(9): Xaa can be Ala, Cys, Asp, Glu, Phe, Gly, His, Ile, Lys, Leu, Met, Asn, Pro, Gln, Arg, Ser, Thr, Val, Trp, or Tyr
  misc_feature (12)..(12): Xaa can be Ala, Cys, Asp, Glu, Phe, Gly, His, Ile, Lys, Leu, Met, Asn, Pro, Gln, Arg, Ser, Thr, Val, Trp, or Tyr
  misc_feature (14)..(14): Xaa can be Ala, Cys, Asp, Glu, Phe, Gly, His, Ile, Lys, Leu, Met, Asn, Pro, Gln, Arg, Ser, Thr, Val, Trp, or Tyr
  misc_feature (17)..(17): Xaa can be Ala, Cys, Asp, Glu, Phe, Gly, His, Ile, Lys, Leu, Met, Asn, Pro, Gln, Arg, Ser, Thr, Val, Trp, or Tyr
GMDPRMCSXMQXSXLPXRSG

SEQ ID NO: 137370 - protein, 20 aa, Artificial Sequence
  Description of Artificial Sequence: Synthetic peptide
  Seed: GMDPRMCSLMQGSTLPRRSG
  Core: MQGSTLPRR
  misc_feature (10)..(10): Xaa can be Ala, Cys, Asp, Glu, Phe, Gly, His, Ile, Lys, Leu, Met, Asn, Pro, Gln, Arg, Ser, Thr, Val, Trp, or Tyr
  misc_feature (13)..(13): Xaa can be Ala, Cys, Asp, Glu, Phe, Gly, His, Ile, Lys, Leu, Met, Asn, Pro, Gln, Arg, Ser, Thr, Val, Trp, or Tyr
  misc_feature (15)..(15): Xaa can be Ala, Cys, Asp, Glu, Phe, Gly, His, Ile, Lys, Leu, Met, Asn, Pro, Gln, Arg, Ser, Thr, Val, Trp, or Tyr
  misc_feature (18)..(18): Xaa can be Ala, Cys, Asp, Glu, Phe, Gly, His, Ile, Lys, Leu, Met, Asn, Pro, Gln, Arg, Ser, Thr, Val, Trp, or Tyr
GMDPRMCSLXQGXTXPRXSG

SEQ ID NO: 137371 - protein, 20 aa, Artificial Sequence
  Description of Artificial Sequence: Synthetic peptide
  Seed: GMDPRMCSLMQGSTLPRRSG
  Core: RMCSLMQGS
  misc_feature (5)..(5): Xaa can be Ala, Cys, Glu, Phe, His, Ile, Lys, Leu, Met, Asn, Gln, Arg, Ser, Thr, Val, Trp, or Tyr
  misc_feature (8)..(8): Xaa can be Ala, Cys, Asp, Glu, Phe, Gly, His, Ile, Lys, Leu, Met, Asn, Pro, Gln, Arg, Ser, Thr, Val, Trp, or Tyr
  misc_feature (10)..(10): Xaa can be Ala, Cys, Asp, Glu, Phe, Gly, His, Ile, Lys, Leu, Met, Asn, Pro, Gln, Arg, Ser, Thr, Val, Trp, or Tyr
  misc_feature (13)..(13): Xaa can be Ala, Cys, Asp, Glu, Phe, Gly, His, Ile, Lys, Leu, Met, Asn, Pro, Gln, Arg, Ser, Thr, Val, Trp, or Tyr
GMDPXMCXLXQGXTLPRRSG

SEQ ID NO: 137372 - protein, 21 aa, Artificial Sequence
  Description of Artificial Sequence: Synthetic peptide
  Seed: GMDPRMCSLMQGSTLPRRSGA
  Core: CSLMQGSTL
  misc_feature (7)..(7): Xaa can be Ala, Cys, Asp, Glu, Phe, Gly, His, Ile, Lys, Leu, Met, Asn, Pro, Gln, Arg, Ser, Thr, Val, Trp, or Tyr
  misc_feature (10)..(10): Xaa can be Ala, Cys, Asp, Glu, Phe, Gly, His, Ile, Lys, Leu, Met, Asn, Pro, Gln, Arg, Ser, Thr, Val, Trp, or Tyr
  misc_feature (12)..(12): Xaa can be Ala, Cys, Asp, Glu, Phe, Gly, His, Ile, Lys, Leu, Met, Asn, Pro, Gln, Arg, Ser, Thr, Val, Trp, or Tyr
  misc_feature (15)..(15): Xaa can be Ala, Cys, Asp, Glu, Phe, Gly, His, Ile, Lys, Leu, Met, Asn, Pro, Gln, Arg, Ser, Thr, Val, Trp, or Tyr
GMDPRMXSLXQXSTXPRRSGA

SEQ ID NO: 137373 - protein, 21 aa, Artificial Sequence
  Description of Artificial Sequence: Synthetic peptide
  Seed: GMDPRMCSLMQGSTLPRRSGA
  Core: LMQGSTLPR
  misc_feature (9)..(9): Xaa can be Ala, Cys, Asp, Glu, Phe, Gly, His, Ile, Lys, Leu, Met, Asn, Pro, Gln, Arg, Ser, Thr, Val, Trp, or Tyr
  misc_feature (12)..(12): Xaa can be Ala, Cys, Asp, Glu, Phe, Gly, His, Ile, Lys, Leu, Met, Asn, Pro, Gln, Arg, Ser, Thr, Val, Trp, or Tyr
  misc_feature (14)..(14): Xaa can be Ala, Cys, Asp, Glu, Phe, Gly, His, Ile, Lys, Leu, Met, Asn, Pro, Gln, Arg, Ser, Thr, Val, Trp, or Tyr
  misc_feature (17)..(17): Xaa can be Ala, Cys, Asp, Glu, Phe, Gly, His, Ile, Lys, Leu, Met, Asn, Pro, Gln, Arg, Ser, Thr, Val, Trp, or Tyr
GMDPRMCSXMQXSXLPXRSGA

SEQ ID NO: 137374 - protein, 21 aa, Artificial Sequence
  Description of Artificial Sequence: Synthetic peptide
  Seed: GMDPRMCSLMQGSTLPRRSGA
  Core: MQGSTLPRR
  misc_feature (10)..(10): Xaa can be Ala, Cys, Asp, Glu, Phe, Gly, His, Ile, Lys, Leu, Met, Asn, Pro, Gln, Arg, Ser, Thr, Val, Trp, or Tyr
  misc_feature (13)..(13): Xaa can be Ala, Cys, Asp, Glu, Phe, Gly, His, Ile, Lys, Leu, Met, Asn, Pro, Gln, Arg, Ser, Thr, Val, Trp, or Tyr
  misc_feature (15)..(15): Xaa can be Ala, Cys, Asp, Glu, Phe, Gly, His, Ile, Lys, Leu, Met, Asn, Pro, Gln, Arg, Ser, Thr, Val, Trp, or Tyr
  misc_feature (18)..(18): Xaa can be Ala, Cys, Asp, Glu, Phe, Gly, His, Ile, Lys, Leu, Met, Asn, Pro, Gln, Arg, Ser, Thr, Val, Trp, or Tyr
GMDPRMCSLXQGXTXPRXSGA

SEQ ID NO: 137375 - protein, 21 aa, Artificial Sequence
  Description of Artificial Sequence: Synthetic peptide
  Seed: GMDPRMCSLMQGSTLPRRSGA
  Core: QGSTLPRRS
  misc_feature (11)..(11): Xaa can be Ala, Cys, Asp, Glu, Phe, Gly, His, Ile, Lys, Leu, Met, Asn, Pro, Gln, Arg, Ser, Thr, Val, Trp, or Tyr
  misc_feature (14)..(14): Xaa can be Ala, Cys, Asp, Glu, Phe, Gly, His, Ile, Lys, Leu, Met, Asn, Pro, Gln, Ser, Thr, Val, Trp, or Tyr
  misc_feature (16)..(16): Xaa can be Ala, Cys, Asp, Glu, Phe, Gly, Ile, Lys, Leu, Met, Asn, Pro, Gln, Ser, Thr, Val, or Tyr
  misc_feature (19)..(19): Xaa can be Ala, Cys, Asp, Glu, Phe, Gly, His, Ile, Lys, Leu, Met, Asn, Pro, Gln, Arg, Ser, Thr, Val, Trp, or Tyr
GMDPRMCSLMXGSXLXRRXGA

SEQ ID NO: 137376 - protein, 21 aa, Artificial Sequence
  Description of Artificial Sequence: Synthetic peptide
  Seed: GMDPRMCSLMQGSTLPRRSGA
  Core: RMCSLMQGS
  misc_feature (5)..(5): Xaa can be Phe, Ile, Leu, Arg, or Tyr
  misc_feature (8)..(8): Xaa can be Ala, Asp, Glu, Phe, His, Ile, Lys, Leu, Met, Asn, Pro, Gln, Arg, Ser, Thr, Val, or Trp
  misc_feature (10)..(10): Xaa can be Ala, Phe, Ile, Leu, Met, Pro, Ser, Thr, Val, Trp, or Tyr
  misc_feature (13)..(13): Xaa can be Ala, Asp, Glu, Phe, His, Ile, Leu, Met, Asn, Gln, Arg, Ser, Thr, Val, or Tyr
GMDPXMCXLXQGXTLPRRSGA

SEQ ID NO: 137377 - protein, 22 aa, Artificial Sequence
  Description of Artificial Sequence: Synthetic peptide
  Seed: GMDPRMCSLMQGSTLPRRSGAA
  Core: CSLMQGSTL
  misc_feature (7)..(7): Xaa can be Ala, Cys, Asp, Glu, Phe, Gly, His, Ile, Lys, Leu, Met, Asn, Pro, Gln, Arg, Ser, Thr, Val, Trp, or Tyr
  misc_feature (10)..(10): Xaa can be Ala, Cys, Asp, Glu, Phe, Gly, His, Ile, Lys, Leu, Met, Asn, Pro, Gln, Arg, Ser, Thr, Val, Trp, or Tyr
  misc_feature (12)..(12): Xaa can be Ala, Cys, Asp, Glu, Phe, Gly, His, Ile, Lys, Leu, Met, Asn, Pro, Gln, Arg, Ser, Thr, Val, Trp, or Tyr
  misc_feature (15)..(15): Xaa can be Ala, Cys, Asp, Glu, Phe, Gly, His, Ile, Lys, Leu, Met, Asn, Pro, Gln, Arg, Ser, Thr, Val, Trp, or Tyr
GMDPRMXSLXQXSTXPRRSGAA

SEQ ID NO: 137378 - protein, 22 aa, Artificial Sequence
  Description of Artificial Sequence: Synthetic peptide
  Seed: GMDPRMCSLMQGSTLPRRSGAA
  Core: LMQGSTLPR
  misc_feature (9)..(9): Xaa can be Ala, Cys, Asp, Glu, Phe, Gly, His, Ile, Lys, Leu, Met, Asn, Pro, Gln, Arg, Ser, Thr, Val, Trp, or Tyr
  misc_feature (12)..(12): Xaa can be Ala, Cys, Asp, Glu, Phe, Gly, His, Ile, Lys, Leu, Met, Asn, Pro, Gln, Arg, Ser, Thr, Val, Trp, or Tyr
  misc_feature (14)..(14): Xaa can be Ala, Cys, Asp, Glu, Phe, Gly, His, Ile, Lys, Leu, Met, Asn, Pro, Gln, Arg, Ser, Thr, Val, Trp, or Tyr
  misc_feature (17)..(17): Xaa can be Ala, Cys, Asp, Glu, Phe, Gly, His, Ile, Lys, Leu, Met, Asn, Pro, Gln, Arg, Ser, Thr, Val, Trp, or Tyr
GMDPRMCSXMQXSXLPXRSGAA

SEQ ID NO: 137379 - protein, 22 aa, Artificial Sequence
  Description of Artificial Sequence: Synthetic peptide
  Seed: GMDPRMCSLMQGSTLPRRSGAA
  Core: MQGSTLPRR
  misc_feature (10)..(10): Xaa can be Ala, Cys, Glu, Phe, His, Ile, Lys, Leu, Met, Gln, Arg, Ser, Thr, Val, Trp, or Tyr
  misc_feature (13)..(13): Xaa can be Ala, Cys, Asp, Glu, Phe, Gly, His, Ile, Lys, Leu, Met, Asn, Pro, Gln, Arg, Ser, Thr, Val, Trp, or Tyr
  misc_feature (15)..(15): Xaa can be Ala, Cys, Asp, Glu, Phe, Gly, His, Ile, Lys, Leu, Met, Asn, Pro, Gln, Arg, Ser, Thr, Val, Trp, or Tyr
  misc_feature (18)..(18): Xaa can be Ala, Cys, Asp, Glu, Phe, Gly, His, Ile, Lys, Leu, Met, Asn, Pro, Gln, Arg, Ser, Thr, Val, Trp, or Tyr
GMDPRMCSLXQGXTXPRXSGAA

SEQ ID NO: 137380 - protein, 22 aa, Artificial Sequence
  Description of Artificial Sequence: Synthetic peptide
  Seed: GMDPRMCSLMQGSTLPRRSGAA
  Core: QGSTLPRRS
  misc_feature (11)..(11): Xaa can be Ala, Cys, Asp, Glu, Phe, Gly, His, Ile, Lys, Leu, Met, Asn, Pro, Gln, Arg, Ser, Thr, Val, Trp, or Tyr
  misc_feature (14)..(14): Xaa can be Ala, Cys, Asp, Glu, Phe, Gly, His, Ile, Lys, Leu, Met, Asn, Pro, Gln, Arg, Ser, Thr, Val, Trp, or Tyr
  misc_feature (16)..(16): Xaa can be Ala, Cys, Asp, Glu, Phe, Gly, His, Ile, Lys, Leu, Met, Asn, Pro, Gln, Arg, Ser, Thr, Val, Trp, or Tyr
  misc_feature (19)..(19): Xaa can be Ala, Cys, Asp, Glu, Phe, Gly, His, Ile, Lys, Leu, Met, Asn, Pro, Gln, Arg, Ser, Thr, Val, Trp, or Tyr
GMDPRMCSLMXGSXLXRRXGAA

SEQ ID NO: 137381 - protein, 22 aa, Artificial Sequence
  Description of Artificial Sequence: Synthetic peptide
  Seed: GMDPRMCSLMQGSTLPRRSGAA
  Core: RMCSLMQGS
  misc_feature (5)..(5): Xaa can be Phe, Ile, Leu, Arg, or Tyr
  misc_feature (8)..(8): Xaa can be Ala, Asp, Glu, Phe, His, Ile, Lys, Leu, Met, Asn, Gln, Ser, Thr, Val, or Trp
  misc_feature (10)..(10): Xaa can be Ala, Phe, Ile, Leu, Met, Pro, Ser, Thr, Val, Trp, or Tyr
  misc_feature (13)..(13): Xaa can be Ala, Asp, Glu, His, Ile, Leu, Met, Asn, Gln, Arg, Ser, Thr, or Val
GMDPXMCXLXQGXTLPRRSGAA

SEQ ID NO: 137382 - protein, 23 aa, Artificial Sequence
  Description of Artificial Sequence: Synthetic peptide
  Seed: GMDPRMCSLMQGSTLPRRSGAAG
  Core: CSLMQGSTL
  misc_feature (7)..(7): Xaa can be Ala, Cys, Asp, Glu, Phe, Gly, His, Ile, Lys, Leu, Met, Asn, Pro, Gln, Arg, Ser, Thr, Val, Trp, or Tyr
  misc_feature (10)..(10): Xaa can be Ala, Cys, Asp, Glu, Phe, Gly, His, Ile, Lys, Leu, Met, Asn, Pro, Gln, Arg, Ser, Thr, Val, Trp, or Tyr
  misc_feature (12)..(12): Xaa can be Ala, Cys, Asp, Glu, Phe, Gly, His, Ile, Lys, Leu, Met, Asn, Pro, Gln, Arg, Ser, Thr, Val, Trp, or Tyr
  misc_feature (15)..(15): Xaa can be Ala, Cys, Asp, Glu, Phe, Gly, His, Ile, Lys, Leu, Met, Asn, Pro, Gln, Arg, Ser, Thr, Val, Trp, or Tyr
GMDPRMXSLXQXSTXPRRSGAAG

SEQ ID NO: 137383 - protein, 23 aa, Artificial Sequence
  Description of Artificial Sequence: Synthetic peptide
  Seed: GMDPRMCSLMQGSTLPRRSGAAG
  Core: GSTLPRRSG
  misc_feature (12)..(12): Xaa can be Ala, Cys, Phe, Gly, His, Ile, Lys, Leu, Met, Asn, Pro, Gln, Arg, Ser, Thr, Val, Trp, or Ty r
  misc_feature (15)..(15): Xaa can be Ala, Cys, Asp, Glu, Phe, Gly, His, Ile, Lys, Leu, Met, Asn, Pro, Gln, Arg, Ser, Thr, Val, Trp, or Tyr
  misc_feature (17)..(17): Xaa can be Ala, Cys, Asp, Glu, Phe, Gly, His, Ile, Lys, Leu, Met, Asn, Pro, Gln, Arg, Ser, Thr, Val, Trp, or Tyr
  misc_feature (20)..(20): Xaa can be Ala, Cys, Asp, Glu, Phe, Gly, His, Ile, Lys, Leu, Met, Asn, Pro, Gln, Arg, Ser, Thr, Val, Trp, or Tyr
GMDPRMCSLMQXSTXPXRSXAAG

SEQ ID NO: 137384 - protein, 23 aa, Artificial Sequence
  Description of Artificial Sequence: Synthetic peptide
  Seed: GMDPRMCSLMQGSTLPRRSGAAG
  Core: LMQGSTLPR
  misc_feature (9)..(9): Xaa can be Ala, Cys, Asp, Glu, Phe, Gly, His, Ile, Lys, Leu, Met, Asn, Pro, Gln, Arg, Ser, Thr, Val, Trp, or Tyr
  misc_feature (12)..(12): Xaa can be Ala, Cys, Asp, Glu, Phe, Gly, His, Ile, Lys, Leu, Met, Asn, Pro, Gln, Arg, Ser, Thr, Val, Trp, or Tyr
  misc_feature (14)..(14): Xaa can be Ala, Cys, Asp, Glu, Phe, Gly, His, Ile, Lys, Leu, Met, Asn, Pro, Gln, Arg, Ser, Thr, Val, Trp, or Tyr
  misc_feature (17)..(17): Xaa can be Ala, Cys, Asp, Glu, Phe, Gly, His, Ile, Lys, Leu, Met, Asn, Pro, Gln, Arg, Ser, Thr, Val, Trp, or Tyr
GMDPRMCSXMQXSXLPXRSGAAG

SEQ ID NO: 137385 - protein, 23 aa, Artificial Sequence
  Description of Artificial Sequence: Synthetic peptide
  Seed: GMDPRMCSLMQGSTLPRRSGAAG
  Core: MQGSTLPRR
  misc_feature (10)..(10): Xaa can be Ala, Cys, Glu, Phe, His, Ile, Lys, Leu, Met, Gln, Arg, Ser, Thr, Val, Trp, or Tyr
  misc_feature (13)..(13): Xaa can be Ala, Cys, Asp, Glu, Phe, Gly, His, Ile, Lys, Leu, Met, Asn, Pro, Gln, Arg, Ser, Thr, Val, Trp, or Tyr
  misc_feature (15)..(15): Xaa can be Ala, Cys, Asp, Glu, Phe, Gly, His, Ile, Lys, Leu, Met, Asn, Pro, Gln, Arg, Ser, Thr, Val, Trp, or Tyr
  misc_feature (18)..(18): Xaa can be Ala, Cys, Asp, Glu, Phe, Gly, His, Ile, Lys, Leu, Met, Asn, Pro, Gln, Arg, Ser, Thr, Val, Trp, or Tyr
GMDPRMCSLXQGXTXPRXSGAAG

SEQ ID NO: 137386 - protein, 23 aa, Artificial Sequence
  Description of Artificial Sequence: Synthetic peptide
  Seed: GMDPRMCSLMQGSTLPRRSGAAG
  Core: QGSTLPRRS
  misc_feature (11)..(11): Xaa can be Ala, Cys, Asp, Glu, Phe, Gly, His, Ile, Lys, Leu, Met, Asn, Pro, Gln, Arg, Ser, Thr, Val, Trp, or Tyr
  misc_feature (14)..(14): Xaa can be Ala, Cys, Asp, Glu, Phe, Gly, His, Ile, Lys, Leu, Met, Asn, Pro, Gln, Arg, Ser, Thr, Val, Trp, or Tyr
  misc_feature (16)..(16): Xaa can be Ala, Cys, Asp, Glu, Phe, Gly, His, Ile, Lys, Leu, Met, Asn, Pro, Gln, Arg, Ser, Thr, Val, Trp, or Tyr
  misc_feature (19)..(19): Xaa can be Ala, Cys, Asp, Glu, Phe, Gly, His, Ile, Lys, Leu, Met, Asn, Pro, Gln, Arg, Ser, Thr, Val, Trp, or Tyr
GMDPRMCSLMXGSXLXRRXGAAG

SEQ ID NO: 137387 - protein, 23 aa, Artificial Sequence
  Description of Artificial Sequence: Synthetic peptide
  Seed: GMDPRMCSLMQGSTLPRRSGAAG
  Core: RMCSLMQGS
  misc_feature (5)..(5): Xaa can be Phe, Ile, Leu, Arg, or Tyr
  misc_feature (8)..(8): Xaa can be Ala, Asp, Glu, Phe, His, Ile, Lys, Leu, Met, Asn, Gln, Ser, Thr, Val, or Trp
  misc_feature (10)..(10): Xaa can be Ala, Phe, Ile, Leu, Met, Pro, Ser, Thr, Val, Trp, or Tyr
  misc_feature (13)..(13): Xaa can be Ala, Asp, Glu, His, Ile, Leu, Met, Asn, Gln, Arg, Ser, Thr, or Val
GMDPXMCXLXQGXTLPRRSGAAG

SEQ ID NO: 137388 - protein, 24 aa, Artificial Sequence
  Description of Artificial Sequence: Synthetic peptide
  Seed: GMDPRMCSLMQGSTLPRRSGAAGA
  Core: CSLMQGSTL
  misc_feature (7)..(7): Xaa can be Ala, Cys, Asp, Glu, Phe, Gly, His, Ile, Lys, Leu, Met, Asn, Pro, Gln, Arg, Ser, Thr, Val, Trp, or Tyr
  misc_feature (10)..(10): Xaa can be Ala, Cys, Asp, Glu, Phe, Gly, His, Ile, Lys, Leu, Met, Asn, Pro, Gln, Arg, Ser, Thr, Val, Trp, or Tyr
  misc_feature (12)..(12): Xaa can be Ala, Cys, Asp, Glu, Phe, Gly, His, Ile, Lys, Leu, Met, Asn, Pro, Gln, Arg, Ser, Thr, Val, Trp, or Tyr
  misc_feature (15)..(15): Xaa can be Ala, Cys, Asp, Glu, Phe, Gly, His, Ile, Lys, Leu, Met, Asn, Pro, Gln, Arg, Ser, Thr, Val, Trp, or Tyr
GMDPRMXSLXQXSTXPRRSGAAGA

SEQ ID NO: 137389 - protein, 24 aa, Artificial Sequence
  Description of Artificial Sequence: Synthetic peptide
  Seed: GMDPRMCSLMQGSTLPRRSGAAGA
  Core: GSTLPRRSG
  misc_feature (12)..(12): Xaa can be Ala, Cys, Glu, Phe, Gly, His, Ile, Lys, Leu, Met, Asn, Pro, Gln, Arg, Ser, Thr, Val, Trp, or Tyr
  misc_feature (15)..(15): Xaa can be Ala, Cys, Asp, Glu, Phe, Gly, His, Ile, Lys, Leu, Met, Asn, Pro, Gln, Arg, Ser, Thr, Val, Trp, or Tyr
  misc_feature (17)..(17): Xaa can be Ala, Cys, Asp, Glu, Phe, Gly, His, Ile, Lys, Leu, Met, Asn, Pro, Gln, Arg, Ser, Thr, Val, Trp, or Tyr
  misc_feature (20)..(20): Xaa can be Ala, Cys, Asp, Glu, Phe, Gly, His, Ile, Lys, Leu, Met, Asn, Pro, Gln, Arg, Ser, Thr, Val, Trp, or Tyr
GMDPRMCSLMQXSTXPXRSXAAGA

SEQ ID NO: 137390 - protein, 24 aa, Artificial Sequence
  Description of Artificial Sequence: Synthetic peptide
  Seed: GMDPRMCSLMQGSTLPRRSGAAGA
  Core: LMQGSTLPR
  misc_feature (9)..(9): Xaa can be Ala, Cys, Asp, Glu, Phe, Gly, His, Ile, Lys, Leu, Met, Asn, Pro, Gln, Arg, Ser, Thr, Val, Trp, or Tyr
  misc_feature (12)..(12): Xaa can be Ala, Cys, Asp, Glu, Phe, Gly, His, Ile, Lys, Leu, Met, Asn, Pro, Gln, Arg, Ser, Thr, Val, Trp, or Tyr
  misc_feature (14)..(14): Xaa can be Ala, Cys, Asp, Glu, Phe, Gly, His, Ile, Lys, Leu, Met, Asn, Pro, Gln, Arg, Ser, Thr, Val, Trp, or Tyr
  misc_feature (17)..(17): Xaa can be Ala, Cys, Asp, Glu, Phe, Gly, His, Ile, Lys, Leu, Met, Asn, Pro, Gln, Arg, Ser, Thr, Val, Trp, or Tyr
GMDPRMCSXMQXSXLPXRSGAAGA

SEQ ID NO: 137391 - protein, 24 aa, Artificial Sequence
  Description of Artificial Sequence: Synthetic peptide
  Seed: GMDPRMCSLMQGSTLPRRSGAAGA
  Core: MQGSTLPRR
  misc_feature (10)..(10): Xaa can be Ala, Cys, Glu, Phe, His, Ile, Lys, Leu, Met, Gln, Arg, Ser, Thr, Val, Trp, or Tyr
  misc_feature (13)..(13): Xaa can be Ala, Cys, Asp, Glu, Phe, Gly, His, Ile, Lys, Leu, Met, Asn, Pro, Gln, Arg, Ser, Thr, Val, Trp, or Tyr
  misc_feature (15)..(15): Xaa can be Ala, Cys, Asp, Glu, Phe, Gly, His, Ile, Lys, Leu, Met, Asn, Pro, Gln, Arg, Ser, Thr, Val, Trp, or Tyr
  misc_feature (18)..(18): Xaa can be Ala, Cys, Asp, Glu, Phe, Gly, His, Ile, Lys, Leu, Met, Asn, Pro, Gln, Arg, Ser, Thr, Val, Trp, or Tyr
GMDPRMCSLXQGXTXPRXSGAAGA

SEQ ID NO: 137392 - protein, 24 aa, Artificial Sequence
  Description of Artificial Sequence: Synthetic peptide
  Seed: GMDPRMCSLMQGSTLPRRSGAAGA
  Core: PRRSGAAGA
  misc_feature (16)..(16): Xaa can be Ala, Cys, Glu, Phe, Gly, His, Ile, Leu, Met, Asn, Pro, Gln, Ser, Thr, Val, Trp, or Tyr
  misc_feature (19)..(19): Xaa can be Ala, Phe, Gly, Ile, Met, Ser, Thr, or Val
  misc_feature (21)..(21): Xaa can be Ala, Cys, Gly, Ile, Leu, Met, Pro, Ser, Thr, or Val
  misc_feature (24)..(24): Xaa can be Ala, Cys, Asp, Glu, Phe, Gly, His, Ile, Leu, Met, Asn, Pro, Gln, Ser, Thr, Val, Trp, or Ty r
GMDPRMCSLMQGSTLXRRXGXAGX

SEQ ID NO: 137393 - protein, 24 aa, Artificial Sequence
  Description of Artificial Sequence: Synthetic peptide
  Seed: GMDPRMCSLMQGSTLPRRSGAAGA
  Core: QGSTLPRRS
  misc_feature (11)..(11): Xaa can be Ala, Cys, Asp, Glu, Phe, Gly, His, Ile, Lys, Leu, Met, Asn, Pro, Gln, Arg, Ser, Thr, Val, Trp, or Tyr
  misc_feature (14)..(14): Xaa can be Ala, Cys, Asp, Glu, Phe, Gly, His, Ile, Lys, Leu, Met, Asn, Pro, Gln, Arg, Ser, Thr, Val, Trp, or Tyr
  misc_feature (16)..(16): Xaa can be Ala, Cys, Asp, Glu, Phe, Gly, His, Ile, Lys, Leu, Met, Asn, Pro, Gln, Arg, Ser, Thr, Val, Trp, or Tyr
  misc_feature (19)..(19): Xaa can be Ala, Cys, Asp, Glu, Phe, Gly, His, Ile, Lys, Leu, Met, Asn, Pro, Gln, Arg, Ser, Thr, Val, Trp, or Tyr
GMDPRMCSLMXGSXLXRRXGAAGA

SEQ ID NO: 137394 - protein, 24 aa, Artificial Sequence
  Description of Artificial Sequence: Synthetic peptide
  Seed: GMDPRMCSLMQGSTLPRRSGAAGA
  Core: RMCSLMQGS
  misc_feature (5)..(5): Xaa can be Phe, Ile, Arg, or Tyr
  misc_feature (8)..(8): Xaa can be Ala, Asp, Glu, Phe, His, Ile, Lys, Leu, Met, Asn, Gln, Ser, Thr, Val, or Trp
  misc_feature (10)..(10): Xaa can be Ala, Phe, Ile, Leu, Met, Pro, Ser, Thr, Val, Trp, or Tyr
  misc_feature (13)..(13): Xaa can be Ala, Asp, Glu, His, Ile, Leu, Met, Asn, Gln, Arg, Ser, Thr, or Val
GMDPXMCXLXQGXTLPRRSGAAGA

SEQ ID NO: 137395 - protein, 13 aa, Artificial Sequence
  Description of Artificial Sequence: Synthetic peptide
  Seed: GSTLPRRSGAAGA
  Core: PRRSGAAGA
  misc_feature (5)..(5): Xaa can be Ala, Cys, Phe, His, Ile, Leu, Met, Asn, Pro, Ser, Thr, Val, Trp, or Tyr
  misc_feature (8)..(8): Xaa can be Ala, Gly, Ser, Thr, or Val
  misc_feature (10)..(10): Xaa can be Ala, Cys, Gly, Ile, Leu, Met, Pro, Ser, Thr, or Val
  misc_feature (13)..(13): Xaa can be Ala, Cys, Phe, Gly, His, Ile, Leu, Met, Asn, Pro, Gln, Ser, Thr, Val, Trp, or Tyr
GSTLXRRXGXAGX

SEQ ID NO: 137396 - protein, 14 aa, Artificial Sequence
  Description of Artificial Sequence: Synthetic peptide
  Seed: LMQGSTLPRRSGAA
  Core: QGSTLPRRS
  misc_feature (3)..(3): Xaa can be Ala, Cys, Asp, Glu, Phe, Gly, His, Ile, Lys, Leu, Met, Asn, Pro, Gln, Arg, Ser, Thr, Val, Trp, or Tyr
  misc_feature (6)..(6): Xaa can be Ala, Cys, Asp, Glu, Phe, Gly, His, Ile, Lys, Leu, Met, Asn, Pro, Gln, Arg, Ser, Thr, Val, Trp, or Tyr
  misc_feature (8)..(8): Xaa can be Ala, Cys, Asp, Glu, Phe, Gly, His, Ile, Lys, Leu, Met, Asn, Pro, Gln, Ser, Thr, Val, Trp, or Tyr
  misc_feature (11)..(11): Xaa can be Ala, Cys, Asp, Glu, Phe, Gly, His, Ile, Lys, Leu, Met, Asn, Pro, Gln, Arg, Ser, Thr, Val, Trp, or Tyr
LMXGSXLXRRXGAA

SEQ ID NO: 137397 - protein, 15 aa, Artificial Sequence
  Description of Artificial Sequence: Synthetic peptide
  Seed: LMQGSTLPRRSGAAG
  Core: GSTLPRRSG
  misc_feature (4)..(4): Xaa can be Ala, Cys, Asp, Glu, Phe, Gly, His, Ile, Lys, Leu, Met, Asn, Pro, Gln, Arg, Ser, Thr, Val, Trp, or Tyr
  misc_feature (7)..(7): Xaa can be Ala, Cys, Asp, Glu, Phe, Gly, His, Ile, Lys, Leu, Met, Asn, Pro, Gln, Arg, Ser, Thr, Val, Trp, or Tyr
  misc_feature (9)..(9): Xaa can be Ala, Cys, Asp, Glu, Phe, Gly, His, Ile, Lys, Leu, Met, Asn, Pro, Gln, Arg, Ser, Thr, Val, Trp, or Tyr
  misc_feature (12)..(12): Xaa can be Ala, Cys, Asp, Glu, Phe, Gly, His, Ile, Lys, Leu, Met, Asn, Pro, Gln, Arg, Ser, Thr, Val, Trp, or Tyr
LMQXSTXPXRSXAAG

SEQ ID NO: 137398 - protein, 15 aa, Artificial Sequence
  Description of Artificial Sequence: Synthetic peptide
  Seed: LMQGSTLPRRSGAAG
  Core: QGSTLPRRS
  misc_feature (3)..(3): Xaa can be Ala, Cys, Asp, Glu, Phe, Gly, His, Ile, Lys, Leu, Met, Asn, Pro, Gln, Arg, Ser, Thr, Val, Trp, or Tyr
  misc_feature (6)..(6): Xaa can be Ala, Cys, Asp, Glu, Phe, Gly, His, Ile, Lys, Leu, Met, Asn, Pro, Gln, Arg, Ser, Thr, Val, Trp, or Tyr
  misc_feature (8)..(8): Xaa can be Ala, Cys, Asp, Glu, Phe, Gly, His, Ile, Lys, Leu, Met, Asn, Pro, Gln, Arg, Ser, Thr, Val, Trp, or Tyr
  misc_feature (11)..(11): Xaa can be Ala, Cys, Asp, Glu, Phe, Gly, His, Ile, Lys, Leu, Met, Asn, Pro, Gln, Arg, Ser, Thr, Val, Trp, or Tyr
LMXGSXLXRRXGAAG

SEQ ID NO: 137399 - protein, 16 aa, Artificial Sequence
  Description of Artificial Sequence: Synthetic peptide
  Seed: LMQGSTLPRRSGAAGA
  Core: PRRSGAAGA
  misc_feature (8)..(8): Xaa can be Ala, Cys, Asp, Glu, Phe, Gly, His, Ile, Lys, Leu, Met, Asn, Pro, Gln, Arg, Ser, Thr, Val, Trp, or Tyr
  misc_feature (11)..(11): Xaa can be Ala, Cys, Asp, Phe, Gly, His, Ile, Leu, Met, Asn, Pro, Gln, Ser, Thr, Val, Trp, or Tyr
  misc_feature (13)..(13): Xaa can be Ala, Cys, Asp, Glu, Phe, Gly, His, Ile, Lys, Leu, Met, Asn, Pro, Gln, Arg, Ser, Thr, Val, Trp, or Tyr
  misc_feature (16)..(16): Xaa can be Ala, Cys, Asp, Glu, Phe, Gly, His, Ile, Lys, Leu, Met, Asn, Pro, Gln, Arg, Ser, Thr, Val, Trp, or Tyr
LMQGSTLXRRXGXAGX

SEQ ID NO: 137400 - protein, 16 aa, Artificial Sequence
  Description of Artificial Sequence: Synthetic peptide
  Seed: LMQGSTLPRRSGAAGA
  Core: QGSTLPRRS
  misc_feature (3)..(3): Xaa can be Ala, Cys, Asp, Glu, Phe, Gly, His, Ile, Lys, Leu, Met, Asn, Pro, Gln, Arg, Ser, Thr, Val, Trp, or Tyr
  misc_feature (6)..(6): Xaa can be Ala, Cys, Asp, Glu, Phe, Gly, His, Ile, Lys, Leu, Met, Asn, Pro, Gln, Arg, Ser, Thr, Val, Trp, or Tyr
  misc_feature (8)..(8): Xaa can be Ala, Cys, Asp, Glu, Phe, Gly, His, Ile, Lys, Leu, Met, Asn, Pro, Gln, Ser, Thr, Val, or Ty r
  misc_feature (11)..(11): Xaa can be Ala, Cys, Asp, Glu, Phe, Gly, His, Ile, Lys, Leu, Met, Asn, Pro, Gln, Arg, Ser, Thr, Val, Trp, or Tyr
LMXGSXLXRRXGAAGA

SEQ ID NO: 137401 - protein, 13 aa, Artificial Sequence
  Description of Artificial Sequence: Synthetic peptide
  Seed: MCSLMQGSTLPRR
  Core: CSLMQGSTL
  misc_feature (2)..(2): Xaa can be Cys, Phe, Ile, Leu, Met, Val, Trp, or Tyr
  misc_feature (5)..(5): Xaa can be Ala, Cys, Glu, Phe, Gly, His, Ile, Lys, Leu, Met, Asn, Gln, Arg, Ser, Thr, Val, Trp, or Ty r
  misc_feature (7)..(7): Xaa can be Ala, Cys, Asp, Glu, Phe, Gly, His, Ile, Lys, Leu, Met, Asn, Pro, Gln, Arg, Ser, Thr, Val, Trp, or Tyr
  misc_feature (10)..(10): Xaa can be Ala, Cys, Asp, Glu, Phe, Gly, His, Ile, Lys, Leu, Met, Asn, Pro, Gln, Arg, Ser, Thr, Val, Trp, or Tyr
MXSLXQXSTXPRR

SEQ ID NO: 137402 - protein, 14 aa, Artificial Sequence
  Description of Artificial Sequence: Synthetic peptide
  Seed: MCSLMQGSTLPRRS
  Core: CSLMQGSTL
  misc_feature (2)..(2): Xaa can be Ala, Cys, Phe, His, Ile, Lys, Leu, Met, Asn, Pro, Gln, Arg, Thr, Val, Trp, or Tyr
  misc_feature (5)..(5): Xaa can be Ala, Cys, Asp, Glu, Phe, Gly, His, Ile, Lys, Leu, Met, Asn, Pro, Gln, Arg, Ser, Thr, Val, Trp, or Tyr
  misc_feature (7)..(7): Xaa can be Ala, Cys, Asp, Glu, Phe, Gly, His, Ile, Lys, Leu, Met, Asn, Pro, Gln, Arg, Ser, Thr, Val, or Trp
  misc_feature (10)..(10): Xaa can be Ala, Cys, Asp, Glu, Phe, Gly, His, Ile, Lys, Leu, Met, Asn, Pro, Gln, Arg, Ser, Thr, Val, Trp, or Tyr
MXSLXQXSTXPRRS

SEQ ID NO: 137403 - protein, 14 aa, Artificial Sequence
  Description of Artificial Sequence: Synthetic peptide
  Seed: MCSLMQGSTLPRRS
  Core: LMQGSTLPR
  misc_feature (4)..(4): Xaa can be Ala, Cys, Asp, Glu, Phe, Gly, His, Ile, Lys, Leu, Met, Asn, Pro, Gln, Arg, Ser, Thr, Val, Trp, or Tyr
  misc_feature (7)..(7): Xaa can be Ala, Cys, Asp, Glu, Phe, Gly, His, Ile, Lys, Leu, Met, Asn, Pro, Gln, Arg, Ser, Thr, Val, Trp, or Tyr
  misc_feature (9)..(9): Xaa can be Ala, Cys, Asp, Glu, Phe, Gly, His, Ile, Lys, Leu, Met, Asn, Pro, Gln, Arg, Ser, Thr, Val, Trp, or Tyr
  misc_feature (12)..(12): Xaa can be Ala, Cys, Asp, Glu, Phe, Gly, His, Ile, Lys, Leu, Met, Asn, Pro, Gln, Arg, Ser, Thr, Val, Trp, or Tyr
MCSXMQXSXLPXRS

SEQ ID NO: 137404 - protein, 14 aa, Artificial Sequence
  Description of Artificial Sequence: Synthetic peptide
  Seed: MCSLMQGSTLPRRS
  Core: MQGSTLPRR
  misc_feature (5)..(5): Xaa can be Ala, Cys, Asp, Glu, Phe, Gly, His, Ile, Lys, Leu, Met, Asn, Pro, Gln, Arg, Ser, Thr, Val, Trp, or Tyr
  misc_feature (8)..(8): Xaa can be Ala, Cys, Phe, Gly, His, Ile, Lys, Leu, Met, Asn, Pro, Gln, Arg, Ser, Thr, Val, Trp, or Ty r
  misc_feature (10)..(10): Xaa can be Ala, Cys, Asp, Glu, Phe, Gly, His, Ile, Lys, Leu, Met, Asn, Pro, Gln, Arg, Ser, Thr, Val, Trp, or Tyr
  misc_feature (13)..(13): Xaa can be Ala, Cys, Asp, Glu, Phe, Gly, His, Ile, Lys, Leu, Met, Asn, Pro, Gln, Arg, Ser, Thr, Val, Trp, or Tyr
MCSLXQGXTXPRXS

SEQ ID NO: 137405 - protein, 15 aa, Artificial Sequence
  Description of Artificial Sequence: Synthetic peptide
  Seed: MCSLMQGSTLPRRSG
  Core: CSLMQGSTL
  misc_feature (2)..(2): Xaa can be Ala, Cys, Asp, Glu, Phe, His, Ile, Lys, Leu, Met, Asn, Pro, Gln, Arg, Ser, Thr, Val, Trp, or Tyr
  misc_feature (5)..(5): Xaa can be Ala, Cys, Asp, Glu, Phe, Gly, His, Ile, Lys, Leu, Met, Asn, Pro, Gln, Arg, Ser, Thr, Val, Trp, or Tyr
  misc_feature (7)..(7): Xaa can be Ala, Cys, Asp, Glu, Phe, Gly, His, Ile, Lys, Leu, Met, Asn, Pro, Gln, Arg, Ser, Thr, or Va l
  misc_feature (10)..(10): Xaa can be Ala, Cys, Asp, Glu, Phe, Gly, His, Ile, Lys, Leu, Met, Asn, Pro, Gln, Arg, Ser, Thr, Val, Trp, or Tyr
MXSLXQXSTXPRRSG

SEQ ID NO: 137406 - protein, 15 aa, Artificial Sequence
  Description of Artificial Sequence: Synthetic peptide
  Seed: MCSLMQGSTLPRRSG
  Core: LMQGSTLPR
  misc_feature (4)..(4): Xaa can be Ala, Cys, Asp, Glu, Phe, Gly, His, Ile, Lys, Leu, Met, Asn, Pro, Gln, Arg, Ser, Thr, Val, Trp, or Tyr
  misc_feature (7)..(7): Xaa can be Ala, Cys, Asp, Glu, Phe, Gly, His, Ile, Lys, Leu, Met, Asn, Pro, Gln, Arg, Ser, Thr, Val, Trp, or Tyr
  misc_feature (9)..(9): Xaa can be Ala, Cys, Asp, Glu, Phe, Gly, His, Ile, Lys, Leu, Met, Asn, Pro, Gln, Arg, Ser, Thr, Val, Trp, or Tyr
  misc_feature (12)..(12): Xaa can be Ala, Cys, Asp, Glu, Phe, Gly, His, Ile, Lys, Leu, Met, Asn, Pro, Gln, Arg, Ser, Thr, Val, Trp, or Tyr
MCSXMQXSXLPXRSG

SEQ ID NO: 137407 - protein, 15 aa, Artificial Sequence
  Description of Artificial Sequence: Synthetic peptide
  Seed: MCSLMQGSTLPRRSG
  Core: QGSTLPRRS
  misc_feature (6)..(6): Xaa can be Ala, Cys, Asp, Glu, Phe, Gly, His, Ile, Lys, Leu, Met, Asn, Pro, Gln, Arg, Ser, Thr, Val, Trp, or Tyr
  misc_feature (9)..(9): Xaa can be Ala, Cys, Asp, Glu, Phe, Gly, His, Ile, Lys, Leu, Met, Asn, Pro, Gln, Arg, Ser, Thr, Val, Trp, or Tyr
  misc_feature (11)..(11): Xaa can be Ala, Cys, Asp, Glu, Phe, Gly, His, Ile, Lys, Leu, Met, Asn, Pro, Gln, Arg, Ser, Thr, Val, Trp, or Tyr
  misc_feature (14)..(14): Xaa can be Ala, Cys, Asp, Glu, Phe, Gly, His, Ile, Lys, Leu, Met, Asn, Pro, Gln, Arg, Ser, Thr, Val, Trp, or Tyr
MCSLMXGSXLXRRXG

SEQ ID NO: 137408 - protein, 16 aa, Artificial Sequence
  Description of Artificial Sequence: Synthetic peptide
  Seed: MCSLMQGSTLPRRSGA
  Core: CSLMQGSTL
  misc_feature (2)..(2): Xaa can be Ala, Cys, Phe, His, Ile, Leu, Met, Gln, Thr, Val, Trp, or Tyr
  misc_feature (5)..(5): Xaa can be Ala, Cys, Asp, Glu, Phe, Gly, His, Ile, Lys, Leu, Met, Asn, Pro, Gln, Arg, Ser, Thr, Val, Trp, or Tyr
  misc_feature (7)..(7): Xaa can be Ala, Cys, Asp, Glu, Gly, His, Ile, Lys, Leu, Asn, Pro, Gln, Arg, Ser, Thr, or Val
  misc_feature (10)..(10): Xaa can be Ala, Cys, Asp, Glu, Phe, Gly, His, Ile, Lys, Leu, Met, Asn, Pro, Gln, Arg, Ser, Thr, Val, Trp, or Tyr
MXSLXQXSTXPRRSGA

SEQ ID NO: 137409 - protein, 16 aa, Artificial Sequence
  Description of Artificial Sequence: Synthetic peptide
  Seed: MCSLMQGSTLPRRSGA
  Core: LMQGSTLPR
  misc_feature (4)..(4): Xaa can be Ala, Cys, Phe, Ile, Leu, Met, Gln, Thr, Val, Trp, or Tyr
  misc_feature (7)..(7): Xaa can be Ala, Cys, Asp, Glu, Phe, Gly, His, Ile, Lys, Leu, Met, Asn, Gln, Arg, Ser, Thr, Val, Trp, or Tyr
  misc_feature (9)..(9): Xaa can be Ala, Cys, Asp, Glu, Phe, Gly, His, Ile, Lys, Leu, Met, Asn, Pro, Gln, Arg, Ser, Thr, Val, Trp, or Tyr
  misc_feature (12)..(12): Xaa can be Ala, Cys, Asp, Glu, Phe, Gly, His, Ile, Lys, Leu, Met, Asn, Pro, Gln, Arg, Ser, Thr, Val, Trp, or Tyr
MCSXMQXSXLPXRSGA

SEQ ID NO: 137410 - protein, 16 aa, Artificial Sequence
  Description of Artificial Sequence: Synthetic peptide
  Seed: MCSLMQGSTLPRRSGA
  Core: QGSTLPRRS
  misc_feature (6)..(6): Xaa can be Ala, Cys, Asp, Glu, Phe, Gly, His, Ile, Lys, Leu, Met, Asn, Pro, Gln, Arg, Ser, Thr, Val, Trp, or Tyr
  misc_feature (9)..(9): Xaa can be Ala, Cys, Asp, Glu, Phe, Gly, His, Ile, Lys, Leu, Met, Asn, Pro, Gln, Arg, Ser, Thr, Val, Trp, or Tyr
  misc_feature (11)..(11): Xaa can be Ala, Cys, Asp, Glu, Phe, Gly, His, Ile, Lys, Leu, Met, Asn, Pro, Gln, Arg, Ser, Thr, Val, Trp, or Tyr
  misc_feature (14)..(14): Xaa can be Ala, Cys, Asp, Glu, Phe, Gly, His, Ile, Lys, Leu, Met, Asn, Pro, Gln, Arg, Ser, Thr, Val, Trp, or Tyr
MCSLMXGSXLXRRXGA

SEQ ID NO: 137411 - protein, 17 aa, Artificial Sequence
  Description of Artificial Sequence: Synthetic peptide
  Seed: MCSLMQGSTLPRRSGAA
  Core: CSLMQGSTL
  misc_feature (2)..(2): Xaa can be Ala, Cys, Phe, His, Ile, Leu, Met, Pro, Gln, Thr, Val, Trp, or Tyr
  misc_feature (5)..(5): Xaa can be Ala, Cys, Asp, Glu, Phe, Gly, His, Ile, Lys, Leu, Met, Asn, Pro, Gln, Arg, Ser, Thr, Val, Trp, or Tyr
  misc_feature (7)..(7): Xaa can be Ala, Cys, Asp, Glu, Gly, His, Ile, Lys, Leu, Asn, Pro, Gln, Arg, Ser, Thr, or Val
  misc_feature (10)..(10): Xaa can be Ala, Cys, Asp, Glu, Phe, Gly, His, Ile, Lys, Leu, Met, Asn, Pro, Gln, Arg, Ser, Thr, Val, Trp, or Tyr
MXSLXQXSTXPRRSGAA

SEQ ID NO: 137412 - protein, 17 aa, Artificial Sequence
  Description of Artificial Sequence: Synthetic peptide
  Seed: MCSLMQGSTLPRRSGAA
  Core: GSTLPRRSG
  misc_feature (7)..(7): Xaa can be Ala, Cys, Phe, Gly, His, Ile, Leu, Met, Asn, Pro, Gln, Arg, Ser, Thr, Val, Trp, or Tyr
  misc_feature (10)..(10): Xaa can be Ala, Cys, Asp, Glu, Phe, Gly, His, Ile, Lys, Leu, Met, Asn, Pro, Gln, Arg, Ser, Thr, Val, Trp, or Tyr
  misc_feature (12)..(12): Xaa can be Ala, Cys, Asp, Glu, Phe, Gly, His, Ile, Lys, Leu, Met, Asn, Pro, Gln, Arg, Ser, Thr, Val, Trp, or Tyr
  misc_feature (15)..(15): Xaa can be Ala, Cys, Asp, Glu, Phe, Gly, His, Ile, Lys, Leu, Met, Asn, Pro, Gln, Arg, Ser, Thr, Val, Trp, or Tyr
MCSLMQXSTXPXRSXAA

SEQ ID NO: 137413 - protein, 17 aa, Artificial Sequence
  Description of Artificial Sequence: Synthetic peptide
  Seed: MCSLMQGSTLPRRSGAA
  Core: LMQGSTLPR
  misc_feature (4)..(4): Xaa can be Ala, Cys, Asp, Glu, Phe, Gly, His, Ile, Lys, Leu, Met, Asn, Pro, Gln, Arg, Ser, Thr, Val, Trp, or Tyr
  misc_feature (7)..(7): Xaa can be Ala, Cys, Asp, Glu, Phe, Gly, His, Ile, Lys, Leu, Met, Asn, Pro, Gln, Arg, Ser, Thr, Val, Trp, or Tyr
  misc_feature (9)..(9): Xaa can be Ala, Cys, Asp, Glu, Phe, Gly, His, Ile, Lys, Leu, Met, Asn, Pro, Gln, Arg, Ser, Thr, Val, Trp, or Tyr
  misc_feature (12)..(12): Xaa can be Ala, Cys, Asp, Glu, Phe, Gly, His, Ile, Lys, Leu, Met, Asn, Pro, Gln, Arg, Ser, Thr, Val, Trp, or Tyr
MCSXMQXSXLPXRSGAA

SEQ ID NO: 137414 - protein, 17 aa, Artificial Sequence
  Description of Artificial Sequence: Synthetic peptide
  Seed: MCSLMQGSTLPRRSGAA
  Core: QGSTLPRRS
  misc_feature (6)..(6): Xaa can be Ala, Cys, Asp, Glu, Phe, Gly, His, Ile, Lys, Leu, Met, Asn, Pro, Gln, Arg, Ser, Thr, Val, Trp, or Tyr
  misc_feature (9)..(9): Xaa can be Ala, Cys, Asp, Glu, Phe, Gly, His, Ile, Lys, Leu, Met, Asn, Pro, Gln, Arg, Ser, Thr, Val, Trp, or Tyr
  misc_feature (11)..(11): Xaa can be Ala, Cys, Asp, Glu, Phe, Gly, His, Ile, Lys, Leu, Met, Asn, Pro, Gln, Arg, Ser, Thr, Val, Trp, or Tyr
  misc_feature (14)..(14): Xaa can be Ala, Cys, Asp, Glu, Phe, Gly, His, Ile, Lys, Leu, Met, Asn, Pro, Gln, Arg, Ser, Thr, Val, Trp, or Tyr
MCSLMXGSXLXRRXGAA

SEQ ID NO: 137415 - protein, 18 aa, Artificial Sequence
  Description of Artificial Sequence: Synthetic peptide
  Seed: MCSLMQGSTLPRRSGAAG
  Core: QGSTLPRRS
  misc_feature (6)..(6): Xaa can be Ala, Cys, Asp, Glu, Phe, Gly, His, Ile, Lys, Leu, Met, Asn, Pro, Gln, Arg, Ser, Thr, Val, Trp, or Tyr
  misc_feature (9)..(9): Xaa can be Ala, Cys, Asp, Glu, Phe, Gly, His, Ile, Lys, Leu, Met, Asn, Pro, Gln, Arg, Ser, Thr, Val, Trp, or Tyr
  misc_feature (11)..(11): Xaa can be Ala, Cys, Asp, Glu, Phe, Gly, His, Ile, Lys, Leu, Met, Asn, Pro, Gln, Ser, Thr, Val, Trp, or Tyr
  misc_feature (14)..(14): Xaa can be Ala, Cys, Asp, Glu, Phe, Gly, His, Ile, Lys, Leu, Met, Asn, Pro, Gln, Arg, Ser, Thr, Val, Trp, or Tyr
MCSLMXGSXLXRRXGAAG

SEQ ID NO: 137416 - protein, 19 aa, Artificial Sequence
  Description of Artificial Sequence: Synthetic peptide
  Seed: MCSLMQGSTLPRRSGAAGA
  Core: CSLMQGSTL
  misc_feature (2)..(2): Xaa can be Cys, Phe, Ile, Leu, Met, Gln, Val, Trp, or Tyr
  misc_feature (5)..(5): Xaa can be Ala, Cys, Asp, Glu, Phe, Gly, His, Ile, Lys, Leu, Met, Asn, Pro, Gln, Arg, Ser, Thr, Val, Trp, or Tyr
  misc_feature (7)..(7): Xaa can be Ala, Cys, Asp, Glu, Gly, His, Ile, Asn, Pro, Gln, Ser, Thr, or Val
  misc_feature (10)..(10): Xaa can be Ala, Cys, Asp, Glu, Phe, Gly, His, Ile, Lys, Leu, Met, Asn, Pro, Gln, Arg, Ser, Thr, Val, Trp, or Tyr
MXSLXQXSTXPRRSGAAGA

SEQ ID NO: 137417 - protein, 19 aa, Artificial Sequence
  Description of Artificial Sequence: Synthetic peptide
  Seed: MCSLMQGSTLPRRSGAAGA
  Core: PRRSGAAGA
  misc_feature (11)..(11): Xaa can be Ala, Cys, Glu, Phe, Gly, His, Ile, Leu, Met, Asn, Pro, Gln, Ser, Thr, Val, Trp, or Tyr
  misc_feature (14)..(14): Xaa can be Ala, Cys, Phe, Gly, His, Ile, Leu, Met, Asn, Ser, Thr, Val, or Trp
  misc_feature (16)..(16): Xaa can be Ala, Cys, Phe, Gly, Ile, Leu, Met, Asn, Pro, Ser, Thr, or Val
  misc_feature (19)..(19): Xaa can be Ala, Cys, Asp, Glu, Phe, Gly, His, Ile, Lys, Leu, Met, Asn, Pro, Gln, Arg, Ser, Thr, Val, Trp, or Tyr
MCSLMQGSTLXRRXGXAGX

SEQ ID NO: 137418 - protein, 19 aa, Artificial Sequence
  Description of Artificial Sequence: Synthetic peptide
  Seed: MCSLMQGSTLPRRSGAAGA
  Core: QGSTLPRRS
  misc_feature (6)..(6): Xaa can be Ala, Cys, Asp, Glu, Phe, Gly, His, Ile, Lys, Leu, Met, Asn, Pro, Gln, Arg, Ser, Thr, Val, Trp, or Tyr
  misc_feature (9)..(9): Xaa can be Ala, Cys, Asp, Glu, Phe, Gly, His, Ile, Lys, Leu, Met, Asn, Pro, Gln, Arg, Ser, Thr, Val, Trp, or Tyr
  misc_feature (11)..(11): Xaa can be Ala, Cys, Asp, Glu, Phe, Gly, His, Ile, Lys, Leu, Met, Asn, Pro, Gln, Ser, Thr, Val, Trp, or Tyr
  misc_feature (14)..(14): Xaa can be Ala, Cys, Asp, Glu, Phe, Gly, His, Ile, Lys, Leu, Met, Asn, Pro, Gln, Arg, Ser, Thr, Val, Trp, or Tyr
MCSLMXGSXLXRRXGAAGA

SEQ ID NO: 137419 - protein, 14 aa, Artificial Sequence
  Description of Artificial Sequence: Synthetic peptide
  Seed: MDPRMCSLMQGSTL
  Core: CSLMQGSTL
  misc_feature (6)..(6): Xaa can be Cys, Phe, Gly, Ile, Leu, Met, Val, Trp, or Tyr
  misc_feature (9)..(9): Xaa can be Ala, Cys, Asp, Glu, Phe, Gly, His, Ile, Lys, Leu, Met, Asn, Gln, Arg, Ser, Thr, Val, Trp, or Tyr
  misc_feature (11)..(11): Xaa can be Ala, Cys, Asp, Glu, Phe, Gly, His, Ile, Lys, Leu, Met, Asn, Pro, Gln, Arg, Ser, Thr, Val, Trp, or Tyr
  misc_feature (14)..(14): Xaa can be Ala, Cys, Asp, Glu, Phe, Gly, His, Ile, Lys, Leu, Met, Asn, Pro, Gln, Arg, Ser, Thr, Val, Trp, or Tyr
MDPRMXSLXQXSTX

SEQ ID NO: 137420 - protein, 15 aa, Artificial Sequence
  Description of Artificial Sequence: Synthetic peptide
  Seed: MDPRMCSLMQGSTLP
  Core: CSLMQGSTL
  misc_feature (6)..(6): Xaa can be Ala, Cys, Asp, Glu, Phe, Gly, His, Ile, Lys, Leu, Met, Asn, Pro, Gln, Arg, Ser, Thr, Val, Trp, or Tyr
  misc_feature (9)..(9): Xaa can be Ala, Cys, Asp, Glu, Phe, Gly, His, Ile, Lys, Leu, Met, Asn, Pro, Gln, Arg, Ser, Thr, Val, Trp, or Tyr
  misc_feature (11)..(11): Xaa can be Ala, Cys, Asp, Glu, Phe, Gly, His, Ile, Lys, Leu, Met, Asn, Pro, Gln, Arg, Ser, Thr, Val, Trp, or Tyr
  misc_feature (14)..(14): Xaa can be Ala, Cys, Asp, Glu, Phe, Gly, His, Ile, Lys, Leu, Met, Asn, Pro, Gln, Arg, Ser, Thr, Val, Trp, or Tyr
MDPRMXSLXQXSTXP

SEQ ID NO: 137421 - protein, 16 aa, Artificial Sequence
  Description of Artificial Sequence: Synthetic peptide
  Seed: MDPRMCSLMQGSTLPR
  Core: CSLMQGSTL
  misc_feature (6)..(6): Xaa can be Ala, Cys, Asp, Glu, Phe, Gly, His, Ile, Lys, Leu, Met, Asn, Pro, Gln, Arg, Ser, Thr, Val, Trp, or Tyr
  misc_feature (9)..(9): Xaa can be Ala, Cys, Asp, Glu, Phe, Gly, His, Ile, Lys, Leu, Met, Asn, Pro, Gln, Arg, Ser, Thr, Val, Trp, or Tyr
  misc_feature (11)..(11): Xaa can be Ala, Cys, Asp, Glu, Phe, Gly, His, Ile, Lys, Leu, Met, Asn, Pro, Gln, Arg, Ser, Thr, Val, Trp, or Tyr
  misc_feature (14)..(14): Xaa can be Ala, Cys, Asp, Glu, Phe, Gly, His, Ile, Lys, Leu, Met, Asn, Pro, Gln, Arg, Ser, Thr, Val, Trp, or Tyr
MDPRMXSLXQXSTXPR

SEQ ID NO: 137422 - protein, 17 aa, Artificial Sequence
  Description of Artificial Sequence: Synthetic peptide
  Seed: MDPRMCSLMQGSTLPRR
  Core: CSLMQGSTL
  misc_feature (6)..(6): Xaa can be Ala, Cys, Asp, Glu, Phe, Gly, His, Ile, Lys, Leu, Met, Asn, Pro, Gln, Arg, Ser, Thr, Val, Trp, or Tyr
  misc_feature (9)..(9): Xaa can be Ala, Cys, Asp, Glu, Phe, Gly, His, Ile, Lys, Leu, Met, Asn, Pro, Gln, Arg, Ser, Thr, Val, Trp, or Tyr
  misc_feature (11)..(11): Xaa can be Ala, Cys, Asp, Glu, Phe, Gly, His, Ile, Lys, Leu, Met, Asn, Pro, Gln, Arg, Ser, Thr, Val, Trp, or Tyr
  misc_feature (14)..(14): Xaa can be Ala, Cys, Asp, Glu, Phe, Gly, His, Ile, Lys, Leu, Met, Asn, Pro, Gln, Arg, Ser, Thr, Val, Trp, or Tyr
MDPRMXSLXQXSTXPRR

SEQ ID NO: 137423 - protein, 17 aa, Artificial Sequence
  Description of Artificial Sequence: Synthetic peptide
  Seed: MDPRMCSLMQGSTLPRR
  Core: LMQGSTLPR
  misc_feature (8)..(8): Xaa can be Ala, Cys, Asp, Glu, Phe, Gly, His, Ile, Lys, Leu, Met, Asn, Pro, Gln, Arg, Ser, Thr, Val, Trp, or Tyr
  misc_feature (11)..(11): Xaa can be Ala, Cys, Asp, Glu, Phe, Gly, His, Ile, Lys, Leu, Met, Asn, Pro, Gln, Arg, Ser, Thr, Val, Trp, or Tyr
  misc_feature (13)..(13): Xaa can be Ala, Cys, Asp, Glu, Phe, Gly, His, Ile, Lys, Leu, Met, Asn, Pro, Gln, Arg, Ser, Thr, Val, Trp, or Tyr
  misc_feature (16)..(16): Xaa can be Ala, Cys, Asp, Glu, Phe, Gly, His, Ile, Lys, Leu, Met, Asn, Pro, Gln, Arg, Ser, Thr, Val, Trp, or Tyr
MDPRMCSXMQXSXLPXR

SEQ ID NO: 137424 - protein, 17 aa, Artificial Sequence
  Description of Artificial Sequence: Synthetic peptide
  Seed: MDPRMCSLMQGSTLPRR
  Core: MQGSTLPRR
  misc_feature (9)..(9): Xaa can be Ala, Cys, Asp, Glu, Phe, Gly, His, Ile, Lys, Leu, Met, Asn, Pro, Gln, Arg, Ser, Thr, Val, Trp, or Tyr
  misc_feature (12)..(12): Xaa can be Ala, Cys, Phe, Gly, His, Ile, Lys, Leu, Met, Asn, Pro, Gln, Arg, Ser, Thr, Val, Trp, or Ty r
  misc_feature (14)..(14): Xaa can be Ala, Cys, Asp, Glu, Phe, Gly, His, Ile, Leu, Met, Asn, Pro, Gln, Ser, Thr, Val, or Tyr
  misc_feature (17)..(17): Xaa can be Ala, Cys, Asp, Glu, Phe, Gly, His, Ile, Lys, Leu, Met, Asn, Pro, Gln, Arg, Ser, Thr, Val, Trp, or Tyr
MDPRMCSLXQGXTXPRX

SEQ ID NO: 137425 - protein, 17 aa, Artificial Sequence
  Description of Artificial Sequence: Synthetic peptide
  Seed: MDPRMCSLMQGSTLPRR
  Core: RMCSLMQGS
  misc_feature (4)..(4): Xaa can be Ala, Cys, Asp, Glu, Phe, Gly, His, Ile, Lys, Leu, Met, Asn, Pro, Gln, Arg, Ser, Thr, Val, Trp, or Tyr
  misc_feature (7)..(7): Xaa can be Ala, Cys, Asp, Glu, Phe, Gly, His, Ile, Lys, Leu, Met, Asn, Pro, Gln, Arg, Ser, Thr, Val, Trp, or Tyr
  misc_feature (9)..(9): Xaa can be Ala, Cys, Asp, Glu, Phe, Gly, His, Ile, Lys, Leu, Met, Asn, Pro, Gln, Arg, Ser, Thr, Val, Trp, or Tyr
  misc_feature (12)..(12): Xaa can be Ala, Cys, Asp, Glu, Phe, Gly, His, Ile, Lys, Leu, Met, Asn, Pro, Gln, Arg, Ser, Thr, Val, Trp, or Tyr
MDPXMCXLXQGXTLPRR

SEQ ID NO: 137426 - protein, 18 aa, Artificial Sequence
  Description of Artificial Sequence: Synthetic peptide
  Seed: MDPRMCSLMQGSTLPRRS
  Core: CSLMQGSTL
  misc_feature (6)..(6): Xaa can be Ala, Cys, Phe, His, Ile, Lys, Leu, Met, Thr, Val, Trp, or Tyr
  misc_feature (9)..(9): Xaa can be Ala, Cys, Asp, Glu, Phe, Gly, His, Ile, Lys, Leu, Met, Asn, Gln, Arg, Ser, Thr, Val, Trp, or Tyr
  misc_feature (11)..(11): Xaa can be Ala, Cys, Asp, Glu, Phe, Gly, His, Ile, Lys, Leu, Met, Asn, Pro, Gln, Arg, Ser, Thr, Val, Trp, or Tyr
  misc_feature (14)..(14): Xaa can be Ala, Cys, Asp, Glu, Phe, Gly, His, Ile, Lys, Leu, Met, Asn, Pro, Gln, Arg, Ser, Thr, Val, Trp, or Tyr
MDPRMXSLXQXSTXPRRS

SEQ ID NO: 137427 - protein, 19 aa, Artificial Sequence
  Description of Artificial Sequence: Synthetic peptide
  Seed: MDPRMCSLMQGSTLPRRSG
  Core: CSLMQGSTL
  misc_feature (6)..(6): Xaa can be Ala, Cys, Asp, Glu, Phe, Gly, His, Ile, Lys, Leu, Met, Asn, Pro, Gln, Arg, Ser, Thr, Val, Trp, or Tyr
  misc_feature (9)..(9): Xaa can be Ala, Cys, Asp, Glu, Phe, Gly, His, Ile, Lys, Leu, Met, Asn, Pro, Gln, Arg, Ser, Thr, Val, Trp, or Tyr
  misc_feature (11)..(11): Xaa can be Ala, Cys, Asp, Glu, Phe, Gly, His, Ile, Lys, Leu, Met, Asn, Pro, Gln, Arg, Ser, Thr, Val, Trp, or Tyr
  misc_feature (14)..(14): Xaa can be Ala, Cys, Asp, Glu, Phe, Gly, His, Ile, Lys, Leu, Met, Asn, Pro, Gln, Arg, Ser, Thr, Val, Trp, or Tyr
MDPRMXSLXQXSTXPRRSG

SEQ ID NO: 137428 - protein, 19 aa, Artificial Sequence
  Description of Artificial Sequence: Synthetic peptide
  Seed: MDPRMCSLMQGSTLPRRSG
  Core: MQGSTLPRR
  misc_feature (9)..(9): Xaa can be Ala, Cys, Asp, Glu, Phe, Gly, His, Ile, Lys, Leu, Met, Asn, Pro, Gln, Arg, Ser, Thr, Val, Trp, or Tyr
  misc_feature (12)..(12): Xaa can be Ala, Cys, Asp, Glu, Phe, Gly, His, Ile, Lys, Leu, Met, Asn, Pro, Gln, Arg, Ser, Thr, Val, Trp, or Tyr
  misc_feature (14)..(14): Xaa can be Ala, Cys, Asp, Glu, Phe, Gly, His, Ile, Lys, Leu, Met, Asn, Pro, Gln, Arg, Ser, Thr, Val, Trp, or Tyr
  misc_feature (17)..(17): Xaa can be Ala, Cys, Asp, Glu, Phe, Gly, His, Ile, Lys, Leu, Met, Asn, Pro, Gln, Arg, Ser, Thr, Val, Trp, or Tyr
MDPRMCSLXQGXTXPRXSG

SEQ ID NO: 137429 - protein, 19 aa, Artificial Sequence
  Description of Artificial Sequence: Synthetic peptide
  Seed: MDPRMCSLMQGSTLPRRSG
  Core: RMCSLMQGS
  misc_feature (4)..(4): Xaa can be Phe, Ile, Lys, Leu, Met, Arg, Val, Trp, or Tyr
  misc_feature (7)..(7): Xaa can be Ala, Cys, Asp, Glu, Phe, His, Ile, Lys, Leu, Met, Asn, Pro, Gln, Arg, Ser, Thr, Val, Trp, or Tyr
  misc_feature (9)..(9): Xaa can be Ala, Phe, Ile, Leu, Met, Pro, Gln, Ser, Thr, Val, Trp, or Tyr
  misc_feature (12)..(12): Xaa can be Ala, Asp, Glu, Phe, His, Ile, Leu, Met, Asn, Pro, Gln, Arg, Ser, Thr, Val, or Tyr
MDPXMCXLXQGXTLPRRSG

SEQ ID NO: 137430 - protein, 20 aa, Artificial Sequence
  Description of Artificial Sequence: Synthetic peptide
  Seed: MDPRMCSLMQGSTLPRRSGA
  Core: CSLMQGSTL
  misc_feature (6)..(6): Xaa can be Ala, Cys, Asp, Glu, Phe, Gly, His, Ile, Lys, Leu, Met, Asn, Pro, Gln, Arg, Ser, Thr, Val, Trp, or Tyr
  misc_feature (9)..(9): Xaa can be Ala, Cys, Asp, Glu, Phe, Gly, His, Ile, Lys, Leu, Met, Asn, Pro, Gln, Arg, Ser, Thr, Val, Trp, or Tyr
  misc_feature (11)..(11): Xaa can be Ala, Cys, Asp, Glu, Phe, Gly, His, Ile, Lys, Leu, Met, Asn, Pro, Gln, Arg, Ser, Thr, Val, Trp, or Tyr
  misc_feature (14)..(14): Xaa can be Ala, Cys, Asp, Glu, Phe, Gly, His, Ile, Lys, Leu, Met, Asn, Pro, Gln, Arg, Ser, Thr, Val, Trp, or Tyr
MDPRMXSLXQXSTXPRRSGA

SEQ ID NO: 137431 - protein, 20 aa, Artificial Sequence
  Description of Artificial Sequence: Synthetic peptide
  Seed: MDPRMCSLMQGSTLPRRSGA
  Core: LMQGSTLPR
  misc_feature (8)..(8): Xaa can be Ala, Cys, Asp, Glu, Phe, Gly, His, Ile, Lys, Leu, Met, Asn, Pro, Gln, Arg, Ser, Thr, Val, Trp, or Tyr
  misc_feature (11)..(11): Xaa can be Ala, Cys, Asp, Glu, Phe, Gly, His, Ile, Lys, Leu, Met, Asn, Pro, Gln, Arg, Ser, Thr, Val, Trp, or Tyr
  misc_feature (13)..(13): Xaa can be Ala, Cys, Asp, Glu, Phe, Gly, His, Ile, Lys, Leu, Met, Asn, Pro, Gln, Arg, Ser, Thr, Val, Trp, or Tyr
  misc_feature (16)..(16): Xaa can be Ala, Cys, Asp, Glu, Phe, Gly, His, Ile, Lys, Leu, Met, Asn, Pro, Gln, Arg, Ser, Thr, Val, Trp, or Tyr
MDPRMCSXMQXSXLPXRSGA

SEQ ID NO: 137432 - protein, 20 aa, Artificial Sequence
  Description of Artificial Sequence: Synthetic peptide
  Seed: MDPRMCSLMQGSTLPRRSGA
  Core: MQGSTLPRR
  misc_feature (9)..(9): Xaa can be Ala, Cys, Asp, Glu, Phe, Gly, His, Ile, Lys, Leu, Met, Asn, Pro, Gln, Arg, Ser, Thr, Val, Trp, or Tyr
  misc_feature (12)..(12): Xaa can be Ala, Cys, Asp, Glu, Phe, Gly, His, Ile, Lys, Leu, Met, Asn, Pro, Gln, Arg, Ser, Thr, Val, Trp, or Tyr
  misc_feature (14)..(14): Xaa can be Ala, Cys, Asp, Glu, Phe, Gly, His, Ile, Lys, Leu, Met, Asn, Pro, Gln, Arg, Ser, Thr, Val, Trp, or Tyr
  misc_feature (17)..(17): Xaa can be Ala, Cys, Asp, Glu, Phe, Gly, His, Ile, Lys, Leu, Met, Asn, Pro, Gln, Arg, Ser, Thr, Val, Trp, or Tyr
MDPRMCSLXQGXTXPRXSGA

SEQ ID NO: 137433 - protein, 20 aa, Artificial Sequence
  Description of Artificial Sequence: Synthetic peptide
  Seed: MDPRMCSLMQGSTLPRRSGA
  Core: QGSTLPRRS
  misc_feature (10)..(10): Xaa can be Ala, Cys, Asp, Glu, Phe, Gly, His, Ile, Lys, Leu, Met, Asn, Pro, Gln, Arg, Ser, Thr, Val, Trp, or Tyr
  misc_feature (13)..(13): Xaa can be Ala, Cys, Asp, Glu, Phe, Gly, His, Ile, Lys, Leu, Met, Asn, Pro, Gln, Arg, Ser, Thr, Val, Trp, or Tyr
  misc_feature (15)..(15): Xaa can be Ala, Cys, Asp, Glu, Phe, Gly, His, Ile, Lys, Leu, Met, Asn, Pro, Gln, Ser, Thr, Val, Trp, or Tyr
  misc_feature (18)..(18): Xaa can be Ala, Cys, Asp, Glu, Phe, Gly, His, Ile, Lys, Leu, Met, Asn, Pro, Gln, Arg, Ser, Thr, Val, Trp, or Tyr
MDPRMCSLMXGSXLXRRXGA

SEQ ID NO: 137434 - protein, 20 aa, Artificial Sequence
  Description of Artificial Sequence: Synthetic peptide
  Seed: MDPRMCSLMQGSTLPRRSGA
  Core: RMCSLMQGS
  misc_feature (4)..(4): Xaa can be Phe, Ile, Lys, Arg, Trp, or Tyr
  misc_feature (7)..(7): Xaa can be Ala, Cys, Asp, Glu, Phe, His, Ile, Lys, Leu, Met, Asn, Gln, Arg, Ser, Thr, Val, Trp, or Ty r
  misc_feature (9)..(9): Xaa can be Ala, Phe, Ile, Leu, Met, Pro, Ser, Thr, Val, Trp, or Tyr
  misc_feature (12)..(12): Xaa can be Ala, Cys, Asp, Glu, Phe, Gly, His, Ile, Lys, Leu, Met, Asn, Pro, Gln, Arg, Ser, Thr, Val, or Tyr
MDPXMCXLXQGXTLPRRSGA

SEQ ID NO: 137435 - protein, 21 aa, Artificial Sequence
  Description of Artificial Sequence: Synthetic peptide
  Seed: MDPRMCSLMQGSTLPRRSGAA
  Core: CSLMQGSTL
  misc_feature (6)..(6): Xaa can be Ala, Cys, Asp, Glu, Phe, Gly, His, Ile, Lys, Leu, Met, Asn, Pro, Gln, Arg, Ser, Thr, Val, Trp, or Tyr
  misc_feature (9)..(9): Xaa can be Ala, Cys, Asp, Glu, Phe, Gly, His, Ile, Lys, Leu, Met, Asn, Pro, Gln, Arg, Ser, Thr, Val, Trp, or Tyr
  misc_feature (11)..(11): Xaa can be Ala, Cys, Asp, Glu, Phe, Gly, His, Ile, Lys, Leu, Met, Asn, Pro, Gln, Arg, Ser, Thr, Val, Trp, or Tyr
  misc_feature (14)..(14): Xaa can be Ala, Cys, Asp, Glu, Phe, Gly, His, Ile, Lys, Leu, Met, Asn, Pro, Gln, Arg, Ser, Thr, Val, Trp, or Tyr
MDPRMXSLXQXSTXPRRSGAA

SEQ ID NO: 137436 - protein, 21 aa, Artificial Sequence
  Description of Artificial Sequence: Synthetic peptide
  Seed: MDPRMCSLMQGSTLPRRSGAA
  Core: LMQGSTLPR
  misc_feature (8)..(8): Xaa can be Ala, Cys, Asp, Glu, Phe, Gly, His, Ile, Lys, Leu, Met, Asn, Pro, Gln, Arg, Ser, Thr, Val, Trp, or Tyr
  misc_feature (11)..(11): Xaa can be Ala, Cys, Asp, Glu, Phe, Gly, His, Ile, Lys, Leu, Met, Asn, Pro, Gln, Arg, Ser, Thr, Val, Trp, or Tyr
  misc_feature (13)..(13): Xaa can be Ala, Cys, Asp, Glu, Phe, Gly, His, Ile, Lys, Leu, Met, Asn, Pro, Gln, Arg, Ser, Thr, Val, Trp, or Tyr
  misc_feature (16)..(16): Xaa can be Ala, Cys, Asp, Glu, Phe, Gly, His, Ile, Lys, Leu, Met, Asn, Pro, Gln, Arg, Ser, Thr, Val, Trp, or Tyr
MDPRMCSXMQXSXLPXRSGAA

SEQ ID NO: 137437 - protein, 21 aa, Artificial Sequence
  Description of Artificial Sequence: Synthetic peptide
  Seed: MDPRMCSLMQGSTLPRRSGAA
  Core: MQGSTLPRR
  misc_feature (9)..(9): Xaa can be Ala, Cys, Glu, Phe, His, Ile, Lys, Leu, Met, Gln, Arg, Ser, Thr, Val, Trp, or Tyr
  misc_feature (12)..(12): Xaa can be Ala, Cys, Asp, Glu, Phe, Gly, His, Ile, Lys, Leu, Met, Asn, Pro, Gln, Arg, Ser, Thr, Val, Trp, or Tyr
  misc_feature (14)..(14): Xaa can be Ala, Cys, Asp, Glu, Phe, Gly, His, Ile, Lys, Leu, Met, Asn, Pro, Gln, Arg, Ser, Thr, Val, Trp, or Tyr
  misc_feature (17)..(17): Xaa can be Ala, Cys, Asp, Glu, Phe, Gly, His, Ile, Lys, Leu, Met, Asn, Pro, Gln, Arg, Ser, Thr, Val, Trp, or Tyr
MDPRMCSLXQGXTXPRXSGAA

SEQ ID NO: 137438 - protein, 21 aa, Artificial Sequence
  Description of Artificial Sequence: Synthetic peptide
  Seed: MDPRMCSLMQGSTLPRRSGAA
  Core: QGSTLPRRS
  misc_feature (10)..(10): Xaa can be Ala, Cys, Asp, Glu, Phe, Gly, His, Ile, Lys, Leu, Met, Asn, Pro, Gln, Arg, Ser, Thr, Val, Trp, or Tyr
  misc_feature (13)..(13): Xaa can be Ala, Cys, Asp, Glu, Phe, Gly, His, Ile, Lys, Leu, Met, Asn, Pro, Gln, Arg, Ser, Thr, Val, Trp, or Tyr
  misc_feature (15)..(15): Xaa can be Ala, Cys, Asp, Glu, Phe, Gly, His, Ile, Lys, Leu, Met, Asn, Pro, Gln, Arg, Ser, Thr, Val, Trp, or Tyr
  misc_feature (18)..(18): Xaa can be Ala, Cys, Asp, Glu, Phe, Gly, His, Ile, Lys, Leu, Met, Asn, Pro, Gln, Arg, Ser, Thr, Val, Trp, or Tyr
MDPRMCSLMXGSXLXRRXGAA

SEQ ID NO: 137439 - protein, 22 aa, Artificial Sequence
  Description of Artificial Sequence: Synthetic peptide
  Seed: MDPRMCSLMQGSTLPRRSGAAG
  Core: CSLMQGSTL
  misc_feature (6)..(6): Xaa can be Ala, Cys, Asp, Glu, Phe, Gly, His, Ile, Lys, Leu, Met, Asn, Pro, Gln, Arg, Ser, Thr, Val, Trp, or Tyr
  misc_feature (9)..(9): Xaa can be Ala, Cys, Asp, Glu, Phe, Gly, His, Ile, Lys, Leu, Met, Asn, Pro, Gln, Arg, Ser, Thr, Val, Trp, or Tyr
  misc_feature (11)..(11): Xaa can be Ala, Cys, Asp, Glu, Phe, Gly, His, Ile, Lys, Leu, Met, Asn, Pro, Gln, Arg, Ser, Thr, Val, Trp, or Tyr
  misc_feature (14)..(14): Xaa can be Ala, Cys, Asp, Glu, Phe, Gly, His, Ile, Lys, Leu, Met, Asn, Pro, Gln, Arg, Ser, Thr, Val, Trp, or Tyr
MDPRMXSLXQXSTXPRRSGAAG

SEQ ID NO: 137440 - protein, 22 aa, Artificial Sequence
  Description of Artificial Sequence: Synthetic peptide
  Seed: MDPRMCSLMQGSTLPRRSGAAG
  Core: LMQGSTLPR
  misc_feature (8)..(8): Xaa can be Ala, Cys, Asp, Glu, Phe, Gly, His, Ile, Lys, Leu, Met, Asn, Pro, Gln, Arg, Ser, Thr, Val, Trp, or Tyr
  misc_feature (11)..(11): Xaa can be Ala, Cys, Asp, Glu, Phe, Gly, His, Ile, Lys, Leu, Met, Asn, Pro, Gln, Arg, Ser, Thr, Val, Trp, or Tyr
  misc_feature (13)..(13): Xaa can be Ala, Cys, Asp, Glu, Phe, Gly, His, Ile, Lys, Leu, Met, Asn, Pro, Gln, Arg, Ser, Thr, Val, Trp, or Tyr
  misc_feature (16)..(16): Xaa can be Ala, Cys, Asp, Glu, Phe, Gly, His, Ile, Lys, Leu, Met, Asn, Pro, Gln, Arg, Ser, Thr, Val, Trp, or Tyr
MDPRMCSXMQXSXLPXRSGAAG

SEQ ID NO: 137441 - protein, 22 aa, Artificial Sequence
  Description of Artificial Sequence: Synthetic peptide
  Seed: MDPRMCSLMQGSTLPRRSGAAG
  Core: MQGSTLPRR
  misc_feature (9)..(9): Xaa can be Ala, Cys, Glu, Phe, His, Ile, Lys, Leu, Met, Gln, Arg, Ser, Thr, Val, Trp, or Tyr
  misc_feature (12)..(12): Xaa can be Ala, Cys, Asp, Glu, Phe, Gly, His, Ile, Lys, Leu, Met, Asn, Pro, Gln, Arg, Ser, Thr, Val, Trp, or Tyr
  misc_feature (14)..(14): Xaa can be Ala, Cys, Asp, Glu, Phe, Gly, His, Ile, Lys, Leu, Met, Asn, Pro, Gln, Arg, Ser, Thr, Val, Trp, or Tyr
  misc_feature (17)..(17): Xaa can be Ala, Cys, Asp, Glu, Phe, Gly, His, Ile, Lys, Leu, Met, Asn, Pro, Gln, Arg, Ser, Thr, Val, Trp, or Tyr
MDPRMCSLXQGXTXPRXSGAAG

SEQ ID NO: 137442 - protein, 22 aa, Artificial Sequence
  Description of Artificial Sequence: Synthetic peptide
  Seed: MDPRMCSLMQGSTLPRRSGAAG
  Core: QGSTLPRRS
  misc_feature (10)..(10): Xaa can be Ala, Cys, Asp, Glu, Phe, Gly, His, Ile, Lys, Leu, Met, Asn, Pro, Gln, Arg, Ser, Thr, Val, Trp, or Tyr
  misc_feature (13)..(13): Xaa can be Ala, Cys, Asp, Glu, Phe, Gly, His, Ile, Lys, Leu, Met, Asn, Pro, Gln, Arg, Ser, Thr, Val, Trp, or Tyr
  misc_feature (15)..(15): Xaa can be Ala, Cys, Asp, Glu, Phe, Gly, His, Ile, Lys, Leu, Met, Asn, Pro, Gln, Arg, Ser, Thr, Val, Trp, or Tyr
  misc_feature (18)..(18): Xaa can be Ala, Cys, Asp, Glu, Phe, Gly, His, Ile, Lys, Leu, Met, Asn, Pro, Gln, Arg, Ser, Thr, Val, Trp, or Tyr
MDPRMCSLMXGSXLXRRXGAAG

SEQ ID NO: 137443 - protein, 23 aa, Artificial Sequence
  Description of Artificial Sequence: Synthetic peptide
  Seed: MDPRMCSLMQGSTLPRRSGAAGA
  Core: CSLMQGSTL
  misc_feature (6)..(6): Xaa can be Ala, Cys, Asp, Glu, Phe, Gly, His, Ile, Lys, Leu, Met, Asn, Pro, Gln, Arg, Ser, Thr, Val, Trp, or Tyr
  misc_feature (9)..(9): Xaa can be Ala, Cys, Asp, Glu, Phe, Gly, His, Ile, Lys, Leu, Met, Asn, Pro, Gln, Arg, Ser, Thr, Val, Trp, or Tyr
  misc_feature (11)..(11): Xaa can be Ala, Cys, Asp, Glu, Phe, Gly, His, Ile, Lys, Leu, Met, Asn, Pro, Gln, Arg, Ser, Thr, Val, Trp, or Tyr
  misc_feature (14)..(14): Xaa can be Ala, Cys, Asp, Glu, Phe, Gly, His, Ile, Lys, Leu, Met, Asn, Pro, Gln, Arg, Ser, Thr, Val, Trp, or Tyr
MDPRMXSLXQXSTXPRRSGAAGA

SEQ ID NO: 137444 - protein, 23 aa, Artificial Sequence
  Description of Artificial Sequence: Synthetic peptide
  Seed: MDPRMCSLMQGSTLPRRSGAAGA
  Core: GSTLPRRSG
  misc_feature (11)..(11): Xaa can be Ala, Cys, Glu, Phe, Gly, His, Ile, Lys, Leu, Met, Asn, Pro, Gln, Arg, Ser, Thr, Val, Trp, or Tyr
  misc_feature (14)..(14): Xaa can be Ala, Cys, Asp, Glu, Phe, Gly, His, Ile, Lys, Leu, Met, Asn, Pro, Gln, Arg, Ser, Thr, Val, Trp, or Tyr
  misc_feature (16)..(16): Xaa can be Ala, Cys, Asp, Glu, Phe, Gly, His, Ile, Lys, Leu, Met, Asn, Pro, Gln, Arg, Ser, Thr, Val, Trp, or Tyr
  misc_feature (19)..(19): Xaa can be Ala, Cys, Asp, Glu, Phe, Gly, His, Ile, Lys, Leu, Met, Asn, Pro, Gln, Arg, Ser, Thr, Val, Trp, or Tyr
MDPRMCSLMQXSTXPXRSXAAGA

SEQ ID NO: 137445 - protein, 23 aa, Artificial Sequence
  Description of Artificial Sequence: Synthetic peptide
  Seed: MDPRMCSLMQGSTLPRRSGAAGA
  Core: LMQGSTLPR
  misc_feature (8)..(8): Xaa can be Ala, Cys, Asp, Glu, Phe, Gly, His, Ile, Lys, Leu, Met, Asn, Pro, Gln, Arg, Ser, Thr, Val, Trp, or Tyr
  misc_feature (11)..(11): Xaa can be Ala, Cys, Asp, Glu, Phe, Gly, His, Ile, Lys, Leu, Met, Asn, Pro, Gln, Arg, Ser, Thr, Val, Trp, or Tyr
  misc_feature (13)..(13): Xaa can be Ala, Cys, Asp, Glu, Phe, Gly, His, Ile, Lys, Leu, Met, Asn, Pro, Gln, Arg, Ser, Thr, Val, Trp, or Tyr
  misc_feature (16)..(16): Xaa can be Ala, Cys, Asp, Glu, Phe, Gly, His, Ile, Lys, Leu, Met, Asn, Pro, Gln, Arg, Ser, Thr, Val, Trp, or Tyr
MDPRMCSXMQXSXLPXRSGAAGA

SEQ ID NO: 137446 - protein, 23 aa, Artificial Sequence
  Description of Artificial Sequence: Synthetic peptide
  Seed: MDPRMCSLMQGSTLPRRSGAAGA
  Core: MQGSTLPRR
  misc_feature (9)..(9): Xaa can be Ala, Cys, Glu, Phe, His, Ile, Leu, Met, Gln, Arg, Ser, Thr, Val, Trp, or Tyr
  misc_feature (12)..(12): Xaa can be Ala, Cys, Asp, Glu, Phe, Gly, His, Ile, Lys, Leu, Met, Asn, Pro, Gln, Arg, Ser, Thr, Val, Trp, or Tyr
  misc_feature (14)..(14): Xaa can be Ala, Cys, Asp, Glu, Phe, Gly, His, Ile, Lys, Leu, Met, Asn, Pro, Gln, Arg, Ser, Thr, Val, Trp, or Tyr
  misc_feature (17)..(17): Xaa can be Ala, Cys, Asp, Glu, Phe, Gly, His, Ile, Lys, Leu, Met, Asn, Pro, Gln, Arg, Ser, Thr, Val, Trp, or Tyr
MDPRMCSLXQGXTXPRXSGAAGA

SEQ ID NO: 137447 - protein, 23 aa, Artificial Sequence
  Description of Artificial Sequence: Synthetic peptide
  Seed: MDPRMCSLMQGSTLPRRSGAAGA
  Core: PRRSGAAGA
  misc_feature (15)..(15): Xaa can be Ala, Cys, Glu, Phe, Gly, His, Ile, Leu, Met, Asn, Pro, Gln, Ser, Thr, Val, Trp, or Tyr
  misc_feature (18)..(18): Xaa can be Ala, Gly, Ile, Met, Ser, Thr, or Val
  misc_feature (20)..(20): Xaa can be Ala, Cys, Gly, Ile, Leu, Met, Pro, Ser, Thr, or Val
  misc_feature (23)..(23): Xaa can be Ala, Cys, Asp, Glu, Phe, Gly, His, Ile, Leu, Met, Asn, Pro, Gln, Ser, Thr, Val, Trp, or Ty r
MDPRMCSLMQGSTLXRRXGXAGX

SEQ ID NO: 137448 - protein, 23 aa, Artificial Sequence
  Description of Artificial Sequence: Synthetic peptide
  Seed: MDPRMCSLMQGSTLPRRSGAAGA
  Core: QGSTLPRRS
  misc_feature (10)..(10): Xaa can be Ala, Cys, Asp, Glu, Phe, Gly, His, Ile, Lys, Leu, Met, Asn, Pro, Gln, Arg, Ser, Thr, Val, Trp, or Tyr
  misc_feature (13)..(13): Xaa can be Ala, Cys, Asp, Glu, Phe, Gly, His, Ile, Lys, Leu, Met, Asn, Pro, Gln, Arg, Ser, Thr, Val, Trp, or Tyr
  misc_feature (15)..(15): Xaa can be Ala, Cys, Asp, Glu, Phe, Gly, His, Ile, Lys, Leu, Met, Asn, Pro, Gln, Arg, Ser, Thr, Val, Trp, or Tyr
  misc_feature (18)..(18): Xaa can be Ala, Cys, Asp, Glu, Phe, Gly, His, Ile, Lys, Leu, Met, Asn, Pro, Gln, Arg, Ser, Thr, Val, Trp, or Tyr
MDPRMCSLMXGSXLXRRXGAAGA

SEQ ID NO: 137449 - protein, 15 aa, Artificial Sequence
  Description of Artificial Sequence: Synthetic peptide
  Seed: MQGSTLPRRSGAAGA
  Core: PRRSGAAGA
  misc_feature (7)..(7): Xaa can be Ala, Cys, Asp, Glu, Phe, Gly, His, Ile, Lys, Leu, Met, Asn, Pro, Gln, Arg, Ser, Thr, Val, Trp, or Tyr
  misc_feature (10)..(10): Xaa can be Ala, Cys, Phe, Gly, His, Ile, Leu, Met, Asn, Pro, Ser, Thr, Val, Trp, or Tyr
  misc_feature (12)..(12): Xaa can be Ala, Cys, Asp, Glu, Phe, Gly, His, Ile, Leu, Met, Asn, Pro, Gln, Ser, Thr, Val, Trp, or Ty r
  misc_feature (15)..(15): Xaa can be Ala, Cys, Asp, Glu, Phe, Gly, His, Ile, Lys, Leu, Met, Asn, Pro, Gln, Arg, Ser, Thr, Val, Trp, or Tyr
MQGSTLXRRXGXAGX

SEQ ID NO: 137450 - protein, 15 aa, Artificial Sequence
  Description of Artificial Sequence: Synthetic peptide
  Seed: MQGSTLPRRSGAAGA
  Core: QGSTLPRRS
  misc_feature (2)..(2): Xaa can be Ala, Cys, Asp, Glu, Phe, Gly, His, Ile, Lys, Leu, Met, Asn, Pro, Gln, Arg, Ser, Thr, Val, Trp, or Tyr
  misc_feature (5)..(5): Xaa can be Ala, Cys, Glu, Phe, Gly, His, Ile, Lys, Leu, Met, Asn, Pro, Gln, Ser, Thr, Val, Trp, or Ty r
  misc_feature (7)..(7): Xaa can be Ala, Cys, Asp, Glu, Phe, Gly, His, Ile, Lys, Leu, Met, Asn, Pro, Gln, Arg, Ser, Thr, Val, Trp, or Tyr
  misc_feature (10)..(10): Xaa can be Ala, Cys, Asp, Glu, Phe, Gly, His, Ile, Lys, Leu, Met, Asn, Pro, Gln, Arg, Ser, Thr, Val, Trp, or Tyr
MXGSXLXRRXGAAGA

SEQ ID NO: 137451 - protein, 13 aa, Artificial Sequence
  Description of Artificial Sequence: Synthetic peptide
  Seed: PRMCSLMQGSTLP
  Core: CSLMQGSTL
  misc_feature (4)..(4): Xaa can be Cys, Phe, Ile, Leu, Met, Val, Trp, or Tyr
  misc_feature (7)..(7): Xaa can be Ala, Cys, Glu, Phe, Gly, His, Ile, Lys, Leu, Met, Asn, Gln, Arg, Ser, Thr, Val, Trp, or Ty r
  misc_feature (9)..(9): Xaa can be Ala, Cys, Asp, Glu, Phe, Gly, His, Ile, Lys, Leu, Met, Asn, Pro, Gln, Arg, Ser, Thr, Val, Trp, or Tyr
  misc_feature (12)..(12): Xaa can be Ala, Cys, Asp, Glu, Phe, Gly, His, Ile, Lys, Leu, Met, Asn, Pro, Gln, Arg, Ser, Thr, Val, Trp, or Tyr
PRMXSLXQXSTXP

SEQ ID NO: 137452 - protein, 14 aa, Artificial Sequence
  Description of Artificial Sequence: Synthetic peptide
  Seed: PRMCSLMQGSTLPR
  Core: CSLMQGSTL
  misc_feature (4)..(4): Xaa can be Ala, Cys, Asp, Glu, Phe, Gly, His, Ile, Lys, Leu, Met, Asn, Pro, Gln, Arg, Ser, Thr, Val, Trp, or Tyr
  misc_feature (7)..(7): Xaa can be Ala, Cys, Asp, Glu, Phe, Gly, His, Ile, Lys, Leu, Met, Asn, Pro, Gln, Arg, Ser, Thr, Val, Trp, or Tyr
  misc_feature (9)..(9): Xaa can be Ala, Cys, Asp, Glu, Phe, Gly, His, Ile, Lys, Leu, Met, Asn, Pro, Gln, Arg, Ser, Thr, Val, Trp, or Tyr
  misc_feature (12)..(12): Xaa can be Ala, Cys, Asp, Glu, Phe, Gly, His, Ile, Lys, Leu, Met, Asn, Pro, Gln, Arg, Ser, Thr, Val, Trp, or Tyr
PRMXSLXQXSTXPR

SEQ ID NO: 137453 - protein, 15 aa, Artificial Sequence
  Description of Artificial Sequence: Synthetic peptide
  Seed: PRMCSLMQGSTLPRR
  Core: CSLMQGSTL
  misc_feature (4)..(4): Xaa can be Ala, Cys, Asp, Glu, Phe, Gly, His, Ile, Lys, Leu, Met, Asn, Pro, Gln, Arg, Ser, Thr, Val, Trp, or Tyr
  misc_feature (7)..(7): Xaa can be Ala, Cys, Asp, Glu, Phe, Gly, His, Ile, Lys, Leu, Met, Asn, Pro, Gln, Arg, Ser, Thr, Val, Trp, or Tyr
  misc_feature (9)..(9): Xaa can be Ala, Cys, Asp, Glu, Phe, Gly, His, Ile, Lys, Leu, Met, Asn, Pro, Gln, Arg, Ser, Thr, Val, Trp, or Tyr
  misc_feature (12)..(12): Xaa can be Ala, Cys, Asp, Glu, Phe, Gly, His, Ile, Lys, Leu, Met, Asn, Pro, Gln, Arg, Ser, Thr, Val, Trp, or Tyr
PRMXSLXQXSTXPRR

SEQ ID NO: 137454 - protein, 15 aa, Artificial Sequence
  Description of Artificial Sequence: Synthetic peptide
  Seed: PRMCSLMQGSTLPRR
  Core: LMQGSTLPR
  misc_feature (6)..(6): Xaa can be Ala, Cys, Asp, Glu, Phe, Gly, His, Ile, Lys, Leu, Met, Asn, Pro, Gln, Arg, Ser, Thr, Val, Trp, or Tyr
  misc_feature (9)..(9): Xaa can be Ala, Cys, Asp, Glu, Phe, Gly, His, Ile, Lys, Leu, Met, Asn, Pro, Gln, Arg, Ser, Thr, Val, Trp, or Tyr
  misc_feature (11)..(11): Xaa can be Ala, Cys, Asp, Glu, Phe, Gly, His, Ile, Lys, Leu, Met, Asn, Pro, Gln, Arg, Ser, Thr, Val, Trp, or Tyr
  misc_feature (14)..(14): Xaa can be Ala, Cys, Asp, Glu, Phe, Gly, His, Ile, Lys, Leu, Met, Asn, Pro, Gln, Arg, Ser, Thr, Val, Trp, or Tyr
PRMCSXMQXSXLPXR

SEQ ID NO: 137455 - protein, 15 aa, Artificial Sequence
  Description of Artificial Sequence: Synthetic peptide
  Seed: PRMCSLMQGSTLPRR
  Core: MQGSTLPRR
  misc_feature (7)..(7): Xaa can be Ala, Cys, Asp, Glu, Phe, Gly, His, Ile, Lys, Leu, Met, Asn, Pro, Gln, Arg, Ser, Thr, Val, Trp, or Tyr
  misc_feature (10)..(10): Xaa can be Ala, Cys, Asp, Glu, Phe, Gly, His, Ile, Lys, Leu, Met, Asn, Pro, Gln, Arg, Ser, Thr, Val, Trp, or Tyr
  misc_feature (12)..(12): Xaa can be Ala, Cys, Asp, Glu, Phe, Gly, His, Ile, Lys, Leu, Met, Asn, Pro, Gln, Arg, Ser, Thr, Val, Trp, or Tyr
  misc_feature (15)..(15): Xaa can be Ala, Cys, Asp, Glu, Phe, Gly, His, Ile, Lys, Leu, Met, Asn, Pro, Gln, Arg, Ser, Thr, Val, Trp, or Tyr
PRMCSLXQGXTXPRX

SEQ ID NO: 137456 - protein, 15 aa, Artificial Sequence
  Description of Artificial Sequence: Synthetic peptide
  Seed: PRMCSLMQGSTLPRR
  Core: RMCSLMQGS
  misc_feature (2)..(2): Xaa can be Phe, Ile, Lys, Leu, Arg, Val, Trp, or Tyr
  misc_feature (5)..(5): Xaa can be Ala, Cys, Asp, Glu, Phe, His, Ile, Lys, Leu, Met, Asn, Pro, Gln, Arg, Ser, Thr, Val, Trp, or Tyr
  misc_feature (7)..(7): Xaa can be Ala, Phe, Ile, Leu, Met, Pro, Ser, Thr, Val, Trp, or Tyr
  misc_feature (10)..(10): Xaa can be Ala, Cys, Asp, Glu, Phe, Gly, His, Ile, Leu, Met, Asn, Pro, Gln, Arg, Ser, Thr, Val, or Ty r
PXMCXLXQGXTLPRR

SEQ ID NO: 137457 - protein, 16 aa, Artificial Sequence
  Description of Artificial Sequence: Synthetic peptide
  Seed: PRMCSLMQGSTLPRRS
  Core: CSLMQGSTL
  misc_feature (4)..(4): Xaa can be Ala, Cys, Asp, Glu, Phe, Gly, His, Ile, Lys, Leu, Met, Asn, Pro, Gln, Arg, Ser, Thr, Val, Trp, or Tyr
  misc_feature (7)..(7): Xaa can be Ala, Cys, Asp, Glu, Phe, Gly, His, Ile, Lys, Leu, Met, Asn, Pro, Gln, Arg, Ser, Thr, Val, Trp, or Tyr
  misc_feature (9)..(9): Xaa can be Ala, Cys, Asp, Glu, Phe, Gly, His, Ile, Lys, Leu, Met, Asn, Pro, Gln, Arg, Ser, Thr, Val, Trp, or Tyr
  misc_feature (12)..(12): Xaa can be Ala, Cys, Asp, Glu, Phe, Gly, His, Ile, Lys, Leu, Met, Asn, Pro, Gln, Arg, Ser, Thr, Val, Trp, or Tyr
PRMXSLXQXSTXPRRS

SEQ ID NO: 137458 - protein, 16 aa, Artificial Sequence
  Description of Artificial Sequence: Synthetic peptide
  Seed: PRMCSLMQGSTLPRRS
  Core: LMQGSTLPR
  misc_feature (6)..(6): Xaa can be Ala, Cys, Phe, His, Ile, Leu, Met, Asn, Pro, Gln, Arg, Ser, Thr, Val, Trp, or Tyr
  misc_feature (9)..(9): Xaa can be Ala, Cys, Asp, Glu, Phe, Gly, His, Ile, Lys, Leu, Met, Asn, Pro, Gln, Arg, Ser, Thr, Val, Trp, or Tyr
  misc_feature (11)..(11): Xaa can be Ala, Cys, Asp, Glu, Phe, Gly, His, Ile, Lys, Leu, Met, Asn, Pro, Gln, Arg, Ser, Thr, Val, Trp, or Tyr
  misc_feature (14)..(14): Xaa can be Ala, Cys, Asp, Glu, Phe, Gly, His, Ile, Lys, Leu, Met, Asn, Pro, Gln, Arg, Ser, Thr, Val, Trp, or Tyr
PRMCSXMQXSXLPXRS

SEQ ID NO: 137459 - protein, 16 aa, Artificial Sequence
  Description of Artificial Sequence: Synthetic peptide
  Seed: PRMCSLMQGSTLPRRS
  Core: MQGSTLPRR
  misc_feature (7)..(7): Xaa can be Ala, Cys, Asp, Glu, Phe, Gly, His, Ile, Lys, Leu, Met, Asn, Pro, Gln, Arg, Ser, Thr, Val, Trp, or Tyr
  misc_feature (10)..(10): Xaa can be Ala, Cys, Asp, Glu, Phe, Gly, His, Ile, Lys, Leu, Met, Asn, Pro, Gln, Arg, Ser, Thr, Val, Trp, or Tyr
  misc_feature (12)..(12): Xaa can be Ala, Cys, Asp, Glu, Phe, Gly, His, Ile, Lys, Leu, Met, Asn, Pro, Gln, Arg, Ser, Thr, Val, Trp, or Tyr
  misc_feature (15)..(15): Xaa can be Ala, Cys, Asp, Glu, Phe, Gly, His, Ile, Lys, Leu, Met, Asn, Pro, Gln, Arg, Ser, Thr, Val, Trp, or Tyr
PRMCSLXQGXTXPRXS

SEQ ID NO: 137460 - protein, 17 aa, Artificial Sequence
  Description of Artificial Sequence: Synthetic peptide
  Seed: PRMCSLMQGSTLPRRSG
  Core: CSLMQGSTL
  misc_feature (4)..(4): Xaa can be Ala, Cys, Asp, Glu, Phe, Gly, His, Ile, Lys, Leu, Met, Asn, Pro, Gln, Arg, Ser, Thr, Val, Trp, or Tyr
  misc_feature (7)..(7): Xaa can be Ala, Cys, Asp, Glu, Phe, Gly, His, Ile, Lys, Leu, Met, Asn, Pro, Gln, Arg, Ser, Thr, Val, Trp, or Tyr
  misc_feature (9)..(9): Xaa can be Ala, Cys, Asp, Glu, Phe, Gly, His, Ile, Lys, Leu, Met, Asn, Pro, Gln, Arg, Ser, Thr, Val, Trp, or Tyr
  misc_feature (12)..(12): Xaa can be Ala, Cys, Asp, Glu, Phe, Gly, His, Ile, Lys, Leu, Met, Asn, Pro, Gln, Arg, Ser, Thr, Val, Trp, or Tyr
PRMXSLXQXSTXPRRSG

SEQ ID NO: 137461 - protein, 17 aa, Artificial Sequence
  Description of Artificial Sequence: Synthetic peptide
  Seed: PRMCSLMQGSTLPRRSG
  Core: LMQGSTLPR
  misc_feature (6)..(6): Xaa can be Ala, Cys, Asp, Glu, Phe, Gly, His, Ile, Lys, Leu, Met, Asn, Pro, Gln, Arg, Ser, Thr, Val, Trp, or Tyr
  misc_feature (9)..(9): Xaa can be Ala, Cys, Asp, Glu, Phe, Gly, His, Ile, Lys, Leu, Met, Asn, Pro, Gln, Arg, Ser, Thr, Val, Trp, or Tyr
  misc_feature (11)..(11): Xaa can be Ala, Cys, Asp, Glu, Phe, Gly, His, Ile, Lys, Leu, Met, Asn, Pro, Gln, Arg, Ser, Thr, Val, Trp, or Tyr
  misc_feature (14)..(14): Xaa can be Ala, Cys, Asp, Glu, Phe, Gly, His, Ile, Lys, Leu, Met, Asn, Pro, Gln, Arg, Ser, Thr, Val, Trp, or Tyr
PRMCSXMQXSXLPXRSG

SEQ ID NO: 137462 - protein, 17 aa, Artificial Sequence
  Description of Artificial Sequence: Synthetic peptide
  Seed: PRMCSLMQGSTLPRRSG
  Core: MQGSTLPRR
  misc_feature (7)..(7): Xaa can be Ala, Cys, Asp, Glu, Phe, Gly, His, Ile, Lys, Leu, Met, Asn, Pro, Gln, Arg, Ser, Thr, Val, Trp, or Tyr
  misc_feature (10)..(10): Xaa can be Ala, Cys, Asp, Glu, Phe, Gly, His, Ile, Lys, Leu, Met, Asn, Pro, Gln, Arg, Ser, Thr, Val, Trp, or Tyr
  misc_feature (12)..(12): Xaa can be Ala, Cys, Asp, Glu, Phe, Gly, His, Ile, Lys, Leu, Met, Asn, Pro, Gln, Arg, Ser, Thr, Val, Trp, or Tyr
  misc_feature (15)..(15): Xaa can be Ala, Cys, Asp, Glu, Phe, Gly, His, Ile, Lys, Leu, Met, Asn, Pro, Gln, Arg, Ser, Thr, Val, Trp, or Tyr
PRMCSLXQGXTXPRXSG

SEQ ID NO: 137463 - protein, 18 aa, Artificial Sequence
  Description of Artificial Sequence: Synthetic peptide
  Seed: PRMCSLMQGSTLPRRSGA
  Core: CSLMQGSTL
  misc_feature (4)..(4): Xaa can be Ala, Cys, Phe, His, Ile, Lys, Leu, Met, Thr, Val, Trp, or Tyr
  misc_feature (7)..(7): Xaa can be Ala, Cys, Asp, Glu, Phe, Gly, His, Ile, Lys, Leu, Met, Asn, Gln, Arg, Ser, Thr, Val, Trp, or Tyr
  misc_feature (9)..(9): Xaa can be Ala, Cys, Asp, Glu, Phe, Gly, His, Ile, Lys, Leu, Met, Asn, Pro, Gln, Arg, Ser, Thr, Val, Trp, or Tyr
  misc_feature (12)..(12): Xaa can be Ala, Cys, Asp, Glu, Phe, Gly, His, Ile, Lys, Leu, Met, Asn, Pro, Gln, Arg, Ser, Thr, Val, Trp, or Tyr
PRMXSLXQXSTXPRRSGA

SEQ ID NO: 137464 - protein, 18 aa, Artificial Sequence
  Description of Artificial Sequence: Synthetic peptide
  Seed: PRMCSLMQGSTLPRRSGA
  Core: QGSTLPRRS
  misc_feature (8)..(8): Xaa can be Ala, Cys, Asp, Glu, Phe, Gly, His, Ile, Lys, Leu, Met, Asn, Pro, Gln, Ser, Thr, Val, Trp, or Tyr
  misc_feature (11)..(11): Xaa can be Ala, Cys, Asp, Glu, Phe, Gly, His, Ile, Leu, Met, Asn, Pro, Gln, Ser, Thr, Val, Trp, or Ty r
  misc_feature (13)..(13): Xaa can be Ala, Cys, Asp, Glu, Phe, Gly, Ile, Leu, Met, Asn, Pro, Gln, Ser, Thr, Val, or Tyr
  misc_feature (16)..(16): Xaa can be Ala, Cys, Asp, Glu, Phe, Gly, His, Ile, Lys, Leu, Met, Asn, Pro, Gln, Arg, Ser, Thr, Val, Trp, or Tyr
PRMCSLMXGSXLXRRXGA

SEQ ID NO: 137465 - protein, 19 aa, Artificial Sequence
  Description of Artificial Sequence: Synthetic peptide
  Seed: PRMCSLMQGSTLPRRSGAA
  Core: CSLMQGSTL
  misc_feature (4)..(4): Xaa can be Ala, Cys, Asp, Glu, Phe, Gly, His, Ile, Lys, Leu, Met, Asn, Pro, Gln, Arg, Ser, Thr, Val, Trp, or Tyr
  misc_feature (7)..(7): Xaa can be Ala, Cys, Asp, Glu, Phe, Gly, His, Ile, Lys, Leu, Met, Asn, Pro, Gln, Arg, Ser, Thr, Val, Trp, or Tyr
  misc_feature (9)..(9): Xaa can be Ala, Cys, Asp, Glu, Phe, Gly, His, Ile, Lys, Leu, Met, Asn, Pro, Gln, Arg, Ser, Thr, Val, Trp, or Tyr
  misc_feature (12)..(12): Xaa can be Ala, Cys, Asp, Glu, Phe, Gly, His, Ile, Lys, Leu, Met, Asn, Pro, Gln, Arg, Ser, Thr, Val, Trp, or Tyr
PRMXSLXQXSTXPRRSGAA

SEQ ID NO: 137466 - protein, 19 aa, Artificial Sequence
  Description of Artificial Sequence: Synthetic peptide
  Seed: PRMCSLMQGSTLPRRSGAA
  Core: LMQGSTLPR
  misc_feature (6)..(6): Xaa can be Phe, Ile, Leu, Met, Val, Trp, or Tyr
  misc_feature (9)..(9): Xaa can be Ala, Cys, Asp, Glu, Phe, Gly, His, Ile, Lys, Leu, Met, Asn, Gln, Arg, Ser, Thr, Val, Trp, or Tyr
  misc_feature (11)..(11): Xaa can be Ala, Cys, Asp, Glu, Phe, Gly, His, Ile, Lys, Leu, Met, Asn, Pro, Gln, Arg, Ser, Thr, Val, Trp, or Tyr
  misc_feature (14)..(14): Xaa can be Ala, Cys, Asp, Glu, Phe, Gly, His, Ile, Lys, Leu, Met, Asn, Pro, Gln, Arg, Ser, Thr, Val, Trp, or Tyr
PRMCSXMQXSXLPXRSGAA

SEQ ID NO: 137467 - protein, 19 aa, Artificial Sequence
  Description of Artificial Sequence: Synthetic peptide
  Seed: PRMCSLMQGSTLPRRSGAA
  Core: QGSTLPRRS
  misc_feature (8)..(8): Xaa can be Ala, Cys, Asp, Glu, Phe, Gly, His, Ile, Lys, Leu, Met, Asn, Pro, Gln, Arg, Ser, Thr, Val, Trp, or Tyr
  misc_feature (11)..(11): Xaa can be Ala, Cys, Asp, Glu, Phe, Gly, His, Ile, Lys, Leu, Met, Asn, Pro, Gln, Arg, Ser, Thr, Val, Trp, or Tyr
  misc_feature (13)..(13): Xaa can be Ala, Cys, Asp, Glu, Phe, Gly, His, Ile, Lys, Leu, Met, Asn, Pro, Gln, Arg, Ser, Thr, Val, Trp, or Tyr
  misc_feature (16)..(16): Xaa can be Ala, Cys, Asp, Glu, Phe, Gly, His, Ile, Lys, Leu, Met, Asn, Pro, Gln, Arg, Ser, Thr, Val, Trp, or Tyr
PRMCSLMXGSXLXRRXGAA

SEQ ID NO: 137468 - protein, 20 aa, Artificial Sequence
  Description of Artificial Sequence: Synthetic peptide
  Seed: PRMCSLMQGSTLPRRSGAAG
  Core: CSLMQGSTL
  misc_feature (4)..(4): Xaa can be Ala, Cys, Asp, Glu, Phe, Gly, His, Ile, Lys, Leu, Met, Asn, Pro, Gln, Arg, Ser, Thr, Val, Trp, or Tyr
  misc_feature (7)..(7): Xaa can be Ala, Cys, Asp, Glu, Phe, Gly, His, Ile, Lys, Leu, Met, Asn, Pro, Gln, Arg, Ser, Thr, Val, Trp, or Tyr
  misc_feature (9)..(9): Xaa can be Ala, Cys, Asp, Glu, Phe, Gly, His, Ile, Lys, Leu, Met, Asn, Pro, Gln, Arg, Ser, Thr, Val, Trp, or Tyr
  misc_feature (12)..(12): Xaa can be Ala, Cys, Asp, Glu, Phe, Gly, His, Ile, Lys, Leu, Met, Asn, Pro, Gln, Arg, Ser, Thr, Val, Trp, or Tyr
PRMXSLXQXSTXPRRSGAAG

SEQ ID NO: 137469 - protein, 20 aa, Artificial Sequence
  Description of Artificial Sequence: Synthetic peptide
  Seed: PRMCSLMQGSTLPRRSGAAG
  Core: GSTLPRRSG
  misc_feature (9)..(9): Xaa can be Ala, Cys, Phe, Gly, His, Ile, Lys, Leu, Met, Asn, Pro, Gln, Arg, Ser, Thr, Val, Trp, or Ty r
  misc_feature (12)..(12): Xaa can be Ala, Cys, Asp, Glu, Phe, Gly, His, Ile, Lys, Leu, Met, Asn, Pro, Gln, Arg, Ser, Thr, Val, Trp, or Tyr
  misc_feature (14)..(14): Xaa can be Ala, Cys, Asp, Glu, Phe, Gly, His, Ile, Lys, Leu, Met, Asn, Pro, Gln, Arg, Ser, Thr, Val, Trp, or Tyr
  misc_feature (17)..(17): Xaa can be Ala, Cys, Asp, Glu, Phe, Gly, His, Ile, Lys, Leu, Met, Asn, Pro, Gln, Arg, Ser, Thr, Val, Trp, or Tyr
PRMCSLMQXSTXPXRSXAAG

SEQ ID NO: 137470 - protein, 20 aa, Artificial Sequence
  Description of Artificial Sequence: Synthetic peptide
  Seed: PRMCSLMQGSTLPRRSGAAG
  Core: LMQGSTLPR
  misc_feature (6)..(6): Xaa can be Ala, Cys, Asp, Glu, Phe, Gly, His, Ile, Lys, Leu, Met, Asn, Pro, Gln, Arg, Ser, Thr, Val, Trp, or Tyr
  misc_feature (9)..(9): Xaa can be Ala, Cys, Asp, Glu, Phe, Gly, His, Ile, Lys, Leu, Met, Asn, Pro, Gln, Arg, Ser, Thr, Val, Trp, or Tyr
  misc_feature (11)..(11): Xaa can be Ala, Cys, Asp, Glu, Phe, Gly, His, Ile, Lys, Leu, Met, Asn, Pro, Gln, Arg, Ser, Thr, Val, Trp, or Tyr
  misc_feature (14)..(14): Xaa can be Ala, Cys, Asp, Glu, Phe, Gly, His, Ile, Lys, Leu, Met, Asn, Pro, Gln, Arg, Ser, Thr, Val, Trp, or Tyr
PRMCSXMQXSXLPXRSGAAG

SEQ ID NO: 137471 - protein, 20 aa, Artificial Sequence
  Description of Artificial Sequence: Synthetic peptide
  Seed: PRMCSLMQGSTLPRRSGAAG
  Core: MQGSTLPRR
  misc_feature (7)..(7): Xaa can be Ala, Cys, Glu, Phe, His, Ile, Lys, Leu, Met, Asn, Gln, Arg, Ser, Thr, Val, Trp, or Tyr
  misc_feature (10)..(10): Xaa can be Ala, Cys, Asp, Glu, Phe, Gly, His, Ile, Lys, Leu, Met, Asn, Pro, Gln, Arg, Ser, Thr, Val, Trp, or Tyr
  misc_feature (12)..(12): Xaa can be Ala, Cys, Asp, Glu, Phe, Gly, His, Ile, Lys, Leu, Met, Asn, Pro, Gln, Arg, Ser, Thr, Val, Trp, or Tyr
  misc_feature (15)..(15): Xaa can be Ala, Cys, Asp, Glu, Phe, Gly, His, Ile, Lys, Leu, Met, Asn, Pro, Gln, Arg, Ser, Thr, Val, Trp, or Tyr
PRMCSLXQGXTXPRXSGAAG

SEQ ID NO: 137472 - protein, 20 aa, Artificial Sequence
  Description of Artificial Sequence: Synthetic peptide
  Seed: PRMCSLMQGSTLPRRSGAAG
  Core: QGSTLPRRS
  misc_feature (8)..(8): Xaa can be Ala, Cys, Asp, Glu, Phe, Gly, His, Ile, Lys, Leu, Met, Asn, Pro, Gln, Arg, Ser, Thr, Val, Trp, or Tyr
  misc_feature (11)..(11): Xaa can be Ala, Cys, Asp, Glu, Phe, Gly, His, Ile, Lys, Leu, Met, Asn, Pro, Gln, Arg, Ser, Thr, Val, Trp, or Tyr
  misc_feature (13)..(13): Xaa can be Ala, Cys, Asp, Glu, Phe, Gly, His, Ile, Lys, Leu, Met, Asn, Pro, Gln, Arg, Ser, Thr, Val, Trp, or Tyr
  misc_feature (16)..(16): Xaa can be Ala, Cys, Asp, Glu, Phe, Gly, His, Ile, Lys, Leu, Met, Asn, Pro, Gln, Arg, Ser, Thr, Val, Trp, or Tyr
PRMCSLMXGSXLXRRXGAAG

SEQ ID NO: 137473 - protein, 21 aa, Artificial Sequence
  Description of Artificial Sequence: Synthetic peptide
  Seed: PRMCSLMQGSTLPRRSGAAGA
  Core: CSLMQGSTL
  misc_feature (4)..(4): Xaa can be Ala, Cys, Asp, Glu, Phe, Gly, His, Ile, Lys, Leu, Met, Asn, Pro, Gln, Arg, Ser, Thr, Val, Trp, or Tyr
  misc_feature (7)..(7): Xaa can be Ala, Cys, Asp, Glu, Phe, Gly, His, Ile, Lys, Leu, Met, Asn, Pro, Gln, Arg, Ser, Thr, Val, Trp, or Tyr
  misc_feature (9)..(9): Xaa can be Ala, Cys, Asp, Glu, Phe, Gly, His, Ile, Lys, Leu, Met, Asn, Pro, Gln, Arg, Ser, Thr, Val, Trp, or Tyr
  misc_feature (12)..(12): Xaa can be Ala, Cys, Asp, Glu, Phe, Gly, His, Ile, Lys, Leu, Met, Asn, Pro, Gln, Arg, Ser, Thr, Val, Trp, or Tyr
PRMXSLXQXSTXPRRSGAAGA

SEQ ID NO: 137474 - protein, 21 aa, Artificial Sequence
  Description of Artificial Sequence: Synthetic peptide
  Seed: PRMCSLMQGSTLPRRSGAAGA
  Core: LMQGSTLPR
  misc_feature (6)..(6): Xaa can be Ala, Cys, Asp, Glu, Phe, Gly, His, Ile, Lys, Leu, Met, Asn, Pro, Gln, Arg, Ser, Thr, Val, Trp, or Tyr
  misc_feature (9)..(9): Xaa can be Ala, Cys, Asp, Glu, Phe, Gly, His, Ile, Lys, Leu, Met, Asn, Pro, Gln, Arg, Ser, Thr, Val, Trp, or Tyr
  misc_feature (11)..(11): Xaa can be Ala, Cys, Asp, Glu, Phe, Gly, His, Ile, Lys, Leu, Met, Asn, Pro, Gln, Arg, Ser, Thr, Val, Trp, or Tyr
  misc_feature (14)..(14): Xaa can be Ala, Cys, Asp, Glu, Phe, Gly, His, Ile, Lys, Leu, Met, Asn, Pro, Gln, Arg, Ser, Thr, Val, Trp, or Tyr
PRMCSXMQXSXLPXRSGAAGA

SEQ ID NO: 137475 - protein, 21 aa, Artificial Sequence
  Description of Artificial Sequence: Synthetic peptide
  Seed: PRMCSLMQGSTLPRRSGAAGA
  Core: PRRSGAAGA
  misc_feature (13)..(13): Xaa can be Ala, Cys, Phe, His, Ile, Leu, Met, Asn, Pro, Gln, Ser, Thr, Val, Trp, or Tyr
  misc_feature (16)..(16): Xaa can be Ala, Gly, Ile, Ser, Thr, or Val
  misc_feature (18)..(18): Xaa can be Ala, Cys, Gly, Ile, Leu, Met, Asn, Pro, Ser, Thr, or Val
  misc_feature (21)..(21): Xaa can be Ala, Cys, Asp, Glu, Phe, Gly, His, Ile, Leu, Met, Asn, Pro, Gln, Ser, Thr, Val, Trp, or Ty r
PRMCSLMQGSTLXRRXGXAGX

SEQ ID NO: 137476 - protein, 21 aa, Artificial Sequence
  Description of Artificial Sequence: Synthetic peptide
  Seed: PRMCSLMQGSTLPRRSGAAGA
  Core: QGSTLPRRS
  misc_feature (8)..(8): Xaa can be Ala, Cys, Asp, Glu, Phe, Gly, His, Ile, Lys, Leu, Met, Asn, Pro, Gln, Arg, Ser, Thr, Val, Trp, or Tyr
  misc_feature (11)..(11): Xaa can be Ala, Cys, Asp, Glu, Phe, Gly, His, Ile, Lys, Leu, Met, Asn, Pro, Gln, Arg, Ser, Thr, Val, Trp, or Tyr
  misc_feature (13)..(13): Xaa can be Ala, Cys, Asp, Glu, Phe, Gly, His, Ile, Lys, Leu, Met, Asn, Pro, Gln, Arg, Ser, Thr, Val, Trp, or Tyr
  misc_feature (16)..(16): Xaa can be Ala, Cys, Asp, Glu, Phe, Gly, His, Ile, Lys, Leu, Met, Asn, Pro, Gln, Arg, Ser, Thr, Val, Trp, or Tyr
PRMCSLMXGSXLXRRXGAAGA

SEQ ID NO: 137477 - protein, 14 aa, Artificial Sequence
  Description of Artificial Sequence: Synthetic peptide
  Seed: QGSTLPRRSGAAGA
  Core: PRRSGAAGA
  misc_feature (6)..(6): Xaa can be Ala, Cys, Asp, Glu, Phe, Gly, His, Ile, Lys, Leu, Met, Asn, Pro, Gln, Ser, Thr, Val, Trp, or Tyr
  misc_feature (9)..(9): Xaa can be Ala, Phe, Gly, Ile, Met, Ser, Thr, or Val
  misc_feature (11)..(11): Xaa can be Ala, Cys, Phe, Gly, Ile, Leu, Met, Asn, Pro, Ser, Thr, Val, Trp, or Tyr
  misc_feature (14)..(14): Xaa can be Ala, Cys, Asp, Glu, Phe, Gly, His, Ile, Lys, Leu, Met, Asn, Pro, Gln, Arg, Ser, Thr, Val, Trp, or Tyr
QGSTLXRRXGXAGX

SEQ ID NO: 137478 - protein, 13 aa, Artificial Sequence
  Description of Artificial Sequence: Synthetic peptide
  Seed: RMCSLMQGSTLPR
  Core: CSLMQGSTL
  misc_feature (3)..(3): Xaa can be Cys, Phe, His, Ile, Leu, Met, Val, Trp, or Tyr
  misc_feature (6)..(6): Xaa can be Ala, Cys, Asp, Glu, Phe, Gly, His, Ile, Lys, Leu, Met, Asn, Gln, Arg, Ser, Thr, Val, Trp, or Tyr
  misc_feature (8)..(8): Xaa can be Ala, Cys, Asp, Glu, Phe, Gly, His, Ile, Lys, Leu, Met, Asn, Pro, Gln, Arg, Ser, Thr, Val, Trp, or Tyr
  misc_feature (11)..(11): Xaa can be Ala, Cys, Asp, Glu, Phe, Gly, His, Ile, Lys, Leu, Met, Asn, Pro, Gln, Arg, Ser, Thr, Val, Trp, or Tyr
RMXSLXQXSTXPR

SEQ ID NO: 137479 - protein, 14 aa, Artificial Sequence
  Description of Artificial Sequence: Synthetic peptide
  Seed: RMCSLMQGSTLPRR
  Core: CSLMQGSTL
  misc_feature (3)..(3): Xaa can be Ala, Cys, Asp, Glu, Phe, Gly, His, Ile, Lys, Leu, Met, Asn, Pro, Gln, Arg, Ser, Thr, Val, Trp, or Tyr
  misc_feature (6)..(6): Xaa can be Ala, Cys, Asp, Glu, Phe, Gly, His, Ile, Lys, Leu, Met, Asn, Pro, Gln, Arg, Ser, Thr, Val, Trp, or Tyr
  misc_feature (8)..(8): Xaa can be Ala, Cys, Asp, Glu, Phe, Gly, His, Ile, Lys, Leu, Met, Asn, Pro, Gln, Arg, Ser, Thr, Val, Trp, or Tyr
  misc_feature (11)..(11): Xaa can be Ala, Cys, Asp, Glu, Phe, Gly, His, Ile, Lys, Leu, Met, Asn, Pro, Gln, Arg, Ser, Thr, Val, Trp, or Tyr
RMXSLXQXSTXPRR

SEQ ID NO: 137480 - protein, 15 aa, Artificial Sequence
  Description of Artificial Sequence: Synthetic peptide
  Seed: RMCSLMQGSTLPRRS
  Core: CSLMQGSTL
  misc_feature (3)..(3): Xaa can be Ala, Cys, Asp, Glu, Phe, Gly, His, Ile, Lys, Leu, Met, Asn, Pro, Gln, Arg, Ser, Thr, Val, Trp, or Tyr
  misc_feature (6)..(6): Xaa can be Ala, Cys, Asp, Glu, Phe, Gly, His, Ile, Lys, Leu, Met, Asn, Pro, Gln, Arg, Ser, Thr, Val, Trp, or Tyr
  misc_feature (8)..(8): Xaa can be Ala, Cys, Asp, Glu, Phe, Gly, His, Ile, Lys, Leu, Met, Asn, Pro, Gln, Arg, Ser, Thr, Val, Trp, or Tyr
  misc_feature (11)..(11): Xaa can be Ala, Cys, Asp, Glu, Phe, Gly, His, Ile, Lys, Leu, Met, Asn, Pro, Gln, Arg, Ser, Thr, Val, Trp, or Tyr
RMXSLXQXSTXPRRS

SEQ ID NO: 137481 - protein, 15 aa, Artificial Sequence
  Description of Artificial Sequence: Synthetic peptide
  Seed: RMCSLMQGSTLPRRS
  Core: LMQGSTLPR
  misc_feature (5)..(5): Xaa can be Ala, Cys, Asp, Glu, Phe, Gly, His, Ile, Lys, Leu, Met, Asn, Pro, Gln, Arg, Ser, Thr, Val, Trp, or Tyr
  misc_feature (8)..(8): Xaa can be Ala, Cys, Asp, Glu, Phe, Gly, His, Ile, Lys, Leu, Met, Asn, Pro, Gln, Arg, Ser, Thr, Val, Trp, or Tyr
  misc_feature (10)..(10): Xaa can be Ala, Cys, Asp, Glu, Phe, Gly, His, Ile, Lys, Leu, Met, Asn, Pro, Gln, Arg, Ser, Thr, Val, Trp, or Tyr
  misc_feature (13)..(13): Xaa can be Ala, Cys, Asp, Glu, Phe, Gly, His, Ile, Lys, Leu, Met, Asn, Pro, Gln, Arg, Ser, Thr, Val, Trp, or Tyr
RMCSXMQXSXLPXRS

SEQ ID NO: 137482 - protein, 15 aa, Artificial Sequence
  Description of Artificial Sequence: Synthetic peptide
  Seed: RMCSLMQGSTLPRRS
  Core: MQGSTLPRR
  misc_feature (6)..(6): Xaa can be Ala, Cys, Asp, Glu, Phe, Gly, His, Ile, Lys, Leu, Met, Asn, Pro, Gln, Arg, Ser, Thr, Val, Trp, or Tyr
  misc_feature (9)..(9): Xaa can be Ala, Cys, Asp, Glu, Phe, Gly, His, Ile, Lys, Leu, Met, Asn, Pro, Gln, Arg, Ser, Thr, Val, Trp, or Tyr
  misc_feature (11)..(11): Xaa can be Ala, Cys, Asp, Glu, Phe, Gly, His, Ile, Lys, Leu, Met, Asn, Pro, Gln, Arg, Ser, Thr, Val, Trp, or Tyr
  misc_feature (14)..(14): Xaa can be Ala, Cys, Asp, Glu, Phe, Gly, His, Ile, Lys, Leu, Met, Asn, Pro, Gln, Arg, Ser, Thr, Val, Trp, or Tyr
RMCSLXQGXTXPRXS

SEQ ID NO: 137483 - protein, 15 aa, Artificial Sequence
  Description of Artificial Sequence: Synthetic peptide
  Seed: RMCSLMQGSTLPRRS
  Core: QGSTLPRRS
  misc_feature (7)..(7): Xaa can be Ala, Cys, Asp, Glu, Phe, Gly, His, Ile, Lys, Leu, Met, Asn, Pro, Gln, Arg, Ser, Thr, Val, Trp, or Tyr
  misc_feature (10)..(10): Xaa can be Ala, Cys, Asp, Glu, Phe, Gly, His, Ile, Lys, Leu, Met, Asn, Pro, Gln, Arg, Ser, Thr, Val, Trp, or Tyr
  misc_feature (12)..(12): Xaa can be Ala, Cys, Asp, Glu, Phe, Gly, His, Ile, Lys, Leu, Met, Asn, Pro, Gln, Arg, Ser, Thr, Val, Trp, or Tyr
  misc_feature (15)..(15): Xaa can be Ala, Cys, Asp, Glu, Phe, Gly, His, Ile, Lys, Leu, Met, Asn, Pro, Gln, Arg, Ser, Thr, Val, Trp, or Tyr
RMCSLMXGSXLXRRX

SEQ ID NO: 137484 - protein, 16 aa, Artificial Sequence
  Description of Artificial Sequence: Synthetic peptide
  Seed: RMCSLMQGSTLPRRSG
  Core: CSLMQGSTL
  misc_feature (3)..(3): Xaa can be Ala, Cys, Asp, Glu, Phe, Gly, His, Ile, Lys, Leu, Met, Asn, Pro, Gln, Arg, Ser, Thr, Val, Trp, or Tyr
  misc_feature (6)..(6): Xaa can be Ala, Cys, Asp, Glu, Phe, Gly, His, Ile, Lys, Leu, Met, Asn, Pro, Gln, Arg, Ser, Thr, Val, Trp, or Tyr
  misc_feature (8)..(8): Xaa can be Ala, Cys, Asp, Glu, Phe, Gly, His, Ile, Lys, Leu, Met, Asn, Pro, Gln, Arg, Ser, Thr, Val, Trp, or Tyr
  misc_feature (11)..(11): Xaa can be Ala, Cys, Asp, Glu, Phe, Gly, His, Ile, Lys, Leu, Met, Asn, Pro, Gln, Arg, Ser, Thr, Val, Trp, or Tyr
RMXSLXQXSTXPRRSG

SEQ ID NO: 137485 - protein, 16 aa, Artificial Sequence
  Description of Artificial Sequence: Synthetic peptide
  Seed: RMCSLMQGSTLPRRSG
  Core: LMQGSTLPR
  misc_feature (5)..(5): Xaa can be Ala, Cys, Phe, His, Ile, Leu, Met, Pro, Gln, Thr, Val, Trp, or Tyr
  misc_feature (8)..(8): Xaa can be Ala, Cys, Asp, Glu, Phe, Gly, His, Ile, Lys, Leu, Met, Asn, Gln, Arg, Ser, Thr, Val, Trp, or Tyr
  misc_feature (10)..(10): Xaa can be Ala, Cys, Asp, Glu, Phe, Gly, His, Ile, Lys, Leu, Met, Asn, Pro, Gln, Arg, Ser, Thr, Val, Trp, or Tyr
  misc_feature (13)..(13): Xaa can be Ala, Cys, Asp, Glu, Phe, Gly, His, Ile, Lys, Leu, Met, Asn, Pro, Gln, Arg, Ser, Thr, Val, Trp, or Tyr
RMCSXMQXSXLPXRSG

SEQ ID NO: 137486 - protein, 16 aa, Artificial Sequence
  Description of Artificial Sequence: Synthetic peptide
  Seed: RMCSLMQGSTLPRRSG
  Core: MQGSTLPRR
  misc_feature (6)..(6): Xaa can be Ala, Cys, Asp, Glu, Phe, Gly, His, Ile, Lys, Leu, Met, Asn, Pro, Gln, Arg, Ser, Thr, Val, Trp, or Tyr
  misc_feature (9)..(9): Xaa can be Ala, Cys, Asp, Glu, Phe, Gly, His, Ile, Lys, Leu, Met, Asn, Pro, Gln, Arg, Ser, Thr, Val, Trp, or Tyr
  misc_feature (11)..(11): Xaa can be Ala, Cys, Asp, Glu, Phe, Gly, His, Ile, Leu, Met, Asn, Pro, Gln, Arg, Ser, Thr, Val, Trp, or Tyr
  misc_feature (14)..(14): Xaa can be Ala, Cys, Asp, Glu, Phe, Gly, His, Ile, Lys, Leu, Met, Asn, Pro, Gln, Arg, Ser, Thr, Val, Trp, or Tyr
RMCSLXQGXTXPRXSG

SEQ ID NO: 137487 - protein, 16 aa, Artificial Sequence
  Description of Artificial Sequence: Synthetic peptide
  Seed: RMCSLMQGSTLPRRSG
  Core: QGSTLPRRS
  misc_feature (7)..(7): Xaa can be Ala, Cys, Asp, Glu, Phe, Gly, His, Ile, Lys, Leu, Met, Asn, Pro, Gln, Arg, Ser, Thr, Val, Trp, or Tyr
  misc_feature (10)..(10): Xaa can be Ala, Cys, Asp, Glu, Phe, Gly, His, Ile, Lys, Leu, Met, Asn, Pro, Gln, Arg, Ser, Thr, Val, Trp, or Tyr
  misc_feature (12)..(12): Xaa can be Ala, Cys, Asp, Glu, Phe, Gly, His, Ile, Lys, Leu, Met, Asn, Pro, Gln, Arg, Ser, Thr, Val, Trp, or Tyr
  misc_feature (15)..(15): Xaa can be Ala, Cys, Asp, Glu, Phe, Gly, His, Ile, Lys, Leu, Met, Asn, Pro, Gln, Arg, Ser, Thr, Val, Trp, or Tyr
RMCSLMXGSXLXRRXG

SEQ ID NO: 137488 - protein, 17 aa, Artificial Sequence
  Description of Artificial Sequence: Synthetic peptide
  Seed: RMCSLMQGSTLPRRSGA
  Core: CSLMQGSTL
  misc_feature (3)..(3): Xaa can be Ala, Cys, Asp, Glu, Phe, Gly, His, Ile, Lys, Leu, Met, Asn, Pro, Gln, Arg, Ser, Thr, Val, Trp, or Tyr
  misc_feature (6)..(6): Xaa can be Ala, Cys, Asp, Glu, Phe, Gly, His, Ile, Lys, Leu, Met, Asn, Pro, Gln, Arg, Ser, Thr, Val, Trp, or Tyr
  misc_feature (8)..(8): Xaa can be Ala, Cys, Asp, Glu, Phe, Gly, His, Ile, Lys, Leu, Met, Asn, Pro, Gln, Arg, Ser, Thr, Val, Trp, or Tyr
  misc_feature (11)..(11): Xaa can be Ala, Cys, Asp, Glu, Phe, Gly, His, Ile, Lys, Leu, Met, Asn, Pro, Gln, Arg, Ser, Thr, Val, Trp, or Tyr
RMXSLXQXSTXPRRSGA

SEQ ID NO: 137489 - protein, 17 aa, Artificial Sequence
  Description of Artificial Sequence: Synthetic peptide
  Seed: RMCSLMQGSTLPRRSGA
  Core: LMQGSTLPR
  misc_feature (5)..(5): Xaa can be Ala, Cys, Asp, Glu, Phe, Gly, His, Ile, Lys, Leu, Met, Asn, Pro, Gln, Arg, Ser, Thr, Val, Trp, or Tyr
  misc_feature (8)..(8): Xaa can be Ala, Cys, Asp, Glu, Phe, Gly, His, Ile, Lys, Leu, Met, Asn, Pro, Gln, Arg, Ser, Thr, Val, Trp, or Tyr
  misc_feature (10)..(10): Xaa can be Ala, Cys, Asp, Glu, Phe, Gly, His, Ile, Lys, Leu, Met, Asn, Pro, Gln, Arg, Ser, Thr, Val, Trp, or Tyr
  misc_feature (13)..(13): Xaa can be Ala, Cys, Asp, Glu, Phe, Gly, His, Ile, Lys, Leu, Met, Asn, Pro, Gln, Arg, Ser, Thr, Val, Trp, or Tyr
RMCSXMQXSXLPXRSGA

SEQ ID NO: 137490 - protein, 17 aa, Artificial Sequence
  Description of Artificial Sequence: Synthetic peptide
  Seed: RMCSLMQGSTLPRRSGA
  Core: MQGSTLPRR
  misc_feature (6)..(6): Xaa can be Ala, Cys, Glu, Phe, His, Ile, Lys, Leu, Met, Gln, Arg, Ser, Thr, Val, Trp, or Tyr
  misc_feature (9)..(9): Xaa can be Ala, Cys, Asp, Glu, Phe, Gly, His, Ile, Lys, Leu, Met, Asn, Pro, Gln, Arg, Ser, Thr, Val, Trp, or Tyr
  misc_feature (11)..(11): Xaa can be Ala, Cys, Glu, Phe, His, Ile, Lys, Leu, Met, Asn, Pro, Gln, Arg, Ser, Thr, Val, Trp, or Ty r
  misc_feature (14)..(14): Xaa can be Ala, Cys, Asp, Glu, Phe, Gly, His, Ile, Lys, Leu, Met, Asn, Pro, Gln, Arg, Ser, Thr, Val, Trp, or Tyr
RMCSLXQGXTXPRXSGA

SEQ ID NO: 137491 - protein, 17 aa, Artificial Sequence
  Description of Artificial Sequence: Synthetic peptide
  Seed: RMCSLMQGSTLPRRSGA
  Core: QGSTLPRRS
  misc_feature (7)..(7): Xaa can be Ala, Cys, Asp, Glu, Phe, Gly, His, Ile, Lys, Leu, Met, Asn, Pro, Gln, Arg, Ser, Thr, Val, Trp, or Tyr
  misc_feature (10)..(10): Xaa can be Ala, Cys, Asp, Glu, Phe, Gly, His, Ile, Lys, Leu, Met, Asn, Pro, Gln, Arg, Ser, Thr, Val, Trp, or Tyr
  misc_feature (12)..(12): Xaa can be Ala, Cys, Asp, Glu, Phe, Gly, His, Ile, Lys, Leu, Met, Asn, Pro, Gln, Arg, Ser, Thr, Val, Trp, or Tyr
  misc_feature (15)..(15): Xaa can be Ala, Cys, Asp, Glu, Phe, Gly, His, Ile, Lys, Leu, Met, Asn, Pro, Gln, Arg, Ser, Thr, Val, Trp, or Tyr
RMCSLMXGSXLXRRXGA

SEQ ID NO: 137492 - protein, 18 aa, Artificial Sequence
  Description of Artificial Sequence: Synthetic peptide
  Seed: RMCSLMQGSTLPRRSGAA
  Core: CSLMQGSTL
  misc_feature (3)..(3): Xaa can be Cys, Phe, Ile, Leu, Met, Val, Trp, or Tyr
  misc_feature (6)..(6): Xaa can be Ala, Cys, Glu, Phe, Gly, His, Ile, Lys, Leu, Met, Asn, Gln, Arg, Ser, Thr, Val, Trp, or Ty r
  misc_feature (8)..(8): Xaa can be Ala, Cys, Asp, Glu, Gly, His, Ile, Lys, Leu, Met, Asn, Pro, Gln, Arg, Ser, Thr, Val, Trp, or Tyr
  misc_feature (11)..(11): Xaa can be Ala, Cys, Asp, Glu, Phe, Gly, His, Ile, Lys, Leu, Met, Asn, Pro, Gln, Arg, Ser, Thr, Val, Trp, or Tyr
RMXSLXQXSTXPRRSGAA

SEQ ID NO: 137493 - protein, 18 aa, Artificial Sequence
  Description of Artificial Sequence: Synthetic peptide
  Seed: RMCSLMQGSTLPRRSGAA
  Core: QGSTLPRRS
  misc_feature (7)..(7): Xaa can be Ala, Cys, Asp, Glu, Phe, Gly, His, Ile, Lys, Leu, Met, Asn, Pro, Gln, Arg, Ser, Thr, Val, Trp, or Tyr
  misc_feature (10)..(10): Xaa can be Ala, Cys, Asp, Glu, Phe, Gly, His, Ile, Lys, Leu, Met, Asn, Pro, Gln, Arg, Ser, Thr, Val, Trp, or Tyr
  misc_feature (12)..(12): Xaa can be Ala, Cys, Asp, Glu, Phe, Gly, His, Ile, Lys, Leu, Met, Asn, Pro, Gln, Ser, Thr, Val, or Ty r
  misc_feature (15)..(15): Xaa can be Ala, Cys, Asp, Glu, Phe, Gly, His, Ile, Lys, Leu, Met, Asn, Pro, Gln, Arg, Ser, Thr, Val, Trp, or Tyr
RMCSLMXGSXLXRRXGAA

SEQ ID NO: 137494 - protein, 19 aa, Artificial Sequence
  Description of Artificial Sequence: Synthetic peptide
  Seed: RMCSLMQGSTLPRRSGAAG
  Core: CSLMQGSTL
  misc_feature (3)..(3): Xaa can be Ala, Cys, Asp, Glu, Phe, Gly, His, Ile, Lys, Leu, Met, Asn, Pro, Gln, Arg, Ser, Thr, Val, Trp, or Tyr
  misc_feature (6)..(6): Xaa can be Ala, Cys, Asp, Glu, Phe, Gly, His, Ile, Lys, Leu, Met, Asn, Pro, Gln, Arg, Ser, Thr, Val, Trp, or Tyr
  misc_feature (8)..(8): Xaa can be Ala, Cys, Asp, Glu, Phe, Gly, His, Ile, Lys, Leu, Met, Asn, Pro, Gln, Arg, Ser, Thr, Val, Trp, or Tyr
  misc_feature (11)..(11): Xaa can be Ala, Cys, Asp, Glu, Phe, Gly, His, Ile, Lys, Leu, Met, Asn, Pro, Gln, Arg, Ser, Thr, Val, Trp, or Tyr
RMXSLXQXSTXPRRSGAAG

SEQ ID NO: 137495 - protein, 19 aa, Artificial Sequence
  Description of Artificial Sequence: Synthetic peptide
  Seed: RMCSLMQGSTLPRRSGAAG
  Core: QGSTLPRRS
  misc_feature (7)..(7): Xaa can be Ala, Cys, Asp, Glu, Phe, Gly, His, Ile, Lys, Leu, Met, Asn, Pro, Gln, Arg, Ser, Thr, Val, Trp, or Tyr
  misc_feature (10)..(10): Xaa can be Ala, Cys, Asp, Glu, Phe, Gly, His, Ile, Lys, Leu, Met, Asn, Pro, Gln, Arg, Ser, Thr, Val, Trp, or Tyr
  misc_feature (12)..(12): Xaa can be Ala, Cys, Asp, Glu, Phe, Gly, His, Ile, Lys, Leu, Met, Asn, Pro, Gln, Arg, Ser, Thr, Val, Trp, or Tyr
  misc_feature (15)..(15): Xaa can be Ala, Cys, Asp, Glu, Phe, Gly, His, Ile, Lys, Leu, Met, Asn, Pro, Gln, Arg, Ser, Thr, Val, Trp, or Tyr
RMCSLMXGSXLXRRXGAAG

SEQ ID NO: 137496 - protein, 20 aa, Artificial Sequence
  Description of Artificial Sequence: Synthetic peptide
  Seed: RMCSLMQGSTLPRRSGAAGA
  Core: CSLMQGSTL
  misc_feature (3)..(3): Xaa can be Ala, Cys, Asp, Glu, Phe, Gly, His, Ile, Lys, Leu, Met, Asn, Pro, Gln, Arg, Ser, Thr, Val, Trp, or Tyr
  misc_feature (6)..(6): Xaa can be Ala, Cys, Asp, Glu, Phe, Gly, His, Ile, Lys, Leu, Met, Asn, Pro, Gln, Arg, Ser, Thr, Val, Trp, or Tyr
  misc_feature (8)..(8): Xaa can be Ala, Cys, Asp, Glu, Phe, Gly, His, Ile, Lys, Leu, Met, Asn, Pro, Gln, Arg, Ser, Thr, Val, Trp, or Tyr
  misc_feature (11)..(11): Xaa can be Ala, Cys, Asp, Glu, Phe, Gly, His, Ile, Lys, Leu, Met, Asn, Pro, Gln, Arg, Ser, Thr, Val, Trp, or Tyr
RMXSLXQXSTXPRRSGAAGA

SEQ ID NO: 137497 - protein, 20 aa, Artificial Sequence
  Description of Artificial Sequence: Synthetic peptide
  Seed: RMCSLMQGSTLPRRSGAAGA
  Core: LMQGSTLPR
  misc_feature (5)..(5): Xaa can be Ala, Cys, Phe, Ile, Leu, Met, Pro, Thr, Val, Trp, or Tyr
  misc_feature (8)..(8): Xaa can be Ala, Cys, Asp, Glu, Phe, Gly, His, Ile, Lys, Leu, Met, Asn, Pro, Gln, Arg, Ser, Thr, Val, Trp, or Tyr
  misc_feature (10)..(10): Xaa can be Ala, Cys, Asp, Glu, Phe, Gly, His, Ile, Lys, Leu, Met, Asn, Pro, Gln, Arg, Ser, Thr, Val, Trp, or Tyr
  misc_feature (13)..(13): Xaa can be Ala, Cys, Asp, Glu, Phe, Gly, His, Ile, Lys, Leu, Met, Asn, Pro, Gln, Arg, Ser, Thr, Val, Trp, or Tyr
RMCSXMQXSXLPXRSGAAGA

SEQ ID NO: 137498 - protein, 20 aa, Artificial Sequence
  Description of Artificial Sequence: Synthetic peptide
  Seed: RMCSLMQGSTLPRRSGAAGA
  Core: MQGSTLPRR
  misc_feature (6)..(6): Xaa can be Ala, Cys, Asp, Glu, Phe, Gly, His, Ile, Lys, Leu, Met, Asn, Pro, Gln, Arg, Ser, Thr, Val, Trp, or Tyr
  misc_feature (9)..(9): Xaa can be Ala, Cys, Asp, Glu, Phe, Gly, His, Ile, Lys, Leu, Met, Asn, Pro, Gln, Arg, Ser, Thr, Val, Trp, or Tyr
  misc_feature (11)..(11): Xaa can be Ala, Cys, Asp, Glu, Phe, Gly, His, Ile, Lys, Leu, Met, Asn, Pro, Gln, Arg, Ser, Thr, Val, Trp, or Tyr
  misc_feature (14)..(14): Xaa can be Ala, Cys, Asp, Glu, Phe, Gly, His, Ile, Lys, Leu, Met, Asn, Pro, Gln, Arg, Ser, Thr, Val, Trp, or Tyr
RMCSLXQGXTXPRXSGAAGA

SEQ ID NO: 137499 - protein, 20 aa, Artificial Sequence
  Description of Artificial Sequence: Synthetic peptide
  Seed: RMCSLMQGSTLPRRSGAAGA
  Core: PRRSGAAGA
  misc_feature (12)..(12): Xaa can be Ala, Cys, Asp, Glu, Phe, Gly, His, Ile, Leu, Met, Asn, Pro, Gln, Arg, Ser, Thr, Val, Trp, or Tyr
  misc_feature (15)..(15): Xaa can be Ala, Cys, Phe, Gly, His, Ile, Leu, Met, Asn, Pro, Gln, Ser, Thr, Val, Trp, or Tyr
  misc_feature (17)..(17): Xaa can be Ala, Cys, Glu, Phe, Gly, His, Ile, Leu, Met, Asn, Pro, Ser, Thr, Val, or Tyr
  misc_feature (20)..(20): Xaa can be Ala, Cys, Asp, Glu, Phe, Gly, His, Ile, Lys, Leu, Met, Asn, Pro, Gln, Arg, Ser, Thr, Val, Trp, or Tyr
RMCSLMQGSTLXRRXGXAGX

SEQ ID NO: 137500 - protein, 20 aa, Artificial Sequence
  Description of Artificial Sequence: Synthetic peptide
  Seed: RMCSLMQGSTLPRRSGAAGA
  Core: QGSTLPRRS
  misc_feature (7)..(7): Xaa can be Ala, Cys, Asp, Glu, Phe, Gly, His, Ile, Lys, Leu, Met, Asn, Pro, Gln, Arg, Ser, Thr, Val, Trp, or Tyr
  misc_feature (10)..(10): Xaa can be Ala, Cys, Asp, Glu, Phe, Gly, His, Ile, Lys, Leu, Met, Asn, Pro, Gln, Arg, Ser, Thr, Val, Trp, or Tyr
  misc_feature (12)..(12): Xaa can be Ala, Cys, Asp, Glu, Phe, Gly, His, Ile, Lys, Leu, Met, Asn, Pro, Gln, Arg, Ser, Thr, Val, Trp, or Tyr
  misc_feature (15)..(15): Xaa can be Ala, Cys, Asp, Glu, Phe, Gly, His, Ile, Lys, Leu, Met, Asn, Pro, Gln, Arg, Ser, Thr, Val, Trp, or Tyr
RMCSLMXGSXLXRRXGAAGA

SEQ ID NO: 137501 - protein, 20 aa, Artificial Sequence
  Description of Artificial Sequence: Synthetic peptide
  Seed: RMCSLMQGSTLPRRSGAAGA
  Core: TLPRRSGAA
  misc_feature (10)..(10): Xaa can be Ala, Cys, Asp, Phe, Gly, His, Ile, Lys, Leu, Met, Asn, Pro, Gln, Arg, Ser, Thr, Val, Trp, or Tyr
  misc_feature (13)..(13): Xaa can be Ala, Cys, Asp, Glu, Phe, Gly, His, Ile, Lys, Leu, Met, Asn, Pro, Gln, Arg, Ser, Thr, Val, Trp, or Tyr
  misc_feature (15)..(15): Xaa can be Ala, Cys, Asp, Glu, Phe, Gly, His, Ile, Lys, Leu, Met, Asn, Pro, Gln, Arg, Ser, Thr, Val, Trp, or Tyr
  misc_feature (18)..(18): Xaa can be Ala, Cys, Asp, Glu, Phe, Gly, His, Ile, Lys, Leu, Met, Asn, Pro, Gln, Arg, Ser, Thr, Val, Trp, or Tyr
RMCSLMQGSXLPXRXGAXGA

SEQ ID NO: 137502 - protein, 14 aa, Artificial Sequence
  Description of Artificial Sequence: Synthetic peptide
  Seed: SLMQGSTLPRRSGA
  Core: QGSTLPRRS
  misc_feature (4)..(4): Xaa can be Ala, Cys, Asp, Glu, Phe, Gly, His, Ile, Lys, Leu, Met, Asn, Pro, Gln, Ser, Thr, Val, Trp, or Tyr
  misc_feature (7)..(7): Xaa can be Ala, Cys, Asp, Glu, Phe, Gly, His, Ile, Leu, Met, Asn, Pro, Gln, Ser, Thr, Val, Trp, or Ty r
  misc_feature (9)..(9): Xaa can be Ala, Cys, Asp, Glu, Phe, Gly, Ile, Leu, Met, Asn, Pro, Gln, Ser, Thr, Val, or Tyr
  misc_feature (12)..(12): Xaa can be Ala, Cys, Asp, Glu, Phe, Gly, His, Ile, Lys, Leu, Met, Asn, Pro, Gln, Arg, Ser, Thr, Val, Trp, or Tyr
SLMXGSXLXRRXGA

SEQ ID NO: 137503 - protein, 15 aa, Artificial Sequence
  Description of Artificial Sequence: Synthetic peptide
  Seed: SLMQGSTLPRRSGAA
  Core: GSTLPRRSG
  misc_feature (5)..(5): Xaa can be Ala, Cys, Asp, Glu, Phe, Gly, His, Ile, Lys, Leu, Met, Asn, Pro, Gln, Arg, Ser, Thr, Val, Trp, or Tyr
  misc_feature (8)..(8): Xaa can be Ala, Cys, Asp, Glu, Phe, Gly, His, Ile, Lys, Leu, Met, Asn, Pro, Gln, Arg, Ser, Thr, Val, Trp, or Tyr
  misc_feature (10)..(10): Xaa can be Ala, Cys, Asp, Glu, Phe, Gly, His, Ile, Lys, Leu, Met, Asn, Pro, Gln, Arg, Ser, Thr, Val, Trp, or Tyr
  misc_feature (13)..(13): Xaa can be Ala, Cys, Asp, Glu, Phe, Gly, His, Ile, Lys, Leu, Met, Asn, Pro, Gln, Arg, Ser, Thr, Val, Trp, or Tyr
SLMQXSTXPXRSXAA

SEQ ID NO: 137504 - protein, 15 aa, Artificial Sequence
  Description of Artificial Sequence: Synthetic peptide
  Seed: SLMQGSTLPRRSGAA
  Core: MQGSTLPRR
  misc_feature (3)..(3): Xaa can be Ala, Cys, Asp, Phe, Gly, His, Ile, Lys, Leu, Met, Asn, Pro, Gln, Arg, Ser, Thr, Val, Trp, or Tyr
  misc_feature (6)..(6): Xaa can be Ala, Cys, Asp, Glu, Phe, Gly, His, Ile, Lys, Leu, Met, Asn, Pro, Gln, Arg, Ser, Thr, Val, Trp, or Tyr
  misc_feature (8)..(8): Xaa can be Ala, Cys, Asp, Glu, Phe, Gly, His, Ile, Lys, Leu, Met, Asn, Pro, Gln, Arg, Ser, Thr, Val, Trp, or Tyr
  misc_feature (11)..(11): Xaa can be Ala, Cys, Asp, Glu, Phe, Gly, His, Ile, Lys, Leu, Met, Asn, Pro, Gln, Arg, Ser, Thr, Val, Trp, or Tyr
SLXQGXTXPRXSGAA

SEQ ID NO: 137505 - protein, 15 aa, Artificial Sequence
  Description of Artificial Sequence: Synthetic peptide
  Seed: SLMQGSTLPRRSGAA
  Core: QGSTLPRRS
  misc_feature (4)..(4): Xaa can be Ala, Cys, Asp, Glu, Phe, Gly, His, Ile, Lys, Leu, Met, Asn, Pro, Gln, Arg, Ser, Thr, Val, Trp, or Tyr
  misc_feature (7)..(7): Xaa can be Ala, Cys, Asp, Glu, Phe, Gly, His, Ile, Lys, Leu, Met, Asn, Pro, Gln, Arg, Ser, Thr, Val, Trp, or Tyr
  misc_feature (9)..(9): Xaa can be Ala, Cys, Asp, Glu, Phe, Gly, His, Ile, Lys, Leu, Met, Asn, Pro, Gln, Arg, Ser, Thr, Val, Trp, or Tyr
  misc_feature (12)..(12): Xaa can be Ala, Cys, Asp, Glu, Phe, Gly, His, Ile, Lys, Leu, Met, Asn, Pro, Gln, Arg, Ser, Thr, Val, Trp, or Tyr
SLMXGSXLXRRXGAA

SEQ ID NO: 137506 - protein, 16 aa, Artificial Sequence
  Description of Artificial Sequence: Synthetic peptide
  Seed: SLMQGSTLPRRSGAAG
  Core: QGSTLPRRS
  misc_feature (4)..(4): Xaa can be Ala, Cys, Asp, Glu, Phe, Gly, His, Ile, Lys, Leu, Met, Asn, Pro, Gln, Arg, Ser, Thr, Val, Trp, or Tyr
  misc_feature (7)..(7): Xaa can be Ala, Cys, Asp, Glu, Phe, Gly, His, Ile, Lys, Leu, Met, Asn, Pro, Gln, Arg, Ser, Thr, Val, Trp, or Tyr
  misc_feature (9)..(9): Xaa can be Ala, Cys, Asp, Glu, Phe, Gly, His, Ile, Lys, Leu, Met, Asn, Pro, Gln, Arg, Ser, Thr, Val, Trp, or Tyr
  misc_feature (12)..(12): Xaa can be Ala, Cys, Asp, Glu, Phe, Gly, His, Ile, Lys, Leu, Met, Asn, Pro, Gln, Arg, Ser, Thr, Val, Trp, or Tyr
SLMXGSXLXRRXGAAG

SEQ ID NO: 137507 - protein, 17 aa, Artificial Sequence
  Description of Artificial Sequence: Synthetic peptide
  Seed: SLMQGSTLPRRSGAAGA
  Core: MQGSTLPRR
  misc_feature (3)..(3): Xaa can be Phe, Ile, Leu, Met, Val, Trp, or Tyr
  misc_feature (6)..(6): Xaa can be Ala, Cys, Asp, Glu, Phe, Gly, His, Ile, Lys, Leu, Met, Asn, Gln, Arg, Ser, Thr, Val, Trp, or Tyr
  misc_feature (8)..(8): Xaa can be Ala, Cys, Phe, Gly, His, Ile, Lys, Leu, Met, Asn, Pro, Gln, Arg, Ser, Thr, Val, Trp, or Ty r
  misc_feature (11)..(11): Xaa can be Ala, Cys, Asp, Glu, Phe, Gly, His, Ile, Lys, Leu, Met, Asn, Pro, Gln, Arg, Ser, Thr, Val, Trp, or Tyr
SLXQGXTXPRXSGAAGA

SEQ ID NO: 137508 - protein, 17 aa, Artificial Sequence
  Description of Artificial Sequence: Synthetic peptide
  Seed: SLMQGSTLPRRSGAAGA
  Core: PRRSGAAGA
  misc_feature (9)..(9): Xaa can be Ala, Cys, Asp, Glu, Phe, Gly, His, Ile, Lys, Leu, Met, Asn, Pro, Gln, Arg, Ser, Thr, Val, Trp, or Tyr
  misc_feature (12)..(12): Xaa can be Ala, Cys, Phe, Gly, His, Ile, Leu, Met, Asn, Pro, Ser, Thr, Val, Trp, or Tyr
  misc_feature (14)..(14): Xaa can be Ala, Cys, Asp, Glu, Phe, Gly, His, Ile, Leu, Met, Asn, Pro, Gln, Ser, Thr, Val, Trp, or Ty r
  misc_feature (17)..(17): Xaa can be Ala, Cys, Asp, Glu, Phe, Gly, His, Ile, Lys, Leu, Met, Asn, Pro, Gln, Arg, Ser, Thr, Val, Trp, or Tyr
SLMQGSTLXRRXGXAGX

SEQ ID NO: 137509 - protein, 17 aa, Artificial Sequence
  Description of Artificial Sequence: Synthetic peptide
  Seed: SLMQGSTLPRRSGAAGA
  Core: QGSTLPRRS
  misc_feature (4)..(4): Xaa can be Ala, Cys, Asp, Glu, Phe, Gly, His, Ile, Lys, Leu, Met, Asn, Pro, Gln, Arg, Ser, Thr, Val, Trp, or Tyr
  misc_feature (7)..(7): Xaa can be Ala, Cys, Asp, Glu, Phe, Gly, His, Ile, Leu, Met, Asn, Pro, Gln, Ser, Thr, Val, Trp, or Ty r
  misc_feature (9)..(9): Xaa can be Ala, Cys, Asp, Glu, Phe, Gly, Ile, Lys, Leu, Met, Asn, Pro, Gln, Ser, Thr, Val, or Tyr
  misc_feature (12)..(12): Xaa can be Ala, Cys, Asp, Glu, Phe, Gly, His, Ile, Lys, Leu, Met, Asn, Pro, Gln, Arg, Ser, Thr, Val, Trp, or Tyr
SLMXGSXLXRRXGAAGA

SEQ ID NO: 137510 - protein, 14 aa, Artificial Sequence
  Description of Artificial Sequence: Synthetic peptide
  Seed: YERMCNILKGKFQT
  Core: MCNILKGKF
  misc_feature (4)..(4): Xaa can be Cys, Phe, Ile, Leu, Met, Val, Trp, or Tyr
  misc_feature (7)..(7): Xaa can be Ala, Cys, Glu, Phe, Gly, His, Ile, Lys, Leu, Met, Asn, Gln, Arg, Ser, Thr, Val, Trp, or Ty r
  misc_feature (9)..(9): Xaa can be Ala, Phe, Gly, His, Ile, Lys, Leu, Met, Asn, Pro, Gln, Arg, Ser, Thr, Val, Trp, or Tyr
  misc_feature (12)..(12): Xaa can be Ala, Cys, Asp, Glu, Phe, Gly, His, Ile, Lys, Leu, Met, Asn, Pro, Gln, Arg, Ser, Thr, Val, Trp, or Tyr
YERXCNXLXGKXQT

SEQ ID NO: 137511 - protein, 15 aa, Artificial Sequence
  Description of Artificial Sequence: Synthetic peptide
  Seed: YERMCNILKGKFQTA
  Core: CNILKGKFQ
  misc_feature (5)..(5): Xaa can be Ala, Cys, Asp, Glu, Phe, Gly, His, Ile, Lys, Leu, Met, Asn, Pro, Gln, Arg, Ser, Thr, Val, Trp, or Tyr
  misc_feature (8)..(8): Xaa can be Ala, Cys, Asp, Glu, Phe, Gly, His, Ile, Lys, Leu, Met, Asn, Pro, Gln, Arg, Ser, Thr, Val, Trp, or Tyr
  misc_feature (10)..(10): Xaa can be Ala, Cys, Asp, Glu, Phe, Gly, His, Ile, Lys, Leu, Met, Asn, Pro, Gln, Arg, Ser, Thr, Val, Trp, or Tyr
  misc_feature (13)..(13): Xaa can be Ala, Cys, Asp, Glu, Phe, Gly, His, Ile, Lys, Leu, Met, Asn, Pro, Gln, Arg, Ser, Thr, Val, Trp, or Tyr
YERMXNIXKXKFXTA

SEQ ID NO: 137512 - protein, 15 aa, Artificial Sequence
  Description of Artificial Sequence: Synthetic peptide
  Seed: YERMCNILKGKFQTA
  Core: ILKGKFQTA
  misc_feature (7)..(7): Xaa can be Ala, Cys, Asp, Glu, Phe, Gly, His, Ile, Lys, Leu, Met, Asn, Pro, Gln, Arg, Ser, Thr, Val, Trp, or Tyr
  misc_feature (10)..(10): Xaa can be Ala, Cys, Asp, Glu, Phe, Gly, His, Ile, Lys, Leu, Met, Asn, Pro, Gln, Arg, Ser, Thr, Val, Trp, or Tyr
  misc_feature (12)..(12): Xaa can be Ala, Cys, Asp, Glu, Phe, Gly, His, Ile, Lys, Leu, Met, Asn, Pro, Gln, Arg, Ser, Thr, Val, Trp, or Tyr
  misc_feature (15)..(15): Xaa can be Ala, Cys, Asp, Glu, Phe, Gly, His, Ile, Lys, Leu, Met, Asn, Pro, Gln, Arg, Ser, Thr, Val, Trp, or Tyr
YERMCNXLKXKXQTX

SEQ ID NO: 137513 - protein, 15 aa, Artificial Sequence
  Description of Artificial Sequence: Synthetic peptide
  Seed: YERMCNILKGKFQTA
  Core: MCNILKGKF
  misc_feature (4)..(4): Xaa can be Ala, Cys, Asp, Glu, Phe, Gly, His, Ile, Lys, Leu, Met, Asn, Pro, Gln, Arg, Ser, Thr, Val, Trp, or Tyr
  misc_feature (7)..(7): Xaa can be Ala, Cys, Asp, Glu, Phe, Gly, His, Ile, Lys, Leu, Met, Asn, Pro, Gln, Arg, Ser, Thr, Val, Trp, or Tyr
  misc_feature (9)..(9): Xaa can be Ala, Cys, Asp, Glu, Phe, Gly, His, Ile, Lys, Leu, Met, Asn, Pro, Gln, Arg, Ser, Thr, Val, Trp, or Tyr
  misc_feature (12)..(12): Xaa can be Ala, Cys, Asp, Glu, Phe, Gly, His, Ile, Lys, Leu, Met, Asn, Pro, Gln, Arg, Ser, Thr, Val, Trp, or Tyr
YERXCNXLXGKXQTA

SEQ ID NO: 137514 - protein, 548 aa, Artificial Sequence
  Description of Artificial Sequence: Synthetic polypeptide
MRVTAPRTLILLLSGALALTETWAGSGGSGGGGSGGCALMQGSTMGGSGGGGSGGCALMQGSTYGGSGGGGSGGGMDPRMCSVGGSGGGGSGGILKGKFQTVGGSGGGGSGGLPRRSGAAVGGSGGGGSGGSFMQGSTLPRGGSGGGGSGGSSLPRRSGKGGSGGGGSGGSTMQGSTLPKGGSGGGGSGGSVMQGSTLPKGGSGGGGSGGYERMCNILGGSGGGGSGGDPRMCSLMMGSALIRRAGAAGGSGGGGSGGDPRMFSLMQSSTVPRGGSGGGGSGGMCSIMQISSLPVRSGGGSGGGGSGGMDPRMCSLFQGTTFPRVSGAGGSGGGGSGGMQGSTLFRRGGAAGAGGSGGGGSGGMQGSTLIRRGGAAGAGGSGGGGSGGPRMISLFQASTLPRRGGSGGGGSGGRMCSLMIGSALARRAGAAGAGGSGGGGSGGYERICNILRGKAQTAGGSGGGGSGGYERICNMLRGKAQTAGGSLGGGGSGIVGIVAGLAVLAVVVIGAVVATVMCRRKSSGGKGGSYSQAASSDSAQGSDVSLTA

SEQ ID NO: 137515 - protein, 9 aa, Artificial Sequence
  Description of Artificial Sequence: Synthetic peptide
  Seed: MMMGMFNML
MMMGMFNMM

SEQ ID NO: 137516 - protein, 10 aa, Artificial Sequence
  Description of Artificial Sequence: Synthetic peptide
  Seed: FSMELPSFGV
FAMELPSFGL

SEQ ID NO: 137517 - protein, 9 aa, Artificial Sequence
  Description of Artificial Sequence: Synthetic peptide
  Seed: FPYTGDPPY
FMYTGDPPY

SEQ ID NO: 137518 - protein, 9 aa, Artificial Sequence
  Description of Artificial Sequence: Synthetic peptide
  Seed: MMMGMFNML
MQMGMFNML

SEQ ID NO: 137519 - protein, 10 aa, Artificial Sequence
  Description of Artificial Sequence: Synthetic peptide
  Seed: FSMELPSFGV
FAMELPSFGY

SEQ ID NO: 137520 - protein, 9 aa, Artificial Sequence
  Description of Artificial Sequence: Synthetic peptide
  Seed: MELPSFGVS
MELPSFGVA

SEQ ID NO: 137521 - protein, 9 aa, Artificial Sequence
  Description of Artificial Sequence: Synthetic peptide
  Seed: FPYTGDPPY
FEYTGDPPF

SEQ ID NO: 137522 - protein, 9 aa, Artificial Sequence
  Description of Artificial Sequence: Synthetic peptide
  Seed: NAISTTFPY
NEISTTFPY

SEQ ID NO: 137523 - protein, 10 aa, Artificial Sequence
  Description of Artificial Sequence: Synthetic peptide
  Seed: FPSSSYRRPV
FPSSSYRRPA

SEQ ID NO: 137524 - protein, 10 aa, Artificial Sequence
  Description of Artificial Sequence: Synthetic peptide
  Seed: RALTLNTMTK
RVLTLNTMTK

SEQ ID NO: 137525 - protein, 9 aa, Artificial Sequence
  Description of Artificial Sequence: Synthetic peptide
  Seed: NAISTTFPY
NEISTTFPM

SEQ ID NO: 137526 - protein, 9 aa, Artificial Sequence
  Description of Artificial Sequence: Synthetic peptide
  Seed: MFNMLSTVL
MMNMLSTVL

SEQ ID NO: 137527 - protein, 10 aa, Artificial Sequence
  Description of Artificial Sequence: Synthetic peptide
  Seed: RALTLNTMTK
RSLTLNTMTK

SEQ ID NO: 137528 - protein, 9 aa, Artificial Sequence
  Description of Artificial Sequence: Synthetic peptide
  Seed: MFNMLSTVL
MRNMLSTVM

SEQ ID NO: 137529 - protein, 9 aa, Artificial Sequence
  Description of Artificial Sequence: Synthetic peptide
  Seed: MMMGMFNML
MAMGMFNMF

SEQ ID NO: 137530 - protein, 9 aa, Artificial Sequence
  Description of Artificial Sequence: Synthetic peptide
  Seed: MMMGMFNML
MSMGMFNMM

SEQ ID NO: 137531 - protein, 9 aa, Artificial Sequence
  Description of Artificial Sequence: Synthetic peptide
  Seed: MSIGVTVIK
MMIGVTVIK

SEQ ID NO: 137532 - protein, 9 aa, Artificial Sequence
  Description of Artificial Sequence: Synthetic peptide
  Seed: MMMGMFNML
MYMGMFNMM

SEQ ID NO: 137533 - protein, 10 aa, Artificial Sequence
  Description of Artificial Sequence: Synthetic peptide
  Seed: MARLGKGYMF
MPRLGKGYML

SEQ ID NO: 137534 - protein, 9 aa, Artificial Sequence
  Description of Artificial Sequence: Synthetic peptide
  Seed: MFNMLSTVL
MRNMLSTVL

SEQ ID NO: 137535 - protein, 9 aa, Artificial Sequence
  Description of Artificial Sequence: Synthetic peptide
  Seed: MMMGMFNML
MYMGMFNMV

SEQ ID NO: 137536 - protein, 9 aa, Artificial Sequence
  Description of Artificial Sequence: Synthetic peptide
  Seed: MMMGMFNML
MAMGMFNML

SEQ ID NO: 137537 - protein, 9 aa, Artificial Sequence
  Description of Artificial Sequence: Synthetic peptide
  Seed: FPYTGDPPY
FPYTGDPPM

SEQ ID NO: 137538 - protein, 9 aa, Artificial Sequence
  Description of Artificial Sequence: Synthetic peptide
  Seed: MMMGMFNML
MQMGMFNMF

SEQ ID NO: 137539 - protein, 10 aa, Artificial Sequence
  Description of Artificial Sequence: Synthetic peptide
  Seed: MARLGKGYMF
MTRLGKGYMW

SEQ ID NO: 137540 - protein, 10 aa, Artificial Sequence
  Description of Artificial Sequence: Synthetic peptide
  Seed: RALTLNTMTK
RMLTLNTMTK

SEQ ID NO: 137541 - protein, 9 aa, Artificial Sequence
  Description of Artificial Sequence: Synthetic peptide
  Seed: NAISTTFPY
NTISTTFPM

SEQ ID NO: 137542 - protein, 9 aa, Artificial Sequence
  Description of Artificial Sequence: Synthetic peptide
  Seed: NAISTTFPY
NTISTTFPY

SEQ ID NO: 137543 - protein, 9 aa, Artificial Sequence
  Description of Artificial Sequence: Synthetic peptide
  Seed: FPYTGDPPY
FPYTGDPPI

SEQ ID NO: 137544 - protein, 9 aa, Artificial Sequence
  Description of Artificial Sequence: Synthetic peptide
  Seed: TSFFYRYGF
TSFFYRYGW

SEQ ID NO: 137545 - protein, 9 aa, Artificial Sequence
  Description of Artificial Sequence: Synthetic peptide
  Seed: MFNMLSTVL
MRNMLSTVY

SEQ ID NO: 137546 - protein, 9 aa, Artificial Sequence
  Description of Artificial Sequence: Synthetic peptide
  Seed: TSFFYRYGF
TTFFYRYGW

SEQ ID NO: 137547 - protein, 9 aa, Artificial Sequence
  Description of Artificial Sequence: Synthetic peptide
  Seed: NAISTTFPY
NVISTTFPY

SEQ ID NO: 137548 - protein, 9 aa, Artificial Sequence
  Description of Artificial Sequence: Synthetic peptide
  Seed: MSIGVTVIK
MTIGVTVIR

SEQ ID NO: 137549 - protein, 9 aa, Artificial Sequence
  Description of Artificial Sequence: Synthetic peptide
  Seed: NAISTTFPY
NMISTTFPY

SEQ ID NO: 137550 - protein, 8 aa, Artificial Sequence
  Description of Artificial Sequence: Synthetic peptide
  Seed: FSFTGEEM
FAFTGEEL

SEQ ID NO: 137551 - protein, 8 aa, Artificial Sequence
  Description of Artificial Sequence: Synthetic peptide
  Seed: FSFTGEEM
FSFTGEEY

SEQ ID NO: 137552 - protein, 10 aa, Artificial Sequence
  Description of Artificial Sequence: Synthetic peptide
  Seed: HIFSFTGEEM
HMFSFTGEEF

SEQ ID NO: 137553 - protein, 8 aa, Artificial Sequence
  Description of Artificial Sequence: Synthetic peptide
  Seed: LLKHRFEI
LMKHRFEV

SEQ ID NO: 137554 - protein, 9 aa, Artificial Sequence
  Description of Artificial Sequence: Synthetic peptide
  Seed: FSFTGEEMA
FVFTGEEMV

SEQ ID NO: 137555 - protein, 10 aa, Artificial Sequence
  Description of Artificial Sequence: Synthetic peptide
  Seed: HIFSFTGEEM
HLFSFTGEEY

SEQ ID NO: 137556 - protein, 11 aa, Artificial Sequence
  Description of Artificial Sequence: Synthetic peptide
  Seed: FSFTGEEMATK
FVFTGEEMATR

SEQ ID NO: 137557 - protein, 9 aa, Artificial Sequence
  Description of Artificial Sequence: Synthetic peptide
  Seed: FSFTGEEMA
FVFTGEEMI

SEQ ID NO: 137558 - protein, 9 aa, Artificial Sequence
  Description of Artificial Sequence: Synthetic peptide
  Seed: IFSFTGEEM
IYSFTGEEI

SEQ ID NO: 137559 - protein, 9 aa, Artificial Sequence
  Description of Artificial Sequence: Synthetic peptide
  Seed: ALLKHRFEI
ATLKHRFEW

SEQ ID NO: 137560 - protein, 9 aa, Artificial Sequence
  Description of Artificial Sequence: Synthetic peptide
  Seed: FTGEEMATK
FTGEEMATR

SEQ ID NO: 137561 - protein, 9 aa, Artificial Sequence
  Description of Artificial Sequence: Synthetic peptide
  Seed: IFSFTGEEM
IFSFTGEEF

SEQ ID NO: 137562 - protein, 9 aa, Artificial Sequence
  Description of Artificial Sequence: Synthetic peptide
  Seed: ALLKHRFEI
AMLKHRFEL

SEQ ID NO: 137563 - protein, 8 aa, Artificial Sequence
  Description of Artificial Sequence: Synthetic peptide
  Seed: FSFTGEEM
FAFTGEEM

SEQ ID NO: 137564 - protein, 8 aa, Artificial Sequence
  Description of Artificial Sequence: Synthetic peptide
  Seed: FSFTGEEM
FSFTGEEL

SEQ ID NO: 137565 - protein, 8 aa, Artificial Sequence
  Description of Artificial Sequence: Synthetic peptide
  Seed: FMYSDFHF
FAYSDFHY

SEQ ID NO: 137566 - protein, 9 aa, Artificial Sequence
  Description of Artificial Sequence: Synthetic peptide
  Seed: FSFTGEEMA
FTFTGEEMV

SEQ ID NO: 137567 - protein, 9 aa, Artificial Sequence
  Description of Artificial Sequence: Synthetic peptide
  Seed: FSFTGEEMA
FTFTGEEML

SEQ ID NO: 137568 - protein, 11 aa, Artificial Sequence
  Description of Artificial Sequence: Synthetic peptide
  Seed: FSFTGEEMATK
FTFTGEEMATK

SEQ ID NO: 137569 - protein, 9 aa, Artificial Sequence
  Description of Artificial Sequence: Synthetic peptide
  Seed: IFSFTGEEM
IYSFTGEEL

SEQ ID NO: 137570 - protein, 9 aa, Artificial Sequence
  Description of Artificial Sequence: Synthetic peptide
  Seed: ALLKHRFEI
ATLKHRFEF

SEQ ID NO: 137571 - protein, 9 aa, Artificial Sequence
  Description of Artificial Sequence: Synthetic peptide
  Seed: FSFTGEEMA
FSFTGEEMV

SEQ ID NO: 137572 - protein, 9 aa, Artificial Sequence
  Description of Artificial Sequence: Synthetic peptide
  Seed: IFSFTGEEM
IYSFTGEEF

SEQ ID NO: 137573 - protein, 9 aa, Artificial Sequence
  Description of Artificial Sequence: Synthetic peptide
  Seed: ALLKHRFEI
ALLKHRFEL

SEQ ID NO: 137574 - protein, 8 aa, Artificial Sequence
  Description of Artificial Sequence: Synthetic peptide
  Seed: FSFTGEEM
FTFTGEEY

SEQ ID NO: 137575 - protein, 10 aa, Artificial Sequence
  Description of Artificial Sequence: Synthetic peptide
  Seed: HIFSFTGEEM
HMFSFTGEEY

SEQ ID NO: 137576 - protein, 8 aa, Artificial Sequence
  Description of Artificial Sequence: Synthetic peptide
  Seed: LLKHRFEI
LMKHRFEL

SEQ ID NO: 137577 - protein, 8 aa, Artificial Sequence
  Description of Artificial Sequence: Synthetic peptide
  Seed: LLKHRFEI
LPKHRFEM

SEQ ID NO: 137578 - protein, 9 aa, Artificial Sequence
  Description of Artificial Sequence: Synthetic peptide
  Seed: FSFTGEEMA
FTFTGEEMI

SEQ ID NO: 137579 - protein, 9 aa, Artificial Sequence
  Description of Artificial Sequence: Synthetic peptide
  Seed: FTGEEMATK
FVGEEMATR

SEQ ID NO: 137580 - protein, 9 aa, Artificial Sequence
  Description of Artificial Sequence: Synthetic peptide
  Seed: ALLKHRFEI
AVLKHRFEW

SEQ ID NO: 137581 - protein, 10 aa, Artificial Sequence
  Description of Artificial Sequence: Synthetic peptide
  Seed: HIFSFTGEEM
HYFSFTGEEY

SEQ ID NO: 137582 - protein, 9 aa, Artificial Sequence
  Description of Artificial Sequence: Synthetic peptide
  Seed: MAMKYPITA
MVMKYPITL

SEQ ID NO: 137583 - protein, 9 aa, Artificial Sequence
  Description of Artificial Sequence: Synthetic peptide
  Seed: WMMAMKYPI
WMMAMKYPM

SEQ ID NO: 137584 - protein, 9 aa, Artificial Sequence
  Description of Artificial Sequence: Synthetic peptide
  Seed: MAMKYPITA
MSMKYPITM

SEQ ID NO: 137585 - protein, 9 aa, Artificial Sequence
  Description of Artificial Sequence: Synthetic peptide
  Seed: MEVVFPNEV
MEVVFPNEI

SEQ ID NO: 137586 - protein, 9 aa, Artificial Sequence
  Description of Artificial Sequence: Synthetic peptide
  Seed: RANQRLNPM
RPNQRLNPV

SEQ ID NO: 137587 - protein, 10 aa, Artificial Sequence
  Description of Artificial Sequence: Synthetic peptide
  Seed: KWMMAMKYPI
KYMMAMKYPY

SEQ ID NO: 137588 - protein, 9 aa, Artificial Sequence
  Description of Artificial Sequence: Synthetic peptide
  Seed: WMMAMKYPI
WQMAMKYPV

SEQ ID NO: 137589 - protein, 10 aa, Artificial Sequence
  Description of Artificial Sequence: Synthetic peptide
  Seed: KWMMAMKYPI
KWMMAMKYPW

SEQ ID NO: 137590 - protein, 9 aa, Artificial Sequence
  Description of Artificial Sequence: Synthetic peptide
  Seed: MEVVFPNEV
MEVVFPNEY

SEQ ID NO: 137591 - protein, 9 aa, Artificial Sequence
  Description of Artificial Sequence: Synthetic peptide
  Seed: MAMKYPITA
MMMKYPITM

SEQ ID NO: 137592 - protein, 9 aa, Artificial Sequence
  Description of Artificial Sequence: Synthetic peptide
  Seed: RMKWMMAMK
RVKWMMAMK

SEQ ID NO: 137593 - protein, 10 aa, Artificial Sequence
  Description of Artificial Sequence: Synthetic peptide
  Seed: KWMMAMKYPI
KYMMAMKYPF

SEQ ID NO: 137594 - protein, 10 aa, Artificial Sequence
  Description of Artificial Sequence: Synthetic peptide
  Seed: RMKWMMAMKY
RYKWMMAMKY

SEQ ID NO: 137595 - protein, 9 aa, Artificial Sequence
  Description of Artificial Sequence: Synthetic peptide
  Seed: TTVDHMAII
TTVDHMAIL

SEQ ID NO: 137596 - protein, 9 aa, Artificial Sequence
  Description of Artificial Sequence: Synthetic peptide
  Seed: TTVDHMAII
TTVDHMAIY

SEQ ID NO: 137597 - protein, 9 aa, Artificial Sequence
  Description of Artificial Sequence: Synthetic peptide
  Seed: MAMKYPITA
MAMKYPITV

SEQ ID NO: 137598 - protein, 9 aa, Artificial Sequence
  Description of Artificial Sequence: Synthetic peptide
  Seed: RMKWMMAMK
RSKWMMAMK

SEQ ID NO: 137599 - protein, 10 aa, Artificial Sequence
  Description of Artificial Sequence: Synthetic peptide
  Seed: KWMMAMKYPI
KWMMAMKYPF

SEQ ID NO: 137600 - protein, 9 aa, Artificial Sequence
  Description of Artificial Sequence: Synthetic peptide
  Seed: RANQRLNPM
RPNQRLNPM

SEQ ID NO: 137601 - protein, 9 aa, Artificial Sequence
  Description of Artificial Sequence: Synthetic peptide
  Seed: MKWMMAMKY
MSWMMAMKY

SEQ ID NO: 137602 - protein, 10 aa, Artificial Sequence
  Description of Artificial Sequence: Synthetic peptide
  Seed: KWMMAMKYPI
KYMMAMKYPW

SEQ ID NO: 137603 - protein, 9 aa, Artificial Sequence
  Description of Artificial Sequence: Synthetic peptide
  Seed: RMKWMMAMK
RTKWMMAMK

SEQ ID NO: 137604 - protein, 9 aa, Artificial Sequence
  Description of Artificial Sequence: Synthetic peptide
  Seed: TTVDHMAII
TTVDHMAIM

SEQ ID NO: 137605 - protein, 9 aa, Artificial Sequence
  Description of Artificial Sequence: Synthetic peptide
  Seed: TTVDHMAII
TVVDHMAIY

SEQ ID NO: 137606 - protein, 9 aa, Artificial Sequence
  Description of Artificial Sequence: Synthetic peptide
  Seed: KAVRGDLNF
KVVRGDLNW

SEQ ID NO: 137607 - protein, 9 aa, Artificial Sequence
  Description of Artificial Sequence: Synthetic peptide
  Seed: VVSIDRFLR
VTSIDRFLR

SEQ ID NO: 137608 - protein, 10 aa, Artificial Sequence
  Description of Artificial Sequence: Synthetic peptide
  Seed: TTVDHMAIIK
TVVDHMAIIK

SEQ ID NO: 137609 - protein, 9 aa, Artificial Sequence
  Description of Artificial Sequence: Synthetic peptide
  Seed: RMKWMMAMK
RMKWMMAMR

SEQ ID NO: 137610 - protein, 9 aa, Artificial Sequence
  Description of Artificial Sequence: Synthetic peptide
  Seed: CLINDPWVL
CMINDPWVV

SEQ ID NO: 137611 - protein, 9 aa, Artificial Sequence
  Description of Artificial Sequence: Synthetic peptide
  Seed: KVCRTLLAK
KYCRTLLAR

SEQ ID NO: 137612 - protein, 9 aa, Artificial Sequence
  Description of Artificial Sequence: Synthetic peptide
  Seed: LNASWFNSF
LTASWFNSY

SEQ ID NO: 137613 - protein, 9 aa, Artificial Sequence
  Description of Artificial Sequence: Synthetic peptide
  Seed: NASWFNSFL
NSSWFNSFM

SEQ ID NO: 137614 - protein, 9 aa, Artificial Sequence
  Description of Artificial Sequence: Synthetic peptide
  Seed: ALLKHRFEI
AMLKHRFEV

SEQ ID NO: 137615 - protein, 9 aa, Artificial Sequence
  Description of Artificial Sequence: Synthetic peptide
  Seed: KVCRTLLAK
KMCRTLLAK

SEQ ID NO: 137616 - protein, 9 aa, Artificial Sequence
  Description of Artificial Sequence: Synthetic peptide
  Seed: RTLLAKSVF
RVLLAKSVW

SEQ ID NO: 137617 - protein, 9 aa, Artificial Sequence
  Description of Artificial Sequence: Synthetic peptide
  Seed: NASWFNSFL
NTSWFNSFL

SEQ ID NO: 137618 - protein, 9 aa, Artificial Sequence
  Description of Artificial Sequence: Synthetic peptide
  Seed: LNASWFNSF
LSASWFNSY

SEQ ID NO: 137619 - protein, 8 aa, Artificial Sequence
  Description of Artificial Sequence: Synthetic peptide
  Seed: LLKHRFEI
LVKHRFEL

SEQ ID NO: 137620 - protein, 8 aa, Artificial Sequence
  Description of Artificial Sequence: Synthetic peptide
  Seed: FMYSDFHF
FYYSDFHF

SEQ ID NO: 137621 - protein, 9 aa, Artificial Sequence
  Description of Artificial Sequence: Synthetic peptide
  Seed: NASWFNSFL
NASWFNSFY

SEQ ID NO: 137622 - protein, 9 aa, Artificial Sequence
  Description of Artificial Sequence: Synthetic peptide
  Seed: RTLLAKSVF
RSLLAKSVK

SEQ ID NO: 137623 - protein, 10 aa, Artificial Sequence
  Description of Artificial Sequence: Synthetic peptide
  Seed: LLNASWFNSF
LMNASWFNSY

SEQ ID NO: 137624 - protein, 9 aa, Artificial Sequence
  Description of Artificial Sequence: Synthetic peptide
  Seed: ALLKHRFEI
ALLKHRFEV

SEQ ID NO: 137625 - protein, 9 aa, Artificial Sequence
  Description of Artificial Sequence: Synthetic peptide
  Seed: KVCRTLLAK
KSCRTLLAK

SEQ ID NO: 137626 - protein, 9 aa, Artificial Sequence
  Description of Artificial Sequence: Synthetic peptide
  Seed: RTLLAKSVF
RILLAKSVK

SEQ ID NO: 137627 - protein, 9 aa, Artificial Sequence
  Description of Artificial Sequence: Synthetic peptide
  Seed: KVCRTLLAK
KLCRTLLAK

SEQ ID NO: 137628 - protein, 9 aa, Artificial Sequence
  Description of Artificial Sequence: Synthetic peptide
  Seed: NASWFNSFL
NVSWFNSFI

SEQ ID NO: 137629 - protein, 9 aa, Artificial Sequence
  Description of Artificial Sequence: Synthetic peptide
  Seed: NASWFNSFL
NLSWFNSFV

SEQ ID NO: 137630 - protein, 8 aa, Artificial Sequence
  Description of Artificial Sequence: Synthetic peptide
  Seed: LLKHRFEI
LPKHRFEL

SEQ ID NO: 137631 - protein, 9 aa, Artificial Sequence
  Description of Artificial Sequence: Synthetic peptide
  Seed: RTLLAKSVF
RSLLAKSVW

SEQ ID NO: 137632 - protein, 11 aa, Artificial Sequence
  Description of Artificial Sequence: Synthetic peptide
  Seed: VLLNASWFNSF
VYLNASWFNSL

SEQ ID NO: 137633 - protein, 9 aa, Artificial Sequence
  Description of Artificial Sequence: Synthetic peptide
  Seed: NASWFNSFL
NASWFNSFM

SEQ ID NO: 137634 - protein, 9 aa, Artificial Sequence
  Description of Artificial Sequence: Synthetic peptide
  Seed: RTLLAKSVF
RYLLAKSVK

SEQ ID NO: 137635 - protein, 11 aa, Artificial Sequence
  Description of Artificial Sequence: Synthetic peptide
  Seed: VLLNASWFNSF
VYLNASWFNSF

SEQ ID NO: 137636 - protein, 9 aa, Artificial Sequence
  Description of Artificial Sequence: Synthetic peptide
  Seed: RTLLAKSVF
RTLLAKSVW

SEQ ID NO: 137637 - protein, 9 aa, Artificial Sequence
  Description of Artificial Sequence: Synthetic peptide
  Seed: PWVLLNASW
PYVLLNASF

SEQ ID NO: 137638 - protein, 9 aa, Artificial Sequence
  Description of Artificial Sequence: Synthetic peptide
  Seed: KVCRTLLAK
KTCRTLLAK

SEQ ID NO: 137639 - protein, 8 aa, Artificial Sequence
  Description of Artificial Sequence: Synthetic peptide
  Seed: LLKHRFEI
LLKHRFEM

SEQ ID NO: 137640 - protein, 10 aa, Artificial Sequence
  Description of Artificial Sequence: Synthetic peptide
  Seed: LLNASWFNSF
LMNASWFNSF

SEQ ID NO: 137641 - protein, 9 aa, Artificial Sequence
  Description of Artificial Sequence: Synthetic peptide
  Seed: LINDPWVLL
LANDPWVLL

SEQ ID NO: 137642 - protein, 9 aa, Artificial Sequence
  Description of Artificial Sequence: Synthetic peptide
  Seed: KTRPILSPL
KARPILSPM

SEQ ID NO: 137643 - protein, 8 aa, Artificial Sequence
  Description of Artificial Sequence: Synthetic peptide
  Seed: TEVETYVL
TEVETYVY

SEQ ID NO: 137644 - protein, 9 aa, Artificial Sequence
  Description of Artificial Sequence: Synthetic peptide
  Seed: KTRPILSPL
KSRPILSPY

SEQ ID NO: 137645 - protein, 9 aa, Artificial Sequence
  Description of Artificial Sequence: Synthetic peptide
  Seed: TEVETYVLS
TEVETYVLA

SEQ ID NO: 137646 - protein, 11 aa, Artificial Sequence
  Description of Artificial Sequence: Synthetic peptide
  Seed: KTRPILSPLTK
KYRPILSPLTR

SEQ ID NO: 137647 - protein, 9 aa, Artificial Sequence
  Description of Artificial Sequence: Synthetic peptide
  Seed: KTRPILSPL
KIRPILSPL

SEQ ID NO: 137648 - protein, 8 aa, Artificial Sequence
  Description of Artificial Sequence: Synthetic peptide
  Seed: WLKTRPIL
WVKTRPIL

SEQ ID NO: 137649 - protein, 11 aa, Artificial Sequence
  Description of Artificial Sequence: Synthetic peptide
  Seed: KTRPILSPLTK
KMRPILSPLTK

SEQ ID NO: 137650 - protein, 9 aa, Artificial Sequence
  Description of Artificial Sequence: Synthetic peptide
  Seed: KTRPILSPL
KTRPILSPW

SEQ ID NO: 137651 - protein, 9 aa, Artificial Sequence
  Description of Artificial Sequence: Synthetic peptide
  Seed: KTRPILSPL
KARPILSPY

SEQ ID NO: 137652 - protein, 9 aa, Artificial Sequence
  Description of Artificial Sequence: Synthetic peptide
  Seed: KTRPILSPL
KQRPILSPV

SEQ ID NO: 137653 - protein, 9 aa, Artificial Sequence
  Description of Artificial Sequence: Synthetic peptide
  Seed: KTRPILSPL
KVRPILSPV

SEQ ID NO: 137654 - protein, 10 aa, Artificial Sequence
  Description of Artificial Sequence: Synthetic peptide
  Seed: TEVETYVLSI
TEVETYVLSY

SEQ ID NO: 137655 - protein, 9 aa, Artificial Sequence
  Description of Artificial Sequence: Synthetic peptide
  Seed: RRRFVQNAL
RTRFVQNAF

SEQ ID NO: 137656 - protein, 10 aa, Artificial Sequence
  Description of Artificial Sequence: Synthetic peptide
  Seed: TEVETYVLSI
TEVETYVLSF

SEQ ID NO: 137657 - protein, 9 aa, Artificial Sequence
  Description of Artificial Sequence: Synthetic peptide
  Seed: RRRFVQNAL
RYRFVQNAF

SEQ ID NO: 137658 - protein, 8 aa, Artificial Sequence
  Description of Artificial Sequence: Synthetic peptide
  Seed: TEVETYVL
TEVETYVF

SEQ ID NO: 137659 - protein, 9 aa, Artificial Sequence
  Description of Artificial Sequence: Synthetic peptide
  Seed: KTRPILSPL
KARPILSPL

SEQ ID NO: 137660 - protein, 8 aa, Artificial Sequence
  Description of Artificial Sequence: Synthetic peptide
  Seed: WLKTRPIL
WPKTRPIL

SEQ ID NO: 137661 - protein, 11 aa, Artificial Sequence
  Description of Artificial Sequence: Synthetic peptide
  Seed: KTRPILSPLTK
KLRPILSPLTK

SEQ ID NO: 137662 - protein, 9 aa, Artificial Sequence
  Description of Artificial Sequence: Synthetic peptide
  Seed: KTRPILSPL
KSRPILSPW

SEQ ID NO: 137663 - protein, 9 aa, Artificial Sequence
  Description of Artificial Sequence: Synthetic peptide
  Seed: KTRPILSPL
KMRPILSPV

SEQ ID NO: 137664 - protein, 10 aa, Artificial Sequence
  Description of Artificial Sequence: Synthetic peptide
  Seed: TEVETYVLSI
TEVETYVLSL

SEQ ID NO: 137665 - protein, 9 aa, Artificial Sequence
  Description of Artificial Sequence: Synthetic peptide
  Seed: RRRFVQNAL
RRRFVQNAY

SEQ ID NO: 137666 - protein, 9 aa, Artificial Sequence
  Description of Artificial Sequence: Synthetic peptide
  Seed: RRRFVQNAL
RWRFVQNAM

SEQ ID NO: 137667 - protein, 8 aa, Artificial Sequence
  Description of Artificial Sequence: Synthetic peptide
  Seed: WLKTRPIL
WMKTRPIM

SEQ ID NO: 137668 - protein, 10 aa, Artificial Sequence
  Description of Artificial Sequence: Synthetic peptide
  Seed: TEVETYVLSI
TEVETYVLSW

SEQ ID NO: 137669 - protein, 11 aa, Artificial Sequence
  Description of Artificial Sequence: Synthetic peptide
  Seed: WLKTRPILSPL
WMKTRPILSPL

SEQ ID NO: 137670 - protein, 9 aa, Artificial Sequence
  Description of Artificial Sequence: Synthetic peptide
  Seed: KTRPILSPL
KTRPILSPF

SEQ ID NO: 137671 - protein, 11 aa, Artificial Sequence
  Description of Artificial Sequence: Synthetic peptide
  Seed: KTRPILSPLTK
KVRPILSPLTK

SEQ ID NO: 137672 - protein, 8 aa, Artificial Sequence
  Description of Artificial Sequence: Synthetic peptide
  Seed: WLKTRPIL
WAKTRPIL

SEQ ID NO: 137673 - protein, 9 aa, Artificial Sequence
  Description of Artificial Sequence: Synthetic peptide
  Seed: RRRFVQNAL
RRRFVQNAF

SEQ ID NO: 137674 - protein, 9 aa, Artificial Sequence
  Description of Artificial Sequence: Synthetic peptide
  Seed: RRRFVQNAL
RKRFVQNAF

SEQ ID NO: 137675 - protein, 9 aa, Artificial Sequence
  Description of Artificial Sequence: Synthetic peptide
  Seed: RRRFVQNAL
RYRFVQNAI

SEQ ID NO: 137676 - protein, 9 aa, Influenza A virus
MMMGMFNML

SEQ ID NO: 137677 - protein, 8 aa, Influenza A virus
LLKHRFEI

SEQ ID NO: 137678 - protein, 10 aa, Influenza A virus
RMKWMMAMKY

SEQ ID NO: 137679 - protein, 9 aa, Influenza A virus
VVSIDRFLR

SEQ ID NO: 137680 - protein, 9 aa, Influenza A virus
KVCRTLLAK

SEQ ID NO: 137681 - protein, 9 aa, Influenza A virus
EECLINDPW

SEQ ID NO: 137682 - protein, 15 aa, Artificial Sequence
  Description of Artificial Sequence: Synthetic peptide
  Seed: SPGMMMGMFNMLSTV
SPGFMMSMYNMLSTV

SEQ ID NO: 137683 - protein, 15 aa, Artificial Sequence
  Description of Artificial Sequence: Synthetic peptide
  Seed: SPGMMMGMFNMLSTV
SPGMIMGYFPMLRTV

SEQ ID NO: 137684 - protein, 20 aa, Artificial Sequence
  Description of Artificial Sequence: Synthetic peptide
  Seed: GNEKKAKLANVVRKMMTNSQ
GNEFKAHLFNVIRKMMTNSQ

SEQ ID NO: 137685 - protein, 17 aa, Artificial Sequence
  Description of Artificial Sequence: Synthetic peptide
  Seed: GMMMGMFNMLSTVLGVS
GMMMGMFNMNSAVLIVS

SEQ ID NO: 137686 - protein, 15 aa, Artificial Sequence
  Description of Artificial Sequence: Synthetic peptide
  Seed: SPGMMMGMFNMLSTV
SPGFMMSMFNMVSTV

SEQ ID NO: 137687 - protein, 20 aa, Artificial Sequence
  Description of Artificial Sequence: Synthetic peptide
  Seed: GNEKKAKLANVVRKMMTNSQ
GNEFKATLFNVVRKMMTNSQ

SEQ ID NO: 137688 - protein, 17 aa, Artificial Sequence
  Description of Artificial Sequence: Synthetic peptide
  Seed: GMMMGMFNMLSTVLGVS
GMMMGMINMYSNVLAVS

SEQ ID NO: 137689 - protein, 20 aa, Artificial Sequence
  Description of Artificial Sequence: Synthetic peptide
  Seed: GNEKKAKLANVVRKMMTNSQ
GNEKKAKIANMVRKMVTNSQ

SEQ ID NO: 137690 - protein, 20 aa, Artificial Sequence
  Description of Artificial Sequence: Synthetic peptide
  Seed: GNEKKAKLANVVRKMMTNSQ
GNEFKASLFNVNRKMMTNSQ

SEQ ID NO: 137691 - protein, 15 aa, Artificial Sequence
  Description of Artificial Sequence: Synthetic peptide
  Seed: SPGMMMGMFNMLSTV
SPGMIMGMFRMLHTV

SEQ ID NO: 137692 - protein, 15 aa, Artificial Sequence
  Description of Artificial Sequence: Synthetic peptide
  Seed: SPGMMMGMFNMLSTV
SPGFMMSMYNMVSTV

SEQ ID NO: 137693 - protein, 20 aa, Artificial Sequence
  Description of Artificial Sequence: Synthetic peptide
  Seed: GNEKKAKLANVVRKMMTNSQ
GNEFKASLFNVIRKMMTNSQ

SEQ ID NO: 137694 - protein, 17 aa, Artificial Sequence
  Description of Artificial Sequence: Synthetic peptide
  Seed: GMMMGMFNMLSTVLGVS
GMMMGMFNMNSNVLIVS

SEQ ID NO: 137695 - protein, 20 aa, Artificial Sequence
  Description of Artificial Sequence: Synthetic peptide
  Seed: GNEKKAKLANVVRKMMTNSQ
GNEFKATLFNVLRKMMTNSQ

SEQ ID NO: 137696 - protein, 20 aa, Artificial Sequence
  Description of Artificial Sequence: Synthetic peptide
  Seed: GNEKKAKLANVVRKMMTNSQ
GNEFKASLFNVVRKMMTNSQ

SEQ ID NO: 137697 - protein, 17 aa, Artificial Sequence
  Description of Artificial Sequence: Synthetic peptide
  Seed: GMMMGMFNMLSTVLGVS
GMMMGMFNMASSVLHVS

SEQ ID NO: 137698 - protein, 15 aa, Artificial Sequence
  Description of Artificial Sequence: Synthetic peptide
  Seed: SPGMMMGMFNMLSTV
SPGFMMHMFNMVSTV

SEQ ID NO: 137699 - protein, 17 aa, Artificial Sequence
  Description of Artificial Sequence: Synthetic peptide
  Seed: GMMMGMFNMLSTVLGVS
GMMMGMFNMNSSVLIVS

SEQ ID NO: 137700 - protein, 17 aa, Artificial Sequence
  Description of Artificial Sequence: Synthetic peptide
  Seed: GMMMGMFNMLSTVLGVS
GMMMGMFNMASPVLAVS

SEQ ID NO: 137701 - protein, 17 aa, Artificial Sequence
  Description of Artificial Sequence: Synthetic peptide
  Seed: GMMMGMFNMLSTVLGVS
GMMMGMINMQSNVLAVS

SEQ ID NO: 137702 - protein, 15 aa, Artificial Sequence
  Description of Artificial Sequence: Synthetic peptide
  Seed: SPGMMMGMFNMLSTV
SPGMIMGMFRMLRTV

SEQ ID NO: 137703 - protein, 20 aa, Artificial Sequence
  Description of Artificial Sequence: Synthetic peptide
  Seed: GNEKKAKLANVVRKMMTNSQ
GNEKKAKIANIVRKMVTNSQ

SEQ ID NO: 137704 - protein, 17 aa, Artificial Sequence
  Description of Artificial Sequence: Synthetic peptide
  Seed: GMMMGMFNMLSTVLGVS
GMMMGMINMMSAVLRVS

SEQ ID NO: 137705 - protein, 20 aa, Artificial Sequence
  Description of Artificial Sequence: Synthetic peptide
  Seed: GNEKKAKLANVVRKMMTNSQ
GNEKKAKIANIVRKMATNSQ

SEQ ID NO: 137706 - protein, 17 aa, Artificial Sequence
  Description of Artificial Sequence: Synthetic peptide
  Seed: GMMMGMFNMLSTVLGVS
GMMMGMFNMNSNVLVVS

SEQ ID NO: 137707 - protein, 15 aa, Artificial Sequence
  Description of Artificial Sequence: Synthetic peptide
  Seed: SPGMMMGMFNMLSTV
SPGMIMGAFPMLATV

SEQ ID NO: 137708 - protein, 17 aa, Artificial Sequence
  Description of Artificial Sequence: Synthetic peptide
  Seed: GMMMGMFNMLSTVLGVS
GMMMGMINMMSSVLRVS

SEQ ID NO: 137709 - protein, 15 aa, Artificial Sequence
  Description of Artificial Sequence: Synthetic peptide
  Seed: SPGMMMGMFNMLSTV
SPGFMMHMFNMLSTV

SEQ ID NO: 137710 - protein, 15 aa, Artificial Sequence
  Description of Artificial Sequence: Synthetic peptide
  Seed: SPGMMMGMFNMLSTV
SPGRMMFMANMFSTV

SEQ ID NO: 137711 - protein, 17 aa, Artificial Sequence
  Description of Artificial Sequence: Synthetic peptide
  Seed: GMMMGMFNMLSTVLGVS
GMMMGMFNMMSSVLHVS

SEQ ID NO: 137712 - protein, 15 aa, Artificial Sequence
  Description of Artificial Sequence: Synthetic peptide
  Seed: SPGMMMGMFNMLSTV
SPGMNMGSFAMLATV

SEQ ID NO: 137713 - protein, 15 aa, Artificial Sequence
  Description of Artificial Sequence: Synthetic peptide
  Seed: HIHIFSFTGEEMATK
HIHFFSFTAEELATK

SEQ ID NO: 137714 - protein, 15 aa, Artificial Sequence
  Description of Artificial Sequence: Synthetic peptide
  Seed: HIHIFSFTGEEMATK
HIHFFSTTFEEMATK

SEQ ID NO: 137715 - protein, 15 aa, Artificial Sequence
  Description of Artificial Sequence: Synthetic peptide
  Seed: HIHIFSFTGEEMATK
HIHFFSSTFEELATK

SEQ ID NO: 137716 - protein, 15 aa, Artificial Sequence
  Description of Artificial Sequence: Synthetic peptide
  Seed: HIHIFSFTGEEMATK
HIHFFSITIEEFATK

SEQ ID NO: 137717 - protein, 15 aa, Artificial Sequence
  Description of Artificial Sequence: Synthetic peptide
  Seed: HIHIFSFTGEEMATK
HIHIFSFTGFEMITK

SEQ ID NO: 137718 - protein, 15 aa, Artificial Sequence
  Description of Artificial Sequence: Synthetic peptide
  Seed: HIHIFSFTGEEMATK
HIHIVSFAGAEMMTK

SEQ ID NO: 137719 - protein, 15 aa, Artificial Sequence
  Description of Artificial Sequence: Synthetic peptide
  Seed: HIHIFSFTGEEMATK
HIHIFSMTIEEAATK

SEQ ID NO: 137720 - protein, 15 aa, Artificial Sequence
  Description of Artificial Sequence: Synthetic peptide
  Seed: HIHIFSFTGEEMATK
HIHFFSITIEEEATK

SEQ ID NO: 137721 - protein, 15 aa, Artificial Sequence
  Description of Artificial Sequence: Synthetic peptide
  Seed: HIHIFSFTGEEMATK
HIHIFSFTAEEVATK

SEQ ID NO: 137722 - protein, 15 aa, Artificial Sequence
  Description of Artificial Sequence: Synthetic peptide
  Seed: HIHIFSFTGEEMATK
HIHFFSITVEELATK

SEQ ID NO: 137723 - protein, 15 aa, Artificial Sequence
  Description of Artificial Sequence: Synthetic peptide
  Seed: HIHIFSFTGEEMATK
HIHIFSFTAEEAATK

SEQ ID NO: 137724 - protein, 15 aa, Artificial Sequence
  Description of Artificial Sequence: Synthetic peptide
  Seed: HIHIFSFTGEEMATK
HIHIISFTGNEMITK

SEQ ID NO: 137725 - protein, 15 aa, Artificial Sequence
  Description of Artificial Sequence: Synthetic peptide
  Seed: HIHIFSFTGEEMATK
HIHFFSFTSEEVATK

SEQ ID NO: 137726 - protein, 15 aa, Artificial Sequence
  Description of Artificial Sequence: Synthetic peptide
  Seed: HIHIFSFTGEEMATK
HIHFFSSTFEEFATK

SEQ ID NO: 137727 - protein, 15 aa, Artificial Sequence
  Description of Artificial Sequence: Synthetic peptide
  Seed: HIHIFSFTGEEMATK
HIHFFSYTSEELATK

SEQ ID NO: 137728 - protein, 15 aa, Artificial Sequence
  Description of Artificial Sequence: Synthetic peptide
  Seed: HIHIFSFTGEEMATK
HIHFFSITAEEAATK

SEQ ID NO: 137729 - protein, 15 aa, Artificial Sequence
  Description of Artificial Sequence: Synthetic peptide
  Seed: HIHIFSFTGEEMATK
HIHIFSITAEELATK

SEQ ID NO: 137730 - protein, 15 aa, Artificial Sequence
  Description of Artificial Sequence: Synthetic peptide
  Seed: HIHIFSFTGEEMATK
HIHIFSFTAEELATK

SEQ ID NO: 137731 - protein, 15 aa, Artificial Sequence
  Description of Artificial Sequence: Synthetic peptide
  Seed: HIHIFSFTGEEMATK
HIHFFSMTSEELATK

SEQ ID NO: 137732 - protein, 15 aa, Artificial Sequence
  Description of Artificial Sequence: Synthetic peptide
  Seed: HIHIFSFTGEEMATK
HIHFFSHTFEELATK

SEQ ID NO: 137733 - protein, 15 aa, Artificial Sequence
  Description of Artificial Sequence: Synthetic peptide
  Seed: HIHIFSFTGEEMATK
HIHFFSFTSEEIATK

SEQ ID NO: 137734 - protein, 15 aa, Artificial Sequence
  Description of Artificial Sequence: Synthetic peptide
  Seed: HIHIFSFTGEEMATK
HIHIFSITREERATK

SEQ ID NO: 137735 - protein, 15 aa, Artificial Sequence
  Description of Artificial Sequence: Synthetic peptide
  Seed: HIHIFSFTGEEMATK
HIHFFSATSEEAATK

SEQ ID NO: 137736 - protein, 15 aa, Artificial Sequence
  Description of Artificial Sequence: Synthetic peptide
  Seed: HIHIFSFTGEEMATK
HIHFFSATIEEAATK

SEQ ID NO: 137737 - protein, 15 aa, Artificial Sequence
  Description of Artificial Sequence: Synthetic peptide
  Seed: HIHIFSFTGEEMATK
HIHFFSFTSEELATK

SEQ ID NO: 137738 - protein, 15 aa, Artificial Sequence
  Description of Artificial Sequence: Synthetic peptide
  Seed: HIHIFSFTGEEMATK
HIHIFSFIGAEMLTK

SEQ ID NO: 137739 - protein, 15 aa, Artificial Sequence
  Description of Artificial Sequence: Synthetic peptide
  Seed: HIHIFSFTGEEMATK
HIHLFSITTEESATK

SEQ ID NO: 137740 - protein, 15 aa, Artificial Sequence
  Description of Artificial Sequence: Synthetic peptide
  Seed: HIHIFSFTGEEMATK
HIHFFSITFEEVATK

SEQ ID NO: 137741 - protein, 15 aa, Artificial Sequence
  Description of Artificial Sequence: Synthetic peptide
  Seed: HIHIFSFTGEEMATK
HIHIFSLTSEEAATK

SEQ ID NO: 137742 - protein, 15 aa, Artificial Sequence
  Description of Artificial Sequence: Synthetic peptide
  Seed: HIHIFSFTGEEMATK
HIHIFSFTDEELATK

SEQ ID NO: 137743 - protein, 15 aa, Artificial Sequence
  Description of Artificial Sequence: Synthetic peptide
  Seed: HIHIFSFTGEEMATK
HIHFFSFTNEELATK

SEQ ID NO: 137744 - protein, 15 aa, Artificial Sequence
  Description of Artificial Sequence: Synthetic peptide
  Seed: HIHIFSFTGEEMATK
HIHIFSFTGAEMLTK

SEQ ID NO: 137745 - protein, 15 aa, Artificial Sequence
  Description of Artificial Sequence: Synthetic peptide
  Seed: HIHIFSFTGEEMATK
HIHIFSITAEEIATK

SEQ ID NO: 137746 - protein, 15 aa, Artificial Sequence
  Description of Artificial Sequence: Synthetic peptide
  Seed: LRMKWMMAMKYPITA
LRMKFMMSMAYPITA

SEQ ID NO: 137747 - protein, 15 aa, Artificial Sequence
  Description of Artificial Sequence: Synthetic peptide
  Seed: LRMKWMMAMKYPITA
LRIKWLMSMKHPITA

SEQ ID NO: 137748 - protein, 15 aa, Artificial Sequence
  Description of Artificial Sequence: Synthetic peptide
  Seed: LRMKWMMAMKYPITA
LRMKFMMDMAYPITA

SEQ ID NO: 137749 - protein, 15 aa, Artificial Sequence
  Description of Artificial Sequence: Synthetic peptide
  Seed: LRMKWMMAMKYPITA
LRIKWIMAMKYPITA

SEQ ID NO: 137750 - protein, 15 aa, Artificial Sequence
  Description of Artificial Sequence: Synthetic peptide
  Seed: LRMKWMMAMKYPITA
LRIKWMMAMKYPITA

SEQ ID NO: 137751 - protein, 15 aa, Artificial Sequence
  Description of Artificial Sequence: Synthetic peptide
  Seed: LRMKWMMAMKYPITA
LRFKWSMFMKVPITA

SEQ ID NO: 137752 - protein, 15 aa, Artificial Sequence
  Description of Artificial Sequence: Synthetic peptide
  Seed: LRMKWMMAMKYPITA
LRMKFMMTMAYPLTA

SEQ ID NO: 137753 - protein, 15 aa, Artificial Sequence
  Description of Artificial Sequence: Synthetic peptide
  Seed: LRMKWMMAMKYPITA
LRIKWMMAMKMPITA

SEQ ID NO: 137754 - protein, 15 aa, Artificial Sequence
  Description of Artificial Sequence: Synthetic peptide
  Seed: LRMKWMMAMKYPITA
LRFKWAMAMKVPITA

SEQ ID NO: 137755 - protein, 13 aa, Artificial Sequence
  Description of Artificial Sequence: Synthetic peptide
  Seed: ERELVRKTRFLPV
ERELFRKTRFLPL

SEQ ID NO: 137756 - protein, 15 aa, Artificial Sequence
  Description of Artificial Sequence: Synthetic peptide
  Seed: LRMKWMMAMKYPITA
LRIKWMMSMKYPITA

SEQ ID NO: 137757 - protein, 15 aa, Artificial Sequence
  Description of Artificial Sequence: Synthetic peptide
  Seed: LRMKWMMAMKYPITA
LRMKIMMSMKYPYTA

SEQ ID NO: 137758 - protein, 13 aa, Artificial Sequence
  Description of Artificial Sequence: Synthetic peptide
  Seed: ERELVRKTRFLPV
ERELFRKTRFLPI

SEQ ID NO: 137759 - protein, 15 aa, Artificial Sequence
  Description of Artificial Sequence: Synthetic peptide
  Seed: LRMKWMMAMKYPITA
LRMKFMMSMAYPLTA

SEQ ID NO: 137760 - protein, 15 aa, Artificial Sequence
  Description of Artificial Sequence: Synthetic peptide
  Seed: LRMKWMMAMKYPITA
LRFKWNMFMKVPITA

SEQ ID NO: 137761 - protein, 15 aa, Artificial Sequence
  Description of Artificial Sequence: Synthetic peptide
  Seed: LRMKWMMAMKYPITA
LRMKFMMSMAYPATA

SEQ ID NO: 137762 - protein, 13 aa, Artificial Sequence
  Description of Artificial Sequence: Synthetic peptide
  Seed: ERELVRKTRFLPV
ERELFRKSRFLPL

SEQ ID NO: 137763 - protein, 15 aa, Artificial Sequence
  Description of Artificial Sequence: Synthetic peptide
  Seed: LRMKWMMAMKYPITA
LRMKIMMNMAYPFTA

SEQ ID NO: 137764 - protein, 15 aa, Artificial Sequence
  Description of Artificial Sequence: Synthetic peptide
  Seed: EECLINDPWVLLNAS
EECFINTPFVLVNAS

SEQ ID NO: 137765 - protein, 15 aa, Artificial Sequence
  Description of Artificial Sequence: Synthetic peptide
  Seed: DPWVLLNASWFNSFL
DPWVLFNATWFNSLL

SEQ ID NO: 137766 - protein, 15 aa, Artificial Sequence
  Description of Artificial Sequence: Synthetic peptide
  Seed: SIGKVCRTLLAKSVF
SIFKVARPLLSKSVF

SEQ ID NO: 137767 - protein, 15 aa, Artificial Sequence
  Description of Artificial Sequence: Synthetic peptide
  Seed: SIGKVCRTLLAKSVF
SIGKVIRTLLSKSVF

SEQ ID NO: 137768 - protein, 15 aa, Artificial Sequence
  Description of Artificial Sequence: Synthetic peptide
  Seed: SIGKVCRTLLAKSVF
SIGKVFRTALFKSIF

SEQ ID NO: 137769 - protein, 15 aa, Artificial Sequence
  Description of Artificial Sequence: Synthetic peptide
  Seed: DPWVLLNASWFNSFL
DPFVLANNSWINSFL

SEQ ID NO: 137770 - protein, 15 aa, Artificial Sequence
  Description of Artificial Sequence: Synthetic peptide
  Seed: DPWVLLNASWFNSFL
DPFVLINASWVNSFL

SEQ ID NO: 137771 - protein, 15 aa, Artificial Sequence
  Description of Artificial Sequence: Synthetic peptide
  Seed: EECLINDPWVLLNAS
EECFINNPFVLLNAS

SEQ ID NO: 137772 - protein, 15 aa, Artificial Sequence
  Description of Artificial Sequence: Synthetic peptide
  Seed: SIGKVCRTLLAKSVF
SIFKVIRSLLTKSVF

SEQ ID NO: 137773 - protein, 15 aa, Artificial Sequence
  Description of Artificial Sequence: Synthetic peptide
  Seed: EECLINDPWVLLNAS
EECFINDPIVLYNAS

SEQ ID NO: 137774 - protein, 15 aa, Artificial Sequence
  Description of Artificial Sequence: Synthetic peptide
  Seed: DPWVLLNASWFNSFL
DPWVLINAFWDNSVL

SEQ ID NO: 137775 - protein, 15 aa, Artificial Sequence
  Description of Artificial Sequence: Synthetic peptide
  Seed: SIGKVCRTLLAKSVF
SIGKVFRTSLFKSLF

SEQ ID NO: 137776 - protein, 15 aa, Artificial Sequence
  Description of Artificial Sequence: Synthetic peptide
  Seed: SIGKVCRTLLAKSVF
SIGKVFRTALFKSVF

SEQ ID NO: 137777 - protein, 15 aa, Artificial Sequence
  Description of Artificial Sequence: Synthetic peptide
  Seed: EECLINDPWVLLNAS
EECLINFPAVLYNAS

SEQ ID NO: 137778 - protein, 15 aa, Artificial Sequence
  Description of Artificial Sequence: Synthetic peptide
  Seed: DPWVLLNASWFNSFL
DPWVLFNAEWFNSLL

SEQ ID NO: 137779 - protein, 15 aa, Artificial Sequence
  Description of Artificial Sequence: Synthetic peptide
  Seed: DPWVLLNASWFNSFL
DPFVLMNSSWLNSFL

SEQ ID NO: 137780 - protein, 15 aa, Artificial Sequence
  Description of Artificial Sequence: Synthetic peptide
  Seed: SIGKVCRTLLAKSVF
SIYKVARSLLGKSVF

SEQ ID NO: 137781 - protein, 15 aa, Artificial Sequence
  Description of Artificial Sequence: Synthetic peptide
  Seed: DPWVLLNASWFNSFL
DPWMLLSARWFRSFL

SEQ ID NO: 137782 - protein, 15 aa, Artificial Sequence
  Description of Artificial Sequence: Synthetic peptide
  Seed: SIGKVCRTLLAKSVF
SIGKVFRTTLFKSRF

SEQ ID NO: 137783 - protein, 15 aa, Artificial Sequence
  Description of Artificial Sequence: Synthetic peptide
  Seed: EECLINDPWVLLNAS
EECIINTPFVLVNAS

SEQ ID NO: 137784 - protein, 15 aa, Artificial Sequence
  Description of Artificial Sequence: Synthetic peptide
  Seed: EECLINDPWVLLNAS
EECLINMPLVLINAS

SEQ ID NO: 137785 - protein, 15 aa, Artificial Sequence
  Description of Artificial Sequence: Synthetic peptide
  Seed: DPWVLLNASWFNSFL
DPFVLLNSSWLNSFL

SEQ ID NO: 137786 - protein, 15 aa, Artificial Sequence
  Description of Artificial Sequence: Synthetic peptide
  Seed: SIGKVCRTLLAKSVF
SIYKVLRNLLSKSVF

SEQ ID NO: 137787 - protein, 15 aa, Artificial Sequence
  Description of Artificial Sequence: Synthetic peptide
  Seed: DPWVLLNASWFNSFL
DPFVLFNASWVNSFL

SEQ ID NO: 137788 - protein, 15 aa, Artificial Sequence
  Description of Artificial Sequence: Synthetic peptide
  Seed: SIGKVCRTLLAKSVF
SIFKVMRTLLSKSVF

SEQ ID NO: 137789 - protein, 15 aa, Artificial Sequence
  Description of Artificial Sequence: Synthetic peptide
  Seed: SIGKVCRTLLAKSVF
SLGKFCRTLRAKSVF

SEQ ID NO: 137790 - protein, 15 aa, Artificial Sequence
  Description of Artificial Sequence: Synthetic peptide
  Seed: EECLINDPWVLLNAS
EECIINDPLVLFNAS

SEQ ID NO: 137791 - protein, 15 aa, Artificial Sequence
  Description of Artificial Sequence: Synthetic peptide
  Seed: SIGKVCRTLLAKSVF
SIGKVIRTLLAKSFF

SEQ ID NO: 137792 - protein, 15 aa, Artificial Sequence
  Description of Artificial Sequence: Synthetic peptide
  Seed: SIGKVCRTLLAKSVF
SIGKVFRTHLFKSLF

SEQ ID NO: 137793 - protein, 15 aa, Artificial Sequence
  Description of Artificial Sequence: Synthetic peptide
  Seed: SIGKVCRTLLAKSVF
SIGKFCRTLRAKSVF

SEQ ID NO: 137794 - protein, 15 aa, Artificial Sequence
  Description of Artificial Sequence: Synthetic peptide
  Seed: SIGKVCRTLLAKSVF
SIGKNCRALIAKAVF

SEQ ID NO: 137795 - protein, 15 aa, Artificial Sequence
  Description of Artificial Sequence: Synthetic peptide
  Seed: DPWVLLNASWFNSFL
DPFVLINRSWDNSFL

SEQ ID NO: 137796 - protein, 15 aa, Artificial Sequence
  Description of Artificial Sequence: Synthetic peptide
  Seed: EWLKTRPILSPLTKG
EFLKARSILAPLTKG

SEQ ID NO: 137797 - protein, 15 aa, Artificial Sequence
  Description of Artificial Sequence: Synthetic peptide
  Seed: EWLKTRPILSPLTKG
EWFKTIPRLSSLTKG

SEQ ID NO: 137798 - protein, 15 aa, Artificial Sequence
  Description of Artificial Sequence: Synthetic peptide
  Seed: EWLKTRPILSPLTKG
EWFKTLPRLSALTKG

SEQ ID NO: 137799 - protein, 15 aa, Artificial Sequence
  Description of Artificial Sequence: Synthetic peptide
  Seed: EWLKTRPILSPLTKG
EWLKIRPFLAPLAKG

SEQ ID NO: 137800 - protein, 15 aa, Artificial Sequence
  Description of Artificial Sequence: Synthetic peptide
  Seed: EWLKTRPILSPLTKG
EYLKMRVILEPLTKG

SEQ ID NO: 137801 - protein, 15 aa, Artificial Sequence
  Description of Artificial Sequence: Synthetic peptide
  Seed: EWLKTRPILSPLTKG
EWLKIRPALIPLSKG

SEQ ID NO: 137802 - protein, 15 aa, Artificial Sequence
  Description of Artificial Sequence: Synthetic peptide
  Seed: EWLKTRPILSPLTKG
EWLKIRPALVPLSKG

SEQ ID NO: 137803 - protein, 15 aa, Artificial Sequence
  Description of Artificial Sequence: Synthetic peptide
  Seed: EWLKTRPILSPLTKG
EFLKMRTILVPLTKG

SEQ ID NO: 137804 - protein, 15 aa, Artificial Sequence
  Description of Artificial Sequence: Synthetic peptide
  Seed: EWLKTRPILSPLTKG
EFLKARTILAPLTKG

SEQ ID NO: 137805 - protein, 15 aa, Artificial Sequence
  Description of Artificial Sequence: Synthetic peptide
  Seed: EWLKTRPILSPLTKG
EWLKIRPALIPLAKG

SEQ ID NO: 137806 - protein, 15 aa, Artificial Sequence
  Description of Artificial Sequence: Synthetic peptide
  Seed: EWLKTRPILSPLTKG
EFLKMRTILQPLTKG

SEQ ID NO: 137807 - protein, 15 aa, Artificial Sequence
  Description of Artificial Sequence: Synthetic peptide
  Seed: EWLKTRPILSPLTKG
EWLKVRPALIPLAKG

SEQ ID NO: 137808 - protein, 15 aa, Artificial Sequence
  Description of Artificial Sequence: Synthetic peptide
  Seed: EWLKTRPILSPLTKG
EYLKARSILSPLTKG

SEQ ID NO: 137809 - protein, 15 aa, Artificial Sequence
  Description of Artificial Sequence: Synthetic peptide
  Seed: EWLKTRPILSPLTKG
EYLKARAILSPLTKG

SEQ ID NO: 137810 - protein, 15 aa, Artificial Sequence
  Description of Artificial Sequence: Synthetic peptide
  Seed: EWLKTRPILSPLTKG
EFLKVRTILAPLTKG

SEQ ID NO: 137811 - protein, 15 aa, Artificial Sequence
  Description of Artificial Sequence: Synthetic peptide
  Seed: EWLKTRPILSPLTKG
EFLKIRSILGPLTKG

SEQ ID NO: 137812 - protein, 15 aa, Artificial Sequence
  Description of Artificial Sequence: Synthetic peptide
  Seed: EWLKTRPILSPLTKG
EWIKTMPRLSVLTKG

SEQ ID NO: 137813 - protein, 15 aa, Artificial Sequence
  Description of Artificial Sequence: Synthetic peptide
  Seed: EWLKTRPILSPLTKG
EWLKFRPMLAPLLKG

SEQ ID NO: 137814 - protein, 15 aa, Artificial Sequence
  Description of Artificial Sequence: Synthetic peptide
  Seed: EWLKTRPILSPLTKG
EFLKLRSILAPLTKG

SEQ ID NO: 137815 - protein, 15 aa, Artificial Sequence
  Description of Artificial Sequence: Synthetic peptide
  Seed: EWLKTRPILSPLTKG
EWLKIRPALVPLAKG

SEQ ID NO: 137816 - protein, 15 aa, Artificial Sequence
  Description of Artificial Sequence: Synthetic peptide
  Seed: EWLKTRPILSPLTKG
EWFKTIPKLSVLTKG

SEQ ID NO: 137817 - protein, 15 aa, Artificial Sequence
  Description of Artificial Sequence: Synthetic peptide
  Seed: EWLKTRPILSPLTKG
EFLKMRSILVPLTKG

SEQ ID NO: 137818 - protein, 15 aa, Artificial Sequence
  Description of Artificial Sequence: Synthetic peptide
  Seed: EWLKTRPILSPLTKG
EWFKTIPRLSVLTKG

SEQ ID NO: 137819 - protein, 15 aa, Artificial Sequence
  Description of Artificial Sequence: Synthetic peptide
  Seed: EWLKTRPILSPLTKG
EWLKIRPALSPLIKG

SEQ ID NO: 137820 - protein, 15 aa, Artificial Sequence
  Description of Artificial Sequence: Synthetic peptide
  Seed: EWLKTRPILSPLTKG
EWLKIRPMLAPLVKG

SEQ ID NO: 137821 - protein, 15 aa, Artificial Sequence
  Description of Artificial Sequence: Synthetic peptide
  Seed: EWLKTRPILSPLTKG
EFLKMRTILGPLTKG

SEQ ID NO: 137822 - protein, 15 aa, Artificial Sequence
  Description of Artificial Sequence: Synthetic peptide
  Seed: EWLKTRPILSPLTKG
EWIKTIPSLSALTKG

SEQ ID NO: 137823 - protein, 15 aa, Artificial Sequence
  Description of Artificial Sequence: Synthetic peptide
  Seed: EWLKTRPILSPLTKG
EWIKTIPRLSALTKG

SEQ ID NO: 137824 - protein, 15 aa, Artificial Sequence
  Description of Artificial Sequence: Synthetic peptide
  Seed: EWLKTRPILSPLTKG
EILKARAILVPLTKG

SEQ ID NO: 137825 - protein, 15 aa, Artificial Sequence
  Description of Artificial Sequence: Synthetic peptide
  Seed: EWLKTRPILSPLTKG
EWLKIRPMLSPLAKG

SEQ ID NO: 137826 - protein, 15 aa, Artificial Sequence
  Description of Artificial Sequence: Synthetic peptide
  Seed: EWLKTRPILSPLTKG
EWLKIRPALAPLAKG

SEQ ID NO: 137827 - protein, 15 aa, Artificial Sequence
  Description of Artificial Sequence: Synthetic peptide
  Seed: EWLKTRPILSPLTKG
EWIKTFPALSLLTKG

SEQ ID NO: 137828 - protein, 15 aa, Artificial Sequence
  Description of Artificial Sequence: Synthetic peptide
  Seed: EWLKTRPILSPLTKG
EWIKTIPFLSRLTKG

SEQ ID NO: 137829 - protein, 15 aa, Artificial Sequence
  Description of Artificial Sequence: Synthetic peptide
  Seed: EWLKTRPILSPLTKG
EFLKIRKILSPLTKG

SEQ ID NO: 137830 - protein, 15 aa, Artificial Sequence
  Description of Artificial Sequence: Synthetic peptide
  Seed: EWLKTRPILSPLTKG
EWLKFRPALSPLAKG

SEQ ID NO: 137831 - protein, 9 aa, Influenza A virus
AASLSPGMM

SEQ ID NO: 137832 - protein, 10 aa, Influenza A virus
AASLSPGMMM

SEQ ID NO: 137833 - protein, 9 aa, Influenza A virus
AATALANTI

SEQ ID NO: 137834 - protein, 9 aa, Influenza A virus
ADMSIGVTV

SEQ ID NO: 137835 - protein, 10 aa, Influenza A virus
ADMSIGVTVI

SEQ ID NO: 137836 - protein, 11 aa, Influenza A virus
ADMSIGVTVIK

SEQ ID NO: 137837 - protein, 9 aa, Influenza A virus
AEILKICST

SEQ ID NO: 137838 - protein, 10 aa, Influenza A virus
AEILKICSTI

SEQ ID NO: 137839 - protein, 8 aa, Influenza A virus
AEIMKICF

SEQ ID NO: 137840 - protein, 9 aa, Influenza A virus
AEIMKICFT

SEQ ID NO: 137841 - protein, 10 aa, Influenza A virus
AEIMKICFTI

SEQ ID NO: 137842 - protein, 9 aa, Influenza A virus
AEIMKICST

SEQ ID NO: 137843 - protein, 10 aa, Influenza A virus
AEIMKICSTI

SEQ ID NO: 137844 - protein, 9 aa, Influenza A virus
AEIMKTCST

SEQ ID NO: 137845 - protein, 10 aa, Influenza A virus
AEIMKTCSTI

SEQ ID NO: 137846 - protein, 9 aa, Influenza A virus
AEMIANIDL

SEQ ID NO: 137847 - protein, 10 aa, Influenza A virus
AEMIANIDLK

SEQ ID NO: 137848 - protein, 11 aa, Influenza A virus
AEMIANIDLKY

SEQ ID NO: 137849 - protein, 9 aa, Influenza A virus
AEMLADIDL

SEQ ID NO: 137850 - protein, 10 aa, Influenza A virus
AEMLADIDLK

SEQ ID NO: 137851 - protein, 11 aa, Influenza A virus
AEMLADIDLKY

SEQ ID NO: 137852 - protein, 9 aa, Influenza A virus
AEMLANIDL

SEQ ID NO: 137853 - protein, 10 aa, Influenza A virus
AEMLANIDLK

SEQ ID NO: 137854 - protein, 11 aa, Influenza A virus
AEMLANIDLKY

SEQ ID NO: 137855 - protein, 10 aa, Influenza A virus
AEMLANIDLR

SEQ ID NO: 137856 - protein, 11 aa, Influenza A virus
AEMLANIDLRY

SEQ ID NO: 137857 - protein, 9 aa, Influenza A virus
AEMLASIDL

SEQ ID NO: 137858 - protein, 10 aa, Influenza A virus
AEMLASIDLK

SEQ ID NO: 137859 - protein, 11 aa, Influenza A virus
AEMLASIDLKY

SEQ ID NO: 137860 - protein, 9 aa, Influenza A virus
AEMLATIDL

SEQ ID NO: 137861 - protein, 10 aa, Influenza A virus
AEMLATIDLK

SEQ ID NO: 137862 - protein, 11 aa, Influenza A virus
AEMLATIDLKY

SEQ ID NO: 137863 - protein, 9 aa, Influenza A virus
AEMLSGIDL

SEQ ID NO: 137864 - protein, 10 aa, Influenza A virus
AEMLSGIDLR

SEQ ID NO: 137865 - protein, 11 aa, Influenza A virus
AEMLSGIDLRY

SEQ ID NO: 137866 - protein, 9 aa, Influenza A virus
AEMLSSIDL

SEQ ID NO: 137867 - protein, 10 aa, Influenza A virus
AEMLSSIDLR

SEQ ID NO: 137868 - protein, 11 aa, Influenza A virus
AEMLSSIDLRY

SEQ ID NO: 137869 - protein, 9 aa, Influenza A virus
AEMLTSIDL

SEQ ID NO: 137870 - protein, 10 aa, Influenza A virus
AEMLTSIDLK

SEQ ID NO: 137871 - protein, 11 aa, Influenza A virus
AEMLTSIDLKY

SEQ ID NO: 137872 - protein, 8 aa, Influenza A virus
AFATTHSW

SEQ ID NO: 137873 - protein, 9 aa, Influenza A virus
AFATTHSWI

SEQ ID NO: 137874 - protein, 11 aa, Influenza A virus
AFATTHSWIPK

SEQ ID NO: 137875 - protein, 10 aa, Influenza A virus
AFLEESHPGI

SEQ ID NO: 137876 - protein, 11 aa, Influenza A virus
AFLEESHPGIF

SEQ ID NO: 137877 - protein, 10 aa, Influenza A virus
AFLEESHPGL

SEQ ID NO: 137878 - protein, 11 aa, Influenza A virus
AFLEESHPGLF

SEQ ID NO: 137879 - protein, 10 aa, Influenza A virus
AFLEGSHPGI

SEQ ID NO: 137880 - protein, 11 aa, Influenza A virus
AFLEGSHPGIF

SEQ ID NO: 137881 - protein, 11 aa, Influenza A virus
AFLEKSHPGIF

SEQ ID NO: 137882 - protein, 11 aa, Influenza A virus
AFLENSHPGIF

SEQ ID NO: 137883 - protein, 11 aa, Influenza A virus
AFLERSHPGIF

SEQ ID NO: 137884 - protein, 11 aa, Influenza A virus
AGIQAGVDRFY

SEQ ID NO: 137885 - protein, 10 aa, Influenza A virus
AGMLASIDLK

SEQ ID NO: 137886 - protein, 11 aa, Influenza A virus
AGMLASIDLKY

SEQ ID NO: 137887 - protein, 8 aa, Influenza A virus
AGVDRFYR

SEQ ID NO: 137888 - protein, 8 aa, Influenza A virus
AGVNRFYR

SEQ ID NO: 137889 - protein, 10 aa, Influenza A virus
AHGPAKIMEY

SEQ ID NO: 137890 - protein, 10 aa, Influenza A virus
AHGPAKNMEY

SEQ ID NO: 137891 - protein, 10 aa, Influenza A virus
AHGPAKSMEY

SEQ ID NO: 137892 - protein, 10 aa, Influenza A virus
AHGPAKSVEY

SEQ ID NO: 137893 - protein, 10 aa, Influenza A virus
AHGPARSMEY

SEQ ID NO: 137894 - protein, 9 aa, Influenza A virus
AIATPGMQI

SEQ ID NO: 137895 - protein, 10 aa, Influenza A virus
AIATPGMQIR

SEQ ID NO: 137896 - protein, 8 aa, Influenza A virus
AISTTFPY

SEQ ID NO: 137897 - protein, 9 aa, Influenza A virus
AISTTFPYT

SEQ ID NO: 137898 - protein, 9 aa, Influenza A virus
AKIMEYDAV

SEQ ID NO: 137899 - protein, 10 aa, Influenza A virus
AKIMEYDAVA

SEQ ID NO: 137900 - protein, 10 aa, Influenza A virus
AKLANVVRKM

SEQ ID NO: 137901 - protein, 9 aa, Influenza A virus
AKSMEYDAF

SEQ ID NO: 137902 - protein, 9 aa, Influenza A virus
ALANTIEIF

SEQ ID NO: 137903 - protein, 10 aa, Influenza A virus
ALANTIEIFR

SEQ ID NO: 137904 - protein, 8 aa, Influenza A virus
ALANTIEV

SEQ ID NO: 137905 - protein, 9 aa, Influenza A virus
ALANTIEVF

SEQ ID NO: 137906 - protein, 10 aa, Influenza A virus
ALANTIEVFR

SEQ ID NO: 137907 - protein, 11 aa, Influenza A virus
ALANTIEVFRL

SEQ ID NO: 137908 - protein, 9 aa, Influenza A virus
ALARSICEK

SEQ ID NO: 137909 - protein, 10 aa, Influenza A virus
ALARSICEKL

SEQ ID NO: 137910 - protein, 10 aa, Influenza A virus
ALIVNAPNHA

SEQ ID NO: 137911 - protein, 9 aa, Influenza A virus
ALIVNAPNY

SEQ ID NO: 137912 - protein, 10 aa, Influenza A virus
ALIVNAPNYA

SEQ ID NO: 137913 - protein, 9 aa, Influenza A virus
ALNHEGIQA

SEQ ID NO: 137914 - protein, 11 aa, Influenza A virus
ALNHEGIQAGV

SEQ ID NO: 137915 - protein, 9 aa, Influenza A virus
ALQLFIKDY

SEQ ID NO: 137916 - protein, 10 aa, Influenza A virus
ALQLFIKDYR

SEQ ID NO: 137917 - protein, 11 aa, Influenza A virus
ALQLNPIDGPL

SEQ ID NO: 137918 - protein, 9 aa, Influenza A virus
ALTLNTMTK

SEQ ID NO: 137919 - protein, 9 aa, Influenza A virus
AMAFLEGSH

SEQ ID NO: 137920 - protein, 9 aa, Influenza A virus
AMAFLENSH

SEQ ID NO: 137921 - protein, 9 aa, Influenza A virus
AMAFLERSH

SEQ ID NO: 137922 - protein, 10 aa, Influenza A virus
AMISRARIDA

SEQ ID NO: 137923 - protein, 11 aa, Influenza A virus
AMISRARIDAR

SEQ ID NO: 137924 - protein, 8 aa, Influenza A virus
AMITYITR

SEQ ID NO: 137925 - protein, 9 aa, Influenza A virus
AMITYITRK

SEQ ID NO: 137926 - protein, 9 aa, Influenza A virus
AMITYITRT

SEQ ID NO: 137927 - protein, 8 aa, Influenza A virus
AMITYMTR

SEQ ID NO: 137928 - protein, 8 aa, Influenza A virus
AMMTYITK

SEQ ID NO: 137929 - protein, 10 aa, Influenza A virus
AMVSRAQIDA

SEQ ID NO: 137930 - protein, 11 aa, Influenza A virus
AMVSRAQIDAR

SEQ ID NO: 137931 - protein, 11 aa, Influenza A virus
AMVSRARIDAR

SEQ ID NO: 137932 - protein, 11 aa, Influenza A virus
AMVSRARIDTR

SEQ ID NO: 137933 - protein, 10 aa, Influenza A virus
ANESGRLIDF

SEQ ID NO: 137934 - protein, 10 aa, Influenza A virus
ANESGRLIDL

SEQ ID NO: 137935 - protein, 10 aa, Influenza A virus
ANFSMELPSF

SEQ ID NO: 137936 - protein, 9 aa, Influenza A virus
APIMFSNKM

SEQ ID NO: 137937 - protein, 10 aa, Influenza A virus
APIMFSNKMA

SEQ ID NO: 137938 - protein, 11 aa, Influenza A virus
APIMFSNKMAR

SEQ ID NO: 137939 - protein, 9 aa, Influenza A virus
APLMFSNKM

SEQ ID NO: 137940 - protein, 10 aa, Influenza A virus
APLMFSNKMA

SEQ ID NO: 137941 - protein, 11 aa, Influenza A virus
APLMFSNKMAR

SEQ ID NO: 137942 - protein, 9 aa, Influenza A virus
APNHAGIQA

SEQ ID NO: 137943 - protein, 9 aa, Influenza A virus
APNHEGIEA

SEQ ID NO: 137944 - protein, 9 aa, Influenza A virus
APNHEGIQA

SEQ ID NO: 137945 - protein, 9 aa, Influenza A virus
APNYAGIQA

SEQ ID NO: 137946 - protein, 11 aa, Influenza A virus
APQLNPIDGPL

SEQ ID NO: 137947 - protein, 9 aa, Influenza A virus
APSHEGIQA

SEQ ID NO: 137948 - protein, 9 aa, Influenza A virus
AQIDARIDF

SEQ ID NO: 137949 - protein, 8 aa, Influenza A virus
AQLALQLF

SEQ ID NO: 137950 - protein, 9 aa, Influenza A virus
AQLALQLFI

SEQ ID NO: 137951 - protein, 10 aa, Influenza A virus
AQLALQLFIK

SEQ ID NO: 137952 - protein, 10 aa, Influenza A virus
AQLNPIDGPL

SEQ ID NO: 137953 - protein, 8 aa, Influenza A virus
AQMALQLF

SEQ ID NO: 137954 - protein, 9 aa, Influenza A virus
AQMALQLFI

SEQ ID NO: 137955 - protein, 10 aa, Influenza A virus
AQMALQLFIK

SEQ ID NO: 137956 - protein, 9 aa, Influenza A virus
AQNAISTTF

SEQ ID NO: 137957 - protein, 10 aa, Influenza A virus
AQNAISTTFP

SEQ ID NO: 137958 - protein, 11 aa, Influenza A virus
AQNAISTTFPY

SEQ ID NO: 137959 - protein, 9 aa, Influenza A virus
AQQDCVLEA

SEQ ID NO: 137960 - protein, 10 aa, Influenza A virus
AQQDCVLEAM

SEQ ID NO: 137961 - protein, 9 aa, Influenza A virus
AQTDCVLEA

SEQ ID NO: 137962 - protein, 10 aa, Influenza A virus
AQTDCVLEAM

SEQ ID NO: 137963 - protein, 10 aa, Influenza A virus
AQTDCVLEAV

SEQ ID NO: 137964 - protein, 9 aa, Influenza A virus
AQTDCVLEV

SEQ ID NO: 137965 - protein, 10 aa, Influenza A virus
AQTDCVLEVM

SEQ ID NO: 137966 - protein, 9 aa, Influenza A virus
ARIDARIDF

SEQ ID NO: 137967 - protein, 11 aa, Influenza A virus
ARIDARIDFEA

SEQ ID NO: 137968 - protein, 9 aa, Influenza A virus
ARIDARVDF

SEQ ID NO: 137969 - protein, 9 aa, Influenza A virus
ARIDFEAGR

SEQ ID NO: 137970 - protein, 10 aa, Influenza A virus
ARIDFEAGRI

SEQ ID NO: 137971 - protein, 11 aa, Influenza A virus
ARIDFEAGRIK

SEQ ID NO: 137972 - protein, 9 aa, Influenza A virus
ARIDFESGR

SEQ ID NO: 137973 - protein, 10 aa, Influenza A virus
ARIDFESGRI

SEQ ID NO: 137974 - protein, 11 aa, Influenza A virus
ARIDFESGRIK

SEQ ID NO: 137975 - protein, 11 aa, Influenza A virus
ARIDFESGRTK

SEQ ID NO: 137976 - protein, 10 aa, Influenza A virus
ARIDFESGRV

SEQ ID NO: 137977 - protein, 11 aa, Influenza A virus
ARIDFESGRVK

SEQ ID NO: 137978 - protein, 9 aa, Influenza A virus
ARIDTRIDF

SEQ ID NO: 137979 - protein, 9 aa, Influenza A virus
ARLGKGYMF

SEQ ID NO: 137980 - protein, 10 aa, Influenza A virus
ARLGKGYMFK

SEQ ID NO: 137981 - protein, 10 aa, Influenza A virus
ARVDFESGRI

SEQ ID NO: 137982 - protein, 10 aa, Influenza A virus
ASESGRLIDF

SEQ ID NO: 137983 - protein, 11 aa, Influenza A virus
ASLEESHPGIF

SEQ ID NO: 137984 - protein, 9 aa, Influenza A virus
ASLSPGMMM

SEQ ID NO: 137985 - protein, 11 aa, Influenza A virus
ASLSPGMMMGM

SEQ ID NO: 137986 - protein, 10 aa, Influenza A virus
ATALANTIEI

SEQ ID NO: 137987 - protein, 11 aa, Influenza A virus
ATALANTIEIF

SEQ ID NO: 137988 - protein, 10 aa, Influenza A virus
ATALANTIEV

SEQ ID NO: 137989 - protein, 11 aa, Influenza A virus
ATALANTIEVF

SEQ ID NO: 137990 - protein, 9 aa, Influenza A virus
ATAQLALQL

SEQ ID NO: 137991 - protein, 10 aa, Influenza A virus
ATAQLALQLF

SEQ ID NO: 137992 - protein, 9 aa, Influenza A virus
ATAQMALQL

SEQ ID NO: 137993 - protein, 10 aa, Influenza A virus
ATAQMALQLF

SEQ ID NO: 137994 - protein, 11 aa, Influenza A virus
ATAQMALQLFI

SEQ ID NO: 137995 - protein, 9 aa, Influenza A virus
ATTHSWIPK

SEQ ID NO: 137996 - protein, 10 aa, Influenza A virus
ATTHSWIPKR

SEQ ID NO: 137997 - protein, 9 aa, Influenza A virus
ATTHSWTPK

SEQ ID NO: 137998 - protein, 10 aa, Influenza A virus
ATTHSWTPKR

SEQ ID NO: 137999 - protein, 9 aa, Influenza A virus
ATTHSWVPK

SEQ ID NO: 138000 - protein, 10 aa, Influenza A virus
ATTHSWVPKR

SEQ ID NO: 138001 - protein, 8 aa, Influenza A virus
AVATTHSW

SEQ ID NO: 138002 - protein, 9 aa, Influenza A virus
AVATTHSWI

SEQ ID NO: 138003 - protein, 11 aa, Influenza A virus
AVATTHSWIPK

SEQ ID NO: 138004 - protein, 11 aa, Influenza A virus
AVATTHSWTPK

SEQ ID NO: 138005 - protein, 9 aa, Influenza A virus
AVATTHSWV

SEQ ID NO: 138006 - protein, 11 aa, Influenza A virus
AVATTHSWVPK

SEQ ID NO: 138007 - protein, 10 aa, Influenza A virus
AVIMPAHGPA

SEQ ID NO: 138008 - protein, 11 aa, Influenza A virus
AVIMPAHGPAK

SEQ ID NO: 138009 - protein, 8 aa, Influenza A virus
AVITYITR

SEQ ID NO: 138010 - protein, 10 aa, Influenza A virus
AVMMPAHGPA

SEQ ID NO: 138011 - protein, 11 aa, Influenza A virus
AVMMPAHGPAK

SEQ ID NO: 138012 - protein, 9 aa, Influenza A virus
AVQQTRVDK

SEQ ID NO: 138013 - protein, 10 aa, Influenza A virus
AVVMPAHGPA

SEQ ID NO: 138014 - protein, 11 aa, Influenza A virus
AVVMPAHGPAK

SEQ ID NO: 138015 - protein, 11 aa, Influenza A virus
AVVMPAHGPAR

SEQ ID NO: 138016 - protein, 10 aa, Influenza A virus
AVVMPSHGPA

SEQ ID NO: 138017 - protein, 11 aa, Influenza A virus
AVVMPSHGPAK

SEQ ID NO: 138018 - protein, 11 aa, Influenza A virus
CCNLFEKFFPS

SEQ ID NO: 138019 - protein, 11 aa, Influenza A virus
CCNLFERFFPS

SEQ ID NO: 138020 - protein, 11 aa, Influenza A virus
CCSLFEKFFPS

SEQ ID NO: 138021 - protein, 11 aa, Influenza A virus
CCTLFEKFFPS

SEQ ID NO: 138022 - protein, 8 aa, Influenza A virus
CEFTSFFY

SEQ ID NO: 138023 - protein, 9 aa, Influenza A virus
CEFTSFFYR

SEQ ID NO: 138024 - protein, 10 aa, Influenza A virus
CEFTSFFYRY

SEQ ID NO: 138025 - protein, 9 aa, Influenza A virus
CEKLEQSGL

SEQ ID NO: 138026 - protein, 9 aa, Influenza A virus
CENLEQSGL

SEQ ID NO: 138027 - protein, 10 aa, Influenza A virus
CKLLGINMSK

SEQ ID NO: 138028 - protein, 11 aa, Influenza A virus
CKLLGINMSKK

SEQ ID NO: 138029 - protein, 10 aa, Influenza A virus
CKLVGINMSK

SEQ ID NO: 138030 - protein, 10 aa, Influenza A virus
CKLVGINMTK

SEQ ID NO: 138031 - protein, 8 aa, Influenza A virus
CLETMEAV

SEQ ID NO: 138032 - protein, 11 aa, Influenza A virus
CLETMEAVQQT

SEQ ID NO: 138033 - protein, 11 aa, Influenza A virus
CLETMEIVQQT

SEQ ID NO: 138034 - protein, 11 aa, Influenza A virus
CLETMEVIQQT

SEQ ID NO: 138035 - protein, 11 aa, Influenza A virus
CLETMEVVQQT

SEQ ID NO: 138036 - protein, 9 aa, Influenza A virus
CLKWELMDK

SEQ ID NO: 138037 - protein, 9 aa, Influenza A virus
CLKWELMDT

SEQ ID NO: 138038 - protein, 10 aa, Influenza A virus
CNLFEKFFPS

SEQ ID NO: 138039 - protein, 10 aa, Influenza A virus
CNLFERFFPS

SEQ ID NO: 138040 - protein, 11 aa, Influenza A virus
CNPLNPFISHK

SEQ ID NO: 138041 - protein, 11 aa, Influenza A virus
CNPLNPFVSHK

SEQ ID NO: 138042 - protein, 10 aa, Influenza A virus
CSLFEKFFPS

SEQ ID NO: 138043 - protein, 9 aa, Influenza A virus
CSTIEEFRR

SEQ ID NO: 138044 - protein, 10 aa, Influenza A virus
CTIEELRRQK

SEQ ID NO: 138045 - protein, 8 aa, Influenza A virus
CTKTTYWW

SEQ ID NO: 138046 - protein, 10 aa, Influenza A virus
CTLFEKFFPS

SEQ ID NO: 138047 - protein, 9 aa, Influenza A virus
CVLEAMAFL

SEQ ID NO: 138048 - protein, 11 aa, Influenza A virus
CVLEAMAFLEK

SEQ ID NO: 138049 - protein, 11 aa, Influenza A virus
CVLEAMAFLER

SEQ ID NO: 138050 - protein, 9 aa, Influenza A virus
CVLEAMASL

SEQ ID NO: 138051 - protein, 9 aa, Influenza A virus
CVLEAVAFL

SEQ ID NO: 138052 - protein, 9 aa, Influenza A virus
CVLEVMAFL

SEQ ID NO: 138053 - protein, 9 aa, Influenza A virus
DAFATTHSW

SEQ ID NO: 138054 - protein, 10 aa, Influenza A virus
DAFATTHSWI

SEQ ID NO: 138055 - protein, 10 aa, Influenza A virus
DARIDFEAGR

SEQ ID NO: 138056 - protein, 10 aa, Influenza A virus
DARIDFESGR

SEQ ID NO: 138057 - protein, 10 aa, Influenza A virus
DARVDFESGR

SEQ ID NO: 138058 - protein, 9 aa, Influenza A virus
DAVATTHSW

SEQ ID NO: 138059 - protein, 10 aa, Influenza A virus
DAVATTHSWI

SEQ ID NO: 138060 - protein, 10 aa, Influenza A virus
DAVATTHSWV

SEQ ID NO: 138061 - protein, 10 aa, Influenza A virus
DCVLEAMAFL

SEQ ID NO: 138062 - protein, 10 aa, Influenza A virus
DCVLEAMASL

SEQ ID NO: 138063 - protein, 10 aa, Influenza A virus
DCVLEAVAFL

SEQ ID NO: 138064 - protein, 10 aa, Influenza A virus
DCVLEVMAFL

SEQ ID NO: 138065 - protein, 11 aa, Influenza A virus
DDMSIGVTVIK

SEQ ID NO: 138066 - protein, 8 aa, Influenza A virus
DEIEVTTH

SEQ ID NO: 138067 - protein, 9 aa, Influenza A virus
DEIEVTTHF

SEQ ID NO: 138068 - protein, 11 aa, Influenza A virus
DEQMYQKCCSL

SEQ ID NO: 138069 - protein, 8 aa, Influenza A virus
DEVEITTH

SEQ ID NO: 138070 - protein, 9 aa, Influenza A virus
DEVEITTHF

SEQ ID NO: 138071 - protein, 11 aa, Influenza A virus
DEVEITTHFQR

SEQ ID NO: 138072 - protein, 8 aa, Influenza A virus
DEVEVTTH

SEQ ID NO: 138073 - protein, 9 aa, Influenza A virus
DEVEVTTHF

SEQ ID NO: 138074 - protein, 11 aa, Influenza A virus
DEVEVTTHFQR

SEQ ID NO: 138075 - protein, 10 aa, Influenza A virus
DFLKDVIESM

SEQ ID NO: 138076 - protein, 10 aa, Influenza A virus
DFLKDVMDSM

SEQ ID NO: 138077 - protein, 10 aa, Influenza A virus
DFLKDVMESM

SEQ ID NO: 138078 - protein, 10 aa, Influenza A virus
DFLKDVVESM

SEQ ID NO: 138079 - protein, 10 aa, Influenza A virus
DGTASLSPGM

SEQ ID NO: 138080 - protein, 11 aa, Influenza A virus
DKEEIEITTHF

SEQ ID NO: 138081 - protein, 11 aa, Influenza A virus
DKEEMEIITHF

SEQ ID NO: 138082 - protein, 11 aa, Influenza A virus
DKEEMEITTHF

SEQ ID NO: 138083 - protein, 11 aa, Influenza A virus
DKEEMEIVTHF

SEQ ID NO: 138084 - protein, 11 aa, Influenza A virus
DKEEMEVTTHF

SEQ ID NO: 138085 - protein, 11 aa, Influenza A virus
DKGEMEIITHF

SEQ ID NO: 138086 - protein, 11 aa, Influenza A virus
DKGEMEITTHF

SEQ ID NO: 138087 - protein, 11 aa, Influenza A virus
DKKEMEITTHF

SEQ ID NO: 138088 - protein, 10 aa, Influenza A virus
DKRSYLIRAL

SEQ ID NO: 138089 - protein, 9 aa, Influenza A virus
DLIANESGR

SEQ ID NO: 138090 - protein, 10 aa, Influenza A virus
DLKYFNDSTK

SEQ ID NO: 138091 - protein, 10 aa, Influenza A virus
DLKYFNDSTR

SEQ ID NO: 138092 - protein, 10 aa, Influenza A virus
DLKYFNELTK

SEQ ID NO: 138093 - protein, 10 aa, Influenza A virus
DLKYFNEPTR

SEQ ID NO: 138094 - protein, 10 aa, Influenza A virus
DLKYFNESTR

SEQ ID NO: 138095 - protein, 10 aa, Influenza A virus
DLKYFNGSTR

SEQ ID NO: 138096 - protein, 11 aa, Influenza A virus
DLKYFNGSTRK

SEQ ID NO: 138097 - protein, 10 aa, Influenza A virus
DLMDEDYQGR

SEQ ID NO: 138098 - protein, 10 aa, Influenza A virus
DLRYFNDSTR

SEQ ID NO: 138099 - protein, 11 aa, Influenza A virus
DLRYFNDSTRR

SEQ ID NO: 138100 - protein, 9 aa, Influenza A virus
DLTANESGR

SEQ ID NO: 138101 - protein, 9 aa, Influenza A virus
DLTSNESGR

SEQ ID NO: 138102 - protein, 10 aa, Influenza A virus
DMEITTHFQR

SEQ ID NO: 138103 - protein, 10 aa, Influenza A virus
DMSIGVTVIK

SEQ ID NO: 138104 - protein, 11 aa, Influenza A virus
DNMTKKMITQR

SEQ ID NO: 138105 - protein, 11 aa, Influenza A virus
DNMTKRMVTQR

SEQ ID NO: 138106 - protein, 11 aa, Influenza A virus
DRDEIEVTTHF

SEQ ID NO: 138107 - protein, 11 aa, Influenza A virus
DREEMEITTHF

SEQ ID NO: 138108 - protein, 9 aa, Influenza A virus
DRFYRTCKL

SEQ ID NO: 138109 - protein, 10 aa, Influenza A virus
DRFYRTCKLL

SEQ ID NO: 138110 - protein, 10 aa, Influenza A virus
DSGRLIDFLK

SEQ ID NO: 138111 - protein, 10 aa, Influenza A virus
DSQIQTRRSF

SEQ ID NO: 138112 - protein, 9 aa, Influenza A virus
DSTRKKIER

SEQ ID NO: 138113 - protein, 10 aa, Influenza A virus
DTQIQTGRSF

SEQ ID NO: 138114 - protein, 10 aa, Influenza A virus
DTQIQTRRSF

SEQ ID NO: 138115 - protein, 10 aa, Influenza A virus
DTRIDFESGR

SEQ ID NO: 138116 - protein, 9 aa, Influenza A virus
DTVNRTHQY

SEQ ID NO: 138117 - protein, 9 aa, Influenza A virus
DTVSRTHQY

SEQ ID NO: 138118 - protein, 11 aa, Influenza A virus
DVMESMDKEEV

SEQ ID NO: 138119 - protein, 11 aa, Influenza A virus
DVMESMDKGEM

SEQ ID NO: 138120 - protein, 11 aa, Influenza A virus
DVMESMDRDEV

SEQ ID NO: 138121 - protein, 11 aa, Influenza A virus
DVMESMDREEV

SEQ ID NO: 138122 - protein, 11 aa, Influenza A virus
DVMESMNKGEM

SEQ ID NO: 138123 - protein, 9 aa, Influenza A virus
DVNPILLFL

SEQ ID NO: 138124 - protein, 10 aa, Influenza A virus
DVNPILLFLK

SEQ ID NO: 138125 - protein, 11 aa, Influenza A virus
DVNPILLFLKV

SEQ ID NO: 138126 - protein, 9 aa, Influenza A virus
DVNPTLIFL

SEQ ID NO: 138127 - protein, 10 aa, Influenza A virus
DVNPTLIFLK

SEQ ID NO: 138128 - protein, 11 aa, Influenza A virus
DVNPTLIFLKV

SEQ ID NO: 138129 - protein, 9 aa, Influenza A virus
DVNPTLLFL

SEQ ID NO: 138130 - protein, 10 aa, Influenza A virus
DVNPTLLFLK

SEQ ID NO: 138131 - protein, 9 aa, Influenza A virus
DVVESMDKK

SEQ ID NO: 138132 - protein, 9 aa, Influenza A virus
DWFRNVLSI

SEQ ID NO: 138133 - protein, 10 aa, Influenza A virus
DYRYPYRCHR

SEQ ID NO: 138134 - protein, 10 aa, Influenza A virus
DYRYTYRCHR

SEQ ID NO: 138135 - protein, 9 aa, Influenza A virus
EAGVDRFYR

SEQ ID NO: 138136 - protein, 10 aa, Influenza A virus
EALARSICEK

SEQ ID NO: 138137 - protein, 9 aa, Influenza A virus
EAMAFLEES

SEQ ID NO: 138138 - protein, 9 aa, Influenza A virus
EAMAFLEGS

SEQ ID NO: 138139 - protein, 9 aa, Influenza A virus
EAMAFLEKS

SEQ ID NO: 138140 - protein, 9 aa, Influenza A virus
EAMAFLENS

SEQ ID NO: 138141 - protein, 8 aa, Influenza A virus
EAMAFLER

SEQ ID NO: 138142 - protein, 9 aa, Influenza A virus
EAMAFLERS

SEQ ID NO: 138143 - protein, 8 aa, Influenza A virus
EAMISRAR

SEQ ID NO: 138144 - protein, 9 aa, Influenza A virus
EAMISRARI

SEQ ID NO: 138145 - protein, 9 aa, Influenza A virus
EAMVSRAQI

SEQ ID NO: 138146 - protein, 9 aa, Influenza A virus
EAMVSRARI

SEQ ID NO: 138147 - protein, 9 aa, Influenza A virus
EAVATTHSW

SEQ ID NO: 138148 - protein, 10 aa, Influenza A virus
EAVATTHSWI

SEQ ID NO: 138149 - protein, 10 aa, Influenza A virus
EAVQQTRVDK

SEQ ID NO: 138150 - protein, 11 aa, Influenza A virus
EDMEITTHFQR

SEQ ID NO: 138151 - protein, 9 aa, Influenza A virus
EEFAEILKI

SEQ ID NO: 138152 - protein, 9 aa, Influenza A virus
EEFAEIMKI

SEQ ID NO: 138153 - protein, 11 aa, Influenza A virus
EEFAEIMKICF

SEQ ID NO: 138154 - protein, 9 aa, Influenza A virus
EEFAEIMKT

SEQ ID NO: 138155 - protein, 9 aa, Influenza A virus
EEFSEIMKI

SEQ ID NO: 138156 - protein, 11 aa, Influenza A virus
EEFSEIMKICF

SEQ ID NO: 138157 - protein, 9 aa, Influenza A virus
EEFSEIMKT

SEQ ID NO: 138158 - protein, 9 aa, Influenza A virus
EEFTEIMKI

SEQ ID NO: 138159 - protein, 9 aa, Influenza A virus
EEFTEIMKT

SEQ ID NO: 138160 - protein, 9 aa, Influenza A virus
EEIEITTHF

SEQ ID NO: 138161 - protein, 11 aa, Influenza A virus
EEIEITTHFQR

SEQ ID NO: 138162 - protein, 8 aa, Influenza A virus
EEMEIITH

SEQ ID NO: 138163 - protein, 9 aa, Influenza A virus
EEMEIITHF

SEQ ID NO: 138164 - protein, 10 aa, Influenza A virus
EEMEIITHFQ

SEQ ID NO: 138165 - protein, 8 aa, Influenza A virus
EEMEITTH

SEQ ID NO: 138166 - protein, 9 aa, Influenza A virus
EEMEITTHF

SEQ ID NO: 138167 - protein, 10 aa, Influenza A virus
EEMEITTHFH

SEQ ID NO: 138168 - protein, 11 aa, Influenza A virus
EEMEITTHFHR

SEQ ID NO: 138169 - protein, 10 aa, Influenza A virus
EEMEITTHFQ

SEQ ID NO: 138170 - protein, 11 aa, Influenza A virus
EEMEITTHFQR

SEQ ID NO: 138171 - protein, 8 aa, Influenza A virus
EEMEIVTH

SEQ ID NO: 138172 - protein, 9 aa, Influenza A virus
EEMEIVTHF

SEQ ID NO: 138173 - protein, 10 aa, Influenza A virus
EEMEIVTHFQ

SEQ ID NO: 138174 - protein, 8 aa, Influenza A virus
EEMEVTTH

SEQ ID NO: 138175 - protein, 9 aa, Influenza A virus
EEMEVTTHF

SEQ ID NO: 138176 - protein, 10 aa, Influenza A virus
EEMEVTTHFQ

SEQ ID NO: 138177 - protein, 8 aa, Influenza A virus
EEMGITTH

SEQ ID NO: 138178 - protein, 9 aa, Influenza A virus
EEMGITTHF

SEQ ID NO: 138179 - protein, 10 aa, Influenza A virus
EEMGITTHFQ

SEQ ID NO: 138180 - protein, 11 aa, Influenza A virus
EEMGITTHFQR

SEQ ID NO: 138181 - protein, 9 aa, Influenza A virus
EEVEITTHF

SEQ ID NO: 138182 - protein, 11 aa, Influenza A virus
EEVEITTHFQR

SEQ ID NO: 138183 - protein, 11 aa, Influenza A virus
EEYQGRLCNPL

SEQ ID NO: 138184 - protein, 8 aa, Influenza A virus
EFTSFFYR

SEQ ID NO: 138185 - protein, 9 aa, Influenza A virus
EFTSFFYRY

SEQ ID NO: 138186 - protein, 9 aa, Influenza A virus
EGIEAGVDR

SEQ ID NO: 138187 - protein, 9 aa, Influenza A virus
EGIQAGVDR

SEQ ID NO: 138188 - protein, 9 aa, Influenza A virus
EGIQAGVNR

SEQ ID NO: 138189 - protein, 9 aa, Influenza A virus
EGMEITTHF

SEQ ID NO: 138190 - protein, 11 aa, Influenza A virus
EGMEITTHFQR

SEQ ID NO: 138191 - protein, 10 aa, Influenza A virus
EGTASLSPGM

SEQ ID NO: 138192 - protein, 10 aa, Influenza A virus
EIEITTHFQR

SEQ ID NO: 138193 - protein, 9 aa, Influenza A virus
EIESINNAV

SEQ ID NO: 138194 - protein, 10 aa, Influenza A virus
EIESINNAVV

SEQ ID NO: 138195 - protein, 9 aa, Influenza A virus
EIESMNNAV

SEQ ID NO: 138196 - protein, 9 aa, Influenza A virus
EIESVNNAV

SEQ ID NO: 138197 - protein, 10 aa, Influenza A virus
EIESVNNAVV

SEQ ID NO: 138198 - protein, 9 aa, Influenza A virus
EIESVNNTV

SEQ ID NO: 138199 - protein, 9 aa, Influenza A virus
EIESVNSAV

SEQ ID NO: 138200 - protein, 10 aa, Influenza A virus
EIESVNSAVV

SEQ ID NO: 138201 - protein, 10 aa, Influenza A virus
EIEVTTHFQR

SEQ ID NO: 138202 - protein, 10 aa, Influenza A virus
EIGAPQLNPI

SEQ ID NO: 138203 - protein, 8 aa, Influenza A virus
EIITHFQR

SEQ ID NO: 138204 - protein, 9 aa, Influenza A virus
EIITHFQRK

SEQ ID NO: 138205 - protein, 10 aa, Influenza A virus
EIITHFQRKR

SEQ ID NO: 138206 - protein, 11 aa, Influenza A virus
EIITHFQRKRR

SEQ ID NO: 138207 - protein, 10 aa, Influenza A virus
EIKKLWDQTR

SEQ ID NO: 138208 - protein, 10 aa, Influenza A virus
EIKKLWEQTR

SEQ ID NO: 138209 - protein, 9 aa, Influenza A virus
EILKICSTI

SEQ ID NO: 138210 - protein, 9 aa, Influenza A virus
EIMKICCTI

SEQ ID NO: 138211 - protein, 9 aa, Influenza A virus
EIMKICFTI

SEQ ID NO: 138212 - protein, 9 aa, Influenza A virus
EIMKICSTI

SEQ ID NO: 138213 - protein, 9 aa, Influenza A virus
EIMKTCSTI

SEQ ID NO: 138214 - protein, 10 aa, Influenza A virus
EINKLWEQTR

SEQ ID NO: 138215 - protein, 8 aa, Influenza A virus
EITTHFHR

SEQ ID NO: 138216 - protein, 9 aa, Influenza A virus
EITTHFHRK

SEQ ID NO: 138217 - protein, 10 aa, Influenza A virus
EITTHFHRKR

SEQ ID NO: 138218 - protein, 11 aa, Influenza A virus
EITTHFHRKRR

SEQ ID NO: 138219 - protein, 8 aa, Influenza A virus
EITTHFQR

SEQ ID NO: 138220 - protein, 9 aa, Influenza A virus
EITTHFQRK

SEQ ID NO: 138221 - protein, 10 aa, Influenza A virus
EITTHFQRKR

SEQ ID NO: 138222 - protein, 10 aa, Influenza A virus
EIVQQTRVDK

SEQ ID NO: 138223 - protein, 8 aa, Influenza A virus
EIVTHFQR

SEQ ID NO: 138224 - protein, 9 aa, Influenza A virus
EIVTHFQRK

SEQ ID NO: 138225 - protein, 10 aa, Influenza A virus
EIVTHFQRKR

SEQ ID NO: 138226 - protein, 11 aa, Influenza A virus
EKEEMEIVTHF

SEQ ID NO: 138227 - protein, 9 aa, Influenza A virus
EKFFPSSSY

SEQ ID NO: 138228 - protein, 10 aa, Influenza A virus
EKFFPSSSYR

SEQ ID NO: 138229 - protein, 11 aa, Influenza A virus
EKFFPSSSYRR

SEQ ID NO: 138230 - protein, 10 aa, Influenza A virus
EKLWEQTRSK

SEQ ID NO: 138231 - protein, 10 aa, Influenza A virus
ELEKLWEQTR

SEQ ID NO: 138232 - protein, 10 aa, Influenza A virus
ELKKLWDQTR

SEQ ID NO: 138233 - protein, 10 aa, Influenza A virus
ELKKLWEQTR

SEQ ID NO: 138234 - protein, 10 aa, Influenza A virus
ELKRLWEQTR

SEQ ID NO: 138235 - protein, 10 aa, Influenza A virus
ELMDEDYKGR

SEQ ID NO: 138236 - protein, 10 aa, Influenza A virus
ELMDEDYQGR

SEQ ID NO: 138237 - protein, 10 aa, Influenza A virus
ELMDEDYRGR

SEQ ID NO: 138238 - protein, 10 aa, Influenza A virus
ELMDEEYQGR

SEQ ID NO: 138239 - protein, 10 aa, Influenza A virus
ELMDKDYQGR

SEQ ID NO: 138240 - protein, 10 aa, Influenza A virus
ELMDTDYQGR

SEQ ID NO: 138241 - protein, 10 aa, Influenza A virus
ELPSFGVSGI

SEQ ID NO: 138242 - protein, 10 aa, Influenza A virus
ELPSFGVSGV

SEQ ID NO: 138243 - protein, 10 aa, Influenza A virus
EMEIITHFQR

SEQ ID NO: 138244 - protein, 11 aa, Influenza A virus
EMEIITHFQRK

SEQ ID NO: 138245 - protein, 10 aa, Influenza A virus
EMEITTHFHR

SEQ ID NO: 138246 - protein, 10 aa, Influenza A virus
EMEITTHFQR

SEQ ID NO: 138247 - protein, 10 aa, Influenza A virus
EMEIVTHFQR

SEQ ID NO: 138248 - protein, 10 aa, Influenza A virus
EMEVTTHFQR

SEQ ID NO: 138249 - protein, 10 aa, Influenza A virus
EMGITTHFQR

SEQ ID NO: 138250 - protein, 9 aa, Influenza A virus
EMIANIDLK

SEQ ID NO: 138251 - protein, 10 aa, Influenza A virus
EMIANIDLKY

SEQ ID NO: 138252 - protein, 9 aa, Influenza A virus
EMLADIDLK

SEQ ID NO: 138253 - protein, 10 aa, Influenza A virus
EMLADIDLKY

SEQ ID NO: 138254 - protein, 9 aa, Influenza A virus
EMLANIDLK

SEQ ID NO: 138255 - protein, 10 aa, Influenza A virus
EMLANIDLKY

SEQ ID NO: 138256 - protein, 9 aa, Influenza A virus
EMLANIDLR

SEQ ID NO: 138257 - protein, 10 aa, Influenza A virus
EMLANIDLRY

SEQ ID NO: 138258 - protein, 9 aa, Influenza A virus
EMLASIDLK

SEQ ID NO: 138259 - protein, 10 aa, Influenza A virus
EMLASIDLKY

SEQ ID NO: 138260 - protein, 9 aa, Influenza A virus
EMLATIDLK

SEQ ID NO: 138261 - protein, 10 aa, Influenza A virus
EMLATIDLKY

SEQ ID NO: 138262 - protein, 9 aa, Influenza A virus
EMLSGIDLR

SEQ ID NO: 138263 - protein, 10 aa, Influenza A virus
EMLSGIDLRY

SEQ ID NO: 138264 - protein, 9 aa, Influenza A virus
EMLSSIDLR

SEQ ID NO: 138265 - protein, 10 aa, Influenza A virus
EMLSSIDLRY

SEQ ID NO: 138266 - protein, 9 aa, Influenza A virus
EMLTSIDLK

SEQ ID NO: 138267 - protein, 10 aa, Influenza A virus
EMLTSIDLKY

SEQ ID NO: 138268 - protein, 10 aa, Influenza A virus
ENSCIETMEV

SEQ ID NO: 138269 - protein, 10 aa, Influenza A virus
ENSCLETMEV

SEQ ID NO: 138270 - protein, 11 aa, Influenza A virus
EPAQNAISTTF

SEQ ID NO: 138271 - protein, 10 aa, Influenza A virus
EQMYQKCCNL

SEQ ID NO: 138272 - protein, 11 aa, Influenza A virus
EQMYQKCCNLF

SEQ ID NO: 138273 - protein, 10 aa, Influenza A virus
EQMYQKCCSL

SEQ ID NO: 138274 - protein, 11 aa, Influenza A virus
EQMYQKCCSLF

SEQ ID NO: 138275 - protein, 10 aa, Influenza A virus
EQMYQKCCTL

SEQ ID NO: 138276 - protein, 11 aa, Influenza A virus
EQMYQKCCTLF

SEQ ID NO: 138277 - protein, 10 aa, Influenza A virus
EQMYQRCCNL

SEQ ID NO: 138278 - protein, 11 aa, Influenza A virus
EQMYQRCCNLF

SEQ ID NO: 138279 - protein, 9 aa, Influenza A virus
ERFFPSSSY

SEQ ID NO: 138280 - protein, 10 aa, Influenza A virus
ERFFPSSSYR

SEQ ID NO: 138281 - protein, 11 aa, Influenza A virus
ERFFPSSSYRR

SEQ ID NO: 138282 - protein, 9 aa, Influenza A virus
ESADMSIGV

SEQ ID NO: 138283 - protein, 10 aa, Influenza A virus
ESADMSIGVT

SEQ ID NO: 138284 - protein, 11 aa, Influenza A virus
ESADMSIGVTV

SEQ ID NO: 138285 - protein, 9 aa, Influenza A virus
ESDDMSIGV

SEQ ID NO: 138286 - protein, 11 aa, Influenza A virus
ESDDMSIGVTV

SEQ ID NO: 138287 - protein, 10 aa, Influenza A virus
ESGRLIDFLK

SEQ ID NO: 138288 - protein, 10 aa, Influenza A virus
ESGRLIDLLR

SEQ ID NO: 138289 - protein, 10 aa, Influenza A virus
ESGRLIDSLK

SEQ ID NO: 138290 - protein, 10 aa, Influenza A virus
ESGRLMDFLK

SEQ ID NO: 138291 - protein, 9 aa, Influenza A virus
ESHPGIFET

SEQ ID NO: 138292 - protein, 9 aa, Influenza A virus
ESINNAVVM

SEQ ID NO: 138293 - protein, 11 aa, Influenza A virus
ESINNAVVMPA

SEQ ID NO: 138294 - protein, 10 aa, Influenza A virus
ESMDKEEMEV

SEQ ID NO: 138295 - protein, 10 aa, Influenza A virus
ESMDKEGMEI

SEQ ID NO: 138296 - protein, 10 aa, Influenza A virus
ESMDKGEMEI

SEQ ID NO: 138297 - protein, 10 aa, Influenza A virus
ESMDRDEIEV

SEQ ID NO: 138298 - protein, 10 aa, Influenza A virus
ESMDRDEVEV

SEQ ID NO: 138299 - protein, 10 aa, Influenza A virus
ESMNKEEMGI

SEQ ID NO: 138300 - protein, 9 aa, Influenza A virus
ESMNNAVMM

SEQ ID NO: 138301 - protein, 11 aa, Influenza A virus
ESMNNAVMMPA

SEQ ID NO: 138302 - protein, 9 aa, Influenza A virus
ESTRKKIER

SEQ ID NO: 138303 - protein, 9 aa, Influenza A virus
ESTRKRIEK

SEQ ID NO: 138304 - protein, 9 aa, Influenza A virus
ESVNNAVIM

SEQ ID NO: 138305 - protein, 11 aa, Influenza A virus
ESVNNAVIMPA

SEQ ID NO: 138306 - protein, 9 aa, Influenza A virus
ESVNNAVMM

SEQ ID NO: 138307 - protein, 11 aa, Influenza A virus
ESVNNAVMMPA

SEQ ID NO: 138308 - protein, 9 aa, Influenza A virus
ESVNNAVVM

SEQ ID NO: 138309 - protein, 11 aa, Influenza A virus
ESVNNAVVMPA

SEQ ID NO: 138310 - protein, 9 aa, Influenza A virus
ESVNNTVVM

SEQ ID NO: 138311 - protein, 11 aa, Influenza A virus
ESVNNTVVMPA

SEQ ID NO: 138312 - protein, 9 aa, Influenza A virus
ESVNSAVVM

SEQ ID NO: 138313 - protein, 11 aa, Influenza A virus
ESVNSAVVMPA

SEQ ID NO: 138314 - protein, 10 aa, Influenza A virus
ETGAAQLNPI

SEQ ID NO: 138315 - protein, 10 aa, Influenza A virus
ETGAHQLNPI

SEQ ID NO: 138316 - protein, 10 aa, Influenza A virus
ETGALQLNPI

SEQ ID NO: 138317 - protein, 10 aa, Influenza A virus
ETGAPQLNPI

SEQ ID NO: 138318 - protein, 10 aa, Influenza A virus
ETGEPQLNPI

SEQ ID NO: 138319 - protein, 9 aa, Influenza A virus
ETIEVVQQT

SEQ ID NO: 138320 - protein, 10 aa, Influenza A virus
ETIEVVQQTR

SEQ ID NO: 138321 - protein, 11 aa, Influenza A virus
ETIEVVQQTRV

SEQ ID NO: 138322 - protein, 10 aa, Influenza A virus
ETLARGICEK

SEQ ID NO: 138323 - protein, 10 aa, Influenza A virus
ETLARNICEK

SEQ ID NO: 138324 - protein, 10 aa, Influenza A virus
ETLARRICEK

SEQ ID NO: 138325 - protein, 10 aa, Influenza A virus
ETLARSICEK

SEQ ID NO: 138326 - protein, 9 aa, Influenza A virus
ETMEAVQQT

SEQ ID NO: 138327 - protein, 10 aa, Influenza A virus
ETMEAVQQTR

SEQ ID NO: 138328 - protein, 11 aa, Influenza A virus
ETMEAVQQTRV

SEQ ID NO: 138329 - protein, 9 aa, Influenza A virus
ETMEIVQQT

SEQ ID NO: 138330 - protein, 10 aa, Influenza A virus
ETMEIVQQTR

SEQ ID NO: 138331 - protein, 11 aa, Influenza A virus
ETMEIVQQTRV

SEQ ID NO: 138332 - protein, 9 aa, Influenza A virus
ETMEVIQQT

SEQ ID NO: 138333 - protein, 10 aa, Influenza A virus
ETMEVIQQTR

SEQ ID NO: 138334 - protein, 11 aa, Influenza A virus
ETMEVIQQTRV

SEQ ID NO: 138335 - protein, 9 aa, Influenza A virus
ETMEVVQQT

SEQ ID NO: 138336 - protein, 10 aa, Influenza A virus
ETMEVVQQTR

SEQ ID NO: 138337 - protein, 11 aa, Influenza A virus
ETMEVVQQTRM

SEQ ID NO: 138338 - protein, 11 aa, Influenza A virus
ETMEVVQQTRV

SEQ ID NO: 138339 - protein, 10 aa, Influenza A virus
ETSCLETMEV

SEQ ID NO: 138340 - protein, 11 aa, Influenza A virus
ETSCLETMEVV

SEQ ID NO: 138341 - protein, 10 aa, Influenza A virus
EVEITTHFQR

SEQ ID NO: 138342 - protein, 11 aa, Influenza A virus
EVEITTHFQRK

SEQ ID NO: 138343 - protein, 9 aa, Influenza A virus
EVESVNNAV

SEQ ID NO: 138344 - protein, 10 aa, Influenza A virus
EVESVNNAVV

SEQ ID NO: 138345 - protein, 10 aa, Influenza A virus
EVEVTTHFQR

SEQ ID NO: 138346 - protein, 11 aa, Influenza A virus
EVEVTTHFQRK

SEQ ID NO: 138347 - protein, 9 aa, Influenza A virus
EVFRLNGLT

SEQ ID NO: 138348 - protein, 10 aa, Influenza A virus
EVFRLNGLTA

SEQ ID NO: 138349 - protein, 9 aa, Influenza A virus
EVFRSNDLI

SEQ ID NO: 138350 - protein, 10 aa, Influenza A virus
EVFRSNDLIA

SEQ ID NO: 138351 - protein, 9 aa, Influenza A virus
EVFRSNDLT

SEQ ID NO: 138352 - protein, 10 aa, Influenza A virus
EVFRSNDLTA

SEQ ID NO: 138353 - protein, 9 aa, Influenza A virus
EVFRSNGLI

SEQ ID NO: 138354 - protein, 10 aa, Influenza A virus
EVFRSNGLIA

SEQ ID NO: 138355 - protein, 9 aa, Influenza A virus
EVFRSNGLK

SEQ ID NO: 138356 - protein, 10 aa, Influenza A virus
EVFRSNGLKA

SEQ ID NO: 138357 - protein, 9 aa, Influenza A virus
EVFRSNGLM

SEQ ID NO: 138358 - protein, 10 aa, Influenza A virus
EVFRSNGLMA

SEQ ID NO: 138359 - protein, 9 aa, Influenza A virus
EVFRSNGLT

SEQ ID NO: 138360 - protein, 10 aa, Influenza A virus
EVFRSNGLTA

SEQ ID NO: 138361 - protein, 9 aa, Influenza A virus
EVFRSNGMT

SEQ ID NO: 138362 - protein, 10 aa, Influenza A virus
EVFRSNGMTA

SEQ ID NO: 138363 - protein, 10 aa, Influenza A virus
EVIQQTRVDK

SEQ ID NO: 138364 - protein, 9 aa, Influenza A virus
EVMAFLEES

SEQ ID NO: 138365 - protein, 8 aa, Influenza A virus
EVTTHFQR

SEQ ID NO: 138366 - protein, 9 aa, Influenza A virus
EVTTHFQRK

SEQ ID NO: 138367 - protein, 10 aa, Influenza A virus
EVTTHFQRKR

SEQ ID NO: 138368 - protein, 10 aa, Influenza A virus
EVVQQTRMDK

SEQ ID NO: 138369 - protein, 10 aa, Influenza A virus
EVVQQTRVDK

SEQ ID NO: 138370 - protein, 10 aa, Influenza A virus
EVVQQTRVDR

SEQ ID NO: 138371 - protein, 9 aa, Influenza A virus
EWFRNILSI

SEQ ID NO: 138372 - protein, 9 aa, Influenza A virus
EWFRNVLSI

SEQ ID NO: 138373 - protein, 9 aa, Influenza A virus
EWFRNVLSL

SEQ ID NO: 138374 - protein, 9 aa, Influenza A virus
EWFRNVLSV

SEQ ID NO: 138375 - protein, 11 aa, Influenza A virus
EYDAFATTHSW

SEQ ID NO: 138376 - protein, 11 aa, Influenza A virus
EYDAVATTHSW

SEQ ID NO: 138377 - protein, 11 aa, Influenza A virus
EYEAVATTHSW

SEQ ID NO: 138378 - protein, 9 aa, Influenza A virus
EYTKTAYWW

SEQ ID NO: 138379 - protein, 9 aa, Influenza A virus
EYTKTSYWW

SEQ ID NO: 138380 - protein, 9 aa, Influenza A virus
FAEIMKICF

SEQ ID NO: 138381 - protein, 11 aa, Influenza A virus
FAEIMKICFTI

SEQ ID NO: 138382 - protein, 11 aa, Influenza A virus
FAEIMKICSTI

SEQ ID NO: 138383 - protein, 11 aa, Influenza A virus
FAEIMKTCSTI

SEQ ID NO: 138384 - protein, 8 aa, Influenza A virus
FALIVNAL

SEQ ID NO: 138385 - protein, 10 aa, Influenza A virus
FALIVNAPNY

SEQ ID NO: 138386 - protein, 9 aa, Influenza A virus
FALIVNAPS

SEQ ID NO: 138387 - protein, 10 aa, Influenza A virus
FATTHSWIPK

SEQ ID NO: 138388 - protein, 11 aa, Influenza A virus
FATTHSWIPKR

SEQ ID NO: 138389 - protein, 9 aa, Influenza A virus
FEANFSMEL

SEQ ID NO: 138390 - protein, 10 aa, Influenza A virus
FEANFSMELP

SEQ ID NO: 138391 - protein, 8 aa, Influenza A virus
FEFTSFFY

SEQ ID NO: 138392 - protein, 9 aa, Influenza A virus
FEFTSFFYR

SEQ ID NO: 138393 - protein, 10 aa, Influenza A virus
FEFTSFFYRY

SEQ ID NO: 138394 - protein, 9 aa, Influenza A virus
FEIKKLWEQ

SEQ ID NO: 138395 - protein, 10 aa, Influenza A virus
FEIKKLWEQT

SEQ ID NO: 138396 - protein, 10 aa, Influenza A virus
FEINKLWEQT

SEQ ID NO: 138397 - protein, 9 aa, Influenza A virus
FEKFFPSSS

SEQ ID NO: 138398 - protein, 10 aa, Influenza A virus
FEKFFPSSSY

SEQ ID NO: 138399 - protein, 11 aa, Influenza A virus
FEKFFPSSSYR

SEQ ID NO: 138400 - protein, 9 aa, Influenza A virus
FELEKLWEQ

SEQ ID NO: 138401 - protein, 9 aa, Influenza A virus
FELKRLWEQ

SEQ ID NO: 138402 - protein, 9 aa, Influenza A virus
FENSCIETM

SEQ ID NO: 138403 - protein, 9 aa, Influenza A virus
FENSCLETI

SEQ ID NO: 138404 - protein, 9 aa, Influenza A virus
FENSCLETM

SEQ ID NO: 138405 - protein, 11 aa, Influenza A virus
FENSCLETMEA

SEQ ID NO: 138406 - protein, 9 aa, Influenza A virus
FERFFPSSS

SEQ ID NO: 138407 - protein, 10 aa, Influenza A virus
FERFFPSSSY

SEQ ID NO: 138408 - protein, 11 aa, Influenza A virus
FERFFPSSSYR

SEQ ID NO: 138409 - protein, 8 aa, Influenza A virus
FESKGMKL

SEQ ID NO: 138410 - protein, 8 aa, Influenza A virus
FESKNMKL

SEQ ID NO: 138411 - protein, 8 aa, Influenza A virus
FESKRMKL

SEQ ID NO: 138412 - protein, 8 aa, Influenza A virus
FESKSMKI

SEQ ID NO: 138413 - protein, 8 aa, Influenza A virus
FESKSMKL

SEQ ID NO: 138414 - protein, 9 aa, Influenza A virus
FETSCLETM

SEQ ID NO: 138415 - protein, 8 aa, Influenza A virus
FFPSSSYR

SEQ ID NO: 138416 - protein, 9 aa, Influenza A virus
FFPSSSYRR

SEQ ID NO: 138417 - protein, 11 aa, Influenza A virus
FFPSSSYRRPV

SEQ ID NO: 138418 - protein, 9 aa, Influenza A virus
FFYRYGFEA

SEQ ID NO: 138419 - protein, 11 aa, Influenza A virus
FFYRYGFEANF

SEQ ID NO: 138420 - protein, 9 aa, Influenza A virus
FFYRYGFVA

SEQ ID NO: 138421 - protein, 11 aa, Influenza A virus
FFYRYGFVANF

SEQ ID NO: 138422 - protein, 10 aa, Influenza A virus
FGVSGINESA

SEQ ID NO: 138423 - protein, 10 aa, Influenza A virus
FGVSGVNESA

SEQ ID NO: 138424 - protein, 9 aa, Influenza A virus
FIKDYRYPY

SEQ ID NO: 138425 - protein, 10 aa, Influenza A virus
FIKDYRYPYR

SEQ ID NO: 138426 - protein, 9 aa, Influenza A virus
FIKDYRYTY

SEQ ID NO: 138427 - protein, 10 aa, Influenza A virus
FIKDYRYTYR

SEQ ID NO: 138428 - protein, 10 aa, Influenza A virus
FISHKEIESV

SEQ ID NO: 138429 - protein, 8 aa, Influenza A virus
FLAMITYI

SEQ ID NO: 138430 - protein, 9 aa, Influenza A virus
FLAMITYIT

SEQ ID NO: 138431 - protein, 10 aa, Influenza A virus
FLAMITYITK

SEQ ID NO: 138432 - protein, 10 aa, Influenza A virus
FLAMITYITR

SEQ ID NO: 138433 - protein, 11 aa, Influenza A virus
FLAMITYITRT

SEQ ID NO: 138434 - protein, 8 aa, Influenza A virus
FLAMITYM

SEQ ID NO: 138435 - protein, 9 aa, Influenza A virus
FLAMITYMT

SEQ ID NO: 138436 - protein, 10 aa, Influenza A virus
FLAMITYMTR

SEQ ID NO: 138437 - protein, 8 aa, Influenza A virus
FLAMMTYI

SEQ ID NO: 138438 - protein, 9 aa, Influenza A virus
FLAMMTYIT

SEQ ID NO: 138439 - protein, 10 aa, Influenza A virus
FLAMMTYITK

SEQ ID NO: 138440 - protein, 8 aa, Influenza A virus
FLAVITYI

SEQ ID NO: 138441 - protein, 9 aa, Influenza A virus
FLAVITYIT

SEQ ID NO: 138442 - protein, 10 aa, Influenza A virus
FLAVITYITR

SEQ ID NO: 138443 - protein, 9 aa, Influenza A virus
FLEESHPGI

SEQ ID NO: 138444 - protein, 10 aa, Influenza A virus
FLEESHPGIF

SEQ ID NO: 138445 - protein, 9 aa, Influenza A virus
FLEESHPGL

SEQ ID NO: 138446 - protein, 10 aa, Influenza A virus
FLEESHPGLF

SEQ ID NO: 138447 - protein, 9 aa, Influenza A virus
FLEGSHPGI

SEQ ID NO: 138448 - protein, 10 aa, Influenza A virus
FLEGSHPGIF

SEQ ID NO: 138449 - protein, 9 aa, Influenza A virus
FLEKSHPGI

SEQ ID NO: 138450 - protein, 10 aa, Influenza A virus
FLEKSHPGIF

SEQ ID NO: 138451 - protein, 9 aa, Influenza A virus
FLENSHPGI

SEQ ID NO: 138452 - protein, 10 aa, Influenza A virus
FLENSHPGIF

SEQ ID NO: 138453 - protein, 9 aa, Influenza A virus
FLERSHPGI

SEQ ID NO: 138454 - protein, 10 aa, Influenza A virus
FLERSHPGIF

SEQ ID NO: 138455 - protein, 9 aa, Influenza A virus
FLKDVIESM

SEQ ID NO: 138456 - protein, 10 aa, Influenza A virus
FLKDVIESMD

SEQ ID NO: 138457 - protein, 9 aa, Influenza A virus
FLKDVMDSM

SEQ ID NO: 138458 - protein, 10 aa, Influenza A virus
FLKDVMDSMD

SEQ ID NO: 138459 - protein, 9 aa, Influenza A virus
FLKDVMESM

SEQ ID NO: 138460 - protein, 10 aa, Influenza A virus
FLKDVMESMD

SEQ ID NO: 138461 - protein, 10 aa, Influenza A virus
FLKDVMESME

SEQ ID NO: 138462 - protein, 10 aa, Influenza A virus
FLKDVMESMK

SEQ ID NO: 138463 - protein, 10 aa, Influenza A virus
FLKDVMESMN

SEQ ID NO: 138464 - protein, 9 aa, Influenza A virus
FLKDVMKSM

SEQ ID NO: 138465 - protein, 9 aa, Influenza A virus
FLKDVVESM

SEQ ID NO: 138466 - protein, 10 aa, Influenza A virus
FLKDVVESMD

SEQ ID NO: 138467 - protein, 9 aa, Influenza A virus
FLKEPAQNA

SEQ ID NO: 138468 - protein, 10 aa, Influenza A virus
FLKEPAQNAI

SEQ ID NO: 138469 - protein, 9 aa, Influenza A virus
FLKIPAQNA

SEQ ID NO: 138470 - protein, 10 aa, Influenza A virus
FLKIPAQNAI

SEQ ID NO: 138471 - protein, 9 aa, Influenza A virus
FLKVPAQNA

SEQ ID NO: 138472 - protein, 10 aa, Influenza A virus
FLKVPAQNAI

SEQ ID NO: 138473 - protein, 9 aa, Influenza A virus
FLKVPVQNA

SEQ ID NO: 138474 - protein, 10 aa, Influenza A virus
FLKVPVQNAI

SEQ ID NO: 138475 - protein, 10 aa, Influenza A virus
FNMLSTVLGV

SEQ ID NO: 138476 - protein, 11 aa, Influenza A virus
FNMLSTVLGVS

SEQ ID NO: 138477 - protein, 9 aa, Influenza A virus
FPSSSYRRP

SEQ ID NO: 138478 - protein, 10 aa, Influenza A virus
FPSSSYRRPV

SEQ ID NO: 138479 - protein, 9 aa, Influenza A virus
FPYTGDPPY

SEQ ID NO: 138480 - protein, 10 aa, Influenza A virus
FPYTGDPPYS

SEQ ID NO: 138481 - protein, 11 aa, Influenza A virus
FPYTGDPPYSH

SEQ ID NO: 138482 - protein, 11 aa, Influenza A virus
FQRKRRIRDNM

SEQ ID NO: 138483 - protein, 11 aa, Influenza A virus
FQRKRRVRDNM

SEQ ID NO: 138484 - protein, 8 aa, Influenza A virus
FRLNGLTA

SEQ ID NO: 138485 - protein, 9 aa, Influenza A virus
FRNILSIAP

SEQ ID NO: 138486 - protein, 10 aa, Influenza A virus
FRNILSIAPI

SEQ ID NO: 138487 - protein, 11 aa, Influenza A virus
FRNILSIAPIM

SEQ ID NO: 138488 - protein, 9 aa, Influenza A virus
FRNVLSIAP

SEQ ID NO: 138489 - protein, 10 aa, Influenza A virus
FRNVLSIAPI

SEQ ID NO: 138490 - protein, 11 aa, Influenza A virus
FRNVLSIAPIM

SEQ ID NO: 138491 - protein, 10 aa, Influenza A virus
FRNVLSIAPL

SEQ ID NO: 138492 - protein, 11 aa, Influenza A virus
FRNVLSIAPLM

SEQ ID NO: 138493 - protein, 9 aa, Influenza A virus
FRNVLSLAP

SEQ ID NO: 138494 - protein, 10 aa, Influenza A virus
FRNVLSLAPI

SEQ ID NO: 138495 - protein, 11 aa, Influenza A virus
FRNVLSLAPIM

SEQ ID NO: 138496 - protein, 8 aa, Influenza A virus
FRNVLSVA

SEQ ID NO: 138497 - protein, 9 aa, Influenza A virus
FRNVLSVAP

SEQ ID NO: 138498 - protein, 10 aa, Influenza A virus
FRNVLSVAPI

SEQ ID NO: 138499 - protein, 11 aa, Influenza A virus
FRNVLSVAPIM

SEQ ID NO: 138500 - protein, 8 aa, Influenza A virus
FRSNGMTA

SEQ ID NO: 138501 - protein, 11 aa, Influenza A virus
FSEIMKICCTI

SEQ ID NO: 138502 - protein, 9 aa, Influenza A virus
FSEIMKICF

SEQ ID NO: 138503 - protein, 11 aa, Influenza A virus
FSEIMKICFTI

SEQ ID NO: 138504 - protein, 11 aa, Influenza A virus
FSEIMKICSTI

SEQ ID NO: 138505 - protein, 11 aa, Influenza A virus
FSEIMKTCSTI

SEQ ID NO: 138506 - protein, 8 aa, Influenza A virus
FSMELPSF

SEQ ID NO: 138507 - protein, 10 aa, Influenza A virus
FSMELPSFGV

SEQ ID NO: 138508 - protein, 11 aa, Influenza A virus
FSMELPSFGVS

SEQ ID NO: 138509 - protein, 8 aa, Influenza A virus
FSNKMARL

SEQ ID NO: 138510 - protein, 10 aa, Influenza A virus
FSNKMARLGK

SEQ ID NO: 138511 - protein, 11 aa, Influenza A virus
FTEIMKICSTI

SEQ ID NO: 138512 - protein, 11 aa, Influenza A virus
FTEIMKTCSTI

SEQ ID NO: 138513 - protein, 10 aa, Influenza A virus
FTIEELRRQK

SEQ ID NO: 138514 - protein, 9 aa, Influenza A virus
FTITGDNTK

SEQ ID NO: 138515 - protein, 10 aa, Influenza A virus
FTITGDNTKW

SEQ ID NO: 138516 - protein, 8 aa, Influenza A virus
FTSFFYRY

SEQ ID NO: 138517 - protein, 10 aa, Influenza A virus
FTSFFYRYGF

SEQ ID NO: 138518 - protein, 11 aa, Influenza A virus
FTSFFYRYGFV

SEQ ID NO: 138519 - protein, 9 aa, Influenza A virus
FTVTGDNTK

SEQ ID NO: 138520 - protein, 10 aa, Influenza A virus
FTVTGDNTKW

SEQ ID NO: 138521 - protein, 9 aa, Influenza A virus
FVANFSMEL

SEQ ID NO: 138522 - protein, 10 aa, Influenza A virus
FVANFSMELP

SEQ ID NO: 138523 - protein, 9 aa, Influenza A virus
FVEALARSI

SEQ ID NO: 138524 - protein, 9 aa, Influenza A virus
FVETLARSI

SEQ ID NO: 138525 - protein, 9 aa, Influenza A virus
FVHFVEALA

SEQ ID NO: 138526 - protein, 10 aa, Influenza A virus
FVHFVEALAR

SEQ ID NO: 138527 - protein, 9 aa, Influenza A virus
FVHFVETLA

SEQ ID NO: 138528 - protein, 10 aa, Influenza A virus
FVHFVETLAR

SEQ ID NO: 138529 - protein, 10 aa, Influenza A virus
FVNHKDIESV

SEQ ID NO: 138530 - protein, 9 aa, Influenza A virus
FVSDGGPNL

SEQ ID NO: 138531 - protein, 10 aa, Influenza A virus
FVSDGGPNLY

SEQ ID NO: 138532 - protein, 11 aa, Influenza A virus
FVSDGGPNLYN

SEQ ID NO: 138533 - protein, 10 aa, Influenza A virus
FVSHKEIESI

SEQ ID NO: 138534 - protein, 10 aa, Influenza A virus
FVSHKEIESV

SEQ ID NO: 138535 - protein, 10 aa, Influenza A virus
FVSHKEVESV

SEQ ID NO: 138536 - protein, 8 aa, Influenza A virus
FVYFVEAL

SEQ ID NO: 138537 - protein, 9 aa, Influenza A virus
FVYFVEALA

SEQ ID NO: 138538 - protein, 10 aa, Influenza A virus
FVYFVEALAR

SEQ ID NO: 138539 - protein, 11 aa, Influenza A virus
FVYFVEALARS

SEQ ID NO: 138540 - protein, 8 aa, Influenza A virus
FVYFVETL

SEQ ID NO: 138541 - protein, 9 aa, Influenza A virus
FVYFVETLA

SEQ ID NO: 138542 - protein, 10 aa, Influenza A virus
FVYFVETLAR

SEQ ID NO: 138543 - protein, 11 aa, Influenza A virus
FVYFVETLARG

SEQ ID NO: 138544 - protein, 11 aa, Influenza A virus
FVYFVETLARN

SEQ ID NO: 138545 - protein, 11 aa, Influenza A virus
FVYFVETLARR

SEQ ID NO: 138546 - protein, 11 aa, Influenza A virus
FVYFVETLARS

SEQ ID NO: 138547 - protein, 8 aa, Influenza A virus
FYRTCKLL

SEQ ID NO: 138548 - protein, 10 aa, Influenza A virus
FYRTCKLLGI

SEQ ID NO: 138549 - protein, 10 aa, Influenza A virus
FYRTCKLVGI

SEQ ID NO: 138550 - protein, 10 aa, Influenza A virus
FYRYGFEANF

SEQ ID NO: 138551 - protein, 10 aa, Influenza A virus
FYRYGFVANF

SEQ ID NO: 138552 - protein, 9 aa, Influenza A virus
GAASLSPGM

SEQ ID NO: 138553 - protein, 11 aa, Influenza A virus
GDSQIQTRRSF

SEQ ID NO: 138554 - protein, 11 aa, Influenza A virus
GDTQIQTGRSF

SEQ ID NO: 138555 - protein, 11 aa, Influenza A virus
GDTQIQTRRSF

SEQ ID NO: 138556 - protein, 9 aa, Influenza A virus
GEMEIITHF

SEQ ID NO: 138557 - protein, 10 aa, Influenza A virus
GEMEIITHFQ

SEQ ID NO: 138558 - protein, 9 aa, Influenza A virus
GEMEITTHF

SEQ ID NO: 138559 - protein, 10 aa, Influenza A virus
GEMEITTHFQ

SEQ ID NO: 138560 - protein, 11 aa, Influenza A virus
GEMEITTHFQR

SEQ ID NO: 138561 - protein, 10 aa, Influenza A virus
GFEANFSMEL

SEQ ID NO: 138562 - protein, 10 aa, Influenza A virus
GFVANFSMEL

SEQ ID NO: 138563 - protein, 9 aa, Influenza A virus
GFVHFVEAL

SEQ ID NO: 138564 - protein, 11 aa, Influenza A virus
GFVHFVEALAR

SEQ ID NO: 138565 - protein, 9 aa, Influenza A virus
GFVHFVETL

SEQ ID NO: 138566 - protein, 11 aa, Influenza A virus
GFVHFVETLAR

SEQ ID NO: 138567 - protein, 9 aa, Influenza A virus
GFVYFVEAL

SEQ ID NO: 138568 - protein, 11 aa, Influenza A virus
GFVYFVEALAR

SEQ ID NO: 138569 - protein, 9 aa, Influenza A virus
GFVYFVETL

SEQ ID NO: 138570 - protein, 11 aa, Influenza A virus
GFVYFVETLAR

SEQ ID NO: 138571 - protein, 9 aa, Influenza A virus
GGSNLYNIR

SEQ ID NO: 138572 - protein, 11 aa, Influenza A virus
GHTQIQTRRSF

SEQ ID NO: 138573 - protein, 10 aa, Influenza A virus
GIEAGVDRFY

SEQ ID NO: 138574 - protein, 11 aa, Influenza A virus
GIEAGVDRFYR

SEQ ID NO: 138575 - protein, 11 aa, Influenza A virus
GIFENSCLETI

SEQ ID NO: 138576 - protein, 9 aa, Influenza A virus
GILEDGQMY

SEQ ID NO: 138577 - protein, 11 aa, Influenza A virus
GILEDGQMYQK

SEQ ID NO: 138578 - protein, 9 aa, Influenza A virus
GILEDQQMY

SEQ ID NO: 138579 - protein, 10 aa, Influenza A virus
GIQAGVDRFY

SEQ ID NO: 138580 - protein, 11 aa, Influenza A virus
GIQAGVDRFYR

SEQ ID NO: 138581 - protein, 10 aa, Influenza A virus
GIQAGVNRFY

SEQ ID NO: 138582 - protein, 11 aa, Influenza A virus
GIQAGVNRFYR

SEQ ID NO: 138583 - protein, 9 aa, Influenza A virus
GISSMMEAM

SEQ ID NO: 138584 - protein, 10 aa, Influenza A virus
GISSMMEAMV

SEQ ID NO: 138585 - protein, 9 aa, Influenza A virus
GISSMVEAM

SEQ ID NO: 138586 - protein, 10 aa, Influenza A virus
GISSMVEAMI

SEQ ID NO: 138587 - protein, 10 aa, Influenza A virus
GISSMVEAMV

SEQ ID NO: 138588 - protein, 8 aa, Influenza A virus
GITTHFQR

SEQ ID NO: 138589 - protein, 9 aa, Influenza A virus
GITTHFQRK

SEQ ID NO: 138590 - protein, 10 aa, Influenza A virus
GITTHFQRKR

SEQ ID NO: 138591 - protein, 10 aa, Influenza A virus
GKGYMFESKR

SEQ ID NO: 138592 - protein, 9 aa, Influenza A virus
GKWTTNTEI

SEQ ID NO: 138593 - protein, 8 aa, Influenza A virus
GLFENSCL

SEQ ID NO: 138594 - protein, 10 aa, Influenza A virus
GLFENSCLET

SEQ ID NO: 138595 - protein, 11 aa, Influenza A virus
GLFENSCLETM

SEQ ID NO: 138596 - protein, 11 aa, Influenza A virus
GLFVSDGGPNL

SEQ ID NO: 138597 - protein, 10 aa, Influenza A virus
GLIANESGRL

SEQ ID NO: 138598 - protein, 11 aa, Influenza A virus
GLLISDGGPNL

SEQ ID NO: 138599 - protein, 11 aa, Influenza A virus
GLLVSDGGPNL

SEQ ID NO: 138600 - protein, 11 aa, Influenza A virus
GLLVSDGGSNL

SEQ ID NO: 138601 - protein, 9 aa, Influenza A virus
GLMANESGR

SEQ ID NO: 138602 - protein, 10 aa, Influenza A virus
GLMANESGRL

SEQ ID NO: 138603 - protein, 11 aa, Influenza A virus
GLMANESGRLI

SEQ ID NO: 138604 - protein, 10 aa, Influenza A virus
GLQSSDDFAL

SEQ ID NO: 138605 - protein, 11 aa, Influenza A virus
GLQSSDDFALI

SEQ ID NO: 138606 - protein, 10 aa, Influenza A virus
GLTASESGRL

SEQ ID NO: 138607 - protein, 10 aa, Influenza A virus
GMEITTHFQR

SEQ ID NO: 138608 - protein, 11 aa, Influenza A virus
GMEITTHFQRK

SEQ ID NO: 138609 - protein, 9 aa, Influenza A virus
GMFNMLSTV

SEQ ID NO: 138610 - protein, 10 aa, Influenza A virus
GMFNMLSTVL

SEQ ID NO: 138611 - protein, 8 aa, Influenza A virus
GMKLRTQI

SEQ ID NO: 138612 - protein, 10 aa, Influenza A virus
GMKLRTQIPA

SEQ ID NO: 138613 - protein, 9 aa, Influenza A virus
GMLASIDLK

SEQ ID NO: 138614 - protein, 10 aa, Influenza A virus
GMLASIDLKY

SEQ ID NO: 138615 - protein, 9 aa, Influenza A virus
GMMMGMFNM

SEQ ID NO: 138616 - protein, 10 aa, Influenza A virus
GMMMGMFNML

SEQ ID NO: 138617 - protein, 10 aa, Influenza A virus
GMQIRGFVHF

SEQ ID NO: 138618 - protein, 11 aa, Influenza A virus
GMQIRGFVHFV

SEQ ID NO: 138619 - protein, 9 aa, Influenza A virus
GMQIRGFVY

SEQ ID NO: 138620 - protein, 10 aa, Influenza A virus
GMQIRGFVYF

SEQ ID NO: 138621 - protein, 11 aa, Influenza A virus
GMQIRGFVYFV

SEQ ID NO: 138622 - protein, 9 aa, Influenza A virus
GPATAQLAL

SEQ ID NO: 138623 - protein, 10 aa, Influenza A virus
GPATAQLALQ

SEQ ID NO: 138624 - protein, 11 aa, Influenza A virus
GPATAQLALQL

SEQ ID NO: 138625 - protein, 9 aa, Influenza A virus
GPATAQMAL

SEQ ID NO: 138626 - protein, 10 aa, Influenza A virus
GPATAQMALQ

SEQ ID NO: 138627 - protein, 11 aa, Influenza A virus
GPATAQMALQL

SEQ ID NO: 138628 - protein, 10 aa, Influenza A virus
GPNLFNIRNL

SEQ ID NO: 138629 - protein, 10 aa, Influenza A virus
GPNLYNIRNL

SEQ ID NO: 138630 - protein, 10 aa, Influenza A virus
GPNPYNIRNL

SEQ ID NO: 138631 - protein, 10 aa, Influenza A virus
GQKEYTKTAY

SEQ ID NO: 138632 - protein, 11 aa, Influenza A virus
GQKEYTKTAYW

SEQ ID NO: 138633 - protein, 10 aa, Influenza A virus
GQKEYTKTSY

SEQ ID NO: 138634 - protein, 11 aa, Influenza A virus
GQKEYTKTSYW

SEQ ID NO: 138635 - protein, 10 aa, Influenza A virus
GQKKYTKTTY

SEQ ID NO: 138636 - protein, 10 aa, Influenza A virus
GQKRCTKTTY

SEQ ID NO: 138637 - protein, 10 aa, Influenza A virus
GQKRHTKTTY

SEQ ID NO: 138638 - protein, 10 aa, Influenza A virus
GQKRYTKTTY

SEQ ID NO: 138639 - protein, 10 aa, Influenza A virus
GQKRYTRTTY

SEQ ID NO: 138640 - protein, 11 aa, Influenza A virus
GQMYQKCCNLF

SEQ ID NO: 138641 - protein, 10 aa, Influenza A virus
GQRKYTKTTY

SEQ ID NO: 138642 - protein, 10 aa, Influenza A virus
GRICNPLNPF

SEQ ID NO: 138643 - protein, 11 aa, Influenza A virus
GRICNPLNPFV

SEQ ID NO: 138644 - protein, 11 aa, Influenza A virus
GRIKKEDFAEI

SEQ ID NO: 138645 - protein, 11 aa, Influenza A virus
GRIKKEDFTEI

SEQ ID NO: 138646 - protein, 11 aa, Influenza A virus
GRIKKEEFAEI

SEQ ID NO: 138647 - protein, 11 aa, Influenza A virus
GRIKKEEFSEI

SEQ ID NO: 138648 - protein, 11 aa, Influenza A virus
GRIKKEEFTEI

SEQ ID NO: 138649 - protein, 9 aa, Influenza A virus
GRKTYDWTL

SEQ ID NO: 138650 - protein, 11 aa, Influenza A virus
GRKTYDWTLNR

SEQ ID NO: 138651 - protein, 10 aa, Influenza A virus
GRLCNPLNPF

SEQ ID NO: 138652 - protein, 11 aa, Influenza A virus
GRLCNPLNPFI

SEQ ID NO: 138653 - protein, 11 aa, Influenza A virus
GRLCNPLNPFV

SEQ ID NO: 138654 - protein, 8 aa, Influenza A virus
GRLIDFLK

SEQ ID NO: 138655 - protein, 10 aa, Influenza A virus
GRLIDFLKDV

SEQ ID NO: 138656 - protein, 11 aa, Influenza A virus
GRLIDFLKDVI

SEQ ID NO: 138657 - protein, 11 aa, Influenza A virus
GRLIDFLKDVM

SEQ ID NO: 138658 - protein, 11 aa, Influenza A virus
GRLIDFLKDVV

SEQ ID NO: 138659 - protein, 10 aa, Influenza A virus
GRLIDLLRDV

SEQ ID NO: 138660 - protein, 11 aa, Influenza A virus
GRLIDLLRDVM

SEQ ID NO: 138661 - protein, 10 aa, Influenza A virus
GRLIDSLKDV

SEQ ID NO: 138662 - protein, 11 aa, Influenza A virus
GRLIDSLKDVM

SEQ ID NO: 138663 - protein, 8 aa, Influenza A virus
GRLMDFLK

SEQ ID NO: 138664 - protein, 10 aa, Influenza A virus
GRLMDFLKDV

SEQ ID NO: 138665 - protein, 11 aa, Influenza A virus
GRLMDFLKDVM

SEQ ID NO: 138666 - protein, 9 aa, Influenza A virus
GRQTFDWTL

SEQ ID NO: 138667 - protein, 10 aa, Influenza A virus
GRQTFDWTLN

SEQ ID NO: 138668 - protein, 11 aa, Influenza A virus
GRQTFDWTLNR

SEQ ID NO: 138669 - protein, 9 aa, Influenza A virus
GRQTYDWTL

SEQ ID NO: 138670 - protein, 10 aa, Influenza A virus
GRQTYDWTLK

SEQ ID NO: 138671 - protein, 11 aa, Influenza A virus
GRQTYDWTLKR

SEQ ID NO: 138672 - protein, 10 aa, Influenza A virus
GRQTYDWTLN

SEQ ID NO: 138673 - protein, 11 aa, Influenza A virus
GRQTYDWTLNR

SEQ ID NO: 138674 - protein, 9 aa, Influenza A virus
GRSFELKKL

SEQ ID NO: 138675 - protein, 10 aa, Influenza A virus
GRSFELKKLW

SEQ ID NO: 138676 - protein, 9 aa, Influenza A virus
GRWTKNTET

SEQ ID NO: 138677 - protein, 9 aa, Influenza A virus
GRWTTNTET

SEQ ID NO: 138678 - protein, 9 aa, Influenza A virus
GSTRKKIEK

SEQ ID NO: 138679 - protein, 9 aa, Influenza A virus
GTASLSPGM

SEQ ID NO: 138680 - protein, 9 aa, Influenza A virus
GTCEFTSFF

SEQ ID NO: 138681 - protein, 10 aa, Influenza A virus
GTCEFTSFFY

SEQ ID NO: 138682 - protein, 11 aa, Influenza A virus
GTCEFTSFFYR

SEQ ID NO: 138683 - protein, 8 aa, Influenza A virus
GTFEFTSF

SEQ ID NO: 138684 - protein, 9 aa, Influenza A virus
GTFEFTSFF

SEQ ID NO: 138685 - protein, 10 aa, Influenza A virus
GTFEFTSFFY

SEQ ID NO: 138686 - protein, 11 aa, Influenza A virus
GTFEFTSFFYR

SEQ ID NO: 138687 - protein, 9 aa, Influenza A virus
GTVSLSPGM

SEQ ID NO: 138688 - protein, 10 aa, Influenza A virus
GVDRFYRTCK

SEQ ID NO: 138689 - protein, 11 aa, Influenza A virus
GVDRFYRTCKL

SEQ ID NO: 138690 - protein, 11 aa, Influenza A virus
GVLEDEQMYQK

SEQ ID NO: 138691 - protein, 11 aa, Influenza A virus
GVLEDEQMYQR

SEQ ID NO: 138692 - protein, 11 aa, Influenza A virus
GVLGDEQMYQR

SEQ ID NO: 138693 - protein, 10 aa, Influenza A virus
GVNRFYRTCK

SEQ ID NO: 138694 - protein, 11 aa, Influenza A virus
GVNRFYRTCKL

SEQ ID NO: 138695 - protein, 10 aa, Influenza A virus
GVSILNLGQK

SEQ ID NO: 138696 - protein, 11 aa, Influenza A virus
GVSILNLGQKK

SEQ ID NO: 138697 - protein, 11 aa, Influenza A virus
GVSILNLGQKR

SEQ ID NO: 138698 - protein, 10 aa, Influenza A virus
GVSILNLGQR

SEQ ID NO: 138699 - protein, 11 aa, Influenza A virus
GVSILNLGQRK

SEQ ID NO: 138700 - protein, 9 aa, Influenza A virus
GYAQQDCVL

SEQ ID NO: 138701 - protein, 9 aa, Influenza A virus
GYAQTDCVL

SEQ ID NO: 138702 - protein, 9 aa, Influenza A virus
GYLIRALTL

SEQ ID NO: 138703 - protein, 9 aa, Influenza A virus
GYMFESKGM

SEQ ID NO: 138704 - protein, 10 aa, Influenza A virus
GYMFESKGMK

SEQ ID NO: 138705 - protein, 11 aa, Influenza A virus
GYMFESKGMKL

SEQ ID NO: 138706 - protein, 9 aa, Influenza A virus
GYMFESKNM

SEQ ID NO: 138707 - protein, 10 aa, Influenza A virus
GYMFESKNMK

SEQ ID NO: 138708 - protein, 11 aa, Influenza A virus
GYMFESKNMKL

SEQ ID NO: 138709 - protein, 9 aa, Influenza A virus
GYMFESKRM

SEQ ID NO: 138710 - protein, 10 aa, Influenza A virus
GYMFESKRMK

SEQ ID NO: 138711 - protein, 11 aa, Influenza A virus
GYMFESKRMKL

SEQ ID NO: 138712 - protein, 9 aa, Influenza A virus
GYMFESKSM

SEQ ID NO: 138713 - protein, 10 aa, Influenza A virus
GYMFESKSMK

SEQ ID NO: 138714 - protein, 11 aa, Influenza A virus
GYMFESKSMKI

SEQ ID NO: 138715 - protein, 11 aa, Influenza A virus
GYMFESKSMKL

SEQ ID NO: 138716 - protein, 9 aa, Influenza A virus
GYMFKSKSM

SEQ ID NO: 138717 - protein, 10 aa, Influenza A virus
GYMFKSKSMK

SEQ ID NO: 138718 - protein, 11 aa, Influenza A virus
GYMFKSKSMKL

SEQ ID NO: 138719 - protein, 9 aa, Influenza A virus
GYTMDTVNR

SEQ ID NO: 138720 - protein, 9 aa, Influenza A virus
GYTMDTVSR

SEQ ID NO: 138721 - protein, 10 aa, Influenza A virus
HAGIQAGVDR

SEQ ID NO: 138722 - protein, 9 aa, Influenza A virus
HFHRKRRVR

SEQ ID NO: 138723 - protein, 9 aa, Influenza A virus
HFQRKRRIR

SEQ ID NO: 138724 - protein, 9 aa, Influenza A virus
HFQRKRRVR

SEQ ID NO: 138725 - protein, 9 aa, Influenza A virus
HGPAKIMEY

SEQ ID NO: 138726 - protein, 9 aa, Influenza A virus
HGPAKSMEY

SEQ ID NO: 138727 - protein, 9 aa, Influenza A virus
HGPAKSVEY

SEQ ID NO: 138728 - protein, 9 aa, Influenza A virus
HGPAKTMEY

SEQ ID NO: 138729 - protein, 9 aa, Influenza A virus
HGPARSMEY

SEQ ID NO: 138730 - protein, 9 aa, Influenza A virus
HGTGTGYTM

SEQ ID NO: 138731 - protein, 11 aa, Influenza A virus
HIPEAGLKWEL

SEQ ID NO: 138732 - protein, 9 aa, Influenza A virus
HIPEVCLKW

SEQ ID NO: 138733 - protein, 11 aa, Influenza A virus
HIPEVCLKWEL

SEQ ID NO: 138734 - protein, 10 aa, Influenza A virus
HIPEVCLKWR

SEQ ID NO: 138735 - protein, 9 aa, Influenza A virus
HIPEVGLKW

SEQ ID NO: 138736 - protein, 11 aa, Influenza A virus
HIPEVGLKWEL

SEQ ID NO: 138737 - protein, 10 aa, Influenza A virus
HKEIESINNA

SEQ ID NO: 138738 - protein, 10 aa, Influenza A virus
HKEIESMNNA

SEQ ID NO: 138739 - protein, 10 aa, Influenza A virus
HKEIESVNNA

SEQ ID NO: 138740 - protein, 10 aa, Influenza A virus
HKEIESVNSA

SEQ ID NO: 138741 - protein, 10 aa, Influenza A virus
HKEVESVNNA

SEQ ID NO: 138742 - protein, 11 aa, Influenza A virus
HKLDKRSYLIR

SEQ ID NO: 138743 - protein, 10 aa, Influenza A virus
HKRSYIIRAL

SEQ ID NO: 138744 - protein, 10 aa, Influenza A virus
HPGIFENSCL

SEQ ID NO: 138745 - protein, 10 aa, Influenza A virus
HPGIFETSCL

SEQ ID NO: 138746 - protein, 10 aa, Influenza A virus
HPGLFENSCL

SEQ ID NO: 138747 - protein, 10 aa, Influenza A virus
HQLNPIDGPL

SEQ ID NO: 138748 - protein, 9 aa, Influenza A virus
HQYSEKGKW

SEQ ID NO: 138749 - protein, 9 aa, Influenza A virus
HQYSEKGRW

SEQ ID NO: 138750 - protein, 9 aa, Influenza A virus
HQYSEQGKW

SEQ ID NO: 138751 - protein, 9 aa, Influenza A virus
HQYSERGKW

SEQ ID NO: 138752 - protein, 9 aa, Influenza A virus
HQYSERGRW

SEQ ID NO: 138753 - protein, 11 aa, Influenza A virus
HQYSERGRWTK

SEQ ID NO: 138754 - protein, 9 aa, Influenza A virus
HRLNKRSYL

SEQ ID NO: 138755 - protein, 10 aa, Influenza A virus
HRLNKRSYLI

SEQ ID NO: 138756 - protein, 11 aa, Influenza A virus
HRLNKRSYLIR

SEQ ID NO: 138757 - protein, 9 aa, Influenza A virus
HSKAGLLVS

SEQ ID NO: 138758 - protein, 9 aa, Influenza A virus
HSWIPKRNR

SEQ ID NO: 138759 - protein, 9 aa, Influenza A virus
HSWTPKRNR

SEQ ID NO: 138760 - protein, 9 aa, Influenza A virus
HSWVPKRNR

SEQ ID NO: 138761 - protein, 8 aa, Influenza A virus
HTKTTYWW

SEQ ID NO: 138762 - protein, 9 aa, Influenza A virus
HTPEVCLKW

SEQ ID NO: 138763 - protein, 11 aa, Influenza A virus
HTPEVCLKWEL

SEQ ID NO: 138764 - protein, 10 aa, Influenza A virus
HTQIQTRRSF

SEQ ID NO: 138765 - protein, 8 aa, Influenza A virus
IANESGRL

SEQ ID NO: 138766 - protein, 9 aa, Influenza A virus
IANESGRLI

SEQ ID NO: 138767 - protein, 11 aa, Influenza A virus
IANESGRLIDF

SEQ ID NO: 138768 - protein, 9 aa, Influenza A virus
IANIDLKYF

SEQ ID NO: 138769 - protein, 9 aa, Influenza A virus
IAPIMFSNK

SEQ ID NO: 138770 - protein, 10 aa, Influenza A virus
IAPIMFSNKM

SEQ ID NO: 138771 - protein, 9 aa, Influenza A virus
IAPLMFSNK

SEQ ID NO: 138772 - protein, 10 aa, Influenza A virus
IAPLMFSNKM

SEQ ID NO: 138773 - protein, 9 aa, Influenza A virus
IATPGMQIR

SEQ ID NO: 138774 - protein, 11 aa, Influenza A virus
IATPGMQIRGF

SEQ ID NO: 138775 - protein, 9 aa, Influenza A virus
ICFTIEELR

SEQ ID NO: 138776 - protein, 9 aa, Influenza A virus
ICSTIEEFR

SEQ ID NO: 138777 - protein, 9 aa, Influenza A virus
IDLKYFNEL

SEQ ID NO: 138778 - protein, 9 aa, Influenza A virus
IEAGVDRFY

SEQ ID NO: 138779 - protein, 10 aa, Influenza A virus
IEAGVDRFYR

SEQ ID NO: 138780 - protein, 9 aa, Influenza A virus
IEGAASLSP

SEQ ID NO: 138781 - protein, 9 aa, Influenza A virus
IEGTASLSP

SEQ ID NO: 138782 - protein, 9 aa, Influenza A virus
IEIFRSNGL

SEQ ID NO: 138783 - protein, 11 aa, Influenza A virus
IEIFRSNGLTA

SEQ ID NO: 138784 - protein, 8 aa, Influenza A virus
IEKIRPLL

SEQ ID NO: 138785 - protein, 9 aa, Influenza A virus
IEKIRPLLI

SEQ ID NO: 138786 - protein, 9 aa, Influenza A virus
IEKIRPLLV

SEQ ID NO: 138787 - protein, 8 aa, Influenza A virus
IERIRPLL

SEQ ID NO: 138788 - protein, 9 aa, Influenza A virus
IERIRPLLI

SEQ ID NO: 138789 - protein, 8 aa, Influenza A virus
IESINNAV

SEQ ID NO: 138790 - protein, 9 aa, Influenza A virus
IESINNAVV

SEQ ID NO: 138791 - protein, 10 aa, Influenza A virus
IESINNAVVM

SEQ ID NO: 138792 - protein, 9 aa, Influenza A virus
IESMDKEEM

SEQ ID NO: 138793 - protein, 8 aa, Influenza A virus
IESMNNAV

SEQ ID NO: 138794 - protein, 9 aa, Influenza A virus
IESMNNAVM

SEQ ID NO: 138795 - protein, 10 aa, Influenza A virus
IESMNNAVMM

SEQ ID NO: 138796 - protein, 9 aa, Influenza A virus
IESVNNAVI

SEQ ID NO: 138797 - protein, 10 aa, Influenza A virus
IESVNNAVIM

SEQ ID NO: 138798 - protein, 9 aa, Influenza A virus
IESVNNAVM

SEQ ID NO: 138799 - protein, 10 aa, Influenza A virus
IESVNNAVMM

SEQ ID NO: 138800 - protein, 9 aa, Influenza A virus
IESVNNAVV

SEQ ID NO: 138801 - protein, 10 aa, Influenza A virus
IESVNNAVVM

SEQ ID NO: 138802 - protein, 9 aa, Influenza A virus
IESVNNTVV

SEQ ID NO: 138803 - protein, 10 aa, Influenza A virus
IESVNNTVVM

SEQ ID NO: 138804 - protein, 9 aa, Influenza A virus
IESVNSAVV

SEQ ID NO: 138805 - protein, 10 aa, Influenza A virus
IESVNSAVVM

SEQ ID NO: 138806 - protein, 11 aa, Influenza A virus
IETMEIVQQTR

SEQ ID NO: 138807 - protein, 11 aa, Influenza A virus
IETMEVVQQTR

SEQ ID NO: 138808 - protein, 9 aa, Influenza A virus
IEVFRLNGL

SEQ ID NO: 138809 - protein, 9 aa, Influenza A virus
IEVFRSNDL

SEQ ID NO: 138810 - protein, 10 aa, Influenza A virus
IEVFRSNDLI

SEQ ID NO: 138811 - protein, 9 aa, Influenza A virus
IEVFRSNGL

SEQ ID NO: 138812 - protein, 10 aa, Influenza A virus
IEVFRSNGLI

SEQ ID NO: 138813 - protein, 10 aa, Influenza A virus
IEVFRSNGLK

SEQ ID NO: 138814 - protein, 10 aa, Influenza A virus
IEVFRSNGLM

SEQ ID NO: 138815 - protein, 11 aa, Influenza A virus
IEVFRSNGLTA

SEQ ID NO: 138816 - protein, 9 aa, Influenza A virus
IEVFRSNGM

SEQ ID NO: 138817 - protein, 11 aa, Influenza A virus
IEVFRSNGMTA

SEQ ID NO: 138818 - protein, 9 aa, Influenza A virus
IEVVQQTRV

SEQ ID NO: 138819 - protein, 10 aa, Influenza A virus
IFENSCIETM

SEQ ID NO: 138820 - protein, 10 aa, Influenza A virus
IFENSCLETM

SEQ ID NO: 138821 - protein, 10 aa, Influenza A virus
IFETSCLETM

SEQ ID NO: 138822 - protein, 9 aa, Influenza A virus
IFLAMITYI

SEQ ID NO: 138823 - protein, 10 aa, Influenza A virus
IFLAMITYIT

SEQ ID NO: 138824 - protein, 11 aa, Influenza A virus
IFLAMITYITR

SEQ ID NO: 138825 - protein, 9 aa, Influenza A virus
IFRSNGLTA

SEQ ID NO: 138826 - protein, 10 aa, Influenza A virus
IGKKKHRLNK

SEQ ID NO: 138827 - protein, 9 aa, Influenza A virus
IIRALTLNT

SEQ ID NO: 138828 - protein, 10 aa, Influenza A virus
IIRALTLNTM

SEQ ID NO: 138829 - protein, 9 aa, Influenza A virus
IITHFQRKR

SEQ ID NO: 138830 - protein, 10 aa, Influenza A virus
IITHFQRKRR

SEQ ID NO: 138831 - protein, 9 aa, Influenza A virus
IKDYRYTYR

SEQ ID NO: 138832 - protein, 9 aa, Influenza A virus
IKKEDFAEI

SEQ ID NO: 138833 - protein, 10 aa, Influenza A virus
IKKEDFAEIM

SEQ ID NO: 138834 - protein, 9 aa, Influenza A virus
IKKEDFTEI

SEQ ID NO: 138835 - protein, 10 aa, Influenza A virus
IKKEDFTEIM

SEQ ID NO: 138836 - protein, 10 aa, Influenza A virus
IKKEEFAEIM

SEQ ID NO: 138837 - protein, 9 aa, Influenza A virus
IKKEEFSEI

SEQ ID NO: 138838 - protein, 10 aa, Influenza A virus
IKKEEFSEIM

SEQ ID NO: 138839 - protein, 9 aa, Influenza A virus
IKKEEFTEI

SEQ ID NO: 138840 - protein, 10 aa, Influenza A virus
IKKEEFTEIM

SEQ ID NO: 138841 - protein, 11 aa, Influenza A virus
IKKLWDQTHSK

SEQ ID NO: 138842 - protein, 11 aa, Influenza A virus
IKKLWDQTRSK

SEQ ID NO: 138843 - protein, 11 aa, Influenza A virus
IKKLWEQTHSK

SEQ ID NO: 138844 - protein, 11 aa, Influenza A virus
IKKLWEQTRSK

SEQ ID NO: 138845 - protein, 10 aa, Influenza A virus
ILEDEQMYQK

SEQ ID NO: 138846 - protein, 10 aa, Influenza A virus
ILEDEQMYQR

SEQ ID NO: 138847 - protein, 10 aa, Influenza A virus
ILEDGQMYQK

SEQ ID NO: 138848 - protein, 10 aa, Influenza A virus
ILEDQQMYQK

SEQ ID NO: 138849 - protein, 11 aa, Influenza A virus
ILKICSTIEEL

SEQ ID NO: 138850 - protein, 9 aa, Influenza A virus
ILLFLKVPA

SEQ ID NO: 138851 - protein, 10 aa, Influenza A virus
ILNAPNHEGI

SEQ ID NO: 138852 - protein, 9 aa, Influenza A virus
ILNLGQKEY

SEQ ID NO: 138853 - protein, 11 aa, Influenza A virus
ILNLGQKEYTK

SEQ ID NO: 138854 - protein, 9 aa, Influenza A virus
ILNLGQKKY

SEQ ID NO: 138855 - protein, 11 aa, Influenza A virus
ILNLGQKKYTK

SEQ ID NO: 138856 - protein, 9 aa, Influenza A virus
ILNLGQKRY

SEQ ID NO: 138857 - protein, 11 aa, Influenza A virus
ILNLGQKRYTK

SEQ ID NO: 138858 - protein, 11 aa, Influenza A virus
ILNLGQKRYTR

SEQ ID NO: 138859 - protein, 9 aa, Influenza A virus
ILNLGQRKY

SEQ ID NO: 138860 - protein, 11 aa, Influenza A virus
ILNLGQRKYTK

SEQ ID NO: 138861 - protein, 9 aa, Influenza A virus
ILNTNQRGI

SEQ ID NO: 138862 - protein, 9 aa, Influenza A virus
ILNTSQRGI

SEQ ID NO: 138863 - protein, 9 aa, Influenza A virus
ILNTSQRGV

SEQ ID NO: 138864 - protein, 9 aa, Influenza A virus
ILSIAPIMF

SEQ ID NO: 138865 - protein, 10 aa, Influenza A virus
ILSIAPIMFS

SEQ ID NO: 138866 - protein, 10 aa, Influenza A virus
IMEYDAVATT

SEQ ID NO: 138867 - protein, 9 aa, Influenza A virus
IMFSNKMAR

SEQ ID NO: 138868 - protein, 10 aa, Influenza A virus
IMFSNKMARL

SEQ ID NO: 138869 - protein, 11 aa, Influenza A virus
IMKICCTIEEL

SEQ ID NO: 138870 - protein, 11 aa, Influenza A virus
IMKICFTIEEL

SEQ ID NO: 138871 - protein, 11 aa, Influenza A virus
IMKICSTIEEF

SEQ ID NO: 138872 - protein, 11 aa, Influenza A virus
IMKICSTIEEL

SEQ ID NO: 138873 - protein, 11 aa, Influenza A virus
IMKTCSTIEEL

SEQ ID NO: 138874 - protein, 9 aa, Influenza A virus
IMPAHGPAK

SEQ ID NO: 138875 - protein, 11 aa, Influenza A virus
IMPAHGPAKSM

SEQ ID NO: 138876 - protein, 9 aa, Influenza A virus
INKLWEQTR

SEQ ID NO: 138877 - protein, 11 aa, Influenza A virus
INKLWEQTRSK

SEQ ID NO: 138878 - protein, 9 aa, Influenza A virus
INKTGTFEF

SEQ ID NO: 138879 - protein, 9 aa, Influenza A virus
INRTGTCEF

SEQ ID NO: 138880 - protein, 9 aa, Influenza A virus
INRTGTFEF

SEQ ID NO: 138881 - protein, 9 aa, Influenza A virus
IPAEMIANI

SEQ ID NO: 138882 - protein, 11 aa, Influenza A virus
IPAEMIANIDL

SEQ ID NO: 138883 - protein, 9 aa, Influenza A virus
IPAEMLADI

SEQ ID NO: 138884 - protein, 9 aa, Influenza A virus
IPAEMLANI

SEQ ID NO: 138885 - protein, 11 aa, Influenza A virus
IPAEMLANIDL

SEQ ID NO: 138886 - protein, 9 aa, Influenza A virus
IPAEMLASI

SEQ ID NO: 138887 - protein, 11 aa, Influenza A virus
IPAEMLASIDL

SEQ ID NO: 138888 - protein, 9 aa, Influenza A virus
IPAEMLATI

SEQ ID NO: 138889 - protein, 11 aa, Influenza A virus
IPAEMLATIDL

SEQ ID NO: 138890 - protein, 9 aa, Influenza A virus
IPAEMLSGI

SEQ ID NO: 138891 - protein, 11 aa, Influenza A virus
IPAEMLSGIDL

SEQ ID NO: 138892 - protein, 9 aa, Influenza A virus
IPAEMLSSI

SEQ ID NO: 138893 - protein, 11 aa, Influenza A virus
IPAEMLSSIDL

SEQ ID NO: 138894 - protein, 9 aa, Influenza A virus
IPAEMLTSI

SEQ ID NO: 138895 - protein, 11 aa, Influenza A virus
IPAEMLTSIDL

SEQ ID NO: 138896 - protein, 9 aa, Influenza A virus
IPAGMLASI

SEQ ID NO: 138897 - protein, 11 aa, Influenza A virus
IPAGMLASIDL

SEQ ID NO: 138898 - protein, 9 aa, Influenza A virus
IPAQNAIST

SEQ ID NO: 138899 - protein, 11 aa, Influenza A virus
IPAQNAISTTF

SEQ ID NO: 138900 - protein, 10 aa, Influenza A virus
IPEAGLKWEL

SEQ ID NO: 138901 - protein, 10 aa, Influenza A virus
IPEVCLKWDL

SEQ ID NO: 138902 - protein, 10 aa, Influenza A virus
IPEVCLKWEL

SEQ ID NO: 138903 - protein, 10 aa, Influenza A virus
IPEVCLKWRL

SEQ ID NO: 138904 - protein, 8 aa, Influenza A virus
IPEVGLKW

SEQ ID NO: 138905 - protein, 10 aa, Influenza A virus
IPEVGLKWEL

SEQ ID NO: 138906 - protein, 8 aa, Influenza A virus
IPKRNRSI

SEQ ID NO: 138907 - protein, 9 aa, Influenza A virus
IPKRNRSIL

SEQ ID NO: 138908 - protein, 8 aa, Influenza A virus
IPKRNRTI

SEQ ID NO: 138909 - protein, 9 aa, Influenza A virus
IPKRNRTIL

SEQ ID NO: 138910 - protein, 9 aa, Influenza A virus
IPTEMLASI

SEQ ID NO: 138911 - protein, 11 aa, Influenza A virus
IPTEMLASIDL

SEQ ID NO: 138912 - protein, 8 aa, Influenza A virus
IQAGVDRF

SEQ ID NO: 138913 - protein, 9 aa, Influenza A virus
IQAGVDRFY

SEQ ID NO: 138914 - protein, 10 aa, Influenza A virus
IQAGVDRFYR

SEQ ID NO: 138915 - protein, 11 aa, Influenza A virus
IQAGVDRFYRT

SEQ ID NO: 138916 - protein, 8 aa, Influenza A virus
IQAGVNRF

SEQ ID NO: 138917 - protein, 9 aa, Influenza A virus
IQAGVNRFY

SEQ ID NO: 138918 - protein, 10 aa, Influenza A virus
IQAGVNRFYR

SEQ ID NO: 138919 - protein, 11 aa, Influenza A virus
IQAGVNRFYRT

SEQ ID NO: 138920 - protein, 9 aa, Influenza A virus
IQTGRSFEL

SEQ ID NO: 138921 - protein, 10 aa, Influenza A virus
IQTGRSFELK

SEQ ID NO: 138922 - protein, 9 aa, Influenza A virus
IQTRRSFEI

SEQ ID NO: 138923 - protein, 10 aa, Influenza A virus
IQTRRSFEIK

SEQ ID NO: 138924 - protein, 9 aa, Influenza A virus
IQTRRSFEL

SEQ ID NO: 138925 - protein, 10 aa, Influenza A virus
IQTRRSFELK

SEQ ID NO: 138926 - protein, 11 aa, Influenza A virus
IQTRRSFELKR

SEQ ID NO: 138927 - protein, 9 aa, Influenza A virus
IRALTLNTM

SEQ ID NO: 138928 - protein, 11 aa, Influenza A virus
IRGFVHFVEAL

SEQ ID NO: 138929 - protein, 11 aa, Influenza A virus
IRGFVHFVETL

SEQ ID NO: 138930 - protein, 11 aa, Influenza A virus
IRGFVYFVEAL

SEQ ID NO: 138931 - protein, 11 aa, Influenza A virus
IRGFVYFVETL

SEQ ID NO: 138932 - protein, 9 aa, Influenza A virus
IRNLHIPEA

SEQ ID NO: 138933 - protein, 11 aa, Influenza A virus
IRNLHIPEAGL

SEQ ID NO: 138934 - protein, 9 aa, Influenza A virus
IRNLHIPEV

SEQ ID NO: 138935 - protein, 11 aa, Influenza A virus
IRNLHIPEVGL

SEQ ID NO: 138936 - protein, 9 aa, Influenza A virus
IRNLHTPEV

SEQ ID NO: 138937 - protein, 10 aa, Influenza A virus
IRPLLIDGAA

SEQ ID NO: 138938 - protein, 10 aa, Influenza A virus
IRPLLIDGTA

SEQ ID NO: 138939 - protein, 10 aa, Influenza A virus
IRPLLIEGAA

SEQ ID NO: 138940 - protein, 10 aa, Influenza A virus
IRPLLIEGTA

SEQ ID NO: 138941 - protein, 10 aa, Influenza A virus
IRPLLVDGTA

SEQ ID NO: 138942 - protein, 10 aa, Influenza A virus
IRPLLVEGTA

SEQ ID NO: 138943 - protein, 9 aa, Influenza A virus
IRTQIPAEM

SEQ ID NO: 138944 - protein, 10 aa, Influenza A virus
IRTQIPAEML

SEQ ID NO: 138945 - protein, 9 aa, Influenza A virus
ISAEMLANI

SEQ ID NO: 138946 - protein, 11 aa, Influenza A virus
ISAEMLANIDL

SEQ ID NO: 138947 - protein, 8 aa, Influenza A virus
ISDGGPNL

SEQ ID NO: 138948 - protein, 9 aa, Influenza A virus
ISDGGPNLY

SEQ ID NO: 138949 - protein, 10 aa, Influenza A virus
ISDGGPNLYN

SEQ ID NO: 138950 - protein, 11 aa, Influenza A virus
ISFTITGDNTK

SEQ ID NO: 138951 - protein, 9 aa, Influenza A virus
ISHKEIESV

SEQ ID NO: 138952 - protein, 9 aa, Influenza A virus
ISRARIDAR

SEQ ID NO: 138953 - protein, 8 aa, Influenza A virus
ISSMMEAM

SEQ ID NO: 138954 - protein, 9 aa, Influenza A virus
ISSMMEAMV

SEQ ID NO: 138955 - protein, 11 aa, Influenza A virus
ISSMMEAMVSR

SEQ ID NO: 138956 - protein, 8 aa, Influenza A virus
ISSMVEAM

SEQ ID NO: 138957 - protein, 9 aa, Influenza A virus
ISSMVEAMI

SEQ ID NO: 138958 - protein, 11 aa, Influenza A virus
ISSMVEAMISR

SEQ ID NO: 138959 - protein, 9 aa, Influenza A virus
ISSMVEAMV

SEQ ID NO: 138960 - protein, 11 aa, Influenza A virus
ISSMVEAMVSR

SEQ ID NO: 138961 - protein, 9 aa, Influenza A virus
ISTTFPYTG

SEQ ID NO: 138962 - protein, 8 aa, Influenza A virus
ITGDNTKW

SEQ ID NO: 138963 - protein, 9 aa, Influenza A virus
ITHFQRKRR

SEQ ID NO: 138964 - protein, 9 aa, Influenza A virus
ITKKMVTQR

SEQ ID NO: 138965 - protein, 8 aa, Influenza A virus
ITKNQPEW

SEQ ID NO: 138966 - protein, 9 aa, Influenza A virus
ITKNQPEWF

SEQ ID NO: 138967 - protein, 10 aa, Influenza A virus
ITKNQPEWFR

SEQ ID NO: 138968 - protein, 9 aa, Influenza A virus
ITQRTIGKK

SEQ ID NO: 138969 - protein, 10 aa, Influenza A virus
ITQRTIGKKK

SEQ ID NO: 138970 - protein, 9 aa, Influenza A virus
ITQRTMGKK

SEQ ID NO: 138971 - protein, 10 aa, Influenza A virus
ITQRTMGKKK

SEQ ID NO: 138972 - protein, 8 aa, Influenza A virus
ITRKQPEW

SEQ ID NO: 138973 - protein, 9 aa, Influenza A virus
ITRKQPEWF

SEQ ID NO: 138974 - protein, 10 aa, Influenza A virus
ITRKQPEWFR

SEQ ID NO: 138975 - protein, 9 aa, Influenza A virus
ITRNQPDWF

SEQ ID NO: 138976 - protein, 10 aa, Influenza A virus
ITRNQPDWFR

SEQ ID NO: 138977 - protein, 8 aa, Influenza A virus
ITRNQPEW

SEQ ID NO: 138978 - protein, 9 aa, Influenza A virus
ITRNQPEWF

SEQ ID NO: 138979 - protein, 10 aa, Influenza A virus
ITRNQPEWFR

SEQ ID NO: 138980 - protein, 8 aa, Influenza A virus
ITRNQPKW

SEQ ID NO: 138981 - protein, 9 aa, Influenza A virus
ITRNQPKWF

SEQ ID NO: 138982 - protein, 10 aa, Influenza A virus
ITRNQPKWFR

SEQ ID NO: 138983 - protein, 11 aa, Influenza A virus
ITRNQPKWFRN

SEQ ID NO: 138984 - protein, 8 aa, Influenza A virus
ITRTQPEW

SEQ ID NO: 138985 - protein, 9 aa, Influenza A virus
ITRTQPEWF

SEQ ID NO: 138986 - protein, 10 aa, Influenza A virus
ITRTQPEWFR

SEQ ID NO: 138987 - protein, 9 aa, Influenza A virus
ITTHFHRKR

SEQ ID NO: 138988 - protein, 10 aa, Influenza A virus
ITTHFHRKRR

SEQ ID NO: 138989 - protein, 9 aa, Influenza A virus
ITTHFQRKR

SEQ ID NO: 138990 - protein, 10 aa, Influenza A virus
ITTHFQRKRR

SEQ ID NO: 138991 - protein, 11 aa, Influenza A virus
ITYITKNQPEW

SEQ ID NO: 138992 - protein, 11 aa, Influenza A virus
ITYITRKQPEW

SEQ ID NO: 138993 - protein, 11 aa, Influenza A virus
ITYITRNQPDW

SEQ ID NO: 138994 - protein, 11 aa, Influenza A virus
ITYITRNQPEW

SEQ ID NO: 138995 - protein, 10 aa, Influenza A virus
ITYITRNQPK

SEQ ID NO: 138996 - protein, 11 aa, Influenza A virus
ITYITRNQPKW

SEQ ID NO: 138997 - protein, 11 aa, Influenza A virus
ITYITRTQPEW

SEQ ID NO: 138998 - protein, 11 aa, Influenza A virus
ITYMTRNQPEW

SEQ ID NO: 138999 - protein, 10 aa, Influenza A virus
IVNALNHEGI

SEQ ID NO: 139000 - protein, 10 aa, Influenza A virus
IVNAPNHAGI

SEQ ID NO: 139001 - protein, 10 aa, Influenza A virus
IVNAPNYAGI

SEQ ID NO: 139002 - protein, 9 aa, Influenza A virus
IVQQTRVDK

SEQ ID NO: 139003 - protein, 9 aa, Influenza A virus
IVTHFQRKR

SEQ ID NO: 139004 - protein, 10 aa, Influenza A virus
IVTHFQRKRR

SEQ ID NO: 139005 - protein, 9 aa, Influenza A virus
IYLIRALTL

SEQ ID NO: 139006 - protein, 9 aa, Influenza A virus
KAKLANVVR

SEQ ID NO: 139007 - protein, 10 aa, Influenza A virus
KAKLANVVRK

SEQ ID NO: 139008 - protein, 9 aa, Influenza A virus
KANESGRLI

SEQ ID NO: 139009 - protein, 11 aa, Influenza A virus
KANESGRLIDF

SEQ ID NO: 139010 - protein, 10 aa, Influenza A virus
KDVVESMDKK

SEQ ID NO: 139011 - protein, 11 aa, Influenza A virus
KDYRYPYRCHR

SEQ ID NO: 139012 - protein, 11 aa, Influenza A virus
KDYRYTYRCHR

SEQ ID NO: 139013 - protein, 8 aa, Influenza A virus
KEDFAEIM

SEQ ID NO: 139014 - protein, 10 aa, Influenza A virus
KEDFAEIMKI

SEQ ID NO: 139015 - protein, 8 aa, Influenza A virus
KEDFTEIM

SEQ ID NO: 139016 - protein, 10 aa, Influenza A virus
KEDFTEIMKI

SEQ ID NO: 139017 - protein, 10 aa, Influenza A virus
KEDMEITTHF

SEQ ID NO: 139018 - protein, 8 aa, Influenza A virus
KEEFAEIL

SEQ ID NO: 139019 - protein, 10 aa, Influenza A virus
KEEFAEILKI

SEQ ID NO: 139020 - protein, 8 aa, Influenza A virus
KEEFAEIM

SEQ ID NO: 139021 - protein, 10 aa, Influenza A virus
KEEFAEIMKI

SEQ ID NO: 139022 - protein, 8 aa, Influenza A virus
KEEFSEIM

SEQ ID NO: 139023 - protein, 10 aa, Influenza A virus
KEEFSEIMKI

SEQ ID NO: 139024 - protein, 8 aa, Influenza A virus
KEEFTEIM

SEQ ID NO: 139025 - protein, 10 aa, Influenza A virus
KEEFTEIMKI

SEQ ID NO: 139026 - protein, 10 aa, Influenza A virus
KEEIEITTHF

SEQ ID NO: 139027 - protein, 10 aa, Influenza A virus
KEEMEIITHF

SEQ ID NO: 139028 - protein, 10 aa, Influenza A virus
KEEMEITTHF

SEQ ID NO: 139029 - protein, 10 aa, Influenza A virus
KEEMEIVTHF

SEQ ID NO: 139030 - protein, 10 aa, Influenza A virus
KEEMEVTTHF

SEQ ID NO: 139031 - protein, 10 aa, Influenza A virus
KEEMGITTHF

SEQ ID NO: 139032 - protein, 10 aa, Influenza A virus
KEEVEITTHF

SEQ ID NO: 139033 - protein, 10 aa, Influenza A virus
KEGMEITTHF

SEQ ID NO: 139034 - protein, 9 aa, Influenza A virus
KEIESINNA

SEQ ID NO: 139035 - protein, 10 aa, Influenza A virus
KEIESINNAV

SEQ ID NO: 139036 - protein, 11 aa, Influenza A virus
KEIESINNAVV

SEQ ID NO: 139037 - protein, 9 aa, Influenza A virus
KEIESMNNA

SEQ ID NO: 139038 - protein, 10 aa, Influenza A virus
KEIESMNNAV

SEQ ID NO: 139039 - protein, 11 aa, Influenza A virus
KEIESMNNAVM

SEQ ID NO: 139040 - protein, 9 aa, Influenza A virus
KEIESVNNA

SEQ ID NO: 139041 - protein, 10 aa, Influenza A virus
KEIESVNNAV

SEQ ID NO: 139042 - protein, 11 aa, Influenza A virus
KEIESVNNAVI

SEQ ID NO: 139043 - protein, 11 aa, Influenza A virus
KEIESVNNAVM

SEQ ID NO: 139044 - protein, 11 aa, Influenza A virus
KEIESVNNAVV

SEQ ID NO: 139045 - protein, 9 aa, Influenza A virus
KEIESVNNT

SEQ ID NO: 139046 - protein, 10 aa, Influenza A virus
KEIESVNNTV

SEQ ID NO: 139047 - protein, 11 aa, Influenza A virus
KEIESVNNTVV

SEQ ID NO: 139048 - protein, 9 aa, Influenza A virus
KEIESVNSA

SEQ ID NO: 139049 - protein, 10 aa, Influenza A virus
KEIESVNSAV

SEQ ID NO: 139050 - protein, 11 aa, Influenza A virus
KEIESVNSAVV

SEQ ID NO: 139051 - protein, 9 aa, Influenza A virus
KEMEITTHF

SEQ ID NO: 139052 - protein, 10 aa, Influenza A virus
KEMEITTHFQ

SEQ ID NO: 139053 - protein, 11 aa, Influenza A virus
KEMEITTHFQR

SEQ ID NO: 139054 - protein, 9 aa, Influenza A virus
KEVESVNNA

SEQ ID NO: 139055 - protein, 10 aa, Influenza A virus
KEVESVNNAV

SEQ ID NO: 139056 - protein, 11 aa, Influenza A virus
KEVESVNNAVV

SEQ ID NO: 139057 - protein, 8 aa, Influenza A virus
KEYTKTAY

SEQ ID NO: 139058 - protein, 9 aa, Influenza A virus
KEYTKTAYW

SEQ ID NO: 139059 - protein, 10 aa, Influenza A virus
KEYTKTAYWW

SEQ ID NO: 139060 - protein, 8 aa, Influenza A virus
KEYTKTSY

SEQ ID NO: 139061 - protein, 9 aa, Influenza A virus
KEYTKTSYW

SEQ ID NO: 139062 - protein, 10 aa, Influenza A virus
KEYTKTSYWW

SEQ ID NO: 139063 - protein, 8 aa, Influenza A virus
KFFPSSSY

SEQ ID NO: 139064 - protein, 9 aa, Influenza A virus
KFFPSSSYR

SEQ ID NO: 139065 - protein, 10 aa, Influenza A virus
KFFPSSSYRR

SEQ ID NO: 139066 - protein, 11 aa, Influenza A virus
KFFPSSSYRRP

SEQ ID NO: 139067 - protein, 10 aa, Influenza A virus
KGEMEIITHF

SEQ ID NO: 139068 - protein, 10 aa, Influenza A virus
KGEMEITTHF

SEQ ID NO: 139069 - protein, 9 aa, Influenza A virus
KGMKLRTQI

SEQ ID NO: 139070 - protein, 9 aa, Influenza A virus
KGRLCNPLN

SEQ ID NO: 139071 - protein, 11 aa, Influenza A virus
KGRLCNPLNPF

SEQ ID NO: 139072 - protein, 9 aa, Influenza A virus
KGRWTTNTE

SEQ ID NO: 139073 - protein, 9 aa, Influenza A virus
KGYLIRALT

SEQ ID NO: 139074 - protein, 10 aa, Influenza A virus
KGYLIRALTL

SEQ ID NO: 139075 - protein, 11 aa, Influenza A virus
KGYMFESKGMK

SEQ ID NO: 139076 - protein, 10 aa, Influenza A virus
KGYMFESKNM

SEQ ID NO: 139077 - protein, 11 aa, Influenza A virus
KGYMFESKNMK

SEQ ID NO: 139078 - protein, 9 aa, Influenza A virus
KGYMFESKR

SEQ ID NO: 139079 - protein, 10 aa, Influenza A virus
KGYMFESKRM

SEQ ID NO: 139080 - protein, 11 aa, Influenza A virus
KGYMFESKRMK

SEQ ID NO: 139081 - protein, 10 aa, Influenza A virus
KGYMFESKSM

SEQ ID NO: 139082 - protein, 11 aa, Influenza A virus
KGYMFESKSMK

SEQ ID NO: 139083 - protein, 10 aa, Influenza A virus
KGYMFKSKSM

SEQ ID NO: 139084 - protein, 11 aa, Influenza A virus
KGYMFKSKSMK

SEQ ID NO: 139085 - protein, 9 aa, Influenza A virus
KHKLDKRSY

SEQ ID NO: 139086 - protein, 9 aa, Influenza A virus
KHRLNKRSY

SEQ ID NO: 139087 - protein, 10 aa, Influenza A virus
KHRLNKRSYL

SEQ ID NO: 139088 - protein, 9 aa, Influenza A virus
KICCTIEEL

SEQ ID NO: 139089 - protein, 10 aa, Influenza A virus
KICCTIEELR

SEQ ID NO: 139090 - protein, 11 aa, Influenza A virus
KICCTIEELRR

SEQ ID NO: 139091 - protein, 9 aa, Influenza A virus
KICFTIEEL

SEQ ID NO: 139092 - protein, 10 aa, Influenza A virus
KICFTIEELR

SEQ ID NO: 139093 - protein, 11 aa, Influenza A virus
KICFTIEELRR

SEQ ID NO: 139094 - protein, 10 aa, Influenza A virus
KICSTIEDLR

SEQ ID NO: 139095 - protein, 11 aa, Influenza A virus
KICSTIEDLRR

SEQ ID NO: 139096 - protein, 9 aa, Influenza A virus
KICSTIEEF

SEQ ID NO: 139097 - protein, 10 aa, Influenza A virus
KICSTIEEFR

SEQ ID NO: 139098 - protein, 11 aa, Influenza A virus
KICSTIEEFRR

SEQ ID NO: 139099 - protein, 9 aa, Influenza A virus
KICSTIEEL

SEQ ID NO: 139100 - protein, 11 aa, Influenza A virus
KICSTIEELGR

SEQ ID NO: 139101 - protein, 10 aa, Influenza A virus
KICSTIEELK

SEQ ID NO: 139102 - protein, 11 aa, Influenza A virus
KICSTIEELKR

SEQ ID NO: 139103 - protein, 10 aa, Influenza A virus
KICSTIEELR

SEQ ID NO: 139104 - protein, 11 aa, Influenza A virus
KICSTIEELRR

SEQ ID NO: 139105 - protein, 9 aa, Influenza A virus
KIDKIRPLL

SEQ ID NO: 139106 - protein, 10 aa, Influenza A virus
KIDKIRPLLI

SEQ ID NO: 139107 - protein, 10 aa, Influenza A virus
KIEKIRPLLI

SEQ ID NO: 139108 - protein, 10 aa, Influenza A virus
KIEKIRPLLR

SEQ ID NO: 139109 - protein, 10 aa, Influenza A virus
KIEKIRPLLV

SEQ ID NO: 139110 - protein, 10 aa, Influenza A virus
KIERIRPLLI

SEQ ID NO: 139111 - protein, 8 aa, Influenza A virus
KIMEYDAV

SEQ ID NO: 139112 - protein, 9 aa, Influenza A virus
KIMEYDAVA

SEQ ID NO: 139113 - protein, 10 aa, Influenza A virus
KIMEYDAVAT

SEQ ID NO: 139114 - protein, 11 aa, Influenza A virus
KIMEYDAVATT

SEQ ID NO: 139115 - protein, 9 aa, Influenza A virus
KIRPLLIDG

SEQ ID NO: 139116 - protein, 10 aa, Influenza A virus
KIRPLLIDGA

SEQ ID NO: 139117 - protein, 11 aa, Influenza A virus
KIRPLLIDGAA

SEQ ID NO: 139118 - protein, 10 aa, Influenza A virus
KIRPLLIDGT

SEQ ID NO: 139119 - protein, 11 aa, Influenza A virus
KIRPLLIDGTA

SEQ ID NO: 139120 - protein, 11 aa, Influenza A virus
KIRPLLIDGTV

SEQ ID NO: 139121 - protein, 9 aa, Influenza A virus
KIRPLLIEG

SEQ ID NO: 139122 - protein, 10 aa, Influenza A virus
KIRPLLIEGA

SEQ ID NO: 139123 - protein, 11 aa, Influenza A virus
KIRPLLIEGAA

SEQ ID NO: 139124 - protein, 10 aa, Influenza A virus
KIRPLLIEGT

SEQ ID NO: 139125 - protein, 11 aa, Influenza A virus
KIRPLLIEGTA

SEQ ID NO: 139126 - protein, 9 aa, Influenza A virus
KIRPLLRDG

SEQ ID NO: 139127 - protein, 11 aa, Influenza A virus
KIRPLLRDGTA

SEQ ID NO: 139128 - protein, 9 aa, Influenza A virus
KIRPLLVDG

SEQ ID NO: 139129 - protein, 11 aa, Influenza A virus
KIRPLLVDGTA

SEQ ID NO: 139130 - protein, 9 aa, Influenza A virus
KIRPLLVEG

SEQ ID NO: 139131 - protein, 10 aa, Influenza A virus
KIRPLLVEGT

SEQ ID NO: 139132 - protein, 11 aa, Influenza A virus
KIRPLLVEGTA

SEQ ID NO: 139133 - protein, 8 aa, Influenza A virus
KIRTQIPA

SEQ ID NO: 139134 - protein, 9 aa, Influenza A virus
KIRTQIPAE

SEQ ID NO: 139135 - protein, 10 aa, Influenza A virus
KIRTQIPAEM

SEQ ID NO: 139136 - protein, 9 aa, Influenza A virus
KKAKLANVV

SEQ ID NO: 139137 - protein, 10 aa, Influenza A virus
KKAKLANVVR

SEQ ID NO: 139138 - protein, 9 aa, Influenza A virus
KKEDFAEIM

SEQ ID NO: 139139 - protein, 9 aa, Influenza A virus
KKEDFTEIM

SEQ ID NO: 139140 - protein, 9 aa, Influenza A virus
KKEEFAEIM

SEQ ID NO: 139141 - protein, 9 aa, Influenza A virus
KKEEFSEIM

SEQ ID NO: 139142 - protein, 11 aa, Influenza A virus
KKEEFSEIMKI

SEQ ID NO: 139143 - protein, 9 aa, Influenza A virus
KKEEFTEIM

SEQ ID NO: 139144 - protein, 11 aa, Influenza A virus
KKEEMGITTHF

SEQ ID NO: 139145 - protein, 10 aa, Influenza A virus
KKEMEITTHF

SEQ ID NO: 139146 - protein, 9 aa, Influenza A virus
KKGYLIRAL

SEQ ID NO: 139147 - protein, 11 aa, Influenza A virus
KKGYLIRALTL

SEQ ID NO: 139148 - protein, 10 aa, Influenza A virus
KKHKLDKRSY

SEQ ID NO: 139149 - protein, 10 aa, Influenza A virus
KKHRLNKRSY

SEQ ID NO: 139150 - protein, 11 aa, Influenza A virus
KKHRLNKRSYL

SEQ ID NO: 139151 - protein, 9 aa, Influenza A virus
KKIDKIRPL

SEQ ID NO: 139152 - protein, 10 aa, Influenza A virus
KKIDKIRPLL

SEQ ID NO: 139153 - protein, 9 aa, Influenza A virus
KKIEKIRPL

SEQ ID NO: 139154 - protein, 10 aa, Influenza A virus
KKIEKIRPLL

SEQ ID NO: 139155 - protein, 9 aa, Influenza A virus
KKIERIRPL

SEQ ID NO: 139156 - protein, 10 aa, Influenza A virus
KKIERIRPLL

SEQ ID NO: 139157 - protein, 11 aa, Influenza A virus
KKKQRLNKSSY

SEQ ID NO: 139158 - protein, 11 aa, Influenza A virus
KKKQRLNRRSY

SEQ ID NO: 139159 - protein, 10 aa, Influenza A virus
KKLWDQTHSK

SEQ ID NO: 139160 - protein, 10 aa, Influenza A virus
KKLWDQTQSK

SEQ ID NO: 139161 - protein, 10 aa, Influenza A virus
KKLWDQTRSK

SEQ ID NO: 139162 - protein, 10 aa, Influenza A virus
KKLWEQTHSK

SEQ ID NO: 139163 - protein, 11 aa, Influenza A virus
KKLWEQTHSKA

SEQ ID NO: 139164 - protein, 10 aa, Influenza A virus
KKLWEQTQSK

SEQ ID NO: 139165 - protein, 10 aa, Influenza A virus
KKLWEQTRSK

SEQ ID NO: 139166 - protein, 9 aa, Influenza A virus
KKMITQRTI

SEQ ID NO: 139167 - protein, 11 aa, Influenza A virus
KKMITQRTIGK

SEQ ID NO: 139168 - protein, 9 aa, Influenza A virus
KKMITQRTM

SEQ ID NO: 139169 - protein, 11 aa, Influenza A virus
KKMITQRTMGK

SEQ ID NO: 139170 - protein, 9 aa, Influenza A virus
KKMVTQRTI

SEQ ID NO: 139171 - protein, 11 aa, Influenza A virus
KKMVTQRTIGK

SEQ ID NO: 139172 - protein, 11 aa, Influenza A virus
KKMVTQRTIGR

SEQ ID NO: 139173 - protein, 10 aa, Influenza A virus
KKQKLHKRSY

SEQ ID NO: 139174 - protein, 10 aa, Influenza A virus
KKQKLNKRSY

SEQ ID NO: 139175 - protein, 10 aa, Influenza A virus
KKQRLNKKSY

SEQ ID NO: 139176 - protein, 10 aa, Influenza A virus
KKQRLNKRIY

SEQ ID NO: 139177 - protein, 11 aa, Influenza A virus
KKQRLNKRIYL

SEQ ID NO: 139178 - protein, 10 aa, Influenza A virus
KKQRLNKRSY

SEQ ID NO: 139179 - protein, 11 aa, Influenza A virus
KKQRLNKRSYL

SEQ ID NO: 139180 - protein, 10 aa, Influenza A virus
KKQRLNKSSY

SEQ ID NO: 139181 - protein, 11 aa, Influenza A virus
KKQRLNKSSYL

SEQ ID NO: 139182 - protein, 10 aa, Influenza A virus
KKQRLNRKSY

SEQ ID NO: 139183 - protein, 10 aa, Influenza A virus
KKQRLNRRSY

SEQ ID NO: 139184 - protein, 11 aa, Influenza A virus
KKQRLNRRSYL

SEQ ID NO: 139185 - protein, 10 aa, Influenza A virus
KKQRLTKKSY

SEQ ID NO: 139186 - protein, 10 aa, Influenza A virus
KKQRVNKRSY

SEQ ID NO: 139187 - protein, 11 aa, Influenza A virus
KKSYINKTGTF

SEQ ID NO: 139188 - protein, 11 aa, Influenza A virus
KKSYINRTGTF

SEQ ID NO: 139189 - protein, 9 aa, Influenza A virus
KKSYLIRAL

SEQ ID NO: 139190 - protein, 10 aa, Influenza A virus
KKSYLIRALT

SEQ ID NO: 139191 - protein, 11 aa, Influenza A virus
KKSYLIRALTL

SEQ ID NO: 139192 - protein, 11 aa, Influenza A virus
KKSYMNRTGTF

SEQ ID NO: 139193 - protein, 11 aa, Influenza A virus
KKSYTNRTGTF

SEQ ID NO: 139194 - protein, 8 aa, Influenza A virus
KKYTKTTY

SEQ ID NO: 139195 - protein, 9 aa, Influenza A virus
KKYTKTTYW

SEQ ID NO: 139196 - protein, 10 aa, Influenza A virus
KKYTKTTYWW

SEQ ID NO: 139197 - protein, 8 aa, Influenza A virus
KLANVVRK

SEQ ID NO: 139198 - protein, 9 aa, Influenza A virus
KLANVVRKM

SEQ ID NO: 139199 - protein, 10 aa, Influenza A virus
KLANVVRKMM

SEQ ID NO: 139200 - protein, 9 aa, Influenza A virus
KLDKRSYLI

SEQ ID NO: 139201 - protein, 10 aa, Influenza A virus
KLDKRSYLIR

SEQ ID NO: 139202 - protein, 11 aa, Influenza A virus
KLDKRSYLIRA

SEQ ID NO: 139203 - protein, 9 aa, Influenza A virus
KLEQSGLPV

SEQ ID NO: 139204 - protein, 9 aa, Influenza A virus
KLHKRSYII

SEQ ID NO: 139205 - protein, 10 aa, Influenza A virus
KLHKRSYIIR

SEQ ID NO: 139206 - protein, 11 aa, Influenza A virus
KLHKRSYIIRA

SEQ ID NO: 139207 - protein, 9 aa, Influenza A virus
KLKRRAIAT

SEQ ID NO: 139208 - protein, 9 aa, Influenza A virus
KLLGINMSK

SEQ ID NO: 139209 - protein, 10 aa, Influenza A virus
KLLGINMSKK

SEQ ID NO: 139210 - protein, 11 aa, Influenza A virus
KLLGINMSKKK

SEQ ID NO: 139211 - protein, 9 aa, Influenza A virus
KLNKRGYLI

SEQ ID NO: 139212 - protein, 10 aa, Influenza A virus
KLNKRGYLIR

SEQ ID NO: 139213 - protein, 11 aa, Influenza A virus
KLNKRGYLIRA

SEQ ID NO: 139214 - protein, 9 aa, Influenza A virus
KLNKRSYII

SEQ ID NO: 139215 - protein, 10 aa, Influenza A virus
KLNKRSYIIR

SEQ ID NO: 139216 - protein, 11 aa, Influenza A virus
KLNKRSYIIRA

SEQ ID NO: 139217 - protein, 9 aa, Influenza A virus
KLNKRSYLI

SEQ ID NO: 139218 - protein, 10 aa, Influenza A virus
KLNKRSYLIR

SEQ ID NO: 139219 - protein, 11 aa, Influenza A virus
KLNKRSYLIRA

SEQ ID NO: 139220 - protein, 9 aa, Influenza A virus
KLNRRGYLI

SEQ ID NO: 139221 - protein, 10 aa, Influenza A virus
KLNRRGYLIR

SEQ ID NO: 139222 - protein, 11 aa, Influenza A virus
KLNRRGYLIRA

SEQ ID NO: 139223 - protein, 9 aa, Influenza A virus
KLRRRAIAT

SEQ ID NO: 139224 - protein, 8 aa, Influenza A virus
KLRTQIPA

SEQ ID NO: 139225 - protein, 9 aa, Influenza A virus
KLRTQIPAE

SEQ ID NO: 139226 - protein, 10 aa, Influenza A virus
KLRTQIPAEM

SEQ ID NO: 139227 - protein, 9 aa, Influenza A virus
KLRTQIPAG

SEQ ID NO: 139228 - protein, 10 aa, Influenza A virus
KLRTQIPAGM

SEQ ID NO: 139229 - protein, 9 aa, Influenza A virus
KLRTQIPTE

SEQ ID NO: 139230 - protein, 10 aa, Influenza A virus
KLRTQIPTEM

SEQ ID NO: 139231 - protein, 10 aa, Influenza A virus
KLRTQISAEM

SEQ ID NO: 139232 - protein, 9 aa, Influenza A virus
KLTQGRQTF

SEQ ID NO: 139233 - protein, 9 aa, Influenza A virus
KLTQGRQTY

SEQ ID NO: 139234 - protein, 9 aa, Influenza A virus
KLVGINMSK

SEQ ID NO: 139235 - protein, 10 aa, Influenza A virus
KLVGINMSKK

SEQ ID NO: 139236 - protein, 11 aa, Influenza A virus
KLVGINMSKKK

SEQ ID NO: 139237 - protein, 9 aa, Influenza A virus
KLVGINMTK

SEQ ID NO: 139238 - protein, 10 aa, Influenza A virus
KLVGINMTKK

SEQ ID NO: 139239 - protein, 11 aa, Influenza A virus
KLVGINMTKKK

SEQ ID NO: 139240 - protein, 9 aa, Influenza A virus
KLWDQTHSK

SEQ ID NO: 139241 - protein, 10 aa, Influenza A virus
KLWDQTHSKA

SEQ ID NO: 139242 - protein, 9 aa, Influenza A virus
KLWDQTQSK

SEQ ID NO: 139243 - protein, 10 aa, Influenza A virus
KLWDQTQSKA

SEQ ID NO: 139244 - protein, 9 aa, Influenza A virus
KLWDQTRSK

SEQ ID NO: 139245 - protein, 10 aa, Influenza A virus
KLWDQTRSKA

SEQ ID NO: 139246 - protein, 10 aa, Influenza A virus
KLWDQTRSKT

SEQ ID NO: 139247 - protein, 9 aa, Influenza A virus
KLWEQTHSK

SEQ ID NO: 139248 - protein, 10 aa, Influenza A virus
KLWEQTHSKA

SEQ ID NO: 139249 - protein, 9 aa, Influenza A virus
KLWEQTQSK

SEQ ID NO: 139250 - protein, 10 aa, Influenza A virus
KLWEQTQSKA

SEQ ID NO: 139251 - protein, 9 aa, Influenza A virus
KLWEQTRSK

SEQ ID NO: 139252 - protein, 10 aa, Influenza A virus
KLWEQTRSKA

SEQ ID NO: 139253 - protein, 10 aa, Influenza A virus
KLWEQTRSKT

SEQ ID NO: 139254 - protein, 9 aa, Influenza A virus
KMARLGKGY

SEQ ID NO: 139255 - protein, 10 aa, Influenza A virus
KMARLGKGYM

SEQ ID NO: 139256 - protein, 11 aa, Influenza A virus
KMARLGKGYMF

SEQ ID NO: 139257 - protein, 9 aa, Influenza A virus
KMITQRTIG

SEQ ID NO: 139258 - protein, 10 aa, Influenza A virus
KMITQRTIGK

SEQ ID NO: 139259 - protein, 11 aa, Influenza A virus
KMITQRTIGKK

SEQ ID NO: 139260 - protein, 8 aa, Influenza A virus
KMITQRTM

SEQ ID NO: 139261 - protein, 9 aa, Influenza A virus
KMITQRTMG

SEQ ID NO: 139262 - protein, 10 aa, Influenza A virus
KMITQRTMGK

SEQ ID NO: 139263 - protein, 11 aa, Influenza A virus
KMITQRTMGKK

SEQ ID NO: 139264 - protein, 11 aa, Influenza A virus
KMMTNSQDTEI

SEQ ID NO: 139265 - protein, 11 aa, Influenza A virus
KMMTNSQDTEL

SEQ ID NO: 139266 - protein, 10 aa, Influenza A virus
KMVTQRTIGK

SEQ ID NO: 139267 - protein, 11 aa, Influenza A virus
KMVTQRTIGKK

SEQ ID NO: 139268 - protein, 11 aa, Influenza A virus
KMVTQRTIGKR

SEQ ID NO: 139269 - protein, 10 aa, Influenza A virus
KMVTQRTIGR

SEQ ID NO: 139270 - protein, 11 aa, Influenza A virus
KMVTQRTIGRK

SEQ ID NO: 139271 - protein, 9 aa, Influenza A virus
KNMKLRTQI

SEQ ID NO: 139272 - protein, 8 aa, Influenza A virus
KNQPEWFR

SEQ ID NO: 139273 - protein, 11 aa, Influenza A virus
KNQPEWFRNIL

SEQ ID NO: 139274 - protein, 10 aa, Influenza A virus
KNQPEWFRNV

SEQ ID NO: 139275 - protein, 11 aa, Influenza A virus
KNQPEWFRNVL

SEQ ID NO: 139276 - protein, 9 aa, Influenza A virus
KQKLHKRSY

SEQ ID NO: 139277 - protein, 10 aa, Influenza A virus
KQKLHKRSYI

SEQ ID NO: 139278 - protein, 9 aa, Influenza A virus
KQKLNKRGY

SEQ ID NO: 139279 - protein, 9 aa, Influenza A virus
KQKLNKRSY

SEQ ID NO: 139280 - protein, 10 aa, Influenza A virus
KQKLNKRSYI

SEQ ID NO: 139281 - protein, 10 aa, Influenza A virus
KQKLNKRSYL

SEQ ID NO: 139282 - protein, 9 aa, Influenza A virus
KQKLNRRGY

SEQ ID NO: 139283 - protein, 10 aa, Influenza A virus
KQKLNRRGYL

SEQ ID NO: 139284 - protein, 9 aa, Influenza A virus
KQPEWFRNV

SEQ ID NO: 139285 - protein, 10 aa, Influenza A virus
KQPEWFRNVL

SEQ ID NO: 139286 - protein, 9 aa, Influenza A virus
KQRLNKKGY

SEQ ID NO: 139287 - protein, 10 aa, Influenza A virus
KQRLNKKGYL

SEQ ID NO: 139288 - protein, 9 aa, Influenza A virus
KQRLNKKSY

SEQ ID NO: 139289 - protein, 10 aa, Influenza A virus
KQRLNKKSYL

SEQ ID NO: 139290 - protein, 9 aa, Influenza A virus
KQRLNKRIY

SEQ ID NO: 139291 - protein, 10 aa, Influenza A virus
KQRLNKRIYL

SEQ ID NO: 139292 - protein, 11 aa, Influenza A virus
KQRLNKRIYLI

SEQ ID NO: 139293 - protein, 9 aa, Influenza A virus
KQRLNKRSY

SEQ ID NO: 139294 - protein, 10 aa, Influenza A virus
KQRLNKRSYL

SEQ ID NO: 139295 - protein, 9 aa, Influenza A virus
KQRLNKSSY

SEQ ID NO: 139296 - protein, 10 aa, Influenza A virus
KQRLNKSSYL

SEQ ID NO: 139297 - protein, 11 aa, Influenza A virus
KQRLNKSSYLI

SEQ ID NO: 139298 - protein, 9 aa, Influenza A virus
KQRLNRKSY

SEQ ID NO: 139299 - protein, 10 aa, Influenza A virus
KQRLNRKSYL

SEQ ID NO: 139300 - protein, 9 aa, Influenza A virus
KQRLNRRSY

SEQ ID NO: 139301 - protein, 10 aa, Influenza A virus
KQRLNRRSYL

SEQ ID NO: 139302 - protein, 11 aa, Influenza A virus
KQRLNRRSYLI

SEQ ID NO: 139303 - protein, 9 aa, Influenza A virus
KQRLTKKSY

SEQ ID NO: 139304 - protein, 10 aa, Influenza A virus
KQRLTKKSYL

SEQ ID NO: 139305 - protein, 9 aa, Influenza A virus
KQRVNKRSY

SEQ ID NO: 139306 - protein, 10 aa, Influenza A virus
KQRVNKRSYL

SEQ ID NO: 139307 - protein, 10 aa, Influenza A virus
KRCTKTTYWW

SEQ ID NO: 139308 - protein, 9 aa, Influenza A virus
KRGYLIRAL

SEQ ID NO: 139309 - protein, 10 aa, Influenza A virus
KRGYLIRALT

SEQ ID NO: 139310 - protein, 11 aa, Influenza A virus
KRGYLIRALTL

SEQ ID NO: 139311 - protein, 9 aa, Influenza A virus
KRIEKIRPL

SEQ ID NO: 139312 - protein, 10 aa, Influenza A virus
KRIEKIRPLL

SEQ ID NO: 139313 - protein, 11 aa, Influenza A virus
KRIEKIRPLLI

SEQ ID NO: 139314 - protein, 9 aa, Influenza A virus
KRIYLIRAL

SEQ ID NO: 139315 - protein, 10 aa, Influenza A virus
KRIYLIRALT

SEQ ID NO: 139316 - protein, 11 aa, Influenza A virus
KRIYLIRALTL

SEQ ID NO: 139317 - protein, 10 aa, Influenza A virus
KRLWEQTRSK

SEQ ID NO: 139318 - protein, 9 aa, Influenza A virus
KRMKLRTQI

SEQ ID NO: 139319 - protein, 10 aa, Influenza A virus
KRMKLRTQIP

SEQ ID NO: 139320 - protein, 11 aa, Influenza A virus
KRMKLRTQIPA

SEQ ID NO: 139321 - protein, 9 aa, Influenza A virus
KRMVTQRTI

SEQ ID NO: 139322 - protein, 10 aa, Influenza A virus
KRMVTQRTIG

SEQ ID NO: 139323 - protein, 11 aa, Influenza A virus
KRMVTQRTIGK

SEQ ID NO: 139324 - protein, 9 aa, Influenza A virus
KRNQPAATA

SEQ ID NO: 139325 - protein, 10 aa, Influenza A virus
KRNQPAATAL

SEQ ID NO: 139326 - protein, 9 aa, Influenza A virus
KRNRSILNT

SEQ ID NO: 139327 - protein, 9 aa, Influenza A virus
KRNRTILNT

SEQ ID NO: 139328 - protein, 10 aa, Influenza A virus
KRRAIATPGM

SEQ ID NO: 139329 - protein, 10 aa, Influenza A virus
KRRIRDNMTK

SEQ ID NO: 139330 - protein, 11 aa, Influenza A virus
KRRIRDNMTKK

SEQ ID NO: 139331 - protein, 10 aa, Influenza A virus
KRRVRDNITK

SEQ ID NO: 139332 - protein, 11 aa, Influenza A virus
KRRVRDNITKK

SEQ ID NO: 139333 - protein, 10 aa, Influenza A virus
KRRVRDNMTK

SEQ ID NO: 139334 - protein, 11 aa, Influenza A virus
KRRVRDNMTKK

SEQ ID NO: 139335 - protein, 11 aa, Influenza A virus
KRRVRDNMTKR

SEQ ID NO: 139336 - protein, 10 aa, Influenza A virus
KRRVRDNVTK

SEQ ID NO: 139337 - protein, 11 aa, Influenza A virus
KRRVRDNVTKK

SEQ ID NO: 139338 - protein, 9 aa, Influenza A virus
KRSYIIRAL

SEQ ID NO: 139339 - protein, 10 aa, Influenza A virus
KRSYIIRALT

SEQ ID NO: 139340 - protein, 11 aa, Influenza A virus
KRSYIIRALTL

SEQ ID NO: 139341 - protein, 9 aa, Influenza A virus
KRSYLIRAL

SEQ ID NO: 139342 - protein, 10 aa, Influenza A virus
KRSYLIRALT

SEQ ID NO: 139343 - protein, 11 aa, Influenza A virus
KRSYLIRALTL

SEQ ID NO: 139344 - protein, 9 aa, Influenza A virus
KRYTKTTYW

SEQ ID NO: 139345 - protein, 10 aa, Influenza A virus
KRYTKTTYWR

SEQ ID NO: 139346 - protein, 10 aa, Influenza A virus
KRYTKTTYWW

SEQ ID NO: 139347 - protein, 8 aa, Influenza A virus
KRYTRTTY

SEQ ID NO: 139348 - protein, 9 aa, Influenza A virus
KRYTRTTYW

SEQ ID NO: 139349 - protein, 10 aa, Influenza A virus
KRYTRTTYWW

SEQ ID NO: 139350 - protein, 8 aa, Influenza A virus
KSKSMKLR

SEQ ID NO: 139351 - protein, 9 aa, Influenza A virus
KSKSMKLRT

SEQ ID NO: 139352 - protein, 10 aa, Influenza A virus
KSKSMKLRTQ

SEQ ID NO: 139353 - protein, 10 aa, Influenza A virus
KSMDKEEMEI

SEQ ID NO: 139354 - protein, 8 aa, Influenza A virus
KSMEYDAF

SEQ ID NO: 139355 - protein, 9 aa, Influenza A virus
KSMEYDAFA

SEQ ID NO: 139356 - protein, 9 aa, Influenza A virus
KSMEYDAVA

SEQ ID NO: 139357 - protein, 9 aa, Influenza A virus
KSMEYEAVA

SEQ ID NO: 139358 - protein, 9 aa, Influenza A virus
KSMKIRTQI

SEQ ID NO: 139359 - protein, 10 aa, Influenza A virus
KSMKIRTQIP

SEQ ID NO: 139360 - protein, 11 aa, Influenza A virus
KSMKIRTQIPA

SEQ ID NO: 139361 - protein, 9 aa, Influenza A virus
KSMKLRTQI

SEQ ID NO: 139362 - protein, 11 aa, Influenza A virus
KSMKLRTQIPA

SEQ ID NO: 139363 - protein, 10 aa, Influenza A virus
KSMKLRTQIS

SEQ ID NO: 139364 - protein, 11 aa, Influenza A virus
KSMKLRTQISA

SEQ ID NO: 139365 - protein, 9 aa, Influenza A virus
KSSYLIRAL

SEQ ID NO: 139366 - protein, 10 aa, Influenza A virus
KSSYLIRALT

SEQ ID NO: 139367 - protein, 11 aa, Influenza A virus
KSSYLIRALTL

SEQ ID NO: 139368 - protein, 9 aa, Influenza A virus
KSYINKTGT

SEQ ID NO: 139369 - protein, 10 aa, Influenza A virus
KSYINKTGTF

SEQ ID NO: 139370 - protein, 11 aa, Influenza A virus
KSYINKTGTFE

SEQ ID NO: 139371 - protein, 9 aa, Influenza A virus
KSYINRTGT

SEQ ID NO: 139372 - protein, 10 aa, Influenza A virus
KSYINRTGTC

SEQ ID NO: 139373 - protein, 10 aa, Influenza A virus
KSYINRTGTF

SEQ ID NO: 139374 - protein, 8 aa, Influenza A virus
KSYLIRAL

SEQ ID NO: 139375 - protein, 9 aa, Influenza A virus
KSYLIRALT

SEQ ID NO: 139376 - protein, 10 aa, Influenza A virus
KSYLIRALTL

SEQ ID NO: 139377 - protein, 9 aa, Influenza A virus
KSYMNRTGT

SEQ ID NO: 139378 - protein, 10 aa, Influenza A virus
KSYMNRTGTF

SEQ ID NO: 139379 - protein, 11 aa, Influenza A virus
KSYMNRTGTFE

SEQ ID NO: 139380 - protein, 9 aa, Influenza A virus
KSYTNRTGT

SEQ ID NO: 139381 - protein, 10 aa, Influenza A virus
KSYTNRTGTF

SEQ ID NO: 139382 - protein, 9 aa, Influenza A virus
KTAYWWDGL

SEQ ID NO: 139383 - protein, 10 aa, Influenza A virus
KTCSTIEDLR

SEQ ID NO: 139384 - protein, 11 aa, Influenza A virus
KTCSTIEDLRR

SEQ ID NO: 139385 - protein, 9 aa, Influenza A virus
KTCSTIEEL

SEQ ID NO: 139386 - protein, 10 aa, Influenza A virus
KTCSTIEELR

SEQ ID NO: 139387 - protein, 11 aa, Influenza A virus
KTCSTIEELRR

SEQ ID NO: 139388 - protein, 10 aa, Influenza A virus
KTGTFEFTSF

SEQ ID NO: 139389 - protein, 11 aa, Influenza A virus
KTGTFEFTSFF

SEQ ID NO: 139390 - protein, 9 aa, Influenza A virus
KTMEYDAVA

SEQ ID NO: 139391 - protein, 9 aa, Influenza A virus
KTSYWWDGL

SEQ ID NO: 139392 - protein, 9 aa, Influenza A virus
KTTYWRDGL

SEQ ID NO: 139393 - protein, 9 aa, Influenza A virus
KTTYWWDGL

SEQ ID NO: 139394 - protein, 9 aa, Influenza A virus
KTYDWTLNR

SEQ ID NO: 139395 - protein, 10 aa, Influenza A virus
KTYDWTLNRN

SEQ ID NO: 139396 - protein, 10 aa, Influenza A virus
KWELMDEDYR

SEQ ID NO: 139397 - protein, 9 aa, Influenza A virus
KWFRNVLSI

SEQ ID NO: 139398 - protein, 10 aa, Influenza A virus
KWFRNVLSIA

SEQ ID NO: 139399 - protein, 9 aa, Influenza A virus
KWNENQNPR

SEQ ID NO: 139400 - protein, 11 aa, Influenza A virus
KWNENQNPRIF

SEQ ID NO: 139401 - protein, 11 aa, Influenza A virus
KWNENQNPRMF

SEQ ID NO: 139402 - protein, 11 aa, Influenza A virus
KWNENQNPRVF

SEQ ID NO: 139403 - protein, 9 aa, Influenza A virus
KWRLMDEDY

SEQ ID NO: 139404 - protein, 10 aa, Influenza A virus
KWRLMDEDYK

SEQ ID NO: 139405 - protein, 9 aa, Influenza A virus
KYFNDSTKK

SEQ ID NO: 139406 - protein, 10 aa, Influenza A virus
KYFNDSTKKK

SEQ ID NO: 139407 - protein, 11 aa, Influenza A virus
KYFNDSTKKKI

SEQ ID NO: 139408 - protein, 8 aa, Influenza A virus
KYFNDSTR

SEQ ID NO: 139409 - protein, 9 aa, Influenza A virus
KYFNDSTRK

SEQ ID NO: 139410 - protein, 10 aa, Influenza A virus
KYFNDSTRKK

SEQ ID NO: 139411 - protein, 11 aa, Influenza A virus
KYFNDSTRKKI

SEQ ID NO: 139412 - protein, 9 aa, Influenza A virus
KYFNELTKK

SEQ ID NO: 139413 - protein, 10 aa, Influenza A virus
KYFNELTKKK

SEQ ID NO: 139414 - protein, 11 aa, Influenza A virus
KYFNELTKKKI

SEQ ID NO: 139415 - protein, 8 aa, Influenza A virus
KYFNEPTR

SEQ ID NO: 139416 - protein, 9 aa, Influenza A virus
KYFNEPTRK

SEQ ID NO: 139417 - protein, 10 aa, Influenza A virus
KYFNEPTRKK

SEQ ID NO: 139418 - protein, 11 aa, Influenza A virus
KYFNEPTRKKI

SEQ ID NO: 139419 - protein, 8 aa, Influenza A virus
KYFNESTR

SEQ ID NO: 139420 - protein, 9 aa, Influenza A virus
KYFNESTRK

SEQ ID NO: 139421 - protein, 10 aa, Influenza A virus
KYFNESTRKK

SEQ ID NO: 139422 - protein, 11 aa, Influenza A virus
KYFNESTRKKI

SEQ ID NO: 139423 - protein, 10 aa, Influenza A virus
KYFNESTRKR

SEQ ID NO: 139424 - protein, 11 aa, Influenza A virus
KYFNESTRKRI

SEQ ID NO: 139425 - protein, 8 aa, Influenza A virus
KYFNGSTR

SEQ ID NO: 139426 - protein, 9 aa, Influenza A virus
KYFNGSTRK

SEQ ID NO: 139427 - protein, 10 aa, Influenza A virus
KYFNGSTRKK

SEQ ID NO: 139428 - protein, 11 aa, Influenza A virus
KYFNGSTRKKI

SEQ ID NO: 139429 - protein, 8 aa, Influenza A virus
KYTKTTYW

SEQ ID NO: 139430 - protein, 9 aa, Influenza A virus
KYTKTTYWW

SEQ ID NO: 139431 - protein, 10 aa, Influenza A virus
KYTKTTYWWD

SEQ ID NO: 139432 - protein, 9 aa, Influenza A virus
LADIDLKYF

SEQ ID NO: 139433 - protein, 11 aa, Influenza A virus
LALQLFIKDYR

SEQ ID NO: 139434 - protein, 9 aa, Influenza A virus
LAMITYITK

SEQ ID NO: 139435 - protein, 9 aa, Influenza A virus
LAMITYITR

SEQ ID NO: 139436 - protein, 10 aa, Influenza A virus
LAMITYITRK

SEQ ID NO: 139437 - protein, 10 aa, Influenza A virus
LAMITYITRT

SEQ ID NO: 139438 - protein, 9 aa, Influenza A virus
LAMITYMTR

SEQ ID NO: 139439 - protein, 9 aa, Influenza A virus
LAMMTYITK

SEQ ID NO: 139440 - protein, 9 aa, Influenza A virus
LANIDLKYF

SEQ ID NO: 139441 - protein, 9 aa, Influenza A virus
LANIDLRYF

SEQ ID NO: 139442 - protein, 9 aa, Influenza A virus
LANTIEIFR

SEQ ID NO: 139443 - protein, 8 aa, Influenza A virus
LANTIEVF

SEQ ID NO: 139444 - protein, 9 aa, Influenza A virus
LANTIEVFR

SEQ ID NO: 139445 - protein, 10 aa, Influenza A virus
LANTIEVFRL

SEQ ID NO: 139446 - protein, 10 aa, Influenza A virus
LANTIEVFRS

SEQ ID NO: 139447 - protein, 8 aa, Influenza A virus
LANVVRKM

SEQ ID NO: 139448 - protein, 9 aa, Influenza A virus
LANVVRKMM

SEQ ID NO: 139449 - protein, 9 aa, Influenza A virus
LAPIMFSNK

SEQ ID NO: 139450 - protein, 10 aa, Influenza A virus
LAPIMFSNKM

SEQ ID NO: 139451 - protein, 9 aa, Influenza A virus
LARNICEKL

SEQ ID NO: 139452 - protein, 9 aa, Influenza A virus
LARSICEKL

SEQ ID NO: 139453 - protein, 9 aa, Influenza A virus
LARSICENL

SEQ ID NO: 139454 - protein, 9 aa, Influenza A virus
LASIDLKYF

SEQ ID NO: 139455 - protein, 9 aa, Influenza A virus
LATIDLKYF

SEQ ID NO: 139456 - protein, 9 aa, Influenza A virus
LAVITYITR

SEQ ID NO: 139457 - protein, 11 aa, Influenza A virus
LDKRSYLIRAL

SEQ ID NO: 139458 - protein, 9 aa, Influenza A virus
LEAMAFLEG

SEQ ID NO: 139459 - protein, 9 aa, Influenza A virus
LEESHPGIF

SEQ ID NO: 139460 - protein, 9 aa, Influenza A virus
LEESHPGLF

SEQ ID NO: 139461 - protein, 9 aa, Influenza A virus
LEGSHPGIF

SEQ ID NO: 139462 - protein, 9 aa, Influenza A virus
LEKSHPGIF

SEQ ID NO: 139463 - protein, 9 aa, Influenza A virus
LENSHPGIF

SEQ ID NO: 139464 - protein, 8 aa, Influenza A virus
LEQSGLPV

SEQ ID NO: 139465 - protein, 9 aa, Influenza A virus
LEQSGLPVG

SEQ ID NO: 139466 - protein, 8 aa, Influenza A virus
LERSHPGI

SEQ ID NO: 139467 - protein, 9 aa, Influenza A virus
LERSHPGIF

SEQ ID NO: 139468 - protein, 11 aa, Influenza A virus
LETIEVVQQTR

SEQ ID NO: 139469 - protein, 11 aa, Influenza A virus
LETMEAVQQTR

SEQ ID NO: 139470 - protein, 11 aa, Influenza A virus
LETMEIVQQTR

SEQ ID NO: 139471 - protein, 11 aa, Influenza A virus
LETMEVIQQTR

SEQ ID NO: 139472 - protein, 11 aa, Influenza A virus
LETMEVVQQTR

SEQ ID NO: 139473 - protein, 11 aa, Influenza A virus
LFEKFFPSSSY

SEQ ID NO: 139474 - protein, 10 aa, Influenza A virus
LFENSCLETM

SEQ ID NO: 139475 - protein, 11 aa, Influenza A virus
LFERFFPSSSY

SEQ ID NO: 139476 - protein, 10 aa, Influenza A virus
LFIKDYRYPY

SEQ ID NO: 139477 - protein, 11 aa, Influenza A virus
LFIKDYRYPYR

SEQ ID NO: 139478 - protein, 10 aa, Influenza A virus
LFIKDYRYTY

SEQ ID NO: 139479 - protein, 11 aa, Influenza A virus
LFIKDYRYTYR

SEQ ID NO: 139480 - protein, 10 aa, Influenza A virus
LFLKEPAQNA

SEQ ID NO: 139481 - protein, 11 aa, Influenza A virus
LFLKEPAQNAI

SEQ ID NO: 139482 - protein, 11 aa, Influenza A virus
LFLKIPAQNAI

SEQ ID NO: 139483 - protein, 10 aa, Influenza A virus
LFLKVPVQNA

SEQ ID NO: 139484 - protein, 11 aa, Influenza A virus
LFLKVPVQNAI

SEQ ID NO: 139485 - protein, 9 aa, Influenza A virus
LFNIRNLHI

SEQ ID NO: 139486 - protein, 10 aa, Influenza A virus
LFVSDGGPNL

SEQ ID NO: 139487 - protein, 11 aa, Influenza A virus
LFVSDGGPNLY

SEQ ID NO: 139488 - protein, 10 aa, Influenza A virus
LGKGYMFESK

SEQ ID NO: 139489 - protein, 11 aa, Influenza A virus
LGKGYMFESKR

SEQ ID NO: 139490 - protein, 10 aa, Influenza A virus
LGKGYMFKSK

SEQ ID NO: 139491 - protein, 10 aa, Influenza A virus
LGPATAQLAL

SEQ ID NO: 139492 - protein, 10 aa, Influenza A virus
LGPATAQMAL

SEQ ID NO: 139493 - protein, 11 aa, Influenza A virus
LGQKEYTKTAY

SEQ ID NO: 139494 - protein, 11 aa, Influenza A virus
LGQKEYTKTSY

SEQ ID NO: 139495 - protein, 11 aa, Influenza A virus
LGQKRCTKTTY

SEQ ID NO: 139496 - protein, 11 aa, Influenza A virus
LGQKRYTKTTY

SEQ ID NO: 139497 - protein, 11 aa, Influenza A virus
LGQKRYTRTTY

SEQ ID NO: 139498 - protein, 11 aa, Influenza A virus
LHKRSYIIRAL

SEQ ID NO: 139499 - protein, 10 aa, Influenza A virus
LHTPEVCLKW

SEQ ID NO: 139500 - protein, 9 aa, Influenza A virus
LIDFLKDVM

SEQ ID NO: 139501 - protein, 10 aa, Influenza A virus
LIDFLKDVMK

SEQ ID NO: 139502 - protein, 9 aa, Influenza A virus
LIDFLKDVV

SEQ ID NO: 139503 - protein, 8 aa, Influenza A virus
LIDGAASL

SEQ ID NO: 139504 - protein, 8 aa, Influenza A virus
LIDGTASL

SEQ ID NO: 139505 - protein, 8 aa, Influenza A virus
LIDGTVSL

SEQ ID NO: 139506 - protein, 9 aa, Influenza A virus
LIDLLRDVM

SEQ ID NO: 139507 - protein, 9 aa, Influenza A virus
LIDSLKDVM

SEQ ID NO: 139508 - protein, 8 aa, Influenza A virus
LIEGTASL

SEQ ID NO: 139509 - protein, 10 aa, Influenza A virus
LIRALTLNTM

SEQ ID NO: 139510 - protein, 9 aa, Influenza A virus
LISDGGPNL

SEQ ID NO: 139511 - protein, 10 aa, Influenza A virus
LISDGGPNLY

SEQ ID NO: 139512 - protein, 9 aa, Influenza A virus
LIVNAPNYA

SEQ ID NO: 139513 - protein, 9 aa, Influenza A virus
LKANESGRL

SEQ ID NO: 139514 - protein, 10 aa, Influenza A virus
LKICSTIEEL

SEQ ID NO: 139515 - protein, 9 aa, Influenza A virus
LKIPAQNAI

SEQ ID NO: 139516 - protein, 11 aa, Influenza A virus
LKKLWDQTRSK

SEQ ID NO: 139517 - protein, 11 aa, Influenza A virus
LKRLWEQTRSK

SEQ ID NO: 139518 - protein, 9 aa, Influenza A virus
LKVPAQNAI

SEQ ID NO: 139519 - protein, 9 aa, Influenza A virus
LKVPVQNAI

SEQ ID NO: 139520 - protein, 10 aa, Influenza A virus
LKWELMDEDY

SEQ ID NO: 139521 - protein, 10 aa, Influenza A virus
LKWELMDEEY

SEQ ID NO: 139522 - protein, 10 aa, Influenza A virus
LKWELMDTDY

SEQ ID NO: 139523 - protein, 10 aa, Influenza A virus
LKYFNELTKK

SEQ ID NO: 139524 - protein, 10 aa, Influenza A virus
LKYFNESTRK

SEQ ID NO: 139525 - protein, 11 aa, Influenza A virus
LKYFNESTRKR

SEQ ID NO: 139526 - protein, 10 aa, Influenza A virus
LKYFNGSTRK

SEQ ID NO: 139527 - protein, 11 aa, Influenza A virus
LLFLKEPAQNA

SEQ ID NO: 139528 - protein, 8 aa, Influenza A virus
LLFLKIPA

SEQ ID NO: 139529 - protein, 11 aa, Influenza A virus
LLFLKIPAQNA

SEQ ID NO: 139530 - protein, 8 aa, Influenza A virus
LLFLKVPA

SEQ ID NO: 139531 - protein, 11 aa, Influenza A virus
LLFLKVPAQNA

SEQ ID NO: 139532 - protein, 8 aa, Influenza A virus
LLFLKVPV

SEQ ID NO: 139533 - protein, 11 aa, Influenza A virus
LLFLKVPVQNA

SEQ ID NO: 139534 - protein, 9 aa, Influenza A virus
LLGINMSKK

SEQ ID NO: 139535 - protein, 10 aa, Influenza A virus
LLGINMSKKK

SEQ ID NO: 139536 - protein, 9 aa, Influenza A virus
LLIDGAASL

SEQ ID NO: 139537 - protein, 10 aa, Influenza A virus
LLIDGAASLS

SEQ ID NO: 139538 - protein, 9 aa, Influenza A virus
LLIDGTASL

SEQ ID NO: 139539 - protein, 10 aa, Influenza A virus
LLIDGTASLS

SEQ ID NO: 139540 - protein, 11 aa, Influenza A virus
LLIDGTASLSP

SEQ ID NO: 139541 - protein, 9 aa, Influenza A virus
LLIDGTVSL

SEQ ID NO: 139542 - protein, 10 aa, Influenza A virus
LLIDGTVSLS

SEQ ID NO: 139543 - protein, 11 aa, Influenza A virus
LLIDGTVSLSP

SEQ ID NO: 139544 - protein, 9 aa, Influenza A virus
LLIEGAASL

SEQ ID NO: 139545 - protein, 10 aa, Influenza A virus
LLIEGAASLS

SEQ ID NO: 139546 - protein, 9 aa, Influenza A virus
LLIEGTASL

SEQ ID NO: 139547 - protein, 10 aa, Influenza A virus
LLIEGTASLS

SEQ ID NO: 139548 - protein, 11 aa, Influenza A virus
LLIEGTASLSP

SEQ ID NO: 139549 - protein, 10 aa, Influenza A virus
LLISDGGPNL

SEQ ID NO: 139550 - protein, 11 aa, Influenza A virus
LLISDGGPNLY

SEQ ID NO: 139551 - protein, 9 aa, Influenza A virus
LLRDGTASL

SEQ ID NO: 139552 - protein, 10 aa, Influenza A virus
LLRDGTASLS

SEQ ID NO: 139553 - protein, 9 aa, Influenza A virus
LLRDVMDSM

SEQ ID NO: 139554 - protein, 9 aa, Influenza A virus
LLVDGTASL

SEQ ID NO: 139555 - protein, 10 aa, Influenza A virus
LLVDGTASLS

SEQ ID NO: 139556 - protein, 9 aa, Influenza A virus
LLVEGTASL

SEQ ID NO: 139557 - protein, 10 aa, Influenza A virus
LLVEGTASLS

SEQ ID NO: 139558 - protein, 10 aa, Influenza A virus
LLVSDGGPNL

SEQ ID NO: 139559 - protein, 11 aa, Influenza A virus
LLVSDGGPNLF

SEQ ID NO: 139560 - protein, 11 aa, Influenza A virus
LLVSDGGPNLY

SEQ ID NO: 139561 - protein, 11 aa, Influenza A virus
LLVSDGGPNPY

SEQ ID NO: 139562 - protein, 10 aa, Influenza A virus
LLVSDGGSNL

SEQ ID NO: 139563 - protein, 11 aa, Influenza A virus
LLVSDGGSNLY

SEQ ID NO: 139564 - protein, 9 aa, Influenza A virus
LMANESGRL

SEQ ID NO: 139565 - protein, 10 aa, Influenza A virus
LMANESGRLI

SEQ ID NO: 139566 - protein, 10 aa, Influenza A virus
LMDEDYKGRL

SEQ ID NO: 139567 - protein, 10 aa, Influenza A virus
LMDEDYQGRI

SEQ ID NO: 139568 - protein, 10 aa, Influenza A virus
LMDEDYQGRL

SEQ ID NO: 139569 - protein, 10 aa, Influenza A virus
LMDEDYRGRL

SEQ ID NO: 139570 - protein, 10 aa, Influenza A virus
LMDEEYQGRL

SEQ ID NO: 139571 - protein, 9 aa, Influenza A virus
LMDFLKDVM

SEQ ID NO: 139572 - protein, 10 aa, Influenza A virus
LMDKDYQGRL

SEQ ID NO: 139573 - protein, 10 aa, Influenza A virus
LMDTDYQGRL

SEQ ID NO: 139574 - protein, 9 aa, Influenza A virus
LMFSNKMAR

SEQ ID NO: 139575 - protein, 10 aa, Influenza A virus
LMFSNKMARL

SEQ ID NO: 139576 - protein, 9 aa, Influenza A virus
LNKKGYLIR

SEQ ID NO: 139577 - protein, 9 aa, Influenza A virus
LNKKSYLIR

SEQ ID NO: 139578 - protein, 9 aa, Influenza A virus
LNKRGYLIR

SEQ ID NO: 139579 - protein, 9 aa, Influenza A virus
LNKRIYLIR

SEQ ID NO: 139580 - protein, 11 aa, Influenza A virus
LNKRIYLIRAL

SEQ ID NO: 139581 - protein, 9 aa, Influenza A virus
LNKRSYIIR

SEQ ID NO: 139582 - protein, 11 aa, Influenza A virus
LNKRSYIIRAL

SEQ ID NO: 139583 - protein, 9 aa, Influenza A virus
LNKRSYLIR

SEQ ID NO: 139584 - protein, 11 aa, Influenza A virus
LNKRSYLIRAL

SEQ ID NO: 139585 - protein, 9 aa, Influenza A virus
LNKSSYLIR

SEQ ID NO: 139586 - protein, 10 aa, Influenza A virus
LNLGQKRYTR

SEQ ID NO: 139587 - protein, 10 aa, Influenza A virus
LNPFISHKEI

SEQ ID NO: 139588 - protein, 10 aa, Influenza A virus
LNPFVSHKEI

SEQ ID NO: 139589 - protein, 10 aa, Influenza A virus
LNPFVSHKEV

SEQ ID NO: 139590 - protein, 9 aa, Influenza A virus
LNRKSYLIR

SEQ ID NO: 139591 - protein, 9 aa, Influenza A virus
LNRRGYLIR

SEQ ID NO: 139592 - protein, 9 aa, Influenza A virus
LNRRSYLIR

SEQ ID NO: 139593 - protein, 11 aa, Influenza A virus
LNRRSYLIRAL

SEQ ID NO: 139594 - protein, 10 aa, Influenza A virus
LNTMTKDAER

SEQ ID NO: 139595 - protein, 10 aa, Influenza A virus
LPEDHEPSGY

SEQ ID NO: 139596 - protein, 11 aa, Influenza A virus
LPEDHEPSGYA

SEQ ID NO: 139597 - protein, 10 aa, Influenza A virus
LPEDNEPSGY

SEQ ID NO: 139598 - protein, 10 aa, Influenza A virus
LPEDNEPTGY

SEQ ID NO: 139599 - protein, 10 aa, Influenza A virus
LPEDNEQSGY

SEQ ID NO: 139600 - protein, 10 aa, Influenza A virus
LPENHEPSGY

SEQ ID NO: 139601 - protein, 11 aa, Influenza A virus
LPENHEPSGYA

SEQ ID NO: 139602 - protein, 10 aa, Influenza A virus
LPKDNEPSGY

SEQ ID NO: 139603 - protein, 9 aa, Influenza A virus
LPSFGVSGI

SEQ ID NO: 139604 - protein, 9 aa, Influenza A virus
LPSFGVSGV

SEQ ID NO: 139605 - protein, 8 aa, Influenza A virus
LQLFIKDY

SEQ ID NO: 139606 - protein, 9 aa, Influenza A virus
LQLFIKDYR

SEQ ID NO: 139607 - protein, 10 aa, Influenza A virus
LQLFIKDYRY

SEQ ID NO: 139608 - protein, 10 aa, Influenza A virus
LQLNPIDGPL

SEQ ID NO: 139609 - protein, 9 aa, Influenza A virus
LQSSDDFAL

SEQ ID NO: 139610 - protein, 10 aa, Influenza A virus
LQSSDDFALI

SEQ ID NO: 139611 - protein, 11 aa, Influenza A virus
LQSSDDFALIL

SEQ ID NO: 139612 - protein, 9 aa, Influenza A virus
LRTQIPAEM

SEQ ID NO: 139613 - protein, 10 aa, Influenza A virus
LRTQIPAEML

SEQ ID NO: 139614 - protein, 9 aa, Influenza A virus
LRTQIPAGM

SEQ ID NO: 139615 - protein, 10 aa, Influenza A virus
LRTQIPAGML

SEQ ID NO: 139616 - protein, 9 aa, Influenza A virus
LRTQIPTEM

SEQ ID NO: 139617 - protein, 10 aa, Influenza A virus
LRTQIPTEML

SEQ ID NO: 139618 - protein, 9 aa, Influenza A virus
LRTQISAEM

SEQ ID NO: 139619 - protein, 10 aa, Influenza A virus
LRTQISAEML

SEQ ID NO: 139620 - protein, 9 aa, Influenza A virus
LRYFNDSTR

SEQ ID NO: 139621 - protein, 10 aa, Influenza A virus
LRYFNDSTRK

SEQ ID NO: 139622 - protein, 10 aa, Influenza A virus
LRYFNDSTRR

SEQ ID NO: 139623 - protein, 11 aa, Influenza A virus
LRYFNDSTRRK

SEQ ID NO: 139624 - protein, 11 aa, Influenza A virus
LSFTITGDNTK

SEQ ID NO: 139625 - protein, 11 aa, Influenza A virus
LSFTVTGDNTK

SEQ ID NO: 139626 - protein, 9 aa, Influenza A virus
LSGIDLRYF

SEQ ID NO: 139627 - protein, 8 aa, Influenza A virus
LSIAPIMF

SEQ ID NO: 139628 - protein, 10 aa, Influenza A virus
LSIAPIMFSN

SEQ ID NO: 139629 - protein, 11 aa, Influenza A virus
LSIAPIMFSNK

SEQ ID NO: 139630 - protein, 8 aa, Influenza A virus
LSIAPLMF

SEQ ID NO: 139631 - protein, 10 aa, Influenza A virus
LSIAPLMFSN

SEQ ID NO: 139632 - protein, 11 aa, Influenza A virus
LSIAPLMFSNK

SEQ ID NO: 139633 - protein, 8 aa, Influenza A virus
LSLAPIMF

SEQ ID NO: 139634 - protein, 10 aa, Influenza A virus
LSLAPIMFSN

SEQ ID NO: 139635 - protein, 11 aa, Influenza A virus
LSLAPIMFSNK

SEQ ID NO: 139636 - protein, 9 aa, Influenza A virus
LSPGMMMGM

SEQ ID NO: 139637 - protein, 10 aa, Influenza A virus
LSPGMMMGMF

SEQ ID NO: 139638 - protein, 9 aa, Influenza A virus
LSSIDLRYF

SEQ ID NO: 139639 - protein, 9 aa, Influenza A virus
LSTVLGVSI

SEQ ID NO: 139640 - protein, 10 aa, Influenza A virus
LSTVLGVSIL

SEQ ID NO: 139641 - protein, 8 aa, Influenza A virus
LSVAPIMF

SEQ ID NO: 139642 - protein, 10 aa, Influenza A virus
LSVAPIMFSN

SEQ ID NO: 139643 - protein, 11 aa, Influenza A virus
LSVAPIMFSNK

SEQ ID NO: 139644 - protein, 9 aa, Influenza A virus
LTANDSGRL

SEQ ID NO: 139645 - protein, 9 aa, Influenza A virus
LTANESGRL

SEQ ID NO: 139646 - protein, 9 aa, Influenza A virus
LTASESGRL

SEQ ID NO: 139647 - protein, 10 aa, Influenza A virus
LTASESGRLI

SEQ ID NO: 139648 - protein, 9 aa, Influenza A virus
LTKKSYLIR

SEQ ID NO: 139649 - protein, 10 aa, Influenza A virus
LTKKSYLIRA

SEQ ID NO: 139650 - protein, 10 aa, Influenza A virus
LTQGRKTYDW

SEQ ID NO: 139651 - protein, 8 aa, Influenza A virus
LTQGRQTF

SEQ ID NO: 139652 - protein, 10 aa, Influenza A virus
LTQGRQTFDW

SEQ ID NO: 139653 - protein, 10 aa, Influenza A virus
LTQGRQTYDW

SEQ ID NO: 139654 - protein, 9 aa, Influenza A virus
LTSIDLKYF

SEQ ID NO: 139655 - protein, 9 aa, Influenza A virus
LTSNESGRL

SEQ ID NO: 139656 - protein, 10 aa, Influenza A virus
LTSNESGRLM

SEQ ID NO: 139657 - protein, 9 aa, Influenza A virus
LTTSESGRL

SEQ ID NO: 139658 - protein, 8 aa, Influenza A virus
LVDGTASL

SEQ ID NO: 139659 - protein, 9 aa, Influenza A virus
LVGINMSKK

SEQ ID NO: 139660 - protein, 10 aa, Influenza A virus
LVGINMSKKK

SEQ ID NO: 139661 - protein, 9 aa, Influenza A virus
LVGINMTKK

SEQ ID NO: 139662 - protein, 10 aa, Influenza A virus
LVGINMTKKK

SEQ ID NO: 139663 - protein, 9 aa, Influenza A virus
LVSDGGPNL

SEQ ID NO: 139664 - protein, 10 aa, Influenza A virus
LVSDGGPNLF

SEQ ID NO: 139665 - protein, 10 aa, Influenza A virus
LVSDGGPNLY

SEQ ID NO: 139666 - protein, 10 aa, Influenza A virus
LVSDGGPNPY

SEQ ID NO: 139667 - protein, 9 aa, Influenza A virus
LVSDGGSNL

SEQ ID NO: 139668 - protein, 10 aa, Influenza A virus
LVSDGGSNLY

SEQ ID NO: 139669 - protein, 11 aa, Influenza A virus
LVSDGGSNLYN

SEQ ID NO: 139670 - protein, 9 aa, Influenza A virus
LYNIRNLHI

SEQ ID NO: 139671 - protein, 11 aa, Influenza A virus
MAFLEESHPGL

SEQ ID NO: 139672 - protein, 10 aa, Influenza A virus
MALQLFIKDY

SEQ ID NO: 139673 - protein, 11 aa, Influenza A virus
MALQLFIKDYR

SEQ ID NO: 139674 - protein, 8 aa, Influenza A virus
MANESGRL

SEQ ID NO: 139675 - protein, 9 aa, Influenza A virus
MANESGRLI

SEQ ID NO: 139676 - protein, 11 aa, Influenza A virus
MANESGRLIDF

SEQ ID NO: 139677 - protein, 9 aa, Influenza A virus
MARLGKGYM

SEQ ID NO: 139678 - protein, 10 aa, Influenza A virus
MARLGKGYMF

SEQ ID NO: 139679 - protein, 11 aa, Influenza A virus
MARLGKGYMFK

SEQ ID NO: 139680 - protein, 11 aa, Influenza A virus
MDFLKDVMESM

SEQ ID NO: 139681 - protein, 11 aa, Influenza A virus
MDKLTQGRQTY

SEQ ID NO: 139682 - protein, 10 aa, Influenza A virus
MDTVNRTHQY

SEQ ID NO: 139683 - protein, 10 aa, Influenza A virus
MDTVSRTHQY

SEQ ID NO: 139684 - protein, 9 aa, Influenza A virus
MDVNPILLF

SEQ ID NO: 139685 - protein, 10 aa, Influenza A virus
MDVNPILLFL

SEQ ID NO: 139686 - protein, 9 aa, Influenza A virus
MDVNPTLIF

SEQ ID NO: 139687 - protein, 10 aa, Influenza A virus
MDVNPTLIFL

SEQ ID NO: 139688 - protein, 9 aa, Influenza A virus
MDVNPTLLF

SEQ ID NO: 139689 - protein, 10 aa, Influenza A virus
MDVNPTLLFL

SEQ ID NO: 139690 - protein, 8 aa, Influenza A virus
MEAMVSRA

SEQ ID NO: 139691 - protein, 10 aa, Influenza A virus
MEAMVSRARI

SEQ ID NO: 139692 - protein, 9 aa, Influenza A virus
MEAVQQTRV

SEQ ID NO: 139693 - protein, 9 aa, Influenza A virus
MEIITHFQR

SEQ ID NO: 139694 - protein, 10 aa, Influenza A virus
MEIITHFQRK

SEQ ID NO: 139695 - protein, 8 aa, Influenza A virus
MEITTHFH

SEQ ID NO: 139696 - protein, 9 aa, Influenza A virus
MEITTHFHR

SEQ ID NO: 139697 - protein, 10 aa, Influenza A virus
MEITTHFHRK

SEQ ID NO: 139698 - protein, 11 aa, Influenza A virus
MEITTHFHRKR

SEQ ID NO: 139699 - protein, 9 aa, Influenza A virus
MEITTHFQR

SEQ ID NO: 139700 - protein, 10 aa, Influenza A virus
MEITTHFQRK

SEQ ID NO: 139701 - protein, 11 aa, Influenza A virus
MEITTHFQRKR

SEQ ID NO: 139702 - protein, 9 aa, Influenza A virus
MEIVQQTRV

SEQ ID NO: 139703 - protein, 9 aa, Influenza A virus
MEIVTHFQR

SEQ ID NO: 139704 - protein, 10 aa, Influenza A virus
MEIVTHFQRK

SEQ ID NO: 139705 - protein, 8 aa, Influenza A virus
MEKEEMEI

SEQ ID NO: 139706 - protein, 9 aa, Influenza A virus
MEKEEMEIV

SEQ ID NO: 139707 - protein, 8 aa, Influenza A virus
MELPSFGV

SEQ ID NO: 139708 - protein, 9 aa, Influenza A virus
MELPSFGVS

SEQ ID NO: 139709 - protein, 10 aa, Influenza A virus
MELPSFGVSG

SEQ ID NO: 139710 - protein, 11 aa, Influenza A virus
MELPSFGVSGI

SEQ ID NO: 139711 - protein, 11 aa, Influenza A virus
MELPSFGVSGV

SEQ ID NO: 139712 - protein, 9 aa, Influenza A virus
MESMDKEDM

SEQ ID NO: 139713 - protein, 9 aa, Influenza A virus
MESMDKEEI

SEQ ID NO: 139714 - protein, 9 aa, Influenza A virus
MESMDKEEM

SEQ ID NO: 139715 - protein, 11 aa, Influenza A virus
MESMDKEEMEV

SEQ ID NO: 139716 - protein, 9 aa, Influenza A virus
MESMDKEEV

SEQ ID NO: 139717 - protein, 9 aa, Influenza A virus
MESMDKEGM

SEQ ID NO: 139718 - protein, 9 aa, Influenza A virus
MESMDKGEM

SEQ ID NO: 139719 - protein, 11 aa, Influenza A virus
MESMDKGEMEI

SEQ ID NO: 139720 - protein, 9 aa, Influenza A virus
MESMDRDEI

SEQ ID NO: 139721 - protein, 9 aa, Influenza A virus
MESMDRDEV

SEQ ID NO: 139722 - protein, 9 aa, Influenza A virus
MESMDREEV

SEQ ID NO: 139723 - protein, 9 aa, Influenza A virus
MESMEKEEM

SEQ ID NO: 139724 - protein, 9 aa, Influenza A virus
MESMKKEEM

SEQ ID NO: 139725 - protein, 9 aa, Influenza A virus
MESMNKEEM

SEQ ID NO: 139726 - protein, 9 aa, Influenza A virus
MESMNKGEM

SEQ ID NO: 139727 - protein, 9 aa, Influenza A virus
MEVIQQTRV

SEQ ID NO: 139728 - protein, 9 aa, Influenza A virus
MEVTTHFQR

SEQ ID NO: 139729 - protein, 10 aa, Influenza A virus
MEVTTHFQRK

SEQ ID NO: 139730 - protein, 11 aa, Influenza A virus
MEVTTHFQRKR

SEQ ID NO: 139731 - protein, 9 aa, Influenza A virus
MEVVQQTRM

SEQ ID NO: 139732 - protein, 9 aa, Influenza A virus
MEVVQQTRV

SEQ ID NO: 139733 - protein, 8 aa, Influenza A virus
MEYDAFAT

SEQ ID NO: 139734 - protein, 9 aa, Influenza A virus
MEYDAFATT

SEQ ID NO: 139735 - protein, 10 aa, Influenza A virus
MEYDAFATTH

SEQ ID NO: 139736 - protein, 8 aa, Influenza A virus
MEYDAVAT

SEQ ID NO: 139737 - protein, 9 aa, Influenza A virus
MEYDAVATT

SEQ ID NO: 139738 - protein, 10 aa, Influenza A virus
MEYDAVATTH

SEQ ID NO: 139739 - protein, 8 aa, Influenza A virus
MEYEAVAT

SEQ ID NO: 139740 - protein, 9 aa, Influenza A virus
MEYEAVATT

SEQ ID NO: 139741 - protein, 10 aa, Influenza A virus
MEYEAVATTH

SEQ ID NO: 139742 - protein, 9 aa, Influenza A virus
MFESKGMKL

SEQ ID NO: 139743 - protein, 10 aa, Influenza A virus
MFESKGMKLR

SEQ ID NO: 139744 - protein, 9 aa, Influenza A virus
MFESKNMKL

SEQ ID NO: 139745 - protein, 10 aa, Influenza A virus
MFESKNMKLR

SEQ ID NO: 139746 - protein, 9 aa, Influenza A virus
MFESKRMKL

SEQ ID NO: 139747 - protein, 10 aa, Influenza A virus
MFESKRMKLR

SEQ ID NO: 139748 - protein, 9 aa, Influenza A virus
MFESKSMKI

SEQ ID NO: 139749 - protein, 10 aa, Influenza A virus
MFESKSMKIR

SEQ ID NO: 139750 - protein, 9 aa, Influenza A virus
MFESKSMKL

SEQ ID NO: 139751 - protein, 10 aa, Influenza A virus
MFESKSMKLR

SEQ ID NO: 139752 - protein, 9 aa, Influenza A virus
MFKSKSMKL

SEQ ID NO: 139753 - protein, 10 aa, Influenza A virus
MFKSKSMKLR

SEQ ID NO: 139754 - protein, 8 aa, Influenza A virus
MFLAMITY

SEQ ID NO: 139755 - protein, 9 aa, Influenza A virus
MFLAMITYI

SEQ ID NO: 139756 - protein, 10 aa, Influenza A virus
MFLAMITYIT

SEQ ID NO: 139757 - protein, 11 aa, Influenza A virus
MFLAMITYITK

SEQ ID NO: 139758 - protein, 11 aa, Influenza A virus
MFLAMITYITR

SEQ ID NO: 139759 - protein, 9 aa, Influenza A virus
MFLAMITYM

SEQ ID NO: 139760 - protein, 10 aa, Influenza A virus
MFLAMITYMT

SEQ ID NO: 139761 - protein, 11 aa, Influenza A virus
MFLAMITYMTR

SEQ ID NO: 139762 - protein, 8 aa, Influenza A virus
MFLAMMTY

SEQ ID NO: 139763 - protein, 9 aa, Influenza A virus
MFLAMMTYI

SEQ ID NO: 139764 - protein, 10 aa, Influenza A virus
MFLAMMTYIT

SEQ ID NO: 139765 - protein, 11 aa, Influenza A virus
MFLAMMTYITK

SEQ ID NO: 139766 - protein, 8 aa, Influenza A virus
MFLAVITY

SEQ ID NO: 139767 - protein, 9 aa, Influenza A virus
MFLAVITYI

SEQ ID NO: 139768 - protein, 10 aa, Influenza A virus
MFLAVITYIT

SEQ ID NO: 139769 - protein, 11 aa, Influenza A virus
MFLAVITYITR

SEQ ID NO: 139770 - protein, 8 aa, Influenza A virus
MFNMLSTV

SEQ ID NO: 139771 - protein, 9 aa, Influenza A virus
MFNMLSTVL

SEQ ID NO: 139772 - protein, 11 aa, Influenza A virus
MFNMLSTVLGV

SEQ ID NO: 139773 - protein, 8 aa, Influenza A virus
MFSNKMAR

SEQ ID NO: 139774 - protein, 9 aa, Influenza A virus
MFSNKMARL

SEQ ID NO: 139775 - protein, 11 aa, Influenza A virus
MFSNKMARLGK

SEQ ID NO: 139776 - protein, 9 aa, Influenza A virus
MGITTHFQR

SEQ ID NO: 139777 - protein, 10 aa, Influenza A virus
MGITTHFQRK

SEQ ID NO: 139778 - protein, 11 aa, Influenza A virus
MGITTHFQRKR

SEQ ID NO: 139779 - protein, 8 aa, Influenza A virus
MGKKKQRL

SEQ ID NO: 139780 - protein, 10 aa, Influenza A virus
MGKKKQRLNK

SEQ ID NO: 139781 - protein, 10 aa, Influenza A virus
MGMFNMLSTV

SEQ ID NO: 139782 - protein, 11 aa, Influenza A virus
MGMFNMLSTVL

SEQ ID NO: 139783 - protein, 8 aa, Influenza A virus
MIANIDLK

SEQ ID NO: 139784 - protein, 9 aa, Influenza A virus
MIANIDLKY

SEQ ID NO: 139785 - protein, 10 aa, Influenza A virus
MIANIDLKYF

SEQ ID NO: 139786 - protein, 9 aa, Influenza A virus
MINNDLGPA

SEQ ID NO: 139787 - protein, 10 aa, Influenza A virus
MISRARIDAR

SEQ ID NO: 139788 - protein, 9 aa, Influenza A virus
MITQRTIGK

SEQ ID NO: 139789 - protein, 10 aa, Influenza A virus
MITQRTIGKK

SEQ ID NO: 139790 - protein, 9 aa, Influenza A virus
MITQRTMGK

SEQ ID NO: 139791 - protein, 10 aa, Influenza A virus
MITQRTMGKK

SEQ ID NO: 139792 - protein, 11 aa, Influenza A virus
MITQRTMGKKK

SEQ ID NO: 139793 - protein, 11 aa, Influenza A virus
MITYITRNQPK

SEQ ID NO: 139794 - protein, 10 aa, Influenza A virus
MKICCTIEEL

SEQ ID NO: 139795 - protein, 11 aa, Influenza A virus
MKICCTIEELR

SEQ ID NO: 139796 - protein, 10 aa, Influenza A virus
MKICFTIEEL

SEQ ID NO: 139797 - protein, 11 aa, Influenza A virus
MKICFTIEELR

SEQ ID NO: 139798 - protein, 10 aa, Influenza A virus
MKICSTIEDL

SEQ ID NO: 139799 - protein, 10 aa, Influenza A virus
MKICSTIEEF

SEQ ID NO: 139800 - protein, 11 aa, Influenza A virus
MKICSTIEEFR

SEQ ID NO: 139801 - protein, 10 aa, Influenza A virus
MKICSTIEEL

SEQ ID NO: 139802 - protein, 11 aa, Influenza A virus
MKICSTIEELR

SEQ ID NO: 139803 - protein, 9 aa, Influenza A virus
MKIRTQIPA

SEQ ID NO: 139804 - protein, 11 aa, Influenza A virus
MKIRTQIPAEM

SEQ ID NO: 139805 - protein, 9 aa, Influenza A virus
MKLRTQIPA

SEQ ID NO: 139806 - protein, 11 aa, Influenza A virus
MKLRTQIPAEM

SEQ ID NO: 139807 - protein, 11 aa, Influenza A virus
MKLRTQIPAGM

SEQ ID NO: 139808 - protein, 11 aa, Influenza A virus
MKLRTQIPTEM

SEQ ID NO: 139809 - protein, 9 aa, Influenza A virus
MKLRTQISA

SEQ ID NO: 139810 - protein, 11 aa, Influenza A virus
MKLRTQISAEM

SEQ ID NO: 139811 - protein, 9 aa, Influenza A virus
MKSMDKEEM

SEQ ID NO: 139812 - protein, 10 aa, Influenza A virus
MKTCSTIEEL

SEQ ID NO: 139813 - protein, 9 aa, Influenza A virus
MLADIDLKY

SEQ ID NO: 139814 - protein, 10 aa, Influenza A virus
MLADIDLKYF

SEQ ID NO: 139815 - protein, 9 aa, Influenza A virus
MLANIDLKY

SEQ ID NO: 139816 - protein, 10 aa, Influenza A virus
MLANIDLKYF

SEQ ID NO: 139817 - protein, 8 aa, Influenza A virus
MLANIDLR

SEQ ID NO: 139818 - protein, 9 aa, Influenza A virus
MLANIDLRY

SEQ ID NO: 139819 - protein, 10 aa, Influenza A virus
MLANIDLRYF

SEQ ID NO: 139820 - protein, 8 aa, Influenza A virus
MLASIDLK

SEQ ID NO: 139821 - protein, 9 aa, Influenza A virus
MLASIDLKY

SEQ ID NO: 139822 - protein, 10 aa, Influenza A virus
MLASIDLKYF

SEQ ID NO: 139823 - protein, 9 aa, Influenza A virus
MLATIDLKY

SEQ ID NO: 139824 - protein, 10 aa, Influenza A virus
MLATIDLKYF

SEQ ID NO: 139825 - protein, 8 aa, Influenza A virus
MLSGIDLR

SEQ ID NO: 139826 - protein, 9 aa, Influenza A virus
MLSGIDLRY

SEQ ID NO: 139827 - protein, 10 aa, Influenza A virus
MLSGIDLRYF

SEQ ID NO: 139828 - protein, 8 aa, Influenza A virus
MLSSIDLR

SEQ ID NO: 139829 - protein, 9 aa, Influenza A virus
MLSSIDLRY

SEQ ID NO: 139830 - protein, 10 aa, Influenza A virus
MLSSIDLRYF

SEQ ID NO: 139831 - protein, 8 aa, Influenza A virus
MLSTVLGV

SEQ ID NO: 139832 - protein, 9 aa, Influenza A virus
MLSTVLGVS

SEQ ID NO: 139833 - protein, 10 aa, Influenza A virus
MLSTVLGVSI

SEQ ID NO: 139834 - protein, 11 aa, Influenza A virus
MLSTVLGVSIL

SEQ ID NO: 139835 - protein, 9 aa, Influenza A virus
MLTSIDLKY

SEQ ID NO: 139836 - protein, 10 aa, Influenza A virus
MLTSIDLKYF

SEQ ID NO: 139837 - protein, 9 aa, Influenza A virus
MMDNDLGPA

SEQ ID NO: 139838 - protein, 11 aa, Influenza A virus
MMDNDLGPATA

SEQ ID NO: 139839 - protein, 8 aa, Influenza A virus
MMEAMVSR

SEQ ID NO: 139840 - protein, 9 aa, Influenza A virus
MMEAMVSRA

SEQ ID NO: 139841 - protein, 10 aa, Influenza A virus
MMEAMVSRAR

SEQ ID NO: 139842 - protein, 8 aa, Influenza A virus
MMGMFNML

SEQ ID NO: 139843 - protein, 9 aa, Influenza A virus
MMGMFNMLS

SEQ ID NO: 139844 - protein, 10 aa, Influenza A virus
MMGMFNMLST

SEQ ID NO: 139845 - protein, 11 aa, Influenza A virus
MMGMFNMLSTV

SEQ ID NO: 139846 - protein, 8 aa, Influenza A virus
MMMGMFNM

SEQ ID NO: 139847 - protein, 10 aa, Influenza A virus
MMMGMFNMLS

SEQ ID NO: 139848 - protein, 11 aa, Influenza A virus
MMMGMFNMLST

SEQ ID NO: 139849 - protein, 9 aa, Influenza A virus
MMPAHGPAK

SEQ ID NO: 139850 - protein, 10 aa, Influenza A virus
MMPAHGPAKI

SEQ ID NO: 139851 - protein, 11 aa, Influenza A virus
MMPAHGPAKIM

SEQ ID NO: 139852 - protein, 11 aa, Influenza A virus
MMPAHGPAKNM

SEQ ID NO: 139853 - protein, 10 aa, Influenza A virus
MMTNSQDTEI

SEQ ID NO: 139854 - protein, 10 aa, Influenza A virus
MMTNSQDTEL

SEQ ID NO: 139855 - protein, 9 aa, Influenza A virus
MNNAVMMPA

SEQ ID NO: 139856 - protein, 9 aa, Influenza A virus
MNRTGTFEF

SEQ ID NO: 139857 - protein, 9 aa, Influenza A virus
MPAHGPAKI

SEQ ID NO: 139858 - protein, 10 aa, Influenza A virus
MPAHGPAKIM

SEQ ID NO: 139859 - protein, 10 aa, Influenza A virus
MPAHGPAKNM

SEQ ID NO: 139860 - protein, 9 aa, Influenza A virus
MPAHGPAKS

SEQ ID NO: 139861 - protein, 10 aa, Influenza A virus
MPAHGPAKSM

SEQ ID NO: 139862 - protein, 10 aa, Influenza A virus
MPAHGPAKSV

SEQ ID NO: 139863 - protein, 9 aa, Influenza A virus
MPAHGPARS

SEQ ID NO: 139864 - protein, 10 aa, Influenza A virus
MPAHGPARSM

SEQ ID NO: 139865 - protein, 11 aa, Influenza A virus
MPAHGPARSME

SEQ ID NO: 139866 - protein, 9 aa, Influenza A virus
MPSHGPAKT

SEQ ID NO: 139867 - protein, 10 aa, Influenza A virus
MPSHGPAKTM

SEQ ID NO: 139868 - protein, 8 aa, Influenza A virus
MQIRGFVH

SEQ ID NO: 139869 - protein, 9 aa, Influenza A virus
MQIRGFVHF

SEQ ID NO: 139870 - protein, 10 aa, Influenza A virus
MQIRGFVHFV

SEQ ID NO: 139871 - protein, 11 aa, Influenza A virus
MQIRGFVHFVE

SEQ ID NO: 139872 - protein, 8 aa, Influenza A virus
MQIRGFVY

SEQ ID NO: 139873 - protein, 9 aa, Influenza A virus
MQIRGFVYF

SEQ ID NO: 139874 - protein, 10 aa, Influenza A virus
MQIRGFVYFV

SEQ ID NO: 139875 - protein, 11 aa, Influenza A virus
MQIRGFVYFVE

SEQ ID NO: 139876 - protein, 8 aa, Influenza A virus
MSIGVTVI

SEQ ID NO: 139877 - protein, 9 aa, Influenza A virus
MSIGVTVIK

SEQ ID NO: 139878 - protein, 10 aa, Influenza A virus
MSIGVTVIKN

SEQ ID NO: 139879 - protein, 8 aa, Influenza A virus
MSKKKSYI

SEQ ID NO: 139880 - protein, 9 aa, Influenza A virus
MSKKKSYIN

SEQ ID NO: 139881 - protein, 10 aa, Influenza A virus
MSKKKSYINK

SEQ ID NO: 139882 - protein, 10 aa, Influenza A virus
MSKKKSYINR

SEQ ID NO: 139883 - protein, 8 aa, Influenza A virus
MSKKKSYM

SEQ ID NO: 139884 - protein, 10 aa, Influenza A virus
MSKKKSYMNR

SEQ ID NO: 139885 - protein, 9 aa, Influenza A virus
MSKKKSYTN

SEQ ID NO: 139886 - protein, 10 aa, Influenza A virus
MSKKKSYTNR

SEQ ID NO: 139887 - protein, 8 aa, Influenza A virus
MTANESGR

SEQ ID NO: 139888 - protein, 9 aa, Influenza A virus
MTANESGRL

SEQ ID NO: 139889 - protein, 10 aa, Influenza A virus
MTANESGRLI

SEQ ID NO: 139890 - protein, 9 aa, Influenza A virus
MTKDAERGK

SEQ ID NO: 139891 - protein, 11 aa, Influenza A virus
MTKDAERGKLR

SEQ ID NO: 139892 - protein, 8 aa, Influenza A virus
MTKKKSYI

SEQ ID NO: 139893 - protein, 9 aa, Influenza A virus
MTKKKSYIN

SEQ ID NO: 139894 - protein, 10 aa, Influenza A virus
MTKKKSYINR

SEQ ID NO: 139895 - protein, 9 aa, Influenza A virus
MTKKMITQR

SEQ ID NO: 139896 - protein, 10 aa, Influenza A virus
MTKKMITQRT

SEQ ID NO: 139897 - protein, 11 aa, Influenza A virus
MTKKMITQRTI

SEQ ID NO: 139898 - protein, 11 aa, Influenza A virus
MTKKMITQRTM

SEQ ID NO: 139899 - protein, 9 aa, Influenza A virus
MTKKMVTQR

SEQ ID NO: 139900 - protein, 11 aa, Influenza A virus
MTKKMVTQRTI

SEQ ID NO: 139901 - protein, 9 aa, Influenza A virus
MTKRMVTQR

SEQ ID NO: 139902 - protein, 10 aa, Influenza A virus
MTKRMVTQRT

SEQ ID NO: 139903 - protein, 11 aa, Influenza A virus
MTKRMVTQRTI

SEQ ID NO: 139904 - protein, 9 aa, Influenza A virus
MTNSQDTEI

SEQ ID NO: 139905 - protein, 11 aa, Influenza A virus
MTNSQDTEISF

SEQ ID NO: 139906 - protein, 9 aa, Influenza A virus
MTNSQDTEL

SEQ ID NO: 139907 - protein, 11 aa, Influenza A virus
MTNSQDTELSF

SEQ ID NO: 139908 - protein, 8 aa, Influenza A virus
MTRNQPEW

SEQ ID NO: 139909 - protein, 9 aa, Influenza A virus
MTRNQPEWF

SEQ ID NO: 139910 - protein, 10 aa, Influenza A virus
MTRNQPEWFR

SEQ ID NO: 139911 - protein, 11 aa, Influenza A virus
MTRNQPEWFRN

SEQ ID NO: 139912 - protein, 11 aa, Influenza A virus
MTYITKNQPEW

SEQ ID NO: 139913 - protein, 8 aa, Influenza A virus
MVEAMISR

SEQ ID NO: 139914 - protein, 10 aa, Influenza A virus
MVEAMISRAR

SEQ ID NO: 139915 - protein, 8 aa, Influenza A virus
MVEAMVSR

SEQ ID NO: 139916 - protein, 10 aa, Influenza A virus
MVEAMVSRAR

SEQ ID NO: 139917 - protein, 10 aa, Influenza A virus
MVSRAQIDAR

SEQ ID NO: 139918 - protein, 10 aa, Influenza A virus
MVSRARIDAR

SEQ ID NO: 139919 - protein, 11 aa, Influenza A virus
MVSRARIDARV

SEQ ID NO: 139920 - protein, 10 aa, Influenza A virus
MVSRARIDTR

SEQ ID NO: 139921 - protein, 9 aa, Influenza A virus
MVTQRTIGK

SEQ ID NO: 139922 - protein, 10 aa, Influenza A virus
MVTQRTIGKK

SEQ ID NO: 139923 - protein, 11 aa, Influenza A virus
MVTQRTIGKKK

SEQ ID NO: 139924 - protein, 10 aa, Influenza A virus
MVTQRTIGKR

SEQ ID NO: 139925 - protein, 11 aa, Influenza A virus
MVTQRTIGKRK

SEQ ID NO: 139926 - protein, 9 aa, Influenza A virus
MVTQRTIGR

SEQ ID NO: 139927 - protein, 10 aa, Influenza A virus
MVTQRTIGRK

SEQ ID NO: 139928 - protein, 11 aa, Influenza A virus
MVTQRTIGRKK

SEQ ID NO: 139929 - protein, 8 aa, Influenza A virus
MYQKCCNL

SEQ ID NO: 139930 - protein, 9 aa, Influenza A virus
MYQKCCNLF

SEQ ID NO: 139931 - protein, 10 aa, Influenza A virus
MYQKCCNLFE

SEQ ID NO: 139932 - protein, 11 aa, Influenza A virus
MYQKCCNLFEK

SEQ ID NO: 139933 - protein, 8 aa, Influenza A virus
MYQKCCSL

SEQ ID NO: 139934 - protein, 9 aa, Influenza A virus
MYQKCCSLF

SEQ ID NO: 139935 - protein, 10 aa, Influenza A virus
MYQKCCSLFE

SEQ ID NO: 139936 - protein, 11 aa, Influenza A virus
MYQKCCSLFEK

SEQ ID NO: 139937 - protein, 8 aa, Influenza A virus
MYQKCCTL

SEQ ID NO: 139938 - protein, 9 aa, Influenza A virus
MYQKCCTLF

SEQ ID NO: 139939 - protein, 10 aa, Influenza A virus
MYQKCCTLFE

SEQ ID NO: 139940 - protein, 11 aa, Influenza A virus
MYQKCCTLFEK

SEQ ID NO: 139941 - protein, 8 aa, Influenza A virus
MYQRCCNL

SEQ ID NO: 139942 - protein, 9 aa, Influenza A virus
MYQRCCNLF

SEQ ID NO: 139943 - protein, 10 aa, Influenza A virus
MYQRCCNLFE

SEQ ID NO: 139944 - protein, 11 aa, Influenza A virus
MYQRCCNLFEK

SEQ ID NO: 139945 - protein, 11 aa, Influenza A virus
MYQRCCNLFER

SEQ ID NO: 139946 - protein, 9 aa, Influenza A virus
NAISTTFPY

SEQ ID NO: 139947 - protein, 10 aa, Influenza A virus
NAISTTFPYT

SEQ ID NO: 139948 - protein, 10 aa, Influenza A virus
NAPNYAGIQA

SEQ ID NO: 139949 - protein, 10 aa, Influenza A virus
NDLGPATAQL

SEQ ID NO: 139950 - protein, 9 aa, Influenza A virus
NENQNPRIF

SEQ ID NO: 139951 - protein, 10 aa, Influenza A virus
NENQNPRIFL

SEQ ID NO: 139952 - protein, 11 aa, Influenza A virus
NENQNPRIFLA

SEQ ID NO: 139953 - protein, 9 aa, Influenza A virus
NENQNPRMF

SEQ ID NO: 139954 - protein, 10 aa, Influenza A virus
NENQNPRMFL

SEQ ID NO: 139955 - protein, 9 aa, Influenza A virus
NENQNPRVF

SEQ ID NO: 139956 - protein, 10 aa, Influenza A virus
NENQNPRVFL

SEQ ID NO: 139957 - protein, 11 aa, Influenza A virus
NENQNPRVFLA

SEQ ID NO: 139958 - protein, 10 aa, Influenza A virus
NESADMSIGV

SEQ ID NO: 139959 - protein, 9 aa, Influenza A virus
NESGRLIDF

SEQ ID NO: 139960 - protein, 10 aa, Influenza A virus
NESGRLIDFL

SEQ ID NO: 139961 - protein, 9 aa, Influenza A virus
NESGRLIDL

SEQ ID NO: 139962 - protein, 10 aa, Influenza A virus
NESGRLIDLL

SEQ ID NO: 139963 - protein, 10 aa, Influenza A virus
NESGRLIDSL

SEQ ID NO: 139964 - protein, 9 aa, Influenza A virus
NESGRLMDF

SEQ ID NO: 139965 - protein, 9 aa, Influenza A virus
NFSMELPSF

SEQ ID NO: 139966 - protein, 11 aa, Influenza A virus
NFSMELPSFGV

SEQ ID NO: 139967 - protein, 10 aa, Influenza A virus
NGLIANESGR

SEQ ID NO: 139968 - protein, 10 aa, Influenza A virus
NGMTANESGR

SEQ ID NO: 139969 - protein, 9 aa, Influenza A virus
NHAGIQAGV

SEQ ID NO: 139970 - protein, 9 aa, Influenza A virus
NHEGIQAGV

SEQ ID NO: 139971 - protein, 10 aa, Influenza A virus
NIRNLHIPEV

SEQ ID NO: 139972 - protein, 10 aa, Influenza A virus
NITKKMVTQR

SEQ ID NO: 139973 - protein, 11 aa, Influenza A virus
NKEEMEITTHF

SEQ ID NO: 139974 - protein, 11 aa, Influenza A virus
NKEEMGITTHF

SEQ ID NO: 139975 - protein, 11 aa, Influenza A virus
NKGEMEITTHF

SEQ ID NO: 139976 - protein, 10 aa, Influenza A virus
NKLWEQTRSK

SEQ ID NO: 139977 - protein, 10 aa, Influenza A virus
NKMARLGKGY

SEQ ID NO: 139978 - protein, 10 aa, Influenza A virus
NKRGYLIRAL

SEQ ID NO: 139979 - protein, 10 aa, Influenza A virus
NKRIYLIRAL

SEQ ID NO: 139980 - protein, 10 aa, Influenza A virus
NKRSYIIRAL

SEQ ID NO: 139981 - protein, 10 aa, Influenza A virus
NKRSYLIRAL

SEQ ID NO: 139982 - protein, 10 aa, Influenza A virus
NKSSYLIRAL

SEQ ID NO: 139983 - protein, 9 aa, Influenza A virus
NLEQSGLPV

SEQ ID NO: 139984 - protein, 9 aa, Influenza A virus
NLFEKFFPS

SEQ ID NO: 139985 - protein, 10 aa, Influenza A virus
NLFEKFFPSS

SEQ ID NO: 139986 - protein, 11 aa, Influenza A virus
NLFEKFFPSSS

SEQ ID NO: 139987 - protein, 9 aa, Influenza A virus
NLFERFFPS

SEQ ID NO: 139988 - protein, 10 aa, Influenza A virus
NLFERFFPSS

SEQ ID NO: 139989 - protein, 11 aa, Influenza A virus
NLFERFFPSSS

SEQ ID NO: 139990 - protein, 10 aa, Influenza A virus
NLFNIRNLHI

SEQ ID NO: 139991 - protein, 9 aa, Influenza A virus
NLGQKRYTR

SEQ ID NO: 139992 - protein, 9 aa, Influenza A virus
NLHIPEAGL

SEQ ID NO: 139993 - protein, 10 aa, Influenza A virus
NLHIPEAGLK

SEQ ID NO: 139994 - protein, 10 aa, Influenza A virus
NLHIPEVCLK

SEQ ID NO: 139995 - protein, 9 aa, Influenza A virus
NLHIPEVGL

SEQ ID NO: 139996 - protein, 10 aa, Influenza A virus
NLHIPEVGLK

SEQ ID NO: 139997 - protein, 9 aa, Influenza A virus
NLHTPEVCL

SEQ ID NO: 139998 - protein, 10 aa, Influenza A virus
NLHTPEVCLK

SEQ ID NO: 139999 - protein, 10 aa, Influenza A virus
NLYNIRNLHI

SEQ ID NO: 140000 - protein, 10 aa, Influenza A virus
NLYNIRNLHT

SEQ ID NO: 140001 - protein, 10 aa, Influenza A virus
NMEYDAVATT

SEQ ID NO: 140002 - protein, 10 aa, Influenza A virus
NMINNDLGPA

SEQ ID NO: 140003 - protein, 8 aa, Influenza A virus
NMKLRTQI

SEQ ID NO: 140004 - protein, 9 aa, Influenza A virus
NMKLRTQIP

SEQ ID NO: 140005 - protein, 10 aa, Influenza A virus
NMKLRTQIPA

SEQ ID NO: 140006 - protein, 9 aa, Influenza A virus
NMLSTVLGV

SEQ ID NO: 140007 - protein, 10 aa, Influenza A virus
NMLSTVLGVS

SEQ ID NO: 140008 - protein, 11 aa, Influenza A virus
NMLSTVLGVSI

SEQ ID NO: 140009 - protein, 10 aa, Influenza A virus
NMMDNDLGPA

SEQ ID NO: 140010 - protein, 9 aa, Influenza A virus
NMSKKKSYI

SEQ ID NO: 140011 - protein, 11 aa, Influenza A virus
NMSKKKSYINR

SEQ ID NO: 140012 - protein, 9 aa, Influenza A virus
NMSKKKSYM

SEQ ID NO: 140013 - protein, 11 aa, Influenza A virus
NMSKKKSYMNR

SEQ ID NO: 140014 - protein, 11 aa, Influenza A virus
NMSKKKSYTNR

SEQ ID NO: 140015 - protein, 9 aa, Influenza A virus
NMTKKKSYI

SEQ ID NO: 140016 - protein, 11 aa, Influenza A virus
NMTKKKSYINR

SEQ ID NO: 140017 - protein, 10 aa, Influenza A virus
NMTKKMITQR

SEQ ID NO: 140018 - protein, 10 aa, Influenza A virus
NMTKKMVTQR

SEQ ID NO: 140019 - protein, 10 aa, Influenza A virus
NMTKRMVTQR

SEQ ID NO: 140020 - protein, 9 aa, Influenza A virus
NPFISHKEI

SEQ ID NO: 140021 - protein, 9 aa, Influenza A virus
NPFVNHKDI

SEQ ID NO: 140022 - protein, 9 aa, Influenza A virus
NPFVSHKEI

SEQ ID NO: 140023 - protein, 9 aa, Influenza A virus
NPFVSHKEV

SEQ ID NO: 140024 - protein, 9 aa, Influenza A virus
NPIDGPLPE

SEQ ID NO: 140025 - protein, 9 aa, Influenza A virus
NPILLFLKV

SEQ ID NO: 140026 - protein, 11 aa, Influenza A virus
NPILLFLKVPA

SEQ ID NO: 140027 - protein, 9 aa, Influenza A virus
NPLNPFISH

SEQ ID NO: 140028 - protein, 10 aa, Influenza A virus
NPLNPFISHK

SEQ ID NO: 140029 - protein, 10 aa, Influenza A virus
NPLNPFVNHK

SEQ ID NO: 140030 - protein, 9 aa, Influenza A virus
NPLNPFVSH

SEQ ID NO: 140031 - protein, 10 aa, Influenza A virus
NPLNPFVSHK

SEQ ID NO: 140032 - protein, 8 aa, Influenza A virus
NPRIFLAM

SEQ ID NO: 140033 - protein, 9 aa, Influenza A virus
NPRIFLAMI

SEQ ID NO: 140034 - protein, 11 aa, Influenza A virus
NPRIFLAMITY

SEQ ID NO: 140035 - protein, 8 aa, Influenza A virus
NPRMFLAM

SEQ ID NO: 140036 - protein, 9 aa, Influenza A virus
NPRMFLAMI

SEQ ID NO: 140037 - protein, 10 aa, Influenza A virus
NPRMFLAMIT

SEQ ID NO: 140038 - protein, 11 aa, Influenza A virus
NPRMFLAMITY

SEQ ID NO: 140039 - protein, 9 aa, Influenza A virus
NPRMFLAMM

SEQ ID NO: 140040 - protein, 11 aa, Influenza A virus
NPRMFLAMMTY

SEQ ID NO: 140041 - protein, 8 aa, Influenza A virus
NPRMFLAV

SEQ ID NO: 140042 - protein, 9 aa, Influenza A virus
NPRMFLAVI

SEQ ID NO: 140043 - protein, 10 aa, Influenza A virus
NPRMFLAVIT

SEQ ID NO: 140044 - protein, 11 aa, Influenza A virus
NPRMFLAVITY

SEQ ID NO: 140045 - protein, 8 aa, Influenza A virus
NPRVFLAM

SEQ ID NO: 140046 - protein, 9 aa, Influenza A virus
NPRVFLAMI

SEQ ID NO: 140047 - protein, 11 aa, Influenza A virus
NPRVFLAMITY

SEQ ID NO: 140048 - protein, 9 aa, Influenza A virus
NPTLIFLKV

SEQ ID NO: 140049 - protein, 11 aa, Influenza A virus
NPTLIFLKVPA

SEQ ID NO: 140050 - protein, 11 aa, Influenza A virus
NPTLLFLKEPA

SEQ ID NO: 140051 - protein, 9 aa, Influenza A virus
NPTLLFLKI

SEQ ID NO: 140052 - protein, 11 aa, Influenza A virus
NPTLLFLKIPA

SEQ ID NO: 140053 - protein, 9 aa, Influenza A virus
NPTLLFLKV

SEQ ID NO: 140054 - protein, 11 aa, Influenza A virus
NPTLLFLKVPA

SEQ ID NO: 140055 - protein, 11 aa, Influenza A virus
NPTLLFLKVPV

SEQ ID NO: 140056 - protein, 8 aa, Influenza A virus
NPYNIRNL

SEQ ID NO: 140057 - protein, 10 aa, Influenza A virus
NPYNIRNLHI

SEQ ID NO: 140058 - protein, 9 aa, Influenza A virus
NQNPRIFLA

SEQ ID NO: 140059 - protein, 10 aa, Influenza A virus
NQNPRIFLAM

SEQ ID NO: 140060 - protein, 9 aa, Influenza A virus
NQNPRMFLA

SEQ ID NO: 140061 - protein, 10 aa, Influenza A virus
NQNPRMFLAM

SEQ ID NO: 140062 - protein, 11 aa, Influenza A virus
NQNPRMFLAMM

SEQ ID NO: 140063 - protein, 10 aa, Influenza A virus
NQNPRMFLAV

SEQ ID NO: 140064 - protein, 11 aa, Influenza A virus
NQNPRMFLAVI

SEQ ID NO: 140065 - protein, 9 aa, Influenza A virus
NQNPRVFLA

SEQ ID NO: 140066 - protein, 10 aa, Influenza A virus
NQNPRVFLAM

SEQ ID NO: 140067 - protein, 9 aa, Influenza A virus
NQPDWFRNV

SEQ ID NO: 140068 - protein, 10 aa, Influenza A virus
NQPDWFRNVL

SEQ ID NO: 140069 - protein, 9 aa, Influenza A virus
NQPEWFRNI

SEQ ID NO: 140070 - protein, 10 aa, Influenza A virus
NQPEWFRNIL

SEQ ID NO: 140071 - protein, 9 aa, Influenza A virus
NQPEWFRNV

SEQ ID NO: 140072 - protein, 10 aa, Influenza A virus
NQPEWFRNVL

SEQ ID NO: 140073 - protein, 9 aa, Influenza A virus
NQPKWFRNV

SEQ ID NO: 140074 - protein, 10 aa, Influenza A virus
NQPKWFRNVL

SEQ ID NO: 140075 - protein, 9 aa, Influenza A virus
NRFYRTCKL

SEQ ID NO: 140076 - protein, 10 aa, Influenza A virus
NRFYRTCKLL

SEQ ID NO: 140077 - protein, 10 aa, Influenza A virus
NRFYRTCKLV

SEQ ID NO: 140078 - protein, 9 aa, Influenza A virus
NRKSYLIRA

SEQ ID NO: 140079 - protein, 10 aa, Influenza A virus
NRKSYLIRAL

SEQ ID NO: 140080 - protein, 9 aa, Influenza A virus
NRNQPAATA

SEQ ID NO: 140081 - protein, 10 aa, Influenza A virus
NRNQPAATAL

SEQ ID NO: 140082 - protein, 9 aa, Influenza A virus
NRRGYLIRA

SEQ ID NO: 140083 - protein, 10 aa, Influenza A virus
NRRGYLIRAL

SEQ ID NO: 140084 - protein, 9 aa, Influenza A virus
NRRSYLIRA

SEQ ID NO: 140085 - protein, 10 aa, Influenza A virus
NRRSYLIRAL

SEQ ID NO: 140086 - protein, 10 aa, Influenza A virus
NRSILNTNQR

SEQ ID NO: 140087 - protein, 10 aa, Influenza A virus
NRSILNTSQR

SEQ ID NO: 140088 - protein, 10 aa, Influenza A virus
NRTILNTSQR

SEQ ID NO: 140089 - protein, 10 aa, Influenza A virus
NSCIETMEIV

SEQ ID NO: 140090 - protein, 10 aa, Influenza A virus
NSCIETMEVV

SEQ ID NO: 140091 - protein, 10 aa, Influenza A virus
NSCLETMEAV

SEQ ID NO: 140092 - protein, 9 aa, Influenza A virus
NSQDTEISF

SEQ ID NO: 140093 - protein, 9 aa, Influenza A virus
NSQDTELSF

SEQ ID NO: 140094 - protein, 11 aa, Influenza A virus
NTIEIFRSNGL

SEQ ID NO: 140095 - protein, 11 aa, Influenza A virus
NTIEVFRLNGL

SEQ ID NO: 140096 - protein, 11 aa, Influenza A virus
NTIEVFRSNDL

SEQ ID NO: 140097 - protein, 11 aa, Influenza A virus
NTIEVFRSNGL

SEQ ID NO: 140098 - protein, 11 aa, Influenza A virus
NTIEVFRSNGM

SEQ ID NO: 140099 - protein, 11 aa, Influenza A virus
NTKWNENQNPR

SEQ ID NO: 140100 - protein, 9 aa, Influenza A virus
NTMTKDAER

SEQ ID NO: 140101 - protein, 11 aa, Influenza A virus
NTMTKDAERGK

SEQ ID NO: 140102 - protein, 9 aa, Influenza A virus
NVLSIAPIM

SEQ ID NO: 140103 - protein, 9 aa, Influenza A virus
NVLSIAPLM

SEQ ID NO: 140104 - protein, 9 aa, Influenza A virus
NVLSLAPIM

SEQ ID NO: 140105 - protein, 9 aa, Influenza A virus
NVLSVAPIM

SEQ ID NO: 140106 - protein, 10 aa, Influenza A virus
NVTKKMVTQR

SEQ ID NO: 140107 - protein, 9 aa, Influenza A virus
NYAGIQAGV

SEQ ID NO: 140108 - protein, 11 aa, Influenza A virus
NYAGIQAGVDR

SEQ ID NO: 140109 - protein, 10 aa, Influenza A virus
PAEMLANIDL

SEQ ID NO: 140110 - protein, 10 aa, Influenza A virus
PAEMLASIDL

SEQ ID NO: 140111 - protein, 10 aa, Influenza A virus
PAEMLATIDL

SEQ ID NO: 140112 - protein, 10 aa, Influenza A virus
PAEMLSGIDL

SEQ ID NO: 140113 - protein, 10 aa, Influenza A virus
PAEMLSSIDL

SEQ ID NO: 140114 - protein, 10 aa, Influenza A virus
PAEMLTSIDL

SEQ ID NO: 140115 - protein, 10 aa, Influenza A virus
PAQNAISTTF

SEQ ID NO: 140116 - protein, 8 aa, Influenza A virus
PATAQLAL

SEQ ID NO: 140117 - protein, 8 aa, Influenza A virus
PATAQMAL

SEQ ID NO: 140118 - protein, 8 aa, Influenza A virus
PDWFRNVL

SEQ ID NO: 140119 - protein, 10 aa, Influenza A virus
PDWFRNVLSI

SEQ ID NO: 140120 - protein, 9 aa, Influenza A virus
PEAGLKWEL

SEQ ID NO: 140121 - protein, 9 aa, Influenza A virus
PEVCLKWEL

SEQ ID NO: 140122 - protein, 9 aa, Influenza A virus
PEVGLKWEL

SEQ ID NO: 140123 - protein, 10 aa, Influenza A virus
PEWFRNILSI

SEQ ID NO: 140124 - protein, 10 aa, Influenza A virus
PEWFRNVLSI

SEQ ID NO: 140125 - protein, 10 aa, Influenza A virus
PEWFRNVLSL

SEQ ID NO: 140126 - protein, 11 aa, Influenza A virus
PGMMMGMFNML

SEQ ID NO: 140127 - protein, 11 aa, Influenza A virus
PGMQIRGFVHF

SEQ ID NO: 140128 - protein, 10 aa, Influenza A virus
PGMQIRGFVY

SEQ ID NO: 140129 - protein, 11 aa, Influenza A virus
PGMQIRGFVYF

SEQ ID NO: 140130 - protein, 10 aa, Influenza A virus
PIMFSNKMAR

SEQ ID NO: 140131 - protein, 8 aa, Influenza A virus
PKWFRNVL

SEQ ID NO: 140132 - protein, 10 aa, Influenza A virus
PKWFRNVLSI

SEQ ID NO: 140133 - protein, 10 aa, Influenza A virus
PLLIDGAASL

SEQ ID NO: 140134 - protein, 10 aa, Influenza A virus
PLLIDGTASL

SEQ ID NO: 140135 - protein, 10 aa, Influenza A virus
PLLIDGTVSL

SEQ ID NO: 140136 - protein, 10 aa, Influenza A virus
PLLIEGAASL

SEQ ID NO: 140137 - protein, 10 aa, Influenza A virus
PLLIEGTASL

SEQ ID NO: 140138 - protein, 10 aa, Influenza A virus
PLLRDGTASL

SEQ ID NO: 140139 - protein, 10 aa, Influenza A virus
PLLVDGTASL

SEQ ID NO: 140140 - protein, 10 aa, Influenza A virus
PLLVEGTASL

SEQ ID NO: 140141 - protein, 10 aa, Influenza A virus
PLMFSNKMAR

SEQ ID NO: 140142 - protein, 9 aa, Influenza A virus
PLNPFISHK

SEQ ID NO: 140143 - protein, 9 aa, Influenza A virus
PLNPFVNHK

SEQ ID NO: 140144 - protein, 9 aa, Influenza A virus
PLNPFVSHK

SEQ ID NO: 140145 - protein, 10 aa, Influenza A virus
PRIFLAMITY

SEQ ID NO: 140146 - protein, 10 aa, Influenza A virus
PRMFLAMITY

SEQ ID NO: 140147 - protein, 11 aa, Influenza A virus
PRMFLAMITYI

SEQ ID NO: 140148 - protein, 10 aa, Influenza A virus
PRMFLAMMTY

SEQ ID NO: 140149 - protein, 11 aa, Influenza A virus
PRMFLAMMTYI

SEQ ID NO: 140150 - protein, 10 aa, Influenza A virus
PRMFLAVITY

SEQ ID NO: 140151 - protein, 11 aa, Influenza A virus
PRMFLAVITYI

SEQ ID NO: 140152 - protein, 10 aa, Influenza A virus
PRVFLAMITY

SEQ ID NO: 140153 - protein, 10 aa, Influenza A virus
PTLLFLKVPV

SEQ ID NO: 140154 - protein, 10 aa, Influenza A virus
PVQNAISTTF

SEQ ID NO: 140155 - protein, 9 aa, Influenza A virus
PYNIRNLHI

SEQ ID NO: 140156 - protein, 8 aa, Influenza A virus
PYTGDPPY

SEQ ID NO: 140157 - protein, 9 aa, Influenza A virus
QAGVDRFYR

SEQ ID NO: 140158 - protein, 9 aa, Influenza A virus
QAGVNRFYR

SEQ ID NO: 140159 - protein, 11 aa, Influenza A virus
QDCVLEAMAFL

SEQ ID NO: 140160 - protein, 9 aa, Influenza A virus
QDTEISFTI

SEQ ID NO: 140161 - protein, 9 aa, Influenza A virus
QDTELSFTI

SEQ ID NO: 140162 - protein, 10 aa, Influenza A virus
QGRKTYDWTL

SEQ ID NO: 140163 - protein, 10 aa, Influenza A virus
QGRQTFDWTL

SEQ ID NO: 140164 - protein, 10 aa, Influenza A virus
QGRQTYDWTL

SEQ ID NO: 140165 - protein, 10 aa, Influenza A virus
QIPAEMIANI

SEQ ID NO: 140166 - protein, 10 aa, Influenza A virus
QIPAEMLADI

SEQ ID NO: 140167 - protein, 10 aa, Influenza A virus
QIPAEMLANI

SEQ ID NO: 140168 - protein, 10 aa, Influenza A virus
QIPAEMLASI

SEQ ID NO: 140169 - protein, 10 aa, Influenza A virus
QIPAEMLATI

SEQ ID NO: 140170 - protein, 10 aa, Influenza A virus
QIPAEMLSGI

SEQ ID NO: 140171 - protein, 10 aa, Influenza A virus
QIPAEMLSSI

SEQ ID NO: 140172 - protein, 10 aa, Influenza A virus
QIPAEMLTSI

SEQ ID NO: 140173 - protein, 10 aa, Influenza A virus
QIPAGMLASI

SEQ ID NO: 140174 - protein, 10 aa, Influenza A virus
QIPTEMLASI

SEQ ID NO: 140175 - protein, 8 aa, Influenza A virus
QIQTGRSF

SEQ ID NO: 140176 - protein, 8 aa, Influenza A virus
QIQTRRSF

SEQ ID NO: 140177 - protein, 11 aa, Influenza A virus
QIQTRRSFEIK

SEQ ID NO: 140178 - protein, 10 aa, Influenza A virus
QIQTRRSFEL

SEQ ID NO: 140179 - protein, 11 aa, Influenza A virus
QIQTRRSFELK

SEQ ID NO: 140180 - protein, 8 aa, Influenza A virus
QIRGFVHF

SEQ ID NO: 140181 - protein, 9 aa, Influenza A virus
QIRGFVHFV

SEQ ID NO: 140182 - protein, 8 aa, Influenza A virus
QIRGFVYF

SEQ ID NO: 140183 - protein, 9 aa, Influenza A virus
QIRGFVYFV

SEQ ID NO: 140184 - protein, 10 aa, Influenza A virus
QISAEMLANI

SEQ ID NO: 140185 - protein, 9 aa, Influenza A virus
QKEYTKTAY

SEQ ID NO: 140186 - protein, 10 aa, Influenza A virus
QKEYTKTAYW

SEQ ID NO: 140187 - protein, 9 aa, Influenza A virus
QKEYTKTSY

SEQ ID NO: 140188 - protein, 10 aa, Influenza A virus
QKEYTKTSYW

SEQ ID NO: 140189 - protein, 11 aa, Influenza A virus
QKEYTKTSYWW

SEQ ID NO: 140190 - protein, 9 aa, Influenza A virus
QKKYTKTTY

SEQ ID NO: 140191 - protein, 11 aa, Influenza A virus
QKKYTKTTYWW

SEQ ID NO: 140192 - protein, 11 aa, Influenza A virus
QKLNKRGYLIR

SEQ ID NO: 140193 - protein, 11 aa, Influenza A virus
QKLNKRSYIIR

SEQ ID NO: 140194 - protein, 11 aa, Influenza A virus
QKLNKRSYLIR

SEQ ID NO: 140195 - protein, 11 aa, Influenza A virus
QKLNRRGYLIR

SEQ ID NO: 140196 - protein, 9 aa, Influenza A virus
QKRCTKTTY

SEQ ID NO: 140197 - protein, 9 aa, Influenza A virus
QKRHTKTTY

SEQ ID NO: 140198 - protein, 9 aa, Influenza A virus
QKRYTKTTY

SEQ ID NO: 140199 - protein, 11 aa, Influenza A virus
QKRYTKTTYWR

SEQ ID NO: 140200 - protein, 11 aa, Influenza A virus
QKRYTKTTYWW

SEQ ID NO: 140201 - protein, 9 aa, Influenza A virus
QKRYTRTTY

SEQ ID NO: 140202 - protein, 11 aa, Influenza A virus
QKRYTRTTYWW

SEQ ID NO: 140203 - protein, 9 aa, Influenza A virus
QLALQLFIK

SEQ ID NO: 140204 - protein, 8 aa, Influenza A virus
QLFIKDYR

SEQ ID NO: 140205 - protein, 9 aa, Influenza A virus
QLFIKDYRY

SEQ ID NO: 140206 - protein, 11 aa, Influenza A virus
QLFIKDYRYPY

SEQ ID NO: 140207 - protein, 11 aa, Influenza A virus
QLFIKDYRYTY

SEQ ID NO: 140208 - protein, 9 aa, Influenza A virus
QLNPIDGPL

SEQ ID NO: 140209 - protein, 11 aa, Influenza A virus
QLNPIDGPLPK

SEQ ID NO: 140210 - protein, 9 aa, Influenza A virus
QMALQLFIK

SEQ ID NO: 140211 - protein, 9 aa, Influenza A virus
QMYQKCCNL

SEQ ID NO: 140212 - protein, 10 aa, Influenza A virus
QMYQKCCNLF

SEQ ID NO: 140213 - protein, 9 aa, Influenza A virus
QMYQKCCSL

SEQ ID NO: 140214 - protein, 10 aa, Influenza A virus
QMYQKCCSLF

SEQ ID NO: 140215 - protein, 9 aa, Influenza A virus
QMYQKCCTL

SEQ ID NO: 140216 - protein, 10 aa, Influenza A virus
QMYQKCCTLF

SEQ ID NO: 140217 - protein, 9 aa, Influenza A virus
QMYQRCCNL

SEQ ID NO: 140218 - protein, 10 aa, Influenza A virus
QMYQRCCNLF

SEQ ID NO: 140219 - protein, 8 aa, Influenza A virus
QNAISTTF

SEQ ID NO: 140220 - protein, 10 aa, Influenza A virus
QNAISTTFPY

SEQ ID NO: 140221 - protein, 10 aa, Influenza A virus
QNPRIFLAMI

SEQ ID NO: 140222 - protein, 10 aa, Influenza A virus
QNPRMFLAMI

SEQ ID NO: 140223 - protein, 10 aa, Influenza A virus
QNPRMFLAMM

SEQ ID NO: 140224 - protein, 10 aa, Influenza A virus
QNPRMFLAVI

SEQ ID NO: 140225 - protein, 10 aa, Influenza A virus
QNPRVFLAMI

SEQ ID NO: 140226 - protein, 11 aa, Influenza A virus
QPAATALANTI

SEQ ID NO: 140227 - protein, 9 aa, Influenza A virus
QPDWFRNVL

SEQ ID NO: 140228 - protein, 10 aa, Influenza A virus
QPDWFRNVLS

SEQ ID NO: 140229 - protein, 11 aa, Influenza A virus
QPDWFRNVLSI

SEQ ID NO: 140230 - protein, 9 aa, Influenza A virus
QPEWFRNIL

SEQ ID NO: 140231 - protein, 11 aa, Influenza A virus
QPEWFRNILSI

SEQ ID NO: 140232 - protein, 9 aa, Influenza A virus
QPEWFRNVL

SEQ ID NO: 140233 - protein, 10 aa, Influenza A virus
QPEWFRNVLS

SEQ ID NO: 140234 - protein, 11 aa, Influenza A virus
QPEWFRNVLSI

SEQ ID NO: 140235 - protein, 11 aa, Influenza A virus
QPEWFRNVLSL

SEQ ID NO: 140236 - protein, 11 aa, Influenza A virus
QPEWFRNVLSV

SEQ ID NO: 140237 - protein, 9 aa, Influenza A virus
QPKWFRNVL

SEQ ID NO: 140238 - protein, 10 aa, Influenza A virus
QPKWFRNVLS

SEQ ID NO: 140239 - protein, 11 aa, Influenza A virus
QPKWFRNVLSI

SEQ ID NO: 140240 - protein, 9 aa, Influenza A virus
QQDCVLEAM

SEQ ID NO: 140241 - protein, 11 aa, Influenza A virus
QQDCVLEAMAF

SEQ ID NO: 140242 - protein, 11 aa, Influenza A virus
QQMYQKCCNLF

SEQ ID NO: 140243 - protein, 9 aa, Influenza A virus
QRCCNLFEK

SEQ ID NO: 140244 - protein, 10 aa, Influenza A virus
QRCCNLFEKF

SEQ ID NO: 140245 - protein, 9 aa, Influenza A virus
QRCCNLFER

SEQ ID NO: 140246 - protein, 10 aa, Influenza A virus
QRCCNLFERF

SEQ ID NO: 140247 - protein, 11 aa, Influenza A virus
QRCCNLFERFF

SEQ ID NO: 140248 - protein, 11 aa, Influenza A virus
QRKYTKTTYWW

SEQ ID NO: 140249 - protein, 9 aa, Influenza A virus
QRLNKKGYL

SEQ ID NO: 140250 - protein, 10 aa, Influenza A virus
QRLNKKGYLI

SEQ ID NO: 140251 - protein, 11 aa, Influenza A virus
QRLNKKGYLIR

SEQ ID NO: 140252 - protein, 9 aa, Influenza A virus
QRLNKKSYL

SEQ ID NO: 140253 - protein, 10 aa, Influenza A virus
QRLNKKSYLI

SEQ ID NO: 140254 - protein, 11 aa, Influenza A virus
QRLNKKSYLIR

SEQ ID NO: 140255 - protein, 9 aa, Influenza A virus
QRLNKRIYL

SEQ ID NO: 140256 - protein, 10 aa, Influenza A virus
QRLNKRIYLI

SEQ ID NO: 140257 - protein, 11 aa, Influenza A virus
QRLNKRIYLIR

SEQ ID NO: 140258 - protein, 9 aa, Influenza A virus
QRLNKRSYL

SEQ ID NO: 140259 - protein, 10 aa, Influenza A virus
QRLNKRSYLI

SEQ ID NO: 140260 - protein, 11 aa, Influenza A virus
QRLNKRSYLIR

SEQ ID NO: 140261 - protein, 9 aa, Influenza A virus
QRLNKSSYL

SEQ ID NO: 140262 - protein, 10 aa, Influenza A virus
QRLNKSSYLI

SEQ ID NO: 140263 - protein, 11 aa, Influenza A virus
QRLNKSSYLIR

SEQ ID NO: 140264 - protein, 9 aa, Influenza A virus
QRLNRKSYL

SEQ ID NO: 140265 - protein, 10 aa, Influenza A virus
QRLNRKSYLI

SEQ ID NO: 140266 - protein, 11 aa, Influenza A virus
QRLNRKSYLIR

SEQ ID NO: 140267 - protein, 9 aa, Influenza A virus
QRLNRRSYL

SEQ ID NO: 140268 - protein, 10 aa, Influenza A virus
QRLNRRSYLI

SEQ ID NO: 140269 - protein, 11 aa, Influenza A virus
QRLNRRSYLIR

SEQ ID NO: 140270 - protein, 9 aa, Influenza A virus
QRLTKKSYL

SEQ ID NO: 140271 - protein, 10 aa, Influenza A virus
QRLTKKSYLI

SEQ ID NO: 140272 - protein, 11 aa, Influenza A virus
QRLTKKSYLIR

SEQ ID NO: 140273 - protein, 10 aa, Influenza A virus
QRTIGKRKQR

SEQ ID NO: 140274 - protein, 10 aa, Influenza A virus
QRTMGKKKQR

SEQ ID NO: 140275 - protein, 9 aa, Influenza A virus
QRVNKRSYL

SEQ ID NO: 140276 - protein, 10 aa, Influenza A virus
QRVNKRSYLI

SEQ ID NO: 140277 - protein, 11 aa, Influenza A virus
QRVNKRSYLIR

SEQ ID NO: 140278 - protein, 9 aa, Influenza A virus
QSKAGLLVS

SEQ ID NO: 140279 - protein, 9 aa, Influenza A virus
QSSDDFALI

SEQ ID NO: 140280 - protein, 10 aa, Influenza A virus
QSSDDFALIL

SEQ ID NO: 140281 - protein, 10 aa, Influenza A virus
QSSDDFALIV

SEQ ID NO: 140282 - protein, 9 aa, Influenza A virus
QTDCVLEAM

SEQ ID NO: 140283 - protein, 9 aa, Influenza A virus
QTDCVLEAV

SEQ ID NO: 140284 - protein, 9 aa, Influenza A virus
QTDCVLEVM

SEQ ID NO: 140285 - protein, 9 aa, Influenza A virus
QTFDWTLNR

SEQ ID NO: 140286 - protein, 10 aa, Influenza A virus
QTFDWTLNRN

SEQ ID NO: 140287 - protein, 9 aa, Influenza A virus
QTGRSFELK

SEQ ID NO: 140288 - protein, 10 aa, Influenza A virus
QTGRSFELKK

SEQ ID NO: 140289 - protein, 9 aa, Influenza A virus
QTHSKAGLL

SEQ ID NO: 140290 - protein, 9 aa, Influenza A virus
QTRRSFEIK

SEQ ID NO: 140291 - protein, 10 aa, Influenza A virus
QTRRSFEIKK

SEQ ID NO: 140292 - protein, 10 aa, Influenza A virus
QTRRSFEINK

SEQ ID NO: 140293 - protein, 9 aa, Influenza A virus
QTRRSFELE

SEQ ID NO: 140294 - protein, 10 aa, Influenza A virus
QTRRSFELEK

SEQ ID NO: 140295 - protein, 9 aa, Influenza A virus
QTRRSFELK

SEQ ID NO: 140296 - protein, 10 aa, Influenza A virus
QTRRSFELKK

SEQ ID NO: 140297 - protein, 10 aa, Influenza A virus
QTRRSFELKR

SEQ ID NO: 140298 - protein, 9 aa, Influenza A virus
QTRSKAGLF

SEQ ID NO: 140299 - protein, 10 aa, Influenza A virus
QTRSKAGLFV

SEQ ID NO: 140300 - protein, 9 aa, Influenza A virus
QTRSKAGLL

SEQ ID NO: 140301 - protein, 10 aa, Influenza A virus
QTRSKAGLLI

SEQ ID NO: 140302 - protein, 10 aa, Influenza A virus
QTRSKAGLLV

SEQ ID NO: 140303 - protein, 9 aa, Influenza A virus
QTRSKTGLL

SEQ ID NO: 140304 - protein, 10 aa, Influenza A virus
QTRSKTGLLV

SEQ ID NO: 140305 - protein, 8 aa, Influenza A virus
QTYDWTLK

SEQ ID NO: 140306 - protein, 9 aa, Influenza A virus
QTYDWTLKR

SEQ ID NO: 140307 - protein, 10 aa, Influenza A virus
QTYDWTLKRN

SEQ ID NO: 140308 - protein, 9 aa, Influenza A virus
QTYDWTLNR

SEQ ID NO: 140309 - protein, 10 aa, Influenza A virus
QTYDWTLNRN

SEQ ID NO: 140310 - protein, 10 aa, Influenza A virus
QYSERGKWTI

SEQ ID NO: 140311 - protein, 10 aa, Influenza A virus
QYSERGRWTK

SEQ ID NO: 140312 - protein, 10 aa, Influenza A virus
RAIATPGMQI

SEQ ID NO: 140313 - protein, 11 aa, Influenza A virus
RAIATPGMQIR

SEQ ID NO: 140314 - protein, 8 aa, Influenza A virus
RALTLNTM

SEQ ID NO: 140315 - protein, 10 aa, Influenza A virus
RALTLNTMTK

SEQ ID NO: 140316 - protein, 10 aa, Influenza A virus
RAQIDARIDF

SEQ ID NO: 140317 - protein, 10 aa, Influenza A virus
RARIDARIDF

SEQ ID NO: 140318 - protein, 10 aa, Influenza A virus
RARIDARVDF

SEQ ID NO: 140319 - protein, 10 aa, Influenza A virus
RARIDTRIDF

SEQ ID NO: 140320 - protein, 8 aa, Influenza A virus
RCCNLFER

SEQ ID NO: 140321 - protein, 9 aa, Influenza A virus
RCTKTTYWW

SEQ ID NO: 140322 - protein, 10 aa, Influenza A virus
RDEIEVTTHF

SEQ ID NO: 140323 - protein, 10 aa, Influenza A virus
RDEVEITTHF

SEQ ID NO: 140324 - protein, 10 aa, Influenza A virus
RDEVEVTTHF

SEQ ID NO: 140325 - protein, 11 aa, Influenza A virus
RDGTASLSPGM

SEQ ID NO: 140326 - protein, 10 aa, Influenza A virus
REEMEITTHF

SEQ ID NO: 140327 - protein, 10 aa, Influenza A virus
REEVEITTHF

SEQ ID NO: 140328 - protein, 8 aa, Influenza A virus
RFFPSSSY

SEQ ID NO: 140329 - protein, 9 aa, Influenza A virus
RFFPSSSYR

SEQ ID NO: 140330 - protein, 10 aa, Influenza A virus
RFFPSSSYRR

SEQ ID NO: 140331 - protein, 11 aa, Influenza A virus
RFFPSSSYRRP

SEQ ID NO: 140332 - protein, 8 aa, Influenza A virus
RFYRTCKL

SEQ ID NO: 140333 - protein, 9 aa, Influenza A virus
RFYRTCKLL

SEQ ID NO: 140334 - protein, 10 aa, Influenza A virus
RFYRTCKLLG

SEQ ID NO: 140335 - protein, 11 aa, Influenza A virus
RFYRTCKLLGI

SEQ ID NO: 140336 - protein, 9 aa, Influenza A virus
RFYRTCKLV

SEQ ID NO: 140337 - protein, 10 aa, Influenza A virus
RFYRTCKLVG

SEQ ID NO: 140338 - protein, 10 aa, Influenza A virus
RGDSQIQTRR

SEQ ID NO: 140339 - protein, 10 aa, Influenza A virus
RGDTQIQTGR

SEQ ID NO: 140340 - protein, 10 aa, Influenza A virus
RGDTQIQTRR

SEQ ID NO: 140341 - protein, 9 aa, Influenza A virus
RGFVHFVEA

SEQ ID NO: 140342 - protein, 9 aa, Influenza A virus
RGFVHFVET

SEQ ID NO: 140343 - protein, 10 aa, Influenza A virus
RGFVHFVETL

SEQ ID NO: 140344 - protein, 9 aa, Influenza A virus
RGFVYFVEA

SEQ ID NO: 140345 - protein, 10 aa, Influenza A virus
RGFVYFVETL

SEQ ID NO: 140346 - protein, 9 aa, Influenza A virus
RGHTQIQTR

SEQ ID NO: 140347 - protein, 10 aa, Influenza A virus
RGHTQIQTRR

SEQ ID NO: 140348 - protein, 10 aa, Influenza A virus
RGILEDGQMY

SEQ ID NO: 140349 - protein, 10 aa, Influenza A virus
RGILEDQQMY

SEQ ID NO: 140350 - protein, 9 aa, Influenza A virus
RGKLKRRAI

SEQ ID NO: 140351 - protein, 10 aa, Influenza A virus
RGKLKRRAIA

SEQ ID NO: 140352 - protein, 9 aa, Influenza A virus
RGKLRRRAI

SEQ ID NO: 140353 - protein, 10 aa, Influenza A virus
RGKLRRRAIA

SEQ ID NO: 140354 - protein, 9 aa, Influenza A virus
RGRLCNPLN

SEQ ID NO: 140355 - protein, 11 aa, Influenza A virus
RGRLCNPLNPF

SEQ ID NO: 140356 - protein, 9 aa, Influenza A virus
RGRWTKNTE

SEQ ID NO: 140357 - protein, 10 aa, Influenza A virus
RGRWTKNTET

SEQ ID NO: 140358 - protein, 9 aa, Influenza A virus
RGRWTTNTE

SEQ ID NO: 140359 - protein, 10 aa, Influenza A virus
RGRWTTNTET

SEQ ID NO: 140360 - protein, 10 aa, Influenza A virus
RGVLGDEQMY

SEQ ID NO: 140361 - protein, 9 aa, Influenza A virus
RGYLIRALT

SEQ ID NO: 140362 - protein, 10 aa, Influenza A virus
RGYLIRALTL

SEQ ID NO: 140363 - protein, 9 aa, Influenza A virus
RHTKTTYWW

SEQ ID NO: 140364 - protein, 9 aa, Influenza A virus
RICNPLNPF

SEQ ID NO: 140365 - protein, 10 aa, Influenza A virus
RICNPLNPFV

SEQ ID NO: 140366 - protein, 10 aa, Influenza A virus
RIDFEAGRIK

SEQ ID NO: 140367 - protein, 11 aa, Influenza A virus
RIDFEAGRIKK

SEQ ID NO: 140368 - protein, 9 aa, Influenza A virus
RIDFESGRI

SEQ ID NO: 140369 - protein, 10 aa, Influenza A virus
RIDFESGRIK

SEQ ID NO: 140370 - protein, 11 aa, Influenza A virus
RIDFESGRIKK

SEQ ID NO: 140371 - protein, 10 aa, Influenza A virus
RIDFESGRTK

SEQ ID NO: 140372 - protein, 11 aa, Influenza A virus
RIDFESGRTKK

SEQ ID NO: 140373 - protein, 9 aa, Influenza A virus
RIDFESGRV

SEQ ID NO: 140374 - protein, 10 aa, Influenza A virus
RIDFESGRVK

SEQ ID NO: 140375 - protein, 11 aa, Influenza A virus
RIDFESGRVKK

SEQ ID NO: 140376 - protein, 9 aa, Influenza A virus
RIEKIRPLL

SEQ ID NO: 140377 - protein, 10 aa, Influenza A virus
RIEKIRPLLI

SEQ ID NO: 140378 - protein, 9 aa, Influenza A virus
RIFLAMITY

SEQ ID NO: 140379 - protein, 10 aa, Influenza A virus
RIFLAMITYI

SEQ ID NO: 140380 - protein, 10 aa, Influenza A virus
RIKKEDFAEI

SEQ ID NO: 140381 - protein, 10 aa, Influenza A virus
RIKKEDFTEI

SEQ ID NO: 140382 - protein, 10 aa, Influenza A virus
RIKKEEFAEI

SEQ ID NO: 140383 - protein, 10 aa, Influenza A virus
RIKKEEFSEI

SEQ ID NO: 140384 - protein, 10 aa, Influenza A virus
RIKKEEFTEI

SEQ ID NO: 140385 - protein, 8 aa, Influenza A virus
RIRDNMTK

SEQ ID NO: 140386 - protein, 9 aa, Influenza A virus
RIRDNMTKK

SEQ ID NO: 140387 - protein, 10 aa, Influenza A virus
RIRDNMTKKM

SEQ ID NO: 140388 - protein, 11 aa, Influenza A virus
RIRDNMTKKMV

SEQ ID NO: 140389 - protein, 9 aa, Influenza A virus
RIRPLLIDG

SEQ ID NO: 140390 - protein, 10 aa, Influenza A virus
RIRPLLIDGT

SEQ ID NO: 140391 - protein, 11 aa, Influenza A virus
RIRPLLIDGTA

SEQ ID NO: 140392 - protein, 9 aa, Influenza A virus
RIYLIRALT

SEQ ID NO: 140393 - protein, 10 aa, Influenza A virus
RIYLIRALTL

SEQ ID NO: 140394 - protein, 9 aa, Influenza A virus
RKIEKIRPL

SEQ ID NO: 140395 - protein, 10 aa, Influenza A virus
RKIEKIRPLL

SEQ ID NO: 140396 - protein, 10 aa, Influenza A virus
RKKIERIRPL

SEQ ID NO: 140397 - protein, 10 aa, Influenza A virus
RKQKLNKRSY

SEQ ID NO: 140398 - protein, 8 aa, Influenza A virus
RKQPEWFR

SEQ ID NO: 140399 - protein, 10 aa, Influenza A virus
RKQPEWFRNV

SEQ ID NO: 140400 - protein, 11 aa, Influenza A virus
RKQPEWFRNVL

SEQ ID NO: 140401 - protein, 10 aa, Influenza A virus
RKQRLNKRSY

SEQ ID NO: 140402 - protein, 11 aa, Influenza A virus
RKQRLNKRSYL

SEQ ID NO: 140403 - protein, 10 aa, Influenza A virus
RKRIEKIRPL

SEQ ID NO: 140404 - protein, 11 aa, Influenza A virus
RKRIEKIRPLL

SEQ ID NO: 140405 - protein, 9 aa, Influenza A virus
RKRRIRDNM

SEQ ID NO: 140406 - protein, 11 aa, Influenza A virus
RKRRIRDNMTK

SEQ ID NO: 140407 - protein, 11 aa, Influenza A virus
RKRRVRDNITK

SEQ ID NO: 140408 - protein, 9 aa, Influenza A virus
RKRRVRDNM

SEQ ID NO: 140409 - protein, 11 aa, Influenza A virus
RKRRVRDNMTK

SEQ ID NO: 140410 - protein, 9 aa, Influenza A virus
RKSYLIRAL

SEQ ID NO: 140411 - protein, 10 aa, Influenza A virus
RKSYLIRALT

SEQ ID NO: 140412 - protein, 11 aa, Influenza A virus
RKSYLIRALTL

SEQ ID NO: 140413 - protein, 10 aa, Influenza A virus
RKTYDWTLNR

SEQ ID NO: 140414 - protein, 11 aa, Influenza A virus
RKTYDWTLNRN

SEQ ID NO: 140415 - protein, 8 aa, Influenza A virus
RKYTKTTY

SEQ ID NO: 140416 - protein, 9 aa, Influenza A virus
RKYTKTTYW

SEQ ID NO: 140417 - protein, 10 aa, Influenza A virus
RKYTKTTYWW

SEQ ID NO: 140418 - protein, 9 aa, Influenza A virus
RLCNPLNPF

SEQ ID NO: 140419 - protein, 10 aa, Influenza A virus
RLCNPLNPFI

SEQ ID NO: 140420 - protein, 10 aa, Influenza A virus
RLCNPLNPFV

SEQ ID NO: 140421 - protein, 11 aa, Influenza A virus
RLCNPLNPFVN

SEQ ID NO: 140422 - protein, 11 aa, Influenza A virus
RLCNPLNPFVS

SEQ ID NO: 140423 - protein, 11 aa, Influenza A virus
RLGKGYMFESK

SEQ ID NO: 140424 - protein, 9 aa, Influenza A virus
RLGKGYMFK

SEQ ID NO: 140425 - protein, 10 aa, Influenza A virus
RLGKGYMFKS

SEQ ID NO: 140426 - protein, 11 aa, Influenza A virus
RLGKGYMFKSK

SEQ ID NO: 140427 - protein, 9 aa, Influenza A virus
RLIDFLKDV

SEQ ID NO: 140428 - protein, 10 aa, Influenza A virus
RLIDFLKDVI

SEQ ID NO: 140429 - protein, 10 aa, Influenza A virus
RLIDFLKDVM

SEQ ID NO: 140430 - protein, 11 aa, Influenza A virus
RLIDFLKDVMK

SEQ ID NO: 140431 - protein, 10 aa, Influenza A virus
RLIDFLKDVV

SEQ ID NO: 140432 - protein, 11 aa, Influenza A virus
RLIDFLKDVVE

SEQ ID NO: 140433 - protein, 9 aa, Influenza A virus
RLIDLLRDV

SEQ ID NO: 140434 - protein, 10 aa, Influenza A virus
RLIDLLRDVM

SEQ ID NO: 140435 - protein, 9 aa, Influenza A virus
RLIDSLKDV

SEQ ID NO: 140436 - protein, 10 aa, Influenza A virus
RLIDSLKDVM

SEQ ID NO: 140437 - protein, 10 aa, Influenza A virus
RLMDEDYKGR

SEQ ID NO: 140438 - protein, 11 aa, Influenza A virus
RLMDEDYKGRL

SEQ ID NO: 140439 - protein, 9 aa, Influenza A virus
RLMDFLKDV

SEQ ID NO: 140440 - protein, 10 aa, Influenza A virus
RLMDFLKDVM

SEQ ID NO: 140441 - protein, 9 aa, Influenza A virus
RLNKKGYLI

SEQ ID NO: 140442 - protein, 10 aa, Influenza A virus
RLNKKGYLIR

SEQ ID NO: 140443 - protein, 11 aa, Influenza A virus
RLNKKGYLIRA

SEQ ID NO: 140444 - protein, 9 aa, Influenza A virus
RLNKKSYLI

SEQ ID NO: 140445 - protein, 10 aa, Influenza A virus
RLNKKSYLIR

SEQ ID NO: 140446 - protein, 11 aa, Influenza A virus
RLNKKSYLIRA

SEQ ID NO: 140447 - protein, 8 aa, Influenza A virus
RLNKRIYL

SEQ ID NO: 140448 - protein, 9 aa, Influenza A virus
RLNKRIYLI

SEQ ID NO: 140449 - protein, 10 aa, Influenza A virus
RLNKRIYLIR

SEQ ID NO: 140450 - protein, 11 aa, Influenza A virus
RLNKRIYLIRA

SEQ ID NO: 140451 - protein, 8 aa, Influenza A virus
RLNKRSYL

SEQ ID NO: 140452 - protein, 9 aa, Influenza A virus
RLNKRSYLI

SEQ ID NO: 140453 - protein, 10 aa, Influenza A virus
RLNKRSYLIR

SEQ ID NO: 140454 - protein, 11 aa, Influenza A virus
RLNKRSYLIRA

SEQ ID NO: 140455 - protein, 9 aa, Influenza A virus
RLNKSSYLI

SEQ ID NO: 140456 - protein, 10 aa, Influenza A virus
RLNKSSYLIR

SEQ ID NO: 140457 - protein, 11 aa, Influenza A virus
RLNKSSYLIRA

SEQ ID NO: 140458 - protein, 8 aa, Influenza A virus
RLNRKSYL

SEQ ID NO: 140459 - protein, 9 aa, Influenza A virus
RLNRKSYLI

SEQ ID NO: 140460 - protein, 10 aa, Influenza A virus
RLNRKSYLIR

SEQ ID NO: 140461 - protein, 11 aa, Influenza A virus
RLNRKSYLIRA

SEQ ID NO: 140462 - protein, 8 aa, Influenza A virus
RLNRRSYL

SEQ ID NO: 140463 - protein, 9 aa, Influenza A virus
RLNRRSYLI

SEQ ID NO: 140464 - protein, 10 aa, Influenza A virus
RLNRRSYLIR

SEQ ID NO: 140465 - protein, 11 aa, Influenza A virus
RLNRRSYLIRA

SEQ ID NO: 140466 - protein, 9 aa, Influenza A virus
RLTKKSYLI

SEQ ID NO: 140467 - protein, 10 aa, Influenza A virus
RLTKKSYLIR

SEQ ID NO: 140468 - protein, 9 aa, Influenza A virus
RLTQGRKTY

SEQ ID NO: 140469 - protein, 9 aa, Influenza A virus
RLTQGRQTY

SEQ ID NO: 140470 - protein, 9 aa, Influenza A virus
RLWEQTRSK

SEQ ID NO: 140471 - protein, 10 aa, Influenza A virus
RLWEQTRSKA

SEQ ID NO: 140472 - protein, 9 aa, Influenza A virus
RMDKLTQGR

SEQ ID NO: 140473 - protein, 9 aa, Influenza A virus
RMFLAMITY

SEQ ID NO: 140474 - protein, 10 aa, Influenza A virus
RMFLAMITYI

SEQ ID NO: 140475 - protein, 11 aa, Influenza A virus
RMFLAMITYIT

SEQ ID NO: 140476 - protein, 10 aa, Influenza A virus
RMFLAMITYM

SEQ ID NO: 140477 - protein, 11 aa, Influenza A virus
RMFLAMITYMT

SEQ ID NO: 140478 - protein, 9 aa, Influenza A virus
RMFLAMMTY

SEQ ID NO: 140479 - protein, 10 aa, Influenza A virus
RMFLAMMTYI

SEQ ID NO: 140480 - protein, 11 aa, Influenza A virus
RMFLAMMTYIT

SEQ ID NO: 140481 - protein, 9 aa, Influenza A virus
RMFLAVITY

SEQ ID NO: 140482 - protein, 10 aa, Influenza A virus
RMFLAVITYI

SEQ ID NO: 140483 - protein, 11 aa, Influenza A virus
RMFLAVITYIT

SEQ ID NO: 140484 - protein, 8 aa, Influenza A virus
RMKLRTQI

SEQ ID NO: 140485 - protein, 9 aa, Influenza A virus
RMKLRTQIP

SEQ ID NO: 140486 - protein, 10 aa, Influenza A virus
RMKLRTQIPA

SEQ ID NO: 140487 - protein, 10 aa, Influenza A virus
RMVTQRTIGK

SEQ ID NO: 140488 - protein, 11 aa, Influenza A virus
RMVTQRTIGKK

SEQ ID NO: 140489 - protein, 9 aa, Influenza A virus
RNILSIAPI

SEQ ID NO: 140490 - protein, 10 aa, Influenza A virus
RNILSIAPIM

SEQ ID NO: 140491 - protein, 11 aa, Influenza A virus
RNILSIAPIMF

SEQ ID NO: 140492 - protein, 9 aa, Influenza A virus
RNQPAATAL

SEQ ID NO: 140493 - protein, 8 aa, Influenza A virus
RNQPDWFR

SEQ ID NO: 140494 - protein, 10 aa, Influenza A virus
RNQPDWFRNV

SEQ ID NO: 140495 - protein, 11 aa, Influenza A virus
RNQPDWFRNVL

SEQ ID NO: 140496 - protein, 8 aa, Influenza A virus
RNQPEWFR

SEQ ID NO: 140497 - protein, 11 aa, Influenza A virus
RNQPEWFRNIL

SEQ ID NO: 140498 - protein, 10 aa, Influenza A virus
RNQPEWFRNV

SEQ ID NO: 140499 - protein, 11 aa, Influenza A virus
RNQPEWFRNVL

SEQ ID NO: 140500 - protein, 8 aa, Influenza A virus
RNQPKWFR

SEQ ID NO: 140501 - protein, 11 aa, Influenza A virus
RNQPKWFRNVL

SEQ ID NO: 140502 - protein, 9 aa, Influenza A virus
RNRSILNTN

SEQ ID NO: 140503 - protein, 11 aa, Influenza A virus
RNRSILNTNQR

SEQ ID NO: 140504 - protein, 9 aa, Influenza A virus
RNRSILNTS

SEQ ID NO: 140505 - protein, 11 aa, Influenza A virus
RNRSILNTSQR

SEQ ID NO: 140506 - protein, 9 aa, Influenza A virus
RNRTILNTS

SEQ ID NO: 140507 - protein, 11 aa, Influenza A virus
RNRTILNTSQR

SEQ ID NO: 140508 - protein, 9 aa, Influenza A virus
RNVLSIAPI

SEQ ID NO: 140509 - protein, 10 aa, Influenza A virus
RNVLSIAPIM

SEQ ID NO: 140510 - protein, 9 aa, Influenza A virus
RNVLSIAPL

SEQ ID NO: 140511 - protein, 10 aa, Influenza A virus
RNVLSIAPLM

SEQ ID NO: 140512 - protein, 11 aa, Influenza A virus
RNVLSIAPLMF

SEQ ID NO: 140513 - protein, 9 aa, Influenza A virus
RNVLSLAPI

SEQ ID NO: 140514 - protein, 10 aa, Influenza A virus
RNVLSLAPIM

SEQ ID NO: 140515 - protein, 9 aa, Influenza A virus
RNVLSVAPI

SEQ ID NO: 140516 - protein, 10 aa, Influenza A virus
RNVLSVAPIM

SEQ ID NO: 140517 - protein, 9 aa, Influenza A virus
RPLLIDGAA

SEQ ID NO: 140518 - protein, 10 aa, Influenza A virus
RPLLIDGAAS

SEQ ID NO: 140519 - protein, 11 aa, Influenza A virus
RPLLIDGAASL

SEQ ID NO: 140520 - protein, 9 aa, Influenza A virus
RPLLIDGTA

SEQ ID NO: 140521 - protein, 10 aa, Influenza A virus
RPLLIDGTAS

SEQ ID NO: 140522 - protein, 11 aa, Influenza A virus
RPLLIDGTASL

SEQ ID NO: 140523 - protein, 9 aa, Influenza A virus
RPLLIDGTV

SEQ ID NO: 140524 - protein, 11 aa, Influenza A virus
RPLLIDGTVSL

SEQ ID NO: 140525 - protein, 9 aa, Influenza A virus
RPLLIEGAA

SEQ ID NO: 140526 - protein, 10 aa, Influenza A virus
RPLLIEGAAS

SEQ ID NO: 140527 - protein, 11 aa, Influenza A virus
RPLLIEGAASL

SEQ ID NO: 140528 - protein, 9 aa, Influenza A virus
RPLLIEGTA

SEQ ID NO: 140529 - protein, 10 aa, Influenza A virus
RPLLIEGTAS

SEQ ID NO: 140530 - protein, 11 aa, Influenza A virus
RPLLIEGTASL

SEQ ID NO: 140531 - protein, 9 aa, Influenza A virus
RPLLRDGTA

SEQ ID NO: 140532 - protein, 10 aa, Influenza A virus
RPLLRDGTAS

SEQ ID NO: 140533 - protein, 11 aa, Influenza A virus
RPLLRDGTASL

SEQ ID NO: 140534 - protein, 9 aa, Influenza A virus
RPLLVDGTA

SEQ ID NO: 140535 - protein, 10 aa, Influenza A virus
RPLLVDGTAS

SEQ ID NO: 140536 - protein, 11 aa, Influenza A virus
RPLLVDGTASL

SEQ ID NO: 140537 - protein, 9 aa, Influenza A virus
RPLLVEGTA

SEQ ID NO: 140538 - protein, 10 aa, Influenza A virus
RPLLVEGTAS

SEQ ID NO: 140539 - protein, 11 aa, Influenza A virus
RPLLVEGTASL

SEQ ID NO: 140540 - protein, 8 aa, Influenza A virus
RPVGISSM

SEQ ID NO: 140541 - protein, 9 aa, Influenza A virus
RPVGISSMM

SEQ ID NO: 140542 - protein, 10 aa, Influenza A virus
RPVGISSMME

SEQ ID NO: 140543 - protein, 11 aa, Influenza A virus
RPVGISSMMEA

SEQ ID NO: 140544 - protein, 9 aa, Influenza A virus
RPVGISSMV

SEQ ID NO: 140545 - protein, 11 aa, Influenza A virus
RPVGISSMVEA

SEQ ID NO: 140546 - protein, 8 aa, Influenza A virus
RQTFDWTL

SEQ ID NO: 140547 - protein, 10 aa, Influenza A virus
RQTFDWTLNR

SEQ ID NO: 140548 - protein, 11 aa, Influenza A virus
RQTFDWTLNRN

SEQ ID NO: 140549 - protein, 8 aa, Influenza A virus
RQTYDWTL

SEQ ID NO: 140550 - protein, 9 aa, Influenza A virus
RQTYDWTLK

SEQ ID NO: 140551 - protein, 10 aa, Influenza A virus
RQTYDWTLKR

SEQ ID NO: 140552 - protein, 11 aa, Influenza A virus
RQTYDWTLKRN

SEQ ID NO: 140553 - protein, 10 aa, Influenza A virus
RQTYDWTLNR

SEQ ID NO: 140554 - protein, 11 aa, Influenza A virus
RQTYDWTLNRN

SEQ ID NO: 140555 - protein, 9 aa, Influenza A virus
RRAIATPGM

SEQ ID NO: 140556 - protein, 11 aa, Influenza A virus
RRAIATPGMQI

SEQ ID NO: 140557 - protein, 9 aa, Influenza A virus
RRGYLIRAL

SEQ ID NO: 140558 - protein, 10 aa, Influenza A virus
RRGYLIRALT

SEQ ID NO: 140559 - protein, 11 aa, Influenza A virus
RRGYLIRALTL

SEQ ID NO: 140560 - protein, 9 aa, Influenza A virus
RRIRDNMTK

SEQ ID NO: 140561 - protein, 10 aa, Influenza A virus
RRIRDNMTKK

SEQ ID NO: 140562 - protein, 11 aa, Influenza A virus
RRIRDNMTKKM

SEQ ID NO: 140563 - protein, 10 aa, Influenza A virus
RRKIEKIRPL

SEQ ID NO: 140564 - protein, 11 aa, Influenza A virus
RRKIEKIRPLL

SEQ ID NO: 140565 - protein, 9 aa, Influenza A virus
RRPVGISSM

SEQ ID NO: 140566 - protein, 10 aa, Influenza A virus
RRPVGISSMM

SEQ ID NO: 140567 - protein, 10 aa, Influenza A virus
RRPVGISSMV

SEQ ID NO: 140568 - protein, 9 aa, Influenza A virus
RRRAIATPG

SEQ ID NO: 140569 - protein, 10 aa, Influenza A virus
RRRAIATPGM

SEQ ID NO: 140570 - protein, 9 aa, Influenza A virus
RRSFEIKKL

SEQ ID NO: 140571 - protein, 10 aa, Influenza A virus
RRSFEIKKLW

SEQ ID NO: 140572 - protein, 11 aa, Influenza A virus
RRSFEIKKLWD

SEQ ID NO: 140573 - protein, 11 aa, Influenza A virus
RRSFEIKKLWE

SEQ ID NO: 140574 - protein, 9 aa, Influenza A virus
RRSFEINKL

SEQ ID NO: 140575 - protein, 10 aa, Influenza A virus
RRSFEINKLW

SEQ ID NO: 140576 - protein, 11 aa, Influenza A virus
RRSFEINKLWE

SEQ ID NO: 140577 - protein, 9 aa, Influenza A virus
RRSFELEKL

SEQ ID NO: 140578 - protein, 10 aa, Influenza A virus
RRSFELEKLW

SEQ ID NO: 140579 - protein, 11 aa, Influenza A virus
RRSFELEKLWE

SEQ ID NO: 140580 - protein, 9 aa, Influenza A virus
RRSFELKKL

SEQ ID NO: 140581 - protein, 10 aa, Influenza A virus
RRSFELKKLW

SEQ ID NO: 140582 - protein, 11 aa, Influenza A virus
RRSFELKKLWD

SEQ ID NO: 140583 - protein, 11 aa, Influenza A virus
RRSFELKKLWE

SEQ ID NO: 140584 - protein, 9 aa, Influenza A virus
RRSFELKRL

SEQ ID NO: 140585 - protein, 10 aa, Influenza A virus
RRSFELKRLW

SEQ ID NO: 140586 - protein, 11 aa, Influenza A virus
RRSFELKRLWE

SEQ ID NO: 140587 - protein, 9 aa, Influenza A virus
RRSYLIRAL

SEQ ID NO: 140588 - protein, 10 aa, Influenza A virus
RRSYLIRALT

SEQ ID NO: 140589 - protein, 11 aa, Influenza A virus
RRSYLIRALTL

SEQ ID NO: 140590 - protein, 9 aa, Influenza A virus
RRVRDNITK

SEQ ID NO: 140591 - protein, 10 aa, Influenza A virus
RRVRDNITKK

SEQ ID NO: 140592 - protein, 11 aa, Influenza A virus
RRVRDNITKKM

SEQ ID NO: 140593 - protein, 9 aa, Influenza A virus
RRVRDNMTK

SEQ ID NO: 140594 - protein, 10 aa, Influenza A virus
RRVRDNMTKK

SEQ ID NO: 140595 - protein, 11 aa, Influenza A virus
RRVRDNMTKKM

SEQ ID NO: 140596 - protein, 10 aa, Influenza A virus
RRVRDNMTKR

SEQ ID NO: 140597 - protein, 11 aa, Influenza A virus
RRVRDNMTKRM

SEQ ID NO: 140598 - protein, 9 aa, Influenza A virus
RRVRDNVTK

SEQ ID NO: 140599 - protein, 10 aa, Influenza A virus
RRVRDNVTKK

SEQ ID NO: 140600 - protein, 11 aa, Influenza A virus
RRVRDNVTKKM

SEQ ID NO: 140601 - protein, 9 aa, Influenza A virus
RSFEIKKLW

SEQ ID NO: 140602 - protein, 10 aa, Influenza A virus
RSFEIKKLWD

SEQ ID NO: 140603 - protein, 10 aa, Influenza A virus
RSFEIKKLWE

SEQ ID NO: 140604 - protein, 8 aa, Influenza A virus
RSFEINKL

SEQ ID NO: 140605 - protein, 9 aa, Influenza A virus
RSFEINKLW

SEQ ID NO: 140606 - protein, 10 aa, Influenza A virus
RSFEINKLWE

SEQ ID NO: 140607 - protein, 11 aa, Influenza A virus
RSFEINKLWEQ

SEQ ID NO: 140608 - protein, 9 aa, Influenza A virus
RSFELEKLW

SEQ ID NO: 140609 - protein, 10 aa, Influenza A virus
RSFELEKLWE

SEQ ID NO: 140610 - protein, 9 aa, Influenza A virus
RSFELKKLW

SEQ ID NO: 140611 - protein, 10 aa, Influenza A virus
RSFELKKLWD

SEQ ID NO: 140612 - protein, 10 aa, Influenza A virus
RSFELKKLWE

SEQ ID NO: 140613 - protein, 9 aa, Influenza A virus
RSFELKRLW

SEQ ID NO: 140614 - protein, 10 aa, Influenza A virus
RSFELKRLWE

SEQ ID NO: 140615 - protein, 10 aa, Influenza A virus
RSHPGIFENS

SEQ ID NO: 140616 - protein, 9 aa, Influenza A virus
RSILNTNQR

SEQ ID NO: 140617 - protein, 11 aa, Influenza A virus
RSILNTNQRGI

SEQ ID NO: 140618 - protein, 9 aa, Influenza A virus
RSILNTSQR

SEQ ID NO: 140619 - protein, 11 aa, Influenza A virus
RSILNTSQRGI

SEQ ID NO: 140620 - protein, 8 aa, Influenza A virus
RSKAGLFV

SEQ ID NO: 140621 - protein, 9 aa, Influenza A virus
RSKAGLFVS

SEQ ID NO: 140622 - protein, 8 aa, Influenza A virus
RSKAGLLI

SEQ ID NO: 140623 - protein, 9 aa, Influenza A virus
RSKAGLLIS

SEQ ID NO: 140624 - protein, 8 aa, Influenza A virus
RSKAGLLV

SEQ ID NO: 140625 - protein, 9 aa, Influenza A virus
RSKAGLLVS

SEQ ID NO: 140626 - protein, 8 aa, Influenza A virus
RSKTGLLV

SEQ ID NO: 140627 - protein, 9 aa, Influenza A virus
RSKTGLLVS

SEQ ID NO: 140628 - protein, 9 aa, Influenza A virus
RSMEYDAVA

SEQ ID NO: 140629 - protein, 8 aa, Influenza A virus
RSYIIRAL

SEQ ID NO: 140630 - protein, 9 aa, Influenza A virus
RSYIIRALT

SEQ ID NO: 140631 - protein, 10 aa, Influenza A virus
RSYIIRALTL

SEQ ID NO: 140632 - protein, 8 aa, Influenza A virus
RSYLIRAL

SEQ ID NO: 140633 - protein, 9 aa, Influenza A virus
RSYLIRALT

SEQ ID NO: 140634 - protein, 10 aa, Influenza A virus
RSYLIRALTL

SEQ ID NO: 140635 - protein, 10 aa, Influenza A virus
RTCKLLGINM

SEQ ID NO: 140636 - protein, 10 aa, Influenza A virus
RTCKLVGINM

SEQ ID NO: 140637 - protein, 10 aa, Influenza A virus
RTGTCEFTSF

SEQ ID NO: 140638 - protein, 11 aa, Influenza A virus
RTGTCEFTSFF

SEQ ID NO: 140639 - protein, 10 aa, Influenza A virus
RTGTFEFTSF

SEQ ID NO: 140640 - protein, 11 aa, Influenza A virus
RTGTFEFTSFF

SEQ ID NO: 140641 - protein, 8 aa, Influenza A virus
RTHQYSEK

SEQ ID NO: 140642 - protein, 10 aa, Influenza A virus
RTHQYSEKGK

SEQ ID NO: 140643 - protein, 11 aa, Influenza A virus
RTHQYSEKGKW

SEQ ID NO: 140644 - protein, 10 aa, Influenza A virus
RTHQYSEKGR

SEQ ID NO: 140645 - protein, 11 aa, Influenza A virus
RTHQYSEKGRW

SEQ ID NO: 140646 - protein, 10 aa, Influenza A virus
RTHQYSEQGK

SEQ ID NO: 140647 - protein, 11 aa, Influenza A virus
RTHQYSEQGKW

SEQ ID NO: 140648 - protein, 8 aa, Influenza A virus
RTHQYSER

SEQ ID NO: 140649 - protein, 10 aa, Influenza A virus
RTHQYSERGK

SEQ ID NO: 140650 - protein, 11 aa, Influenza A virus
RTHQYSERGKW

SEQ ID NO: 140651 - protein, 10 aa, Influenza A virus
RTHQYSERGR

SEQ ID NO: 140652 - protein, 11 aa, Influenza A virus
RTHQYSERGRW

SEQ ID NO: 140653 - protein, 9 aa, Influenza A virus
RTIGKKKHK

SEQ ID NO: 140654 - protein, 9 aa, Influenza A virus
RTIGKKKHR

SEQ ID NO: 140655 - protein, 9 aa, Influenza A virus
RTIGKKKQK

SEQ ID NO: 140656 - protein, 9 aa, Influenza A virus
RTIGKKKQR

SEQ ID NO: 140657 - protein, 9 aa, Influenza A virus
RTIGKRKQK

SEQ ID NO: 140658 - protein, 9 aa, Influenza A virus
RTIGKRKQR

SEQ ID NO: 140659 - protein, 9 aa, Influenza A virus
RTIGRKKQK

SEQ ID NO: 140660 - protein, 9 aa, Influenza A virus
RTILNTSQR

SEQ ID NO: 140661 - protein, 10 aa, Influenza A virus
RTILNTSQRG

SEQ ID NO: 140662 - protein, 11 aa, Influenza A virus
RTILNTSQRGI

SEQ ID NO: 140663 - protein, 10 aa, Influenza A virus
RTKKEEFAEI

SEQ ID NO: 140664 - protein, 9 aa, Influenza A virus
RTMGKKKQR

SEQ ID NO: 140665 - protein, 9 aa, Influenza A virus
RTQIPAEMI

SEQ ID NO: 140666 - protein, 10 aa, Influenza A virus
RTQIPAEMIA

SEQ ID NO: 140667 - protein, 9 aa, Influenza A virus
RTQIPAEML

SEQ ID NO: 140668 - protein, 10 aa, Influenza A virus
RTQIPAEMLA

SEQ ID NO: 140669 - protein, 10 aa, Influenza A virus
RTQIPAEMLS

SEQ ID NO: 140670 - protein, 9 aa, Influenza A virus
RTQIPAGML

SEQ ID NO: 140671 - protein, 10 aa, Influenza A virus
RTQIPAGMLA

SEQ ID NO: 140672 - protein, 8 aa, Influenza A virus
RTQIPTEM

SEQ ID NO: 140673 - protein, 9 aa, Influenza A virus
RTQIPTEML

SEQ ID NO: 140674 - protein, 10 aa, Influenza A virus
RTQIPTEMLA

SEQ ID NO: 140675 - protein, 8 aa, Influenza A virus
RTQISAEM

SEQ ID NO: 140676 - protein, 9 aa, Influenza A virus
RTQISAEML

SEQ ID NO: 140677 - protein, 10 aa, Influenza A virus
RTQISAEMLA

SEQ ID NO: 140678 - protein, 8 aa, Influenza A virus
RTQPEWFR

SEQ ID NO: 140679 - protein, 10 aa, Influenza A virus
RTQPEWFRNV

SEQ ID NO: 140680 - protein, 11 aa, Influenza A virus
RTQPEWFRNVL

SEQ ID NO: 140681 - protein, 9 aa, Influenza A virus
RTTYWWDGL

SEQ ID NO: 140682 - protein, 9 aa, Influenza A virus
RVDFESGRI

SEQ ID NO: 140683 - protein, 10 aa, Influenza A virus
RVDFESGRIK

SEQ ID NO: 140684 - protein, 11 aa, Influenza A virus
RVDFESGRIKK

SEQ ID NO: 140685 - protein, 9 aa, Influenza A virus
RVDKLTQGR

SEQ ID NO: 140686 - protein, 9 aa, Influenza A virus
RVDRLTQGR

SEQ ID NO: 140687 - protein, 10 aa, Influenza A virus
RVDRLTQGRK

SEQ ID NO: 140688 - protein, 9 aa, Influenza A virus
RVFLAMITY

SEQ ID NO: 140689 - protein, 10 aa, Influenza A virus
RVFLAMITYI

SEQ ID NO: 140690 - protein, 10 aa, Influenza A virus
RVKKEEFAEI

SEQ ID NO: 140691 - protein, 9 aa, Influenza A virus
RVNKRSYLI

SEQ ID NO: 140692 - protein, 10 aa, Influenza A virus
RVNKRSYLIR

SEQ ID NO: 140693 - protein, 11 aa, Influenza A virus
RVNKRSYLIRA

SEQ ID NO: 140694 - protein, 8 aa, Influenza A virus
RVRDNITK

SEQ ID NO: 140695 - protein, 9 aa, Influenza A virus
RVRDNITKK

SEQ ID NO: 140696 - protein, 10 aa, Influenza A virus
RVRDNITKKM

SEQ ID NO: 140697 - protein, 11 aa, Influenza A virus
RVRDNITKKMV

SEQ ID NO: 140698 - protein, 8 aa, Influenza A virus
RVRDNMTK

SEQ ID NO: 140699 - protein, 9 aa, Influenza A virus
RVRDNMTKK

SEQ ID NO: 140700 - protein, 10 aa, Influenza A virus
RVRDNMTKKM

SEQ ID NO: 140701 - protein, 11 aa, Influenza A virus
RVRDNMTKKMI

SEQ ID NO: 140702 - protein, 11 aa, Influenza A virus
RVRDNMTKKMV

SEQ ID NO: 140703 - protein, 9 aa, Influenza A virus
RVRDNMTKR

SEQ ID NO: 140704 - protein, 10 aa, Influenza A virus
RVRDNMTKRM

SEQ ID NO: 140705 - protein, 11 aa, Influenza A virus
RVRDNMTKRMV

SEQ ID NO: 140706 - protein, 8 aa, Influenza A virus
RVRDNVTK

SEQ ID NO: 140707 - protein, 9 aa, Influenza A virus
RVRDNVTKK

SEQ ID NO: 140708 - protein, 10 aa, Influenza A virus
RVRDNVTKKM

SEQ ID NO: 140709 - protein, 11 aa, Influenza A virus
RVRDNVTKKMV

SEQ ID NO: 140710 - protein, 10 aa, Influenza A virus
RWTKNTETGA

SEQ ID NO: 140711 - protein, 11 aa, Influenza A virus
RWTTNTETGAL

SEQ ID NO: 140712 - protein, 8 aa, Influenza A virus
RYFNDSTR

SEQ ID NO: 140713 - protein, 9 aa, Influenza A virus
RYFNDSTRK

SEQ ID NO: 140714 - protein, 10 aa, Influenza A virus
RYFNDSTRKK

SEQ ID NO: 140715 - protein, 11 aa, Influenza A virus
RYFNDSTRKKI

SEQ ID NO: 140716 - protein, 9 aa, Influenza A virus
RYFNDSTRR

SEQ ID NO: 140717 - protein, 10 aa, Influenza A virus
RYFNDSTRRK

SEQ ID NO: 140718 - protein, 11 aa, Influenza A virus
RYFNDSTRRKI

SEQ ID NO: 140719 - protein, 8 aa, Influenza A virus
RYGFEANF

SEQ ID NO: 140720 - protein, 10 aa, Influenza A virus
RYGFEANFSM

SEQ ID NO: 140721 - protein, 8 aa, Influenza A virus
RYGFVANF

SEQ ID NO: 140722 - protein, 10 aa, Influenza A virus
RYGFVANFSM

SEQ ID NO: 140723 - protein, 8 aa, Influenza A virus
RYPYRCHR

SEQ ID NO: 140724 - protein, 8 aa, Influenza A virus
RYTKTTYW

SEQ ID NO: 140725 - protein, 9 aa, Influenza A virus
RYTKTTYWR

SEQ ID NO: 140726 - protein, 10 aa, Influenza A virus
RYTKTTYWRD

SEQ ID NO: 140727 - protein, 9 aa, Influenza A virus
RYTKTTYWW

SEQ ID NO: 140728 - protein, 10 aa, Influenza A virus
RYTKTTYWWD

SEQ ID NO: 140729 - protein, 8 aa, Influenza A virus
RYTRTTYW

SEQ ID NO: 140730 - protein, 9 aa, Influenza A virus
RYTRTTYWW

SEQ ID NO: 140731 - protein, 10 aa, Influenza A virus
RYTRTTYWWD

SEQ ID NO: 140732 - protein, 8 aa, Influenza A virus
RYTYRCHR

SEQ ID NO: 140733 - protein, 10 aa, Influenza A virus
SADMSIGVTV

SEQ ID NO: 140734 - protein, 10 aa, Influenza A virus
SAEMLANIDL

SEQ ID NO: 140735 - protein, 11 aa, Influenza A virus
SAEMLANIDLK

SEQ ID NO: 140736 - protein, 9 aa, Influenza A virus
SCLETMEAV

SEQ ID NO: 140737 - protein, 8 aa, Influenza A virus
SDGGSNLY

SEQ ID NO: 140738 - protein, 9 aa, Influenza A virus
SEIMKICCT

SEQ ID NO: 140739 - protein, 10 aa, Influenza A virus
SEIMKICCTI

SEQ ID NO: 140740 - protein, 8 aa, Influenza A virus
SEIMKICF

SEQ ID NO: 140741 - protein, 9 aa, Influenza A virus
SEIMKICFT

SEQ ID NO: 140742 - protein, 10 aa, Influenza A virus
SEIMKICFTI

SEQ ID NO: 140743 - protein, 9 aa, Influenza A virus
SEIMKICST

SEQ ID NO: 140744 - protein, 10 aa, Influenza A virus
SEIMKICSTI

SEQ ID NO: 140745 - protein, 9 aa, Influenza A virus
SEIMKTCST

SEQ ID NO: 140746 - protein, 10 aa, Influenza A virus
SEIMKTCSTI

SEQ ID NO: 140747 - protein, 8 aa, Influenza A virus
SERGKWTI

SEQ ID NO: 140748 - protein, 9 aa, Influenza A virus
SESGRLIDF

SEQ ID NO: 140749 - protein, 10 aa, Influenza A virus
SESGRLIDFL

SEQ ID NO: 140750 - protein, 8 aa, Influenza A virus
SFEIKKLW

SEQ ID NO: 140751 - protein, 8 aa, Influenza A virus
SFEINKLW

SEQ ID NO: 140752 - protein, 8 aa, Influenza A virus
SFELEKLW

SEQ ID NO: 140753 - protein, 8 aa, Influenza A virus
SFELKRLW

SEQ ID NO: 140754 - protein, 8 aa, Influenza A virus
SFFYRYGF

SEQ ID NO: 140755 - protein, 9 aa, Influenza A virus
SFFYRYGFV

SEQ ID NO: 140756 - protein, 10 aa, Influenza A virus
SFTITGDNTK

SEQ ID NO: 140757 - protein, 11 aa, Influenza A virus
SFTITGDNTKW

SEQ ID NO: 140758 - protein, 10 aa, Influenza A virus
SFTVTGDNTK

SEQ ID NO: 140759 - protein, 11 aa, Influenza A virus
SFTVTGDNTKW

SEQ ID NO: 140760 - protein, 9 aa, Influenza A virus
SGRLIDFLK

SEQ ID NO: 140761 - protein, 11 aa, Influenza A virus
SGRLIDFLKDV

SEQ ID NO: 140762 - protein, 9 aa, Influenza A virus
SGRLIDLLR

SEQ ID NO: 140763 - protein, 11 aa, Influenza A virus
SGRLIDLLRDV

SEQ ID NO: 140764 - protein, 9 aa, Influenza A virus
SGRLIDSLK

SEQ ID NO: 140765 - protein, 11 aa, Influenza A virus
SGRLIDSLKDV

SEQ ID NO: 140766 - protein, 9 aa, Influenza A virus
SGRLMDFLK

SEQ ID NO: 140767 - protein, 11 aa, Influenza A virus
SGRLMDFLKDV

SEQ ID NO: 140768 - protein, 10 aa, Influenza A virus
SGYAQTDCVL

SEQ ID NO: 140769 - protein, 10 aa, Influenza A virus
SHGPAKTMEY

SEQ ID NO: 140770 - protein, 10 aa, Influenza A virus
SHGTGTGYTM

SEQ ID NO: 140771 - protein, 11 aa, Influenza A virus
SHKEIESINNA

SEQ ID NO: 140772 - protein, 11 aa, Influenza A virus
SHKEIESVNNA

SEQ ID NO: 140773 - protein, 11 aa, Influenza A virus
SHKEIESVNSA

SEQ ID NO: 140774 - protein, 10 aa, Influenza A virus
SIAPIMFSNK

SEQ ID NO: 140775 - protein, 11 aa, Influenza A virus
SIAPIMFSNKM

SEQ ID NO: 140776 - protein, 10 aa, Influenza A virus
SIAPLMFSNK

SEQ ID NO: 140777 - protein, 10 aa, Influenza A virus
SILNLGQKEY

SEQ ID NO: 140778 - protein, 9 aa, Influenza A virus
SILNLGQKK

SEQ ID NO: 140779 - protein, 10 aa, Influenza A virus
SILNLGQKKY

SEQ ID NO: 140780 - protein, 9 aa, Influenza A virus
SILNLGQKR

SEQ ID NO: 140781 - protein, 10 aa, Influenza A virus
SILNLGQKRY

SEQ ID NO: 140782 - protein, 9 aa, Influenza A virus
SILNLGQRK

SEQ ID NO: 140783 - protein, 10 aa, Influenza A virus
SILNLGQRKY

SEQ ID NO: 140784 - protein, 10 aa, Influenza A virus
SILNTSQRGV

SEQ ID NO: 140785 - protein, 10 aa, Influenza A virus
SINNAVVMPA

SEQ ID NO: 140786 - protein, 9 aa, Influenza A virus
SKKKSYINK

SEQ ID NO: 140787 - protein, 10 aa, Influenza A virus
SKRMKLRTQI

SEQ ID NO: 140788 - protein, 10 aa, Influenza A virus
SLAPIMFSNK

SEQ ID NO: 140789 - protein, 11 aa, Influenza A virus
SLAPIMFSNKM

SEQ ID NO: 140790 - protein, 9 aa, Influenza A virus
SLEESHPGI

SEQ ID NO: 140791 - protein, 8 aa, Influenza A virus
SLFEKFFP

SEQ ID NO: 140792 - protein, 9 aa, Influenza A virus
SLFEKFFPS

SEQ ID NO: 140793 - protein, 10 aa, Influenza A virus
SLFEKFFPSS

SEQ ID NO: 140794 - protein, 11 aa, Influenza A virus
SLFEKFFPSSS

SEQ ID NO: 140795 - protein, 9 aa, Influenza A virus
SLKDVMESM

SEQ ID NO: 140796 - protein, 11 aa, Influenza A virus
SLKDVMESMDK

SEQ ID NO: 140797 - protein, 10 aa, Influenza A virus
SLSPGMMMGM

SEQ ID NO: 140798 - protein, 9 aa, Influenza A virus
SMDKEDMEI

SEQ ID NO: 140799 - protein, 9 aa, Influenza A virus
SMDKEEIEI

SEQ ID NO: 140800 - protein, 9 aa, Influenza A virus
SMDKEEMEI

SEQ ID NO: 140801 - protein, 10 aa, Influenza A virus
SMDKEEMEII

SEQ ID NO: 140802 - protein, 10 aa, Influenza A virus
SMDKEEMEIV

SEQ ID NO: 140803 - protein, 9 aa, Influenza A virus
SMDKEEMEV

SEQ ID NO: 140804 - protein, 9 aa, Influenza A virus
SMDKEEVEI

SEQ ID NO: 140805 - protein, 9 aa, Influenza A virus
SMDKEGMEI

SEQ ID NO: 140806 - protein, 9 aa, Influenza A virus
SMDKGEMEI

SEQ ID NO: 140807 - protein, 10 aa, Influenza A virus
SMDKGEMEII

SEQ ID NO: 140808 - protein, 9 aa, Influenza A virus
SMDKKEMEI

SEQ ID NO: 140809 - protein, 9 aa, Influenza A virus
SMDRDEIEV

SEQ ID NO: 140810 - protein, 9 aa, Influenza A virus
SMDRDEVEI

SEQ ID NO: 140811 - protein, 9 aa, Influenza A virus
SMDRDEVEV

SEQ ID NO: 140812 - protein, 9 aa, Influenza A virus
SMDREEMEI

SEQ ID NO: 140813 - protein, 9 aa, Influenza A virus
SMDREEVEI

SEQ ID NO: 140814 - protein, 10 aa, Influenza A virus
SMEKEEMEIV

SEQ ID NO: 140815 - protein, 9 aa, Influenza A virus
SMELPSFGV

SEQ ID NO: 140816 - protein, 10 aa, Influenza A virus
SMEYDAFATT

SEQ ID NO: 140817 - protein, 10 aa, Influenza A virus
SMEYDAVATT

SEQ ID NO: 140818 - protein, 10 aa, Influenza A virus
SMEYEAVATT

SEQ ID NO: 140819 - protein, 8 aa, Influenza A virus
SMKIRTQI

SEQ ID NO: 140820 - protein, 10 aa, Influenza A virus
SMKIRTQIPA

SEQ ID NO: 140821 - protein, 9 aa, Influenza A virus
SMKKEEMGI

SEQ ID NO: 140822 - protein, 8 aa, Influenza A virus
SMKLRTQI

SEQ ID NO: 140823 - protein, 9 aa, Influenza A virus
SMKLRTQIP

SEQ ID NO: 140824 - protein, 10 aa, Influenza A virus
SMKLRTQIPA

SEQ ID NO: 140825 - protein, 10 aa, Influenza A virus
SMKLRTQIPT

SEQ ID NO: 140826 - protein, 9 aa, Influenza A virus
SMKLRTQIS

SEQ ID NO: 140827 - protein, 10 aa, Influenza A virus
SMKLRTQISA

SEQ ID NO: 140828 - protein, 9 aa, Influenza A virus
SMMEAMVSR

SEQ ID NO: 140829 - protein, 10 aa, Influenza A virus
SMMEAMVSRA

SEQ ID NO: 140830 - protein, 11 aa, Influenza A virus
SMMEAMVSRAR

SEQ ID NO: 140831 - protein, 9 aa, Influenza A virus
SMNKEEMEI

SEQ ID NO: 140832 - protein, 9 aa, Influenza A virus
SMNKEEMGI

SEQ ID NO: 140833 - protein, 9 aa, Influenza A virus
SMNKGEMEI

SEQ ID NO: 140834 - protein, 10 aa, Influenza A virus
SMNNAVMMPA

SEQ ID NO: 140835 - protein, 9 aa, Influenza A virus
SMVEAMISR

SEQ ID NO: 140836 - protein, 10 aa, Influenza A virus
SMVEAMISRA

SEQ ID NO: 140837 - protein, 11 aa, Influenza A virus
SMVEAMISRAR

SEQ ID NO: 140838 - protein, 9 aa, Influenza A virus
SMVEAMVSR

SEQ ID NO: 140839 - protein, 10 aa, Influenza A virus
SMVEAMVSRA

SEQ ID NO: 140840 - protein, 11 aa, Influenza A virus
SMVEAMVSRAR

SEQ ID NO: 140841 - protein, 10 aa, Influenza A virus
SNESGRLMDF

SEQ ID NO: 140842 - protein, 9 aa, Influenza A virus
SNKMARLGK

SEQ ID NO: 140843 - protein, 8 aa, Influenza A virus
SPGMMMGM

SEQ ID NO: 140844 - protein, 9 aa, Influenza A virus
SPGMMMGMF

SEQ ID NO: 140845 - protein, 11 aa, Influenza A virus
SPGMMMGMFNM

SEQ ID NO: 140846 - protein, 8 aa, Influenza A virus
SQDTEISF

SEQ ID NO: 140847 - protein, 10 aa, Influenza A virus
SQDTEISFTI

SEQ ID NO: 140848 - protein, 8 aa, Influenza A virus
SQDTELSF

SEQ ID NO: 140849 - protein, 10 aa, Influenza A virus
SQDTELSFTI

SEQ ID NO: 140850 - protein, 10 aa, Influenza A virus
SQDTELSFTV

SEQ ID NO: 140851 - protein, 9 aa, Influenza A virus
SQIQTRRSF

SEQ ID NO: 140852 - protein, 10 aa, Influenza A virus
SQIQTRRSFE

SEQ ID NO: 140853 - protein, 11 aa, Influenza A virus
SQIQTRRSFEL

SEQ ID NO: 140854 - protein, 11 aa, Influenza A virus
SQRGILEDQQM

SEQ ID NO: 140855 - protein, 11 aa, Influenza A virus
SQRGVLGDEQM

SEQ ID NO: 140856 - protein, 9 aa, Influenza A virus
SRAQIDARI

SEQ ID NO: 140857 - protein, 11 aa, Influenza A virus
SRAQIDARIDF

SEQ ID NO: 140858 - protein, 9 aa, Influenza A virus
SRARIDARI

SEQ ID NO: 140859 - protein, 11 aa, Influenza A virus
SRARIDARIDF

SEQ ID NO: 140860 - protein, 9 aa, Influenza A virus
SRARIDARV

SEQ ID NO: 140861 - protein, 11 aa, Influenza A virus
SRARIDARVDF

SEQ ID NO: 140862 - protein, 9 aa, Influenza A virus
SRARIDTRI

SEQ ID NO: 140863 - protein, 11 aa, Influenza A virus
SRARIDTRIDF

SEQ ID NO: 140864 - protein, 8 aa, Influenza A virus
SSDDFALI

SEQ ID NO: 140865 - protein, 9 aa, Influenza A virus
SSDDFALIL

SEQ ID NO: 140866 - protein, 9 aa, Influenza A virus
SSDDFALIV

SEQ ID NO: 140867 - protein, 8 aa, Influenza A virus
SSIDLRYF

SEQ ID NO: 140868 - protein, 10 aa, Influenza A virus
SSMMEAMVSR

SEQ ID NO: 140869 - protein, 11 aa, Influenza A virus
SSMMEAMVSRA

SEQ ID NO: 140870 - protein, 10 aa, Influenza A virus
SSMVEAMISR

SEQ ID NO: 140871 - protein, 10 aa, Influenza A virus
SSMVEAMVSR

SEQ ID NO: 140872 - protein, 11 aa, Influenza A virus
SSMVEAMVSRA

SEQ ID NO: 140873 - protein, 9 aa, Influenza A virus
SSSYRRPVG

SEQ ID NO: 140874 - protein, 8 aa, Influenza A virus
SSYLIRAL

SEQ ID NO: 140875 - protein, 9 aa, Influenza A virus
SSYLIRALT

SEQ ID NO: 140876 - protein, 10 aa, Influenza A virus
SSYLIRALTL

SEQ ID NO: 140877 - protein, 9 aa, Influenza A virus
SSYRRPVGI

SEQ ID NO: 140878 - protein, 10 aa, Influenza A virus
SSYRRPVGIS

SEQ ID NO: 140879 - protein, 10 aa, Influenza A virus
STIEDLRRQK

SEQ ID NO: 140880 - protein, 10 aa, Influenza A virus
STIEEFRRQK

SEQ ID NO: 140881 - protein, 11 aa, Influenza A virus
STIEELGRQGK

SEQ ID NO: 140882 - protein, 10 aa, Influenza A virus
STIEELGRQK

SEQ ID NO: 140883 - protein, 10 aa, Influenza A virus
STIEELKRQK

SEQ ID NO: 140884 - protein, 10 aa, Influenza A virus
STIEELRRQK

SEQ ID NO: 140885 - protein, 10 aa, Influenza A virus
STKKKIEKIR

SEQ ID NO: 140886 - protein, 8 aa, Influenza A virus
STRKKIEK

SEQ ID NO: 140887 - protein, 9 aa, Influenza A virus
STRKKIEKI

SEQ ID NO: 140888 - protein, 10 aa, Influenza A virus
STRKKIEKIR

SEQ ID NO: 140889 - protein, 9 aa, Influenza A virus
STRKKIERI

SEQ ID NO: 140890 - protein, 10 aa, Influenza A virus
STRKKIERIR

SEQ ID NO: 140891 - protein, 8 aa, Influenza A virus
STRKRIEK

SEQ ID NO: 140892 - protein, 9 aa, Influenza A virus
STRKRIEKI

SEQ ID NO: 140893 - protein, 10 aa, Influenza A virus
STRKRIEKIR

SEQ ID NO: 140894 - protein, 8 aa, Influenza A virus
STRRKIEK

SEQ ID NO: 140895 - protein, 9 aa, Influenza A virus
STRRKIEKI

SEQ ID NO: 140896 - protein, 10 aa, Influenza A virus
STRRKIEKIR

SEQ ID NO: 140897 - protein, 9 aa, Influenza A virus
STVLGVSIL

SEQ ID NO: 140898 - protein, 10 aa, Influenza A virus
SVAPIMFSNK

SEQ ID NO: 140899 - protein, 11 aa, Influenza A virus
SVAPIMFSNKM

SEQ ID NO: 140900 - protein, 10 aa, Influenza A virus
SVEYDAVATT

SEQ ID NO: 140901 - protein, 10 aa, Influenza A virus
SVNNAVIMPA

SEQ ID NO: 140902 - protein, 10 aa, Influenza A virus
SVNNAVMMPA

SEQ ID NO: 140903 - protein, 10 aa, Influenza A virus
SVNNAVVMPA

SEQ ID NO: 140904 - protein, 8 aa, Influenza A virus
SVNNTVVM

SEQ ID NO: 140905 - protein, 10 aa, Influenza A virus
SVNNTVVMPA

SEQ ID NO: 140906 - protein, 10 aa, Influenza A virus
SVNSAVVMPA

SEQ ID NO: 140907 - protein, 11 aa, Influenza A virus
SWIPKRNRSIL

SEQ ID NO: 140908 - protein, 10 aa, Influenza A virus
SWIPKRNRTI

SEQ ID NO: 140909 - protein, 11 aa, Influenza A virus
SWIPKRNRTIL

SEQ ID NO: 140910 - protein, 11 aa, Influenza A virus
SWTPKRNRSIL

SEQ ID NO: 140911 - protein, 11 aa, Influenza A virus
SWVPKRNRSIL

SEQ ID NO: 140912 - protein, 9 aa, Influenza A virus
SYIIRALTL

SEQ ID NO: 140913 - protein, 9 aa, Influenza A virus
SYINKTGTF

SEQ ID NO: 140914 - protein, 10 aa, Influenza A virus
SYINKTGTFE

SEQ ID NO: 140915 - protein, 11 aa, Influenza A virus
SYINKTGTFEF

SEQ ID NO: 140916 - protein, 9 aa, Influenza A virus
SYINRTGTC

SEQ ID NO: 140917 - protein, 11 aa, Influenza A virus
SYINRTGTCEF

SEQ ID NO: 140918 - protein, 9 aa, Influenza A virus
SYINRTGTF

SEQ ID NO: 140919 - protein, 10 aa, Influenza A virus
SYINRTGTFE

SEQ ID NO: 140920 - protein, 11 aa, Influenza A virus
SYINRTGTFEF

SEQ ID NO: 140921 - protein, 9 aa, Influenza A virus
SYLIRALTL

SEQ ID NO: 140922 - protein, 9 aa, Influenza A virus
SYMNRTGTF

SEQ ID NO: 140923 - protein, 10 aa, Influenza A virus
SYMNRTGTFE

SEQ ID NO: 140924 - protein, 11 aa, Influenza A virus
SYMNRTGTFEF

SEQ ID NO: 140925 - protein, 9 aa, Influenza A virus
SYRRPVGIS

SEQ ID NO: 140926 - protein, 10 aa, Influenza A virus
SYRRPVGISS

SEQ ID NO: 140927 - protein, 11 aa, Influenza A virus
SYRRPVGISSM

SEQ ID NO: 140928 - protein, 9 aa, Influenza A virus
SYTNRTGTF

SEQ ID NO: 140929 - protein, 11 aa, Influenza A virus
SYTNRTGTFEF

SEQ ID NO: 140930 - protein, 9 aa, Influenza A virus
TALANTIEI

SEQ ID NO: 140931 - protein, 10 aa, Influenza A virus
TALANTIEIF

SEQ ID NO: 140932 - protein, 11 aa, Influenza A virus
TALANTIEIFR

SEQ ID NO: 140933 - protein, 9 aa, Influenza A virus
TALANTIEV

SEQ ID NO: 140934 - protein, 10 aa, Influenza A virus
TALANTIEVF

SEQ ID NO: 140935 - protein, 11 aa, Influenza A virus
TALANTIEVFR

SEQ ID NO: 140936 - protein, 9 aa, Influenza A virus
TANDSGRLI

SEQ ID NO: 140937 - protein, 9 aa, Influenza A virus
TANESGRLI

SEQ ID NO: 140938 - protein, 9 aa, Influenza A virus
TAQLALQLF

SEQ ID NO: 140939 - protein, 10 aa, Influenza A virus
TAQLALQLFI

SEQ ID NO: 140940 - protein, 9 aa, Influenza A virus
TAQMALQLF

SEQ ID NO: 140941 - protein, 10 aa, Influenza A virus
TAQMALQLFI

SEQ ID NO: 140942 - protein, 11 aa, Influenza A virus
TAQMALQLFIK

SEQ ID NO: 140943 - protein, 9 aa, Influenza A virus
TASESGRLI

SEQ ID NO: 140944 - protein, 9 aa, Influenza A virus
TASLSPGMM

SEQ ID NO: 140945 - protein, 10 aa, Influenza A virus
TASLSPGMMM

SEQ ID NO: 140946 - protein, 9 aa, Influenza A virus
TCEFTSFFY

SEQ ID NO: 140947 - protein, 10 aa, Influenza A virus
TCEFTSFFYR

SEQ ID NO: 140948 - protein, 11 aa, Influenza A virus
TCEFTSFFYRY

SEQ ID NO: 140949 - protein, 11 aa, Influenza A virus
TCKLLGINMSK

SEQ ID NO: 140950 - protein, 11 aa, Influenza A virus
TCKLVGINMSK

SEQ ID NO: 140951 - protein, 11 aa, Influenza A virus
TCKLVGINMTK

SEQ ID NO: 140952 - protein, 9 aa, Influenza A virus
TCSTIEELR

SEQ ID NO: 140953 - protein, 11 aa, Influenza A virus
TDCVLEAMAFL

SEQ ID NO: 140954 - protein, 11 aa, Influenza A virus
TDCVLEVMAFL

SEQ ID NO: 140955 - protein, 8 aa, Influenza A virus
TEIGAPQL

SEQ ID NO: 140956 - protein, 11 aa, Influenza A virus
TEIGAPQLNPI

SEQ ID NO: 140957 - protein, 9 aa, Influenza A virus
TEIMKICST

SEQ ID NO: 140958 - protein, 10 aa, Influenza A virus
TEIMKICSTI

SEQ ID NO: 140959 - protein, 9 aa, Influenza A virus
TEIMKTCST

SEQ ID NO: 140960 - protein, 10 aa, Influenza A virus
TEIMKTCSTI

SEQ ID NO: 140961 - protein, 9 aa, Influenza A virus
TEISFTITG

SEQ ID NO: 140962 - protein, 9 aa, Influenza A virus
TELSFTITG

SEQ ID NO: 140963 - protein, 9 aa, Influenza A virus
TELSFTVTG

SEQ ID NO: 140964 - protein, 9 aa, Influenza A virus
TEMLASIDL

SEQ ID NO: 140965 - protein, 10 aa, Influenza A virus
TEMLASIDLK

SEQ ID NO: 140966 - protein, 11 aa, Influenza A virus
TEMLASIDLKY

SEQ ID NO: 140967 - protein, 8 aa, Influenza A virus
TFDWTLNR

SEQ ID NO: 140968 - protein, 8 aa, Influenza A virus
TFEFTSFF

SEQ ID NO: 140969 - protein, 9 aa, Influenza A virus
TFEFTSFFY

SEQ ID NO: 140970 - protein, 10 aa, Influenza A virus
TFEFTSFFYR

SEQ ID NO: 140971 - protein, 11 aa, Influenza A virus
TFEFTSFFYRY

SEQ ID NO: 140972 - protein, 10 aa, Influenza A virus
TFPYTGDPPY

SEQ ID NO: 140973 - protein, 9 aa, Influenza A virus
TGRSFELKK

SEQ ID NO: 140974 - protein, 11 aa, Influenza A virus
TGRSFELKKLW

SEQ ID NO: 140975 - protein, 9 aa, Influenza A virus
TGTCEFTSF

SEQ ID NO: 140976 - protein, 10 aa, Influenza A virus
TGTCEFTSFF

SEQ ID NO: 140977 - protein, 9 aa, Influenza A virus
TGTFEFTSF

SEQ ID NO: 140978 - protein, 10 aa, Influenza A virus
TGTFEFTSFF

SEQ ID NO: 140979 - protein, 11 aa, Influenza A virus
TGTFEFTSFFY

SEQ ID NO: 140980 - protein, 10 aa, Influenza A virus
TGTGYTMDTV

SEQ ID NO: 140981 - protein, 10 aa, Influenza A virus
TGYAQTDCVL

SEQ ID NO: 140982 - protein, 10 aa, Influenza A virus
TGYTMDTVNR

SEQ ID NO: 140983 - protein, 10 aa, Influenza A virus
TGYTMDTVSR

SEQ ID NO: 140984 - protein, 9 aa, Influenza A virus
THSKAGLLV

SEQ ID NO: 140985 - protein, 10 aa, Influenza A virus
THSWIPKRNR

SEQ ID NO: 140986 - protein, 10 aa, Influenza A virus
THSWTPKRNR

SEQ ID NO: 140987 - protein, 10 aa, Influenza A virus
THSWVPKRNR

SEQ ID NO: 140988 - protein, 9 aa, Influenza A virus
TIEEFRRQK

SEQ ID NO: 140989 - protein, 9 aa, Influenza A virus
TIEELRRQK

SEQ ID NO: 140990 - protein, 10 aa, Influenza A virus
TIEIFRSNGL

SEQ ID NO: 140991 - protein, 10 aa, Influenza A virus
TIEVFRLNGL

SEQ ID NO: 140992 - protein, 10 aa, Influenza A virus
TIEVFRSNGL

SEQ ID NO: 140993 - protein, 11 aa, Influenza A virus
TIEVFRSNGLK

SEQ ID NO: 140994 - protein, 9 aa, Influenza A virus
TIEVVQQTR

SEQ ID NO: 140995 - protein, 9 aa, Influenza A virus
TIGKKKHKL

SEQ ID NO: 140996 - protein, 9 aa, Influenza A virus
TIGKKKHRL

SEQ ID NO: 140997 - protein, 9 aa, Influenza A virus
TIGKRKQKL

SEQ ID NO: 140998 - protein, 9 aa, Influenza A virus
TIGKRKQRL

SEQ ID NO: 140999 - protein, 10 aa, Influenza A virus
TKKMITQRTM

SEQ ID NO: 141000 - protein, 10 aa, Influenza A virus
TKRMVTQRTI

SEQ ID NO: 141001 - protein, 10 aa, Influenza A virus
TKTAYWWDGL

SEQ ID NO: 141002 - protein, 9 aa, Influenza A virus
TLARGICEK

SEQ ID NO: 141003 - protein, 10 aa, Influenza A virus
TLARGICEKL

SEQ ID NO: 141004 - protein, 9 aa, Influenza A virus
TLARNICEK

SEQ ID NO: 141005 - protein, 10 aa, Influenza A virus
TLARNICEKL

SEQ ID NO: 141006 - protein, 9 aa, Influenza A virus
TLARRICEK

SEQ ID NO: 141007 - protein, 10 aa, Influenza A virus
TLARRICEKL

SEQ ID NO: 141008 - protein, 9 aa, Influenza A virus
TLARSICEK

SEQ ID NO: 141009 - protein, 10 aa, Influenza A virus
TLARSICEKL

SEQ ID NO: 141010 - protein, 10 aa, Influenza A virus
TLARSICENL

SEQ ID NO: 141011 - protein, 9 aa, Influenza A virus
TLFEKFFPS

SEQ ID NO: 141012 - protein, 10 aa, Influenza A virus
TLFEKFFPSS

SEQ ID NO: 141013 - protein, 11 aa, Influenza A virus
TLFEKFFPSSS

SEQ ID NO: 141014 - protein, 9 aa, Influenza A virus
TLIFLKVPA

SEQ ID NO: 141015 - protein, 9 aa, Influenza A virus
TLKRNQPAA

SEQ ID NO: 141016 - protein, 9 aa, Influenza A virus
TLLFLKEPA

SEQ ID NO: 141017 - protein, 9 aa, Influenza A virus
TLLFLKIPA

SEQ ID NO: 141018 - protein, 9 aa, Influenza A virus
TLLFLKVPA

SEQ ID NO: 141019 - protein, 9 aa, Influenza A virus
TLLFLKVPV

SEQ ID NO: 141020 - protein, 10 aa, Influenza A virus
TLLFLKVPVQ

SEQ ID NO: 141021 - protein, 9 aa, Influenza A virus
TLNRNQPAA

SEQ ID NO: 141022 - protein, 11 aa, Influenza A virus
TLNTMTKDAER

SEQ ID NO: 141023 - protein, 11 aa, Influenza A virus
TMDTVNRTHQY

SEQ ID NO: 141024 - protein, 11 aa, Influenza A virus
TMDTVSRTHQY

SEQ ID NO: 141025 - protein, 9 aa, Influenza A virus
TMEAVQQTR

SEQ ID NO: 141026 - protein, 10 aa, Influenza A virus
TMEAVQQTRV

SEQ ID NO: 141027 - protein, 9 aa, Influenza A virus
TMEIVQQTR

SEQ ID NO: 141028 - protein, 10 aa, Influenza A virus
TMEIVQQTRV

SEQ ID NO: 141029 - protein, 9 aa, Influenza A virus
TMEVIQQTR

SEQ ID NO: 141030 - protein, 9 aa, Influenza A virus
TMEVVQQTR

SEQ ID NO: 141031 - protein, 10 aa, Influenza A virus
TMEYDAVATT

SEQ ID NO: 141032 - protein, 9 aa, Influenza A virus
TMGKKKQRL

SEQ ID NO: 141033 - protein, 9 aa, Influenza A virus
TNRTGTFEF

SEQ ID NO: 141034 - protein, 10 aa, Influenza A virus
TPEVCLKWEL

SEQ ID NO: 141035 - protein, 9 aa, Influenza A virus
TPGMQIRGF

SEQ ID NO: 141036 - protein, 10 aa, Influenza A virus
TPGMQIRGFV

SEQ ID NO: 141037 - protein, 8 aa, Influenza A virus
TPKRNRSI

SEQ ID NO: 141038 - protein, 9 aa, Influenza A virus
TPKRNRSIL

SEQ ID NO: 141039 - protein, 11 aa, Influenza A virus
TQGRQTFDWTL

SEQ ID NO: 141040 - protein, 11 aa, Influenza A virus
TQGRQTYDWTL

SEQ ID NO: 141041 - protein, 9 aa, Influenza A virus
TQIPAEMIA

SEQ ID NO: 141042 - protein, 11 aa, Influenza A virus
TQIPAEMIANI

SEQ ID NO: 141043 - protein, 9 aa, Influenza A virus
TQIPAEMLA

SEQ ID NO: 141044 - protein, 11 aa, Influenza A virus
TQIPAEMLANI

SEQ ID NO: 141045 - protein, 11 aa, Influenza A virus
TQIPAEMLASI

SEQ ID NO: 141046 - protein, 10 aa, Influenza A virus
TQIPAEMLAT

SEQ ID NO: 141047 - protein, 11 aa, Influenza A virus
TQIPAEMLATI

SEQ ID NO: 141048 - protein, 11 aa, Influenza A virus
TQIPAEMLSGI

SEQ ID NO: 141049 - protein, 11 aa, Influenza A virus
TQIPAEMLSSI

SEQ ID NO: 141050 - protein, 11 aa, Influenza A virus
TQIPAEMLTSI

SEQ ID NO: 141051 - protein, 9 aa, Influenza A virus
TQIPAGMLA

SEQ ID NO: 141052 - protein, 11 aa, Influenza A virus
TQIPAGMLASI

SEQ ID NO: 141053 - protein, 9 aa, Influenza A virus
TQIPTEMLA

SEQ ID NO: 141054 - protein, 11 aa, Influenza A virus
TQIPTEMLASI

SEQ ID NO: 141055 - protein, 9 aa, Influenza A virus
TQIQTGRSF

SEQ ID NO: 141056 - protein, 10 aa, Influenza A virus
TQIQTGRSFE

SEQ ID NO: 141057 - protein, 11 aa, Influenza A virus
TQIQTGRSFEL

SEQ ID NO: 141058 - protein, 9 aa, Influenza A virus
TQIQTRRSF

SEQ ID NO: 141059 - protein, 10 aa, Influenza A virus
TQIQTRRSFE

SEQ ID NO: 141060 - protein, 9 aa, Influenza A virus
TQISAEMLA

SEQ ID NO: 141061 - protein, 11 aa, Influenza A virus
TQISAEMLANI

SEQ ID NO: 141062 - protein, 9 aa, Influenza A virus
TQPEWFRNV

SEQ ID NO: 141063 - protein, 10 aa, Influenza A virus
TQPEWFRNVL

SEQ ID NO: 141064 - protein, 9 aa, Influenza A virus
TQRTIGKKK

SEQ ID NO: 141065 - protein, 9 aa, Influenza A virus
TQRTIGKRK

SEQ ID NO: 141066 - protein, 9 aa, Influenza A virus
TQRTIGRKK

SEQ ID NO: 141067 - protein, 9 aa, Influenza A virus
TQRTMGKKK

SEQ ID NO: 141068 - protein, 9 aa, Influenza A virus
TQSKAGLLV

SEQ ID NO: 141069 - protein, 10 aa, Influenza A virus
TRIDFESGRI

SEQ ID NO: 141070 - protein, 10 aa, Influenza A virus
TRMDKLTQGR

SEQ ID NO: 141071 - protein, 9 aa, Influenza A virus
TRNQPKWFR

SEQ ID NO: 141072 - protein, 9 aa, Influenza A virus
TRRSFEIKK

SEQ ID NO: 141073 - protein, 10 aa, Influenza A virus
TRRSFEIKKL

SEQ ID NO: 141074 - protein, 11 aa, Influenza A virus
TRRSFEIKKLW

SEQ ID NO: 141075 - protein, 10 aa, Influenza A virus
TRRSFEINKL

SEQ ID NO: 141076 - protein, 11 aa, Influenza A virus
TRRSFEINKLW

SEQ ID NO: 141077 - protein, 9 aa, Influenza A virus
TRRSFELEK

SEQ ID NO: 141078 - protein, 10 aa, Influenza A virus
TRRSFELEKL

SEQ ID NO: 141079 - protein, 11 aa, Influenza A virus
TRRSFELEKLW

SEQ ID NO: 141080 - protein, 9 aa, Influenza A virus
TRRSFELKK

SEQ ID NO: 141081 - protein, 10 aa, Influenza A virus
TRRSFELKKL

SEQ ID NO: 141082 - protein, 11 aa, Influenza A virus
TRRSFELKKLW

SEQ ID NO: 141083 - protein, 9 aa, Influenza A virus
TRRSFELKR

SEQ ID NO: 141084 - protein, 10 aa, Influenza A virus
TRRSFELKRL

SEQ ID NO: 141085 - protein, 11 aa, Influenza A virus
TRRSFELKRLW

SEQ ID NO: 141086 - protein, 9 aa, Influenza A virus
TRSKAGLFV

SEQ ID NO: 141087 - protein, 9 aa, Influenza A virus
TRSKAGLLI

SEQ ID NO: 141088 - protein, 9 aa, Influenza A virus
TRSKAGLLV

SEQ ID NO: 141089 - protein, 9 aa, Influenza A virus
TRSKTGLLV

SEQ ID NO: 141090 - protein, 10 aa, Influenza A virus
TRTTYWWDGL

SEQ ID NO: 141091 - protein, 9 aa, Influenza A virus
TSFFYRYGF

SEQ ID NO: 141092 - protein, 10 aa, Influenza A virus
TSFFYRYGFV

SEQ ID NO: 141093 - protein, 9 aa, Influenza A virus
TSNESGRLM

SEQ ID NO: 141094 - protein, 11 aa, Influenza A virus
TTFPYTGDPPY

SEQ ID NO: 141095 - protein, 9 aa, Influenza A virus
TTHFHRKRR

SEQ ID NO: 141096 - protein, 9 aa, Influenza A virus
TTHFQRKRR

SEQ ID NO: 141097 - protein, 8 aa, Influenza A virus
TTHSWIPK

SEQ ID NO: 141098 - protein, 9 aa, Influenza A virus
TTHSWIPKR

SEQ ID NO: 141099 - protein, 11 aa, Influenza A virus
TTHSWIPKRNR

SEQ ID NO: 141100 - protein, 8 aa, Influenza A virus
TTHSWTPK

SEQ ID NO: 141101 - protein, 9 aa, Influenza A virus
TTHSWTPKR

SEQ ID NO: 141102 - protein, 11 aa, Influenza A virus
TTHSWTPKRNR

SEQ ID NO: 141103 - protein, 8 aa, Influenza A virus
TTHSWVPK

SEQ ID NO: 141104 - protein, 9 aa, Influenza A virus
TTHSWVPKR

SEQ ID NO: 141105 - protein, 11 aa, Influenza A virus
TTHSWVPKRNR

SEQ ID NO: 141106 - protein, 9 aa, Influenza A virus
TTSESGRLI

SEQ ID NO: 141107 - protein, 11 aa, Influenza A virus
TTSESGRLIDF

SEQ ID NO: 141108 - protein, 10 aa, Influenza A virus
TVLGVSILNL

SEQ ID NO: 141109 - protein, 11 aa, Influenza A virus
TVNRTHQYSEK

SEQ ID NO: 141110 - protein, 11 aa, Influenza A virus
TVNRTHQYSER

SEQ ID NO: 141111 - protein, 10 aa, Influenza A virus
TVSLSPGMMM

SEQ ID NO: 141112 - protein, 11 aa, Influenza A virus
TVSRTHQYSEK

SEQ ID NO: 141113 - protein, 9 aa, Influenza A virus
TVTGDNTKW

SEQ ID NO: 141114 - protein, 10 aa, Influenza A virus
TVVMPAHGPA

SEQ ID NO: 141115 - protein, 11 aa, Influenza A virus
TVVMPAHGPAK

SEQ ID NO: 141116 - protein, 8 aa, Influenza A virus
TYDWTLNR

SEQ ID NO: 141117 - protein, 10 aa, Influenza A virus
TYITKNQPEW

SEQ ID NO: 141118 - protein, 11 aa, Influenza A virus
TYITKNQPEWF

SEQ ID NO: 141119 - protein, 10 aa, Influenza A virus
TYITRKQPEW

SEQ ID NO: 141120 - protein, 11 aa, Influenza A virus
TYITRKQPEWF

SEQ ID NO: 141121 - protein, 10 aa, Influenza A virus
TYITRNQPDW

SEQ ID NO: 141122 - protein, 11 aa, Influenza A virus
TYITRNQPDWF

SEQ ID NO: 141123 - protein, 10 aa, Influenza A virus
TYITRNQPEW

SEQ ID NO: 141124 - protein, 11 aa, Influenza A virus
TYITRNQPEWF

SEQ ID NO: 141125 - protein, 9 aa, Influenza A virus
TYITRNQPK

SEQ ID NO: 141126 - protein, 10 aa, Influenza A virus
TYITRNQPKW

SEQ ID NO: 141127 - protein, 11 aa, Influenza A virus
TYITRNQPKWF

SEQ ID NO: 141128 - protein, 10 aa, Influenza A virus
TYITRTQPEW

SEQ ID NO: 141129 - protein, 11 aa, Influenza A virus
TYITRTQPEWF

SEQ ID NO: 141130 - protein, 10 aa, Influenza A virus
TYMTRNQPEW

SEQ ID NO: 141131 - protein, 11 aa, Influenza A virus
TYMTRNQPEWF

SEQ ID NO: 141132 - protein, 8 aa, Influenza A virus
VANFSMEL

SEQ ID NO: 141133 - protein, 11 aa, Influenza A virus
VANFSMELPSF

SEQ ID NO: 141134 - protein, 9 aa, Influenza A virus
VAPIMFSNK

SEQ ID NO: 141135 - protein, 10 aa, Influenza A virus
VAPIMFSNKM

SEQ ID NO: 141136 - protein, 10 aa, Influenza A virus
VATTHSWIPK

SEQ ID NO: 141137 - protein, 11 aa, Influenza A virus
VATTHSWIPKR

SEQ ID NO: 141138 - protein, 10 aa, Influenza A virus
VATTHSWTPK

SEQ ID NO: 141139 - protein, 11 aa, Influenza A virus
VATTHSWTPKR

SEQ ID NO: 141140 - protein, 10 aa, Influenza A virus
VATTHSWVPK

SEQ ID NO: 141141 - protein, 11 aa, Influenza A virus
VATTHSWVPKR

SEQ ID NO: 141142 - protein, 10 aa, Influenza A virus
VCLKWELMDK

SEQ ID NO: 141143 - protein, 10 aa, Influenza A virus
VDRFYRTCKL

SEQ ID NO: 141144 - protein, 8 aa, Influenza A virus
VEALARSI

SEQ ID NO: 141145 - protein, 9 aa, Influenza A virus
VEALARSIC

SEQ ID NO: 141146 - protein, 11 aa, Influenza A virus
VEALARSICEK

SEQ ID NO: 141147 - protein, 8 aa, Influenza A virus
VEAMISRA

SEQ ID NO: 141148 - protein, 10 aa, Influenza A virus
VEAMISRARI

SEQ ID NO: 141149 - protein, 8 aa, Influenza A virus
VEAMVSRA

SEQ ID NO: 141150 - protein, 10 aa, Influenza A virus
VEAMVSRAQI

SEQ ID NO: 141151 - protein, 10 aa, Influenza A virus
VEAMVSRARI

SEQ ID NO: 141152 - protein, 9 aa, Influenza A virus
VEGTASLSP

SEQ ID NO: 141153 - protein, 8 aa, Influenza A virus
VESVNNAV

SEQ ID NO: 141154 - protein, 9 aa, Influenza A virus
VESVNNAVV

SEQ ID NO: 141155 - protein, 10 aa, Influenza A virus
VESVNNAVVM

SEQ ID NO: 141156 - protein, 8 aa, Influenza A virus
VETLARGI

SEQ ID NO: 141157 - protein, 11 aa, Influenza A virus
VETLARGICEK

SEQ ID NO: 141158 - protein, 8 aa, Influenza A virus
VETLARNI

SEQ ID NO: 141159 - protein, 8 aa, Influenza A virus
VETLARSI

SEQ ID NO: 141160 - protein, 11 aa, Influenza A virus
VETLARSICEK

SEQ ID NO: 141161 - protein, 9 aa, Influenza A virus
VEYDAVATT

SEQ ID NO: 141162 - protein, 9 aa, Influenza A virus
VFLAMITYI

SEQ ID NO: 141163 - protein, 10 aa, Influenza A virus
VFLAMITYIT

SEQ ID NO: 141164 - protein, 11 aa, Influenza A virus
VFLAMITYITR

SEQ ID NO: 141165 - protein, 9 aa, Influenza A virus
VFRLNGLTA

SEQ ID NO: 141166 - protein, 9 aa, Influenza A virus
VFRLNGLTT

SEQ ID NO: 141167 - protein, 9 aa, Influenza A virus
VFRSNDLTA

SEQ ID NO: 141168 - protein, 9 aa, Influenza A virus
VFRSNGLIA

SEQ ID NO: 141169 - protein, 9 aa, Influenza A virus
VFRSNGLKA

SEQ ID NO: 141170 - protein, 8 aa, Influenza A virus
VFRSNGLM

SEQ ID NO: 141171 - protein, 9 aa, Influenza A virus
VFRSNGLMA

SEQ ID NO: 141172 - protein, 9 aa, Influenza A virus
VFRSNGLTA

SEQ ID NO: 141173 - protein, 9 aa, Influenza A virus
VFRSNGMTA

SEQ ID NO: 141174 - protein, 9 aa, Influenza A virus
VIMPAHGPA

SEQ ID NO: 141175 - protein, 10 aa, Influenza A virus
VIMPAHGPAK

SEQ ID NO: 141176 - protein, 9 aa, Influenza A virus
VIQQTRVDK

SEQ ID NO: 141177 - protein, 10 aa, Influenza A virus
VKKEEFAEIM

SEQ ID NO: 141178 - protein, 8 aa, Influenza A virus
VLEAMAFL

SEQ ID NO: 141179 - protein, 10 aa, Influenza A virus
VLEAMAFLEK

SEQ ID NO: 141180 - protein, 10 aa, Influenza A virus
VLEAMAFLER

SEQ ID NO: 141181 - protein, 8 aa, Influenza A virus
VLEAMASL

SEQ ID NO: 141182 - protein, 8 aa, Influenza A virus
VLEAVAFL

SEQ ID NO: 141183 - protein, 10 aa, Influenza A virus
VLEDEQMYQK

SEQ ID NO: 141184 - protein, 10 aa, Influenza A virus
VLEDEQMYQR

SEQ ID NO: 141185 - protein, 8 aa, Influenza A virus
VLEVMAFL

SEQ ID NO: 141186 - protein, 10 aa, Influenza A virus
VLGDEQMYQR

SEQ ID NO: 141187 - protein, 9 aa, Influenza A virus
VLGVSILNL

SEQ ID NO: 141188 - protein, 9 aa, Influenza A virus
VLSIAPIMF

SEQ ID NO: 141189 - protein, 9 aa, Influenza A virus
VLSIAPLMF

SEQ ID NO: 141190 - protein, 9 aa, Influenza A virus
VLSLAPIMF

SEQ ID NO: 141191 - protein, 9 aa, Influenza A virus
VLSVAPIMF

SEQ ID NO: 141192 - protein, 10 aa, Influenza A virus
VMESMDKEEV

SEQ ID NO: 141193 - protein, 10 aa, Influenza A virus
VMESMDRDEV

SEQ ID NO: 141194 - protein, 10 aa, Influenza A virus
VMESMDREEV

SEQ ID NO: 141195 - protein, 10 aa, Influenza A virus
VMKSMDKEEM

SEQ ID NO: 141196 - protein, 9 aa, Influenza A virus
VMMPAHGPA

SEQ ID NO: 141197 - protein, 10 aa, Influenza A virus
VMMPAHGPAK

SEQ ID NO: 141198 - protein, 11 aa, Influenza A virus
VMMPAHGPAKI

SEQ ID NO: 141199 - protein, 9 aa, Influenza A virus
VMPAHGPAK

SEQ ID NO: 141200 - protein, 11 aa, Influenza A virus
VMPAHGPAKSM

SEQ ID NO: 141201 - protein, 9 aa, Influenza A virus
VMPAHGPAR

SEQ ID NO: 141202 - protein, 11 aa, Influenza A virus
VMPAHGPARSM

SEQ ID NO: 141203 - protein, 9 aa, Influenza A virus
VMPSHGPAK

SEQ ID NO: 141204 - protein, 11 aa, Influenza A virus
VMPSHGPAKTM

SEQ ID NO: 141205 - protein, 9 aa, Influenza A virus
VNKRSYLIR

SEQ ID NO: 141206 - protein, 11 aa, Influenza A virus
VNKRSYLIRAL

SEQ ID NO: 141207 - protein, 9 aa, Influenza A virus
VNRFYRTCK

SEQ ID NO: 141208 - protein, 10 aa, Influenza A virus
VNRFYRTCKL

SEQ ID NO: 141209 - protein, 10 aa, Influenza A virus
VNRTHQYSEK

SEQ ID NO: 141210 - protein, 9 aa, Influenza A virus
VPAQNAIST

SEQ ID NO: 141211 - protein, 11 aa, Influenza A virus
VPAQNAISTTF

SEQ ID NO: 141212 - protein, 8 aa, Influenza A virus
VPKRNRSI

SEQ ID NO: 141213 - protein, 9 aa, Influenza A virus
VPKRNRSIL

SEQ ID NO: 141214 - protein, 9 aa, Influenza A virus
VPVQNAIST

SEQ ID NO: 141215 - protein, 11 aa, Influenza A virus
VPVQNAISTTF

SEQ ID NO: 141216 - protein, 9 aa, Influenza A virus
VQNAISTTF

SEQ ID NO: 141217 - protein, 10 aa, Influenza A virus
VQNAISTTFP

SEQ ID NO: 141218 - protein, 11 aa, Influenza A virus
VQNAISTTFPY

SEQ ID NO: 141219 - protein, 8 aa, Influenza A virus
VSDGGPNL

SEQ ID NO: 141220 - protein, 9 aa, Influenza A virus
VSDGGPNLF

SEQ ID NO: 141221 - protein, 9 aa, Influenza A virus
VSDGGPNLY

SEQ ID NO: 141222 - protein, 10 aa, Influenza A virus
VSDGGPNLYN

SEQ ID NO: 141223 - protein, 9 aa, Influenza A virus
VSDGGPNPY

SEQ ID NO: 141224 - protein, 8 aa, Influenza A virus
VSDGGSNL

SEQ ID NO: 141225 - protein, 9 aa, Influenza A virus
VSDGGSNLY

SEQ ID NO: 141226 - protein, 10 aa, Influenza A virus
VSDGGSNLYN

SEQ ID NO: 141227 - protein, 9 aa, Influenza A virus
VSHKEIESI

SEQ ID NO: 141228 - protein, 9 aa, Influenza A virus
VSHKEIESM

SEQ ID NO: 141229 - protein, 9 aa, Influenza A virus
VSILNLGQK

SEQ ID NO: 141230 - protein, 11 aa, Influenza A virus
VSILNLGQKEY

SEQ ID NO: 141231 - protein, 10 aa, Influenza A virus
VSILNLGQKK

SEQ ID NO: 141232 - protein, 11 aa, Influenza A virus
VSILNLGQKKY

SEQ ID NO: 141233 - protein, 10 aa, Influenza A virus
VSILNLGQKR

SEQ ID NO: 141234 - protein, 11 aa, Influenza A virus
VSILNLGQKRY

SEQ ID NO: 141235 - protein, 9 aa, Influenza A virus
VSILNLGQR

SEQ ID NO: 141236 - protein, 10 aa, Influenza A virus
VSILNLGQRK

SEQ ID NO: 141237 - protein, 11 aa, Influenza A virus
VSILNLGQRKY

SEQ ID NO: 141238 - protein, 9 aa, Influenza A virus
VSLSPGMMM

SEQ ID NO: 141239 - protein, 11 aa, Influenza A virus
VSLSPGMMMGM

SEQ ID NO: 141240 - protein, 9 aa, Influenza A virus
VSRAQIDAR

SEQ ID NO: 141241 - protein, 9 aa, Influenza A virus
VSRARIDAR

SEQ ID NO: 141242 - protein, 10 aa, Influenza A virus
VSRARIDARV

SEQ ID NO: 141243 - protein, 9 aa, Influenza A virus
VSRARIDTR

SEQ ID NO: 141244 - protein, 9 aa, Influenza A virus
VSRTHQYSE

SEQ ID NO: 141245 - protein, 10 aa, Influenza A virus
VSRTHQYSEK

SEQ ID NO: 141246 - protein, 9 aa, Influenza A virus
VTHFQRKRR

SEQ ID NO: 141247 - protein, 9 aa, Influenza A virus
VTKKMVTQR

SEQ ID NO: 141248 - protein, 9 aa, Influenza A virus
VTQRTIGKK

SEQ ID NO: 141249 - protein, 10 aa, Influenza A virus
VTQRTIGKKK

SEQ ID NO: 141250 - protein, 9 aa, Influenza A virus
VTQRTIGKR

SEQ ID NO: 141251 - protein, 10 aa, Influenza A virus
VTQRTIGKRK

SEQ ID NO: 141252 - protein, 9 aa, Influenza A virus
VTQRTIGRK

SEQ ID NO: 141253 - protein, 10 aa, Influenza A virus
VTQRTIGRKK

SEQ ID NO: 141254 - protein, 9 aa, Influenza A virus
VTTHFQRKR

SEQ ID NO: 141255 - protein, 10 aa, Influenza A virus
VTTHFQRKRR

SEQ ID NO: 141256 - protein, 9 aa, Influenza A virus
VTVIKNNMI

SEQ ID NO: 141257 - protein, 9 aa, Influenza A virus
VTVIKNNMM

SEQ ID NO: 141258 - protein, 9 aa, Influenza A virus
VVMPAHGPA

SEQ ID NO: 141259 - protein, 10 aa, Influenza A virus
VVMPAHGPAK

SEQ ID NO: 141260 - protein, 10 aa, Influenza A virus
VVMPAHGPAR

SEQ ID NO: 141261 - protein, 9 aa, Influenza A virus
VVMPSHGPA

SEQ ID NO: 141262 - protein, 10 aa, Influenza A virus
VVMPSHGPAK

SEQ ID NO: 141263 - protein, 9 aa, Influenza A virus
VVQQTRMDK

SEQ ID NO: 141264 - protein, 9 aa, Influenza A virus
VVQQTRVDK

SEQ ID NO: 141265 - protein, 9 aa, Influenza A virus
VVQQTRVDR

SEQ ID NO: 141266 - protein, 9 aa, Influenza A virus
VVRKMMTNS

SEQ ID NO: 141267 - protein, 9 aa, Influenza A virus
VYFVEALAR

SEQ ID NO: 141268 - protein, 11 aa, Influenza A virus
VYFVEALARSI

SEQ ID NO: 141269 - protein, 9 aa, Influenza A virus
VYFVETLAR

SEQ ID NO: 141270 - protein, 11 aa, Influenza A virus
VYFVETLARGI

SEQ ID NO: 141271 - protein, 11 aa, Influenza A virus
VYFVETLARNI

SEQ ID NO: 141272 - protein, 10 aa, Influenza A virus
VYFVETLARR

SEQ ID NO: 141273 - protein, 11 aa, Influenza A virus
VYFVETLARRI

SEQ ID NO: 141274 - protein, 11 aa, Influenza A virus
VYFVETLARSI

SEQ ID NO: 141275 - protein, 8 aa, Influenza A virus
WELMDEEY

SEQ ID NO: 141276 - protein, 8 aa, Influenza A virus
WELMDTDY

SEQ ID NO: 141277 - protein, 10 aa, Influenza A virus
WEQTHSKAGL

SEQ ID NO: 141278 - protein, 11 aa, Influenza A virus
WEQTHSKAGLL

SEQ ID NO: 141279 - protein, 10 aa, Influenza A virus
WEQTQSKAGL

SEQ ID NO: 141280 - protein, 11 aa, Influenza A virus
WEQTQSKAGLL

SEQ ID NO: 141281 - protein, 10 aa, Influenza A virus
WEQTRSKAGL

SEQ ID NO: 141282 - protein, 11 aa, Influenza A virus
WEQTRSKAGLL

SEQ ID NO: 141283 - protein, 10 aa, Influenza A virus
WEQTRSKTGL

SEQ ID NO: 141284 - protein, 11 aa, Influenza A virus
WEQTRSKTGLL

SEQ ID NO: 141285 - protein, 8 aa, Influenza A virus
WFRNILSI

SEQ ID NO: 141286 - protein, 8 aa, Influenza A virus
WFRNVLSI

SEQ ID NO: 141287 - protein, 11 aa, Influenza A virus
WFRNVLSIAPL

SEQ ID NO: 141288 - protein, 8 aa, Influenza A virus
WFRNVLSL

SEQ ID NO: 141289 - protein, 9 aa, Influenza A virus
WFRNVLSLA

SEQ ID NO: 141290 - protein, 9 aa, Influenza A virus
WIPKRNRSI

SEQ ID NO: 141291 - protein, 10 aa, Influenza A virus
WIPKRNRSIL

SEQ ID NO: 141292 - protein, 9 aa, Influenza A virus
WIPKRNRTI

SEQ ID NO: 141293 - protein, 10 aa, Influenza A virus
WIPKRNRTIL

SEQ ID NO: 141294 - protein, 10 aa, Influenza A virus
WNENQNPRIF

SEQ ID NO: 141295 - protein, 10 aa, Influenza A virus
WNENQNPRMF

SEQ ID NO: 141296 - protein, 10 aa, Influenza A virus
WNENQNPRVF

SEQ ID NO: 141297 - protein, 9 aa, Influenza A virus
WTINTETGA

SEQ ID NO: 141298 - protein, 9 aa, Influenza A virus
WTLKRNQPA

SEQ ID NO: 141299 - protein, 9 aa, Influenza A virus
WTPKRNRSI

SEQ ID NO: 141300 - protein, 10 aa, Influenza A virus
WTPKRNRSIL

SEQ ID NO: 141301 - protein, 9 aa, Influenza A virus
WTTNTEIGA

SEQ ID NO: 141302 - protein, 10 aa, Influenza A virus
WTTNTETGAL

SEQ ID NO: 141303 - protein, 9 aa, Influenza A virus
WVPKRNRSI

SEQ ID NO: 141304 - protein, 10 aa, Influenza A virus
WVPKRNRSIL

SEQ ID NO: 141305 - protein, 10 aa, Influenza A virus
YAGIQAGVDR

SEQ ID NO: 141306 - protein, 8 aa, Influenza A virus
YAQQDCVL

SEQ ID NO: 141307 - protein, 10 aa, Influenza A virus
YAQQDCVLEA

SEQ ID NO: 141308 - protein, 11 aa, Influenza A virus
YAQQDCVLEAM

SEQ ID NO: 141309 - protein, 8 aa, Influenza A virus
YAQTDCVL

SEQ ID NO: 141310 - protein, 10 aa, Influenza A virus
YAQTDCVLEA

SEQ ID NO: 141311 - protein, 11 aa, Influenza A virus
YAQTDCVLEAM

SEQ ID NO: 141312 - protein, 11 aa, Influenza A virus
YAQTDCVLEAV

SEQ ID NO: 141313 - protein, 10 aa, Influenza A virus
YAQTDCVLEV

SEQ ID NO: 141314 - protein, 10 aa, Influenza A virus
YDAFATTHSW

SEQ ID NO: 141315 - protein, 11 aa, Influenza A virus
YDAFATTHSWI

SEQ ID NO: 141316 - protein, 10 aa, Influenza A virus
YDAVATTHSW

SEQ ID NO: 141317 - protein, 11 aa, Influenza A virus
YDAVATTHSWI

SEQ ID NO: 141318 - protein, 11 aa, Influenza A virus
YDAVATTHSWT

SEQ ID NO: 141319 - protein, 11 aa, Influenza A virus
YDAVATTHSWV

SEQ ID NO: 141320 - protein, 9 aa, Influenza A virus
YEAVATTHS

SEQ ID NO: 141321 - protein, 10 aa, Influenza A virus
YEAVATTHSW

SEQ ID NO: 141322 - protein, 11 aa, Influenza A virus
YEAVATTHSWI

SEQ ID NO: 141323 - protein, 9 aa, Influenza A virus
YFNDSTRRK

SEQ ID NO: 141324 - protein, 10 aa, Influenza A virus
YFNDSTRRKI

SEQ ID NO: 141325 - protein, 9 aa, Influenza A virus
YFNESTRKR

SEQ ID NO: 141326 - protein, 10 aa, Influenza A virus
YFVEALARSI

SEQ ID NO: 141327 - protein, 9 aa, Influenza A virus
YFVETLARR

SEQ ID NO: 141328 - protein, 10 aa, Influenza A virus
YFVETLARSI

SEQ ID NO: 141329 - protein, 9 aa, Influenza A virus
YGFEANFSM

SEQ ID NO: 141330 - protein, 11 aa, Influenza A virus
YGFEANFSMEL

SEQ ID NO: 141331 - protein, 9 aa, Influenza A virus
YGFVANFSM

SEQ ID NO: 141332 - protein, 11 aa, Influenza A virus
YGFVANFSMEL

SEQ ID NO: 141333 - protein, 8 aa, Influenza A virus
YIIRALTL

SEQ ID NO: 141334 - protein, 10 aa, Influenza A virus
YIIRALTLNT

SEQ ID NO: 141335 - protein, 11 aa, Influenza A virus
YIIRALTLNTM

SEQ ID NO: 141336 - protein, 8 aa, Influenza A virus
YINKTGTF

SEQ ID NO: 141337 - protein, 10 aa, Influenza A virus
YINKTGTFEF

SEQ ID NO: 141338 - protein, 10 aa, Influenza A virus
YINRTGTCEF

SEQ ID NO: 141339 - protein, 8 aa, Influenza A virus
YINRTGTF

SEQ ID NO: 141340 - protein, 10 aa, Influenza A virus
YINRTGTFEF

SEQ ID NO: 141341 - protein, 9 aa, Influenza A virus
YITKNQPEW

SEQ ID NO: 141342 - protein, 11 aa, Influenza A virus
YITKNQPEWFR

SEQ ID NO: 141343 - protein, 9 aa, Influenza A virus
YITRKQPEW

SEQ ID NO: 141344 - protein, 11 aa, Influenza A virus
YITRKQPEWFR

SEQ ID NO: 141345 - protein, 9 aa, Influenza A virus
YITRNQPDW

SEQ ID NO: 141346 - protein, 11 aa, Influenza A virus
YITRNQPDWFR

SEQ ID NO: 141347 - protein, 9 aa, Influenza A virus
YITRNQPEW

SEQ ID NO: 141348 - protein, 11 aa, Influenza A virus
YITRNQPEWFR

SEQ ID NO: 141349 - protein, 9 aa, Influenza A virus
YITRNQPKW

SEQ ID NO: 141350 - protein, 11 aa, Influenza A virus
YITRNQPKWFR

SEQ ID NO: 141351 - protein, 9 aa, Influenza A virus
YITRTQPEW

SEQ ID NO: 141352 - protein, 11 aa, Influenza A virus
YITRTQPEWFR

SEQ ID NO: 141353 - protein, 9 aa, Influenza A virus
YKGRLCNPL

SEQ ID NO: 141354 - protein, 8 aa, Influenza A virus
YLIRALTL

SEQ ID NO: 141355 - protein, 10 aa, Influenza A virus
YLIRALTLNT

SEQ ID NO: 141356 - protein, 11 aa, Influenza A virus
YLIRALTLNTM

SEQ ID NO: 141357 - protein, 8 aa, Influenza A virus
YMFESKGM

SEQ ID NO: 141358 - protein, 9 aa, Influenza A virus
YMFESKGMK

SEQ ID NO: 141359 - protein, 10 aa, Influenza A virus
YMFESKGMKL

SEQ ID NO: 141360 - protein, 11 aa, Influenza A virus
YMFESKGMKLR

SEQ ID NO: 141361 - protein, 8 aa, Influenza A virus
YMFESKNM

SEQ ID NO: 141362 - protein, 9 aa, Influenza A virus
YMFESKNMK

SEQ ID NO: 141363 - protein, 10 aa, Influenza A virus
YMFESKNMKL

SEQ ID NO: 141364 - protein, 11 aa, Influenza A virus
YMFESKNMKLR

SEQ ID NO: 141365 - protein, 8 aa, Influenza A virus
YMFESKRM

SEQ ID NO: 141366 - protein, 9 aa, Influenza A virus
YMFESKRMK

SEQ ID NO: 141367 - protein, 10 aa, Influenza A virus
YMFESKRMKL

SEQ ID NO: 141368 - protein, 11 aa, Influenza A virus
YMFESKRMKLR

SEQ ID NO: 141369 - protein, 8 aa, Influenza A virus
YMFESKSM

SEQ ID NO: 141370 - protein, 9 aa, Influenza A virus
YMFESKSMK

SEQ ID NO: 141371 - protein, 10 aa, Influenza A virus
YMFESKSMKI

SEQ ID NO: 141372 - protein, 11 aa, Influenza A virus
YMFESKSMKIR

SEQ ID NO: 141373 - protein, 10 aa, Influenza A virus
YMFESKSMKL

SEQ ID NO: 141374 - protein, 11 aa, Influenza A virus
YMFESKSMKLR

SEQ ID NO: 141375 - protein, 8 aa, Influenza A virus
YMFKSKSM

SEQ ID NO: 141376 - protein, 9 aa, Influenza A virus
YMFKSKSMK

SEQ ID NO: 141377 - protein, 10 aa, Influenza A virus
YMFKSKSMKL

SEQ ID NO: 141378 - protein, 11 aa, Influenza A virus
YMFKSKSMKLR

SEQ ID NO: 141379 - protein, 8 aa, Influenza A virus
YMNRTGTF

SEQ ID NO: 141380 - protein, 10 aa, Influenza A virus
YMNRTGTFEF

SEQ ID NO: 141381 - protein, 11 aa, Influenza A virus
YMNRTGTFEFT

SEQ ID NO: 141382 - protein, 9 aa, Influenza A virus
YMTRNQPEW

SEQ ID NO: 141383 - protein, 10 aa, Influenza A virus
YMTRNQPEWF

SEQ ID NO: 141384 - protein, 11 aa, Influenza A virus
YMTRNQPEWFR

SEQ ID NO: 141385 - protein, 10 aa, Influenza A virus
YPYRCHRGDT

SEQ ID NO: 141386 - protein, 9 aa, Influenza A virus
YQGRICNPL

SEQ ID NO: 141387 - protein, 9 aa, Influenza A virus
YQGRLCNPL

SEQ ID NO: 141388 - protein, 8 aa, Influenza A virus
YQKCCNLF

SEQ ID NO: 141389 - protein, 10 aa, Influenza A virus
YQKCCNLFEK

SEQ ID NO: 141390 - protein, 11 aa, Influenza A virus
YQKCCNLFEKF

SEQ ID NO: 141391 - protein, 8 aa, Influenza A virus
YQKCCSLF

SEQ ID NO: 141392 - protein, 10 aa, Influenza A virus
YQKCCSLFEK

SEQ ID NO: 141393 - protein, 11 aa, Influenza A virus
YQKCCSLFEKF

SEQ ID NO: 141394 - protein, 8 aa, Influenza A virus
YQKCCTLF

SEQ ID NO: 141395 - protein, 10 aa, Influenza A virus
YQKCCTLFEK

SEQ ID NO: 141396 - protein, 11 aa, Influenza A virus
YQKCCTLFEKF

SEQ ID NO: 141397 - protein, 8 aa, Influenza A virus
YQRCCNLF

SEQ ID NO: 141398 - protein, 10 aa, Influenza A virus
YQRCCNLFEK

SEQ ID NO: 141399 - protein, 11 aa, Influenza A virus
YQRCCNLFEKF

SEQ ID NO: 141400 - protein, 10 aa, Influenza A virus
YQRCCNLFER

SEQ ID NO: 141401 - protein, 11 aa, Influenza A virus
YQRCCNLFERF

SEQ ID NO: 141402 - protein, 10 aa, Influenza A virus
YRCHRGDSQI

SEQ ID NO: 141403 - protein, 10 aa, Influenza A virus
YRCHRGDTQI

SEQ ID NO: 141404 - protein, 10 aa, Influenza A virus
YRCHRGHTQI

SEQ ID NO: 141405 - protein, 9 aa, Influenza A virus
YRGRLCNPL

SEQ ID NO: 141406 - protein, 10 aa, Influenza A virus
YRRPVGISSM

SEQ ID NO: 141407 - protein, 11 aa, Influenza A virus
YRRPVGISSMM

SEQ ID NO: 141408 - protein, 11 aa, Influenza A virus
YRRPVGISSMV

SEQ ID NO: 141409 - protein, 9 aa, Influenza A virus
YRTCKLLGI

SEQ ID NO: 141410 - protein, 11 aa, Influenza A virus
YRTCKLLGINM

SEQ ID NO: 141411 - protein, 9 aa, Influenza A virus
YRTCKLVGI

SEQ ID NO: 141412 - protein, 11 aa, Influenza A virus
YRTCKLVGINM

SEQ ID NO: 141413 - protein, 9 aa, Influenza A virus
YRYGFEANF

SEQ ID NO: 141414 - protein, 10 aa, Influenza A virus
YRYGFEANFS

SEQ ID NO: 141415 - protein, 11 aa, Influenza A virus
YRYGFEANFSM

SEQ ID NO: 141416 - protein, 9 aa, Influenza A virus
YRYGFVANF

SEQ ID NO: 141417 - protein, 10 aa, Influenza A virus
YRYGFVANFS

SEQ ID NO: 141418 - protein, 11 aa, Influenza A virus
YRYGFVANFSM

SEQ ID NO: 141419 - protein, 9 aa, Influenza A virus
YRYPYRCHR

SEQ ID NO: 141420 - protein, 10 aa, Influenza A virus
YRYPYRCHRG

SEQ ID NO: 141421 - protein, 9 aa, Influenza A virus
YRYTYRCHR

SEQ ID NO: 141422 - protein, 10 aa, Influenza A virus
YRYTYRCHRG

SEQ ID NO: 141423 - protein, 9 aa, Influenza A virus
YSERGKWTI

SEQ ID NO: 141424 - protein, 9 aa, Influenza A virus
YSERGRWTK

SEQ ID NO: 141425 - protein, 9 aa, Influenza A virus
YSHGTGTGY

SEQ ID NO: 141426 - protein, 11 aa, Influenza A virus
YSHGTGTGYTM

SEQ ID NO: 141427 - protein, 8 aa, Influenza A virus
YTKTAYWW

SEQ ID NO: 141428 - protein, 8 aa, Influenza A virus
YTKTSYWW

SEQ ID NO: 141429 - protein, 8 aa, Influenza A virus
YTKTTYWR

SEQ ID NO: 141430 - protein, 8 aa, Influenza A virus
YTKTTYWW

SEQ ID NO: 141431 - protein, 8 aa, Influenza A virus
YTMDTVNR

SEQ ID NO: 141432 - protein, 9 aa, Influenza A virus
YTMDTVNRT

SEQ ID NO: 141433 - protein, 8 aa, Influenza A virus
YTMDTVSR

SEQ ID NO: 141434 - protein, 9 aa, Influenza A virus
YTMDTVSRT

SEQ ID NO: 141435 - protein, 10 aa, Influenza A virus
YTMDTVSRTH

SEQ ID NO: 141436 - protein, 8 aa, Influenza A virus
YTNRTGTF

SEQ ID NO: 141437 - protein, 10 aa, Influenza A virus
YTNRTGTFEF

SEQ ID NO: 141438 - protein, 8 aa, Influenza A virus
YTRTTYWW

SEQ ID NO: 141439 - protein, 10 aa, Influenza A virus
AAEAMEVASK

SEQ ID NO: 141440 - protein, 9 aa, Influenza A virus
AAFGLICAT

SEQ ID NO: 141441 - protein, 9 aa, Influenza A virus
ADLEALMEW

SEQ ID NO: 141442 - protein, 10 aa, Influenza A virus
ADLEALMEWL

SEQ ID NO: 141443 - protein, 10 aa, Influenza A virus
AEAMDIASQA

SEQ ID NO: 141444 - protein, 11 aa, Influenza A virus
AEAMDIASQAR

SEQ ID NO: 141445 - protein, 10 aa, Influenza A virus
AEAMEIANQA

SEQ ID NO: 141446 - protein, 11 aa, Influenza A virus
AEAMEIANQAR

SEQ ID NO: 141447 - protein, 10 aa, Influenza A virus
AEAMEIASQA

SEQ ID NO: 141448 - protein, 11 aa, Influenza A virus
AEAMEIASQAR

SEQ ID NO: 141449 - protein, 10 aa, Influenza A virus
AEAMEVAGQA

SEQ ID NO: 141450 - protein, 11 aa, Influenza A virus
AEAMEVAGQAR

SEQ ID NO: 141451 - protein, 10 aa, Influenza A virus
AEAMEVANQA

SEQ ID NO: 141452 - protein, 11 aa, Influenza A virus
AEAMEVANQAR

SEQ ID NO: 141453 - protein, 10 aa, Influenza A virus
AEAMEVASKA

SEQ ID NO: 141454 - protein, 11 aa, Influenza A virus
AEAMEVASKAR

SEQ ID NO: 141455 - protein, 10 aa, Influenza A virus
AEAMEVASQA

SEQ ID NO: 141456 - protein, 11 aa, Influenza A virus
AEAMEVASQAR

SEQ ID NO: 141457 - protein, 10 aa, Influenza A virus
AEAMEVASQT

SEQ ID NO: 141458 - protein, 11 aa, Influenza A virus
AEAMEVASQTR

SEQ ID NO: 141459 - protein, 10 aa, Influenza A virus
AEIAQKLEDV

SEQ ID NO: 141460 - protein, 11 aa, Influenza A virus
AEIAQKLEDVF

SEQ ID NO: 141461 - protein, 10 aa, Influenza A virus
AEIAQRLEDV

SEQ ID NO: 141462 - protein, 11 aa, Influenza A virus
AEIAQRLEDVF

SEQ ID NO: 141463 - protein, 10 aa, Influenza A virus
AEIAQRLENV

SEQ ID NO: 141464 - protein, 11 aa, Influenza A virus
AEIAQRLENVF

SEQ ID NO: 141465 - protein, 10 aa, Influenza A virus
AEIARRLEDV

SEQ ID NO: 141466 - protein, 11 aa, Influenza A virus
AEIARRLEDVF

SEQ ID NO: 141467 - protein, 10 aa, Influenza A virus
AERMEVAGQA

SEQ ID NO: 141468 - protein, 10 aa, Influenza A virus
AERMEVASQA

SEQ ID NO: 141469 - protein, 11 aa, Influenza A virus
AFGLVCATCER

SEQ ID NO: 141470 - protein, 11 aa, Influenza A virus
AGLKSDLLENL

SEQ ID NO: 141471 - protein, 10 aa, Influenza A virus
AGRNTDLEAL

SEQ ID NO: 141472 - protein, 9 aa, Influenza A virus
AIKLYKKLK

SEQ ID NO: 141473 - protein, 10 aa, Influenza A virus
AIKLYKKLKR

SEQ ID NO: 141474 - protein, 8 aa, Influenza A virus
AKDVALSY

SEQ ID NO: 141475 - protein, 10 aa, Influenza A virus
AKEIALGYSA

SEQ ID NO: 141476 - protein, 8 aa, Influenza A virus
AKEIALSY

SEQ ID NO: 141477 - protein, 10 aa, Influenza A virus
AKEIALSYSA

SEQ ID NO: 141478 - protein, 8 aa, Influenza A virus
AKEISLSY

SEQ ID NO: 141479 - protein, 10 aa, Influenza A virus
AKEISLSYSA

SEQ ID NO: 141480 - protein, 10 aa, Influenza A virus
AKEVALGYST

SEQ ID NO: 141481 - protein, 8 aa, Influenza A virus
AKEVALSY

SEQ ID NO: 141482 - protein, 10 aa, Influenza A virus
AKEVALSYSA

SEQ ID NO: 141483 - protein, 10 aa, Influenza A virus
AKEVALSYST

SEQ ID NO: 141484 - protein, 8 aa, Influenza A virus
ALASCMGL

SEQ ID NO: 141485 - protein, 9 aa, Influenza A virus
ALASCMGLI

SEQ ID NO: 141486 - protein, 10 aa, Influenza A virus
ALASCMGLIY

SEQ ID NO: 141487 - protein, 8 aa, Influenza A virus
ALATCMGL

SEQ ID NO: 141488 - protein, 9 aa, Influenza A virus
ALATCMGLI

SEQ ID NO: 141489 - protein, 10 aa, Influenza A virus
ALATCMGLIY

SEQ ID NO: 141490 - protein, 9 aa, Influenza A virus
ALGYSAGAL

SEQ ID NO: 141491 - protein, 10 aa, Influenza A virus
ALGYSAGALA

SEQ ID NO: 141492 - protein, 9 aa, Influenza A virus
ALGYSTGAL

SEQ ID NO: 141493 - protein, 10 aa, Influenza A virus
ALGYSTGALA

SEQ ID NO: 141494 - protein, 8 aa, Influenza A virus
ALMEWLKT

SEQ ID NO: 141495 - protein, 9 aa, Influenza A virus
ALMEWLKTR

SEQ ID NO: 141496 - protein, 10 aa, Influenza A virus
ALMEWLKTRP

SEQ ID NO: 141497 - protein, 11 aa, Influenza A virus
ALMEWLKTRPI

SEQ ID NO: 141498 - protein, 9 aa, Influenza A virus
ALSYSAGAL

SEQ ID NO: 141499 - protein, 10 aa, Influenza A virus
ALSYSAGALA

SEQ ID NO: 141500 - protein, 9 aa, Influenza A virus
ALSYSTGAL

SEQ ID NO: 141501 - protein, 10 aa, Influenza A virus
ALSYSTGALA

SEQ ID NO: 141502 - protein, 9 aa, Influenza A virus
ALTEWLKTR

SEQ ID NO: 141503 - protein, 11 aa, Influenza A virus
ALTEWLKTRPI

SEQ ID NO: 141504 - protein, 9 aa, Influenza A virus
AMDIASQAR

SEQ ID NO: 141505 - protein, 9 aa, Influenza A virus
AMEIANQAR

SEQ ID NO: 141506 - protein, 9 aa, Influenza A virus
AMEIASQAR

SEQ ID NO: 141507 - protein, 11 aa, Influenza A virus
AMEQMAGSSER

SEQ ID NO: 141508 - protein, 9 aa, Influenza A virus
AMEVAGQAR

SEQ ID NO: 141509 - protein, 9 aa, Influenza A virus
AMEVANQAR

SEQ ID NO: 141510 - protein, 9 aa, Influenza A virus
AMEVASKAR

SEQ ID NO: 141511 - protein, 9 aa, Influenza A virus
AMEVASQAR

SEQ ID NO: 141512 - protein, 9 aa, Influenza A virus
AMEVASQTR

SEQ ID NO: 141513 - protein, 10 aa, Influenza A virus
AMITIGTHPS

SEQ ID NO: 141514 - protein, 9 aa, Influenza A virus
AMRAIGTHP

SEQ ID NO: 141515 - protein, 10 aa, Influenza A virus
AMRAIGTHPR

SEQ ID NO: 141516 - protein, 11 aa, Influenza A virus
AMRAIGTHPRS

SEQ ID NO: 141517 - protein, 10 aa, Influenza A virus
AMRAIGTHPS

SEQ ID NO: 141518 - protein, 9 aa, Influenza A virus
AMRAIGTPP

SEQ ID NO: 141519 - protein, 10 aa, Influenza A virus
AMRAIGTPPS

SEQ ID NO: 141520 - protein, 9 aa, Influenza A virus
AMRTIGIHP

SEQ ID NO: 141521 - protein, 10 aa, Influenza A virus
AMRTIGIHPS

SEQ ID NO: 141522 - protein, 10 aa, Influenza A virus
AMRTIGTHPS

SEQ ID NO: 141523 - protein, 10 aa, Influenza A virus
AMRTVGTHPS

SEQ ID NO: 141524 - protein, 10 aa, Influenza A virus
AMRVIGTHPS

SEQ ID NO: 141525 - protein, 11 aa, Influenza A virus
ANAMEVASQAR

SEQ ID NO: 141526 - protein, 8 aa, Influenza A virus
AQGLEGVF

SEQ ID NO: 141527 - protein, 9 aa, Influenza A virus
AQHRSHRQM

SEQ ID NO: 141528 - protein, 10 aa, Influenza A virus
AQIAQRLEDV

SEQ ID NO: 141529 - protein, 11 aa, Influenza A virus
AQIAQRLEDVF

SEQ ID NO: 141530 - protein, 8 aa, Influenza A virus
AQKLEDVF

SEQ ID NO: 141531 - protein, 8 aa, Influenza A virus
AQRLEDVF

SEQ ID NO: 141532 - protein, 11 aa, Influenza A virus
AQRLEDVFAGK

SEQ ID NO: 141533 - protein, 11 aa, Influenza A virus
AQRLEDVFAGR

SEQ ID NO: 141534 - protein, 8 aa, Influenza A virus
AQRLENVF

SEQ ID NO: 141535 - protein, 9 aa, Influenza A virus
AQRLENVFA

SEQ ID NO: 141536 - protein, 11 aa, Influenza A virus
AQRLENVFAGK

SEQ ID NO: 141537 - protein, 9 aa, Influenza A virus
ARHMVQAMR

SEQ ID NO: 141538 - protein, 11 aa, Influenza A virus
ARHMVQAMRTI

SEQ ID NO: 141539 - protein, 9 aa, Influenza A virus
ARQMIQAMR

SEQ ID NO: 141540 - protein, 11 aa, Influenza A virus
ARQMIQAMRTI

SEQ ID NO: 141541 - protein, 8 aa, Influenza A virus
ARQMVHAM

SEQ ID NO: 141542 - protein, 9 aa, Influenza A virus
ARQMVHAMR

SEQ ID NO: 141543 - protein, 11 aa, Influenza A virus
ARQMVHAMRTI

SEQ ID NO: 141544 - protein, 9 aa, Influenza A virus
ARQMVQAMI

SEQ ID NO: 141545 - protein, 11 aa, Influenza A virus
ARQMVQAMITI

SEQ ID NO: 141546 - protein, 9 aa, Influenza A virus
ARQMVQAMR

SEQ ID NO: 141547 - protein, 10 aa, Influenza A virus
ARQMVQAMRA

SEQ ID NO: 141548 - protein, 11 aa, Influenza A virus
ARQMVQAMRAI

SEQ ID NO: 141549 - protein, 11 aa, Influenza A virus
ARQMVQAMRTI

SEQ ID NO: 141550 - protein, 11 aa, Influenza A virus
ARQMVQAMRTV

SEQ ID NO: 141551 - protein, 10 aa, Influenza A virus
ARQMVQAMRV

SEQ ID NO: 141552 - protein, 11 aa, Influenza A virus
ARQMVQAMRVI

SEQ ID NO: 141553 - protein, 11 aa, Influenza A virus
ARRLEDVFAGK

SEQ ID NO: 141554 - protein, 10 aa, Influenza A virus
ASCMGLIYDR

SEQ ID NO: 141555 - protein, 10 aa, Influenza A virus
ASCMGLIYNR

SEQ ID NO: 141556 - protein, 11 aa, Influenza A virus
ASCMGLIYNRM

SEQ ID NO: 141557 - protein, 8 aa, Influenza A virus
ASHTAKAM

SEQ ID NO: 141558 - protein, 8 aa, Influenza A virus
ASITAKAM

SEQ ID NO: 141559 - protein, 9 aa, Influenza A virus
ASKARQMVQ

SEQ ID NO: 141560 - protein, 10 aa, Influenza A virus
ASKARQMVQA

SEQ ID NO: 141561 - protein, 10 aa, Influenza A virus
ASQARHMVQA

SEQ ID NO: 141562 - protein, 10 aa, Influenza A virus
ASQARQMVHA

SEQ ID NO: 141563 - protein, 9 aa, Influenza A virus
ATATNPLIR

SEQ ID NO: 141564 - protein, 10 aa, Influenza A virus
ATCMGLIYNR

SEQ ID NO: 141565 - protein, 11 aa, Influenza A virus
ATCMGLIYNRM

SEQ ID NO: 141566 - protein, 9 aa, Influenza A virus
ATITNPLIR

SEQ ID NO: 141567 - protein, 11 aa, Influenza A virus
ATNPLIRHENR

SEQ ID NO: 141568 - protein, 9 aa, Influenza A virus
ATTTNPLIR

SEQ ID NO: 141569 - protein, 9 aa, Influenza A virus
AVKLYGKLK

SEQ ID NO: 141570 - protein, 10 aa, Influenza A virus
AVKLYGKLKR

SEQ ID NO: 141571 - protein, 9 aa, Influenza A virus
AVKLYKKLK

SEQ ID NO: 141572 - protein, 10 aa, Influenza A virus
AVKLYKKLKR

SEQ ID NO: 141573 - protein, 9 aa, Influenza A virus
AVKLYRKIK

SEQ ID NO: 141574 - protein, 10 aa, Influenza A virus
AVKLYRKIKR

SEQ ID NO: 141575 - protein, 9 aa, Influenza A virus
AVKLYRKLK

SEQ ID NO: 141576 - protein, 10 aa, Influenza A virus
AVKLYRKLKR

SEQ ID NO: 141577 - protein, 10 aa, Influenza A virus
AVTTEAAFGL

SEQ ID NO: 141578 - protein, 9 aa, Influenza A virus
AVTTEVAFA

SEQ ID NO: 141579 - protein, 10 aa, Influenza A virus
AVTTEVAFAV

SEQ ID NO: 141580 - protein, 10 aa, Influenza A virus
AVTTEVAFGL

SEQ ID NO: 141581 - protein, 10 aa, Influenza A virus
AVTTEVVLGL

SEQ ID NO: 141582 - protein, 10 aa, Influenza A virus
AVVCATCEQI

SEQ ID NO: 141583 - protein, 10 aa, Influenza A virus
AYQKRMGVQI

SEQ ID NO: 141584 - protein, 10 aa, Influenza A virus
AYQKRMGVQL

SEQ ID NO: 141585 - protein, 10 aa, Influenza A virus
AYQKRMGVQM

SEQ ID NO: 141586 - protein, 11 aa, Influenza A virus
AYQKRMGVQMR

SEQ ID NO: 141587 - protein, 10 aa, Influenza A virus
AYQNRMGVQM

SEQ ID NO: 141588 - protein, 8 aa, Influenza A virus
CMGLIYNR

SEQ ID NO: 141589 - protein, 10 aa, Influenza A virus
DDLIENLQAY

SEQ ID NO: 141590 - protein, 10 aa, Influenza A virus
DEVAQGLEGV

SEQ ID NO: 141591 - protein, 11 aa, Influenza A virus
DEVAQGLEGVF

SEQ ID NO: 141592 - protein, 10 aa, Influenza A virus
DLEALMEWLK

SEQ ID NO: 141593 - protein, 10 aa, Influenza A virus
DLEALTEWLK

SEQ ID NO: 141594 - protein, 9 aa, Influenza A virus
DLIENLQAY

SEQ ID NO: 141595 - protein, 9 aa, Influenza A virus
DLLENLQAY

SEQ ID NO: 141596 - protein, 9 aa, Influenza A virus
DLLENLQTY

SEQ ID NO: 141597 - protein, 10 aa, Influenza A virus
DRMGTVTTEV

SEQ ID NO: 141598 - protein, 10 aa, Influenza A virus
DSNNMDRAVK

SEQ ID NO: 141599 - protein, 10 aa, Influenza A virus
DVALSYSTGA

SEQ ID NO: 141600 - protein, 10 aa, Influenza A virus
DVFAGRNTDL

SEQ ID NO: 141601 - protein, 10 aa, Influenza A virus
DVTFHGAKEV

SEQ ID NO: 141602 - protein, 9 aa, Influenza A virus
EAAFGLICA

SEQ ID NO: 141603 - protein, 10 aa, Influenza A virus
EAAFGLICAT

SEQ ID NO: 141604 - protein, 9 aa, Influenza A virus
EAAFGLVCA

SEQ ID NO: 141605 - protein, 10 aa, Influenza A virus
EAAFGLVCAT

SEQ ID NO: 141606 - protein, 10 aa, Influenza A virus
EALMEWLKTR

SEQ ID NO: 141607 - protein, 10 aa, Influenza A virus
EALTEWLKTR

SEQ ID NO: 141608 - protein, 9 aa, Influenza A virus
EAMDIASQA

SEQ ID NO: 141609 - protein, 10 aa, Influenza A virus
EAMDIASQAR

SEQ ID NO: 141610 - protein, 11 aa, Influenza A virus
EAMDIASQARQ

SEQ ID NO: 141611 - protein, 9 aa, Influenza A virus
EAMEIANQA

SEQ ID NO: 141612 - protein, 10 aa, Influenza A virus
EAMEIANQAR

SEQ ID NO: 141613 - protein, 11 aa, Influenza A virus
EAMEIANQARQ

SEQ ID NO: 141614 - protein, 9 aa, Influenza A virus
EAMEIASQA

SEQ ID NO: 141615 - protein, 10 aa, Influenza A virus
EAMEIASQAR

SEQ ID NO: 141616 - protein, 11 aa, Influenza A virus
EAMEIASQARQ

SEQ ID NO: 141617 - protein, 9 aa, Influenza A virus
EAMEVAGQA

SEQ ID NO: 141618 - protein, 10 aa, Influenza A virus
EAMEVAGQAR

SEQ ID NO: 141619 - protein, 9 aa, Influenza A virus
EAMEVANQA

SEQ ID NO: 141620 - protein, 10 aa, Influenza A virus
EAMEVANQAR

SEQ ID NO: 141621 - protein, 11 aa, Influenza A virus
EAMEVANQARQ

SEQ ID NO: 141622 - protein, 9 aa, Influenza A virus
EAMEVASKA

SEQ ID NO: 141623 - protein, 10 aa, Influenza A virus
EAMEVASKAR

SEQ ID NO: 141624 - protein, 11 aa, Influenza A virus
EAMEVASKARQ

SEQ ID NO: 141625 - protein, 9 aa, Influenza A virus
EAMEVASQA

SEQ ID NO: 141626 - protein, 10 aa, Influenza A virus
EAMEVASQAR

SEQ ID NO: 141627 - protein, 11 aa, Influenza A virus
EAMEVASQARH

SEQ ID NO: 141628 - protein, 11 aa, Influenza A virus
EAMEVASQARQ

SEQ ID NO: 141629 - protein, 9 aa, Influenza A virus
EAMEVASQT

SEQ ID NO: 141630 - protein, 10 aa, Influenza A virus
EAMEVASQTR

SEQ ID NO: 141631 - protein, 11 aa, Influenza A virus
EAMEVASQTRQ

SEQ ID NO: 141632 - protein, 10 aa, Influenza A virus
EIALGYSAGA

SEQ ID NO: 141633 - protein, 10 aa, Influenza A virus
EIALSYSAGA

SEQ ID NO: 141634 - protein, 9 aa, Influenza A virus
EIANQARQM

SEQ ID NO: 141635 - protein, 10 aa, Influenza A virus
EIANQARQMV

SEQ ID NO: 141636 - protein, 9 aa, Influenza A virus
EIAQKLEDV

SEQ ID NO: 141637 - protein, 9 aa, Influenza A virus
EIAQRLEDV

SEQ ID NO: 141638 - protein, 9 aa, Influenza A virus
EIAQRLENV

SEQ ID NO: 141639 - protein, 9 aa, Influenza A virus
EIARRLEDV

SEQ ID NO: 141640 - protein, 9 aa, Influenza A virus
EIASQARQM

SEQ ID NO: 141641 - protein, 10 aa, Influenza A virus
EIASQARQMV

SEQ ID NO: 141642 - protein, 10 aa, Influenza A virus
EISLSYSAGA

SEQ ID NO: 141643 - protein, 10 aa, Influenza A virus
EITFHGAKDV

SEQ ID NO: 141644 - protein, 10 aa, Influenza A virus
EITFHGAKEI

SEQ ID NO: 141645 - protein, 10 aa, Influenza A virus
EITFHGAKEV

SEQ ID NO: 141646 - protein, 10 aa, Influenza A virus
EITFYGAKEV

SEQ ID NO: 141647 - protein, 10 aa, Influenza A virus
EMTFHGAKEV

SEQ ID NO: 141648 - protein, 9 aa, Influenza A virus
EQAAEAMEV

SEQ ID NO: 141649 - protein, 9 aa, Influenza A virus
EQAANAMEV

SEQ ID NO: 141650 - protein, 9 aa, Influenza A virus
EQIADAQHR

SEQ ID NO: 141651 - protein, 9 aa, Influenza A virus
EQIADSQHR

SEQ ID NO: 141652 - protein, 11 aa, Influenza A virus
EQIADSQHRSY

SEQ ID NO: 141653 - protein, 9 aa, Influenza A virus
EQMAGSSER

SEQ ID NO: 141654 - protein, 9 aa, Influenza A virus
ERMEVAGQA

SEQ ID NO: 141655 - protein, 9 aa, Influenza A virus
ERMEVASQA

SEQ ID NO: 141656 - protein, 10 aa, Influenza A virus
ERMEVASQAR

SEQ ID NO: 141657 - protein, 9 aa, Influenza A virus
ESAFGLICA

SEQ ID NO: 141658 - protein, 10 aa, Influenza A virus
ESAFGLICAT

SEQ ID NO: 141659 - protein, 9 aa, Influenza A virus
ETTTNPLIR

SEQ ID NO: 141660 - protein, 10 aa, Influenza A virus
ETYVLSIIPS

SEQ ID NO: 141661 - protein, 8 aa, Influenza A virus
ETYVLSIV

SEQ ID NO: 141662 - protein, 10 aa, Influenza A virus
ETYVLSIVPS

SEQ ID NO: 141663 - protein, 9 aa, Influenza A virus
EVAFAVVCA

SEQ ID NO: 141664 - protein, 10 aa, Influenza A virus
EVAFAVVCAT

SEQ ID NO: 141665 - protein, 9 aa, Influenza A virus
EVAFGLLCA

SEQ ID NO: 141666 - protein, 10 aa, Influenza A virus
EVAFGLLCAT

SEQ ID NO: 141667 - protein, 9 aa, Influenza A virus
EVAFGLVCA

SEQ ID NO: 141668 - protein, 10 aa, Influenza A virus
EVAFGLVCAT

SEQ ID NO: 141669 - protein, 9 aa, Influenza A virus
EVAGQARQM

SEQ ID NO: 141670 - protein, 10 aa, Influenza A virus
EVAGQARQMV

SEQ ID NO: 141671 - protein, 9 aa, Influenza A virus
EVALGLVCA

SEQ ID NO: 141672 - protein, 10 aa, Influenza A virus
EVALGLVCAT

SEQ ID NO: 141673 - protein, 10 aa, Influenza A virus
EVALGYSTGA

SEQ ID NO: 141674 - protein, 11 aa, Influenza A virus
EVALGYSTGAL

SEQ ID NO: 141675 - protein, 10 aa, Influenza A virus
EVALSYSAGA

SEQ ID NO: 141676 - protein, 10 aa, Influenza A virus
EVALSYSTGA

SEQ ID NO: 141677 - protein, 11 aa, Influenza A virus
EVALSYSTGAL

SEQ ID NO: 141678 - protein, 9 aa, Influenza A virus
EVANQARQM

SEQ ID NO: 141679 - protein, 10 aa, Influenza A virus
EVANQARQMV

SEQ ID NO: 141680 - protein, 9 aa, Influenza A virus
EVAQGLEGV

SEQ ID NO: 141681 - protein, 10 aa, Influenza A virus
EVAQGLEGVF

SEQ ID NO: 141682 - protein, 11 aa, Influenza A virus
EVAQGLEGVFA

SEQ ID NO: 141683 - protein, 9 aa, Influenza A virus
EVASKARQM

SEQ ID NO: 141684 - protein, 10 aa, Influenza A virus
EVASKARQMV

SEQ ID NO: 141685 - protein, 9 aa, Influenza A virus
EVASQARHM

SEQ ID NO: 141686 - protein, 10 aa, Influenza A virus
EVASQARHMV

SEQ ID NO: 141687 - protein, 9 aa, Influenza A virus
EVASQARQM

SEQ ID NO: 141688 - protein, 10 aa, Influenza A virus
EVASQARQMI

SEQ ID NO: 141689 - protein, 10 aa, Influenza A virus
EVASQARQMV

SEQ ID NO: 141690 - protein, 9 aa, Influenza A virus
EVASQTRQM

SEQ ID NO: 141691 - protein, 10 aa, Influenza A virus
EVASQTRQMV

SEQ ID NO: 141692 - protein, 9 aa, Influenza A virus
EVETYVLSI

SEQ ID NO: 141693 - protein, 10 aa, Influenza A virus
EVETYVLSII

SEQ ID NO: 141694 - protein, 10 aa, Influenza A virus
EVETYVLSIV

SEQ ID NO: 141695 - protein, 10 aa, Influenza A virus
EVLLEWLKTR

SEQ ID NO: 141696 - protein, 10 aa, Influenza A virus
EVLMEWLKTR

SEQ ID NO: 141697 - protein, 9 aa, Influenza A virus
EVVLGLVCA

SEQ ID NO: 141698 - protein, 8 aa, Influenza A virus
EWLKTRPI

SEQ ID NO: 141699 - protein, 11 aa, Influenza A virus
FGLLCATCEQI

SEQ ID NO: 141700 - protein, 10 aa, Influenza A virus
FGLVCATCER

SEQ ID NO: 141701 - protein, 9 aa, Influenza A virus
FHGAKDVAL

SEQ ID NO: 141702 - protein, 11 aa, Influenza A virus
FHGAKDVALSY

SEQ ID NO: 141703 - protein, 9 aa, Influenza A virus
FHGAKEIAL

SEQ ID NO: 141704 - protein, 11 aa, Influenza A virus
FHGAKEIALSY

SEQ ID NO: 141705 - protein, 9 aa, Influenza A virus
FHGAKEISL

SEQ ID NO: 141706 - protein, 11 aa, Influenza A virus
FHGAKEISLSY

SEQ ID NO: 141707 - protein, 9 aa, Influenza A virus
FHGAKEVAL

SEQ ID NO: 141708 - protein, 11 aa, Influenza A virus
FHGAKEVALSY

SEQ ID NO: 141709 - protein, 9 aa, Influenza A virus
FLTEVETYV

SEQ ID NO: 141710 - protein, 10 aa, Influenza A virus
FLTEVETYVL

SEQ ID NO: 141711 - protein, 11 aa, Influenza A virus
FLTEVETYVLS

SEQ ID NO: 141712 - protein, 9 aa, Influenza A virus
FTLTCPSER

SEQ ID NO: 141713 - protein, 9 aa, Influenza A virus
FTLTVPGER

SEQ ID NO: 141714 - protein, 10 aa, Influenza A virus
FTLTVPGERG

SEQ ID NO: 141715 - protein, 9 aa, Influenza A virus
FTLTVPSER

SEQ ID NO: 141716 - protein, 10 aa, Influenza A virus
FTLTVPSERG

SEQ ID NO: 141717 - protein, 9 aa, Influenza A virus
FTLTVTSER

SEQ ID NO: 141718 - protein, 10 aa, Influenza A virus
FTLTVTSERG

SEQ ID NO: 141719 - protein, 11 aa, Influenza A virus
FTLTVTSERGL

SEQ ID NO: 141720 - protein, 9 aa, Influenza A virus
FVFTLTCPS

SEQ ID NO: 141721 - protein, 11 aa, Influenza A virus
FVFTLTCPSER

SEQ ID NO: 141722 - protein, 9 aa, Influenza A virus
FVFTLTVPG

SEQ ID NO: 141723 - protein, 11 aa, Influenza A virus
FVFTLTVPGER

SEQ ID NO: 141724 - protein, 9 aa, Influenza A virus
FVFTLTVPS

SEQ ID NO: 141725 - protein, 11 aa, Influenza A virus
FVFTLTVPSER

SEQ ID NO: 141726 - protein, 9 aa, Influenza A virus
FVFTLTVTS

SEQ ID NO: 141727 - protein, 11 aa, Influenza A virus
FVFTLTVTSER

SEQ ID NO: 141728 - protein, 9 aa, Influenza A virus
FYGAKEVAL

SEQ ID NO: 141729 - protein, 11 aa, Influenza A virus
FYGAKEVALSY

SEQ ID NO: 141730 - protein, 9 aa, Influenza A virus
GAKDVALSY

SEQ ID NO: 141731 - protein, 9 aa, Influenza A virus
GAKEIALGY

SEQ ID NO: 141732 - protein, 11 aa, Influenza A virus
GAKEIALGYSA

SEQ ID NO: 141733 - protein, 9 aa, Influenza A virus
GAKEIALSY

SEQ ID NO: 141734 - protein, 11 aa, Influenza A virus
GAKEIALSYSA

SEQ ID NO: 141735 - protein, 9 aa, Influenza A virus
GAKEISLSY

SEQ ID NO: 141736 - protein, 11 aa, Influenza A virus
GAKEISLSYSA

SEQ ID NO: 141737 - protein, 9 aa, Influenza A virus
GAKEVALGY

SEQ ID NO: 141738 - protein, 9 aa, Influenza A virus
GAKEVALSY

SEQ ID NO: 141739 - protein, 11 aa, Influenza A virus
GAKEVALSYSA

SEQ ID NO: 141740 - protein, 10 aa, Influenza A virus
GALASCMGLI

SEQ ID NO: 141741 - protein, 11 aa, Influenza A virus
GALASCMGLIY

SEQ ID NO: 141742 - protein, 9 aa, Influenza A virus
GALATCMGL

SEQ ID NO: 141743 - protein, 10 aa, Influenza A virus
GALATCMGLI

SEQ ID NO: 141744 - protein, 11 aa, Influenza A virus
GALATCMGLIY

SEQ ID NO: 141745 - protein, 9 aa, Influenza A virus
GAVTTEAAF

SEQ ID NO: 141746 - protein, 9 aa, Influenza A virus
GAVTTESAF

SEQ ID NO: 141747 - protein, 9 aa, Influenza A virus
GAVTTEVAF

SEQ ID NO: 141748 - protein, 9 aa, Influenza A virus
GAVTTEVVL

SEQ ID NO: 141749 - protein, 11 aa, Influenza A virus
GIHPSCGAGLK

SEQ ID NO: 141750 - protein, 9 aa, Influenza A virus
GILGFVFTL

SEQ ID NO: 141751 - protein, 10 aa, Influenza A virus
GILGFVFTLT

SEQ ID NO: 141752 - protein, 11 aa, Influenza A virus
GILGFVFTLTV

SEQ ID NO: 141753 - protein, 9 aa, Influenza A virus
GKLKREITF

SEQ ID NO: 141754 - protein, 9 aa, Influenza A virus
GLEGVFAGK

SEQ ID NO: 141755 - protein, 10 aa, Influenza A virus
GLICATCEQI

SEQ ID NO: 141756 - protein, 10 aa, Influenza A virus
GLIYDRMGTV

SEQ ID NO: 141757 - protein, 11 aa, Influenza A virus
GLIYDRMGTVT

SEQ ID NO: 141758 - protein, 9 aa, Influenza A virus
GLIYNRMGA

SEQ ID NO: 141759 - protein, 10 aa, Influenza A virus
GLIYNRMGAV

SEQ ID NO: 141760 - protein, 10 aa, Influenza A virus
GLIYNRMGTV

SEQ ID NO: 141761 - protein, 10 aa, Influenza A virus
GLKDDLIENL

SEQ ID NO: 141762 - protein, 10 aa, Influenza A virus
GLKDDLLENL

SEQ ID NO: 141763 - protein, 10 aa, Influenza A virus
GLKDNLLENL

SEQ ID NO: 141764 - protein, 10 aa, Influenza A virus
GLKNDLLENL

SEQ ID NO: 141765 - protein, 10 aa, Influenza A virus
GLKSDLLENL

SEQ ID NO: 141766 - protein, 10 aa, Influenza A virus
GLLCATCEQI

SEQ ID NO: 141767 - protein, 10 aa, Influenza A virus
GLRDDLLENL

SEQ ID NO: 141768 - protein, 10 aa, Influenza A virus
GLRDNLLENL

SEQ ID NO: 141769 - protein, 10 aa, Influenza A virus
GLVCATCEHI

SEQ ID NO: 141770 - protein, 10 aa, Influenza A virus
GLVCATCEQI

SEQ ID NO: 141771 - protein, 9 aa, Influenza A virus
GLVCATCER

SEQ ID NO: 141772 - protein, 10 aa, Influenza A virus
GLVCATCERI

SEQ ID NO: 141773 - protein, 11 aa, Influenza A virus
GPLKAQIAQRL

SEQ ID NO: 141774 - protein, 9 aa, Influenza A virus
GQARQMVQA

SEQ ID NO: 141775 - protein, 10 aa, Influenza A virus
GQARQMVQAM

SEQ ID NO: 141776 - protein, 9 aa, Influenza A virus
GRNTDLEAL

SEQ ID NO: 141777 - protein, 10 aa, Influenza A virus
GRNTDLEALM

SEQ ID NO: 141778 - protein, 9 aa, Influenza A virus
GSSEQAAER

SEQ ID NO: 141779 - protein, 11 aa, Influenza A virus
GTHPNSSAGLR

SEQ ID NO: 141780 - protein, 11 aa, Influenza A virus
GTHPNSSTGLK

SEQ ID NO: 141781 - protein, 11 aa, Influenza A virus
GTHPNSSTGLR

SEQ ID NO: 141782 - protein, 9 aa, Influenza A virus
GTHPRSSAG

SEQ ID NO: 141783 - protein, 11 aa, Influenza A virus
GTHPRSSAGLK

SEQ ID NO: 141784 - protein, 11 aa, Influenza A virus
GTHPSSSAGLK

SEQ ID NO: 141785 - protein, 11 aa, Influenza A virus
GTHPSSSAGLR

SEQ ID NO: 141786 - protein, 11 aa, Influenza A virus
GTHPSSSTGLK

SEQ ID NO: 141787 - protein, 11 aa, Influenza A virus
GTPPSSSAGLK

SEQ ID NO: 141788 - protein, 9 aa, Influenza A virus
GTVTTEAAF

SEQ ID NO: 141789 - protein, 9 aa, Influenza A virus
GTVTTEGAF

SEQ ID NO: 141790 - protein, 9 aa, Influenza A virus
GTVTTEVAF

SEQ ID NO: 141791 - protein, 9 aa, Influenza A virus
GVLGFVFTL

SEQ ID NO: 141792 - protein, 10 aa, Influenza A virus
GVLGFVFTLT

SEQ ID NO: 141793 - protein, 11 aa, Influenza A virus
GVLGFVFTLTV

SEQ ID NO: 141794 - protein, 8 aa, Influenza A virus
GVQMQRFR

SEQ ID NO: 141795 - protein, 9 aa, Influenza A virus
HAMRTIGTH

SEQ ID NO: 141796 - protein, 8 aa, Influenza A virus
HENRMVLA

SEQ ID NO: 141797 - protein, 9 aa, Influenza A virus
HENRMVLAC

SEQ ID NO: 141798 - protein, 9 aa, Influenza A virus
HENRMVLAS

SEQ ID NO: 141799 - protein, 10 aa, Influenza A virus
HENRMVLASI

SEQ ID NO: 141800 - protein, 9 aa, Influenza A virus
HENRMVLTS

SEQ ID NO: 141801 - protein, 8 aa, Influenza A virus
HENRMVLV

SEQ ID NO: 141802 - protein, 9 aa, Influenza A virus
HENRMVLVS

SEQ ID NO: 141803 - protein, 10 aa, Influenza A virus
HENRMVLVST

SEQ ID NO: 141804 - protein, 8 aa, Influenza A virus
HENRMVMA

SEQ ID NO: 141805 - protein, 9 aa, Influenza A virus
HENRMVMAS

SEQ ID NO: 141806 - protein, 10 aa, Influenza A virus
HGAKDVALSY

SEQ ID NO: 141807 - protein, 10 aa, Influenza A virus
HGAKEIALGY

SEQ ID NO: 141808 - protein, 10 aa, Influenza A virus
HGAKEIALSY

SEQ ID NO: 141809 - protein, 10 aa, Influenza A virus
HGAKEISLSY

SEQ ID NO: 141810 - protein, 10 aa, Influenza A virus
HGAKEVALGY

SEQ ID NO: 141811 - protein, 10 aa, Influenza A virus
HGAKEVALSY

SEQ ID NO: 141812 - protein, 11 aa, Influenza A virus
HIADSQHRSHR

SEQ ID NO: 141813 - protein, 9 aa, Influenza A virus
HKSHRQMVI

SEQ ID NO: 141814 - protein, 9 aa, Influenza A virus
HMVQAMRTI

SEQ ID NO: 141815 - protein, 8 aa, Influenza A virus
HPNSSAGL

SEQ ID NO: 141816 - protein, 9 aa, Influenza A virus
HPNSSAGLR

SEQ ID NO: 141817 - protein, 8 aa, Influenza A virus
HPNSSTGL

SEQ ID NO: 141818 - protein, 9 aa, Influenza A virus
HPNSSTGLR

SEQ ID NO: 141819 - protein, 8 aa, Influenza A virus
HPRSSAGL

SEQ ID NO: 141820 - protein, 8 aa, Influenza A virus
HPSCGAGL

SEQ ID NO: 141821 - protein, 8 aa, Influenza A virus
HPSSSAGL

SEQ ID NO: 141822 - protein, 9 aa, Influenza A virus
HPSSSAGLR

SEQ ID NO: 141823 - protein, 8 aa, Influenza A virus
HPSSSTGL

SEQ ID NO: 141824 - protein, 9 aa, Influenza A virus
HPSSSTGLK

SEQ ID NO: 141825 - protein, 11 aa, Influenza A virus
HRQIVTTTNPL

SEQ ID NO: 141826 - protein, 11 aa, Influenza A virus
HRQMATATNPL

SEQ ID NO: 141827 - protein, 11 aa, Influenza A virus
HRQMATITNPL

SEQ ID NO: 141828 - protein, 11 aa, Influenza A virus
HRQMATTTNPL

SEQ ID NO: 141829 - protein, 11 aa, Influenza A virus
HRQMETTTNPL

SEQ ID NO: 141830 - protein, 11 aa, Influenza A virus
HRQMMTTTNPL

SEQ ID NO: 141831 - protein, 11 aa, Influenza A virus
HRQMTTTTNPL

SEQ ID NO: 141832 - protein, 11 aa, Influenza A virus
HRQMVATTNPL

SEQ ID NO: 141833 - protein, 11 aa, Influenza A virus
HRQMVITTNPL

SEQ ID NO: 141834 - protein, 11 aa, Influenza A virus
HRQMVTTINPL

SEQ ID NO: 141835 - protein, 11 aa, Influenza A virus
HRQMVTTTNPL

SEQ ID NO: 141836 - protein, 10 aa, Influenza A virus
HRSHRQMATA

SEQ ID NO: 141837 - protein, 10 aa, Influenza A virus
HRSHRQMATI

SEQ ID NO: 141838 - protein, 9 aa, Influenza A virus
HRSHRQMVA

SEQ ID NO: 141839 - protein, 9 aa, Influenza A virus
HRSHRQMVI

SEQ ID NO: 141840 - protein, 11 aa, Influenza A virus
HRSHRQMVTTI

SEQ ID NO: 141841 - protein, 9 aa, Influenza A virus
HRSLRQMVA

SEQ ID NO: 141842 - protein, 9 aa, Influenza A virus
HTAKAMEQM

SEQ ID NO: 141843 - protein, 10 aa, Influenza A virus
HTAKAMEQMA

SEQ ID NO: 141844 - protein, 9 aa, Influenza A virus
IADSQHRSL

SEQ ID NO: 141845 - protein, 10 aa, Influenza A virus
IADSQHRSLR

SEQ ID NO: 141846 - protein, 9 aa, Influenza A virus
IADSQHRSY

SEQ ID NO: 141847 - protein, 10 aa, Influenza A virus
IADSQHRSYR

SEQ ID NO: 141848 - protein, 9 aa, Influenza A virus
IALGYSAGA

SEQ ID NO: 141849 - protein, 10 aa, Influenza A virus
IALGYSAGAL

SEQ ID NO: 141850 - protein, 10 aa, Influenza A virus
IALSYSAGAL

SEQ ID NO: 141851 - protein, 8 aa, Influenza A virus
IANQARQM

SEQ ID NO: 141852 - protein, 9 aa, Influenza A virus
IANQARQMV

SEQ ID NO: 141853 - protein, 9 aa, Influenza A virus
IAQKLEDVF

SEQ ID NO: 141854 - protein, 9 aa, Influenza A virus
IAQRLEDVF

SEQ ID NO: 141855 - protein, 9 aa, Influenza A virus
IAQRLENVF

SEQ ID NO: 141856 - protein, 9 aa, Influenza A virus
IARRLEDVF

SEQ ID NO: 141857 - protein, 8 aa, Influenza A virus
IASQARQM

SEQ ID NO: 141858 - protein, 9 aa, Influenza A virus
IASQARQMV

SEQ ID NO: 141859 - protein, 8 aa, Influenza A virus
ILGFVFTL

SEQ ID NO: 141860 - protein, 9 aa, Influenza A virus
ILGFVFTLT

SEQ ID NO: 141861 - protein, 10 aa, Influenza A virus
ILGFVFTLTV

SEQ ID NO: 141862 - protein, 9 aa, Influenza A virus
ILSPLTKGI

SEQ ID NO: 141863 - protein, 10 aa, Influenza A virus
ILSPLTKGIL

SEQ ID NO: 141864 - protein, 9 aa, Influenza A virus
ILSPLTKGV

SEQ ID NO: 141865 - protein, 10 aa, Influenza A virus
ILSPLTKGVL

SEQ ID NO: 141866 - protein, 10 aa, Influenza A virus
IPSGPLKAEI

SEQ ID NO: 141867 - protein, 9 aa, Influenza A virus
IQAMRTIGI

SEQ ID NO: 141868 - protein, 10 aa, Influenza A virus
IQAMRTIGIH

SEQ ID NO: 141869 - protein, 9 aa, Influenza A virus
IRHENRMVL

SEQ ID NO: 141870 - protein, 9 aa, Influenza A virus
IRHENRMVM

SEQ ID NO: 141871 - protein, 10 aa, Influenza A virus
ISLSYSAGAL

SEQ ID NO: 141872 - protein, 9 aa, Influenza A virus
ITAKAMEQM

SEQ ID NO: 141873 - protein, 9 aa, Influenza A virus
ITFHGAKDV

SEQ ID NO: 141874 - protein, 11 aa, Influenza A virus
ITFHGAKDVAL

SEQ ID NO: 141875 - protein, 9 aa, Influenza A virus
ITFHGAKEI

SEQ ID NO: 141876 - protein, 11 aa, Influenza A virus
ITFHGAKEIAL

SEQ ID NO: 141877 - protein, 11 aa, Influenza A virus
ITFHGAKEISL

SEQ ID NO: 141878 - protein, 9 aa, Influenza A virus
ITFHGAKEV

SEQ ID NO: 141879 - protein, 11 aa, Influenza A virus
ITFHGAKEVAL

SEQ ID NO: 141880 - protein, 9 aa, Influenza A virus
ITFYGAKEV

SEQ ID NO: 141881 - protein, 11 aa, Influenza A virus
ITFYGAKEVAL

SEQ ID NO: 141882 - protein, 11 aa, Influenza A virus
ITNPLIRHENR

SEQ ID NO: 141883 - protein, 9 aa, Influenza A virus
IVTTTNPLI

SEQ ID NO: 141884 - protein, 10 aa, Influenza A virus
IVTTTNPLIR

SEQ ID NO: 141885 - protein, 9 aa, Influenza A virus
KAIKLYKKL

SEQ ID NO: 141886 - protein, 10 aa, Influenza A virus
KAIKLYKKLK

SEQ ID NO: 141887 - protein, 11 aa, Influenza A virus
KAIKLYKKLKR

SEQ ID NO: 141888 - protein, 9 aa, Influenza A virus
KARQMVQAM

SEQ ID NO: 141889 - protein, 10 aa, Influenza A virus
KARQMVQAMR

SEQ ID NO: 141890 - protein, 9 aa, Influenza A virus
KAVKLYGKL

SEQ ID NO: 141891 - protein, 10 aa, Influenza A virus
KAVKLYGKLK

SEQ ID NO: 141892 - protein, 11 aa, Influenza A virus
KAVKLYGKLKR

SEQ ID NO: 141893 - protein, 9 aa, Influenza A virus
KAVKLYKKL

SEQ ID NO: 141894 - protein, 10 aa, Influenza A virus
KAVKLYKKLK

SEQ ID NO: 141895 - protein, 11 aa, Influenza A virus
KAVKLYKKLKR

SEQ ID NO: 141896 - protein, 9 aa, Influenza A virus
KAVKLYRKI

SEQ ID NO: 141897 - protein, 10 aa, Influenza A virus
KAVKLYRKIK

SEQ ID NO: 141898 - protein, 11 aa, Influenza A virus
KAVKLYRKIKR

SEQ ID NO: 141899 - protein, 9 aa, Influenza A virus
KAVKLYRKL

SEQ ID NO: 141900 - protein, 10 aa, Influenza A virus
KAVKLYRKLK

SEQ ID NO: 141901 - protein, 11 aa, Influenza A virus
KAVKLYRKLKR

SEQ ID NO: 141902 - protein, 11 aa, Influenza A virus
KDDLIENLQAY

SEQ ID NO: 141903 - protein, 11 aa, Influenza A virus
KDDLLENLQAY

SEQ ID NO: 141904 - protein, 11 aa, Influenza A virus
KDDLLENLQTY

SEQ ID NO: 141905 - protein, 11 aa, Influenza A virus
KDNLLENLQAY

SEQ ID NO: 141906 - protein, 9 aa, Influenza A virus
KEIALGYSA

SEQ ID NO: 141907 - protein, 10 aa, Influenza A virus
KEIALGYSAG

SEQ ID NO: 141908 - protein, 11 aa, Influenza A virus
KEIALGYSAGA

SEQ ID NO: 141909 - protein, 9 aa, Influenza A virus
KEIALSYSA

SEQ ID NO: 141910 - protein, 10 aa, Influenza A virus
KEIALSYSAG

SEQ ID NO: 141911 - protein, 11 aa, Influenza A virus
KEIALSYSAGA

SEQ ID NO: 141912 - protein, 9 aa, Influenza A virus
KEISLSYSA

SEQ ID NO: 141913 - protein, 10 aa, Influenza A virus
KEISLSYSAG

SEQ ID NO: 141914 - protein, 11 aa, Influenza A virus
KEISLSYSAGA

SEQ ID NO: 141915 - protein, 9 aa, Influenza A virus
KEVALGYST

SEQ ID NO: 141916 - protein, 11 aa, Influenza A virus
KEVALGYSTGA

SEQ ID NO: 141917 - protein, 9 aa, Influenza A virus
KEVALSYSA

SEQ ID NO: 141918 - protein, 10 aa, Influenza A virus
KEVALSYSAG

SEQ ID NO: 141919 - protein, 11 aa, Influenza A virus
KEVALSYSAGA

SEQ ID NO: 141920 - protein, 9 aa, Influenza A virus
KEVALSYST

SEQ ID NO: 141921 - protein, 11 aa, Influenza A virus
KEVALSYSTGA

SEQ ID NO: 141922 - protein, 10 aa, Influenza A virus
KGILGFVFTL

SEQ ID NO: 141923 - protein, 10 aa, Influenza A virus
KGVLGFVFTL

SEQ ID NO: 141924 - protein, 9 aa, Influenza A virus
KIKREITFH

SEQ ID NO: 141925 - protein, 10 aa, Influenza A virus
KIKREITFHG

SEQ ID NO: 141926 - protein, 11 aa, Influenza A virus
KIKREITFHGA

SEQ ID NO: 141927 - protein, 9 aa, Influenza A virus
KKLKRDVTF

SEQ ID NO: 141928 - protein, 9 aa, Influenza A virus
KKLKREITF

SEQ ID NO: 141929 - protein, 9 aa, Influenza A virus
KKLKREMTF

SEQ ID NO: 141930 - protein, 9 aa, Influenza A virus
KLEDVFAGK

SEQ ID NO: 141931 - protein, 10 aa, Influenza A virus
KLKRDVTFHG

SEQ ID NO: 141932 - protein, 9 aa, Influenza A virus
KLKREITFH

SEQ ID NO: 141933 - protein, 10 aa, Influenza A virus
KLKREITFHG

SEQ ID NO: 141934 - protein, 9 aa, Influenza A virus
KLKREITFY

SEQ ID NO: 141935 - protein, 10 aa, Influenza A virus
KLKREITFYG

SEQ ID NO: 141936 - protein, 9 aa, Influenza A virus
KLKREMTFH

SEQ ID NO: 141937 - protein, 8 aa, Influenza A virus
KLYGKLKR

SEQ ID NO: 141938 - protein, 10 aa, Influenza A virus
KLYGKLKREI

SEQ ID NO: 141939 - protein, 8 aa, Influenza A virus
KLYKKLKR

SEQ ID NO: 141940 - protein, 10 aa, Influenza A virus
KLYKKLKRDV

SEQ ID NO: 141941 - protein, 10 aa, Influenza A virus
KLYKKLKREI

SEQ ID NO: 141942 - protein, 8 aa, Influenza A virus
KLYRKIKR

SEQ ID NO: 141943 - protein, 10 aa, Influenza A virus
KLYRKIKREI

SEQ ID NO: 141944 - protein, 8 aa, Influenza A virus
KLYRKLKR

SEQ ID NO: 141945 - protein, 10 aa, Influenza A virus
KLYRKLKREI

SEQ ID NO: 141946 - protein, 11 aa, Influenza A virus
KNADLEALMEW

SEQ ID NO: 141947 - protein, 11 aa, Influenza A virus
KNDLLENLQAY

SEQ ID NO: 141948 - protein, 11 aa, Influenza A virus
KNTDLEALMEW

SEQ ID NO: 141949 - protein, 11 aa, Influenza A virus
KNTDLEALTEW

SEQ ID NO: 141950 - protein, 11 aa, Influenza A virus
KNTDLEVLLEW

SEQ ID NO: 141951 - protein, 11 aa, Influenza A virus
KNTDLEVLMEW

SEQ ID NO: 141952 - protein, 9 aa, Influenza A virus
KRDVTFHGA

SEQ ID NO: 141953 - protein, 10 aa, Influenza A virus
KRDVTFHGAK

SEQ ID NO: 141954 - protein, 10 aa, Influenza A virus
KREITFHGAK

SEQ ID NO: 141955 - protein, 9 aa, Influenza A virus
KREITFYGA

SEQ ID NO: 141956 - protein, 10 aa, Influenza A virus
KREITFYGAK

SEQ ID NO: 141957 - protein, 9 aa, Influenza A virus
KREMTFHGA

SEQ ID NO: 141958 - protein, 10 aa, Influenza A virus
KREMTFHGAK

SEQ ID NO: 141959 - protein, 9 aa, Influenza A virus
KRMGVQIQR

SEQ ID NO: 141960 - protein, 10 aa, Influenza A virus
KRMGVQIQRF

SEQ ID NO: 141961 - protein, 11 aa, Influenza A virus
KRMGVQIQRFK

SEQ ID NO: 141962 - protein, 9 aa, Influenza A virus
KRMGVQLQR

SEQ ID NO: 141963 - protein, 10 aa, Influenza A virus
KRMGVQLQRF

SEQ ID NO: 141964 - protein, 11 aa, Influenza A virus
KRMGVQLQRFK

SEQ ID NO: 141965 - protein, 9 aa, Influenza A virus
KRMGVQMQR

SEQ ID NO: 141966 - protein, 10 aa, Influenza A virus
KRMGVQMQRF

SEQ ID NO: 141967 - protein, 11 aa, Influenza A virus
KRMGVQMQRFK

SEQ ID NO: 141968 - protein, 11 aa, Influenza A virus
KRMGVQMQRFR

SEQ ID NO: 141969 - protein, 8 aa, Influenza A virus
KRMGVQMR

SEQ ID NO: 141970 - protein, 9 aa, Influenza A virus
KRMGVQMRR

SEQ ID NO: 141971 - protein, 10 aa, Influenza A virus
KRMGVQMRRF

SEQ ID NO: 141972 - protein, 11 aa, Influenza A virus
KRMGVQMRRFK

SEQ ID NO: 141973 - protein, 9 aa, Influenza A virus
KRMGVQVQR

SEQ ID NO: 141974 - protein, 10 aa, Influenza A virus
KRMGVQVQRF

SEQ ID NO: 141975 - protein, 11 aa, Influenza A virus
KRMGVQVQRFK

SEQ ID NO: 141976 - protein, 11 aa, Influenza A virus
KSDLLENLQAY

SEQ ID NO: 141977 - protein, 9 aa, Influenza A virus
KSHRQMVIT

SEQ ID NO: 141978 - protein, 10 aa, Influenza A virus
KSHRQMVITT

SEQ ID NO: 141979 - protein, 9 aa, Influenza A virus
KSHRQMVTT

SEQ ID NO: 141980 - protein, 10 aa, Influenza A virus
KSHRQMVTTT

SEQ ID NO: 141981 - protein, 9 aa, Influenza A virus
KTMEQVAGS

SEQ ID NO: 141982 - protein, 8 aa, Influenza A virus
KTRPILSP

SEQ ID NO: 141983 - protein, 9 aa, Influenza A virus
KTRPILSPL

SEQ ID NO: 141984 - protein, 10 aa, Influenza A virus
KTRPILSPLT

SEQ ID NO: 141985 - protein, 11 aa, Influenza A virus
KTRPILSPLTK

SEQ ID NO: 141986 - protein, 9 aa, Influenza A virus
LACTTAKAM

SEQ ID NO: 141987 - protein, 9 aa, Influenza A virus
LASCMGLIY

SEQ ID NO: 141988 - protein, 11 aa, Influenza A virus
LASCMGLIYDR

SEQ ID NO: 141989 - protein, 11 aa, Influenza A virus
LASCMGLIYNR

SEQ ID NO: 141990 - protein, 9 aa, Influenza A virus
LASHTAKAM

SEQ ID NO: 141991 - protein, 9 aa, Influenza A virus
LASITAKAM

SEQ ID NO: 141992 - protein, 9 aa, Influenza A virus
LASTTAKAM

SEQ ID NO: 141993 - protein, 9 aa, Influenza A virus
LASTTAKTM

SEQ ID NO: 141994 - protein, 9 aa, Influenza A virus
LATCMGLIY

SEQ ID NO: 141995 - protein, 11 aa, Influenza A virus
LATCMGLIYNR

SEQ ID NO: 141996 - protein, 8 aa, Influenza A virus
LEALMEWL

SEQ ID NO: 141997 - protein, 8 aa, Influenza A virus
LEALTEWL

SEQ ID NO: 141998 - protein, 10 aa, Influenza A virus
LEDVFAGKNA

SEQ ID NO: 141999 - protein, 8 aa, Influenza A virus
LEVLLEWL

SEQ ID NO: 142000 - protein, 8 aa, Influenza A virus
LEVLMEWL

SEQ ID NO: 142001 - protein, 9 aa, Influenza A virus
LEWLKTRPI

SEQ ID NO: 142002 - protein, 10 aa, Influenza A virus
LEWLKTRPIL

SEQ ID NO: 142003 - protein, 9 aa, Influenza A virus
LGFVFTLTV

SEQ ID NO: 142004 - protein, 10 aa, Influenza A virus
LIENLQAYQK

SEQ ID NO: 142005 - protein, 11 aa, Influenza A virus
LIENLQAYQKR

SEQ ID NO: 142006 - protein, 10 aa, Influenza A virus
LIRHENRMVL

SEQ ID NO: 142007 - protein, 10 aa, Influenza A virus
LIRHENRMVM

SEQ ID NO: 142008 - protein, 9 aa, Influenza A virus
LIYDRMGTV

SEQ ID NO: 142009 - protein, 10 aa, Influenza A virus
LIYDRMGTVT

SEQ ID NO: 142010 - protein, 9 aa, Influenza A virus
LIYNRMGAV

SEQ ID NO: 142011 - protein, 10 aa, Influenza A virus
LIYNRMGAVT

SEQ ID NO: 142012 - protein, 9 aa, Influenza A virus
LIYNRMGTV

SEQ ID NO: 142013 - protein, 10 aa, Influenza A virus
LIYNRMGTVT

SEQ ID NO: 142014 - protein, 9 aa, Influenza A virus
LKAEIAQKL

SEQ ID NO: 142015 - protein, 9 aa, Influenza A virus
LKAEIAQRL

SEQ ID NO: 142016 - protein, 9 aa, Influenza A virus
LKAEIARRL

SEQ ID NO: 142017 - protein, 9 aa, Influenza A virus
LKAQIAQRL

SEQ ID NO: 142018 - protein, 8 aa, Influenza A virus
LKREITFY

SEQ ID NO: 142019 - protein, 10 aa, Influenza A virus
LKTRPILSPL

SEQ ID NO: 142020 - protein, 9 aa, Influenza A virus
LLCATCEQI

SEQ ID NO: 142021 - protein, 10 aa, Influenza A virus
LLCATCEQIA

SEQ ID NO: 142022 - protein, 10 aa, Influenza A virus
LLENLQAYQK

SEQ ID NO: 142023 - protein, 11 aa, Influenza A virus
LLENLQAYQKR

SEQ ID NO: 142024 - protein, 11 aa, Influenza A virus
LLENLQAYQNR

SEQ ID NO: 142025 - protein, 10 aa, Influenza A virus
LLENLQTYQK

SEQ ID NO: 142026 - protein, 11 aa, Influenza A virus
LLENLQTYQKR

SEQ ID NO: 142027 - protein, 10 aa, Influenza A virus
LLEWLKTRPI

SEQ ID NO: 142028 - protein, 9 aa, Influenza A virus
LLTEVETYV

SEQ ID NO: 142029 - protein, 10 aa, Influenza A virus
LLTEVETYVL

SEQ ID NO: 142030 - protein, 11 aa, Influenza A virus
LLTEVETYVLS

SEQ ID NO: 142031 - protein, 10 aa, Influenza A virus
LMEWLKTRPI

SEQ ID NO: 142032 - protein, 11 aa, Influenza A virus
LMEWLKTRPIL

SEQ ID NO: 142033 - protein, 8 aa, Influenza A virus
LPTEVETY

SEQ ID NO: 142034 - protein, 9 aa, Influenza A virus
LPTEVETYV

SEQ ID NO: 142035 - protein, 10 aa, Influenza A virus
LPTEVETYVL

SEQ ID NO: 142036 - protein, 10 aa, Influenza A virus
LQAYQKRMGV

SEQ ID NO: 142037 - protein, 8 aa, Influenza A virus
LQAYQNRM

SEQ ID NO: 142038 - protein, 10 aa, Influenza A virus
LQAYQNRMGV

SEQ ID NO: 142039 - protein, 10 aa, Influenza A virus
LQRRRFVQNA

SEQ ID NO: 142040 - protein, 11 aa, Influenza A virus
LQRRRFVQNAL

SEQ ID NO: 142041 - protein, 10 aa, Influenza A virus
LQTYQKRMGV

SEQ ID NO: 142042 - protein, 9 aa, Influenza A virus
LRDDLLENL

SEQ ID NO: 142043 - protein, 9 aa, Influenza A virus
LRDNLLENL

SEQ ID NO: 142044 - protein, 11 aa, Influenza A virus
LRQMVATTNPL

SEQ ID NO: 142045 - protein, 9 aa, Influenza A virus
LSIIPSGPL

SEQ ID NO: 142046 - protein, 10 aa, Influenza A virus
LSIIPSGPLK

SEQ ID NO: 142047 - protein, 9 aa, Influenza A virus
LSIVPSGPL

SEQ ID NO: 142048 - protein, 10 aa, Influenza A virus
LSIVPSGPLK

SEQ ID NO: 142049 - protein, 9 aa, Influenza A virus
LSPLTKGIL

SEQ ID NO: 142050 - protein, 11 aa, Influenza A virus
LSPLTKGILGF

SEQ ID NO: 142051 - protein, 9 aa, Influenza A virus
LSPLTKGVL

SEQ ID NO: 142052 - protein, 11 aa, Influenza A virus
LSPLTKGVLGF

SEQ ID NO: 142053 - protein, 8 aa, Influenza A virus
LSYSAGAL

SEQ ID NO: 142054 - protein, 9 aa, Influenza A virus
LSYSAGALA

SEQ ID NO: 142055 - protein, 8 aa, Influenza A virus
LSYSTGAL

SEQ ID NO: 142056 - protein, 9 aa, Influenza A virus
LSYSTGALA

SEQ ID NO: 142057 - protein, 9 aa, Influenza A virus
LTCPSERGL

SEQ ID NO: 142058 - protein, 11 aa, Influenza A virus
LTCPSERGLQR

SEQ ID NO: 142059 - protein, 10 aa, Influenza A virus
LTEWLKTRPI

SEQ ID NO: 142060 - protein, 8 aa, Influenza A virus
LTKGILGF

SEQ ID NO: 142061 - protein, 9 aa, Influenza A virus
LTKGILGFV

SEQ ID NO: 142062 - protein, 10 aa, Influenza A virus
LTKGILGFVF

SEQ ID NO: 142063 - protein, 8 aa, Influenza A virus
LTKGVLGF

SEQ ID NO: 142064 - protein, 9 aa, Influenza A virus
LTKGVLGFV

SEQ ID NO: 142065 - protein, 10 aa, Influenza A virus
LTKGVLGFVF

SEQ ID NO: 142066 - protein, 9 aa, Influenza A virus
LTSTTAKAM

SEQ ID NO: 142067 - protein, 9 aa, Influenza A virus
LTVPGERGL

SEQ ID NO: 142068 - protein, 11 aa, Influenza A virus
LTVPGERGLQR

SEQ ID NO: 142069 - protein, 9 aa, Influenza A virus
LTVPSERGL

SEQ ID NO: 142070 - protein, 11 aa, Influenza A virus
LTVPSERGLQR

SEQ ID NO: 142071 - protein, 9 aa, Influenza A virus
LTVTSERGL

SEQ ID NO: 142072 - protein, 9 aa, Influenza A virus
LVCATCEHI

SEQ ID NO: 142073 - protein, 9 aa, Influenza A virus
LVSTTAKAM

SEQ ID NO: 142074 - protein, 9 aa, Influenza A virus
LYGKLKREI

SEQ ID NO: 142075 - protein, 11 aa, Influenza A virus
LYGKLKREITF

SEQ ID NO: 142076 - protein, 11 aa, Influenza A virus
LYKKLKRDVTF

SEQ ID NO: 142077 - protein, 11 aa, Influenza A virus
LYKKLKREITF

SEQ ID NO: 142078 - protein, 9 aa, Influenza A virus
LYKKLKREM

SEQ ID NO: 142079 - protein, 11 aa, Influenza A virus
LYKKLKREMTF

SEQ ID NO: 142080 - protein, 9 aa, Influenza A virus
LYRKIKREI

SEQ ID NO: 142081 - protein, 11 aa, Influenza A virus
LYRKIKREITF

SEQ ID NO: 142082 - protein, 11 aa, Influenza A virus
LYRKLKREITF

SEQ ID NO: 142083 - protein, 11 aa, Influenza A virus
MAGSSEQAAER

SEQ ID NO: 142084 - protein, 9 aa, Influenza A virus
MASTTAKAM

SEQ ID NO: 142085 - protein, 8 aa, Influenza A virus
MATATNPL

SEQ ID NO: 142086 - protein, 9 aa, Influenza A virus
MATATNPLI

SEQ ID NO: 142087 - protein, 10 aa, Influenza A virus
MATATNPLIR

SEQ ID NO: 142088 - protein, 8 aa, Influenza A virus
MATITNPL

SEQ ID NO: 142089 - protein, 9 aa, Influenza A virus
MATITNPLI

SEQ ID NO: 142090 - protein, 10 aa, Influenza A virus
MATITNPLIR

SEQ ID NO: 142091 - protein, 8 aa, Influenza A virus
MATTTNPL

SEQ ID NO: 142092 - protein, 9 aa, Influenza A virus
MATTTNPLI

SEQ ID NO: 142093 - protein, 10 aa, Influenza A virus
MATTTNPLIR

SEQ ID NO: 142094 - protein, 9 aa, Influenza A virus
MDKAVKLYR

SEQ ID NO: 142095 - protein, 9 aa, Influenza A virus
MDRAVKLYK

SEQ ID NO: 142096 - protein, 10 aa, Influenza A virus
MDRAVKLYKK

SEQ ID NO: 142097 - protein, 9 aa, Influenza A virus
MDRAVKLYR

SEQ ID NO: 142098 - protein, 10 aa, Influenza A virus
MDRAVKLYRK

SEQ ID NO: 142099 - protein, 10 aa, Influenza A virus
MEIANQARQM

SEQ ID NO: 142100 - protein, 11 aa, Influenza A virus
MEIANQARQMV

SEQ ID NO: 142101 - protein, 10 aa, Influenza A virus
MEIASQARQM

SEQ ID NO: 142102 - protein, 11 aa, Influenza A virus
MEIASQARQMV

SEQ ID NO: 142103 - protein, 11 aa, Influenza A virus
MEQMAGSNEQA

SEQ ID NO: 142104 - protein, 11 aa, Influenza A virus
MEQMAGSSEQA

SEQ ID NO: 142105 - protein, 10 aa, Influenza A virus
MEQMAGSSER

SEQ ID NO: 142106 - protein, 11 aa, Influenza A virus
MEQMAGSSERA

SEQ ID NO: 142107 - protein, 11 aa, Influenza A virus
MEQVAGSSEQA

SEQ ID NO: 142108 - protein, 8 aa, Influenza A virus
METTTNPL

SEQ ID NO: 142109 - protein, 9 aa, Influenza A virus
METTTNPLI

SEQ ID NO: 142110 - protein, 10 aa, Influenza A virus
METTTNPLIR

SEQ ID NO: 142111 - protein, 10 aa, Influenza A virus
MEVAGQARQM

SEQ ID NO: 142112 - protein, 10 aa, Influenza A virus
MEVANQARQM

SEQ ID NO: 142113 - protein, 10 aa, Influenza A virus
MEVASKARQM

SEQ ID NO: 142114 - protein, 10 aa, Influenza A virus
MEVASQARHM

SEQ ID NO: 142115 - protein, 10 aa, Influenza A virus
MEVASQARQM

SEQ ID NO: 142116 - protein, 10 aa, Influenza A virus
MEVASQTRQM

SEQ ID NO: 142117 - protein, 9 aa, Influenza A virus
MEWLKTRPI

SEQ ID NO: 142118 - protein, 10 aa, Influenza A virus
MEWLKTRPIL

SEQ ID NO: 142119 - protein, 11 aa, Influenza A virus
MEWLKTRPILS

SEQ ID NO: 142120 - protein, 10 aa, Influenza A virus
MGAVTTEAAF

SEQ ID NO: 142121 - protein, 10 aa, Influenza A virus
MGAVTTESAF

SEQ ID NO: 142122 - protein, 10 aa, Influenza A virus
MGAVTTEVAF

SEQ ID NO: 142123 - protein, 9 aa, Influenza A virus
MGAVTTEVV

SEQ ID NO: 142124 - protein, 10 aa, Influenza A virus
MGAVTTEVVL

SEQ ID NO: 142125 - protein, 11 aa, Influenza A virus
MGLIYDRMGTV

SEQ ID NO: 142126 - protein, 10 aa, Influenza A virus
MGLIYNRMGA

SEQ ID NO: 142127 - protein, 11 aa, Influenza A virus
MGLIYNRMGAV

SEQ ID NO: 142128 - protein, 11 aa, Influenza A virus
MGLIYNRMGTV

SEQ ID NO: 142129 - protein, 10 aa, Influenza A virus
MGTVTTEAAF

SEQ ID NO: 142130 - protein, 10 aa, Influenza A virus
MGTVTTEGAF

SEQ ID NO: 142131 - protein, 10 aa, Influenza A virus
MGTVTTEVAF

SEQ ID NO: 142132 - protein, 10 aa, Influenza A virus
MGTVTTEVAL

SEQ ID NO: 142133 - protein, 9 aa, Influenza A virus
MGVQIQRFK

SEQ ID NO: 142134 - protein, 9 aa, Influenza A virus
MGVQLQRFK

SEQ ID NO: 142135 - protein, 9 aa, Influenza A virus
MGVQMQRFK

SEQ ID NO: 142136 - protein, 9 aa, Influenza A virus
MGVQMQRFR

SEQ ID NO: 142137 - protein, 9 aa, Influenza A virus
MGVQMRRFK

SEQ ID NO: 142138 - protein, 9 aa, Influenza A virus
MGVQVQRFK

SEQ ID NO: 142139 - protein, 10 aa, Influenza A virus
MIQAMRTIGI

SEQ ID NO: 142140 - protein, 8 aa, Influenza A virus
MMTTTNPL

SEQ ID NO: 142141 - protein, 9 aa, Influenza A virus
MMTTTNPLI

SEQ ID NO: 142142 - protein, 10 aa, Influenza A virus
MMTTTNPLIR

SEQ ID NO: 142143 - protein, 9 aa, Influenza A virus
MRAIGTHPR

SEQ ID NO: 142144 - protein, 9 aa, Influenza A virus
MRAIGTHPS

SEQ ID NO: 142145 - protein, 9 aa, Influenza A virus
MRAIGTPPS

SEQ ID NO: 142146 - protein, 9 aa, Influenza A virus
MRTIGIHPS

SEQ ID NO: 142147 - protein, 9 aa, Influenza A virus
MRVIGTHPS

SEQ ID NO: 142148 - protein, 10 aa, Influenza A virus
MSFLTEVETY

SEQ ID NO: 142149 - protein, 11 aa, Influenza A virus
MSFLTEVETYV

SEQ ID NO: 142150 - protein, 10 aa, Influenza A virus
MSLLTEVETY

SEQ ID NO: 142151 - protein, 11 aa, Influenza A virus
MSLLTEVETYV

SEQ ID NO: 142152 - protein, 10 aa, Influenza A virus
MSLPTEVETY

SEQ ID NO: 142153 - protein, 11 aa, Influenza A virus
MSLPTEVETYV

SEQ ID NO: 142154 - protein, 9 aa, Influenza A virus
MTFHGAKEV

SEQ ID NO: 142155 - protein, 10 aa, Influenza A virus
MTFHGAKEVA

SEQ ID NO: 142156 - protein, 11 aa, Influenza A virus
MTFHGAKEVAL

SEQ ID NO: 142157 - protein, 9 aa, Influenza A virus
MTTTNPLIR

SEQ ID NO: 142158 - protein, 8 aa, Influenza A virus
MTTTTNPL

SEQ ID NO: 142159 - protein, 9 aa, Influenza A virus
MTTTTNPLI

SEQ ID NO: 142160 - protein, 10 aa, Influenza A virus
MTTTTNPLIR

SEQ ID NO: 142161 - protein, 9 aa, Influenza A virus
MVATTNPLI

SEQ ID NO: 142162 - protein, 10 aa, Influenza A virus
MVATTNPLIR

SEQ ID NO: 142163 - protein, 9 aa, Influenza A virus
MVHAMRTIG

SEQ ID NO: 142164 - protein, 8 aa, Influenza A virus
MVITTNPL

SEQ ID NO: 142165 - protein, 9 aa, Influenza A virus
MVITTNPLI

SEQ ID NO: 142166 - protein, 10 aa, Influenza A virus
MVITTNPLIR

SEQ ID NO: 142167 - protein, 9 aa, Influenza A virus
MVLACTTAK

SEQ ID NO: 142168 - protein, 10 aa, Influenza A virus
MVLACTTAKA

SEQ ID NO: 142169 - protein, 11 aa, Influenza A virus
MVLACTTAKAM

SEQ ID NO: 142170 - protein, 9 aa, Influenza A virus
MVLASHTAK

SEQ ID NO: 142171 - protein, 10 aa, Influenza A virus
MVLASHTAKA

SEQ ID NO: 142172 - protein, 11 aa, Influenza A virus
MVLASHTAKAM

SEQ ID NO: 142173 - protein, 9 aa, Influenza A virus
MVLASITAK

SEQ ID NO: 142174 - protein, 10 aa, Influenza A virus
MVLASITAKA

SEQ ID NO: 142175 - protein, 11 aa, Influenza A virus
MVLASITAKAM

SEQ ID NO: 142176 - protein, 9 aa, Influenza A virus
MVLASTTAK

SEQ ID NO: 142177 - protein, 10 aa, Influenza A virus
MVLASTTAKA

SEQ ID NO: 142178 - protein, 11 aa, Influenza A virus
MVLASTTAKAM

SEQ ID NO: 142179 - protein, 10 aa, Influenza A virus
MVLASTTAKT

SEQ ID NO: 142180 - protein, 11 aa, Influenza A virus
MVLASTTAKTM

SEQ ID NO: 142181 - protein, 9 aa, Influenza A virus
MVLTSTTAK

SEQ ID NO: 142182 - protein, 10 aa, Influenza A virus
MVLTSTTAKA

SEQ ID NO: 142183 - protein, 11 aa, Influenza A virus
MVLTSTTAKAM

SEQ ID NO: 142184 - protein, 9 aa, Influenza A virus
MVLVSTTAK

SEQ ID NO: 142185 - protein, 10 aa, Influenza A virus
MVLVSTTAKA

SEQ ID NO: 142186 - protein, 11 aa, Influenza A virus
MVLVSTTAKAM

SEQ ID NO: 142187 - protein, 9 aa, Influenza A virus
MVMASTTAK

SEQ ID NO: 142188 - protein, 10 aa, Influenza A virus
MVMASTTAKA

SEQ ID NO: 142189 - protein, 11 aa, Influenza A virus
MVMASTTAKAM

SEQ ID NO: 142190 - protein, 10 aa, Influenza A virus
MVQAMITIGT

SEQ ID NO: 142191 - protein, 9 aa, Influenza A virus
MVTTINPLI

SEQ ID NO: 142192 - protein, 10 aa, Influenza A virus
MVTTINPLIR

SEQ ID NO: 142193 - protein, 9 aa, Influenza A virus
MVTTTNPLI

SEQ ID NO: 142194 - protein, 10 aa, Influenza A virus
MVTTTNPLIR

SEQ ID NO: 142195 - protein, 10 aa, Influenza A virus
NADLEALMEW

SEQ ID NO: 142196 - protein, 9 aa, Influenza A virus
NAMEVASQA

SEQ ID NO: 142197 - protein, 10 aa, Influenza A virus
NAMEVASQAR

SEQ ID NO: 142198 - protein, 10 aa, Influenza A virus
NDLLENLQAY

SEQ ID NO: 142199 - protein, 8 aa, Influenza A virus
NEQAAEAM

SEQ ID NO: 142200 - protein, 9 aa, Influenza A virus
NLLENLQAY

SEQ ID NO: 142201 - protein, 11 aa, Influenza A virus
NLQAYQKRMGV

SEQ ID NO: 142202 - protein, 11 aa, Influenza A virus
NLQAYQNRMGV

SEQ ID NO: 142203 - protein, 11 aa, Influenza A virus
NLQTYQKRMGV

SEQ ID NO: 142204 - protein, 9 aa, Influenza A virus
NMDKAIKLY

SEQ ID NO: 142205 - protein, 10 aa, Influenza A virus
NMDKAIKLYK

SEQ ID NO: 142206 - protein, 9 aa, Influenza A virus
NMDKAVKLY

SEQ ID NO: 142207 - protein, 10 aa, Influenza A virus
NMDKAVKLYK

SEQ ID NO: 142208 - protein, 10 aa, Influenza A virus
NMDKAVKLYR

SEQ ID NO: 142209 - protein, 9 aa, Influenza A virus
NMDRAVKLY

SEQ ID NO: 142210 - protein, 10 aa, Influenza A virus
NMDRAVKLYK

SEQ ID NO: 142211 - protein, 10 aa, Influenza A virus
NMDRAVKLYR

SEQ ID NO: 142212 - protein, 10 aa, Influenza A virus
NNMDKAIKLY

SEQ ID NO: 142213 - protein, 11 aa, Influenza A virus
NNMDKAVKLYR

SEQ ID NO: 142214 - protein, 9 aa, Influenza A virus
NNMDRAVKL

SEQ ID NO: 142215 - protein, 10 aa, Influenza A virus
NNMDRAVKLY

SEQ ID NO: 142216 - protein, 11 aa, Influenza A virus
NNMDRAVKLYR

SEQ ID NO: 142217 - protein, 10 aa, Influenza A virus
NPLIRHENRM

SEQ ID NO: 142218 - protein, 9 aa, Influenza A virus
NQARQMVQA

SEQ ID NO: 142219 - protein, 10 aa, Influenza A virus
NQARQMVQAM

SEQ ID NO: 142220 - protein, 10 aa, Influenza A virus
NRMGAVTTEA

SEQ ID NO: 142221 - protein, 11 aa, Influenza A virus
NRMGAVTTEAA

SEQ ID NO: 142222 - protein, 11 aa, Influenza A virus
NRMGAVTTESA

SEQ ID NO: 142223 - protein, 10 aa, Influenza A virus
NRMGAVTTEV

SEQ ID NO: 142224 - protein, 11 aa, Influenza A virus
NRMGAVTTEVA

SEQ ID NO: 142225 - protein, 11 aa, Influenza A virus
NRMGAVTTEVV

SEQ ID NO: 142226 - protein, 10 aa, Influenza A virus
NRMGTVTTEA

SEQ ID NO: 142227 - protein, 11 aa, Influenza A virus
NRMGTVTTEAA

SEQ ID NO: 142228 - protein, 11 aa, Influenza A virus
NRMGTVTTEGA

SEQ ID NO: 142229 - protein, 10 aa, Influenza A virus
NRMGTVTTEV

SEQ ID NO: 142230 - protein, 11 aa, Influenza A virus
NRMGTVTTEVA

SEQ ID NO: 142231 - protein, 9 aa, Influenza A virus
NRMGVQMQR

SEQ ID NO: 142232 - protein, 10 aa, Influenza A virus
NRMGVQMQRF

SEQ ID NO: 142233 - protein, 11 aa, Influenza A virus
NRMGVQMQRFK

SEQ ID NO: 142234 - protein, 9 aa, Influenza A virus
NRMVLACTT

SEQ ID NO: 142235 - protein, 10 aa, Influenza A virus
NRMVLACTTA

SEQ ID NO: 142236 - protein, 11 aa, Influenza A virus
NRMVLACTTAK

SEQ ID NO: 142237 - protein, 9 aa, Influenza A virus
NRMVLASHT

SEQ ID NO: 142238 - protein, 10 aa, Influenza A virus
NRMVLASHTA

SEQ ID NO: 142239 - protein, 11 aa, Influenza A virus
NRMVLASHTAK

SEQ ID NO: 142240 - protein, 8 aa, Influenza A virus
NRMVLASI

SEQ ID NO: 142241 - protein, 9 aa, Influenza A virus
NRMVLASIT

SEQ ID NO: 142242 - protein, 10 aa, Influenza A virus
NRMVLASITA

SEQ ID NO: 142243 - protein, 11 aa, Influenza A virus
NRMVLASITAK

SEQ ID NO: 142244 - protein, 9 aa, Influenza A virus
NRMVLASTT

SEQ ID NO: 142245 - protein, 10 aa, Influenza A virus
NRMVLASTTA

SEQ ID NO: 142246 - protein, 11 aa, Influenza A virus
NRMVLASTTAK

SEQ ID NO: 142247 - protein, 9 aa, Influenza A virus
NRMVLTSTT

SEQ ID NO: 142248 - protein, 10 aa, Influenza A virus
NRMVLTSTTA

SEQ ID NO: 142249 - protein, 11 aa, Influenza A virus
NRMVLTSTTAK

SEQ ID NO: 142250 - protein, 9 aa, Influenza A virus
NRMVLVSTT

SEQ ID NO: 142251 - protein, 10 aa, Influenza A virus
NRMVLVSTTA

SEQ ID NO: 142252 - protein, 11 aa, Influenza A virus
NRMVLVSTTAK

SEQ ID NO: 142253 - protein, 9 aa, Influenza A virus
NRMVMASTT

SEQ ID NO: 142254 - protein, 10 aa, Influenza A virus
NRMVMASTTA

SEQ ID NO: 142255 - protein, 11 aa, Influenza A virus
NRMVMASTTAK

SEQ ID NO: 142256 - protein, 10 aa, Influenza A virus
NTDLEALMEW

SEQ ID NO: 142257 - protein, 10 aa, Influenza A virus
NTDLEALTEW

SEQ ID NO: 142258 - protein, 10 aa, Influenza A virus
NTDLEVLLEW

SEQ ID NO: 142259 - protein, 10 aa, Influenza A virus
NTDLEVLMEW

SEQ ID NO: 142260 - protein, 10 aa, Influenza A virus
PILSPLTKGI

SEQ ID NO: 142261 - protein, 10 aa, Influenza A virus
PILSPLTKGV

SEQ ID NO: 142262 - protein, 9 aa, Influenza A virus
PLKAQIAQR

SEQ ID NO: 142263 - protein, 11 aa, Influenza A virus
QAAEAMEVASK

SEQ ID NO: 142264 - protein, 11 aa, Influenza A virus
QAMRAIGTHPR

SEQ ID NO: 142265 - protein, 9 aa, Influenza A virus
QARHMVQAM

SEQ ID NO: 142266 - protein, 10 aa, Influenza A virus
QARHMVQAMR

SEQ ID NO: 142267 - protein, 9 aa, Influenza A virus
QARQMIQAM

SEQ ID NO: 142268 - protein, 10 aa, Influenza A virus
QARQMIQAMR

SEQ ID NO: 142269 - protein, 9 aa, Influenza A virus
QARQMVHAM

SEQ ID NO: 142270 - protein, 10 aa, Influenza A virus
QARQMVHAMR

SEQ ID NO: 142271 - protein, 9 aa, Influenza A virus
QARQMVQAM

SEQ ID NO: 142272 - protein, 10 aa, Influenza A virus
QARQMVQAMI

SEQ ID NO: 142273 - protein, 10 aa, Influenza A virus
QARQMVQAMR

SEQ ID NO: 142274 - protein, 9 aa, Influenza A virus
QAYQKRMGV

SEQ ID NO: 142275 - protein, 9 aa, Influenza A virus
QAYQNRMGV

SEQ ID NO: 142276 - protein, 9 aa, Influenza A virus
QHRSHRQMM

SEQ ID NO: 142277 - protein, 11 aa, Influenza A virus
QIADAQHRSHR

SEQ ID NO: 142278 - protein, 11 aa, Influenza A virus
QIADSQHKSHR

SEQ ID NO: 142279 - protein, 11 aa, Influenza A virus
QIADSQHQSHR

SEQ ID NO: 142280 - protein, 11 aa, Influenza A virus
QIADSQHRSHR

SEQ ID NO: 142281 - protein, 11 aa, Influenza A virus
QIADSQHRSLR

SEQ ID NO: 142282 - protein, 10 aa, Influenza A virus
QIADSQHRSY

SEQ ID NO: 142283 - protein, 11 aa, Influenza A virus
QIADSQHRSYR

SEQ ID NO: 142284 - protein, 11 aa, Influenza A virus
QIADSQHTSHR

SEQ ID NO: 142285 - protein, 9 aa, Influenza A virus
QIAQRLEDV

SEQ ID NO: 142286 - protein, 9 aa, Influenza A virus
QIVTTTNPL

SEQ ID NO: 142287 - protein, 11 aa, Influenza A virus
QIVTTTNPLIR

SEQ ID NO: 142288 - protein, 10 aa, Influenza A virus
QKRMGVQIQR

SEQ ID NO: 142289 - protein, 11 aa, Influenza A virus
QKRMGVQIQRF

SEQ ID NO: 142290 - protein, 10 aa, Influenza A virus
QKRMGVQLQR

SEQ ID NO: 142291 - protein, 11 aa, Influenza A virus
QKRMGVQLQRF

SEQ ID NO: 142292 - protein, 10 aa, Influenza A virus
QKRMGVQMQR

SEQ ID NO: 142293 - protein, 11 aa, Influenza A virus
QKRMGVQMQRF

SEQ ID NO: 142294 - protein, 10 aa, Influenza A virus
QKRMGVQMRR

SEQ ID NO: 142295 - protein, 11 aa, Influenza A virus
QKRMGVQMRRF

SEQ ID NO: 142296 - protein, 10 aa, Influenza A virus
QKRMGVQVQR

SEQ ID NO: 142297 - protein, 11 aa, Influenza A virus
QKRMGVQVQRF

SEQ ID NO: 142298 - protein, 9 aa, Influenza A virus
QMAGSNEQA

SEQ ID NO: 142299 - protein, 9 aa, Influenza A virus
QMAGSSEQA

SEQ ID NO: 142300 - protein, 9 aa, Influenza A virus
QMAGSSERA

SEQ ID NO: 142301 - protein, 9 aa, Influenza A virus
QMATATNPL

SEQ ID NO: 142302 - protein, 10 aa, Influenza A virus
QMATATNPLI

SEQ ID NO: 142303 - protein, 11 aa, Influenza A virus
QMATATNPLIR

SEQ ID NO: 142304 - protein, 9 aa, Influenza A virus
QMATITNPL

SEQ ID NO: 142305 - protein, 10 aa, Influenza A virus
QMATITNPLI

SEQ ID NO: 142306 - protein, 11 aa, Influenza A virus
QMATITNPLIR

SEQ ID NO: 142307 - protein, 9 aa, Influenza A virus
QMATTTNPL

SEQ ID NO: 142308 - protein, 10 aa, Influenza A virus
QMATTTNPLI

SEQ ID NO: 142309 - protein, 11 aa, Influenza A virus
QMATTTNPLIR

SEQ ID NO: 142310 - protein, 9 aa, Influenza A virus
QMETTTNPL

SEQ ID NO: 142311 - protein, 9 aa, Influenza A virus
QMIQAMRTI

SEQ ID NO: 142312 - protein, 11 aa, Influenza A virus
QMIQAMRTIGI

SEQ ID NO: 142313 - protein, 9 aa, Influenza A virus
QMMTTTNPL

SEQ ID NO: 142314 - protein, 10 aa, Influenza A virus
QMMTTTNPLI

SEQ ID NO: 142315 - protein, 11 aa, Influenza A virus
QMMTTTNPLIR

SEQ ID NO: 142316 - protein, 9 aa, Influenza A virus
QMTTTTNPL

SEQ ID NO: 142317 - protein, 10 aa, Influenza A virus
QMTTTTNPLI

SEQ ID NO: 142318 - protein, 11 aa, Influenza A virus
QMTTTTNPLIR

SEQ ID NO: 142319 - protein, 9 aa, Influenza A virus
QMVATTNPL

SEQ ID NO: 142320 - protein, 10 aa, Influenza A virus
QMVATTNPLI

SEQ ID NO: 142321 - protein, 11 aa, Influenza A virus
QMVATTNPLIR

SEQ ID NO: 142322 - protein, 9 aa, Influenza A virus
QMVHAMRTI

SEQ ID NO: 142323 - protein, 9 aa, Influenza A virus
QMVITTNPL

SEQ ID NO: 142324 - protein, 10 aa, Influenza A virus
QMVITTNPLI

SEQ ID NO: 142325 - protein, 11 aa, Influenza A virus
QMVITTNPLIR

SEQ ID NO: 142326 - protein, 9 aa, Influenza A virus
QMVQAMITI

SEQ ID NO: 142327 - protein, 9 aa, Influenza A virus
QMVQAMRAI

SEQ ID NO: 142328 - protein, 9 aa, Influenza A virus
QMVQAMRTI

SEQ ID NO: 142329 - protein, 9 aa, Influenza A virus
QMVQAMRTV

SEQ ID NO: 142330 - protein, 9 aa, Influenza A virus
QMVQAMRVI

SEQ ID NO: 142331 - protein, 9 aa, Influenza A virus
QMVTTINPL

SEQ ID NO: 142332 - protein, 10 aa, Influenza A virus
QMVTTINPLI

SEQ ID NO: 142333 - protein, 11 aa, Influenza A virus
QMVTTINPLIR

SEQ ID NO: 142334 - protein, 9 aa, Influenza A virus
QMVTTTNPL

SEQ ID NO: 142335 - protein, 10 aa, Influenza A virus
QMVTTTNPLI

SEQ ID NO: 142336 - protein, 11 aa, Influenza A virus
QMVTTTNPLIR

SEQ ID NO: 142337 - protein, 10 aa, Influenza A virus
QNRMGVQMQR

SEQ ID NO: 142338 - protein, 10 aa, Influenza A virus
QRLEDVFAGK

SEQ ID NO: 142339 - protein, 10 aa, Influenza A virus
QRLEDVFAGR

SEQ ID NO: 142340 - protein, 9 aa, Influenza A virus
QRLENVFAG

SEQ ID NO: 142341 - protein, 10 aa, Influenza A virus
QRLENVFAGK

SEQ ID NO: 142342 - protein, 10 aa, Influenza A virus
QRRRFVQNAL

SEQ ID NO: 142343 - protein, 9 aa, Influenza A virus
QTRQMVQAM

SEQ ID NO: 142344 - protein, 10 aa, Influenza A virus
QTRQMVQAMR

SEQ ID NO: 142345 - protein, 9 aa, Influenza A virus
QTYQKRMGV

SEQ ID NO: 142346 - protein, 11 aa, Influenza A virus
QTYQKRMGVQM

SEQ ID NO: 142347 - protein, 9 aa, Influenza A virus
QVAGSSEQA

SEQ ID NO: 142348 - protein, 8 aa, Influenza A virus
RAAEAMEV

SEQ ID NO: 142349 - protein, 9 aa, Influenza A virus
RAAEAMEVA

SEQ ID NO: 142350 - protein, 8 aa, Influenza A virus
RAIGTHPR

SEQ ID NO: 142351 - protein, 9 aa, Influenza A virus
RAIGTHPRS

SEQ ID NO: 142352 - protein, 9 aa, Influenza A virus
RAIGTHPSS

SEQ ID NO: 142353 - protein, 9 aa, Influenza A virus
RAVKLYKKL

SEQ ID NO: 142354 - protein, 10 aa, Influenza A virus
RAVKLYKKLK

SEQ ID NO: 142355 - protein, 11 aa, Influenza A virus
RAVKLYKKLKR

SEQ ID NO: 142356 - protein, 9 aa, Influenza A virus
RAVKLYRKL

SEQ ID NO: 142357 - protein, 10 aa, Influenza A virus
RAVKLYRKLK

SEQ ID NO: 142358 - protein, 11 aa, Influenza A virus
RAVKLYRKLKR

SEQ ID NO: 142359 - protein, 11 aa, Influenza A virus
RDDLLENLQAY

SEQ ID NO: 142360 - protein, 11 aa, Influenza A virus
RDNLLENLQAY

SEQ ID NO: 142361 - protein, 8 aa, Influenza A virus
REITFHGA

SEQ ID NO: 142362 - protein, 11 aa, Influenza A virus
REITFHGAKDV

SEQ ID NO: 142363 - protein, 11 aa, Influenza A virus
REITFHGAKEI

SEQ ID NO: 142364 - protein, 11 aa, Influenza A virus
REITFHGAKEV

SEQ ID NO: 142365 - protein, 8 aa, Influenza A virus
REITFYGA

SEQ ID NO: 142366 - protein, 9 aa, Influenza A virus
REITFYGAK

SEQ ID NO: 142367 - protein, 11 aa, Influenza A virus
REITFYGAKEV

SEQ ID NO: 142368 - protein, 8 aa, Influenza A virus
REMTFHGA

SEQ ID NO: 142369 - protein, 9 aa, Influenza A virus
REMTFHGAK

SEQ ID NO: 142370 - protein, 11 aa, Influenza A virus
REMTFHGAKEV

SEQ ID NO: 142371 - protein, 9 aa, Influenza A virus
RGLQRRRFV

SEQ ID NO: 142372 - protein, 10 aa, Influenza A virus
RHENRMVLAC

SEQ ID NO: 142373 - protein, 10 aa, Influenza A virus
RHMVQAMRTI

SEQ ID NO: 142374 - protein, 11 aa, Influenza A virus
RIADSQHRSHR

SEQ ID NO: 142375 - protein, 9 aa, Influenza A virus
RKIKREITF

SEQ ID NO: 142376 - protein, 9 aa, Influenza A virus
RKLKREITF

SEQ ID NO: 142377 - protein, 10 aa, Influenza A virus
RKLKREITFY

SEQ ID NO: 142378 - protein, 9 aa, Influenza A virus
RLEDVFAGK

SEQ ID NO: 142379 - protein, 9 aa, Influenza A virus
RLEDVFAGR

SEQ ID NO: 142380 - protein, 9 aa, Influenza A virus
RLENVFAGK

SEQ ID NO: 142381 - protein, 9 aa, Influenza A virus
RMEVAGQAR

SEQ ID NO: 142382 - protein, 11 aa, Influenza A virus
RMEVAGQARQM

SEQ ID NO: 142383 - protein, 9 aa, Influenza A virus
RMEVASQAR

SEQ ID NO: 142384 - protein, 11 aa, Influenza A virus
RMEVASQARQM

SEQ ID NO: 142385 - protein, 9 aa, Influenza A virus
RMGAVTTEA

SEQ ID NO: 142386 - protein, 10 aa, Influenza A virus
RMGAVTTEAA

SEQ ID NO: 142387 - protein, 11 aa, Influenza A virus
RMGAVTTEAAF

SEQ ID NO: 142388 - protein, 10 aa, Influenza A virus
RMGAVTTESA

SEQ ID NO: 142389 - protein, 11 aa, Influenza A virus
RMGAVTTESAF

SEQ ID NO: 142390 - protein, 9 aa, Influenza A virus
RMGAVTTEV

SEQ ID NO: 142391 - protein, 10 aa, Influenza A virus
RMGAVTTEVA

SEQ ID NO: 142392 - protein, 11 aa, Influenza A virus
RMGAVTTEVAF

SEQ ID NO: 142393 - protein, 10 aa, Influenza A virus
RMGAVTTEVV

SEQ ID NO: 142394 - protein, 11 aa, Influenza A virus
RMGAVTTEVVL

SEQ ID NO: 142395 - protein, 9 aa, Influenza A virus
RMGTVTTEA

SEQ ID NO: 142396 - protein, 10 aa, Influenza A virus
RMGTVTTEAA

SEQ ID NO: 142397 - protein, 11 aa, Influenza A virus
RMGTVTTEAAF

SEQ ID NO: 142398 - protein, 10 aa, Influenza A virus
RMGTVTTEGA

SEQ ID NO: 142399 - protein, 11 aa, Influenza A virus
RMGTVTTEGAF

SEQ ID NO: 142400 - protein, 9 aa, Influenza A virus
RMGTVTTEV

SEQ ID NO: 142401 - protein, 10 aa, Influenza A virus
RMGTVTTEVA

SEQ ID NO: 142402 - protein, 11 aa, Influenza A virus
RMGTVTTEVAF

SEQ ID NO: 142403 - protein, 11 aa, Influenza A virus
RMGTVTTEVAL

SEQ ID NO: 142404 - protein, 8 aa, Influenza A virus
RMGVQIQR

SEQ ID NO: 142405 - protein, 9 aa, Influenza A virus
RMGVQIQRF

SEQ ID NO: 142406 - protein, 10 aa, Influenza A virus
RMGVQIQRFK

SEQ ID NO: 142407 - protein, 8 aa, Influenza A virus
RMGVQLQR

SEQ ID NO: 142408 - protein, 9 aa, Influenza A virus
RMGVQLQRF

SEQ ID NO: 142409 - protein, 10 aa, Influenza A virus
RMGVQLQRFK

SEQ ID NO: 142410 - protein, 8 aa, Influenza A virus
RMGVQMQR

SEQ ID NO: 142411 - protein, 9 aa, Influenza A virus
RMGVQMQRF

SEQ ID NO: 142412 - protein, 10 aa, Influenza A virus
RMGVQMQRFK

SEQ ID NO: 142413 - protein, 10 aa, Influenza A virus
RMGVQMQRFR

SEQ ID NO: 142414 - protein, 8 aa, Influenza A virus
RMGVQMRR

SEQ ID NO: 142415 - protein, 9 aa, Influenza A virus
RMGVQMRRF

SEQ ID NO: 142416 - protein, 10 aa, Influenza A virus
RMGVQMRRFK

SEQ ID NO: 142417 - protein, 8 aa, Influenza A virus
RMGVQVQR

SEQ ID NO: 142418 - protein, 9 aa, Influenza A virus
RMGVQVQRF

SEQ ID NO: 142419 - protein, 10 aa, Influenza A virus
RMGVQVQRFK

SEQ ID NO: 142420 - protein, 9 aa, Influenza A virus
RMVLACTTA

SEQ ID NO: 142421 - protein, 10 aa, Influenza A virus
RMVLACTTAK

SEQ ID NO: 142422 - protein, 11 aa, Influenza A virus
RMVLACTTAKA

SEQ ID NO: 142423 - protein, 9 aa, Influenza A virus
RMVLASHTA

SEQ ID NO: 142424 - protein, 10 aa, Influenza A virus
RMVLASHTAK

SEQ ID NO: 142425 - protein, 11 aa, Influenza A virus
RMVLASHTAKA

SEQ ID NO: 142426 - protein, 9 aa, Influenza A virus
RMVLASITA

SEQ ID NO: 142427 - protein, 10 aa, Influenza A virus
RMVLASITAK

SEQ ID NO: 142428 - protein, 11 aa, Influenza A virus
RMVLASITAKA

SEQ ID NO: 142429 - protein, 9 aa, Influenza A virus
RMVLASTTA

SEQ ID NO: 142430 - protein, 10 aa, Influenza A virus
RMVLASTTAK

SEQ ID NO: 142431 - protein, 11 aa, Influenza A virus
RMVLASTTAKA

SEQ ID NO: 142432 - protein, 11 aa, Influenza A virus
RMVLASTTAKT

SEQ ID NO: 142433 - protein, 9 aa, Influenza A virus
RMVLTSTTA

SEQ ID NO: 142434 - protein, 10 aa, Influenza A virus
RMVLTSTTAK

SEQ ID NO: 142435 - protein, 11 aa, Influenza A virus
RMVLTSTTAKA

SEQ ID NO: 142436 - protein, 9 aa, Influenza A virus
RMVLVSTTA

SEQ ID NO: 142437 - protein, 10 aa, Influenza A virus
RMVLVSTTAK

SEQ ID NO: 142438 - protein, 11 aa, Influenza A virus
RMVLVSTTAKA

SEQ ID NO: 142439 - protein, 9 aa, Influenza A virus
RMVMASTTA

SEQ ID NO: 142440 - protein, 10 aa, Influenza A virus
RMVMASTTAK

SEQ ID NO: 142441 - protein, 11 aa, Influenza A virus
RMVMASTTAKA

SEQ ID NO: 142442 - protein, 11 aa, Influenza A virus
RNTDLEALMEW

SEQ ID NO: 142443 - protein, 11 aa, Influenza A virus
RPILSPLTKGI

SEQ ID NO: 142444 - protein, 11 aa, Influenza A virus
RPILSPLTKGV

SEQ ID NO: 142445 - protein, 10 aa, Influenza A virus
RQIVTTTNPL

SEQ ID NO: 142446 - protein, 11 aa, Influenza A virus
RQIVTTTNPLI

SEQ ID NO: 142447 - protein, 9 aa, Influenza A virus
RQMATATNP

SEQ ID NO: 142448 - protein, 10 aa, Influenza A virus
RQMATATNPL

SEQ ID NO: 142449 - protein, 11 aa, Influenza A virus
RQMATATNPLI

SEQ ID NO: 142450 - protein, 9 aa, Influenza A virus
RQMATITNP

SEQ ID NO: 142451 - protein, 10 aa, Influenza A virus
RQMATITNPL

SEQ ID NO: 142452 - protein, 11 aa, Influenza A virus
RQMATITNPLI

SEQ ID NO: 142453 - protein, 9 aa, Influenza A virus
RQMATTTNP

SEQ ID NO: 142454 - protein, 10 aa, Influenza A virus
RQMATTTNPL

SEQ ID NO: 142455 - protein, 11 aa, Influenza A virus
RQMATTTNPLI

SEQ ID NO: 142456 - protein, 9 aa, Influenza A virus
RQMETTTNP

SEQ ID NO: 142457 - protein, 10 aa, Influenza A virus
RQMETTTNPL

SEQ ID NO: 142458 - protein, 11 aa, Influenza A virus
RQMETTTNPLI

SEQ ID NO: 142459 - protein, 8 aa, Influenza A virus
RQMIQAMR

SEQ ID NO: 142460 - protein, 9 aa, Influenza A virus
RQMIQAMRT

SEQ ID NO: 142461 - protein, 10 aa, Influenza A virus
RQMIQAMRTI

SEQ ID NO: 142462 - protein, 9 aa, Influenza A virus
RQMMTTTNP

SEQ ID NO: 142463 - protein, 10 aa, Influenza A virus
RQMMTTTNPL

SEQ ID NO: 142464 - protein, 11 aa, Influenza A virus
RQMMTTTNPLI

SEQ ID NO: 142465 - protein, 9 aa, Influenza A virus
RQMTTTTNP

SEQ ID NO: 142466 - protein, 10 aa, Influenza A virus
RQMTTTTNPL

SEQ ID NO: 142467 - protein, 11 aa, Influenza A virus
RQMTTTTNPLI

SEQ ID NO: 142468 - protein, 9 aa, Influenza A virus
RQMVATTNP

SEQ ID NO: 142469 - protein, 10 aa, Influenza A virus
RQMVATTNPL

SEQ ID NO: 142470 - protein, 11 aa, Influenza A virus
RQMVATTNPLI

SEQ ID NO: 142471 - protein, 8 aa, Influenza A virus
RQMVHAMR

SEQ ID NO: 142472 - protein, 9 aa, Influenza A virus
RQMVHAMRT

SEQ ID NO: 142473 - protein, 10 aa, Influenza A virus
RQMVHAMRTI

SEQ ID NO: 142474 - protein, 9 aa, Influenza A virus
RQMVITTNP

SEQ ID NO: 142475 - protein, 10 aa, Influenza A virus
RQMVITTNPL

SEQ ID NO: 142476 - protein, 11 aa, Influenza A virus
RQMVITTNPLI

SEQ ID NO: 142477 - protein, 8 aa, Influenza A virus
RQMVQAMI

SEQ ID NO: 142478 - protein, 9 aa, Influenza A virus
RQMVQAMIT

SEQ ID NO: 142479 - protein, 10 aa, Influenza A virus
RQMVQAMITI

SEQ ID NO: 142480 - protein, 8 aa, Influenza A virus
RQMVQAMR

SEQ ID NO: 142481 - protein, 9 aa, Influenza A virus
RQMVQAMRA

SEQ ID NO: 142482 - protein, 10 aa, Influenza A virus
RQMVQAMRAI

SEQ ID NO: 142483 - protein, 9 aa, Influenza A virus
RQMVQAMRT

SEQ ID NO: 142484 - protein, 10 aa, Influenza A virus
RQMVQAMRTI

SEQ ID NO: 142485 - protein, 10 aa, Influenza A virus
RQMVQAMRTV

SEQ ID NO: 142486 - protein, 9 aa, Influenza A virus
RQMVQAMRV

SEQ ID NO: 142487 - protein, 10 aa, Influenza A virus
RQMVQAMRVI

SEQ ID NO: 142488 - protein, 9 aa, Influenza A virus
RQMVTTINP

SEQ ID NO: 142489 - protein, 10 aa, Influenza A virus
RQMVTTINPL

SEQ ID NO: 142490 - protein, 11 aa, Influenza A virus
RQMVTTINPLI

SEQ ID NO: 142491 - protein, 9 aa, Influenza A virus
RQMVTTTNP

SEQ ID NO: 142492 - protein, 10 aa, Influenza A virus
RQMVTTTNPL

SEQ ID NO: 142493 - protein, 11 aa, Influenza A virus
RQMVTTTNPLI

SEQ ID NO: 142494 - protein, 8 aa, Influenza A virus
RRFVQNAL

SEQ ID NO: 142495 - protein, 9 aa, Influenza A virus
RRFVQNALN

SEQ ID NO: 142496 - protein, 10 aa, Influenza A virus
RRFVQNALNG

SEQ ID NO: 142497 - protein, 9 aa, Influenza A virus
RRFVQNALS

SEQ ID NO: 142498 - protein, 10 aa, Influenza A virus
RRFVQNALSG

SEQ ID NO: 142499 - protein, 9 aa, Influenza A virus
RRLEDVFAG

SEQ ID NO: 142500 - protein, 10 aa, Influenza A virus
RRLEDVFAGK

SEQ ID NO: 142501 - protein, 11 aa, Influenza A virus
RRLEDVFAGKN

SEQ ID NO: 142502 - protein, 9 aa, Influenza A virus
RRRFVQNAL

SEQ ID NO: 142503 - protein, 10 aa, Influenza A virus
RRRFVQNALN

SEQ ID NO: 142504 - protein, 10 aa, Influenza A virus
RRRFVQNALS

SEQ ID NO: 142505 - protein, 9 aa, Influenza A virus
RSHRQIVTT

SEQ ID NO: 142506 - protein, 10 aa, Influenza A virus
RSHRQIVTTT

SEQ ID NO: 142507 - protein, 9 aa, Influenza A virus
RSHRQMATA

SEQ ID NO: 142508 - protein, 10 aa, Influenza A virus
RSHRQMATAT

SEQ ID NO: 142509 - protein, 9 aa, Influenza A virus
RSHRQMATI

SEQ ID NO: 142510 - protein, 10 aa, Influenza A virus
RSHRQMATIT

SEQ ID NO: 142511 - protein, 9 aa, Influenza A virus
RSHRQMATT

SEQ ID NO: 142512 - protein, 10 aa, Influenza A virus
RSHRQMATTT

SEQ ID NO: 142513 - protein, 9 aa, Influenza A virus
RSHRQMETT

SEQ ID NO: 142514 - protein, 10 aa, Influenza A virus
RSHRQMETTT

SEQ ID NO: 142515 - protein, 9 aa, Influenza A virus
RSHRQMMTT

SEQ ID NO: 142516 - protein, 10 aa, Influenza A virus
RSHRQMMTTT

SEQ ID NO: 142517 - protein, 9 aa, Influenza A virus
RSHRQMTTT

SEQ ID NO: 142518 - protein, 10 aa, Influenza A virus
RSHRQMTTTT

SEQ ID NO: 142519 - protein, 8 aa, Influenza A virus
RSHRQMVA

SEQ ID NO: 142520 - protein, 9 aa, Influenza A virus
RSHRQMVAT

SEQ ID NO: 142521 - protein, 10 aa, Influenza A virus
RSHRQMVATT

SEQ ID NO: 142522 - protein, 9 aa, Influenza A virus
RSHRQMVIT

SEQ ID NO: 142523 - protein, 10 aa, Influenza A virus
RSHRQMVITT

SEQ ID NO: 142524 - protein, 9 aa, Influenza A virus
RSHRQMVTT

SEQ ID NO: 142525 - protein, 10 aa, Influenza A virus
RSHRQMVTTI

SEQ ID NO: 142526 - protein, 10 aa, Influenza A virus
RSHRQMVTTT

SEQ ID NO: 142527 - protein, 9 aa, Influenza A virus
RSLRQMVAT

SEQ ID NO: 142528 - protein, 10 aa, Influenza A virus
RSLRQMVATT

SEQ ID NO: 142529 - protein, 9 aa, Influenza A virus
RSYRQMATT

SEQ ID NO: 142530 - protein, 10 aa, Influenza A virus
RSYRQMATTT

SEQ ID NO: 142531 - protein, 9 aa, Influenza A virus
RTIGIHPSC

SEQ ID NO: 142532 - protein, 10 aa, Influenza A virus
RTIGIHPSCG

SEQ ID NO: 142533 - protein, 11 aa, Influenza A virus
RTIGIHPSCGA

SEQ ID NO: 142534 - protein, 9 aa, Influenza A virus
RTIGTHPNS

SEQ ID NO: 142535 - protein, 10 aa, Influenza A virus
RTIGTHPNSS

SEQ ID NO: 142536 - protein, 11 aa, Influenza A virus
RTIGTHPNSSA

SEQ ID NO: 142537 - protein, 9 aa, Influenza A virus
RTIGTHPSS

SEQ ID NO: 142538 - protein, 10 aa, Influenza A virus
RTIGTHPSSS

SEQ ID NO: 142539 - protein, 11 aa, Influenza A virus
RTIGTHPSSSA

SEQ ID NO: 142540 - protein, 9 aa, Influenza A virus
RTVGTHPNS

SEQ ID NO: 142541 - protein, 10 aa, Influenza A virus
RTVGTHPNSS

SEQ ID NO: 142542 - protein, 9 aa, Influenza A virus
RTVGTHPSS

SEQ ID NO: 142543 - protein, 10 aa, Influenza A virus
RTVGTHPSSS

SEQ ID NO: 142544 - protein, 11 aa, Influenza A virus
RTVGTHPSSSA

SEQ ID NO: 142545 - protein, 9 aa, Influenza A virus
RVIGTHPSS

SEQ ID NO: 142546 - protein, 10 aa, Influenza A virus
RVIGTHPSSS

SEQ ID NO: 142547 - protein, 11 aa, Influenza A virus
RVIGTHPSSSA

SEQ ID NO: 142548 - protein, 9 aa, Influenza A virus
SAFGLICAT

SEQ ID NO: 142549 - protein, 9 aa, Influenza A virus
SAGALASCM

SEQ ID NO: 142550 - protein, 9 aa, Influenza A virus
SAGLRDNLL

SEQ ID NO: 142551 - protein, 9 aa, Influenza A virus
SCMGLIYDR

SEQ ID NO: 142552 - protein, 9 aa, Influenza A virus
SCMGLIYNR

SEQ ID NO: 142553 - protein, 10 aa, Influenza A virus
SDLLENLQAY

SEQ ID NO: 142554 - protein, 8 aa, Influenza A virus
SEQAAEAM

SEQ ID NO: 142555 - protein, 10 aa, Influenza A virus
SEQAAEAMDI

SEQ ID NO: 142556 - protein, 11 aa, Influenza A virus
SEQAAEAMDIA

SEQ ID NO: 142557 - protein, 10 aa, Influenza A virus
SEQAAEAMEI

SEQ ID NO: 142558 - protein, 11 aa, Influenza A virus
SEQAAEAMEIA

SEQ ID NO: 142559 - protein, 10 aa, Influenza A virus
SEQAAEAMEV

SEQ ID NO: 142560 - protein, 11 aa, Influenza A virus
SEQAAEAMEVA

SEQ ID NO: 142561 - protein, 10 aa, Influenza A virus
SEQAAERMEV

SEQ ID NO: 142562 - protein, 11 aa, Influenza A virus
SEQAAERMEVA

SEQ ID NO: 142563 - protein, 8 aa, Influenza A virus
SEQAANAM

SEQ ID NO: 142564 - protein, 10 aa, Influenza A virus
SEQAANAMEV

SEQ ID NO: 142565 - protein, 11 aa, Influenza A virus
SEQAANAMEVA

SEQ ID NO: 142566 - protein, 8 aa, Influenza A virus
SERAAEAM

SEQ ID NO: 142567 - protein, 10 aa, Influenza A virus
SERAAEAMEV

SEQ ID NO: 142568 - protein, 11 aa, Influenza A virus
SERAAEAMEVA

SEQ ID NO: 142569 - protein, 10 aa, Influenza A virus
SERGLQRRRF

SEQ ID NO: 142570 - protein, 9 aa, Influenza A virus
SFLTEVETY

SEQ ID NO: 142571 - protein, 10 aa, Influenza A virus
SFLTEVETYV

SEQ ID NO: 142572 - protein, 11 aa, Influenza A virus
SFLTEVETYVL

SEQ ID NO: 142573 - protein, 11 aa, Influenza A virus
SGPLKAQIAQR

SEQ ID NO: 142574 - protein, 9 aa, Influenza A virus
SHRQMVITT

SEQ ID NO: 142575 - protein, 9 aa, Influenza A virus
SHRQMVTTI

SEQ ID NO: 142576 - protein, 9 aa, Influenza A virus
SIIPSGPLK

SEQ ID NO: 142577 - protein, 10 aa, Influenza A virus
SIIPSGPLKA

SEQ ID NO: 142578 - protein, 9 aa, Influenza A virus
SIVPSGPLK

SEQ ID NO: 142579 - protein, 10 aa, Influenza A virus
SKARQMVQAM

SEQ ID NO: 142580 - protein, 9 aa, Influenza A virus
SLLTEVETY

SEQ ID NO: 142581 - protein, 10 aa, Influenza A virus
SLLTEVETYV

SEQ ID NO: 142582 - protein, 11 aa, Influenza A virus
SLLTEVETYVL

SEQ ID NO: 142583 - protein, 9 aa, Influenza A virus
SLPTEVETY

SEQ ID NO: 142584 - protein, 10 aa, Influenza A virus
SLPTEVETYV

SEQ ID NO: 142585 - protein, 11 aa, Influenza A virus
SLPTEVETYVL

SEQ ID NO: 142586 - protein, 9 aa, Influenza A virus
SLRQMVATT

SEQ ID NO: 142587 - protein, 9 aa, Influenza A virus
SLSYSAGAL

SEQ ID NO: 142588 - protein, 10 aa, Influenza A virus
SLSYSAGALA

SEQ ID NO: 142589 - protein, 8 aa, Influenza A virus
SPLTKGIL

SEQ ID NO: 142590 - protein, 10 aa, Influenza A virus
SPLTKGILGF

SEQ ID NO: 142591 - protein, 8 aa, Influenza A virus
SPLTKGVL

SEQ ID NO: 142592 - protein, 10 aa, Influenza A virus
SPLTKGVLGF

SEQ ID NO: 142593 - protein, 9 aa, Influenza A virus
SQARHMVQA

SEQ ID NO: 142594 - protein, 10 aa, Influenza A virus
SQARHMVQAM

SEQ ID NO: 142595 - protein, 11 aa, Influenza A virus
SQARHMVQAMR

SEQ ID NO: 142596 - protein, 9 aa, Influenza A virus
SQARQMIQA

SEQ ID NO: 142597 - protein, 10 aa, Influenza A virus
SQARQMIQAM

SEQ ID NO: 142598 - protein, 11 aa, Influenza A virus
SQARQMIQAMR

SEQ ID NO: 142599 - protein, 9 aa, Influenza A virus
SQARQMVHA

SEQ ID NO: 142600 - protein, 10 aa, Influenza A virus
SQARQMVHAM

SEQ ID NO: 142601 - protein, 11 aa, Influenza A virus
SQARQMVHAMR

SEQ ID NO: 142602 - protein, 9 aa, Influenza A virus
SQARQMVQA

SEQ ID NO: 142603 - protein, 10 aa, Influenza A virus
SQARQMVQAM

SEQ ID NO: 142604 - protein, 11 aa, Influenza A virus
SQARQMVQAMR

SEQ ID NO: 142605 - protein, 9 aa, Influenza A virus
SQHKSHRQM

SEQ ID NO: 142606 - protein, 9 aa, Influenza A virus
SQHQSHRQM

SEQ ID NO: 142607 - protein, 9 aa, Influenza A virus
SQHRSHRQI

SEQ ID NO: 142608 - protein, 10 aa, Influenza A virus
SQHRSHRQIV

SEQ ID NO: 142609 - protein, 9 aa, Influenza A virus
SQHRSHRQM

SEQ ID NO: 142610 - protein, 10 aa, Influenza A virus
SQHRSHRQMA

SEQ ID NO: 142611 - protein, 10 aa, Influenza A virus
SQHRSHRQMM

SEQ ID NO: 142612 - protein, 9 aa, Influenza A virus
SQHRSLRQM

SEQ ID NO: 142613 - protein, 10 aa, Influenza A virus
SQHRSLRQMV

SEQ ID NO: 142614 - protein, 9 aa, Influenza A virus
SQHRSYRQM

SEQ ID NO: 142615 - protein, 10 aa, Influenza A virus
SQHRSYRQMA

SEQ ID NO: 142616 - protein, 9 aa, Influenza A virus
SQHTSHRQM

SEQ ID NO: 142617 - protein, 10 aa, Influenza A virus
SQTRQMVQAM

SEQ ID NO: 142618 - protein, 11 aa, Influenza A virus
SQTRQMVQAMR

SEQ ID NO: 142619 - protein, 9 aa, Influenza A virus
SSAGLRDNL

SEQ ID NO: 142620 - protein, 9 aa, Influenza A virus
SSEQAAEAM

SEQ ID NO: 142621 - protein, 9 aa, Influenza A virus
SSEQAANAM

SEQ ID NO: 142622 - protein, 9 aa, Influenza A virus
SSERAAEAM

SEQ ID NO: 142623 - protein, 10 aa, Influenza A virus
STTAKAMEQM

SEQ ID NO: 142624 - protein, 10 aa, Influenza A virus
STTAKAMEQV

SEQ ID NO: 142625 - protein, 10 aa, Influenza A virus
STTAKTMEQV

SEQ ID NO: 142626 - protein, 9 aa, Influenza A virus
SYRQMATTT

SEQ ID NO: 142627 - protein, 11 aa, Influenza A virus
SYSAGALASCM

SEQ ID NO: 142628 - protein, 11 aa, Influenza A virus
SYSTGALASCM

SEQ ID NO: 142629 - protein, 9 aa, Influenza A virus
SYSTGALAT

SEQ ID NO: 142630 - protein, 11 aa, Influenza A virus
SYSTGALATCM

SEQ ID NO: 142631 - protein, 9 aa, Influenza A virus
TCMGLIYNR

SEQ ID NO: 142632 - protein, 9 aa, Influenza A virus
TDLEALMEW

SEQ ID NO: 142633 - protein, 10 aa, Influenza A virus
TDLEALTEWL

SEQ ID NO: 142634 - protein, 9 aa, Influenza A virus
TDLEVLLEW

SEQ ID NO: 142635 - protein, 9 aa, Influenza A virus
TDLEVLMEW

SEQ ID NO: 142636 - protein, 8 aa, Influenza A virus
TEAAFGLI

SEQ ID NO: 142637 - protein, 9 aa, Influenza A virus
TEAAFGLIC

SEQ ID NO: 142638 - protein, 10 aa, Influenza A virus
TEAAFGLICA

SEQ ID NO: 142639 - protein, 8 aa, Influenza A virus
TEAAFGLV

SEQ ID NO: 142640 - protein, 9 aa, Influenza A virus
TEAAFGLVC

SEQ ID NO: 142641 - protein, 10 aa, Influenza A virus
TEAAFGLVCA

SEQ ID NO: 142642 - protein, 9 aa, Influenza A virus
TEGAFGLVC

SEQ ID NO: 142643 - protein, 10 aa, Influenza A virus
TEGAFGLVCA

SEQ ID NO: 142644 - protein, 8 aa, Influenza A virus
TESAFGLI

SEQ ID NO: 142645 - protein, 9 aa, Influenza A virus
TESAFGLIC

SEQ ID NO: 142646 - protein, 10 aa, Influenza A virus
TESAFGLICA

SEQ ID NO: 142647 - protein, 8 aa, Influenza A virus
TEVAFAVV

SEQ ID NO: 142648 - protein, 9 aa, Influenza A virus
TEVAFAVVC

SEQ ID NO: 142649 - protein, 10 aa, Influenza A virus
TEVAFAVVCA

SEQ ID NO: 142650 - protein, 8 aa, Influenza A virus
TEVAFGLL

SEQ ID NO: 142651 - protein, 9 aa, Influenza A virus
TEVAFGLLC

SEQ ID NO: 142652 - protein, 10 aa, Influenza A virus
TEVAFGLLCA

SEQ ID NO: 142653 - protein, 8 aa, Influenza A virus
TEVAFGLV

SEQ ID NO: 142654 - protein, 9 aa, Influenza A virus
TEVAFGLVC

SEQ ID NO: 142655 - protein, 10 aa, Influenza A virus
TEVAFGLVCA

SEQ ID NO: 142656 - protein, 9 aa, Influenza A virus
TEVALGLVC

SEQ ID NO: 142657 - protein, 10 aa, Influenza A virus
TEVALGLVCA

SEQ ID NO: 142658 - protein, 8 aa, Influenza A virus
TEVETYVL

SEQ ID NO: 142659 - protein, 9 aa, Influenza A virus
TEVETYVLS

SEQ ID NO: 142660 - protein, 10 aa, Influenza A virus
TEVETYVLSI

SEQ ID NO: 142661 - protein, 9 aa, Influenza A virus
TEVVLGLVC

SEQ ID NO: 142662 - protein, 10 aa, Influenza A virus
TEVVLGLVCA

SEQ ID NO: 142663 - protein, 9 aa, Influenza A virus
TEWLKTRPI

SEQ ID NO: 142664 - protein, 10 aa, Influenza A virus
TEWLKTRPIL

SEQ ID NO: 142665 - protein, 10 aa, Influenza A virus
TFHGAKDVAL

SEQ ID NO: 142666 - protein, 10 aa, Influenza A virus
TFHGAKEIAL

SEQ ID NO: 142667 - protein, 10 aa, Influenza A virus
TFHGAKEISL

SEQ ID NO: 142668 - protein, 10 aa, Influenza A virus
TFHGAKEVAL

SEQ ID NO: 142669 - protein, 10 aa, Influenza A virus
TFYGAKEVAL

SEQ ID NO: 142670 - protein, 11 aa, Influenza A virus
TINPLIRHENR

SEQ ID NO: 142671 - protein, 9 aa, Influenza A virus
TKGILGFVF

SEQ ID NO: 142672 - protein, 11 aa, Influenza A virus
TKGILGFVFTL

SEQ ID NO: 142673 - protein, 9 aa, Influenza A virus
TKGVLGFVF

SEQ ID NO: 142674 - protein, 11 aa, Influenza A virus
TKGVLGFVFTL

SEQ ID NO: 142675 - protein, 10 aa, Influenza A virus
TLTCPSERGL

SEQ ID NO: 142676 - protein, 10 aa, Influenza A virus
TLTVPSERGL

SEQ ID NO: 142677 - protein, 10 aa, Influenza A virus
TLTVTSERGL

SEQ ID NO: 142678 - protein, 9 aa, Influenza A virus
TPPSSSAGL

SEQ ID NO: 142679 - protein, 9 aa, Influenza A virus
TRQMVQAMR

SEQ ID NO: 142680 - protein, 9 aa, Influenza A virus
TTAKAMEQM

SEQ ID NO: 142681 - protein, 10 aa, Influenza A virus
TTAKAMEQMA

SEQ ID NO: 142682 - protein, 9 aa, Influenza A virus
TTAKAMEQV

SEQ ID NO: 142683 - protein, 10 aa, Influenza A virus
TTAKAMEQVA

SEQ ID NO: 142684 - protein, 9 aa, Influenza A virus
TTAKTMEQV

SEQ ID NO: 142685 - protein, 10 aa, Influenza A virus
TTAKTMEQVA

SEQ ID NO: 142686 - protein, 9 aa, Influenza A virus
TTEAAFGLI

SEQ ID NO: 142687 - protein, 9 aa, Influenza A virus
TTEAAFGLV

SEQ ID NO: 142688 - protein, 9 aa, Influenza A virus
TTEGAFGLV

SEQ ID NO: 142689 - protein, 9 aa, Influenza A virus
TTESAFGLI

SEQ ID NO: 142690 - protein, 8 aa, Influenza A virus
TTEVAFAV

SEQ ID NO: 142691 - protein, 9 aa, Influenza A virus
TTEVAFAVV

SEQ ID NO: 142692 - protein, 9 aa, Influenza A virus
TTEVAFGLV

SEQ ID NO: 142693 - protein, 9 aa, Influenza A virus
TTEVALGLV

SEQ ID NO: 142694 - protein, 9 aa, Influenza A virus
TTEVVLGLV

SEQ ID NO: 142695 - protein, 8 aa, Influenza A virus
TTINPLIR

SEQ ID NO: 142696 - protein, 9 aa, Influenza A virus
TTINPLIRH

SEQ ID NO: 142697 - protein, 11 aa, Influenza A virus
TTNPLIRHENR

SEQ ID NO: 142698 - protein, 9 aa, Influenza A virus
TTTTNPLIR

SEQ ID NO: 142699 - protein, 10 aa, Influenza A virus
TVPGERGLQR

SEQ ID NO: 142700 - protein, 10 aa, Influenza A virus
TVPSERGLQR

SEQ ID NO: 142701 - protein, 10 aa, Influenza A virus
TVTSERGLQR

SEQ ID NO: 142702 - protein, 10 aa, Influenza A virus
TVTTEAAFGL

SEQ ID NO: 142703 - protein, 11 aa, Influenza A virus
TVTTEAAFGLV

SEQ ID NO: 142704 - protein, 10 aa, Influenza A virus
TVTTEGAFGL

SEQ ID NO: 142705 - protein, 11 aa, Influenza A virus
TVTTEGAFGLV

SEQ ID NO: 142706 - protein, 10 aa, Influenza A virus
TVTTEVAFGL

SEQ ID NO: 142707 - protein, 10 aa, Influenza A virus
TVTTEVALGL

SEQ ID NO: 142708 - protein, 10 aa, Influenza A virus
TYQKRMGVQM

SEQ ID NO: 142709 - protein, 10 aa, Influenza A virus
TYQKRMGVQV

SEQ ID NO: 142710 - protein, 9 aa, Influenza A virus
VAFAVVCAT

SEQ ID NO: 142711 - protein, 9 aa, Influenza A virus
VAFGLVCAT

SEQ ID NO: 142712 - protein, 9 aa, Influenza A virus
VAGQARQMV

SEQ ID NO: 142713 - protein, 10 aa, Influenza A virus
VALGYSTGAL

SEQ ID NO: 142714 - protein, 10 aa, Influenza A virus
VALSYSAGAL

SEQ ID NO: 142715 - protein, 10 aa, Influenza A virus
VALSYSTGAL

SEQ ID NO: 142716 - protein, 8 aa, Influenza A virus
VANQARQM

SEQ ID NO: 142717 - protein, 9 aa, Influenza A virus
VANQARQMV

SEQ ID NO: 142718 - protein, 9 aa, Influenza A virus
VAQGLEGVF

SEQ ID NO: 142719 - protein, 8 aa, Influenza A virus
VASKARQM

SEQ ID NO: 142720 - protein, 9 aa, Influenza A virus
VASKARQMV

SEQ ID NO: 142721 - protein, 8 aa, Influenza A virus
VASQARHM

SEQ ID NO: 142722 - protein, 9 aa, Influenza A virus
VASQARHMV

SEQ ID NO: 142723 - protein, 8 aa, Influenza A virus
VASQARQM

SEQ ID NO: 142724 - protein, 9 aa, Influenza A virus
VASQARQMI

SEQ ID NO: 142725 - protein, 9 aa, Influenza A virus
VASQARQMV

SEQ ID NO: 142726 - protein, 8 aa, Influenza A virus
VASQTRQM

SEQ ID NO: 142727 - protein, 9 aa, Influenza A virus
VASQTRQMV

SEQ ID NO: 142728 - protein, 8 aa, Influenza A virus
VETYVLSI

SEQ ID NO: 142729 - protein, 9 aa, Influenza A virus
VETYVLSII

SEQ ID NO: 142730 - protein, 10 aa, Influenza A virus
VETYVLSIIP

SEQ ID NO: 142731 - protein, 9 aa, Influenza A virus
VETYVLSIV

SEQ ID NO: 142732 - protein, 10 aa, Influenza A virus
VETYVLSIVP

SEQ ID NO: 142733 - protein, 9 aa, Influenza A virus
VFAGKNADL

SEQ ID NO: 142734 - protein, 9 aa, Influenza A virus
VFAGKNTDL

SEQ ID NO: 142735 - protein, 9 aa, Influenza A virus
VFAGRNTDL

SEQ ID NO: 142736 - protein, 10 aa, Influenza A virus
VFTLTCPSER

SEQ ID NO: 142737 - protein, 10 aa, Influenza A virus
VFTLTVPGER

SEQ ID NO: 142738 - protein, 10 aa, Influenza A virus
VFTLTVPSER

SEQ ID NO: 142739 - protein, 10 aa, Influenza A virus
VFTLTVTSER

SEQ ID NO: 142740 - protein, 9 aa, Influenza A virus
VITTNPLIR

SEQ ID NO: 142741 - protein, 9 aa, Influenza A virus
VLACTTAKA

SEQ ID NO: 142742 - protein, 10 aa, Influenza A virus
VLACTTAKAM

SEQ ID NO: 142743 - protein, 9 aa, Influenza A virus
VLASHTAKA

SEQ ID NO: 142744 - protein, 10 aa, Influenza A virus
VLASHTAKAM

SEQ ID NO: 142745 - protein, 9 aa, Influenza A virus
VLASITAKA

SEQ ID NO: 142746 - protein, 10 aa, Influenza A virus
VLASITAKAM

SEQ ID NO: 142747 - protein, 9 aa, Influenza A virus
VLASTTAKA

SEQ ID NO: 142748 - protein, 10 aa, Influenza A virus
VLASTTAKAM

SEQ ID NO: 142749 - protein, 9 aa, Influenza A virus
VLASTTAKT

SEQ ID NO: 142750 - protein, 10 aa, Influenza A virus
VLASTTAKTM

SEQ ID NO: 142751 - protein, 8 aa, Influenza A virus
VLGFVFTL

SEQ ID NO: 142752 - protein, 9 aa, Influenza A virus
VLGFVFTLT

SEQ ID NO: 142753 - protein, 10 aa, Influenza A virus
VLGFVFTLTV

SEQ ID NO: 142754 - protein, 9 aa, Influenza A virus
VLLEWLKTR

SEQ ID NO: 142755 - protein, 11 aa, Influenza A virus
VLLEWLKTRPI

SEQ ID NO: 142756 - protein, 9 aa, Influenza A virus
VLMEWLKTR

SEQ ID NO: 142757 - protein, 11 aa, Influenza A virus
VLMEWLKTRPI

SEQ ID NO: 142758 - protein, 10 aa, Influenza A virus
VLSIIPSGPL

SEQ ID NO: 142759 - protein, 11 aa, Influenza A virus
VLSIIPSGPLK

SEQ ID NO: 142760 - protein, 10 aa, Influenza A virus
VLSIVPSGPL

SEQ ID NO: 142761 - protein, 11 aa, Influenza A virus
VLSIVPSGPLK

SEQ ID NO: 142762 - protein, 9 aa, Influenza A virus
VLTSTTAKA

SEQ ID NO: 142763 - protein, 10 aa, Influenza A virus
VLTSTTAKAM

SEQ ID NO: 142764 - protein, 9 aa, Influenza A virus
VLVSTTAKA

SEQ ID NO: 142765 - protein, 10 aa, Influenza A virus
VLVSTTAKAM

SEQ ID NO: 142766 - protein, 9 aa, Influenza A virus
VMASTTAKA

SEQ ID NO: 142767 - protein, 10 aa, Influenza A virus
VMASTTAKAM

SEQ ID NO: 142768 - protein, 10 aa, Influenza A virus
VPSGPLKAEI

SEQ ID NO: 142769 - protein, 10 aa, Influenza A virus
VPSGPLKAQI

SEQ ID NO: 142770 - protein, 9 aa, Influenza A virus
VQAMITIGT

SEQ ID NO: 142771 - protein, 10 aa, Influenza A virus
VQAMITIGTH

SEQ ID NO: 142772 - protein, 10 aa, Influenza A virus
VQAMRAIGTH

SEQ ID NO: 142773 - protein, 10 aa, Influenza A virus
VQAMRTIGTH

SEQ ID NO: 142774 - protein, 10 aa, Influenza A virus
VQAMRTVGTH

SEQ ID NO: 142775 - protein, 10 aa, Influenza A virus
VQAMRVIGTH

SEQ ID NO: 142776 - protein, 8 aa, Influenza A virus
VSTTAKAM

SEQ ID NO: 142777 - protein, 9 aa, Influenza A virus
VTFHGAKEV

SEQ ID NO: 142778 - protein, 11 aa, Influenza A virus
VTFHGAKEVAL

SEQ ID NO: 142779 - protein, 9 aa, Influenza A virus
VTSERGLQR

SEQ ID NO: 142780 - protein, 10 aa, Influenza A virus
VTSERGLQRR

SEQ ID NO: 142781 - protein, 9 aa, Influenza A virus
VTTEAAFGL

SEQ ID NO: 142782 - protein, 10 aa, Influenza A virus
VTTEAAFGLI

SEQ ID NO: 142783 - protein, 10 aa, Influenza A virus
VTTEAAFGLV

SEQ ID NO: 142784 - protein, 9 aa, Influenza A virus
VTTEGAFGL

SEQ ID NO: 142785 - protein, 10 aa, Influenza A virus
VTTEGAFGLV

SEQ ID NO: 142786 - protein, 9 aa, Influenza A virus
VTTESAFGL

SEQ ID NO: 142787 - protein, 10 aa, Influenza A virus
VTTESAFGLI

SEQ ID NO: 142788 - protein, 9 aa, Influenza A virus
VTTEVAFAV

SEQ ID NO: 142789 - protein, 10 aa, Influenza A virus
VTTEVAFAVV

SEQ ID NO: 142790 - protein, 9 aa, Influenza A virus
VTTEVAFGL

SEQ ID NO: 142791 - protein, 10 aa, Influenza A virus
VTTEVAFGLL

SEQ ID NO: 142792 - protein, 10 aa, Influenza A virus
VTTEVAFGLV

SEQ ID NO: 142793 - protein, 9 aa, Influenza A virus
VTTEVALGL

SEQ ID NO: 142794 - protein, 10 aa, Influenza A virus
VTTEVALGLV

SEQ ID NO: 142795 - protein, 9 aa, Influenza A virus
VTTEVVLGL

SEQ ID NO: 142796 - protein, 10 aa, Influenza A virus
VTTEVVLGLV

SEQ ID NO: 142797 - protein, 9 aa, Influenza A virus
VTTINPLIR

SEQ ID NO: 142798 - protein, 9 aa, Influenza A virus
VTTTNPLIR

SEQ ID NO: 142799 - protein, 9 aa, Influenza A virus
VVLGLVCAT

SEQ ID NO: 142800 - protein, 8 aa, Influenza A virus
WLKTRPIL

SEQ ID NO: 142801 - protein, 11 aa, Influenza A virus
WLKTRPILSPL

SEQ ID NO: 142802 - protein, 11 aa, Influenza A virus
YDRMGTVTTEV

SEQ ID NO: 142803 - protein, 10 aa, Influenza A virus
YGAKEVALSY

SEQ ID NO: 142804 - protein, 8 aa, Influenza A virus
YGKLKREI

SEQ ID NO: 142805 - protein, 10 aa, Influenza A virus
YGKLKREITF

SEQ ID NO: 142806 - protein, 10 aa, Influenza A virus
YKKLKRDVTF

SEQ ID NO: 142807 - protein, 10 aa, Influenza A virus
YKKLKREITF

SEQ ID NO: 142808 - protein, 8 aa, Influenza A virus
YKKLKREM

SEQ ID NO: 142809 - protein, 10 aa, Influenza A virus
YKKLKREMTF

SEQ ID NO: 142810 - protein, 11 aa, Influenza A virus
YNRMGAVTTEA

SEQ ID NO: 142811 - protein, 11 aa, Influenza A virus
YNRMGAVTTEV

SEQ ID NO: 142812 - protein, 11 aa, Influenza A virus
YNRMGTVTTEA

SEQ ID NO: 142813 - protein, 11 aa, Influenza A virus
YNRMGTVTTEV

SEQ ID NO: 142814 - protein, 9 aa, Influenza A virus
YQKRMGVQI

SEQ ID NO: 142815 - protein, 11 aa, Influenza A virus
YQKRMGVQIQR

SEQ ID NO: 142816 - protein, 9 aa, Influenza A virus
YQKRMGVQL

SEQ ID NO: 142817 - protein, 11 aa, Influenza A virus
YQKRMGVQLQR

SEQ ID NO: 142818 - protein, 9 aa, Influenza A virus
YQKRMGVQM

SEQ ID NO: 142819 - protein, 11 aa, Influenza A virus
YQKRMGVQMQR

SEQ ID NO: 142820 - protein, 10 aa, Influenza A virus
YQKRMGVQMR

SEQ ID NO: 142821 - protein, 11 aa, Influenza A virus
YQKRMGVQMRR

SEQ ID NO: 142822 - protein, 9 aa, Influenza A virus
YQKRMGVQV

SEQ ID NO: 142823 - protein, 11 aa, Influenza A virus
YQKRMGVQVQR

SEQ ID NO: 142824 - protein, 9 aa, Influenza A virus
YQNRMGVQM

SEQ ID NO: 142825 - protein, 11 aa, Influenza A virus
YQNRMGVQMQR

SEQ ID NO: 142826 - protein, 10 aa, Influenza A virus
YRKIKREITF

SEQ ID NO: 142827 - protein, 10 aa, Influenza A virus
YRKLKREITF

SEQ ID NO: 142828 - protein, 11 aa, Influenza A virus
YRQMATTTNPL

SEQ ID NO: 142829 - protein, 9 aa, Influenza A virus
YSAGALASC

SEQ ID NO: 142830 - protein, 10 aa, Influenza A virus
YSAGALASCM

SEQ ID NO: 142831 - protein, 10 aa, Influenza A virus
YSTGALASCM

SEQ ID NO: 142832 - protein, 10 aa, Influenza A virus
YSTGALATCM

SEQ ID NO: 142833 - protein, 9 aa, Influenza A virus
YVLSIIPSG

SEQ ID NO: 142834 - protein, 11 aa, Influenza A virus
YVLSIIPSGPL

SEQ ID NO: 142835 - protein, 11 aa, Influenza A virus
YVLSIVPSGPL

SEQ ID NO: 142836 - protein, 9 aa, Influenza A virus
AAAPPEPSR

SEQ ID NO: 142837 - protein, 9 aa, Influenza A virus
AAAPPEQSR

SEQ ID NO: 142838 - protein, 9 aa, Influenza A virus
AAAPPKLSR

SEQ ID NO: 142839 - protein, 10 aa, Influenza A virus
AAAPPKLSRM

SEQ ID NO: 142840 - protein, 10 aa, Influenza A virus
AAAPPKQSGM

SEQ ID NO: 142841 - protein, 9 aa, Influenza A virus
AAAPPKQSR

SEQ ID NO: 142842 - protein, 10 aa, Influenza A virus
AAAPPKQSRM

SEQ ID NO: 142843 - protein, 11 aa, Influenza A virus
AAMGLKISSSF

SEQ ID NO: 142844 - protein, 11 aa, Influenza A virus
AAMGLRISSSF

SEQ ID NO: 142845 - protein, 9 aa, Influenza A virus
AAPPEPSRM

SEQ ID NO: 142846 - protein, 11 aa, Influenza A virus
AAPPEPSRMQF

SEQ ID NO: 142847 - protein, 9 aa, Influenza A virus
AAPPEQSRM

SEQ ID NO: 142848 - protein, 9 aa, Influenza A virus
AAPPKLSRM

SEQ ID NO: 142849 - protein, 9 aa, Influenza A virus
AAPPKQSGM

SEQ ID NO: 142850 - protein, 9 aa, Influenza A virus
AAPPKQSRM

SEQ ID NO: 142851 - protein, 11 aa, Influenza A virus
AAPPKQSRMQF

SEQ ID NO: 142852 - protein, 9 aa, Influenza A virus
AARAQYSGF

SEQ ID NO: 142853 - protein, 10 aa, Influenza A virus
AARAQYSGFV

SEQ ID NO: 142854 - protein, 11 aa, Influenza A virus
AARAQYSGFVR

SEQ ID NO: 142855 - protein, 9 aa, Influenza A virus
AARGKYSGF

SEQ ID NO: 142856 - protein, 10 aa, Influenza A virus
AARGKYSGFV

SEQ ID NO: 142857 - protein, 11 aa, Influenza A virus
AARGKYSGFVR

SEQ ID NO: 142858 - protein, 9 aa, Influenza A virus
AARGQYSGF

SEQ ID NO: 142859 - protein, 10 aa, Influenza A virus
AARGQYSGFV

SEQ ID NO: 142860 - protein, 11 aa, Influenza A virus
AARGQYSGFVR

SEQ ID NO: 142861 - protein, 9 aa, Influenza A virus
AARNIVKRA

SEQ ID NO: 142862 - protein, 9 aa, Influenza A virus
AARNIVRRA

SEQ ID NO: 142863 - protein, 10 aa, Influenza A virus
AARNIVRRAA

SEQ ID NO: 142864 - protein, 10 aa, Influenza A virus
AARNIVRRAM

SEQ ID NO: 142865 - protein, 9 aa, Influenza A virus
AARSIVRRA

SEQ ID NO: 142866 - protein, 9 aa, Influenza A virus
AARSQYSGF

SEQ ID NO: 142867 - protein, 10 aa, Influenza A virus
AARSQYSGFV

SEQ ID NO: 142868 - protein, 11 aa, Influenza A virus
AARSQYSGFVR

SEQ ID NO: 142869 - protein, 9 aa, Influenza A virus
ADKRIIETI

SEQ ID NO: 142870 - protein, 9 aa, Influenza A virus
ADKRITETI

SEQ ID NO: 142871 - protein, 10 aa, Influenza A virus
ADPLASLLEM

SEQ ID NO: 142872 - protein, 8 aa, Influenza A virus
AEAIIVAI

SEQ ID NO: 142873 - protein, 9 aa, Influenza A virus
AEAIIVAIV

SEQ ID NO: 142874 - protein, 10 aa, Influenza A virus
AEAIIVAIVF

SEQ ID NO: 142875 - protein, 8 aa, Influenza A virus
AEAIIVAM

SEQ ID NO: 142876 - protein, 9 aa, Influenza A virus
AEAIIVAMV

SEQ ID NO: 142877 - protein, 10 aa, Influenza A virus
AEAIIVAMVF

SEQ ID NO: 142878 - protein, 8 aa, Influenza A virus
AEAVIVAM

SEQ ID NO: 142879 - protein, 9 aa, Influenza A virus
AEAVIVAMV

SEQ ID NO: 142880 - protein, 10 aa, Influenza A virus
AEAVIVAMVF

SEQ ID NO: 142881 - protein, 8 aa, Influenza A virus
AEKIVVSI

SEQ ID NO: 142882 - protein, 8 aa, Influenza A virus
AEMSLRGI

SEQ ID NO: 142883 - protein, 10 aa, Influenza A virus
AEMSLRGIRV

SEQ ID NO: 142884 - protein, 11 aa, Influenza A virus
AEMSLRGIRVS

SEQ ID NO: 142885 - protein, 8 aa, Influenza A virus
AEMSLRGV

SEQ ID NO: 142886 - protein, 10 aa, Influenza A virus
AEMSLRGVRV

SEQ ID NO: 142887 - protein, 11 aa, Influenza A virus
AEMSLRGVRVS

SEQ ID NO: 142888 - protein, 9 aa, Influenza A virus
AERLKHGTF

SEQ ID NO: 142889 - protein, 8 aa, Influenza A virus
AERVVVSI

SEQ ID NO: 142890 - protein, 8 aa, Influenza A virus
AEVLFQNW

SEQ ID NO: 142891 - protein, 10 aa, Influenza A virus
AEVLFQNWGI

SEQ ID NO: 142892 - protein, 9 aa, Influenza A virus
AFNYNKTTK

SEQ ID NO: 142893 - protein, 10 aa, Influenza A virus
AFNYNKTTKR

SEQ ID NO: 142894 - protein, 9 aa, Influenza A virus
AGVESAVLR

SEQ ID NO: 142895 - protein, 11 aa, Influenza A virus
AGVESAVLRGF

SEQ ID NO: 142896 - protein, 10 aa, Influenza A virus
AHYPKVYKTY

SEQ ID NO: 142897 - protein, 11 aa, Influenza A virus
AHYPKVYKTYF

SEQ ID NO: 142898 - protein, 10 aa, Influenza A virus
AIIKKFTSGR

SEQ ID NO: 142899 - protein, 10 aa, Influenza A virus
AIIKKYTSGR

SEQ ID NO: 142900 - protein, 10 aa, Influenza A virus
AIIKRYTSGR

SEQ ID NO: 142901 - protein, 9 aa, Influenza A virus
AIIRKATRR

SEQ ID NO: 142902 - protein, 9 aa, Influenza A virus
AILKKATRR

SEQ ID NO: 142903 - protein, 9 aa, Influenza A virus
AILRKATQR

SEQ ID NO: 142904 - protein, 9 aa, Influenza A virus
AILRKATRK

SEQ ID NO: 142905 - protein, 9 aa, Influenza A virus
AILRKATRR

SEQ ID NO: 142906 - protein, 9 aa, Influenza A virus
AILRKETRR

SEQ ID NO: 142907 - protein, 9 aa, Influenza A virus
AILRKSTKR

SEQ ID NO: 142908 - protein, 9 aa, Influenza A virus
AILRKTTRR

SEQ ID NO: 142909 - protein, 9 aa, Influenza A virus
AILYNKMEF

SEQ ID NO: 142910 - protein, 9 aa, Influenza A virus
AIRGQYSGF

SEQ ID NO: 142911 - protein, 10 aa, Influenza A virus
AIRGQYSGFV

SEQ ID NO: 142912 - protein, 11 aa, Influenza A virus
AIRGQYSGFVR

SEQ ID NO: 142913 - protein, 10 aa, Influenza A virus
AITYSSSMMW

SEQ ID NO: 142914 - protein, 11 aa, Influenza A virus
AITYSSSMMWE

SEQ ID NO: 142915 - protein, 9 aa, Influenza A virus
AIVRKATRR

SEQ ID NO: 142916 - protein, 10 aa, Influenza A virus
AIVRKATRRL

SEQ ID NO: 142917 - protein, 10 aa, Influenza A virus
AKDVIMEVVF

SEQ ID NO: 142918 - protein, 10 aa, Influenza A virus
AKILFQNWGI

SEQ ID NO: 142919 - protein, 10 aa, Influenza A virus
AKILFQNWGV

SEQ ID NO: 142920 - protein, 10 aa, Influenza A virus
AKILTSESQL

SEQ ID NO: 142921 - protein, 10 aa, Influenza A virus
AKLLFQNWGI

SEQ ID NO: 142922 - protein, 10 aa, Influenza A virus
AKVLFLNWGI

SEQ ID NO: 142923 - protein, 10 aa, Influenza A virus
AKVLFQNWGI

SEQ ID NO: 142924 - protein, 10 aa, Influenza A virus
AKVLFQNWGV

SEQ ID NO: 142925 - protein, 10 aa, Influenza A virus
AKVLFQSWGI

SEQ ID NO: 142926 - protein, 8 aa, Influenza A virus
ALFQNWGI

SEQ ID NO: 142927 - protein, 10 aa, Influenza A virus
ALFQNWGIES

SEQ ID NO: 142928 - protein, 11 aa, Influenza A virus
ALFQNWGIESI

SEQ ID NO: 142929 - protein, 9 aa, Influenza A virus
ALFQQMRDV

SEQ ID NO: 142930 - protein, 10 aa, Influenza A virus
ALFQQMRDVL

SEQ ID NO: 142931 - protein, 10 aa, Influenza A virus
ALKLTVHEGY

SEQ ID NO: 142932 - protein, 8 aa, Influenza A virus
ALRMKWMM

SEQ ID NO: 142933 - protein, 9 aa, Influenza A virus
ALRMKWMMA

SEQ ID NO: 142934 - protein, 10 aa, Influenza A virus
ALRMKWMMAM

SEQ ID NO: 142935 - protein, 11 aa, Influenza A virus
ALRMKWMMAMK

SEQ ID NO: 142936 - protein, 10 aa, Influenza A virus
ALSINELRNL

SEQ ID NO: 142937 - protein, 9 aa, Influenza A virus
ALSINELSK

SEQ ID NO: 142938 - protein, 10 aa, Influenza A virus
ALSINELSKL

SEQ ID NO: 142939 - protein, 10 aa, Influenza A virus
ALSINELSNI

SEQ ID NO: 142940 - protein, 10 aa, Influenza A virus
ALSINELSNL

SEQ ID NO: 142941 - protein, 11 aa, Influenza A virus
ALSINELSNLA

SEQ ID NO: 142942 - protein, 10 aa, Influenza A virus
ALSINELSSL

SEQ ID NO: 142943 - protein, 11 aa, Influenza A virus
ALSINELSSLA

SEQ ID NO: 142944 - protein, 10 aa, Influenza A virus
ALSINELSTL

SEQ ID NO: 142945 - protein, 11 aa, Influenza A virus
ALSINELSTLA

SEQ ID NO: 142946 - protein, 10 aa, Influenza A virus
ALSINQLSSL

SEQ ID NO: 142947 - protein, 10 aa, Influenza A virus
ALSISELGNL

SEQ ID NO: 142948 - protein, 10 aa, Influenza A virus
ALSISELSNL

SEQ ID NO: 142949 - protein, 11 aa, Influenza A virus
ALSISELSNLA

SEQ ID NO: 142950 - protein, 10 aa, Influenza A virus
ALTEDPDEGI

SEQ ID NO: 142951 - protein, 9 aa, Influenza A virus
ALWSKTNDA

SEQ ID NO: 142952 - protein, 10 aa, Influenza A virus
AMGLKISSSF

SEQ ID NO: 142953 - protein, 10 aa, Influenza A virus
AMGLRISSSF

SEQ ID NO: 142954 - protein, 10 aa, Influenza A virus
AMKYPITADK

SEQ ID NO: 142955 - protein, 11 aa, Influenza A virus
AMKYPITADKK

SEQ ID NO: 142956 - protein, 11 aa, Influenza A virus
AMKYPITADKR

SEQ ID NO: 142957 - protein, 10 aa, Influenza A virus
AMKYPITADR

SEQ ID NO: 142958 - protein, 11 aa, Influenza A virus
AMKYPITADRR

SEQ ID NO: 142959 - protein, 9 aa, Influenza A virus
AMLYNKMEF

SEQ ID NO: 142960 - protein, 11 aa, Influenza A virus
AMVFSQEDCMV

SEQ ID NO: 142961 - protein, 10 aa, Influenza A virus
AMVFSQEDCV

SEQ ID NO: 142962 - protein, 10 aa, Influenza A virus
AMVFSQEECM

SEQ ID NO: 142963 - protein, 9 aa, Influenza A virus
AMVSADPLA

SEQ ID NO: 142964 - protein, 11 aa, Influenza A virus
AMVSADPLASL

SEQ ID NO: 142965 - protein, 11 aa, Influenza A virus
ANQRLNPMHQL

SEQ ID NO: 142966 - protein, 11 aa, Influenza A virus
ANTIHYPKIYK

SEQ ID NO: 142967 - protein, 9 aa, Influenza A virus
APLMEAYML

SEQ ID NO: 142968 - protein, 11 aa, Influenza A virus
APLMEAYMLER

SEQ ID NO: 142969 - protein, 9 aa, Influenza A virus
APLMVAYIL

SEQ ID NO: 142970 - protein, 11 aa, Influenza A virus
APLMVAYILER

SEQ ID NO: 142971 - protein, 8 aa, Influenza A virus
APLMVAYM

SEQ ID NO: 142972 - protein, 9 aa, Influenza A virus
APLMVAYMF

SEQ ID NO: 142973 - protein, 11 aa, Influenza A virus
APLMVAYMFER

SEQ ID NO: 142974 - protein, 9 aa, Influenza A virus
APLMVAYML

SEQ ID NO: 142975 - protein, 11 aa, Influenza A virus
APLMVAYMLER

SEQ ID NO: 142976 - protein, 10 aa, Influenza A virus
APPEPSRMQF

SEQ ID NO: 142977 - protein, 10 aa, Influenza A virus
APPEQSRIQF

SEQ ID NO: 142978 - protein, 10 aa, Influenza A virus
APPEQSRMQF

SEQ ID NO: 142979 - protein, 10 aa, Influenza A virus
APPKLSRMQF

SEQ ID NO: 142980 - protein, 10 aa, Influenza A virus
APPKQSGMQF

SEQ ID NO: 142981 - protein, 10 aa, Influenza A virus
APPKQSRMQF

SEQ ID NO: 142982 - protein, 8 aa, Influenza A virus
AQDVIMEV

SEQ ID NO: 142983 - protein, 9 aa, Influenza A virus
AQDVIMEVV

SEQ ID NO: 142984 - protein, 10 aa, Influenza A virus
AQDVIMEVVF

SEQ ID NO: 142985 - protein, 11 aa, Influenza A virus
AQGTEKLTITY

SEQ ID NO: 142986 - protein, 9 aa, Influenza A virus
AQIIKLLPF

SEQ ID NO: 142987 - protein, 10 aa, Influenza A virus
AQIIKLLPFA

SEQ ID NO: 142988 - protein, 10 aa, Influenza A virus
AQLLTSESQL

SEQ ID NO: 142989 - protein, 8 aa, Influenza A virus
AQVSADPL

SEQ ID NO: 142990 - protein, 9 aa, Influenza A virus
AQVSADPLA

SEQ ID NO: 142991 - protein, 11 aa, Influenza A virus
AQVSADPLASL

SEQ ID NO: 142992 - protein, 8 aa, Influenza A virus
AQYSGFVR

SEQ ID NO: 142993 - protein, 9 aa, Influenza A virus
AQYSGFVRT

SEQ ID NO: 142994 - protein, 10 aa, Influenza A virus
AQYSGFVRTL

SEQ ID NO: 142995 - protein, 11 aa, Influenza A virus
AQYSGFVRTLF

SEQ ID NO: 142996 - protein, 9 aa, Influenza A virus
ARAQYSGFV

SEQ ID NO: 142997 - protein, 10 aa, Influenza A virus
ARAQYSGFVR

SEQ ID NO: 142998 - protein, 10 aa, Influenza A virus
ARGKYSGFVR

SEQ ID NO: 142999 - protein, 10 aa, Influenza A virus
ARGQYSGFVR

SEQ ID NO: 143000 - protein, 10 aa, Influenza A virus
ARILTSDSQL

SEQ ID NO: 143001 - protein, 10 aa, Influenza A virus
ARILTSESQL

SEQ ID NO: 143002 - protein, 11 aa, Influenza A virus
ARILTSESQLM

SEQ ID NO: 143003 - protein, 10 aa, Influenza A virus
ARNDDVDQSL

SEQ ID NO: 143004 - protein, 9 aa, Influenza A virus
ARNIVRRAM

SEQ ID NO: 143005 - protein, 10 aa, Influenza A virus
ARNIVRRATV

SEQ ID NO: 143006 - protein, 10 aa, Influenza A virus
ARSIVRRATV

SEQ ID NO: 143007 - protein, 9 aa, Influenza A virus
ARSQYSGFV

SEQ ID NO: 143008 - protein, 10 aa, Influenza A virus
ARSQYSGFVR

SEQ ID NO: 143009 - protein, 10 aa, Influenza A virus
ARTLTSESQL

SEQ ID NO: 143010 - protein, 10 aa, Influenza A virus
ASLLEMCHST

SEQ ID NO: 143011 - protein, 11 aa, Influenza A virus
ASLLEMCHSTL

SEQ ID NO: 143012 - protein, 8 aa, Influenza A virus
ASTIHYPK

SEQ ID NO: 143013 - protein, 9 aa, Influenza A virus
ASTIHYPKI

SEQ ID NO: 143014 - protein, 10 aa, Influenza A virus
ASTIHYPKIY

SEQ ID NO: 143015 - protein, 11 aa, Influenza A virus
ASTIHYPKIYK

SEQ ID NO: 143016 - protein, 9 aa, Influenza A virus
ASTIHYPKV

SEQ ID NO: 143017 - protein, 10 aa, Influenza A virus
ASTIHYPKVY

SEQ ID NO: 143018 - protein, 11 aa, Influenza A virus
ASTIHYPKVYR

SEQ ID NO: 143019 - protein, 8 aa, Influenza A virus
ASTVHYPK

SEQ ID NO: 143020 - protein, 9 aa, Influenza A virus
ASTVHYPKI

SEQ ID NO: 143021 - protein, 10 aa, Influenza A virus
ASTVHYPKIY

SEQ ID NO: 143022 - protein, 11 aa, Influenza A virus
ASTVHYPKIYK

SEQ ID NO: 143023 - protein, 9 aa, Influenza A virus
ASTVHYPKV

SEQ ID NO: 143024 - protein, 10 aa, Influenza A virus
ASTVHYPKVY

SEQ ID NO: 143025 - protein, 11 aa, Influenza A virus
ASTVHYPKVYR

SEQ ID NO: 143026 - protein, 11 aa, Influenza A virus
ASVSADPLASL

SEQ ID NO: 143027 - protein, 10 aa, Influenza A virus
ATAIIRKATR

SEQ ID NO: 143028 - protein, 11 aa, Influenza A virus
ATAIIRKATRR

SEQ ID NO: 143029 - protein, 10 aa, Influenza A virus
ATAILKKATR

SEQ ID NO: 143030 - protein, 11 aa, Influenza A virus
ATAILKKATRR

SEQ ID NO: 143031 - protein, 11 aa, Influenza A virus
ATAILRKATQR

SEQ ID NO: 143032 - protein, 10 aa, Influenza A virus
ATAILRKATR

SEQ ID NO: 143033 - protein, 11 aa, Influenza A virus
ATAILRKATRK

SEQ ID NO: 143034 - protein, 11 aa, Influenza A virus
ATAILRKATRR

SEQ ID NO: 143035 - protein, 10 aa, Influenza A virus
ATAILRKETR

SEQ ID NO: 143036 - protein, 11 aa, Influenza A virus
ATAILRKETRR

SEQ ID NO: 143037 - protein, 10 aa, Influenza A virus
ATAILRKSTK

SEQ ID NO: 143038 - protein, 11 aa, Influenza A virus
ATAILRKSTKR

SEQ ID NO: 143039 - protein, 10 aa, Influenza A virus
ATAILRKTTR

SEQ ID NO: 143040 - protein, 11 aa, Influenza A virus
ATAILRKTTRR

SEQ ID NO: 143041 - protein, 10 aa, Influenza A virus
ATAIVRKATR

SEQ ID NO: 143042 - protein, 11 aa, Influenza A virus
ATAIVRKATRR

SEQ ID NO: 143043 - protein, 10 aa, Influenza A virus
ATATLRKATR

SEQ ID NO: 143044 - protein, 11 aa, Influenza A virus
ATATLRKATRR

SEQ ID NO: 143045 - protein, 9 aa, Influenza A virus
ATGTVHYPK

SEQ ID NO: 143046 - protein, 10 aa, Influenza A virus
ATGTVHYPKV

SEQ ID NO: 143047 - protein, 9 aa, Influenza A virus
ATKRIQMAI

SEQ ID NO: 143048 - protein, 8 aa, Influenza A virus
ATKRIRMA

SEQ ID NO: 143049 - protein, 9 aa, Influenza A virus
ATKRIRMAI

SEQ ID NO: 143050 - protein, 10 aa, Influenza A virus
ATKRIRMAIN

SEQ ID NO: 143051 - protein, 9 aa, Influenza A virus
ATKRIRMAT

SEQ ID NO: 143052 - protein, 10 aa, Influenza A virus
ATKRIRMATN

SEQ ID NO: 143053 - protein, 8 aa, Influenza A virus
ATKRLRMA

SEQ ID NO: 143054 - protein, 9 aa, Influenza A virus
ATKRLRMAI

SEQ ID NO: 143055 - protein, 9 aa, Influenza A virus
ATKRLTILG

SEQ ID NO: 143056 - protein, 10 aa, Influenza A virus
ATKRLTILGK

SEQ ID NO: 143057 - protein, 9 aa, Influenza A virus
ATKRLTVLG

SEQ ID NO: 143058 - protein, 10 aa, Influenza A virus
ATKRLTVLGK

SEQ ID NO: 143059 - protein, 8 aa, Influenza A virus
ATLRKATR

SEQ ID NO: 143060 - protein, 9 aa, Influenza A virus
ATLRKATRR

SEQ ID NO: 143061 - protein, 10 aa, Influenza A virus
ATLRKATRRL

SEQ ID NO: 143062 - protein, 9 aa, Influenza A virus
ATLYNKMEF

SEQ ID NO: 143063 - protein, 9 aa, Influenza A virus
ATQRLVQLI

SEQ ID NO: 143064 - protein, 10 aa, Influenza A virus
ATQRLVQLII

SEQ ID NO: 143065 - protein, 9 aa, Influenza A virus
ATRGQYSGF

SEQ ID NO: 143066 - protein, 10 aa, Influenza A virus
ATRGQYSGFV

SEQ ID NO: 143067 - protein, 11 aa, Influenza A virus
ATRGQYSGFVR

SEQ ID NO: 143068 - protein, 9 aa, Influenza A virus
ATRKLIQLI

SEQ ID NO: 143069 - protein, 10 aa, Influenza A virus
ATRKLIQLIV

SEQ ID NO: 143070 - protein, 9 aa, Influenza A virus
ATRRLIQLI

SEQ ID NO: 143071 - protein, 10 aa, Influenza A virus
ATRRLIQLIV

SEQ ID NO: 143072 - protein, 9 aa, Influenza A virus
ATRRLVQLI

SEQ ID NO: 143073 - protein, 10 aa, Influenza A virus
ATRRLVQLIV

SEQ ID NO: 143074 - protein, 9 aa, Influenza A virus
ATRRMIQLI

SEQ ID NO: 143075 - protein, 10 aa, Influenza A virus
ATRRMIQLIV

SEQ ID NO: 143076 - protein, 9 aa, Influenza A virus
ATRSQYSGF

SEQ ID NO: 143077 - protein, 10 aa, Influenza A virus
ATRSQYSGFV

SEQ ID NO: 143078 - protein, 11 aa, Influenza A virus
ATRSQYSGFVR

SEQ ID NO: 143079 - protein, 9 aa, Influenza A virus
ATSAVHYPK

SEQ ID NO: 143080 - protein, 10 aa, Influenza A virus
ATSAVHYPKV

SEQ ID NO: 143081 - protein, 11 aa, Influenza A virus
ATSAVHYPKVY

SEQ ID NO: 143082 - protein, 9 aa, Influenza A virus
ATSTVHYPK

SEQ ID NO: 143083 - protein, 10 aa, Influenza A virus
ATSTVHYPKV

SEQ ID NO: 143084 - protein, 11 aa, Influenza A virus
ATSTVHYPKVY

SEQ ID NO: 143085 - protein, 11 aa, Influenza A virus
ATVSADPLASL

SEQ ID NO: 143086 - protein, 11 aa, Influenza A virus
ATVSTDPLASL

SEQ ID NO: 143087 - protein, 11 aa, Influenza A virus
ATVSTDPLSSL

SEQ ID NO: 143088 - protein, 9 aa, Influenza A virus
AVDICKAAM

SEQ ID NO: 143089 - protein, 9 aa, Influenza A virus
AVHYPKIYK

SEQ ID NO: 143090 - protein, 9 aa, Influenza A virus
AVHYPKVYK

SEQ ID NO: 143091 - protein, 9 aa, Influenza A virus
AVLRGFLIL

SEQ ID NO: 143092 - protein, 10 aa, Influenza A virus
AVLRGFLILA

SEQ ID NO: 143093 - protein, 11 aa, Influenza A virus
AVLRGFLILAK

SEQ ID NO: 143094 - protein, 10 aa, Influenza A virus
AVLRGFLILG

SEQ ID NO: 143095 - protein, 11 aa, Influenza A virus
AVLRGFLILGK

SEQ ID NO: 143096 - protein, 11 aa, Influenza A virus
AVLRGFLILGR

SEQ ID NO: 143097 - protein, 9 aa, Influenza A virus
AVLRGIPIL

SEQ ID NO: 143098 - protein, 11 aa, Influenza A virus
AVLRGIPILGK

SEQ ID NO: 143099 - protein, 9 aa, Influenza A virus
AVNICKAAM

SEQ ID NO: 143100 - protein, 9 aa, Influenza A virus
AVNVRGSGM

SEQ ID NO: 143101 - protein, 10 aa, Influenza A virus
AVNVRGSGMR

SEQ ID NO: 143102 - protein, 9 aa, Influenza A virus
AVRGDLNFI

SEQ ID NO: 143103 - protein, 11 aa, Influenza A virus
AVRGDLNFINR

SEQ ID NO: 143104 - protein, 9 aa, Influenza A virus
AVRGDLNFM

SEQ ID NO: 143105 - protein, 11 aa, Influenza A virus
AVRGDLNFMNR

SEQ ID NO: 143106 - protein, 9 aa, Influenza A virus
AVRGDLNFV

SEQ ID NO: 143107 - protein, 11 aa, Influenza A virus
AVRGDLNFVNR

SEQ ID NO: 143108 - protein, 9 aa, Influenza A virus
AVRGQYSGF

SEQ ID NO: 143109 - protein, 10 aa, Influenza A virus
AVRGQYSGFV

SEQ ID NO: 143110 - protein, 11 aa, Influenza A virus
AVRGQYSGFVR

SEQ ID NO: 143111 - protein, 10 aa, Influenza A virus
AVSADPLASL

SEQ ID NO: 143112 - protein, 11 aa, Influenza A virus
AVSADPLASLL

SEQ ID NO: 143113 - protein, 9 aa, Influenza A virus
AVTTHYPKV

SEQ ID NO: 143114 - protein, 10 aa, Influenza A virus
AVTTHYPKVY

SEQ ID NO: 143115 - protein, 11 aa, Influenza A virus
AVTTHYPKVYK

SEQ ID NO: 143116 - protein, 9 aa, Influenza A virus
AVVSIDRFL

SEQ ID NO: 143117 - protein, 10 aa, Influenza A virus
AVVSIDRFLR

SEQ ID NO: 143118 - protein, 11 aa, Influenza A virus
AVVSIDRFLRV

SEQ ID NO: 143119 - protein, 8 aa, Influenza A virus
AVYYPKVY

SEQ ID NO: 143120 - protein, 9 aa, Influenza A virus
AVYYPKVYK

SEQ ID NO: 143121 - protein, 10 aa, Influenza A virus
AVYYPKVYKT

SEQ ID NO: 143122 - protein, 11 aa, Influenza A virus
AVYYPKVYKTY

SEQ ID NO: 143123 - protein, 8 aa, Influenza A virus
AYILEREL

SEQ ID NO: 143124 - protein, 9 aa, Influenza A virus
AYILERELV

SEQ ID NO: 143125 - protein, 10 aa, Influenza A virus
AYILERELVR

SEQ ID NO: 143126 - protein, 8 aa, Influenza A virus
AYMFEREL

SEQ ID NO: 143127 - protein, 9 aa, Influenza A virus
AYMFERELV

SEQ ID NO: 143128 - protein, 10 aa, Influenza A virus
AYMFERELVR

SEQ ID NO: 143129 - protein, 11 aa, Influenza A virus
AYMFERELVRK

SEQ ID NO: 143130 - protein, 8 aa, Influenza A virus
AYMLEREL

SEQ ID NO: 143131 - protein, 9 aa, Influenza A virus
AYMLERELV

SEQ ID NO: 143132 - protein, 10 aa, Influenza A virus
AYMLERELVR

SEQ ID NO: 143133 - protein, 11 aa, Influenza A virus
AYMLERELVRK

SEQ ID NO: 143134 - protein, 10 aa, Influenza A virus
CHSTLIGGTR

SEQ ID NO: 143135 - protein, 10 aa, Influenza A virus
CHSTQIGGLR

SEQ ID NO: 143136 - protein, 10 aa, Influenza A virus
CHSTQIGGTR

SEQ ID NO: 143137 - protein, 9 aa, Influenza A virus
CKAAMGLKI

SEQ ID NO: 143138 - protein, 9 aa, Influenza A virus
CKAAMGLRI

SEQ ID NO: 143139 - protein, 10 aa, Influenza A virus
CKIAPLMEAY

SEQ ID NO: 143140 - protein, 9 aa, Influenza A virus
CKIAPLMVA

SEQ ID NO: 143141 - protein, 10 aa, Influenza A virus
CKIAPLMVAY

SEQ ID NO: 143142 - protein, 9 aa, Influenza A virus
CKISPLLVA

SEQ ID NO: 143143 - protein, 10 aa, Influenza A virus
CKISPLLVAY

SEQ ID NO: 143144 - protein, 9 aa, Influenza A virus
CKISPLMVA

SEQ ID NO: 143145 - protein, 10 aa, Influenza A virus
CKISPLMVAY

SEQ ID NO: 143146 - protein, 11 aa, Influenza A virus
CKISPLMVAYM

SEQ ID NO: 143147 - protein, 10 aa, Influenza A virus
CMIKAVRGDL

SEQ ID NO: 143148 - protein, 10 aa, Influenza A virus
CMVKAVRGDL

SEQ ID NO: 143149 - protein, 10 aa, Influenza A virus
CNISPLMVAY

SEQ ID NO: 143150 - protein, 11 aa, Influenza A virus
DEGTAGVESAV

SEQ ID NO: 143151 - protein, 11 aa, Influenza A virus
DEGTSGVESAV

SEQ ID NO: 143152 - protein, 9 aa, Influenza A virus
DEQSIAEAI

SEQ ID NO: 143153 - protein, 9 aa, Influenza A virus
DEQSIAEAV

SEQ ID NO: 143154 - protein, 8 aa, Influenza A virus
DEQSIVEA

SEQ ID NO: 143155 - protein, 9 aa, Influenza A virus
DEQSIVEAI

SEQ ID NO: 143156 - protein, 9 aa, Influenza A virus
DEQSVAEAI

SEQ ID NO: 143157 - protein, 11 aa, Influenza A virus
DESTSGVESAV

SEQ ID NO: 143158 - protein, 9 aa, Influenza A virus
DEYSNAERV

SEQ ID NO: 143159 - protein, 9 aa, Influenza A virus
DEYSRAERV

SEQ ID NO: 143160 - protein, 9 aa, Influenza A virus
DEYSSAEKI

SEQ ID NO: 143161 - protein, 9 aa, Influenza A virus
DEYSSAERV

SEQ ID NO: 143162 - protein, 9 aa, Influenza A virus
DEYSSMERV

SEQ ID NO: 143163 - protein, 9 aa, Influenza A virus
DEYSSTEKV

SEQ ID NO: 143164 - protein, 9 aa, Influenza A virus
DEYSSTERA

SEQ ID NO: 143165 - protein, 10 aa, Influenza A virus
DEYSSTERAV

SEQ ID NO: 143166 - protein, 9 aa, Influenza A virus
DEYSSTERI

SEQ ID NO: 143167 - protein, 9 aa, Influenza A virus
DEYSSTERV

SEQ ID NO: 143168 - protein, 9 aa, Influenza A virus
DGYEEFTMV

SEQ ID NO: 143169 - protein, 9 aa, Influenza A virus
DHMAIIKKY

SEQ ID NO: 143170 - protein, 9 aa, Influenza A virus
DHMAIIKRY

SEQ ID NO: 143171 - protein, 8 aa, Influenza A virus
DHSLIIAA

SEQ ID NO: 143172 - protein, 9 aa, Influenza A virus
DHSLIIAAR

SEQ ID NO: 143173 - protein, 10 aa, Influenza A virus
DICKAAMGLK

SEQ ID NO: 143174 - protein, 10 aa, Influenza A virus
DICKAAMGLR

SEQ ID NO: 143175 - protein, 11 aa, Influenza A virus
DIDQSLIIAAR

SEQ ID NO: 143176 - protein, 9 aa, Influenza A virus
DINPGHANL

SEQ ID NO: 143177 - protein, 11 aa, Influenza A virus
DKRIIETIPER

SEQ ID NO: 143178 - protein, 11 aa, Influenza A virus
DKRIMGMIPER

SEQ ID NO: 143179 - protein, 10 aa, Influenza A virus
DKRYGPALSI

SEQ ID NO: 143180 - protein, 9 aa, Influenza A virus
DLLSQSRTR

SEQ ID NO: 143181 - protein, 9 aa, Influenza A virus
DLMLQSRTR

SEQ ID NO: 143182 - protein, 9 aa, Influenza A virus
DLMSQPRTR

SEQ ID NO: 143183 - protein, 9 aa, Influenza A virus
DLMSQSRTR

SEQ ID NO: 143184 - protein, 11 aa, Influenza A virus
DLNFINRANQR

SEQ ID NO: 143185 - protein, 11 aa, Influenza A virus
DLNFMNRANQR

SEQ ID NO: 143186 - protein, 11 aa, Influenza A virus
DLNFVNRANQR

SEQ ID NO: 143187 - protein, 11 aa, Influenza A virus
DMTPNAEMSLR

SEQ ID NO: 143188 - protein, 11 aa, Influenza A virus
DMTPNTEMSLR

SEQ ID NO: 143189 - protein, 11 aa, Influenza A virus
DMTPSAEMSLR

SEQ ID NO: 143190 - protein, 11 aa, Influenza A virus
DMTPSIEMSMR

SEQ ID NO: 143191 - protein, 11 aa, Influenza A virus
DMTPSTEMSLR

SEQ ID NO: 143192 - protein, 11 aa, Influenza A virus
DMTPSTEMSMR

SEQ ID NO: 143193 - protein, 11 aa, Influenza A virus
DMTPSTEVSLR

SEQ ID NO: 143194 - protein, 11 aa, Influenza A virus
DMTPSTEVSMR

SEQ ID NO: 143195 - protein, 11 aa, Influenza A virus
DMTPSTGMSLR

SEQ ID NO: 143196 - protein, 11 aa, Influenza A virus
DMTPSTVMSMR

SEQ ID NO: 143197 - protein, 11 aa, Influenza A virus
DMTSSTEMSMR

SEQ ID NO: 143198 - protein, 10 aa, Influenza A virus
DNVMGMIGIM

SEQ ID NO: 143199 - protein, 9 aa, Influenza A virus
DNVMGMIGV

SEQ ID NO: 143200 - protein, 9 aa, Influenza A virus
DNVMGMVGV

SEQ ID NO: 143201 - protein, 9 aa, Influenza A virus
DPLASLLEM

SEQ ID NO: 143202 - protein, 9 aa, Influenza A virus
DPLSSLLEM

SEQ ID NO: 143203 - protein, 9 aa, Influenza A virus
DQSLIIAAR

SEQ ID NO: 143204 - protein, 9 aa, Influenza A virus
DQSLIVAAR

SEQ ID NO: 143205 - protein, 9 aa, Influenza A virus
DQSLVIAAR

SEQ ID NO: 143206 - protein, 10 aa, Influenza A virus
DRFLRIRDQR

SEQ ID NO: 143207 - protein, 9 aa, Influenza A virus
DRFLRVRDL

SEQ ID NO: 143208 - protein, 10 aa, Influenza A virus
DRFLRVRDLR

SEQ ID NO: 143209 - protein, 10 aa, Influenza A virus
DRFLRVRDQR

SEQ ID NO: 143210 - protein, 8 aa, Influenza A virus
DRIMVSPL

SEQ ID NO: 143211 - protein, 9 aa, Influenza A virus
DRIMVSPLA

SEQ ID NO: 143212 - protein, 10 aa, Influenza A virus
DRIMVSPLAV

SEQ ID NO: 143213 - protein, 11 aa, Influenza A virus
DRRIMEMIPER

SEQ ID NO: 143214 - protein, 10 aa, Influenza A virus
DRRYGPALSI

SEQ ID NO: 143215 - protein, 8 aa, Influenza A virus
DRVMISPL

SEQ ID NO: 143216 - protein, 9 aa, Influenza A virus
DRVMISPLA

SEQ ID NO: 143217 - protein, 10 aa, Influenza A virus
DRVMISPLAV

SEQ ID NO: 143218 - protein, 8 aa, Influenza A virus
DRVMVSPL

SEQ ID NO: 143219 - protein, 9 aa, Influenza A virus
DRVMVSPLA

SEQ ID NO: 143220 - protein, 10 aa, Influenza A virus
DRVMVSPLAV

SEQ ID NO: 143221 - protein, 10 aa, Influenza A virus
DSQLTITKEK

SEQ ID NO: 143222 - protein, 10 aa, Influenza A virus
DSQTATKRLR

SEQ ID NO: 143223 - protein, 9 aa, Influenza A virus
DSVMGMIGI

SEQ ID NO: 143224 - protein, 10 aa, Influenza A virus
DSVMGMIGIL

SEQ ID NO: 143225 - protein, 9 aa, Influenza A virus
DSVMGMVGV

SEQ ID NO: 143226 - protein, 10 aa, Influenza A virus
DSVMGMVGVL

SEQ ID NO: 143227 - protein, 9 aa, Influenza A virus
DTAQIIKLL

SEQ ID NO: 143228 - protein, 9 aa, Influenza A virus
DTIQIIKLL

SEQ ID NO: 143229 - protein, 9 aa, Influenza A virus
DTNPGHADL

SEQ ID NO: 143230 - protein, 9 aa, Influenza A virus
DTTQIIKLL

SEQ ID NO: 143231 - protein, 9 aa, Influenza A virus
DTVQIIKLL

SEQ ID NO: 143232 - protein, 9 aa, Influenza A virus
DTVQIINLL

SEQ ID NO: 143233 - protein, 11 aa, Influenza A virus
DTVQIINLLPF

SEQ ID NO: 143234 - protein, 11 aa, Influenza A virus
DVDHSLIIAAR

SEQ ID NO: 143235 - protein, 11 aa, Influenza A virus
DVDQSLIIAAR

SEQ ID NO: 143236 - protein, 11 aa, Influenza A virus
DVDQSLIVAAR

SEQ ID NO: 143237 - protein, 11 aa, Influenza A virus
DVDQSLVIAAR

SEQ ID NO: 143238 - protein, 11 aa, Influenza A virus
DVGQSLIIAAR

SEQ ID NO: 143239 - protein, 9 aa, Influenza A virus
DVIGTFDTV

SEQ ID NO: 143240 - protein, 11 aa, Influenza A virus
DVIGTFDTVQI

SEQ ID NO: 143241 - protein, 9 aa, Influenza A virus
DVIQSMIIA

SEQ ID NO: 143242 - protein, 10 aa, Influenza A virus
DVIQSMIIAA

SEQ ID NO: 143243 - protein, 11 aa, Influenza A virus
DVIQSMIIAAR

SEQ ID NO: 143244 - protein, 9 aa, Influenza A virus
DVLGTFDTA

SEQ ID NO: 143245 - protein, 9 aa, Influenza A virus
DVLGTFDTI

SEQ ID NO: 143246 - protein, 9 aa, Influenza A virus
DVLGTFDTV

SEQ ID NO: 143247 - protein, 9 aa, Influenza A virus
DVMGMIGIL

SEQ ID NO: 143248 - protein, 9 aa, Influenza A virus
DVVLVMKRK

SEQ ID NO: 143249 - protein, 10 aa, Influenza A virus
DVVLVMKRKR

SEQ ID NO: 143250 - protein, 9 aa, Influenza A virus
EAIIVAIVF

SEQ ID NO: 143251 - protein, 9 aa, Influenza A virus
EAIIVAMVF

SEQ ID NO: 143252 - protein, 9 aa, Influenza A virus
EAIVVAMVF

SEQ ID NO: 143253 - protein, 9 aa, Influenza A virus
EAKDVIMEV

SEQ ID NO: 143254 - protein, 10 aa, Influenza A virus
EAKDVIMEVV

SEQ ID NO: 143255 - protein, 9 aa, Influenza A virus
EAQDVIMEV

SEQ ID NO: 143256 - protein, 10 aa, Influenza A virus
EAQDVIMEVV

SEQ ID NO: 143257 - protein, 9 aa, Influenza A virus
EAVIVAMVF

SEQ ID NO: 143258 - protein, 9 aa, Influenza A virus
EAYMLEREL

SEQ ID NO: 143259 - protein, 10 aa, Influenza A virus
EAYMLERELV

SEQ ID NO: 143260 - protein, 11 aa, Influenza A virus
EAYMLERELVR

SEQ ID NO: 143261 - protein, 11 aa, Influenza A virus
EDRRYGPALSI

SEQ ID NO: 143262 - protein, 10 aa, Influenza A virus
EEFTIVGKRA

SEQ ID NO: 143263 - protein, 10 aa, Influenza A virus
EEFTIVGRRA

SEQ ID NO: 143264 - protein, 10 aa, Influenza A virus
EEFTMVGKKA

SEQ ID NO: 143265 - protein, 10 aa, Influenza A virus
EEFTMVGKRA

SEQ ID NO: 143266 - protein, 10 aa, Influenza A virus
EEFTMVGRRA

SEQ ID NO: 143267 - protein, 9 aa, Influenza A virus
EELQDCKIA

SEQ ID NO: 143268 - protein, 10 aa, Influenza A virus
EELQDCKIAP

SEQ ID NO: 143269 - protein, 9 aa, Influenza A virus
EELQNCKIA

SEQ ID NO: 143270 - protein, 10 aa, Influenza A virus
EELQNCKIAP

SEQ ID NO: 143271 - protein, 10 aa, Influenza A virus
EEMLTGNLQT

SEQ ID NO: 143272 - protein, 11 aa, Influenza A virus
EEMLTGNLQTL

SEQ ID NO: 143273 - protein, 10 aa, Influenza A virus
EEQAVDICKA

SEQ ID NO: 143274 - protein, 11 aa, Influenza A virus
EEQAVDICKAA

SEQ ID NO: 143275 - protein, 10 aa, Influenza A virus
EEQAVEICKA

SEQ ID NO: 143276 - protein, 11 aa, Influenza A virus
EEQAVEICKAA

SEQ ID NO: 143277 - protein, 10 aa, Influenza A virus
EEQAVGICKA

SEQ ID NO: 143278 - protein, 11 aa, Influenza A virus
EEQAVGICKAA

SEQ ID NO: 143279 - protein, 10 aa, Influenza A virus
EEQAVNICKA

SEQ ID NO: 143280 - protein, 11 aa, Influenza A virus
EEQAVNICKAA

SEQ ID NO: 143281 - protein, 9 aa, Influenza A virus
EERRYGPAL

SEQ ID NO: 143282 - protein, 11 aa, Influenza A virus
EERRYGPALSI

SEQ ID NO: 143283 - protein, 10 aa, Influenza A virus
EEVLTGNLQA

SEQ ID NO: 143284 - protein, 11 aa, Influenza A virus
EEVSETHGTER

SEQ ID NO: 143285 - protein, 11 aa, Influenza A virus
EFEPFQSLVPR

SEQ ID NO: 143286 - protein, 8 aa, Influenza A virus
EFESFQSL

SEQ ID NO: 143287 - protein, 11 aa, Influenza A virus
EFESFQSLVPK

SEQ ID NO: 143288 - protein, 9 aa, Influenza A virus
EGFEEFTMV

SEQ ID NO: 143289 - protein, 10 aa, Influenza A virus
EGIAGVESAV

SEQ ID NO: 143290 - protein, 10 aa, Influenza A virus
EGTAGVESAV

SEQ ID NO: 143291 - protein, 10 aa, Influenza A virus
EGTSGVESAV

SEQ ID NO: 143292 - protein, 10 aa, Influenza A virus
EGTTGIESAV

SEQ ID NO: 143293 - protein, 10 aa, Influenza A virus
EGTTGVESAV

SEQ ID NO: 143294 - protein, 11 aa, Influenza A virus
EGYEEFTIVGR

SEQ ID NO: 143295 - protein, 9 aa, Influenza A virus
EGYEEFTMV

SEQ ID NO: 143296 - protein, 11 aa, Influenza A virus
EGYEEFTMVGR

SEQ ID NO: 143297 - protein, 9 aa, Influenza A virus
EHIDNVMGM

SEQ ID NO: 143298 - protein, 9 aa, Influenza A virus
EHIDSVMGM

SEQ ID NO: 143299 - protein, 9 aa, Influenza A virus
EICKAAMGL

SEQ ID NO: 143300 - protein, 10 aa, Influenza A virus
EICKAAMGLR

SEQ ID NO: 143301 - protein, 10 aa, Influenza A virus
EILTGNLQTL

SEQ ID NO: 143302 - protein, 11 aa, Influenza A virus
EILTGNLQTLK

SEQ ID NO: 143303 - protein, 10 aa, Influenza A virus
EINGPESILV

SEQ ID NO: 143304 - protein, 10 aa, Influenza A virus
EINGPESVLI

SEQ ID NO: 143305 - protein, 10 aa, Influenza A virus
EINGPESVLV

SEQ ID NO: 143306 - protein, 10 aa, Influenza A virus
EINGSESVLV

SEQ ID NO: 143307 - protein, 11 aa, Influenza A virus
EKLQDCKIAPL

SEQ ID NO: 143308 - protein, 11 aa, Influenza A virus
EKLTITYSSSL

SEQ ID NO: 143309 - protein, 11 aa, Influenza A virus
EKLTITYSSSM

SEQ ID NO: 143310 - protein, 11 aa, Influenza A virus
EKSMRGIRISK

SEQ ID NO: 143311 - protein, 10 aa, Influenza A virus
ELKDCKISPL

SEQ ID NO: 143312 - protein, 10 aa, Influenza A virus
ELKNCNISPL

SEQ ID NO: 143313 - protein, 10 aa, Influenza A virus
ELLTGNLQTL

SEQ ID NO: 143314 - protein, 10 aa, Influenza A virus
ELQDCKIAPL

SEQ ID NO: 143315 - protein, 10 aa, Influenza A virus
ELQDCKISPL

SEQ ID NO: 143316 - protein, 10 aa, Influenza A virus
ELQECKISPL

SEQ ID NO: 143317 - protein, 10 aa, Influenza A virus
ELQGCKISPL

SEQ ID NO: 143318 - protein, 10 aa, Influenza A virus
ELQNCKIAPL

SEQ ID NO: 143319 - protein, 10 aa, Influenza A virus
ELQNCKISPL

SEQ ID NO: 143320 - protein, 10 aa, Influenza A virus
ELRDCKISPL

SEQ ID NO: 143321 - protein, 10 aa, Influenza A virus
ELRDLLSQSR

SEQ ID NO: 143322 - protein, 10 aa, Influenza A virus
ELRDLMLQSR

SEQ ID NO: 143323 - protein, 10 aa, Influenza A virus
ELRDLMSQPR

SEQ ID NO: 143324 - protein, 10 aa, Influenza A virus
ELRDLMSQSR

SEQ ID NO: 143325 - protein, 10 aa, Influenza A virus
ELRNLMSQSR

SEQ ID NO: 143326 - protein, 10 aa, Influenza A virus
ELSNIAKGEK

SEQ ID NO: 143327 - protein, 10 aa, Influenza A virus
ELSNLTKGEK

SEQ ID NO: 143328 - protein, 10 aa, Influenza A virus
ELSSLAKGEK

SEQ ID NO: 143329 - protein, 9 aa, Influenza A virus
ELVRKTRFL

SEQ ID NO: 143330 - protein, 11 aa, Influenza A virus
ELVRKTRFLPV

SEQ ID NO: 143331 - protein, 10 aa, Influenza A virus
EMLTGNLQTL

SEQ ID NO: 143332 - protein, 11 aa, Influenza A virus
EMLTGNLQTLK

SEQ ID NO: 143333 - protein, 11 aa, Influenza A virus
EMSLRGIRISK

SEQ ID NO: 143334 - protein, 11 aa, Influenza A virus
EMSLRGIRVSK

SEQ ID NO: 143335 - protein, 8 aa, Influenza A virus
EMSLRGLR

SEQ ID NO: 143336 - protein, 11 aa, Influenza A virus
EMSLRGLRVSK

SEQ ID NO: 143337 - protein, 11 aa, Influenza A virus
EMSLRGVRVSK

SEQ ID NO: 143338 - protein, 11 aa, Influenza A virus
EMSMRGIRVSK

SEQ ID NO: 143339 - protein, 8 aa, Influenza A virus
EMSMRGLR

SEQ ID NO: 143340 - protein, 9 aa, Influenza A virus
EMSMRGLRV

SEQ ID NO: 143341 - protein, 11 aa, Influenza A virus
EMSMRGLRVSK

SEQ ID NO: 143342 - protein, 11 aa, Influenza A virus
EMSMRGVRISK

SEQ ID NO: 143343 - protein, 11 aa, Influenza A virus
EMSMRGVRVSK

SEQ ID NO: 143344 - protein, 9 aa, Influenza A virus
ENKRYGPAL

SEQ ID NO: 143345 - protein, 9 aa, Influenza A virus
EPFQSLIPK

SEQ ID NO: 143346 - protein, 10 aa, Influenza A virus
EPFQSLIPKA

SEQ ID NO: 143347 - protein, 11 aa, Influenza A virus
EPFQSLIPKAA

SEQ ID NO: 143348 - protein, 8 aa, Influenza A virus
EPFQSLVL

SEQ ID NO: 143349 - protein, 9 aa, Influenza A virus
EPFQSLVLK

SEQ ID NO: 143350 - protein, 10 aa, Influenza A virus
EPFQSLVLKA

SEQ ID NO: 143351 - protein, 11 aa, Influenza A virus
EPFQSLVLKAA

SEQ ID NO: 143352 - protein, 9 aa, Influenza A virus
EPFQSLVPK

SEQ ID NO: 143353 - protein, 10 aa, Influenza A virus
EPFQSLVPKA

SEQ ID NO: 143354 - protein, 11 aa, Influenza A virus
EPFQSLVPKAA

SEQ ID NO: 143355 - protein, 9 aa, Influenza A virus
EPFQSLVPR

SEQ ID NO: 143356 - protein, 10 aa, Influenza A virus
EPFQSLVPRA

SEQ ID NO: 143357 - protein, 9 aa, Influenza A virus
EPIDDVMGM

SEQ ID NO: 143358 - protein, 9 aa, Influenza A virus
EPIDNIMGM

SEQ ID NO: 143359 - protein, 9 aa, Influenza A virus
EPIDNVMGM

SEQ ID NO: 143360 - protein, 10 aa, Influenza A virus
EPIDNVMGMV

SEQ ID NO: 143361 - protein, 10 aa, Influenza A virus
EPSRMQFSSL

SEQ ID NO: 143362 - protein, 9 aa, Influenza A virus
EPTMLYNKM

SEQ ID NO: 143363 - protein, 9 aa, Influenza A virus
EQGQTLWSR

SEQ ID NO: 143364 - protein, 10 aa, Influenza A virus
EQLYTPGGEV

SEQ ID NO: 143365 - protein, 10 aa, Influenza A virus
EQMYAPGGEV

SEQ ID NO: 143366 - protein, 10 aa, Influenza A virus
EQMYTPGGEV

SEQ ID NO: 143367 - protein, 9 aa, Influenza A virus
EQMYTPGGR

SEQ ID NO: 143368 - protein, 10 aa, Influenza A virus
EQSIAEAIIV

SEQ ID NO: 143369 - protein, 10 aa, Influenza A virus
EQSIAEAVIV

SEQ ID NO: 143370 - protein, 10 aa, Influenza A virus
EQSRIQFSSL

SEQ ID NO: 143371 - protein, 10 aa, Influenza A virus
EQSRMQFSSL

SEQ ID NO: 143372 - protein, 10 aa, Influenza A virus
ERIKELRDLL

SEQ ID NO: 143373 - protein, 9 aa, Influenza A virus
ERIKELRNL

SEQ ID NO: 143374 - protein, 9 aa, Influenza A virus
ERIKGLRDL

SEQ ID NO: 143375 - protein, 11 aa, Influenza A virus
ERLKNGTFGPV

SEQ ID NO: 143376 - protein, 9 aa, Influenza A virus
ERLTITYSS

SEQ ID NO: 143377 - protein, 11 aa, Influenza A virus
ERLTITYSSSM

SEQ ID NO: 143378 - protein, 9 aa, Influenza A virus
ERNDQGQTL

SEQ ID NO: 143379 - protein, 9 aa, Influenza A virus
ERNEQGQAL

SEQ ID NO: 143380 - protein, 9 aa, Influenza A virus
ERNEQGQIL

SEQ ID NO: 143381 - protein, 9 aa, Influenza A virus
ERNEQGQTL

SEQ ID NO: 143382 - protein, 10 aa, Influenza A virus
ERRYGPALSI

SEQ ID NO: 143383 - protein, 9 aa, Influenza A virus
ESAVLRGFL

SEQ ID NO: 143384 - protein, 10 aa, Influenza A virus
ESAVLRGFLI

SEQ ID NO: 143385 - protein, 10 aa, Influenza A virus
ESAVLRGIPI

SEQ ID NO: 143386 - protein, 9 aa, Influenza A virus
ESFQSLVPK

SEQ ID NO: 143387 - protein, 10 aa, Influenza A virus
ESFQSLVPKA

SEQ ID NO: 143388 - protein, 11 aa, Influenza A virus
ESFQSLVPKAA

SEQ ID NO: 143389 - protein, 9 aa, Influenza A virus
ESIDNVMGM

SEQ ID NO: 143390 - protein, 10 aa, Influenza A virus
ESIDNVMGMI

SEQ ID NO: 143391 - protein, 9 aa, Influenza A virus
ESILVNTYQ

SEQ ID NO: 143392 - protein, 10 aa, Influenza A virus
ESILVNTYQW

SEQ ID NO: 143393 - protein, 10 aa, Influenza A virus
ESQLKITQEK

SEQ ID NO: 143394 - protein, 10 aa, Influenza A virus
ESQLMITKEK

SEQ ID NO: 143395 - protein, 10 aa, Influenza A virus
ESQLMVTKEK

SEQ ID NO: 143396 - protein, 10 aa, Influenza A virus
ESQLPITKEK

SEQ ID NO: 143397 - protein, 10 aa, Influenza A virus
ESQLTITKEK

SEQ ID NO: 143398 - protein, 10 aa, Influenza A virus
ESQLTITREK

SEQ ID NO: 143399 - protein, 10 aa, Influenza A virus
ESQLTTTKEK

SEQ ID NO: 143400 - protein, 9 aa, Influenza A virus
ESTSGVESA

SEQ ID NO: 143401 - protein, 10 aa, Influenza A virus
ESTSGVESAV

SEQ ID NO: 143402 - protein, 9 aa, Influenza A virus
ESVLINTYQ

SEQ ID NO: 143403 - protein, 10 aa, Influenza A virus
ESVLINTYQW

SEQ ID NO: 143404 - protein, 11 aa, Influenza A virus
ESVLINTYQWV

SEQ ID NO: 143405 - protein, 10 aa, Influenza A virus
ESVLVNTYQW

SEQ ID NO: 143406 - protein, 11 aa, Influenza A virus
ESVLVNTYQWV

SEQ ID NO: 143407 - protein, 10 aa, Influenza A virus
ETHGTERLTI

SEQ ID NO: 143408 - protein, 9 aa, Influenza A virus
ETIDNVMGM

SEQ ID NO: 143409 - protein, 10 aa, Influenza A virus
ETIDNVMGMI

SEQ ID NO: 143410 - protein, 9 aa, Influenza A virus
ETRRLIQLI

SEQ ID NO: 143411 - protein, 9 aa, Influenza A virus
ETVKIQWSH

SEQ ID NO: 143412 - protein, 9 aa, Influenza A virus
ETVKIQWSQ

SEQ ID NO: 143413 - protein, 10 aa, Influenza A virus
ETVKIQWSQV

SEQ ID NO: 143414 - protein, 9 aa, Influenza A virus
EVLFQNWGI

SEQ ID NO: 143415 - protein, 9 aa, Influenza A virus
EVLHLTQGA

SEQ ID NO: 143416 - protein, 11 aa, Influenza A virus
EVLTGNLQALK

SEQ ID NO: 143417 - protein, 11 aa, Influenza A virus
EVLTGNLQTLK

SEQ ID NO: 143418 - protein, 10 aa, Influenza A virus
EVNETQGTEK

SEQ ID NO: 143419 - protein, 9 aa, Influenza A virus
EVNGPESVL

SEQ ID NO: 143420 - protein, 10 aa, Influenza A virus
EVNGPESVLV

SEQ ID NO: 143421 - protein, 10 aa, Influenza A virus
EVSEAQGTEK

SEQ ID NO: 143422 - protein, 10 aa, Influenza A virus
EVSETHGTEK

SEQ ID NO: 143423 - protein, 10 aa, Influenza A virus
EVSETHGTER

SEQ ID NO: 143424 - protein, 10 aa, Influenza A virus
EVSETQGMEK

SEQ ID NO: 143425 - protein, 10 aa, Influenza A virus
EVSETQGTEK

SEQ ID NO: 143426 - protein, 10 aa, Influenza A virus
EVSETQGTER

SEQ ID NO: 143427 - protein, 9 aa, Influenza A virus
EVSLRGVRV

SEQ ID NO: 143428 - protein, 11 aa, Influenza A virus
EVSLRGVRVSK

SEQ ID NO: 143429 - protein, 9 aa, Influenza A virus
EVSMRGVRV

SEQ ID NO: 143430 - protein, 11 aa, Influenza A virus
EVSMRGVRVSK

SEQ ID NO: 143431 - protein, 10 aa, Influenza A virus
EVVFPNEVGA

SEQ ID NO: 143432 - protein, 11 aa, Influenza A virus
EVVFPNEVGAK

SEQ ID NO: 143433 - protein, 11 aa, Influenza A virus
EVVFPNEVGAR

SEQ ID NO: 143434 - protein, 9 aa, Influenza A virus
FAAAPPEPS

SEQ ID NO: 143435 - protein, 10 aa, Influenza A virus
FAAAPPEPSR

SEQ ID NO: 143436 - protein, 11 aa, Influenza A virus
FAAAPPEPSRM

SEQ ID NO: 143437 - protein, 10 aa, Influenza A virus
FAAAPPEQSR

SEQ ID NO: 143438 - protein, 11 aa, Influenza A virus
FAAAPPEQSRM

SEQ ID NO: 143439 - protein, 8 aa, Influenza A virus
FAAAPPKL

SEQ ID NO: 143440 - protein, 10 aa, Influenza A virus
FAAAPPKLSR

SEQ ID NO: 143441 - protein, 11 aa, Influenza A virus
FAAAPPKLSRM

SEQ ID NO: 143442 - protein, 11 aa, Influenza A virus
FAAAPPKQSGM

SEQ ID NO: 143443 - protein, 10 aa, Influenza A virus
FAAAPPKQSR

SEQ ID NO: 143444 - protein, 11 aa, Influenza A virus
FAAAPPKQSRM

SEQ ID NO: 143445 - protein, 8 aa, Influenza A virus
FAGFTFKR

SEQ ID NO: 143446 - protein, 10 aa, Influenza A virus
FDTAQIIKLL

SEQ ID NO: 143447 - protein, 10 aa, Influenza A virus
FDTVQIINLL

SEQ ID NO: 143448 - protein, 10 aa, Influenza A virus
FEPFQSLIPK

SEQ ID NO: 143449 - protein, 9 aa, Influenza A virus
FEPFQSLVL

SEQ ID NO: 143450 - protein, 10 aa, Influenza A virus
FEPFQSLVLK

SEQ ID NO: 143451 - protein, 10 aa, Influenza A virus
FEPFQSLVPK

SEQ ID NO: 143452 - protein, 10 aa, Influenza A virus
FEPFQSLVPR

SEQ ID NO: 143453 - protein, 8 aa, Influenza A virus
FESFQSLV

SEQ ID NO: 143454 - protein, 9 aa, Influenza A virus
FESFQSLVP

SEQ ID NO: 143455 - protein, 10 aa, Influenza A virus
FESFQSLVPK

SEQ ID NO: 143456 - protein, 11 aa, Influenza A virus
FESFQSLVPKA

SEQ ID NO: 143457 - protein, 9 aa, Influenza A virus
FGNQVKIRR

SEQ ID NO: 143458 - protein, 10 aa, Influenza A virus
FGPVHFGNQV

SEQ ID NO: 143459 - protein, 10 aa, Influenza A virus
FGPVHFRNHV

SEQ ID NO: 143460 - protein, 10 aa, Influenza A virus
FGPVHFRNQI

SEQ ID NO: 143461 - protein, 10 aa, Influenza A virus
FGPVHFRNQV

SEQ ID NO: 143462 - protein, 10 aa, Influenza A virus
FGPVRFRNQV

SEQ ID NO: 143463 - protein, 9 aa, Influenza A virus
FHKDAKVLF

SEQ ID NO: 143464 - protein, 9 aa, Influenza A virus
FINRANQRL

SEQ ID NO: 143465 - protein, 9 aa, Influenza A virus
FKRISGSSV

SEQ ID NO: 143466 - protein, 10 aa, Influenza A virus
FKRISGSSVK

SEQ ID NO: 143467 - protein, 11 aa, Influenza A virus
FKRISGSSVKR

SEQ ID NO: 143468 - protein, 9 aa, Influenza A virus
FKRTKGFSV

SEQ ID NO: 143469 - protein, 11 aa, Influenza A virus
FKRTKGFSVKR

SEQ ID NO: 143470 - protein, 9 aa, Influenza A virus
FKRTNGSSV

SEQ ID NO: 143471 - protein, 11 aa, Influenza A virus
FKRTNGSSVKK

SEQ ID NO: 143472 - protein, 9 aa, Influenza A virus
FKRTSGSSF

SEQ ID NO: 143473 - protein, 10 aa, Influenza A virus
FKRTSGSSFT

SEQ ID NO: 143474 - protein, 11 aa, Influenza A virus
FKRTSGSSFTK

SEQ ID NO: 143475 - protein, 9 aa, Influenza A virus
FKRTSGSSI

SEQ ID NO: 143476 - protein, 11 aa, Influenza A virus
FKRTSGSSIKK

SEQ ID NO: 143477 - protein, 11 aa, Influenza A virus
FKRTSGSSIKR

SEQ ID NO: 143478 - protein, 11 aa, Influenza A virus
FKRTSGSSTKK

SEQ ID NO: 143479 - protein, 11 aa, Influenza A virus
FKRTSGSSTKR

SEQ ID NO: 143480 - protein, 9 aa, Influenza A virus
FKRTSGSSV

SEQ ID NO: 143481 - protein, 11 aa, Influenza A virus
FKRTSGSSVER

SEQ ID NO: 143482 - protein, 11 aa, Influenza A virus
FKRTSGSSVKK

SEQ ID NO: 143483 - protein, 11 aa, Influenza A virus
FKRTSGSSVKR

SEQ ID NO: 143484 - protein, 11 aa, Influenza A virus
FKRTSGSSVNR

SEQ ID NO: 143485 - protein, 9 aa, Influenza A virus
FKRTSGTSV

SEQ ID NO: 143486 - protein, 11 aa, Influenza A virus
FKRTSGTSVKK

SEQ ID NO: 143487 - protein, 11 aa, Influenza A virus
FKRTSGTSVRR

SEQ ID NO: 143488 - protein, 10 aa, Influenza A virus
FLILAKEDKR

SEQ ID NO: 143489 - protein, 10 aa, Influenza A virus
FLILGKEDKR

SEQ ID NO: 143490 - protein, 10 aa, Influenza A virus
FLILGKEDRR

SEQ ID NO: 143491 - protein, 9 aa, Influenza A virus
FLILGKEER

SEQ ID NO: 143492 - protein, 10 aa, Influenza A virus
FLILGKEERR

SEQ ID NO: 143493 - protein, 9 aa, Influenza A virus
FLILGKENK

SEQ ID NO: 143494 - protein, 10 aa, Influenza A virus
FLILGKENKR

SEQ ID NO: 143495 - protein, 10 aa, Influenza A virus
FLILGKGDRR

SEQ ID NO: 143496 - protein, 11 aa, Influenza A virus
FLILGKGDRRY

SEQ ID NO: 143497 - protein, 10 aa, Influenza A virus
FLILGREDKR

SEQ ID NO: 143498 - protein, 9 aa, Influenza A virus
FLILGREDR

SEQ ID NO: 143499 - protein, 10 aa, Influenza A virus
FLILGREDRR

SEQ ID NO: 143500 - protein, 11 aa, Influenza A virus
FLILGREDRRY

SEQ ID NO: 143501 - protein, 9 aa, Influenza A virus
FLNWGIEHI

SEQ ID NO: 143502 - protein, 10 aa, Influenza A virus
FLNWGIEHID

SEQ ID NO: 143503 - protein, 9 aa, Influenza A virus
FLNWGIEPI

SEQ ID NO: 143504 - protein, 10 aa, Influenza A virus
FLNWGIEPID

SEQ ID NO: 143505 - protein, 11 aa, Influenza A virus
FLNWGIEPIDN

SEQ ID NO: 143506 - protein, 10 aa, Influenza A virus
FLPVAGGTSS

SEQ ID NO: 143507 - protein, 11 aa, Influenza A virus
FLPVAGGTSSI

SEQ ID NO: 143508 - protein, 11 aa, Influenza A virus
FLPVAGGTSSM

SEQ ID NO: 143509 - protein, 11 aa, Influenza A virus
FLPVAGGTSSV

SEQ ID NO: 143510 - protein, 10 aa, Influenza A virus
FLPVSGGTSS

SEQ ID NO: 143511 - protein, 11 aa, Influenza A virus
FLPVSGGTSSV

SEQ ID NO: 143512 - protein, 11 aa, Influenza A virus
FLRVRDLRGNV

SEQ ID NO: 143513 - protein, 11 aa, Influenza A virus
FLRVRDQQGNV

SEQ ID NO: 143514 - protein, 9 aa, Influenza A virus
FMNRANQRL

SEQ ID NO: 143515 - protein, 10 aa, Influenza A virus
FMNRANQRLN

SEQ ID NO: 143516 - protein, 9 aa, Influenza A virus
FNYNKATKR

SEQ ID NO: 143517 - protein, 10 aa, Influenza A virus
FNYNKATKRL

SEQ ID NO: 143518 - protein, 9 aa, Influenza A virus
FNYNKGTKR

SEQ ID NO: 143519 - protein, 10 aa, Influenza A virus
FNYNKGTKRL

SEQ ID NO: 143520 - protein, 9 aa, Influenza A virus
FNYNKSTKR

SEQ ID NO: 143521 - protein, 10 aa, Influenza A virus
FNYNKSTKRL

SEQ ID NO: 143522 - protein, 9 aa, Influenza A virus
FNYNKTTKR

SEQ ID NO: 143523 - protein, 10 aa, Influenza A virus
FNYNKTTKRL

SEQ ID NO: 143524 - protein, 9 aa, Influenza A virus
FNYNKVTKR

SEQ ID NO: 143525 - protein, 10 aa, Influenza A virus
FNYNKVTKRL

SEQ ID NO: 143526 - protein, 9 aa, Influenza A virus
FNYNRTTKR

SEQ ID NO: 143527 - protein, 10 aa, Influenza A virus
FNYNRTTKRL

SEQ ID NO: 143528 - protein, 9 aa, Influenza A virus
FNYSKATKR

SEQ ID NO: 143529 - protein, 10 aa, Influenza A virus
FNYSKATKRL

SEQ ID NO: 143530 - protein, 9 aa, Influenza A virus
FPNEVGAKI

SEQ ID NO: 143531 - protein, 10 aa, Influenza A virus
FPNEVGAKIL

SEQ ID NO: 143532 - protein, 11 aa, Influenza A virus
FPNEVGAKILT

SEQ ID NO: 143533 - protein, 9 aa, Influenza A virus
FPNEVGAQL

SEQ ID NO: 143534 - protein, 10 aa, Influenza A virus
FPNEVGAQLL

SEQ ID NO: 143535 - protein, 11 aa, Influenza A virus
FPNEVGAQLLT

SEQ ID NO: 143536 - protein, 9 aa, Influenza A virus
FPNEVGARI

SEQ ID NO: 143537 - protein, 10 aa, Influenza A virus
FPNEVGARIL

SEQ ID NO: 143538 - protein, 11 aa, Influenza A virus
FPNEVGARILT

SEQ ID NO: 143539 - protein, 9 aa, Influenza A virus
FPNEVGART

SEQ ID NO: 143540 - protein, 10 aa, Influenza A virus
FPNEVGARTL

SEQ ID NO: 143541 - protein, 11 aa, Influenza A virus
FPNEVGARTLT

SEQ ID NO: 143542 - protein, 9 aa, Influenza A virus
FQKDAKALF

SEQ ID NO: 143543 - protein, 9 aa, Influenza A virus
FQKDAKILF

SEQ ID NO: 143544 - protein, 9 aa, Influenza A virus
FQKDAKLLF

SEQ ID NO: 143545 - protein, 10 aa, Influenza A virus
FQKDAKLLFQ

SEQ ID NO: 143546 - protein, 9 aa, Influenza A virus
FQKDAKTLF

SEQ ID NO: 143547 - protein, 9 aa, Influenza A virus
FQKDAKVLF

SEQ ID NO: 143548 - protein, 10 aa, Influenza A virus
FQKDAKVLFL

SEQ ID NO: 143549 - protein, 8 aa, Influenza A virus
FQKGAEVL

SEQ ID NO: 143550 - protein, 9 aa, Influenza A virus
FQKGAEVLF

SEQ ID NO: 143551 - protein, 9 aa, Influenza A virus
FQNWGIEHI

SEQ ID NO: 143552 - protein, 9 aa, Influenza A virus
FQNWGIEPI

SEQ ID NO: 143553 - protein, 10 aa, Influenza A virus
FQNWGIEPID

SEQ ID NO: 143554 - protein, 9 aa, Influenza A virus
FQNWGIESI

SEQ ID NO: 143555 - protein, 10 aa, Influenza A virus
FQNWGIESID

SEQ ID NO: 143556 - protein, 9 aa, Influenza A virus
FQNWGIETI

SEQ ID NO: 143557 - protein, 9 aa, Influenza A virus
FQNWGVEPI

SEQ ID NO: 143558 - protein, 10 aa, Influenza A virus
FQNWGVEPID

SEQ ID NO: 143559 - protein, 10 aa, Influenza A virus
FQQMRDVIGT

SEQ ID NO: 143560 - protein, 11 aa, Influenza A virus
FQQMRDVIGTF

SEQ ID NO: 143561 - protein, 8 aa, Influenza A virus
FQQMRDVL

SEQ ID NO: 143562 - protein, 10 aa, Influenza A virus
FQQMRDVLGT

SEQ ID NO: 143563 - protein, 11 aa, Influenza A virus
FQQMRDVLGTF

SEQ ID NO: 143564 - protein, 9 aa, Influenza A virus
FQSLIPKAA

SEQ ID NO: 143565 - protein, 10 aa, Influenza A virus
FQSLIPKAAR

SEQ ID NO: 143566 - protein, 11 aa, Influenza A virus
FQSLIPKAARA

SEQ ID NO: 143567 - protein, 9 aa, Influenza A virus
FQSLIPKAI

SEQ ID NO: 143568 - protein, 10 aa, Influenza A virus
FQSLIPKAIR

SEQ ID NO: 143569 - protein, 9 aa, Influenza A virus
FQSLVLKAA

SEQ ID NO: 143570 - protein, 10 aa, Influenza A virus
FQSLVLKAAR

SEQ ID NO: 143571 - protein, 9 aa, Influenza A virus
FQSLVPKAA

SEQ ID NO: 143572 - protein, 10 aa, Influenza A virus
FQSLVPKAAR

SEQ ID NO: 143573 - protein, 11 aa, Influenza A virus
FQSLVPKAARA

SEQ ID NO: 143574 - protein, 9 aa, Influenza A virus
FQSLVPKAI

SEQ ID NO: 143575 - protein, 10 aa, Influenza A virus
FQSLVPKAIR

SEQ ID NO: 143576 - protein, 10 aa, Influenza A virus
FQSLVPKATR

SEQ ID NO: 143577 - protein, 9 aa, Influenza A virus
FQSLVPKAV

SEQ ID NO: 143578 - protein, 10 aa, Influenza A virus
FQSLVPKAVR

SEQ ID NO: 143579 - protein, 9 aa, Influenza A virus
FQSLVPRAT

SEQ ID NO: 143580 - protein, 10 aa, Influenza A virus
FQSLVPRATR

SEQ ID NO: 143581 - protein, 9 aa, Influenza A virus
FQSWGIEPI

SEQ ID NO: 143582 - protein, 10 aa, Influenza A virus
FQSWGIEPID

SEQ ID NO: 143583 - protein, 9 aa, Influenza A virus
FRNHVKIRR

SEQ ID NO: 143584 - protein, 9 aa, Influenza A virus
FRNQIKIRR

SEQ ID NO: 143585 - protein, 10 aa, Influenza A virus
FRNQIKIRRR

SEQ ID NO: 143586 - protein, 9 aa, Influenza A virus
FRNQVKIRR

SEQ ID NO: 143587 - protein, 10 aa, Influenza A virus
FRNQVKIRRR

SEQ ID NO: 143588 - protein, 8 aa, Influenza A virus
FSFAGFTF

SEQ ID NO: 143589 - protein, 9 aa, Influenza A virus
FSFAGFTFK

SEQ ID NO: 143590 - protein, 10 aa, Influenza A virus
FSFAGFTFKR

SEQ ID NO: 143591 - protein, 11 aa, Influenza A virus
FSFAGFTFKRT

SEQ ID NO: 143592 - protein, 8 aa, Influenza A virus
FSFGGFTF

SEQ ID NO: 143593 - protein, 9 aa, Influenza A virus
FSFGGFTFK

SEQ ID NO: 143594 - protein, 10 aa, Influenza A virus
FSFGGFTFKR

SEQ ID NO: 143595 - protein, 11 aa, Influenza A virus
FSFGGFTFKRI

SEQ ID NO: 143596 - protein, 11 aa, Influenza A virus
FSFGGFTFKRT

SEQ ID NO: 143597 - protein, 9 aa, Influenza A virus
FSQDDCMIK

SEQ ID NO: 143598 - protein, 10 aa, Influenza A virus
FSQDDCMIKA

SEQ ID NO: 143599 - protein, 8 aa, Influenza A virus
FSSFTVNV

SEQ ID NO: 143600 - protein, 9 aa, Influenza A virus
FSSFTVNVR

SEQ ID NO: 143601 - protein, 10 aa, Influenza A virus
FSSFTVNVRG

SEQ ID NO: 143602 - protein, 9 aa, Influenza A virus
FSSLAVNVR

SEQ ID NO: 143603 - protein, 9 aa, Influenza A virus
FSSLTINVR

SEQ ID NO: 143604 - protein, 9 aa, Influenza A virus
FSSLTVNVR

SEQ ID NO: 143605 - protein, 9 aa, Influenza A virus
FSVKREEEV

SEQ ID NO: 143606 - protein, 9 aa, Influenza A virus
FTFKRISGS

SEQ ID NO: 143607 - protein, 11 aa, Influenza A virus
FTFKRISGSSV

SEQ ID NO: 143608 - protein, 9 aa, Influenza A virus
FTFKRTKGF

SEQ ID NO: 143609 - protein, 11 aa, Influenza A virus
FTFKRTKGFSV

SEQ ID NO: 143610 - protein, 9 aa, Influenza A virus
FTFKRTNGS

SEQ ID NO: 143611 - protein, 11 aa, Influenza A virus
FTFKRTNGSSV

SEQ ID NO: 143612 - protein, 9 aa, Influenza A virus
FTFKRTSGS

SEQ ID NO: 143613 - protein, 11 aa, Influenza A virus
FTFKRTSGSSF

SEQ ID NO: 143614 - protein, 11 aa, Influenza A virus
FTFKRTSGSSI

SEQ ID NO: 143615 - protein, 11 aa, Influenza A virus
FTFKRTSGSSV

SEQ ID NO: 143616 - protein, 9 aa, Influenza A virus
FTFKRTSGT

SEQ ID NO: 143617 - protein, 11 aa, Influenza A virus
FTFKRTSGTSV

SEQ ID NO: 143618 - protein, 10 aa, Influenza A virus
FTIVGKRATA

SEQ ID NO: 143619 - protein, 9 aa, Influenza A virus
FTIVGRRAT

SEQ ID NO: 143620 - protein, 10 aa, Influenza A virus
FTIVGRRATA

SEQ ID NO: 143621 - protein, 10 aa, Influenza A virus
FTMVGKKATA

SEQ ID NO: 143622 - protein, 10 aa, Influenza A virus
FTMVGKRATA

SEQ ID NO: 143623 - protein, 9 aa, Influenza A virus
FTMVGRRAT

SEQ ID NO: 143624 - protein, 10 aa, Influenza A virus
FTMVGRRATA

SEQ ID NO: 143625 - protein, 10 aa, Influenza A virus
FTVNVRGSGM

SEQ ID NO: 143626 - protein, 11 aa, Influenza A virus
FTVNVRGSGMR

SEQ ID NO: 143627 - protein, 9 aa, Influenza A virus
FVNRANQRL

SEQ ID NO: 143628 - protein, 9 aa, Influenza A virus
FVRALFQQM

SEQ ID NO: 143629 - protein, 10 aa, Influenza A virus
FVRALFQQMR

SEQ ID NO: 143630 - protein, 9 aa, Influenza A virus
FVRTLFQQM

SEQ ID NO: 143631 - protein, 10 aa, Influenza A virus
FVRTLFQQMR

SEQ ID NO: 143632 - protein, 9 aa, Influenza A virus
GAEVLFQNW

SEQ ID NO: 143633 - protein, 9 aa, Influenza A virus
GDRRYGPAL

SEQ ID NO: 143634 - protein, 11 aa, Influenza A virus
GDRRYGPALSI

SEQ ID NO: 143635 - protein, 10 aa, Influenza A virus
GEGTAGVESA

SEQ ID NO: 143636 - protein, 11 aa, Influenza A virus
GEGTAGVESAV

SEQ ID NO: 143637 - protein, 8 aa, Influenza A virus
GEKANVLI

SEQ ID NO: 143638 - protein, 9 aa, Influenza A virus
GEKANVLIM

SEQ ID NO: 143639 - protein, 9 aa, Influenza A virus
GEVRNDDVI

SEQ ID NO: 143640 - protein, 11 aa, Influenza A virus
GFEEFTMVGKR

SEQ ID NO: 143641 - protein, 10 aa, Influenza A virus
GFLILGKEDR

SEQ ID NO: 143642 - protein, 10 aa, Influenza A virus
GFLILGKEER

SEQ ID NO: 143643 - protein, 10 aa, Influenza A virus
GFLILGKGDR

SEQ ID NO: 143644 - protein, 10 aa, Influenza A virus
GFLILGREDR

SEQ ID NO: 143645 - protein, 10 aa, Influenza A virus
GFTFKRTKGF

SEQ ID NO: 143646 - protein, 11 aa, Influenza A virus
GFVRALFQQMR

SEQ ID NO: 143647 - protein, 11 aa, Influenza A virus
GFVRTLFQQMR

SEQ ID NO: 143648 - protein, 9 aa, Influenza A virus
GGFTFKRTK

SEQ ID NO: 143649 - protein, 10 aa, Influenza A virus
GGIKMVDILR

SEQ ID NO: 143650 - protein, 10 aa, Influenza A virus
GGIRMVDILK

SEQ ID NO: 143651 - protein, 10 aa, Influenza A virus
GGIRMVDILR

SEQ ID NO: 143652 - protein, 10 aa, Influenza A virus
GGIRMVEILR

SEQ ID NO: 143653 - protein, 10 aa, Influenza A virus
GGIRMVNILR

SEQ ID NO: 143654 - protein, 10 aa, Influenza A virus
GGLRMVDILR

SEQ ID NO: 143655 - protein, 10 aa, Influenza A virus
GGTKMVDILR

SEQ ID NO: 143656 - protein, 10 aa, Influenza A virus
GGTRMMDILR

SEQ ID NO: 143657 - protein, 10 aa, Influenza A virus
GGTRMVDILK

SEQ ID NO: 143658 - protein, 10 aa, Influenza A virus
GGTRMVDILR

SEQ ID NO: 143659 - protein, 10 aa, Influenza A virus
GGTSSIYIEV

SEQ ID NO: 143660 - protein, 10 aa, Influenza A virus
GGTSSMYIEV

SEQ ID NO: 143661 - protein, 10 aa, Influenza A virus
GGTSSVYIEV

SEQ ID NO: 143662 - protein, 10 aa, Influenza A virus
GGTSSVYVEV

SEQ ID NO: 143663 - protein, 10 aa, Influenza A virus
GGVRMVDILK

SEQ ID NO: 143664 - protein, 10 aa, Influenza A virus
GGVRMVDILR

SEQ ID NO: 143665 - protein, 9 aa, Influenza A virus
GIAGVESAV

SEQ ID NO: 143666 - protein, 10 aa, Influenza A virus
GIAGVESAVL

SEQ ID NO: 143667 - protein, 11 aa, Influenza A virus
GIAGVESAVLR

SEQ ID NO: 143668 - protein, 10 aa, Influenza A virus
GICKAAMGLR

SEQ ID NO: 143669 - protein, 10 aa, Influenza A virus
GIESAVLRGF

SEQ ID NO: 143670 - protein, 9 aa, Influenza A virus
GIKMVDILR

SEQ ID NO: 143671 - protein, 10 aa, Influenza A virus
GILPDMTPNA

SEQ ID NO: 143672 - protein, 10 aa, Influenza A virus
GILPDMTPSA

SEQ ID NO: 143673 - protein, 10 aa, Influenza A virus
GILPDMTPSI

SEQ ID NO: 143674 - protein, 11 aa, Influenza A virus
GILPDMTPSTV

SEQ ID NO: 143675 - protein, 9 aa, Influenza A virus
GIMPDMTPS

SEQ ID NO: 143676 - protein, 9 aa, Influenza A virus
GIRISKMGV

SEQ ID NO: 143677 - protein, 9 aa, Influenza A virus
GIRISKTGV

SEQ ID NO: 143678 - protein, 9 aa, Influenza A virus
GIRMVDILK

SEQ ID NO: 143679 - protein, 9 aa, Influenza A virus
GIRMVDILR

SEQ ID NO: 143680 - protein, 9 aa, Influenza A virus
GIRMVEILR

SEQ ID NO: 143681 - protein, 9 aa, Influenza A virus
GIRMVNILR

SEQ ID NO: 143682 - protein, 9 aa, Influenza A virus
GIRVSKMGV

SEQ ID NO: 143683 - protein, 11 aa, Influenza A virus
GKEERRYGPAL

SEQ ID NO: 143684 - protein, 10 aa, Influenza A virus
GKRATAIIRK

SEQ ID NO: 143685 - protein, 9 aa, Influenza A virus
GKRATAILK

SEQ ID NO: 143686 - protein, 10 aa, Influenza A virus
GKRATAILKK

SEQ ID NO: 143687 - protein, 10 aa, Influenza A virus
GKRATAILRK

SEQ ID NO: 143688 - protein, 10 aa, Influenza A virus
GKRATAIVRK

SEQ ID NO: 143689 - protein, 10 aa, Influenza A virus
GKRATATLRK

SEQ ID NO: 143690 - protein, 10 aa, Influenza A virus
GKYSGFVRTL

SEQ ID NO: 143691 - protein, 11 aa, Influenza A virus
GKYSGFVRTLF

SEQ ID NO: 143692 - protein, 8 aa, Influenza A virus
GLKISSSF

SEQ ID NO: 143693 - protein, 10 aa, Influenza A virus
GLKISSSFSF

SEQ ID NO: 143694 - protein, 9 aa, Influenza A virus
GLRDLMSQS

SEQ ID NO: 143695 - protein, 10 aa, Influenza A virus
GLRDLMSQSR

SEQ ID NO: 143696 - protein, 8 aa, Influenza A virus
GLRISSSF

SEQ ID NO: 143697 - protein, 9 aa, Influenza A virus
GLRISSSFS

SEQ ID NO: 143698 - protein, 10 aa, Influenza A virus
GLRISSSFSF

SEQ ID NO: 143699 - protein, 11 aa, Influenza A virus
GLRISSSFSFA

SEQ ID NO: 143700 - protein, 11 aa, Influenza A virus
GLRISSSFSFG

SEQ ID NO: 143701 - protein, 9 aa, Influenza A virus
GLRMVDILR

SEQ ID NO: 143702 - protein, 9 aa, Influenza A virus
GLRVSKMGV

SEQ ID NO: 143703 - protein, 9 aa, Influenza A virus
GMEKLTITY

SEQ ID NO: 143704 - protein, 9 aa, Influenza A virus
GMIGILPDL

SEQ ID NO: 143705 - protein, 10 aa, Influenza A virus
GMIGILPDLT

SEQ ID NO: 143706 - protein, 9 aa, Influenza A virus
GMIGILPDM

SEQ ID NO: 143707 - protein, 10 aa, Influenza A virus
GMIGILPDMT

SEQ ID NO: 143708 - protein, 9 aa, Influenza A virus
GMIGILPGM

SEQ ID NO: 143709 - protein, 10 aa, Influenza A virus
GMIGILPGMT

SEQ ID NO: 143710 - protein, 9 aa, Influenza A virus
GMIGIMPDM

SEQ ID NO: 143711 - protein, 10 aa, Influenza A virus
GMIGIMPDMT

SEQ ID NO: 143712 - protein, 9 aa, Influenza A virus
GMIGVLPDL

SEQ ID NO: 143713 - protein, 10 aa, Influenza A virus
GMIGVLPDLT

SEQ ID NO: 143714 - protein, 9 aa, Influenza A virus
GMIGVLPDM

SEQ ID NO: 143715 - protein, 10 aa, Influenza A virus
GMIGVLPDMT

SEQ ID NO: 143716 - protein, 9 aa, Influenza A virus
GMQFSSLTI

SEQ ID NO: 143717 - protein, 11 aa, Influenza A virus
GMQFSSLTINV

SEQ ID NO: 143718 - protein, 9 aa, Influenza A virus
GMSLRGVRV

SEQ ID NO: 143719 - protein, 11 aa, Influenza A virus
GMSLRGVRVSK

SEQ ID NO: 143720 - protein, 9 aa, Influenza A virus
GMTGILPDM

SEQ ID NO: 143721 - protein, 10 aa, Influenza A virus
GMTPSTEMSM

SEQ ID NO: 143722 - protein, 11 aa, Influenza A virus
GMTPSTEMSMR

SEQ ID NO: 143723 - protein, 9 aa, Influenza A virus
GMVGILPDL

SEQ ID NO: 143724 - protein, 10 aa, Influenza A virus
GMVGILPDLT

SEQ ID NO: 143725 - protein, 9 aa, Influenza A virus
GMVGILPDM

SEQ ID NO: 143726 - protein, 10 aa, Influenza A virus
GMVGILPDMT

SEQ ID NO: 143727 - protein, 9 aa, Influenza A virus
GMVGVLPDM

SEQ ID NO: 143728 - protein, 10 aa, Influenza A virus
GMVGVLPDMT

SEQ ID NO: 143729 - protein, 10 aa, Influenza A virus
GNLQALKLTV

SEQ ID NO: 143730 - protein, 10 aa, Influenza A virus
GNLQTLKIKV

SEQ ID NO: 143731 - protein, 10 aa, Influenza A virus
GNLQTLKIRV

SEQ ID NO: 143732 - protein, 10 aa, Influenza A virus
GNLQTLKLNV

SEQ ID NO: 143733 - protein, 10 aa, Influenza A virus
GNLQTLKLTV

SEQ ID NO: 143734 - protein, 10 aa, Influenza A virus
GNSPAFNYNK

SEQ ID NO: 143735 - protein, 10 aa, Influenza A virus
GNSPIFNYNK

SEQ ID NO: 143736 - protein, 10 aa, Influenza A virus
GNSPVFNYNK

SEQ ID NO: 143737 - protein, 10 aa, Influenza A virus
GNSPVFNYNR

SEQ ID NO: 143738 - protein, 10 aa, Influenza A virus
GNSPVFNYSK

SEQ ID NO: 143739 - protein, 9 aa, Influenza A virus
GPALSINEL

SEQ ID NO: 143740 - protein, 10 aa, Influenza A virus
GPALSINELR

SEQ ID NO: 143741 - protein, 9 aa, Influenza A virus
GPALSINQL

SEQ ID NO: 143742 - protein, 9 aa, Influenza A virus
GPALSISEL

SEQ ID NO: 143743 - protein, 9 aa, Influenza A virus
GPATGTVHY

SEQ ID NO: 143744 - protein, 11 aa, Influenza A virus
GPATGTVHYPK

SEQ ID NO: 143745 - protein, 9 aa, Influenza A virus
GPATSAVHY

SEQ ID NO: 143746 - protein, 11 aa, Influenza A virus
GPATSAVHYPK

SEQ ID NO: 143747 - protein, 9 aa, Influenza A virus
GPATSTVHY

SEQ ID NO: 143748 - protein, 11 aa, Influenza A virus
GPATSTVHYPK

SEQ ID NO: 143749 - protein, 10 aa, Influenza A virus
GPESILVNTY

SEQ ID NO: 143750 - protein, 10 aa, Influenza A virus
GPESVLINTY

SEQ ID NO: 143751 - protein, 10 aa, Influenza A virus
GPESVLVNTY

SEQ ID NO: 143752 - protein, 9 aa, Influenza A virus
GPITNTVHY

SEQ ID NO: 143753 - protein, 11 aa, Influenza A virus
GPITNTVHYPK

SEQ ID NO: 143754 - protein, 9 aa, Influenza A virus
GPMTNTVHY

SEQ ID NO: 143755 - protein, 11 aa, Influenza A virus
GPMTNTVHYPK

SEQ ID NO: 143756 - protein, 9 aa, Influenza A virus
GPMTSTIHY

SEQ ID NO: 143757 - protein, 11 aa, Influenza A virus
GPMTSTIHYPK

SEQ ID NO: 143758 - protein, 9 aa, Influenza A virus
GPMTSTVHY

SEQ ID NO: 143759 - protein, 11 aa, Influenza A virus
GPMTSTVHYPK

SEQ ID NO: 143760 - protein, 9 aa, Influenza A virus
GPTASTIHY

SEQ ID NO: 143761 - protein, 11 aa, Influenza A virus
GPTASTIHYPK

SEQ ID NO: 143762 - protein, 9 aa, Influenza A virus
GPTASTVHY

SEQ ID NO: 143763 - protein, 11 aa, Influenza A virus
GPTASTVHYPK

SEQ ID NO: 143764 - protein, 9 aa, Influenza A virus
GPTAVTTHY

SEQ ID NO: 143765 - protein, 9 aa, Influenza A virus
GPTTSAVHY

SEQ ID NO: 143766 - protein, 11 aa, Influenza A virus
GPTTSAVHYPK

SEQ ID NO: 143767 - protein, 9 aa, Influenza A virus
GPTTSAVYY

SEQ ID NO: 143768 - protein, 11 aa, Influenza A virus
GPTTSAVYYPK

SEQ ID NO: 143769 - protein, 9 aa, Influenza A virus
GPTTSTAHY

SEQ ID NO: 143770 - protein, 11 aa, Influenza A virus
GPTTSTAHYPK

SEQ ID NO: 143771 - protein, 9 aa, Influenza A virus
GPTTSTIHY

SEQ ID NO: 143772 - protein, 11 aa, Influenza A virus
GPTTSTIHYPK

SEQ ID NO: 143773 - protein, 9 aa, Influenza A virus
GPTTSTVHY

SEQ ID NO: 143774 - protein, 11 aa, Influenza A virus
GPTTSTVHYPK

SEQ ID NO: 143775 - protein, 9 aa, Influenza A virus
GPVANTIHY

SEQ ID NO: 143776 - protein, 11 aa, Influenza A virus
GPVANTIHYPK

SEQ ID NO: 143777 - protein, 9 aa, Influenza A virus
GPVASTIHY

SEQ ID NO: 143778 - protein, 11 aa, Influenza A virus
GPVASTIHYPK

SEQ ID NO: 143779 - protein, 9 aa, Influenza A virus
GPVASTVHY

SEQ ID NO: 143780 - protein, 11 aa, Influenza A virus
GPVASTVHYPK

SEQ ID NO: 143781 - protein, 9 aa, Influenza A virus
GPVHFGNQV

SEQ ID NO: 143782 - protein, 9 aa, Influenza A virus
GPVHFRNHV

SEQ ID NO: 143783 - protein, 10 aa, Influenza A virus
GPVHFRNHVK

SEQ ID NO: 143784 - protein, 9 aa, Influenza A virus
GPVHFRNQI

SEQ ID NO: 143785 - protein, 9 aa, Influenza A virus
GPVHFRNQV

SEQ ID NO: 143786 - protein, 9 aa, Influenza A virus
GPVRFRNQV

SEQ ID NO: 143787 - protein, 10 aa, Influenza A virus
GPVRFRNQVK

SEQ ID NO: 143788 - protein, 9 aa, Influenza A virus
GPVTNTVHY

SEQ ID NO: 143789 - protein, 11 aa, Influenza A virus
GPVTNTVHYPK

SEQ ID NO: 143790 - protein, 9 aa, Influenza A virus
GPVTSTVHY

SEQ ID NO: 143791 - protein, 11 aa, Influenza A virus
GPVTSTVHYPK

SEQ ID NO: 143792 - protein, 9 aa, Influenza A virus
GQGDVVLVM

SEQ ID NO: 143793 - protein, 10 aa, Influenza A virus
GQGDVVLVMK

SEQ ID NO: 143794 - protein, 9 aa, Influenza A virus
GQSLIIAAR

SEQ ID NO: 143795 - protein, 9 aa, Influenza A virus
GQTTSTVHY

SEQ ID NO: 143796 - protein, 11 aa, Influenza A virus
GQTTSTVHYPK

SEQ ID NO: 143797 - protein, 9 aa, Influenza A virus
GQVTNTVHY

SEQ ID NO: 143798 - protein, 11 aa, Influenza A virus
GQVTNTVHYPK

SEQ ID NO: 143799 - protein, 8 aa, Influenza A virus
GQYSGFVR

SEQ ID NO: 143800 - protein, 9 aa, Influenza A virus
GQYSGFVRA

SEQ ID NO: 143801 - protein, 10 aa, Influenza A virus
GQYSGFVRAL

SEQ ID NO: 143802 - protein, 11 aa, Influenza A virus
GQYSGFVRALF

SEQ ID NO: 143803 - protein, 9 aa, Influenza A virus
GQYSGFVRT

SEQ ID NO: 143804 - protein, 10 aa, Influenza A virus
GQYSGFVRTL

SEQ ID NO: 143805 - protein, 11 aa, Influenza A virus
GQYSGFVRTLF

SEQ ID NO: 143806 - protein, 11 aa, Influenza A virus
GRDEQSIAEAI

SEQ ID NO: 143807 - protein, 11 aa, Influenza A virus
GRDEQSIVEAI

SEQ ID NO: 143808 - protein, 11 aa, Influenza A virus
GRDEQSVAEAI

SEQ ID NO: 143809 - protein, 11 aa, Influenza A virus
GREDRRYGPAL

SEQ ID NO: 143810 - protein, 11 aa, Influenza A virus
GRLKHGTFGPV

SEQ ID NO: 143811 - protein, 9 aa, Influenza A virus
GRQEKNPAL

SEQ ID NO: 143812 - protein, 11 aa, Influenza A virus
GRQEKNPALRM

SEQ ID NO: 143813 - protein, 9 aa, Influenza A virus
GRQEKNPSL

SEQ ID NO: 143814 - protein, 11 aa, Influenza A virus
GRQEKNPSLRM

SEQ ID NO: 143815 - protein, 9 aa, Influenza A virus
GRRATAILR

SEQ ID NO: 143816 - protein, 10 aa, Influenza A virus
GRRATAILRK

SEQ ID NO: 143817 - protein, 10 aa, Influenza A virus
GSESVLVNTY

SEQ ID NO: 143818 - protein, 9 aa, Influenza A virus
GSGMRIIVR

SEQ ID NO: 143819 - protein, 9 aa, Influenza A virus
GSGMRILIR

SEQ ID NO: 143820 - protein, 9 aa, Influenza A virus
GSGMRILVR

SEQ ID NO: 143821 - protein, 9 aa, Influenza A virus
GSGMRVLVR

SEQ ID NO: 143822 - protein, 9 aa, Influenza A virus
GTAGVESAV

SEQ ID NO: 143823 - protein, 10 aa, Influenza A virus
GTAGVESAVL

SEQ ID NO: 143824 - protein, 11 aa, Influenza A virus
GTAGVESAVLR

SEQ ID NO: 143825 - protein, 9 aa, Influenza A virus
GTEKLAITY

SEQ ID NO: 143826 - protein, 9 aa, Influenza A virus
GTEKLTIIY

SEQ ID NO: 143827 - protein, 9 aa, Influenza A virus
GTEKLTITY

SEQ ID NO: 143828 - protein, 9 aa, Influenza A virus
GTERLTITY

SEQ ID NO: 143829 - protein, 10 aa, Influenza A virus
GTERLTITYS

SEQ ID NO: 143830 - protein, 9 aa, Influenza A virus
GTFDTAQII

SEQ ID NO: 143831 - protein, 10 aa, Influenza A virus
GTFDTAQIIK

SEQ ID NO: 143832 - protein, 9 aa, Influenza A virus
GTFDTIQII

SEQ ID NO: 143833 - protein, 10 aa, Influenza A virus
GTFDTIQIIK

SEQ ID NO: 143834 - protein, 9 aa, Influenza A virus
GTFDTTQII

SEQ ID NO: 143835 - protein, 10 aa, Influenza A virus
GTFDTTQIIK

SEQ ID NO: 143836 - protein, 9 aa, Influenza A virus
GTFDTTQMI

SEQ ID NO: 143837 - protein, 10 aa, Influenza A virus
GTFDTTQMIK

SEQ ID NO: 143838 - protein, 9 aa, Influenza A virus
GTFDTVQII

SEQ ID NO: 143839 - protein, 10 aa, Influenza A virus
GTFDTVQIIK

SEQ ID NO: 143840 - protein, 8 aa, Influenza A virus
GTFGPVHF

SEQ ID NO: 143841 - protein, 9 aa, Influenza A virus
GTFGPVHFR

SEQ ID NO: 143842 - protein, 10 aa, Influenza A virus
GTFGPVHFRN

SEQ ID NO: 143843 - protein, 11 aa, Influenza A virus
GTFGPVHFRNH

SEQ ID NO: 143844 - protein, 8 aa, Influenza A virus
GTFGPVRF

SEQ ID NO: 143845 - protein, 9 aa, Influenza A virus
GTFGPVRFR

SEQ ID NO: 143846 - protein, 10 aa, Influenza A virus
GTFGPVRFRN

SEQ ID NO: 143847 - protein, 9 aa, Influenza A virus
GTKMVDILR

SEQ ID NO: 143848 - protein, 9 aa, Influenza A virus
GTKRLTVLG

SEQ ID NO: 143849 - protein, 10 aa, Influenza A virus
GTKRLTVLGK

SEQ ID NO: 143850 - protein, 10 aa, Influenza A virus
GTQIGGIRMV

SEQ ID NO: 143851 - protein, 9 aa, Influenza A virus
GTRMMDILR

SEQ ID NO: 143852 - protein, 9 aa, Influenza A virus
GTRMVDILK

SEQ ID NO: 143853 - protein, 9 aa, Influenza A virus
GTRMVDILR

SEQ ID NO: 143854 - protein, 9 aa, Influenza A virus
GTSGVESAV

SEQ ID NO: 143855 - protein, 11 aa, Influenza A virus
GTSGVESAVLR

SEQ ID NO: 143856 - protein, 9 aa, Influenza A virus
GTSSIYIEV

SEQ ID NO: 143857 - protein, 10 aa, Influenza A virus
GTSSIYIEVL

SEQ ID NO: 143858 - protein, 9 aa, Influenza A virus
GTSSMYIEV

SEQ ID NO: 143859 - protein, 9 aa, Influenza A virus
GTSSVYIEV

SEQ ID NO: 143860 - protein, 10 aa, Influenza A virus
GTSSVYIEVL

SEQ ID NO: 143861 - protein, 9 aa, Influenza A virus
GTSSVYVEV

SEQ ID NO: 143862 - protein, 10 aa, Influenza A virus
GTSSVYVEVL

SEQ ID NO: 143863 - protein, 9 aa, Influenza A virus
GTTGIESAV

SEQ ID NO: 143864 - protein, 11 aa, Influenza A virus
GTTGIESAVLR

SEQ ID NO: 143865 - protein, 9 aa, Influenza A virus
GTTGVESAV

SEQ ID NO: 143866 - protein, 11 aa, Influenza A virus
GTTGVESAVLR

SEQ ID NO: 143867 - protein, 9 aa, Influenza A virus
GTVHYPKVY

SEQ ID NO: 143868 - protein, 10 aa, Influenza A virus
GTVHYPKVYK

SEQ ID NO: 143869 - protein, 10 aa, Influenza A virus
GVDEYSRAER

SEQ ID NO: 143870 - protein, 10 aa, Influenza A virus
GVDEYSSAEK

SEQ ID NO: 143871 - protein, 10 aa, Influenza A virus
GVDEYSSTEK

SEQ ID NO: 143872 - protein, 10 aa, Influenza A virus
GVESAVLRGF

SEQ ID NO: 143873 - protein, 10 aa, Influenza A virus
GVESAVLRGI

SEQ ID NO: 143874 - protein, 9 aa, Influenza A virus
GVRISKMGV

SEQ ID NO: 143875 - protein, 9 aa, Influenza A virus
GVRMVDILK

SEQ ID NO: 143876 - protein, 9 aa, Influenza A virus
GVRMVDILR

SEQ ID NO: 143877 - protein, 9 aa, Influenza A virus
GVRVSKMGV

SEQ ID NO: 143878 - protein, 9 aa, Influenza A virus
GVRVSKTGV

SEQ ID NO: 143879 - protein, 11 aa, Influenza A virus
GYEEFTIVGKR

SEQ ID NO: 143880 - protein, 10 aa, Influenza A virus
GYEEFTIVGR

SEQ ID NO: 143881 - protein, 11 aa, Influenza A virus
GYEEFTIVGRR

SEQ ID NO: 143882 - protein, 10 aa, Influenza A virus
GYEEFTMVGR

SEQ ID NO: 143883 - protein, 11 aa, Influenza A virus
GYEEFTMVGRR

SEQ ID NO: 143884 - protein, 9 aa, Influenza A virus
HEGFEEFTM

SEQ ID NO: 143885 - protein, 10 aa, Influenza A virus
HEGFEEFTMV

SEQ ID NO: 143886 - protein, 9 aa, Influenza A virus
HEGYEEFTI

SEQ ID NO: 143887 - protein, 10 aa, Influenza A virus
HEGYEEFTIV

SEQ ID NO: 143888 - protein, 9 aa, Influenza A virus
HEGYEEFTM

SEQ ID NO: 143889 - protein, 10 aa, Influenza A virus
HEGYEEFTMV

SEQ ID NO: 143890 - protein, 9 aa, Influenza A virus
HFGNQVKIR

SEQ ID NO: 143891 - protein, 10 aa, Influenza A virus
HFGNQVKIRR

SEQ ID NO: 143892 - protein, 9 aa, Influenza A virus
HFHKDAKVL

SEQ ID NO: 143893 - protein, 10 aa, Influenza A virus
HFHKDAKVLF

SEQ ID NO: 143894 - protein, 9 aa, Influenza A virus
HFQKDAKAL

SEQ ID NO: 143895 - protein, 10 aa, Influenza A virus
HFQKDAKALF

SEQ ID NO: 143896 - protein, 9 aa, Influenza A virus
HFQKDAKIL

SEQ ID NO: 143897 - protein, 10 aa, Influenza A virus
HFQKDAKILF

SEQ ID NO: 143898 - protein, 9 aa, Influenza A virus
HFQKDAKLL

SEQ ID NO: 143899 - protein, 10 aa, Influenza A virus
HFQKDAKLLF

SEQ ID NO: 143900 - protein, 9 aa, Influenza A virus
HFQKDAKTL

SEQ ID NO: 143901 - protein, 10 aa, Influenza A virus
HFQKDAKTLF

SEQ ID NO: 143902 - protein, 9 aa, Influenza A virus
HFQKDAKVL

SEQ ID NO: 143903 - protein, 10 aa, Influenza A virus
HFQKDAKVLF

SEQ ID NO: 143904 - protein, 9 aa, Influenza A virus
HFQKGAEVL

SEQ ID NO: 143905 - protein, 10 aa, Influenza A virus
HFQKGAEVLF

SEQ ID NO: 143906 - protein, 9 aa, Influenza A virus
HFRNHVKIR

SEQ ID NO: 143907 - protein, 10 aa, Influenza A virus
HFRNHVKIRR

SEQ ID NO: 143908 - protein, 9 aa, Influenza A virus
HFRNQIKIR

SEQ ID NO: 143909 - protein, 10 aa, Influenza A virus
HFRNQIKIRR

SEQ ID NO: 143910 - protein, 9 aa, Influenza A virus
HFRNQVKIR

SEQ ID NO: 143911 - protein, 10 aa, Influenza A virus
HFRNQVKIRR

SEQ ID NO: 143912 - protein, 10 aa, Influenza A virus
HGTEKLTITY

SEQ ID NO: 143913 - protein, 10 aa, Influenza A virus
HGTERLTITY

SEQ ID NO: 143914 - protein, 10 aa, Influenza A virus
HGTFGPVHFR

SEQ ID NO: 143915 - protein, 11 aa, Influenza A virus
HGTFGPVHFRN

SEQ ID NO: 143916 - protein, 10 aa, Influenza A virus
HGTFGPVRFR

SEQ ID NO: 143917 - protein, 11 aa, Influenza A virus
HGTFGPVRFRN

SEQ ID NO: 143918 - protein, 9 aa, Influenza A virus
HIDNVMGMV

SEQ ID NO: 143919 - protein, 9 aa, Influenza A virus
HIDSVMGMV

SEQ ID NO: 143920 - protein, 10 aa, Influenza A virus
HKTYFEKVER

SEQ ID NO: 143921 - protein, 11 aa, Influenza A virus
HKTYFEKVERL

SEQ ID NO: 143922 - protein, 9 aa, Influenza A virus
HQLLRHFHK

SEQ ID NO: 143923 - protein, 9 aa, Influenza A virus
HQLLRHFQK

SEQ ID NO: 143924 - protein, 8 aa, Influenza A virus
HSLIIAAR

SEQ ID NO: 143925 - protein, 9 aa, Influenza A virus
HSQQIGGTR

SEQ ID NO: 143926 - protein, 10 aa, Influenza A virus
HSQQIGGTRM

SEQ ID NO: 143927 - protein, 9 aa, Influenza A virus
HSTLIGGTR

SEQ ID NO: 143928 - protein, 10 aa, Influenza A virus
HSTLIGGTRM

SEQ ID NO: 143929 - protein, 11 aa, Influenza A virus
HSTLIGGTRMV

SEQ ID NO: 143930 - protein, 9 aa, Influenza A virus
HSTQIGGIK

SEQ ID NO: 143931 - protein, 10 aa, Influenza A virus
HSTQIGGIKM

SEQ ID NO: 143932 - protein, 9 aa, Influenza A virus
HSTQIGGIR

SEQ ID NO: 143933 - protein, 10 aa, Influenza A virus
HSTQIGGIRM

SEQ ID NO: 143934 - protein, 9 aa, Influenza A virus
HSTQIGGLR

SEQ ID NO: 143935 - protein, 10 aa, Influenza A virus
HSTQIGGLRM

SEQ ID NO: 143936 - protein, 11 aa, Influenza A virus
HSTQIGGLRMV

SEQ ID NO: 143937 - protein, 9 aa, Influenza A virus
HSTQIGGTK

SEQ ID NO: 143938 - protein, 10 aa, Influenza A virus
HSTQIGGTKM

SEQ ID NO: 143939 - protein, 9 aa, Influenza A virus
HSTQIGGTR

SEQ ID NO: 143940 - protein, 10 aa, Influenza A virus
HSTQIGGTRM

SEQ ID NO: 143941 - protein, 11 aa, Influenza A virus
HSTQIGGTRMM

SEQ ID NO: 143942 - protein, 9 aa, Influenza A virus
HSTQIGGVR

SEQ ID NO: 143943 - protein, 10 aa, Influenza A virus
HSTQIGGVRM

SEQ ID NO: 143944 - protein, 9 aa, Influenza A virus
HYPKIYKTY

SEQ ID NO: 143945 - protein, 10 aa, Influenza A virus
HYPKIYKTYF

SEQ ID NO: 143946 - protein, 11 aa, Influenza A virus
HYPKIYKTYFE

SEQ ID NO: 143947 - protein, 9 aa, Influenza A virus
HYPKVHKTY

SEQ ID NO: 143948 - protein, 10 aa, Influenza A virus
HYPKVHKTYF

SEQ ID NO: 143949 - protein, 11 aa, Influenza A virus
HYPKVHKTYFE

SEQ ID NO: 143950 - protein, 9 aa, Influenza A virus
HYPKVYKPY

SEQ ID NO: 143951 - protein, 10 aa, Influenza A virus
HYPKVYKPYF

SEQ ID NO: 143952 - protein, 11 aa, Influenza A virus
HYPKVYKPYFE

SEQ ID NO: 143953 - protein, 9 aa, Influenza A virus
HYPKVYKTY

SEQ ID NO: 143954 - protein, 10 aa, Influenza A virus
HYPKVYKTYF

SEQ ID NO: 143955 - protein, 11 aa, Influenza A virus
HYPKVYKTYFD

SEQ ID NO: 143956 - protein, 11 aa, Influenza A virus
HYPKVYKTYFE

SEQ ID NO: 143957 - protein, 9 aa, Influenza A virus
HYPKVYNTY

SEQ ID NO: 143958 - protein, 10 aa, Influenza A virus
HYPKVYNTYF

SEQ ID NO: 143959 - protein, 11 aa, Influenza A virus
HYPKVYNTYFE

SEQ ID NO: 143960 - protein, 9 aa, Influenza A virus
HYPKVYRTY

SEQ ID NO: 143961 - protein, 10 aa, Influenza A virus
HYPKVYRTYF

SEQ ID NO: 143962 - protein, 11 aa, Influenza A virus
HYPKVYRTYFE

SEQ ID NO: 143963 - protein, 9 aa, Influenza A virus
HYPKVYTTY

SEQ ID NO: 143964 - protein, 10 aa, Influenza A virus
HYPKVYTTYF

SEQ ID NO: 143965 - protein, 11 aa, Influenza A virus
HYPKVYTTYFE

SEQ ID NO: 143966 - protein, 9 aa, Influenza A virus
IAARNIVKR

SEQ ID NO: 143967 - protein, 9 aa, Influenza A virus
IAARNIVRR

SEQ ID NO: 143968 - protein, 11 aa, Influenza A virus
IAARNIVRRAM

SEQ ID NO: 143969 - protein, 9 aa, Influenza A virus
IAARSIVRR

SEQ ID NO: 143970 - protein, 9 aa, Influenza A virus
IAEAIIVAI

SEQ ID NO: 143971 - protein, 9 aa, Influenza A virus
IAEAIIVAM

SEQ ID NO: 143972 - protein, 10 aa, Influenza A virus
IAEAIIVAMV

SEQ ID NO: 143973 - protein, 9 aa, Influenza A virus
IAEAVIVAM

SEQ ID NO: 143974 - protein, 10 aa, Influenza A virus
IAEAVIVAMV

SEQ ID NO: 143975 - protein, 9 aa, Influenza A virus
IAGVESAVL

SEQ ID NO: 143976 - protein, 10 aa, Influenza A virus
IAGVESAVLR

SEQ ID NO: 143977 - protein, 9 aa, Influenza A virus
IAPLMEAYM

SEQ ID NO: 143978 - protein, 8 aa, Influenza A virus
IAPLMVAY

SEQ ID NO: 143979 - protein, 9 aa, Influenza A virus
IAPLMVAYI

SEQ ID NO: 143980 - protein, 10 aa, Influenza A virus
IAPLMVAYIL

SEQ ID NO: 143981 - protein, 9 aa, Influenza A virus
IAPLMVAYM

SEQ ID NO: 143982 - protein, 10 aa, Influenza A virus
IAPLMVAYMF

SEQ ID NO: 143983 - protein, 10 aa, Influenza A virus
IAPLMVAYML

SEQ ID NO: 143984 - protein, 9 aa, Influenza A virus
ICKAAMGLK

SEQ ID NO: 143985 - protein, 9 aa, Influenza A virus
ICKAAMGLR

SEQ ID NO: 143986 - protein, 10 aa, Influenza A virus
IDQSLIIAAR

SEQ ID NO: 143987 - protein, 11 aa, Influenza A virus
IDRFLRIRDQR

SEQ ID NO: 143988 - protein, 11 aa, Influenza A virus
IDRFLRVRDLR

SEQ ID NO: 143989 - protein, 11 aa, Influenza A virus
IDRFLRVRDQR

SEQ ID NO: 143990 - protein, 10 aa, Influenza A virus
IDSVMGMVGV

SEQ ID NO: 143991 - protein, 9 aa, Influenza A virus
IEFEPFQSL

SEQ ID NO: 143992 - protein, 10 aa, Influenza A virus
IEFEPFQSLI

SEQ ID NO: 143993 - protein, 10 aa, Influenza A virus
IEFEPFQSLV

SEQ ID NO: 143994 - protein, 11 aa, Influenza A virus
IEFEPFQSLVP

SEQ ID NO: 143995 - protein, 10 aa, Influenza A virus
IEHIDNVMGM

SEQ ID NO: 143996 - protein, 10 aa, Influenza A virus
IEHIDSVMGM

SEQ ID NO: 143997 - protein, 8 aa, Influenza A virus
IEMSMRGV

SEQ ID NO: 143998 - protein, 10 aa, Influenza A virus
IEMSMRGVRI

SEQ ID NO: 143999 - protein, 10 aa, Influenza A virus
IEMSMRGVRV

SEQ ID NO: 144000 - protein, 10 aa, Influenza A virus
IEPIDDVMGM

SEQ ID NO: 144001 - protein, 10 aa, Influenza A virus
IEPIDNIMGM

SEQ ID NO: 144002 - protein, 10 aa, Influenza A virus
IEPIDNVMGM

SEQ ID NO: 144003 - protein, 9 aa, Influenza A virus
IERLKHGTF

SEQ ID NO: 144004 - protein, 9 aa, Influenza A virus
IESAVLRGF

SEQ ID NO: 144005 - protein, 10 aa, Influenza A virus
IESAVLRGFL

SEQ ID NO: 144006 - protein, 8 aa, Influenza A virus
IESIDNVM

SEQ ID NO: 144007 - protein, 10 aa, Influenza A virus
IESIDNVMGM

SEQ ID NO: 144008 - protein, 10 aa, Influenza A virus
IETIDNVMGM

SEQ ID NO: 144009 - protein, 11 aa, Influenza A virus
IETIDNVMGMI

SEQ ID NO: 144010 - protein, 10 aa, Influenza A virus
IEVLHLTQGA

SEQ ID NO: 144011 - protein, 9 aa, Influenza A virus
IFNYNKTTK

SEQ ID NO: 144012 - protein, 10 aa, Influenza A virus
IFNYNKTTKR

SEQ ID NO: 144013 - protein, 11 aa, Influenza A virus
IGGIKMVDILR

SEQ ID NO: 144014 - protein, 11 aa, Influenza A virus
IGGIRMVDILR

SEQ ID NO: 144015 - protein, 11 aa, Influenza A virus
IGGIRMVEILR

SEQ ID NO: 144016 - protein, 11 aa, Influenza A virus
IGGIRMVNILR

SEQ ID NO: 144017 - protein, 11 aa, Influenza A virus
IGGLRMVDILR

SEQ ID NO: 144018 - protein, 11 aa, Influenza A virus
IGGTKMVDILR

SEQ ID NO: 144019 - protein, 11 aa, Influenza A virus
IGGTRMMDILR

SEQ ID NO: 144020 - protein, 11 aa, Influenza A virus
IGGTRMVDILR

SEQ ID NO: 144021 - protein, 11 aa, Influenza A virus
IGGVRMVDILR

SEQ ID NO: 144022 - protein, 11 aa, Influenza A virus
IGILPDMTPSI

SEQ ID NO: 144023 - protein, 10 aa, Influenza A virus
IGQGDVVLVM

SEQ ID NO: 144024 - protein, 10 aa, Influenza A virus
IGTFDTVQII

SEQ ID NO: 144025 - protein, 11 aa, Influenza A virus
IGTFDTVQIIK

SEQ ID NO: 144026 - protein, 10 aa, Influenza A virus
IHEGYEEFTI

SEQ ID NO: 144027 - protein, 10 aa, Influenza A virus
IHYPKIYKTY

SEQ ID NO: 144028 - protein, 11 aa, Influenza A virus
IHYPKIYKTYF

SEQ ID NO: 144029 - protein, 10 aa, Influenza A virus
IHYPKVYKTY

SEQ ID NO: 144030 - protein, 11 aa, Influenza A virus
IHYPKVYKTYF

SEQ ID NO: 144031 - protein, 10 aa, Influenza A virus
IHYPKVYRTY

SEQ ID NO: 144032 - protein, 11 aa, Influenza A virus
IHYPKVYRTYF

SEQ ID NO: 144033 - protein, 9 aa, Influenza A virus
IIAARNIVK

SEQ ID NO: 144034 - protein, 10 aa, Influenza A virus
IIAARNIVKR

SEQ ID NO: 144035 - protein, 9 aa, Influenza A virus
IIAARNIVR

SEQ ID NO: 144036 - protein, 10 aa, Influenza A virus
IIAARNIVRR

SEQ ID NO: 144037 - protein, 9 aa, Influenza A virus
IIAARSIVR

SEQ ID NO: 144038 - protein, 10 aa, Influenza A virus
IIAARSIVRR

SEQ ID NO: 144039 - protein, 9 aa, Influenza A virus
IIKKFTSGR

SEQ ID NO: 144040 - protein, 9 aa, Influenza A virus
IIKKYTSGR

SEQ ID NO: 144041 - protein, 10 aa, Influenza A virus
IIKLLPFAAA

SEQ ID NO: 144042 - protein, 9 aa, Influenza A virus
IIKNWETVK

SEQ ID NO: 144043 - protein, 9 aa, Influenza A virus
IIKRYTSGR

SEQ ID NO: 144044 - protein, 9 aa, Influenza A virus
IINLLPFAA

SEQ ID NO: 144045 - protein, 10 aa, Influenza A virus
IINLLPFAAA

SEQ ID NO: 144046 - protein, 9 aa, Influenza A virus
IIRKATRRL

SEQ ID NO: 144047 - protein, 10 aa, Influenza A virus
IIRKATRRLV

SEQ ID NO: 144048 - protein, 9 aa, Influenza A virus
IIRNWEAVK

SEQ ID NO: 144049 - protein, 9 aa, Influenza A virus
IIRNWEIVK

SEQ ID NO: 144050 - protein, 9 aa, Influenza A virus
IIRNWEMIK

SEQ ID NO: 144051 - protein, 9 aa, Influenza A virus
IIRNWETVK

SEQ ID NO: 144052 - protein, 10 aa, Influenza A virus
IIVHEGYEEF

SEQ ID NO: 144053 - protein, 9 aa, Influenza A virus
IIVRGNSPV

SEQ ID NO: 144054 - protein, 10 aa, Influenza A virus
IIVRGNSPVF

SEQ ID NO: 144055 - protein, 9 aa, Influenza A virus
IIYSSSMMW

SEQ ID NO: 144056 - protein, 11 aa, Influenza A virus
IIYSSSMMWEI

SEQ ID NO: 144057 - protein, 10 aa, Influenza A virus
IKAVRGDLNF

SEQ ID NO: 144058 - protein, 11 aa, Influenza A virus
IKIQWSQDPTM

SEQ ID NO: 144059 - protein, 11 aa, Influenza A virus
IKIQWSQEPTM

SEQ ID NO: 144060 - protein, 11 aa, Influenza A virus
IKIQWSQNPTM

SEQ ID NO: 144061 - protein, 9 aa, Influenza A virus
IKLLPFAAA

SEQ ID NO: 144062 - protein, 10 aa, Influenza A virus
IKVHEGYEEF

SEQ ID NO: 144063 - protein, 9 aa, Influenza A virus
ILAKEDKRY

SEQ ID NO: 144064 - protein, 9 aa, Influenza A virus
ILERELVRK

SEQ ID NO: 144065 - protein, 8 aa, Influenza A virus
ILFQNWGI

SEQ ID NO: 144066 - protein, 11 aa, Influenza A virus
ILFQNWGIEPI

SEQ ID NO: 144067 - protein, 10 aa, Influenza A virus
ILFQNWGIES

SEQ ID NO: 144068 - protein, 11 aa, Influenza A virus
ILFQNWGIESI

SEQ ID NO: 144069 - protein, 8 aa, Influenza A virus
ILFQNWGV

SEQ ID NO: 144070 - protein, 11 aa, Influenza A virus
ILFQNWGVEPI

SEQ ID NO: 144071 - protein, 9 aa, Influenza A virus
ILGKDAGAL

SEQ ID NO: 144072 - protein, 9 aa, Influenza A virus
ILGKDAGTL

SEQ ID NO: 144073 - protein, 10 aa, Influenza A virus
ILGKDAGTLI

SEQ ID NO: 144074 - protein, 9 aa, Influenza A virus
ILGKGDRRY

SEQ ID NO: 144075 - protein, 9 aa, Influenza A virus
ILIRGNSPV

SEQ ID NO: 144076 - protein, 10 aa, Influenza A virus
ILIRGNSPVF

SEQ ID NO: 144077 - protein, 9 aa, Influenza A virus
ILKKATRRL

SEQ ID NO: 144078 - protein, 8 aa, Influenza A virus
ILLSPEEV

SEQ ID NO: 144079 - protein, 9 aa, Influenza A virus
ILPDLTPST

SEQ ID NO: 144080 - protein, 11 aa, Influenza A virus
ILPDLTPSTEK

SEQ ID NO: 144081 - protein, 11 aa, Influenza A virus
ILPDLTPSTEM

SEQ ID NO: 144082 - protein, 9 aa, Influenza A virus
ILPDMTPNA

SEQ ID NO: 144083 - protein, 11 aa, Influenza A virus
ILPDMTPNAEM

SEQ ID NO: 144084 - protein, 9 aa, Influenza A virus
ILPDMTPNT

SEQ ID NO: 144085 - protein, 11 aa, Influenza A virus
ILPDMTPNTEM

SEQ ID NO: 144086 - protein, 9 aa, Influenza A virus
ILPDMTPSA

SEQ ID NO: 144087 - protein, 11 aa, Influenza A virus
ILPDMTPSAEM

SEQ ID NO: 144088 - protein, 9 aa, Influenza A virus
ILPDMTPSI

SEQ ID NO: 144089 - protein, 10 aa, Influenza A virus
ILPDMTPSIE

SEQ ID NO: 144090 - protein, 11 aa, Influenza A virus
ILPDMTPSIEM

SEQ ID NO: 144091 - protein, 9 aa, Influenza A virus
ILPDMTPST

SEQ ID NO: 144092 - protein, 11 aa, Influenza A virus
ILPDMTPSTEM

SEQ ID NO: 144093 - protein, 11 aa, Influenza A virus
ILPDMTPSTEV

SEQ ID NO: 144094 - protein, 11 aa, Influenza A virus
ILPDMTPSTGM

SEQ ID NO: 144095 - protein, 10 aa, Influenza A virus
ILPDMTPSTV

SEQ ID NO: 144096 - protein, 11 aa, Influenza A virus
ILPDMTPSTVM

SEQ ID NO: 144097 - protein, 9 aa, Influenza A virus
ILPDMTSST

SEQ ID NO: 144098 - protein, 11 aa, Influenza A virus
ILPDMTSSTEM

SEQ ID NO: 144099 - protein, 9 aa, Influenza A virus
ILPGMTPST

SEQ ID NO: 144100 - protein, 11 aa, Influenza A virus
ILPGMTPSTEM

SEQ ID NO: 144101 - protein, 9 aa, Influenza A virus
ILRKATQRL

SEQ ID NO: 144102 - protein, 10 aa, Influenza A virus
ILRKATQRLV

SEQ ID NO: 144103 - protein, 9 aa, Influenza A virus
ILRKATRKL

SEQ ID NO: 144104 - protein, 9 aa, Influenza A virus
ILRKATRRL

SEQ ID NO: 144105 - protein, 10 aa, Influenza A virus
ILRKATRRLV

SEQ ID NO: 144106 - protein, 9 aa, Influenza A virus
ILRKATRRM

SEQ ID NO: 144107 - protein, 9 aa, Influenza A virus
ILRKETRRL

SEQ ID NO: 144108 - protein, 10 aa, Influenza A virus
ILSPEEVSET

SEQ ID NO: 144109 - protein, 10 aa, Influenza A virus
ILTDSQTATK

SEQ ID NO: 144110 - protein, 9 aa, Influenza A virus
ILTGNLQTL

SEQ ID NO: 144111 - protein, 10 aa, Influenza A virus
ILTGNLQTLK

SEQ ID NO: 144112 - protein, 10 aa, Influenza A virus
ILTSDSQLTI

SEQ ID NO: 144113 - protein, 9 aa, Influenza A virus
ILTSESQLM

SEQ ID NO: 144114 - protein, 10 aa, Influenza A virus
ILTSESQLMI

SEQ ID NO: 144115 - protein, 10 aa, Influenza A virus
ILTSESQLMV

SEQ ID NO: 144116 - protein, 10 aa, Influenza A virus
ILTSESQLPI

SEQ ID NO: 144117 - protein, 10 aa, Influenza A virus
ILTSESQLTI

SEQ ID NO: 144118 - protein, 10 aa, Influenza A virus
ILTTTTVDHM

SEQ ID NO: 144119 - protein, 8 aa, Influenza A virus
ILVNTYQW

SEQ ID NO: 144120 - protein, 9 aa, Influenza A virus
ILVNTYQWI

SEQ ID NO: 144121 - protein, 10 aa, Influenza A virus
ILVNTYQWII

SEQ ID NO: 144122 - protein, 9 aa, Influenza A virus
ILVRGNSPA

SEQ ID NO: 144123 - protein, 10 aa, Influenza A virus
ILVRGNSPAF

SEQ ID NO: 144124 - protein, 9 aa, Influenza A virus
ILVRGNSPI

SEQ ID NO: 144125 - protein, 10 aa, Influenza A virus
ILVRGNSPIF

SEQ ID NO: 144126 - protein, 9 aa, Influenza A virus
ILVRGNSPV

SEQ ID NO: 144127 - protein, 10 aa, Influenza A virus
ILVRGNSPVF

SEQ ID NO: 144128 - protein, 9 aa, Influenza A virus
ILWSKTNDA

SEQ ID NO: 144129 - protein, 8 aa, Influenza A virus
ILYNKIEF

SEQ ID NO: 144130 - protein, 9 aa, Influenza A virus
ILYNKIEFE

SEQ ID NO: 144131 - protein, 10 aa, Influenza A virus
ILYNKIEFEP

SEQ ID NO: 144132 - protein, 11 aa, Influenza A virus
ILYNKIEFEPF

SEQ ID NO: 144133 - protein, 8 aa, Influenza A virus
ILYNKMEF

SEQ ID NO: 144134 - protein, 11 aa, Influenza A virus
ILYNKMEFEPF

SEQ ID NO: 144135 - protein, 10 aa, Influenza A virus
IMEVVFPNEV

SEQ ID NO: 144136 - protein, 8 aa, Influenza A virus
IMGMIPER

SEQ ID NO: 144137 - protein, 9 aa, Influenza A virus
IMPDMTPST

SEQ ID NO: 144138 - protein, 11 aa, Influenza A virus
IMPDMTPSTEM

SEQ ID NO: 144139 - protein, 9 aa, Influenza A virus
IMQGDVVLV

SEQ ID NO: 144140 - protein, 10 aa, Influenza A virus
IMQGDVVLVM

SEQ ID NO: 144141 - protein, 11 aa, Influenza A virus
IMQGDVVLVMK

SEQ ID NO: 144142 - protein, 8 aa, Influenza A virus
IMVSPLAV

SEQ ID NO: 144143 - protein, 9 aa, Influenza A virus
IMVSPLAVT

SEQ ID NO: 144144 - protein, 10 aa, Influenza A virus
IMVSPLAVTW

SEQ ID NO: 144145 - protein, 11 aa, Influenza A virus
IMVSPLAVTWW

SEQ ID NO: 144146 - protein, 9 aa, Influenza A virus
INTYQWIIR

SEQ ID NO: 144147 - protein, 11 aa, Influenza A virus
INTYQWIIRNW

SEQ ID NO: 144148 - protein, 9 aa, Influenza A virus
INTYQWVIR

SEQ ID NO: 144149 - protein, 11 aa, Influenza A virus
INTYQWVIRNW

SEQ ID NO: 144150 - protein, 11 aa, Influenza A virus
IPEKNEQGQTL

SEQ ID NO: 144151 - protein, 11 aa, Influenza A virus
IPERNDQGQTL

SEQ ID NO: 144152 - protein, 11 aa, Influenza A virus
IPERNEQGQAL

SEQ ID NO: 144153 - protein, 10 aa, Influenza A virus
IPERNEQGQI

SEQ ID NO: 144154 - protein, 10 aa, Influenza A virus
IPERNEQGQM

SEQ ID NO: 144155 - protein, 11 aa, Influenza A virus
IPERNEQGQTL

SEQ ID NO: 144156 - protein, 9 aa, Influenza A virus
IPKAARAQY

SEQ ID NO: 144157 - protein, 11 aa, Influenza A virus
IPKRNEQGQTL

SEQ ID NO: 144158 - protein, 8 aa, Influenza A virus
IQFSSLTV

SEQ ID NO: 144159 - protein, 9 aa, Influenza A virus
IQFSSLTVN

SEQ ID NO: 144160 - protein, 10 aa, Influenza A virus
IQFSSLTVNV

SEQ ID NO: 144161 - protein, 11 aa, Influenza A virus
IQFSSLTVNVR

SEQ ID NO: 144162 - protein, 10 aa, Influenza A virus
IQIHEGYEEF

SEQ ID NO: 144163 - protein, 9 aa, Influenza A virus
IQIIKLLPF

SEQ ID NO: 144164 - protein, 10 aa, Influenza A virus
IQIIKLLPFA

SEQ ID NO: 144165 - protein, 9 aa, Influenza A virus
IQSMIIAAR

SEQ ID NO: 144166 - protein, 9 aa, Influenza A virus
IQWSHNPTM

SEQ ID NO: 144167 - protein, 10 aa, Influenza A virus
IQWSHNPTML

SEQ ID NO: 144168 - protein, 11 aa, Influenza A virus
IQWSHNPTMLY

SEQ ID NO: 144169 - protein, 9 aa, Influenza A virus
IQWSQDPTI

SEQ ID NO: 144170 - protein, 10 aa, Influenza A virus
IQWSQDPTIL

SEQ ID NO: 144171 - protein, 11 aa, Influenza A virus
IQWSQDPTILY

SEQ ID NO: 144172 - protein, 9 aa, Influenza A virus
IQWSQDPTM

SEQ ID NO: 144173 - protein, 10 aa, Influenza A virus
IQWSQDPTML

SEQ ID NO: 144174 - protein, 11 aa, Influenza A virus
IQWSQDPTMLY

SEQ ID NO: 144175 - protein, 9 aa, Influenza A virus
IQWSQDPTV

SEQ ID NO: 144176 - protein, 10 aa, Influenza A virus
IQWSQDPTVL

SEQ ID NO: 144177 - protein, 11 aa, Influenza A virus
IQWSQDPTVLY

SEQ ID NO: 144178 - protein, 9 aa, Influenza A virus
IQWSQEPTM

SEQ ID NO: 144179 - protein, 10 aa, Influenza A virus
IQWSQEPTML

SEQ ID NO: 144180 - protein, 11 aa, Influenza A virus
IQWSQEPTMLY

SEQ ID NO: 144181 - protein, 9 aa, Influenza A virus
IQWSQNPAI

SEQ ID NO: 144182 - protein, 10 aa, Influenza A virus
IQWSQNPAIL

SEQ ID NO: 144183 - protein, 11 aa, Influenza A virus
IQWSQNPAILY

SEQ ID NO: 144184 - protein, 9 aa, Influenza A virus
IQWSQNPAM

SEQ ID NO: 144185 - protein, 10 aa, Influenza A virus
IQWSQNPAML

SEQ ID NO: 144186 - protein, 11 aa, Influenza A virus
IQWSQNPAMLY

SEQ ID NO: 144187 - protein, 9 aa, Influenza A virus
IQWSQNPTM

SEQ ID NO: 144188 - protein, 10 aa, Influenza A virus
IQWSQNPTML

SEQ ID NO: 144189 - protein, 11 aa, Influenza A virus
IQWSQNPTMLY

SEQ ID NO: 144190 - protein, 9 aa, Influenza A virus
IQWSQSPTM

SEQ ID NO: 144191 - protein, 10 aa, Influenza A virus
IQWSQSPTML

SEQ ID NO: 144192 - protein, 11 aa, Influenza A virus
IQWSQSPTMLY

SEQ ID NO: 144193 - protein, 9 aa, Influenza A virus
IQWSQVPAT

SEQ ID NO: 144194 - protein, 10 aa, Influenza A virus
IQWSQVPATL

SEQ ID NO: 144195 - protein, 11 aa, Influenza A virus
IQWSQVPATLY

SEQ ID NO: 144196 - protein, 9 aa, Influenza A virus
IRDQRGNVL

SEQ ID NO: 144197 - protein, 10 aa, Influenza A virus
IRDQRGNVLL

SEQ ID NO: 144198 - protein, 10 aa, Influenza A virus
IRGNSPVFNY

SEQ ID NO: 144199 - protein, 10 aa, Influenza A virus
IRGQYSGFVR

SEQ ID NO: 144200 - protein, 9 aa, Influenza A virus
IRKATRRLV

SEQ ID NO: 144201 - protein, 8 aa, Influenza A virus
IRMVNILR

SEQ ID NO: 144202 - protein, 9 aa, Influenza A virus
IRNWEAVKI

SEQ ID NO: 144203 - protein, 9 aa, Influenza A virus
IRNWEIVKI

SEQ ID NO: 144204 - protein, 9 aa, Influenza A virus
IRNWEMIKI

SEQ ID NO: 144205 - protein, 9 aa, Influenza A virus
IRNWETVKI

SEQ ID NO: 144206 - protein, 9 aa, Influenza A virus
IRQGDVVLV

SEQ ID NO: 144207 - protein, 10 aa, Influenza A virus
IRQGDVVLVM

SEQ ID NO: 144208 - protein, 10 aa, Influenza A virus
IRVHDGYEEF

SEQ ID NO: 144209 - protein, 10 aa, Influenza A virus
IRVHEGYEEF

SEQ ID NO: 144210 - protein, 10 aa, Influenza A virus
IRVNEGYEEF

SEQ ID NO: 144211 - protein, 9 aa, Influenza A virus
ISELGNLAK

SEQ ID NO: 144212 - protein, 9 aa, Influenza A virus
ISELSNLAK

SEQ ID NO: 144213 - protein, 9 aa, Influenza A virus
ISKMGVDEY

SEQ ID NO: 144214 - protein, 9 aa, Influenza A virus
ISKTGVDEY

SEQ ID NO: 144215 - protein, 8 aa, Influenza A virus
ISPLAVTW

SEQ ID NO: 144216 - protein, 9 aa, Influenza A virus
ISPLAVTWW

SEQ ID NO: 144217 - protein, 11 aa, Influenza A virus
ISPLAVTWWNR

SEQ ID NO: 144218 - protein, 8 aa, Influenza A virus
ISPLLVAY

SEQ ID NO: 144219 - protein, 9 aa, Influenza A virus
ISPLLVAYM

SEQ ID NO: 144220 - protein, 10 aa, Influenza A virus
ISPLLVAYML

SEQ ID NO: 144221 - protein, 8 aa, Influenza A virus
ISPLMVAY

SEQ ID NO: 144222 - protein, 9 aa, Influenza A virus
ISPLMVAYM

SEQ ID NO: 144223 - protein, 10 aa, Influenza A virus
ISPLMVAYML

SEQ ID NO: 144224 - protein, 9 aa, Influenza A virus
ISSSFSFAG

SEQ ID NO: 144225 - protein, 10 aa, Influenza A virus
ISSSFSFAGF

SEQ ID NO: 144226 - protein, 9 aa, Influenza A virus
ISSSFSFGG

SEQ ID NO: 144227 - protein, 10 aa, Influenza A virus
ISSSFSFGGF

SEQ ID NO: 144228 - protein, 10 aa, Influenza A virus
ITADKKITEM

SEQ ID NO: 144229 - protein, 10 aa, Influenza A virus
ITADKRIIEM

SEQ ID NO: 144230 - protein, 11 aa, Influenza A virus
ITADKRIIEMV

SEQ ID NO: 144231 - protein, 8 aa, Influenza A virus
ITADKRIM

SEQ ID NO: 144232 - protein, 10 aa, Influenza A virus
ITADKRIMEM

SEQ ID NO: 144233 - protein, 10 aa, Influenza A virus
ITADKRIMGM

SEQ ID NO: 144234 - protein, 10 aa, Influenza A virus
ITADKRITEM

SEQ ID NO: 144235 - protein, 11 aa, Influenza A virus
ITADKRITEMV

SEQ ID NO: 144236 - protein, 8 aa, Influenza A virus
ITADRRIM

SEQ ID NO: 144237 - protein, 10 aa, Influenza A virus
ITADRRIMEM

SEQ ID NO: 144238 - protein, 10 aa, Influenza A virus
ITADRRITEM

SEQ ID NO: 144239 - protein, 9 aa, Influenza A virus
ITKEKKEEL

SEQ ID NO: 144240 - protein, 10 aa, Influenza A virus
ITKEKKEELR

SEQ ID NO: 144241 - protein, 9 aa, Influenza A virus
ITKEKREEL

SEQ ID NO: 144242 - protein, 9 aa, Influenza A virus
ITNTVHYPK

SEQ ID NO: 144243 - protein, 10 aa, Influenza A virus
ITNTVHYPKI

SEQ ID NO: 144244 - protein, 11 aa, Influenza A virus
ITNTVHYPKIY

SEQ ID NO: 144245 - protein, 9 aa, Influenza A virus
ITQEKKEEL

SEQ ID NO: 144246 - protein, 9 aa, Influenza A virus
ITREKKEEL

SEQ ID NO: 144247 - protein, 8 aa, Influenza A virus
ITYSSSLM

SEQ ID NO: 144248 - protein, 9 aa, Influenza A virus
ITYSSSLMW

SEQ ID NO: 144249 - protein, 10 aa, Influenza A virus
ITYSSSLMWE

SEQ ID NO: 144250 - protein, 11 aa, Influenza A virus
ITYSSSLMWEI

SEQ ID NO: 144251 - protein, 8 aa, Influenza A virus
ITYSSSMM

SEQ ID NO: 144252 - protein, 9 aa, Influenza A virus
ITYSSSMMW

SEQ ID NO: 144253 - protein, 10 aa, Influenza A virus
ITYSSSMMWE

SEQ ID NO: 144254 - protein, 11 aa, Influenza A virus
ITYSSSMMWEI

SEQ ID NO: 144255 - protein, 11 aa, Influenza A virus
ITYSSSMMWEV

SEQ ID NO: 144256 - protein, 9 aa, Influenza A virus
IVAARNIVR

SEQ ID NO: 144257 - protein, 10 aa, Influenza A virus
IVAARNIVRR

SEQ ID NO: 144258 - protein, 9 aa, Influenza A virus
IVEAIIVAM

SEQ ID NO: 144259 - protein, 10 aa, Influenza A virus
IVEAIIVAMV

SEQ ID NO: 144260 - protein, 9 aa, Influenza A virus
IVEAIVVAM

SEQ ID NO: 144261 - protein, 10 aa, Influenza A virus
IVEAIVVAMV

SEQ ID NO: 144262 - protein, 9 aa, Influenza A virus
IVFSQEDCM

SEQ ID NO: 144263 - protein, 11 aa, Influenza A virus
IVFSQEDCMIK

SEQ ID NO: 144264 - protein, 9 aa, Influenza A virus
IVGKRATAI

SEQ ID NO: 144265 - protein, 11 aa, Influenza A virus
IVGKRATAILR

SEQ ID NO: 144266 - protein, 9 aa, Influenza A virus
IVGRRATAI

SEQ ID NO: 144267 - protein, 11 aa, Influenza A virus
IVGRRATAILR

SEQ ID NO: 144268 - protein, 9 aa, Influenza A virus
IVHEGYEEF

SEQ ID NO: 144269 - protein, 9 aa, Influenza A virus
IVKRATVSA

SEQ ID NO: 144270 - protein, 9 aa, Influenza A virus
IVRGNSPVF

SEQ ID NO: 144271 - protein, 11 aa, Influenza A virus
IVRGNSPVFNY

SEQ ID NO: 144272 - protein, 9 aa, Influenza A virus
IVRKATRRL

SEQ ID NO: 144273 - protein, 10 aa, Influenza A virus
IVRKATRRLV

SEQ ID NO: 144274 - protein, 9 aa, Influenza A virus
IVRRAAVSA

SEQ ID NO: 144275 - protein, 9 aa, Influenza A virus
IVRRAMVSA

SEQ ID NO: 144276 - protein, 9 aa, Influenza A virus
IVRRAQVSA

SEQ ID NO: 144277 - protein, 9 aa, Influenza A virus
IVRRASVSA

SEQ ID NO: 144278 - protein, 9 aa, Influenza A virus
IVRRATVSA

SEQ ID NO: 144279 - protein, 9 aa, Influenza A virus
IVRRATVST

SEQ ID NO: 144280 - protein, 9 aa, Influenza A virus
IVVSIDRFL

SEQ ID NO: 144281 - protein, 10 aa, Influenza A virus
IVVSIDRFLR

SEQ ID NO: 144282 - protein, 11 aa, Influenza A virus
IVVSIDRFLRV

SEQ ID NO: 144283 - protein, 8 aa, Influenza A virus
IYIEVLHL

SEQ ID NO: 144284 - protein, 9 aa, Influenza A virus
IYIEVLHLT

SEQ ID NO: 144285 - protein, 11 aa, Influenza A virus
IYKTYFEKAER

SEQ ID NO: 144286 - protein, 9 aa, Influenza A virus
IYKTYFEKV

SEQ ID NO: 144287 - protein, 11 aa, Influenza A virus
IYKTYFEKVER

SEQ ID NO: 144288 - protein, 8 aa, Influenza A virus
IYKTYFER

SEQ ID NO: 144289 - protein, 9 aa, Influenza A virus
IYKTYFERV

SEQ ID NO: 144290 - protein, 11 aa, Influenza A virus
IYKTYFERVER

SEQ ID NO: 144291 - protein, 8 aa, Influenza A virus
IYSSSMMW

SEQ ID NO: 144292 - protein, 10 aa, Influenza A virus
IYSSSMMWEI

SEQ ID NO: 144293 - protein, 10 aa, Influenza A virus
KAARAQYSGF

SEQ ID NO: 144294 - protein, 10 aa, Influenza A virus
KAARGKYSGF

SEQ ID NO: 144295 - protein, 10 aa, Influenza A virus
KAARGQYSGF

SEQ ID NO: 144296 - protein, 10 aa, Influenza A virus
KAARSQYSGF

SEQ ID NO: 144297 - protein, 10 aa, Influenza A virus
KAIRGQYSGF

SEQ ID NO: 144298 - protein, 9 aa, Influenza A virus
KALFQNWGI

SEQ ID NO: 144299 - protein, 9 aa, Influenza A virus
KANDAGSDR

SEQ ID NO: 144300 - protein, 9 aa, Influenza A virus
KATAILRKA

SEQ ID NO: 144301 - protein, 11 aa, Influenza A virus
KATAILRKATR

SEQ ID NO: 144302 - protein, 9 aa, Influenza A virus
KATKRLTIL

SEQ ID NO: 144303 - protein, 10 aa, Influenza A virus
KATKRLTILG

SEQ ID NO: 144304 - protein, 11 aa, Influenza A virus
KATKRLTILGK

SEQ ID NO: 144305 - protein, 9 aa, Influenza A virus
KATKRLTVL

SEQ ID NO: 144306 - protein, 10 aa, Influenza A virus
KATKRLTVLG

SEQ ID NO: 144307 - protein, 11 aa, Influenza A virus
KATKRLTVLGK

SEQ ID NO: 144308 - protein, 9 aa, Influenza A virus
KATQRLVQL

SEQ ID NO: 144309 - protein, 10 aa, Influenza A virus
KATQRLVQLI

SEQ ID NO: 144310 - protein, 10 aa, Influenza A virus
KATRGQYSGF

SEQ ID NO: 144311 - protein, 9 aa, Influenza A virus
KATRKLIQL

SEQ ID NO: 144312 - protein, 10 aa, Influenza A virus
KATRKLIQLI

SEQ ID NO: 144313 - protein, 9 aa, Influenza A virus
KATRRLIQL

SEQ ID NO: 144314 - protein, 10 aa, Influenza A virus
KATRRLIQLI

SEQ ID NO: 144315 - protein, 9 aa, Influenza A virus
KATRRLVQL

SEQ ID NO: 144316 - protein, 10 aa, Influenza A virus
KATRRLVQLI

SEQ ID NO: 144317 - protein, 9 aa, Influenza A virus
KATRRMIQL

SEQ ID NO: 144318 - protein, 10 aa, Influenza A virus
KATRRMIQLI

SEQ ID NO: 144319 - protein, 11 aa, Influenza A virus
KATRRMIQLIV

SEQ ID NO: 144320 - protein, 9 aa, Influenza A virus
KAVRGDLNF

SEQ ID NO: 144321 - protein, 10 aa, Influenza A virus
KAVRGDLNFI

SEQ ID NO: 144322 - protein, 10 aa, Influenza A virus
KAVRGDLNFM

SEQ ID NO: 144323 - protein, 10 aa, Influenza A virus
KAVRGDLNFV

SEQ ID NO: 144324 - protein, 10 aa, Influenza A virus
KAVRGQYSGF

SEQ ID NO: 144325 - protein, 10 aa, Influenza A virus
KDAKALFQNW

SEQ ID NO: 144326 - protein, 10 aa, Influenza A virus
KDAKILFQNW

SEQ ID NO: 144327 - protein, 10 aa, Influenza A virus
KDAKLLFQNW

SEQ ID NO: 144328 - protein, 10 aa, Influenza A virus
KDAKTLFQNW

SEQ ID NO: 144329 - protein, 10 aa, Influenza A virus
KDAKVLFLNW

SEQ ID NO: 144330 - protein, 10 aa, Influenza A virus
KDAKVLFQNW

SEQ ID NO: 144331 - protein, 10 aa, Influenza A virus
KDAKVLFQSW

SEQ ID NO: 144332 - protein, 10 aa, Influenza A virus
KDEQSIAEAI

SEQ ID NO: 144333 - protein, 10 aa, Influenza A virus
KEAKDVIMEV

SEQ ID NO: 144334 - protein, 10 aa, Influenza A virus
KEAQDVIMEV

SEQ ID NO: 144335 - protein, 9 aa, Influenza A virus
KEDKRYGPA

SEQ ID NO: 144336 - protein, 10 aa, Influenza A virus
KEDKRYGPAL

SEQ ID NO: 144337 - protein, 9 aa, Influenza A virus
KEDRRYGPA

SEQ ID NO: 144338 - protein, 10 aa, Influenza A virus
KEDRRYGPAL

SEQ ID NO: 144339 - protein, 10 aa, Influenza A virus
KEEEMLTGNL

SEQ ID NO: 144340 - protein, 10 aa, Influenza A virus
KEEEVLTGNL

SEQ ID NO: 144341 - protein, 10 aa, Influenza A virus
KEELQDCKIA

SEQ ID NO: 144342 - protein, 9 aa, Influenza A virus
KEELQGCKI

SEQ ID NO: 144343 - protein, 9 aa, Influenza A virus
KEELQNCKI

SEQ ID NO: 144344 - protein, 10 aa, Influenza A virus
KEELQNCKIA

SEQ ID NO: 144345 - protein, 9 aa, Influenza A virus
KEELRDCKI

SEQ ID NO: 144346 - protein, 9 aa, Influenza A virus
KEERRYGPA

SEQ ID NO: 144347 - protein, 10 aa, Influenza A virus
KEERRYGPAL

SEQ ID NO: 144348 - protein, 9 aa, Influenza A virus
KEEVLTGNL

SEQ ID NO: 144349 - protein, 9 aa, Influenza A virus
KEKLQDCKI

SEQ ID NO: 144350 - protein, 10 aa, Influenza A virus
KEKLQDCKIA

SEQ ID NO: 144351 - protein, 8 aa, Influenza A virus
KELRDLML

SEQ ID NO: 144352 - protein, 9 aa, Influenza A virus
KENKRYGPA

SEQ ID NO: 144353 - protein, 10 aa, Influenza A virus
KENKRYGPAL

SEQ ID NO: 144354 - protein, 9 aa, Influenza A virus
KETRRLIQL

SEQ ID NO: 144355 - protein, 10 aa, Influenza A virus
KETRRLIQLI

SEQ ID NO: 144356 - protein, 9 aa, Influenza A virus
KFTSGRQEK

SEQ ID NO: 144357 - protein, 10 aa, Influenza A virus
KGAEVLFQNW

SEQ ID NO: 144358 - protein, 10 aa, Influenza A virus
KGEKANVLIM

SEQ ID NO: 144359 - protein, 10 aa, Influenza A virus
KGTKRLTVLG

SEQ ID NO: 144360 - protein, 11 aa, Influenza A virus
KGTKRLTVLGK

SEQ ID NO: 144361 - protein, 10 aa, Influenza A virus
KHGTFGPVHF

SEQ ID NO: 144362 - protein, 11 aa, Influenza A virus
KHGTFGPVHFR

SEQ ID NO: 144363 - protein, 10 aa, Influenza A virus
KHGTFGPVRF

SEQ ID NO: 144364 - protein, 11 aa, Influenza A virus
KHGTFGPVRFR

SEQ ID NO: 144365 - protein, 9 aa, Influenza A virus
KIAPLMEAY

SEQ ID NO: 144366 - protein, 10 aa, Influenza A virus
KIAPLMEAYM

SEQ ID NO: 144367 - protein, 11 aa, Influenza A virus
KIAPLMEAYML

SEQ ID NO: 144368 - protein, 9 aa, Influenza A virus
KIAPLMVAY

SEQ ID NO: 144369 - protein, 10 aa, Influenza A virus
KIAPLMVAYI

SEQ ID NO: 144370 - protein, 11 aa, Influenza A virus
KIAPLMVAYIL

SEQ ID NO: 144371 - protein, 10 aa, Influenza A virus
KIAPLMVAYM

SEQ ID NO: 144372 - protein, 11 aa, Influenza A virus
KIAPLMVAYMF

SEQ ID NO: 144373 - protein, 11 aa, Influenza A virus
KIAPLMVAYML

SEQ ID NO: 144374 - protein, 10 aa, Influenza A virus
KIEFEPFQSL

SEQ ID NO: 144375 - protein, 9 aa, Influenza A virus
KILFQNWGI

SEQ ID NO: 144376 - protein, 9 aa, Influenza A virus
KILFQNWGV

SEQ ID NO: 144377 - protein, 11 aa, Influenza A virus
KILTSESQLTI

SEQ ID NO: 144378 - protein, 9 aa, Influenza A virus
KINDAGSDR

SEQ ID NO: 144379 - protein, 10 aa, Influenza A virus
KIQWSHNPTM

SEQ ID NO: 144380 - protein, 10 aa, Influenza A virus
KIQWSQDPTI

SEQ ID NO: 144381 - protein, 10 aa, Influenza A virus
KIQWSQDPTM

SEQ ID NO: 144382 - protein, 10 aa, Influenza A virus
KIQWSQDPTV

SEQ ID NO: 144383 - protein, 10 aa, Influenza A virus
KIQWSQEPTM

SEQ ID NO: 144384 - protein, 9 aa, Influenza A virus
KIQWSQNPA

SEQ ID NO: 144385 - protein, 10 aa, Influenza A virus
KIQWSQNPAI

SEQ ID NO: 144386 - protein, 10 aa, Influenza A virus
KIQWSQNPAM

SEQ ID NO: 144387 - protein, 10 aa, Influenza A virus
KIQWSQNPTM

SEQ ID NO: 144388 - protein, 10 aa, Influenza A virus
KIQWSQSPTM

SEQ ID NO: 144389 - protein, 9 aa, Influenza A virus
KIQWSQVPA

SEQ ID NO: 144390 - protein, 11 aa, Influenza A virus
KIQWSQVPATL

SEQ ID NO: 144391 - protein, 9 aa, Influenza A virus
KIRRRVDIN

SEQ ID NO: 144392 - protein, 10 aa, Influenza A virus
KIRRRVDINP

SEQ ID NO: 144393 - protein, 9 aa, Influenza A virus
KIRRRVDMN

SEQ ID NO: 144394 - protein, 10 aa, Influenza A virus
KIRRRVDMNP

SEQ ID NO: 144395 - protein, 9 aa, Influenza A virus
KIRRRVDTN

SEQ ID NO: 144396 - protein, 9 aa, Influenza A virus
KIRRRVDVN

SEQ ID NO: 144397 - protein, 9 aa, Influenza A virus
KIRVHDGYE

SEQ ID NO: 144398 - protein, 9 aa, Influenza A virus
KISPLLVAY

SEQ ID NO: 144399 - protein, 10 aa, Influenza A virus
KISPLLVAYM

SEQ ID NO: 144400 - protein, 11 aa, Influenza A virus
KISPLLVAYML

SEQ ID NO: 144401 - protein, 9 aa, Influenza A virus
KISPLMVAY

SEQ ID NO: 144402 - protein, 10 aa, Influenza A virus
KISPLMVAYM

SEQ ID NO: 144403 - protein, 11 aa, Influenza A virus
KISPLMVAYML

SEQ ID NO: 144404 - protein, 8 aa, Influenza A virus
KISSSFSF

SEQ ID NO: 144405 - protein, 9 aa, Influenza A virus
KISSSFSFG

SEQ ID NO: 144406 - protein, 11 aa, Influenza A virus
KISSSFSFGGF

SEQ ID NO: 144407 - protein, 9 aa, Influenza A virus
KITEMIPER

SEQ ID NO: 144408 - protein, 9 aa, Influenza A virus
KIVVSIDRF

SEQ ID NO: 144409 - protein, 11 aa, Influenza A virus
KIVVSIDRFLR

SEQ ID NO: 144410 - protein, 9 aa, Influenza A virus
KIYKTYFEK

SEQ ID NO: 144411 - protein, 10 aa, Influenza A virus
KIYKTYFEKA

SEQ ID NO: 144412 - protein, 10 aa, Influenza A virus
KIYKTYFEKV

SEQ ID NO: 144413 - protein, 9 aa, Influenza A virus
KIYKTYFER

SEQ ID NO: 144414 - protein, 10 aa, Influenza A virus
KIYKTYFERV

SEQ ID NO: 144415 - protein, 11 aa, Influenza A virus
KKATRRLIQLI

SEQ ID NO: 144416 - protein, 10 aa, Influenza A virus
KKITEMIPER

SEQ ID NO: 144417 - protein, 9 aa, Influenza A virus
KLAITYSSS

SEQ ID NO: 144418 - protein, 10 aa, Influenza A virus
KLAITYSSSM

SEQ ID NO: 144419 - protein, 10 aa, Influenza A virus
KLEFEPFQSL

SEQ ID NO: 144420 - protein, 11 aa, Influenza A virus
KLEFEPFQSLV

SEQ ID NO: 144421 - protein, 10 aa, Influenza A virus
KLIQLIVSGR

SEQ ID NO: 144422 - protein, 11 aa, Influenza A virus
KLKVHEGFEEF

SEQ ID NO: 144423 - protein, 9 aa, Influenza A virus
KLLFQNWGI

SEQ ID NO: 144424 - protein, 10 aa, Influenza A virus
KLLFQNWGIE

SEQ ID NO: 144425 - protein, 8 aa, Influenza A virus
KLLPFAAA

SEQ ID NO: 144426 - protein, 9 aa, Influenza A virus
KLLPFAAAP

SEQ ID NO: 144427 - protein, 11 aa, Influenza A virus
KLLPFAAAPPK

SEQ ID NO: 144428 - protein, 8 aa, Influenza A virus
KLNVHEGY

SEQ ID NO: 144429 - protein, 10 aa, Influenza A virus
KLQDCKIAPL

SEQ ID NO: 144430 - protein, 11 aa, Influenza A virus
KLQDCKIAPLM

SEQ ID NO: 144431 - protein, 11 aa, Influenza A virus
KLRVHEGYEEF

SEQ ID NO: 144432 - protein, 10 aa, Influenza A virus
KLSRMQFSSL

SEQ ID NO: 144433 - protein, 11 aa, Influenza A virus
KLSRMQFSSLT

SEQ ID NO: 144434 - protein, 10 aa, Influenza A virus
KLTIIYSSSM

SEQ ID NO: 144435 - protein, 10 aa, Influenza A virus
KLTITYSSSL

SEQ ID NO: 144436 - protein, 10 aa, Influenza A virus
KLTITYSSSM

SEQ ID NO: 144437 - protein, 10 aa, Influenza A virus
KLTKGEKANV

SEQ ID NO: 144438 - protein, 10 aa, Influenza A virus
KMEFEPFQSL

SEQ ID NO: 144439 - protein, 11 aa, Influenza A virus
KMEFEPFQSLI

SEQ ID NO: 144440 - protein, 11 aa, Influenza A virus
KMEFEPFQSLV

SEQ ID NO: 144441 - protein, 10 aa, Influenza A virus
KMEFESFQSL

SEQ ID NO: 144442 - protein, 11 aa, Influenza A virus
KMEFESFQSLV

SEQ ID NO: 144443 - protein, 10 aa, Influenza A virus
KMGVDEYSNA

SEQ ID NO: 144444 - protein, 9 aa, Influenza A virus
KMGVDEYSR

SEQ ID NO: 144445 - protein, 10 aa, Influenza A virus
KMGVDEYSRA

SEQ ID NO: 144446 - protein, 10 aa, Influenza A virus
KMGVDEYSSA

SEQ ID NO: 144447 - protein, 10 aa, Influenza A virus
KMGVDEYSSM

SEQ ID NO: 144448 - protein, 9 aa, Influenza A virus
KMNDAGSDR

SEQ ID NO: 144449 - protein, 10 aa, Influenza A virus
KMNDAGSDRV

SEQ ID NO: 144450 - protein, 11 aa, Influenza A virus
KMNDAGSDRVM

SEQ ID NO: 144451 - protein, 9 aa, Influenza A virus
KMSDAGSDR

SEQ ID NO: 144452 - protein, 10 aa, Influenza A virus
KMSDAGSDRV

SEQ ID NO: 144453 - protein, 11 aa, Influenza A virus
KMSDAGSDRVM

SEQ ID NO: 144454 - protein, 11 aa, Influenza A virus
KMVDILRQNPT

SEQ ID NO: 144455 - protein, 9 aa, Influenza A virus
KNEQGQTLW

SEQ ID NO: 144456 - protein, 11 aa, Influenza A virus
KNGTFGPVHFR

SEQ ID NO: 144457 - protein, 10 aa, Influenza A virus
KNPALRMKWM

SEQ ID NO: 144458 - protein, 10 aa, Influenza A virus
KNPSLRMKWM

SEQ ID NO: 144459 - protein, 11 aa, Influenza A virus
KNPSLRMKWMM

SEQ ID NO: 144460 - protein, 10 aa, Influenza A virus
KNWETVKIQW

SEQ ID NO: 144461 - protein, 10 aa, Influenza A virus
KPYFEKVERL

SEQ ID NO: 144462 - protein, 10 aa, Influenza A virus
KQSGMQFSSL

SEQ ID NO: 144463 - protein, 10 aa, Influenza A virus
KQSRMQFSSF

SEQ ID NO: 144464 - protein, 11 aa, Influenza A virus
KQSRMQFSSFT

SEQ ID NO: 144465 - protein, 10 aa, Influenza A virus
KQSRMQFSSL

SEQ ID NO: 144466 - protein, 11 aa, Influenza A virus
KQSRMQFSSLA

SEQ ID NO: 144467 - protein, 11 aa, Influenza A virus
KQSRMQFSSLT

SEQ ID NO: 144468 - protein, 9 aa, Influenza A virus
KRATAIIRK

SEQ ID NO: 144469 - protein, 10 aa, Influenza A virus
KRATAIIRKA

SEQ ID NO: 144470 - protein, 8 aa, Influenza A virus
KRATAILK

SEQ ID NO: 144471 - protein, 9 aa, Influenza A virus
KRATAILKK

SEQ ID NO: 144472 - protein, 10 aa, Influenza A virus
KRATAILKKA

SEQ ID NO: 144473 - protein, 9 aa, Influenza A virus
KRATAILRK

SEQ ID NO: 144474 - protein, 10 aa, Influenza A virus
KRATAILRKA

SEQ ID NO: 144475 - protein, 10 aa, Influenza A virus
KRATAILRKT

SEQ ID NO: 144476 - protein, 9 aa, Influenza A virus
KRATAIVRK

SEQ ID NO: 144477 - protein, 9 aa, Influenza A virus
KRATATLRK

SEQ ID NO: 144478 - protein, 10 aa, Influenza A virus
KRATVSADPL

SEQ ID NO: 144479 - protein, 10 aa, Influenza A virus
KRGTFGPVHF

SEQ ID NO: 144480 - protein, 11 aa, Influenza A virus
KRGTFGPVHFR

SEQ ID NO: 144481 - protein, 10 aa, Influenza A virus
KRIIEMIPER

SEQ ID NO: 144482 - protein, 10 aa, Influenza A virus
KRIIEMVPER

SEQ ID NO: 144483 - protein, 10 aa, Influenza A virus
KRIIETIPER

SEQ ID NO: 144484 - protein, 10 aa, Influenza A virus
KRIMEMIPEK

SEQ ID NO: 144485 - protein, 10 aa, Influenza A virus
KRIMEMIPER

SEQ ID NO: 144486 - protein, 9 aa, Influenza A virus
KRIMEMIPK

SEQ ID NO: 144487 - protein, 10 aa, Influenza A virus
KRIMEMIPKR

SEQ ID NO: 144488 - protein, 10 aa, Influenza A virus
KRIMGMIPER

SEQ ID NO: 144489 - protein, 9 aa, Influenza A virus
KRISGSSVK

SEQ ID NO: 144490 - protein, 10 aa, Influenza A virus
KRISGSSVKR

SEQ ID NO: 144491 - protein, 10 aa, Influenza A virus
KRITEMIPER

SEQ ID NO: 144492 - protein, 10 aa, Influenza A virus
KRITEMVPER

SEQ ID NO: 144493 - protein, 10 aa, Influenza A virus
KRITETIPER

SEQ ID NO: 144494 - protein, 9 aa, Influenza A virus
KRKRDFSIL

SEQ ID NO: 144495 - protein, 9 aa, Influenza A virus
KRKRDSSIL

SEQ ID NO: 144496 - protein, 9 aa, Influenza A virus
KRKRNSSIL

SEQ ID NO: 144497 - protein, 8 aa, Influenza A virus
KRLTILGK

SEQ ID NO: 144498 - protein, 10 aa, Influenza A virus
KRLTILGKDA

SEQ ID NO: 144499 - protein, 8 aa, Influenza A virus
KRLTVLGK

SEQ ID NO: 144500 - protein, 8 aa, Influenza A virus
KRLVQLIV

SEQ ID NO: 144501 - protein, 10 aa, Influenza A virus
KRLVQLIVSG

SEQ ID NO: 144502 - protein, 11 aa, Influenza A virus
KRLVQLIVSGR

SEQ ID NO: 144503 - protein, 9 aa, Influenza A virus
KRNEQGQTL

SEQ ID NO: 144504 - protein, 8 aa, Influenza A virus
KRTKGFSV

SEQ ID NO: 144505 - protein, 9 aa, Influenza A virus
KRTKGFSVK

SEQ ID NO: 144506 - protein, 10 aa, Influenza A virus
KRTKGFSVKR

SEQ ID NO: 144507 - protein, 11 aa, Influenza A virus
KRTKGFSVKRE

SEQ ID NO: 144508 - protein, 9 aa, Influenza A virus
KRTNGSSVK

SEQ ID NO: 144509 - protein, 10 aa, Influenza A virus
KRTNGSSVKK

SEQ ID NO: 144510 - protein, 10 aa, Influenza A virus
KRTSGSSFTK

SEQ ID NO: 144511 - protein, 9 aa, Influenza A virus
KRTSGSSIK

SEQ ID NO: 144512 - protein, 10 aa, Influenza A virus
KRTSGSSIKK

SEQ ID NO: 144513 - protein, 10 aa, Influenza A virus
KRTSGSSIKR

SEQ ID NO: 144514 - protein, 9 aa, Influenza A virus
KRTSGSSTK

SEQ ID NO: 144515 - protein, 10 aa, Influenza A virus
KRTSGSSTKK

SEQ ID NO: 144516 - protein, 10 aa, Influenza A virus
KRTSGSSTKR

SEQ ID NO: 144517 - protein, 10 aa, Influenza A virus
KRTSGSSVER

SEQ ID NO: 144518 - protein, 9 aa, Influenza A virus
KRTSGSSVK

SEQ ID NO: 144519 - protein, 10 aa, Influenza A virus
KRTSGSSVKK

SEQ ID NO: 144520 - protein, 10 aa, Influenza A virus
KRTSGSSVKR

SEQ ID NO: 144521 - protein, 10 aa, Influenza A virus
KRTSGSSVNR

SEQ ID NO: 144522 - protein, 9 aa, Influenza A virus
KRTSGTSVK

SEQ ID NO: 144523 - protein, 10 aa, Influenza A virus
KRTSGTSVKK

SEQ ID NO: 144524 - protein, 10 aa, Influenza A virus
KRTSGTSVRR

SEQ ID NO: 144525 - protein, 9 aa, Influenza A virus
KRYGPALSI

SEQ ID NO: 144526 - protein, 10 aa, Influenza A virus
KRYGPALSIN

SEQ ID NO: 144527 - protein, 10 aa, Influenza A virus
KRYGPALSIS

SEQ ID NO: 144528 - protein, 10 aa, Influenza A virus
KRYTSGRQEK

SEQ ID NO: 144529 - protein, 9 aa, Influenza A virus
KSMRGIRIS

SEQ ID NO: 144530 - protein, 10 aa, Influenza A virus
KSMRGIRISK

SEQ ID NO: 144531 - protein, 11 aa, Influenza A virus
KSMRGIRISKM

SEQ ID NO: 144532 - protein, 9 aa, Influenza A virus
KSTKRLTVL

SEQ ID NO: 144533 - protein, 10 aa, Influenza A virus
KSTKRLTVLG

SEQ ID NO: 144534 - protein, 11 aa, Influenza A virus
KSTKRLTVLGK

SEQ ID NO: 144535 - protein, 9 aa, Influenza A virus
KSTKRLVQL

SEQ ID NO: 144536 - protein, 10 aa, Influenza A virus
KSTKRLVQLI

SEQ ID NO: 144537 - protein, 11 aa, Influenza A virus
KSTKRLVQLIV

SEQ ID NO: 144538 - protein, 9 aa, Influenza A virus
KTLFQNWGI

SEQ ID NO: 144539 - protein, 9 aa, Influenza A virus
KTNDAGSDR

SEQ ID NO: 144540 - protein, 11 aa, Influenza A virus
KTNDAGSDRIM

SEQ ID NO: 144541 - protein, 11 aa, Influenza A virus
KTNDAGSDRVM

SEQ ID NO: 144542 - protein, 8 aa, Influenza A virus
KTRFLPVA

SEQ ID NO: 144543 - protein, 9 aa, Influenza A virus
KTRFLPVAG

SEQ ID NO: 144544 - protein, 10 aa, Influenza A virus
KTRFLPVAGG

SEQ ID NO: 144545 - protein, 11 aa, Influenza A virus
KTRFLPVAGGT

SEQ ID NO: 144546 - protein, 8 aa, Influenza A virus
KTRFLPVS

SEQ ID NO: 144547 - protein, 9 aa, Influenza A virus
KTRFLPVSG

SEQ ID NO: 144548 - protein, 10 aa, Influenza A virus
KTRFLPVSGG

SEQ ID NO: 144549 - protein, 11 aa, Influenza A virus
KTRFLPVSGGT

SEQ ID NO: 144550 - protein, 9 aa, Influenza A virus
KTSDAGSDR

SEQ ID NO: 144551 - protein, 11 aa, Influenza A virus
KTSDAGSDRVM

SEQ ID NO: 144552 - protein, 9 aa, Influenza A virus
KTTKRLTIL

SEQ ID NO: 144553 - protein, 10 aa, Influenza A virus
KTTKRLTILG

SEQ ID NO: 144554 - protein, 11 aa, Influenza A virus
KTTKRLTILGK

SEQ ID NO: 144555 - protein, 9 aa, Influenza A virus
KTTKRLTVL

SEQ ID NO: 144556 - protein, 10 aa, Influenza A virus
KTTKRLTVLG

SEQ ID NO: 144557 - protein, 11 aa, Influenza A virus
KTTKRLTVLGK

SEQ ID NO: 144558 - protein, 9 aa, Influenza A virus
KTTRRLIQL

SEQ ID NO: 144559 - protein, 10 aa, Influenza A virus
KTTRRLIQLI

SEQ ID NO: 144560 - protein, 11 aa, Influenza A virus
KTTRRLIQLIV

SEQ ID NO: 144561 - protein, 9 aa, Influenza A virus
KTTVDHMAI

SEQ ID NO: 144562 - protein, 10 aa, Influenza A virus
KTTVDHMAII

SEQ ID NO: 144563 - protein, 11 aa, Influenza A virus
KTTVDHMAIIK

SEQ ID NO: 144564 - protein, 9 aa, Influenza A virus
KTYFDKVER

SEQ ID NO: 144565 - protein, 10 aa, Influenza A virus
KTYFDKVERL

SEQ ID NO: 144566 - protein, 11 aa, Influenza A virus
KTYFDKVERLK

SEQ ID NO: 144567 - protein, 9 aa, Influenza A virus
KTYFEKAER

SEQ ID NO: 144568 - protein, 10 aa, Influenza A virus
KTYFEKAERL

SEQ ID NO: 144569 - protein, 11 aa, Influenza A virus
KTYFEKAERLK

SEQ ID NO: 144570 - protein, 9 aa, Influenza A virus
KTYFEKIER

SEQ ID NO: 144571 - protein, 10 aa, Influenza A virus
KTYFEKIERL

SEQ ID NO: 144572 - protein, 11 aa, Influenza A virus
KTYFEKIERLK

SEQ ID NO: 144573 - protein, 9 aa, Influenza A virus
KTYFEKVER

SEQ ID NO: 144574 - protein, 10 aa, Influenza A virus
KTYFEKVERL

SEQ ID NO: 144575 - protein, 11 aa, Influenza A virus
KTYFEKVERLK

SEQ ID NO: 144576 - protein, 11 aa, Influenza A virus
KTYFEKVERLR

SEQ ID NO: 144577 - protein, 10 aa, Influenza A virus
KTYFEKVERM

SEQ ID NO: 144578 - protein, 11 aa, Influenza A virus
KTYFEKVERMK

SEQ ID NO: 144579 - protein, 9 aa, Influenza A virus
KTYFEKVGR

SEQ ID NO: 144580 - protein, 10 aa, Influenza A virus
KTYFEKVGRL

SEQ ID NO: 144581 - protein, 11 aa, Influenza A virus
KTYFEKVGRLK

SEQ ID NO: 144582 - protein, 9 aa, Influenza A virus
KTYFERVER

SEQ ID NO: 144583 - protein, 10 aa, Influenza A virus
KTYFERVERL

SEQ ID NO: 144584 - protein, 11 aa, Influenza A virus
KTYFERVERLK

SEQ ID NO: 144585 - protein, 10 aa, Influenza A virus
KVERLRHGTF

SEQ ID NO: 144586 - protein, 9 aa, Influenza A virus
KVHEGFEEF

SEQ ID NO: 144587 - protein, 9 aa, Influenza A virus
KVHEGYEEF

SEQ ID NO: 144588 - protein, 9 aa, Influenza A virus
KVHKTYFEK

SEQ ID NO: 144589 - protein, 10 aa, Influenza A virus
KVHKTYFEKV

SEQ ID NO: 144590 - protein, 9 aa, Influenza A virus
KVLFLNWGI

SEQ ID NO: 144591 - protein, 9 aa, Influenza A virus
KVLFQNWGI

SEQ ID NO: 144592 - protein, 9 aa, Influenza A virus
KVLFQNWGV

SEQ ID NO: 144593 - protein, 9 aa, Influenza A virus
KVLFQSWGI

SEQ ID NO: 144594 - protein, 9 aa, Influenza A virus
KVNDAGSDR

SEQ ID NO: 144595 - protein, 9 aa, Influenza A virus
KVTKRLTVL

SEQ ID NO: 144596 - protein, 10 aa, Influenza A virus
KVTKRLTVLG

SEQ ID NO: 144597 - protein, 11 aa, Influenza A virus
KVTKRLTVLGK

SEQ ID NO: 144598 - protein, 9 aa, Influenza A virus
KVVVSIDRF

SEQ ID NO: 144599 - protein, 11 aa, Influenza A virus
KVVVSIDRFLR

SEQ ID NO: 144600 - protein, 9 aa, Influenza A virus
KVYKPYFEK

SEQ ID NO: 144601 - protein, 10 aa, Influenza A virus
KVYKPYFEKV

SEQ ID NO: 144602 - protein, 9 aa, Influenza A virus
KVYKTYFDK

SEQ ID NO: 144603 - protein, 10 aa, Influenza A virus
KVYKTYFDKV

SEQ ID NO: 144604 - protein, 9 aa, Influenza A virus
KVYKTYFEK

SEQ ID NO: 144605 - protein, 10 aa, Influenza A virus
KVYKTYFEKI

SEQ ID NO: 144606 - protein, 10 aa, Influenza A virus
KVYKTYFEKV

SEQ ID NO: 144607 - protein, 9 aa, Influenza A virus
KVYNTYFEK

SEQ ID NO: 144608 - protein, 10 aa, Influenza A virus
KVYNTYFEKV

SEQ ID NO: 144609 - protein, 9 aa, Influenza A virus
KVYRTYFEK

SEQ ID NO: 144610 - protein, 10 aa, Influenza A virus
KVYRTYFEKV

SEQ ID NO: 144611 - protein, 9 aa, Influenza A virus
KVYTTYFEK

SEQ ID NO: 144612 - protein, 10 aa, Influenza A virus
KVYTTYFEKV

SEQ ID NO: 144613 - protein, 10 aa, Influenza A virus
KWMMAMKYPI

SEQ ID NO: 144614 - protein, 10 aa, Influenza A virus
KYPITADKKI

SEQ ID NO: 144615 - protein, 10 aa, Influenza A virus
KYPITADKRI

SEQ ID NO: 144616 - protein, 11 aa, Influenza A virus
KYPITADKRII

SEQ ID NO: 144617 - protein, 9 aa, Influenza A virus
KYPITADRR

SEQ ID NO: 144618 - protein, 10 aa, Influenza A virus
KYPITADRRI

SEQ ID NO: 144619 - protein, 9 aa, Influenza A virus
KYSGFVRTL

SEQ ID NO: 144620 - protein, 10 aa, Influenza A virus
KYSGFVRTLF

SEQ ID NO: 144621 - protein, 11 aa, Influenza A virus
KYSGFVRTLFQ

SEQ ID NO: 144622 - protein, 9 aa, Influenza A virus
KYTSGRQEK

SEQ ID NO: 144623 - protein, 8 aa, Influenza A virus
LAITWWNR

SEQ ID NO: 144624 - protein, 9 aa, Influenza A virus
LAITYSSSM

SEQ ID NO: 144625 - protein, 10 aa, Influenza A virus
LAITYSSSMM

SEQ ID NO: 144626 - protein, 11 aa, Influenza A virus
LAITYSSSMMW

SEQ ID NO: 144627 - protein, 10 aa, Influenza A virus
LAKGEKANVL

SEQ ID NO: 144628 - protein, 10 aa, Influenza A virus
LAVNVRGSGM

SEQ ID NO: 144629 - protein, 11 aa, Influenza A virus
LAVNVRGSGMR

SEQ ID NO: 144630 - protein, 8 aa, Influenza A virus
LAVTWWNR

SEQ ID NO: 144631 - protein, 9 aa, Influenza A virus
LEFEPFQSL

SEQ ID NO: 144632 - protein, 10 aa, Influenza A virus
LEFEPFQSLV

SEQ ID NO: 144633 - protein, 11 aa, Influenza A virus
LEFEPFQSLVP

SEQ ID NO: 144634 - protein, 9 aa, Influenza A virus
LEMCHGTQI

SEQ ID NO: 144635 - protein, 9 aa, Influenza A virus
LEMCHSQQI

SEQ ID NO: 144636 - protein, 8 aa, Influenza A virus
LEMCHSTL

SEQ ID NO: 144637 - protein, 9 aa, Influenza A virus
LEMCHSTLI

SEQ ID NO: 144638 - protein, 10 aa, Influenza A virus
LEMCHSTLIG

SEQ ID NO: 144639 - protein, 9 aa, Influenza A virus
LEMCHSTQI

SEQ ID NO: 144640 - protein, 10 aa, Influenza A virus
LFLNWGIEHI

SEQ ID NO: 144641 - protein, 10 aa, Influenza A virus
LFLNWGIEPI

SEQ ID NO: 144642 - protein, 10 aa, Influenza A virus
LFQNWGIEHI

SEQ ID NO: 144643 - protein, 10 aa, Influenza A virus
LFQNWGIEPI

SEQ ID NO: 144644 - protein, 10 aa, Influenza A virus
LFQNWGIESI

SEQ ID NO: 144645 - protein, 10 aa, Influenza A virus
LFQNWGIETI

SEQ ID NO: 144646 - protein, 10 aa, Influenza A virus
LFQNWGVEPI

SEQ ID NO: 144647 - protein, 9 aa, Influenza A virus
LFQQMRDVI

SEQ ID NO: 144648 - protein, 9 aa, Influenza A virus
LFQQMRDVL

SEQ ID NO: 144649 - protein, 10 aa, Influenza A virus
LFQSWGIEPI

SEQ ID NO: 144650 - protein, 9 aa, Influenza A virus
LGKDAGALR

SEQ ID NO: 144651 - protein, 10 aa, Influenza A virus
LGTFDTAQII

SEQ ID NO: 144652 - protein, 11 aa, Influenza A virus
LGTFDTAQIIK

SEQ ID NO: 144653 - protein, 10 aa, Influenza A virus
LGTFDTIQII

SEQ ID NO: 144654 - protein, 11 aa, Influenza A virus
LGTFDTIQIIK

SEQ ID NO: 144655 - protein, 10 aa, Influenza A virus
LGTFDTTQII

SEQ ID NO: 144656 - protein, 11 aa, Influenza A virus
LGTFDTTQIIK

SEQ ID NO: 144657 - protein, 10 aa, Influenza A virus
LGTFDTTQMI

SEQ ID NO: 144658 - protein, 11 aa, Influenza A virus
LGTFDTTQMIK

SEQ ID NO: 144659 - protein, 10 aa, Influenza A virus
LGTFDTVQII

SEQ ID NO: 144660 - protein, 11 aa, Influenza A virus
LGTFDTVQIIK

SEQ ID NO: 144661 - protein, 10 aa, Influenza A virus
LIGQGDVVLV

SEQ ID NO: 144662 - protein, 9 aa, Influenza A virus
LIIAARNIV

SEQ ID NO: 144663 - protein, 10 aa, Influenza A virus
LIIAARNIVK

SEQ ID NO: 144664 - protein, 11 aa, Influenza A virus
LIIAARNIVKR

SEQ ID NO: 144665 - protein, 10 aa, Influenza A virus
LIIAARNIVR

SEQ ID NO: 144666 - protein, 11 aa, Influenza A virus
LIIAARNIVRR

SEQ ID NO: 144667 - protein, 9 aa, Influenza A virus
LIIAARSIV

SEQ ID NO: 144668 - protein, 10 aa, Influenza A virus
LIIAARSIVR

SEQ ID NO: 144669 - protein, 11 aa, Influenza A virus
LIIAARSIVRR

SEQ ID NO: 144670 - protein, 9 aa, Influenza A virus
LILAKEDKR

SEQ ID NO: 144671 - protein, 9 aa, Influenza A virus
LILGKEERR

SEQ ID NO: 144672 - protein, 9 aa, Influenza A virus
LILGKENKR

SEQ ID NO: 144673 - protein, 9 aa, Influenza A virus
LILGKGDRR

SEQ ID NO: 144674 - protein, 9 aa, Influenza A virus
LILGREDRR

SEQ ID NO: 144675 - protein, 9 aa, Influenza A virus
LIMQGDVVL

SEQ ID NO: 144676 - protein, 10 aa, Influenza A virus
LIMQGDVVLV

SEQ ID NO: 144677 - protein, 11 aa, Influenza A virus
LIMQGDVVLVM

SEQ ID NO: 144678 - protein, 9 aa, Influenza A virus
LINTYQWII

SEQ ID NO: 144679 - protein, 10 aa, Influenza A virus
LINTYQWIIR

SEQ ID NO: 144680 - protein, 9 aa, Influenza A virus
LINTYQWVI

SEQ ID NO: 144681 - protein, 10 aa, Influenza A virus
LINTYQWVIR

SEQ ID NO: 144682 - protein, 10 aa, Influenza A virus
LIPKAARAQY

SEQ ID NO: 144683 - protein, 10 aa, Influenza A virus
LIPKAARGQY

SEQ ID NO: 144684 - protein, 10 aa, Influenza A virus
LIPKAIRGQY

SEQ ID NO: 144685 - protein, 9 aa, Influenza A virus
LIQLIVGGR

SEQ ID NO: 144686 - protein, 9 aa, Influenza A virus
LIQLIVSGK

SEQ ID NO: 144687 - protein, 9 aa, Influenza A virus
LIQLIVSGR

SEQ ID NO: 144688 - protein, 9 aa, Influenza A virus
LIRGNSPVF

SEQ ID NO: 144689 - protein, 11 aa, Influenza A virus
LIRGNSPVFNY

SEQ ID NO: 144690 - protein, 9 aa, Influenza A virus
LIRQGDVVL

SEQ ID NO: 144691 - protein, 10 aa, Influenza A virus
LIRQGDVVLV

SEQ ID NO: 144692 - protein, 9 aa, Influenza A virus
LIVAARNIV

SEQ ID NO: 144693 - protein, 10 aa, Influenza A virus
LIVAARNIVR

SEQ ID NO: 144694 - protein, 11 aa, Influenza A virus
LIVAARNIVRR

SEQ ID NO: 144695 - protein, 11 aa, Influenza A virus
LKAARGQYSGF

SEQ ID NO: 144696 - protein, 9 aa, Influenza A virus
LKDCKISPL

SEQ ID NO: 144697 - protein, 9 aa, Influenza A virus
LKHGTFGPV

SEQ ID NO: 144698 - protein, 11 aa, Influenza A virus
LKHGTFGPVHF

SEQ ID NO: 144699 - protein, 11 aa, Influenza A virus
LKHGTFGPVRF

SEQ ID NO: 144700 - protein, 9 aa, Influenza A virus
LKIIVHEGY

SEQ ID NO: 144701 - protein, 9 aa, Influenza A virus
LKIKVHEGY

SEQ ID NO: 144702 - protein, 9 aa, Influenza A virus
LKIQIHEGY

SEQ ID NO: 144703 - protein, 9 aa, Influenza A virus
LKIRVHDGY

SEQ ID NO: 144704 - protein, 9 aa, Influenza A virus
LKIRVHEGY

SEQ ID NO: 144705 - protein, 9 aa, Influenza A virus
LKIRVNEGY

SEQ ID NO: 144706 - protein, 9 aa, Influenza A virus
LKISSSFSF

SEQ ID NO: 144707 - protein, 10 aa, Influenza A virus
LKISSSFSFG

SEQ ID NO: 144708 - protein, 9 aa, Influenza A virus
LKLKVHEGF

SEQ ID NO: 144709 - protein, 9 aa, Influenza A virus
LKLKVHEGY

SEQ ID NO: 144710 - protein, 9 aa, Influenza A virus
LKLNVHEGY

SEQ ID NO: 144711 - protein, 9 aa, Influenza A virus
LKLRVHEGY

SEQ ID NO: 144712 - protein, 9 aa, Influenza A virus
LKLTVHEGY

SEQ ID NO: 144713 - protein, 9 aa, Influenza A virus
LKNCNISPL

SEQ ID NO: 144714 - protein, 10 aa, Influenza A virus
LKNCNISPLM

SEQ ID NO: 144715 - protein, 9 aa, Influenza A virus
LKNGTFGPV

SEQ ID NO: 144716 - protein, 11 aa, Influenza A virus
LKNGTFGPVHF

SEQ ID NO: 144717 - protein, 9 aa, Influenza A virus
LKRGTFGPV

SEQ ID NO: 144718 - protein, 11 aa, Influenza A virus
LKRGTFGPVHF

SEQ ID NO: 144719 - protein, 10 aa, Influenza A virus
LKVHEGFEEF

SEQ ID NO: 144720 - protein, 10 aa, Influenza A virus
LKVHEGYEEF

SEQ ID NO: 144721 - protein, 10 aa, Influenza A virus
LLEMCHGTQI

SEQ ID NO: 144722 - protein, 10 aa, Influenza A virus
LLEMCHSQQI

SEQ ID NO: 144723 - protein, 9 aa, Influenza A virus
LLEMCHSTL

SEQ ID NO: 144724 - protein, 10 aa, Influenza A virus
LLEMCHSTLI

SEQ ID NO: 144725 - protein, 10 aa, Influenza A virus
LLEMCHSTQI

SEQ ID NO: 144726 - protein, 8 aa, Influenza A virus
LLFQNWGI

SEQ ID NO: 144727 - protein, 11 aa, Influenza A virus
LLFQNWGIEPI

SEQ ID NO: 144728 - protein, 10 aa, Influenza A virus
LLPFAAAPPK

SEQ ID NO: 144729 - protein, 11 aa, Influenza A virus
LLPFAAAPPKL

SEQ ID NO: 144730 - protein, 10 aa, Influenza A virus
LLRHFHKDAK

SEQ ID NO: 144731 - protein, 11 aa, Influenza A virus
LLRHFHKDAKV

SEQ ID NO: 144732 - protein, 10 aa, Influenza A virus
LLRHFQKDAK

SEQ ID NO: 144733 - protein, 11 aa, Influenza A virus
LLRHFQKDAKV

SEQ ID NO: 144734 - protein, 9 aa, Influenza A virus
LLRHFQKGA

SEQ ID NO: 144735 - protein, 11 aa, Influenza A virus
LLRHFQKGAEV

SEQ ID NO: 144736 - protein, 10 aa, Influenza A virus
LLSPEEVSEA

SEQ ID NO: 144737 - protein, 10 aa, Influenza A virus
LLSPEEVSET

SEQ ID NO: 144738 - protein, 10 aa, Influenza A virus
LLSQSRTREI

SEQ ID NO: 144739 - protein, 9 aa, Influenza A virus
LLTGNLQTL

SEQ ID NO: 144740 - protein, 10 aa, Influenza A virus
LLTGNLQTLK

SEQ ID NO: 144741 - protein, 9 aa, Influenza A virus
LLTSESQLK

SEQ ID NO: 144742 - protein, 10 aa, Influenza A virus
LLTSESQLKI

SEQ ID NO: 144743 - protein, 9 aa, Influenza A virus
LLVAYMLER

SEQ ID NO: 144744 - protein, 11 aa, Influenza A virus
LLVAYMLEREL

SEQ ID NO: 144745 - protein, 9 aa, Influenza A virus
LMEAYMLER

SEQ ID NO: 144746 - protein, 10 aa, Influenza A virus
LMLQSRTREI

SEQ ID NO: 144747 - protein, 10 aa, Influenza A virus
LMSQPRTREI

SEQ ID NO: 144748 - protein, 10 aa, Influenza A virus
LMSQSRTREI

SEQ ID NO: 144749 - protein, 10 aa, Influenza A virus
LMSQSRTRGI

SEQ ID NO: 144750 - protein, 9 aa, Influenza A virus
LMVAYILER

SEQ ID NO: 144751 - protein, 11 aa, Influenza A virus
LMVAYILEREL

SEQ ID NO: 144752 - protein, 9 aa, Influenza A virus
LMVAYMFER

SEQ ID NO: 144753 - protein, 10 aa, Influenza A virus
LMVAYMFERE

SEQ ID NO: 144754 - protein, 11 aa, Influenza A virus
LMVAYMFEREL

SEQ ID NO: 144755 - protein, 9 aa, Influenza A virus
LMVAYMLER

SEQ ID NO: 144756 - protein, 11 aa, Influenza A virus
LMVAYMLEREL

SEQ ID NO: 144757 - protein, 10 aa, Influenza A virus
LMWEINGPES

SEQ ID NO: 144758 - protein, 11 aa, Influenza A virus
LMWEINGPESV

SEQ ID NO: 144759 - protein, 10 aa, Influenza A virus
LNFINRANQR

SEQ ID NO: 144760 - protein, 10 aa, Influenza A virus
LNFMNRANQR

SEQ ID NO: 144761 - protein, 10 aa, Influenza A virus
LNFVNRANQR

SEQ ID NO: 144762 - protein, 11 aa, Influenza A virus
LNPMHQLLRHF

SEQ ID NO: 144763 - protein, 10 aa, Influenza A virus
LPDLTPSTEM

SEQ ID NO: 144764 - protein, 10 aa, Influenza A virus
LPDMTPNAEM

SEQ ID NO: 144765 - protein, 10 aa, Influenza A virus
LPDMTPNTEM

SEQ ID NO: 144766 - protein, 10 aa, Influenza A virus
LPDMTPSAEM

SEQ ID NO: 144767 - protein, 8 aa, Influenza A virus
LPDMTPSI

SEQ ID NO: 144768 - protein, 10 aa, Influenza A virus
LPDMTPSIEM

SEQ ID NO: 144769 - protein, 10 aa, Influenza A virus
LPDMTPSTEM

SEQ ID NO: 144770 - protein, 10 aa, Influenza A virus
LPDMTPSTEV

SEQ ID NO: 144771 - protein, 10 aa, Influenza A virus
LPDMTPSTGM

SEQ ID NO: 144772 - protein, 9 aa, Influenza A virus
LPDMTPSTV

SEQ ID NO: 144773 - protein, 10 aa, Influenza A virus
LPDMTPSTVM

SEQ ID NO: 144774 - protein, 11 aa, Influenza A virus
LPDMTPSTVMS

SEQ ID NO: 144775 - protein, 10 aa, Influenza A virus
LPDMTSSTEM

SEQ ID NO: 144776 - protein, 9 aa, Influenza A virus
LPFAAAPPE

SEQ ID NO: 144777 - protein, 10 aa, Influenza A virus
LPFAAAPPEP

SEQ ID NO: 144778 - protein, 9 aa, Influenza A virus
LPFAAAPPK

SEQ ID NO: 144779 - protein, 10 aa, Influenza A virus
LPFAAAPPKL

SEQ ID NO: 144780 - protein, 10 aa, Influenza A virus
LPGMTPSTEM

SEQ ID NO: 144781 - protein, 9 aa, Influenza A virus
LPVAGGTSS

SEQ ID NO: 144782 - protein, 10 aa, Influenza A virus
LPVAGGTSSI

SEQ ID NO: 144783 - protein, 11 aa, Influenza A virus
LPVAGGTSSIY

SEQ ID NO: 144784 - protein, 10 aa, Influenza A virus
LPVAGGTSSM

SEQ ID NO: 144785 - protein, 11 aa, Influenza A virus
LPVAGGTSSMY

SEQ ID NO: 144786 - protein, 10 aa, Influenza A virus
LPVAGGTSSV

SEQ ID NO: 144787 - protein, 11 aa, Influenza A virus
LPVAGGTSSVY

SEQ ID NO: 144788 - protein, 9 aa, Influenza A virus
LPVSGGTSS

SEQ ID NO: 144789 - protein, 10 aa, Influenza A virus
LPVSGGTSSV

SEQ ID NO: 144790 - protein, 11 aa, Influenza A virus
LPVSGGTSSVY

SEQ ID NO: 144791 - protein, 9 aa, Influenza A virus
LQALKLTVH

SEQ ID NO: 144792 - protein, 9 aa, Influenza A virus
LQDCKIAPL

SEQ ID NO: 144793 - protein, 10 aa, Influenza A virus
LQDCKIAPLM

SEQ ID NO: 144794 - protein, 9 aa, Influenza A virus
LQDCKISPL

SEQ ID NO: 144795 - protein, 10 aa, Influenza A virus
LQDCKISPLM

SEQ ID NO: 144796 - protein, 9 aa, Influenza A virus
LQECKISPL

SEQ ID NO: 144797 - protein, 10 aa, Influenza A virus
LQECKISPLM

SEQ ID NO: 144798 - protein, 9 aa, Influenza A virus
LQGCKISPL

SEQ ID NO: 144799 - protein, 10 aa, Influenza A virus
LQGCKISPLM

SEQ ID NO: 144800 - protein, 9 aa, Influenza A virus
LQNCKIAPL

SEQ ID NO: 144801 - protein, 10 aa, Influenza A virus
LQNCKIAPLM

SEQ ID NO: 144802 - protein, 11 aa, Influenza A virus
LQNCKIAPLMV

SEQ ID NO: 144803 - protein, 9 aa, Influenza A virus
LQNCKISPL

SEQ ID NO: 144804 - protein, 10 aa, Influenza A virus
LQNCKISPLL

SEQ ID NO: 144805 - protein, 11 aa, Influenza A virus
LQNCKISPLLV

SEQ ID NO: 144806 - protein, 10 aa, Influenza A virus
LQNCKISPLM

SEQ ID NO: 144807 - protein, 11 aa, Influenza A virus
LQNCKISPLMV

SEQ ID NO: 144808 - protein, 9 aa, Influenza A virus
LQSRTREIL

SEQ ID NO: 144809 - protein, 11 aa, Influenza A virus
LQSRTREILTR

SEQ ID NO: 144810 - protein, 9 aa, Influenza A virus
LQTLKIIVH

SEQ ID NO: 144811 - protein, 9 aa, Influenza A virus
LQTLKIRVH

SEQ ID NO: 144812 - protein, 9 aa, Influenza A virus
LQTLKLNVH

SEQ ID NO: 144813 - protein, 9 aa, Influenza A virus
LQTLKLRVH

SEQ ID NO: 144814 - protein, 9 aa, Influenza A virus
LQTLKLTVH

SEQ ID NO: 144815 - protein, 9 aa, Influenza A virus
LRDCKISPL

SEQ ID NO: 144816 - protein, 10 aa, Influenza A virus
LRDCKISPLM

SEQ ID NO: 144817 - protein, 11 aa, Influenza A virus
LRDLMSQPRTR

SEQ ID NO: 144818 - protein, 11 aa, Influenza A virus
LRDLMSQSRTR

SEQ ID NO: 144819 - protein, 9 aa, Influenza A virus
LRGFLILAK

SEQ ID NO: 144820 - protein, 9 aa, Influenza A virus
LRGFLILGK

SEQ ID NO: 144821 - protein, 9 aa, Influenza A virus
LRGFLILGR

SEQ ID NO: 144822 - protein, 9 aa, Influenza A virus
LRGIPILGK

SEQ ID NO: 144823 - protein, 9 aa, Influenza A virus
LRGIRISKM

SEQ ID NO: 144824 - protein, 9 aa, Influenza A virus
LRGIRVSKM

SEQ ID NO: 144825 - protein, 9 aa, Influenza A virus
LRGLRVSKM

SEQ ID NO: 144826 - protein, 9 aa, Influenza A virus
LRGVRVSKM

SEQ ID NO: 144827 - protein, 10 aa, Influenza A virus
LRHFQKDAKL

SEQ ID NO: 144828 - protein, 9 aa, Influenza A virus
LRHGTFGPV

SEQ ID NO: 144829 - protein, 11 aa, Influenza A virus
LRHGTFGPVHF

SEQ ID NO: 144830 - protein, 9 aa, Influenza A virus
LRISSSFSF

SEQ ID NO: 144831 - protein, 10 aa, Influenza A virus
LRISSSFSFA

SEQ ID NO: 144832 - protein, 10 aa, Influenza A virus
LRISSSFSFG

SEQ ID NO: 144833 - protein, 9 aa, Influenza A virus
LRKATQRLV

SEQ ID NO: 144834 - protein, 9 aa, Influenza A virus
LRKATRRLI

SEQ ID NO: 144835 - protein, 9 aa, Influenza A virus
LRKATRRLV

SEQ ID NO: 144836 - protein, 9 aa, Influenza A virus
LRKETRRLI

SEQ ID NO: 144837 - protein, 9 aa, Influenza A virus
LRKSTKRLV

SEQ ID NO: 144838 - protein, 9 aa, Influenza A virus
LRKTTRRLI

SEQ ID NO: 144839 - protein, 9 aa, Influenza A virus
LRMKWMMAM

SEQ ID NO: 144840 - protein, 10 aa, Influenza A virus
LRMKWMMAMK

SEQ ID NO: 144841 - protein, 11 aa, Influenza A virus
LRMKWMMAMKY

SEQ ID NO: 144842 - protein, 9 aa, Influenza A virus
LRNLMSQSR

SEQ ID NO: 144843 - protein, 11 aa, Influenza A virus
LRNLMSQSRTR

SEQ ID NO: 144844 - protein, 10 aa, Influenza A virus
LRVHEGYEEF

SEQ ID NO: 144845 - protein, 9 aa, Influenza A virus
LSINELRNL

SEQ ID NO: 144846 - protein, 11 aa, Influenza A virus
LSINELRNLAK

SEQ ID NO: 144847 - protein, 9 aa, Influenza A virus
LSINELSKL

SEQ ID NO: 144848 - protein, 11 aa, Influenza A virus
LSINELSKLTK

SEQ ID NO: 144849 - protein, 9 aa, Influenza A virus
LSINELSNI

SEQ ID NO: 144850 - protein, 11 aa, Influenza A virus
LSINELSNIAK

SEQ ID NO: 144851 - protein, 9 aa, Influenza A virus
LSINELSNL

SEQ ID NO: 144852 - protein, 11 aa, Influenza A virus
LSINELSNLAK

SEQ ID NO: 144853 - protein, 11 aa, Influenza A virus
LSINELSNLTK

SEQ ID NO: 144854 - protein, 9 aa, Influenza A virus
LSINELSSL

SEQ ID NO: 144855 - protein, 10 aa, Influenza A virus
LSINELSSLA

SEQ ID NO: 144856 - protein, 11 aa, Influenza A virus
LSINELSSLAK

SEQ ID NO: 144857 - protein, 9 aa, Influenza A virus
LSINELSTL

SEQ ID NO: 144858 - protein, 10 aa, Influenza A virus
LSINELSTLA

SEQ ID NO: 144859 - protein, 11 aa, Influenza A virus
LSINELSTLAK

SEQ ID NO: 144860 - protein, 9 aa, Influenza A virus
LSINQLSSL

SEQ ID NO: 144861 - protein, 11 aa, Influenza A virus
LSINQLSSLAK

SEQ ID NO: 144862 - protein, 9 aa, Influenza A virus
LSISELGNL

SEQ ID NO: 144863 - protein, 11 aa, Influenza A virus
LSISELGNLAK

SEQ ID NO: 144864 - protein, 9 aa, Influenza A virus
LSISELSNL

SEQ ID NO: 144865 - protein, 10 aa, Influenza A virus
LSISELSNLA

SEQ ID NO: 144866 - protein, 11 aa, Influenza A virus
LSISELSNLAK

SEQ ID NO: 144867 - protein, 9 aa, Influenza A virus
LSKLTKGEK

SEQ ID NO: 144868 - protein, 9 aa, Influenza A virus
LSNIAKGEK

SEQ ID NO: 144869 - protein, 9 aa, Influenza A virus
LSNLAKGEK

SEQ ID NO: 144870 - protein, 9 aa, Influenza A virus
LSNLTKGEK

SEQ ID NO: 144871 - protein, 9 aa, Influenza A virus
LSQSRTREI

SEQ ID NO: 144872 - protein, 9 aa, Influenza A virus
LSRMQFSSL

SEQ ID NO: 144873 - protein, 10 aa, Influenza A virus
LSRMQFSSLT

SEQ ID NO: 144874 - protein, 11 aa, Influenza A virus
LSRMQFSSLTV

SEQ ID NO: 144875 - protein, 9 aa, Influenza A virus
LTDSQTATK

SEQ ID NO: 144876 - protein, 10 aa, Influenza A virus
LTDSQTATKR

SEQ ID NO: 144877 - protein, 9 aa, Influenza A virus
LTGNLQALK

SEQ ID NO: 144878 - protein, 9 aa, Influenza A virus
LTGNLQTLK

SEQ ID NO: 144879 - protein, 9 aa, Influenza A virus
LTIIYSSSM

SEQ ID NO: 144880 - protein, 10 aa, Influenza A virus
LTIIYSSSMM

SEQ ID NO: 144881 - protein, 11 aa, Influenza A virus
LTIIYSSSMMW

SEQ ID NO: 144882 - protein, 10 aa, Influenza A virus
LTINVRGSGM

SEQ ID NO: 144883 - protein, 11 aa, Influenza A virus
LTINVRGSGMR

SEQ ID NO: 144884 - protein, 9 aa, Influenza A virus
LTITYSSSL

SEQ ID NO: 144885 - protein, 10 aa, Influenza A virus
LTITYSSSLM

SEQ ID NO: 144886 - protein, 11 aa, Influenza A virus
LTITYSSSLMW

SEQ ID NO: 144887 - protein, 9 aa, Influenza A virus
LTITYSSSM

SEQ ID NO: 144888 - protein, 10 aa, Influenza A virus
LTITYSSSMM

SEQ ID NO: 144889 - protein, 11 aa, Influenza A virus
LTITYSSSMMW

SEQ ID NO: 144890 - protein, 9 aa, Influenza A virus
LTKTTVDHM

SEQ ID NO: 144891 - protein, 10 aa, Influenza A virus
LTPSTEKSMR

SEQ ID NO: 144892 - protein, 9 aa, Influenza A virus
LTPSTEMSM

SEQ ID NO: 144893 - protein, 10 aa, Influenza A virus
LTPSTEMSMR

SEQ ID NO: 144894 - protein, 11 aa, Influenza A virus
LTQGACWEQLY

SEQ ID NO: 144895 - protein, 11 aa, Influenza A virus
LTQGTCWEQLY

SEQ ID NO: 144896 - protein, 11 aa, Influenza A virus
LTQGTCWEQMY

SEQ ID NO: 144897 - protein, 9 aa, Influenza A virus
LTRTTVDHM

SEQ ID NO: 144898 - protein, 10 aa, Influenza A virus
LTRTTVDHMA

SEQ ID NO: 144899 - protein, 11 aa, Influenza A virus
LTRTTVDHMAI

SEQ ID NO: 144900 - protein, 9 aa, Influenza A virus
LTSDSQLTI

SEQ ID NO: 144901 - protein, 11 aa, Influenza A virus
LTSDSQLTITK

SEQ ID NO: 144902 - protein, 9 aa, Influenza A virus
LTSESQLKI

SEQ ID NO: 144903 - protein, 9 aa, Influenza A virus
LTSESQLMI

SEQ ID NO: 144904 - protein, 11 aa, Influenza A virus
LTSESQLMITK

SEQ ID NO: 144905 - protein, 9 aa, Influenza A virus
LTSESQLMV

SEQ ID NO: 144906 - protein, 11 aa, Influenza A virus
LTSESQLMVTK

SEQ ID NO: 144907 - protein, 9 aa, Influenza A virus
LTSESQLPI

SEQ ID NO: 144908 - protein, 11 aa, Influenza A virus
LTSESQLPITK

SEQ ID NO: 144909 - protein, 9 aa, Influenza A virus
LTSESQLTI

SEQ ID NO: 144910 - protein, 11 aa, Influenza A virus
LTSESQLTITK

SEQ ID NO: 144911 - protein, 11 aa, Influenza A virus
LTSESQLTITR

SEQ ID NO: 144912 - protein, 11 aa, Influenza A virus
LTSESQLTTTK

SEQ ID NO: 144913 - protein, 9 aa, Influenza A virus
LTTTTVDHM

SEQ ID NO: 144914 - protein, 10 aa, Influenza A virus
LTVHEGYEEF

SEQ ID NO: 144915 - protein, 10 aa, Influenza A virus
LTVNVRGSGM

SEQ ID NO: 144916 - protein, 11 aa, Influenza A virus
LTVNVRGSGMR

SEQ ID NO: 144917 - protein, 10 aa, Influenza A virus
LVAYMLEREL

SEQ ID NO: 144918 - protein, 9 aa, Influenza A virus
LVIAARNIV

SEQ ID NO: 144919 - protein, 10 aa, Influenza A virus
LVIAARNIVR

SEQ ID NO: 144920 - protein, 11 aa, Influenza A virus
LVIAARNIVRR

SEQ ID NO: 144921 - protein, 10 aa, Influenza A virus
LVLKAARGQY

SEQ ID NO: 144922 - protein, 9 aa, Influenza A virus
LVMKRKRDF

SEQ ID NO: 144923 - protein, 11 aa, Influenza A virus
LVMKRKRDFSI

SEQ ID NO: 144924 - protein, 9 aa, Influenza A virus
LVNTYQWII

SEQ ID NO: 144925 - protein, 10 aa, Influenza A virus
LVNTYQWIIK

SEQ ID NO: 144926 - protein, 10 aa, Influenza A virus
LVNTYQWIIR

SEQ ID NO: 144927 - protein, 9 aa, Influenza A virus
LVNTYQWVI

SEQ ID NO: 144928 - protein, 10 aa, Influenza A virus
LVNTYQWVIR

SEQ ID NO: 144929 - protein, 10 aa, Influenza A virus
LVPKAARAQY

SEQ ID NO: 144930 - protein, 10 aa, Influenza A virus
LVPKAARGKY

SEQ ID NO: 144931 - protein, 10 aa, Influenza A virus
LVPKAARGQY

SEQ ID NO: 144932 - protein, 10 aa, Influenza A virus
LVPKAARSQY

SEQ ID NO: 144933 - protein, 10 aa, Influenza A virus
LVPKAIRGQY

SEQ ID NO: 144934 - protein, 10 aa, Influenza A virus
LVPKATRGQY

SEQ ID NO: 144935 - protein, 10 aa, Influenza A virus
LVPKAVRGQY

SEQ ID NO: 144936 - protein, 10 aa, Influenza A virus
LVPRATRGQY

SEQ ID NO: 144937 - protein, 10 aa, Influenza A virus
LVPRATRSQY

SEQ ID NO: 144938 - protein, 9 aa, Influenza A virus
LVQLIISGK

SEQ ID NO: 144939 - protein, 9 aa, Influenza A virus
LVQLIVSGR

SEQ ID NO: 144940 - protein, 9 aa, Influenza A virus
LVRGNSPAF

SEQ ID NO: 144941 - protein, 11 aa, Influenza A virus
LVRGNSPAFNY

SEQ ID NO: 144942 - protein, 9 aa, Influenza A virus
LVRGNSPIF

SEQ ID NO: 144943 - protein, 11 aa, Influenza A virus
LVRGNSPIFNY

SEQ ID NO: 144944 - protein, 9 aa, Influenza A virus
LVRGNSPVF

SEQ ID NO: 144945 - protein, 11 aa, Influenza A virus
LVRGNSPVFNY

SEQ ID NO: 144946 - protein, 9 aa, Influenza A virus
LVRKTRFLP

SEQ ID NO: 144947 - protein, 10 aa, Influenza A virus
LVRKTRFLPV

SEQ ID NO: 144948 - protein, 11 aa, Influenza A virus
LVRKTRFLPVA

SEQ ID NO: 144949 - protein, 10 aa, Influenza A virus
LYNKIEFEPF

SEQ ID NO: 144950 - protein, 10 aa, Influenza A virus
LYNKLEFEPF

SEQ ID NO: 144951 - protein, 10 aa, Influenza A virus
LYNKMEFEPF

SEQ ID NO: 144952 - protein, 10 aa, Influenza A virus
LYNKMEFESF

SEQ ID NO: 144953 - protein, 11 aa, Influenza A virus
MAIIKKFTSGR

SEQ ID NO: 144954 - protein, 11 aa, Influenza A virus
MAIIKKYTSGR

SEQ ID NO: 144955 - protein, 9 aa, Influenza A virus
MAIIKRYTS

SEQ ID NO: 144956 - protein, 11 aa, Influenza A virus
MAIIKRYTSGR

SEQ ID NO: 144957 - protein, 9 aa, Influenza A virus
MAMKYPITA

SEQ ID NO: 144958 - protein, 11 aa, Influenza A virus
MAMKYPITADK

SEQ ID NO: 144959 - protein, 11 aa, Influenza A virus
MAMKYPITADR

SEQ ID NO: 144960 - protein, 11 aa, Influenza A virus
MCHSTLIGGTR

SEQ ID NO: 144961 - protein, 11 aa, Influenza A virus
MCHSTQIGGLR

SEQ ID NO: 144962 - protein, 11 aa, Influenza A virus
MCHSTQIGGTR

SEQ ID NO: 144963 - protein, 10 aa, Influenza A virus
MEAYMLEREL

SEQ ID NO: 144964 - protein, 11 aa, Influenza A virus
MEAYMLERELV

SEQ ID NO: 144965 - protein, 9 aa, Influenza A virus
MEFEPFQSL

SEQ ID NO: 144966 - protein, 10 aa, Influenza A virus
MEFEPFQSLI

SEQ ID NO: 144967 - protein, 11 aa, Influenza A virus
MEFEPFQSLIP

SEQ ID NO: 144968 - protein, 10 aa, Influenza A virus
MEFEPFQSLV

SEQ ID NO: 144969 - protein, 11 aa, Influenza A virus
MEFEPFQSLVL

SEQ ID NO: 144970 - protein, 11 aa, Influenza A virus
MEFEPFQSLVP

SEQ ID NO: 144971 - protein, 8 aa, Influenza A virus
MEFESFQS

SEQ ID NO: 144972 - protein, 9 aa, Influenza A virus
MEFESFQSL

SEQ ID NO: 144973 - protein, 10 aa, Influenza A virus
MEFESFQSLV

SEQ ID NO: 144974 - protein, 11 aa, Influenza A virus
MEFESFQSLVP

SEQ ID NO: 144975 - protein, 8 aa, Influenza A virus
MEKLTITY

SEQ ID NO: 144976 - protein, 9 aa, Influenza A virus
MEKLTITYS

SEQ ID NO: 144977 - protein, 10 aa, Influenza A virus
MERIKELRDL

SEQ ID NO: 144978 - protein, 11 aa, Influenza A virus
MERIKELRDLL

SEQ ID NO: 144979 - protein, 11 aa, Influenza A virus
MERIKELRDLM

SEQ ID NO: 144980 - protein, 10 aa, Influenza A virus
MERIKELRNL

SEQ ID NO: 144981 - protein, 11 aa, Influenza A virus
MERIKELRNLM

SEQ ID NO: 144982 - protein, 10 aa, Influenza A virus
MERIKGLRDL

SEQ ID NO: 144983 - protein, 11 aa, Influenza A virus
MERIKGLRDLM

SEQ ID NO: 144984 - protein, 8 aa, Influenza A virus
MERVVVSI

SEQ ID NO: 144985 - protein, 10 aa, Influenza A virus
MERVVVSIDR

SEQ ID NO: 144986 - protein, 9 aa, Influenza A virus
MEVVFPNEV

SEQ ID NO: 144987 - protein, 11 aa, Influenza A virus
MEVVFPNEVGA

SEQ ID NO: 144988 - protein, 11 aa, Influenza A virus
MFERELVRKTR

SEQ ID NO: 144989 - protein, 9 aa, Influenza A virus
MGLKISSSF

SEQ ID NO: 144990 - protein, 11 aa, Influenza A virus
MGLKISSSFSF

SEQ ID NO: 144991 - protein, 9 aa, Influenza A virus
MGLRISSSF

SEQ ID NO: 144992 - protein, 10 aa, Influenza A virus
MGLRISSSFS

SEQ ID NO: 144993 - protein, 11 aa, Influenza A virus
MGLRISSSFSF

SEQ ID NO: 144994 - protein, 10 aa, Influenza A virus
MGMIGILPDL

SEQ ID NO: 144995 - protein, 10 aa, Influenza A virus
MGMIGILPDM

SEQ ID NO: 144996 - protein, 10 aa, Influenza A virus
MGMIGILPGM

SEQ ID NO: 144997 - protein, 10 aa, Influenza A virus
MGMIGIMPDM

SEQ ID NO: 144998 - protein, 10 aa, Influenza A virus
MGMIGVLPDL

SEQ ID NO: 144999 - protein, 10 aa, Influenza A virus
MGMIGVLPDM

SEQ ID NO: 145000 - protein, 10 aa, Influenza A virus
MGMTGILPDM

SEQ ID NO: 145001 - protein, 10 aa, Influenza A virus
MGMVGILPDL

SEQ ID NO: 145002 - protein, 10 aa, Influenza A virus
MGMVGILPDM

SEQ ID NO: 145003 - protein, 10 aa, Influenza A virus
MGMVGVLPDM

SEQ ID NO: 145004 - protein, 11 aa, Influenza A virus
MGVDEYSRAER

SEQ ID NO: 145005 - protein, 11 aa, Influenza A virus
MGVDEYSSAER

SEQ ID NO: 145006 - protein, 9 aa, Influenza A virus
MGVDEYSSM

SEQ ID NO: 145007 - protein, 11 aa, Influenza A virus
MGVDEYSSMER

SEQ ID NO: 145008 - protein, 10 aa, Influenza A virus
MHQLLRHFHK

SEQ ID NO: 145009 - protein, 10 aa, Influenza A virus
MHQLLRHFQK

SEQ ID NO: 145010 - protein, 9 aa, Influenza A virus
MIIAARNIV

SEQ ID NO: 145011 - protein, 10 aa, Influenza A virus
MIIAARNIVR

SEQ ID NO: 145012 - protein, 11 aa, Influenza A virus
MIIAARNIVRR

SEQ ID NO: 145013 - protein, 9 aa, Influenza A virus
MIKAVRGDL

SEQ ID NO: 145014 - protein, 11 aa, Influenza A virus
MIKAVRGDLNF

SEQ ID NO: 145015 - protein, 9 aa, Influenza A virus
MIKLLPFAA

SEQ ID NO: 145016 - protein, 10 aa, Influenza A virus
MIKLLPFAAA

SEQ ID NO: 145017 - protein, 9 aa, Influenza A virus
MIQLIVSGR

SEQ ID NO: 145018 - protein, 9 aa, Influenza A virus
MISPLAVTW

SEQ ID NO: 145019 - protein, 10 aa, Influenza A virus
MISPLAVTWW

SEQ ID NO: 145020 - protein, 10 aa, Influenza A virus
MITKEKKEEL

SEQ ID NO: 145021 - protein, 9 aa, Influenza A virus
MKHGTFGPV

SEQ ID NO: 145022 - protein, 10 aa, Influenza A virus
MKHGTFGPVH

SEQ ID NO: 145023 - protein, 11 aa, Influenza A virus
MKHGTFGPVHF

SEQ ID NO: 145024 - protein, 9 aa, Influenza A virus
MKRKRDFSI

SEQ ID NO: 145025 - protein, 10 aa, Influenza A virus
MKRKRDFSIL

SEQ ID NO: 145026 - protein, 9 aa, Influenza A virus
MKRKRDSSI

SEQ ID NO: 145027 - protein, 10 aa, Influenza A virus
MKRKRDSSIL

SEQ ID NO: 145028 - protein, 9 aa, Influenza A virus
MKRKRNSSI

SEQ ID NO: 145029 - protein, 10 aa, Influenza A virus
MKRKRNSSIL

SEQ ID NO: 145030 - protein, 9 aa, Influenza A virus
MKWMMAMKY

SEQ ID NO: 145031 - protein, 11 aa, Influenza A virus
MKWMMAMKYPI

SEQ ID NO: 145032 - protein, 10 aa, Influenza A virus
MKYPITADRR

SEQ ID NO: 145033 - protein, 9 aa, Influenza A virus
MLERELVRK

SEQ ID NO: 145034 - protein, 9 aa, Influenza A virus
MLQSRTREI

SEQ ID NO: 145035 - protein, 10 aa, Influenza A virus
MLQSRTREIL

SEQ ID NO: 145036 - protein, 9 aa, Influenza A virus
MLTGNLQTL

SEQ ID NO: 145037 - protein, 10 aa, Influenza A virus
MLTGNLQTLK

SEQ ID NO: 145038 - protein, 11 aa, Influenza A virus
MLTGNLQTLKI

SEQ ID NO: 145039 - protein, 9 aa, Influenza A virus
MLWSKANDA

SEQ ID NO: 145040 - protein, 8 aa, Influenza A virus
MLYNKIEF

SEQ ID NO: 145041 - protein, 9 aa, Influenza A virus
MLYNKIEFE

SEQ ID NO: 145042 - protein, 10 aa, Influenza A virus
MLYNKIEFEP

SEQ ID NO: 145043 - protein, 11 aa, Influenza A virus
MLYNKIEFEPF

SEQ ID NO: 145044 - protein, 8 aa, Influenza A virus
MLYNKLEF

SEQ ID NO: 145045 - protein, 9 aa, Influenza A virus
MLYNKLEFE

SEQ ID NO: 145046 - protein, 10 aa, Influenza A virus
MLYNKLEFEP

SEQ ID NO: 145047 - protein, 11 aa, Influenza A virus
MLYNKLEFEPF

SEQ ID NO: 145048 - protein, 8 aa, Influenza A virus
MLYNKMEF

SEQ ID NO: 145049 - protein, 9 aa, Influenza A virus
MLYNKMEFE

SEQ ID NO: 145050 - protein, 10 aa, Influenza A virus
MLYNKMEFEP

SEQ ID NO: 145051 - protein, 11 aa, Influenza A virus
MLYNKMEFEPF

SEQ ID NO: 145052 - protein, 10 aa, Influenza A virus
MLYNKMEFES

SEQ ID NO: 145053 - protein, 11 aa, Influenza A virus
MLYNKMEFESF

SEQ ID NO: 145054 - protein, 8 aa, Influenza A virus
MMAMKYPI

SEQ ID NO: 145055 - protein, 9 aa, Influenza A virus
MMAMKYPIT

SEQ ID NO: 145056 - protein, 10 aa, Influenza A virus
MMAMKYPITA

SEQ ID NO: 145057 - protein, 9 aa, Influenza A virus
MMWEINGPE

SEQ ID NO: 145058 - protein, 10 aa, Influenza A virus
MMWEINGPES

SEQ ID NO: 145059 - protein, 11 aa, Influenza A virus
MMWEINGPESI

SEQ ID NO: 145060 - protein, 11 aa, Influenza A virus
MMWEINGPESV

SEQ ID NO: 145061 - protein, 10 aa, Influenza A virus
MMWEINGSES

SEQ ID NO: 145062 - protein, 11 aa, Influenza A virus
MMWEINGSESV

SEQ ID NO: 145063 - protein, 9 aa, Influenza A virus
MMWEVNGPE

SEQ ID NO: 145064 - protein, 10 aa, Influenza A virus
MMWEVNGPES

SEQ ID NO: 145065 - protein, 11 aa, Influenza A virus
MMWEVNGPESV

SEQ ID NO: 145066 - protein, 10 aa, Influenza A virus
MNPGHADLSA

SEQ ID NO: 145067 - protein, 11 aa, Influenza A virus
MNRANQRLNPM

SEQ ID NO: 145068 - protein, 9 aa, Influenza A virus
MPDMTPSTE

SEQ ID NO: 145069 - protein, 10 aa, Influenza A virus
MPDMTPSTEM

SEQ ID NO: 145070 - protein, 11 aa, Influenza A virus
MPDMTPSTEMS

SEQ ID NO: 145071 - protein, 8 aa, Influenza A virus
MQFSSFTV

SEQ ID NO: 145072 - protein, 9 aa, Influenza A virus
MQFSSFTVN

SEQ ID NO: 145073 - protein, 10 aa, Influenza A virus
MQFSSFTVNV

SEQ ID NO: 145074 - protein, 11 aa, Influenza A virus
MQFSSFTVNVR

SEQ ID NO: 145075 - protein, 8 aa, Influenza A virus
MQFSSLAV

SEQ ID NO: 145076 - protein, 9 aa, Influenza A virus
MQFSSLAVN

SEQ ID NO: 145077 - protein, 10 aa, Influenza A virus
MQFSSLAVNV

SEQ ID NO: 145078 - protein, 11 aa, Influenza A virus
MQFSSLAVNVR

SEQ ID NO: 145079 - protein, 8 aa, Influenza A virus
MQFSSLTI

SEQ ID NO: 145080 - protein, 9 aa, Influenza A virus
MQFSSLTIN

SEQ ID NO: 145081 - protein, 10 aa, Influenza A virus
MQFSSLTINV

SEQ ID NO: 145082 - protein, 11 aa, Influenza A virus
MQFSSLTINVR

SEQ ID NO: 145083 - protein, 8 aa, Influenza A virus
MQFSSLTV

SEQ ID NO: 145084 - protein, 9 aa, Influenza A virus
MQFSSLTVN

SEQ ID NO: 145085 - protein, 10 aa, Influenza A virus
MQFSSLTVNV

SEQ ID NO: 145086 - protein, 11 aa, Influenza A virus
MQFSSLTVNVR

SEQ ID NO: 145087 - protein, 9 aa, Influenza A virus
MQGDVVLVM

SEQ ID NO: 145088 - protein, 10 aa, Influenza A virus
MQGDVVLVMK

SEQ ID NO: 145089 - protein, 11 aa, Influenza A virus
MQGDVVLVMKR

SEQ ID NO: 145090 - protein, 11 aa, Influenza A virus
MRDVIGTFDTV

SEQ ID NO: 145091 - protein, 11 aa, Influenza A virus
MRDVLGTFDTI

SEQ ID NO: 145092 - protein, 11 aa, Influenza A virus
MRDVLGTFDTV

SEQ ID NO: 145093 - protein, 8 aa, Influenza A virus
MRGIRISK

SEQ ID NO: 145094 - protein, 9 aa, Influenza A virus
MRGIRISKM

SEQ ID NO: 145095 - protein, 9 aa, Influenza A virus
MRGIRVSKM

SEQ ID NO: 145096 - protein, 8 aa, Influenza A virus
MRGLRVSK

SEQ ID NO: 145097 - protein, 9 aa, Influenza A virus
MRGLRVSKM

SEQ ID NO: 145098 - protein, 8 aa, Influenza A virus
MRGVRISK

SEQ ID NO: 145099 - protein, 9 aa, Influenza A virus
MRGVRISKM

SEQ ID NO: 145100 - protein, 9 aa, Influenza A virus
MRGVRVSKM

SEQ ID NO: 145101 - protein, 11 aa, Influenza A virus
MRIIVRGNSPV

SEQ ID NO: 145102 - protein, 11 aa, Influenza A virus
MRILIRGNSPV

SEQ ID NO: 145103 - protein, 11 aa, Influenza A virus
MRILVRGNSPA

SEQ ID NO: 145104 - protein, 11 aa, Influenza A virus
MRILVRGNSPI

SEQ ID NO: 145105 - protein, 11 aa, Influenza A virus
MRILVRGNSPV

SEQ ID NO: 145106 - protein, 11 aa, Influenza A virus
MRVLVRGNSPV

SEQ ID NO: 145107 - protein, 9 aa, Influenza A virus
MSDAGSDRV

SEQ ID NO: 145108 - protein, 10 aa, Influenza A virus
MSDAGSDRVM

SEQ ID NO: 145109 - protein, 10 aa, Influenza A virus
MSLRGIRISK

SEQ ID NO: 145110 - protein, 11 aa, Influenza A virus
MSLRGIRISKM

SEQ ID NO: 145111 - protein, 10 aa, Influenza A virus
MSLRGIRVSK

SEQ ID NO: 145112 - protein, 11 aa, Influenza A virus
MSLRGIRVSKM

SEQ ID NO: 145113 - protein, 10 aa, Influenza A virus
MSLRGLRVSK

SEQ ID NO: 145114 - protein, 11 aa, Influenza A virus
MSLRGLRVSKM

SEQ ID NO: 145115 - protein, 10 aa, Influenza A virus
MSLRGVRVSK

SEQ ID NO: 145116 - protein, 11 aa, Influenza A virus
MSLRGVRVSKM

SEQ ID NO: 145117 - protein, 8 aa, Influenza A virus
MSMRGIRV

SEQ ID NO: 145118 - protein, 9 aa, Influenza A virus
MSMRGIRVS

SEQ ID NO: 145119 - protein, 10 aa, Influenza A virus
MSMRGIRVSK

SEQ ID NO: 145120 - protein, 11 aa, Influenza A virus
MSMRGIRVSKM

SEQ ID NO: 145121 - protein, 8 aa, Influenza A virus
MSMRGLRV

SEQ ID NO: 145122 - protein, 9 aa, Influenza A virus
MSMRGLRVS

SEQ ID NO: 145123 - protein, 10 aa, Influenza A virus
MSMRGLRVSK

SEQ ID NO: 145124 - protein, 11 aa, Influenza A virus
MSMRGLRVSKM

SEQ ID NO: 145125 - protein, 8 aa, Influenza A virus
MSMRGVRI

SEQ ID NO: 145126 - protein, 9 aa, Influenza A virus
MSMRGVRIS

SEQ ID NO: 145127 - protein, 10 aa, Influenza A virus
MSMRGVRISK

SEQ ID NO: 145128 - protein, 11 aa, Influenza A virus
MSMRGVRISKM

SEQ ID NO: 145129 - protein, 8 aa, Influenza A virus
MSMRGVRV

SEQ ID NO: 145130 - protein, 9 aa, Influenza A virus
MSMRGVRVS

SEQ ID NO: 145131 - protein, 10 aa, Influenza A virus
MSMRGVRVSK

SEQ ID NO: 145132 - protein, 11 aa, Influenza A virus
MSMRGVRVSKM

SEQ ID NO: 145133 - protein, 9 aa, Influenza A virus
MSQPRTREI

SEQ ID NO: 145134 - protein, 10 aa, Influenza A virus
MSQPRTREIL

SEQ ID NO: 145135 - protein, 9 aa, Influenza A virus
MSQSRTREI

SEQ ID NO: 145136 - protein, 10 aa, Influenza A virus
MSQSRTREIL

SEQ ID NO: 145137 - protein, 9 aa, Influenza A virus
MSQSRTRGI

SEQ ID NO: 145138 - protein, 10 aa, Influenza A virus
MSQSRTRGIL

SEQ ID NO: 145139 - protein, 9 aa, Influenza A virus
MTNTVHYPK

SEQ ID NO: 145140 - protein, 10 aa, Influenza A virus
MTNTVHYPKI

SEQ ID NO: 145141 - protein, 11 aa, Influenza A virus
MTNTVHYPKIY

SEQ ID NO: 145142 - protein, 9 aa, Influenza A virus
MTPNAEMSL

SEQ ID NO: 145143 - protein, 10 aa, Influenza A virus
MTPNAEMSLR

SEQ ID NO: 145144 - protein, 9 aa, Influenza A virus
MTPNTEMSL

SEQ ID NO: 145145 - protein, 10 aa, Influenza A virus
MTPNTEMSLR

SEQ ID NO: 145146 - protein, 9 aa, Influenza A virus
MTPSAEMSL

SEQ ID NO: 145147 - protein, 10 aa, Influenza A virus
MTPSAEMSLR

SEQ ID NO: 145148 - protein, 9 aa, Influenza A virus
MTPSIEMSM

SEQ ID NO: 145149 - protein, 10 aa, Influenza A virus
MTPSIEMSMR

SEQ ID NO: 145150 - protein, 11 aa, Influenza A virus
MTPSIEMSMRG

SEQ ID NO: 145151 - protein, 9 aa, Influenza A virus
MTPSTEMSL

SEQ ID NO: 145152 - protein, 10 aa, Influenza A virus
MTPSTEMSLR

SEQ ID NO: 145153 - protein, 9 aa, Influenza A virus
MTPSTEMSM

SEQ ID NO: 145154 - protein, 10 aa, Influenza A virus
MTPSTEMSMR

SEQ ID NO: 145155 - protein, 9 aa, Influenza A virus
MTPSTEVSL

SEQ ID NO: 145156 - protein, 10 aa, Influenza A virus
MTPSTEVSLR

SEQ ID NO: 145157 - protein, 11 aa, Influenza A virus
MTPSTEVSLRG

SEQ ID NO: 145158 - protein, 9 aa, Influenza A virus
MTPSTEVSM

SEQ ID NO: 145159 - protein, 10 aa, Influenza A virus
MTPSTEVSMR

SEQ ID NO: 145160 - protein, 9 aa, Influenza A virus
MTPSTGMSL

SEQ ID NO: 145161 - protein, 10 aa, Influenza A virus
MTPSTGMSLR

SEQ ID NO: 145162 - protein, 11 aa, Influenza A virus
MTPSTGMSLRG

SEQ ID NO: 145163 - protein, 9 aa, Influenza A virus
MTPSTVMSM

SEQ ID NO: 145164 - protein, 10 aa, Influenza A virus
MTPSTVMSMR

SEQ ID NO: 145165 - protein, 11 aa, Influenza A virus
MTPSTVMSMRG

SEQ ID NO: 145166 - protein, 9 aa, Influenza A virus
MTSSTEMSM

SEQ ID NO: 145167 - protein, 10 aa, Influenza A virus
MTSSTEMSMR

SEQ ID NO: 145168 - protein, 11 aa, Influenza A virus
MTSSTEMSMRG

SEQ ID NO: 145169 - protein, 9 aa, Influenza A virus
MTSTIHYPK

SEQ ID NO: 145170 - protein, 10 aa, Influenza A virus
MTSTIHYPKI

SEQ ID NO: 145171 - protein, 11 aa, Influenza A virus
MTSTIHYPKIY

SEQ ID NO: 145172 - protein, 9 aa, Influenza A virus
MTSTVHYPK

SEQ ID NO: 145173 - protein, 10 aa, Influenza A virus
MTSTVHYPKI

SEQ ID NO: 145174 - protein, 11 aa, Influenza A virus
MTSTVHYPKIY

SEQ ID NO: 145175 - protein, 10 aa, Influenza A virus
MTSTVHYPKV

SEQ ID NO: 145176 - protein, 11 aa, Influenza A virus
MTSTVHYPKVY

SEQ ID NO: 145177 - protein, 8 aa, Influenza A virus
MVAYILER

SEQ ID NO: 145178 - protein, 9 aa, Influenza A virus
MVAYILERE

SEQ ID NO: 145179 - protein, 10 aa, Influenza A virus
MVAYILEREL

SEQ ID NO: 145180 - protein, 11 aa, Influenza A virus
MVAYILERELV

SEQ ID NO: 145181 - protein, 8 aa, Influenza A virus
MVAYMFER

SEQ ID NO: 145182 - protein, 10 aa, Influenza A virus
MVAYMFEREL

SEQ ID NO: 145183 - protein, 11 aa, Influenza A virus
MVAYMFERELV

SEQ ID NO: 145184 - protein, 8 aa, Influenza A virus
MVAYMLER

SEQ ID NO: 145185 - protein, 10 aa, Influenza A virus
MVAYMLEREL

SEQ ID NO: 145186 - protein, 11 aa, Influenza A virus
MVAYMLERELV

SEQ ID NO: 145187 - protein, 10 aa, Influenza A virus
MVEILRQNPR

SEQ ID NO: 145188 - protein, 9 aa, Influenza A virus
MVFSQDDCM

SEQ ID NO: 145189 - protein, 10 aa, Influenza A virus
MVFSQDDCMI

SEQ ID NO: 145190 - protein, 11 aa, Influenza A virus
MVFSQDDCMIK

SEQ ID NO: 145191 - protein, 9 aa, Influenza A virus
MVFSQEDCM

SEQ ID NO: 145192 - protein, 10 aa, Influenza A virus
MVFSQEDCMI

SEQ ID NO: 145193 - protein, 11 aa, Influenza A virus
MVFSQEDCMIK

SEQ ID NO: 145194 - protein, 10 aa, Influenza A virus
MVFSQEDCMV

SEQ ID NO: 145195 - protein, 11 aa, Influenza A virus
MVFSQEDCMVK

SEQ ID NO: 145196 - protein, 9 aa, Influenza A virus
MVFSQEDCV

SEQ ID NO: 145197 - protein, 10 aa, Influenza A virus
MVFSQEDCVI

SEQ ID NO: 145198 - protein, 11 aa, Influenza A virus
MVFSQEDCVIK

SEQ ID NO: 145199 - protein, 9 aa, Influenza A virus
MVFSQEECM

SEQ ID NO: 145200 - protein, 10 aa, Influenza A virus
MVFSQEECMI

SEQ ID NO: 145201 - protein, 11 aa, Influenza A virus
MVFSQEECMIK

SEQ ID NO: 145202 - protein, 9 aa, Influenza A virus
MVGKKATAI

SEQ ID NO: 145203 - protein, 10 aa, Influenza A virus
MVGKKATAIL

SEQ ID NO: 145204 - protein, 11 aa, Influenza A virus
MVGKKATAILR

SEQ ID NO: 145205 - protein, 9 aa, Influenza A virus
MVGKRATAI

SEQ ID NO: 145206 - protein, 10 aa, Influenza A virus
MVGKRATAII

SEQ ID NO: 145207 - protein, 11 aa, Influenza A virus
MVGKRATAIIR

SEQ ID NO: 145208 - protein, 10 aa, Influenza A virus
MVGKRATAIL

SEQ ID NO: 145209 - protein, 11 aa, Influenza A virus
MVGKRATAILK

SEQ ID NO: 145210 - protein, 11 aa, Influenza A virus
MVGKRATAILR

SEQ ID NO: 145211 - protein, 10 aa, Influenza A virus
MVGKRATAIV

SEQ ID NO: 145212 - protein, 11 aa, Influenza A virus
MVGKRATAIVR

SEQ ID NO: 145213 - protein, 10 aa, Influenza A virus
MVGKRATATL

SEQ ID NO: 145214 - protein, 11 aa, Influenza A virus
MVGKRATATLR

SEQ ID NO: 145215 - protein, 9 aa, Influenza A virus
MVGRRATAI

SEQ ID NO: 145216 - protein, 10 aa, Influenza A virus
MVGRRATAIL

SEQ ID NO: 145217 - protein, 11 aa, Influenza A virus
MVGRRATAILR

SEQ ID NO: 145218 - protein, 9 aa, Influenza A virus
MVKAVRGDL

SEQ ID NO: 145219 - protein, 11 aa, Influenza A virus
MVKAVRGDLNF

SEQ ID NO: 145220 - protein, 10 aa, Influenza A virus
MVSADPLASL

SEQ ID NO: 145221 - protein, 11 aa, Influenza A virus
MVSADPLASLL

SEQ ID NO: 145222 - protein, 9 aa, Influenza A virus
MVSPLAITW

SEQ ID NO: 145223 - protein, 10 aa, Influenza A virus
MVSPLAITWW

SEQ ID NO: 145224 - protein, 11 aa, Influenza A virus
MVSPLAITWWN

SEQ ID NO: 145225 - protein, 9 aa, Influenza A virus
MVSPLAVTW

SEQ ID NO: 145226 - protein, 10 aa, Influenza A virus
MVSPLAVTWW

SEQ ID NO: 145227 - protein, 11 aa, Influenza A virus
MVSPLAVTWWN

SEQ ID NO: 145228 - protein, 10 aa, Influenza A virus
MWEINGPESI

SEQ ID NO: 145229 - protein, 10 aa, Influenza A virus
MWEINGPESV

SEQ ID NO: 145230 - protein, 10 aa, Influenza A virus
MWEINGSESV

SEQ ID NO: 145231 - protein, 11 aa, Influenza A virus
MWEINGSESVL

SEQ ID NO: 145232 - protein, 10 aa, Influenza A virus
MWEVNGPESV

SEQ ID NO: 145233 - protein, 8 aa, Influenza A virus
MYAPGGEV

SEQ ID NO: 145234 - protein, 9 aa, Influenza A virus
MYAPGGEVR

SEQ ID NO: 145235 - protein, 8 aa, Influenza A virus
MYIEVLHL

SEQ ID NO: 145236 - protein, 9 aa, Influenza A virus
MYIEVLHLT

SEQ ID NO: 145237 - protein, 9 aa, Influenza A virus
MYTPGGEAR

SEQ ID NO: 145238 - protein, 8 aa, Influenza A virus
MYTPGGEV

SEQ ID NO: 145239 - protein, 9 aa, Influenza A virus
MYTPGGEVR

SEQ ID NO: 145240 - protein, 9 aa, Influenza A virus
MYTPGGRVT

SEQ ID NO: 145241 - protein, 10 aa, Influenza A virus
NAEMSLRGIR

SEQ ID NO: 145242 - protein, 10 aa, Influenza A virus
NEGTAGVESA

SEQ ID NO: 145243 - protein, 11 aa, Influenza A virus
NEGTAGVESAV

SEQ ID NO: 145244 - protein, 9 aa, Influenza A virus
NEGYEEFTM

SEQ ID NO: 145245 - protein, 8 aa, Influenza A virus
NEQGQALW

SEQ ID NO: 145246 - protein, 8 aa, Influenza A virus
NEQGQILW

SEQ ID NO: 145247 - protein, 8 aa, Influenza A virus
NEQGQMLW

SEQ ID NO: 145248 - protein, 8 aa, Influenza A virus
NEQGQTLW

SEQ ID NO: 145249 - protein, 9 aa, Influenza A virus
NETQGTEKL

SEQ ID NO: 145250 - protein, 9 aa, Influenza A virus
NFINRANQR

SEQ ID NO: 145251 - protein, 9 aa, Influenza A virus
NFMNRANQR

SEQ ID NO: 145252 - protein, 10 aa, Influenza A virus
NFMNRANQRL

SEQ ID NO: 145253 - protein, 9 aa, Influenza A virus
NFVNRANQR

SEQ ID NO: 145254 - protein, 10 aa, Influenza A virus
NGPATGTVHY

SEQ ID NO: 145255 - protein, 10 aa, Influenza A virus
NGPATSAVHY

SEQ ID NO: 145256 - protein, 10 aa, Influenza A virus
NGPATSTVHY

SEQ ID NO: 145257 - protein, 11 aa, Influenza A virus
NGPESILVNTY

SEQ ID NO: 145258 - protein, 11 aa, Influenza A virus
NGPESVLINTY

SEQ ID NO: 145259 - protein, 11 aa, Influenza A virus
NGPESVLVNTY

SEQ ID NO: 145260 - protein, 10 aa, Influenza A virus
NGPITNTVHY

SEQ ID NO: 145261 - protein, 10 aa, Influenza A virus
NGPMTNTVHY

SEQ ID NO: 145262 - protein, 10 aa, Influenza A virus
NGPMTSTIHY

SEQ ID NO: 145263 - protein, 10 aa, Influenza A virus
NGPMTSTVHY

SEQ ID NO: 145264 - protein, 10 aa, Influenza A virus
NGPTASTIHY

SEQ ID NO: 145265 - protein, 10 aa, Influenza A virus
NGPTASTVHY

SEQ ID NO: 145266 - protein, 10 aa, Influenza A virus
NGPTAVTTHY

SEQ ID NO: 145267 - protein, 10 aa, Influenza A virus
NGPTTSAVYY

SEQ ID NO: 145268 - protein, 10 aa, Influenza A virus
NGPTTSTIHY

SEQ ID NO: 145269 - protein, 10 aa, Influenza A virus
NGPTTSTVHY

SEQ ID NO: 145270 - protein, 10 aa, Influenza A virus
NGPVANTIHY

SEQ ID NO: 145271 - protein, 10 aa, Influenza A virus
NGPVASTIHY

SEQ ID NO: 145272 - protein, 10 aa, Influenza A virus
NGPVASTVHY

SEQ ID NO: 145273 - protein, 10 aa, Influenza A virus
NGPVTNTVHY

SEQ ID NO: 145274 - protein, 10 aa, Influenza A virus
NGPVTSTVHY

SEQ ID NO: 145275 - protein, 10 aa, Influenza A virus
NGQTTSTVHY

SEQ ID NO: 145276 - protein, 10 aa, Influenza A virus
NGQVTNTVHY

SEQ ID NO: 145277 - protein, 11 aa, Influenza A virus
NGSESVLVNTY

SEQ ID NO: 145278 - protein, 10 aa, Influenza A virus
NGTFGPVHFR

SEQ ID NO: 145279 - protein, 11 aa, Influenza A virus
NGTFGPVHFRN

SEQ ID NO: 145280 - protein, 10 aa, Influenza A virus
NICKAAMGLR

SEQ ID NO: 145281 - protein, 9 aa, Influenza A virus
NILLSPEEV

SEQ ID NO: 145282 - protein, 9 aa, Influenza A virus
NIMGMTGIL

SEQ ID NO: 145283 - protein, 9 aa, Influenza A virus
NISPLMVAY

SEQ ID NO: 145284 - protein, 10 aa, Influenza A virus
NISPLMVAYM

SEQ ID NO: 145285 - protein, 8 aa, Influenza A virus
NIVRRAAV

SEQ ID NO: 145286 - protein, 10 aa, Influenza A virus
NIVRRAMVSA

SEQ ID NO: 145287 - protein, 8 aa, Influenza A virus
NIVRRASV

SEQ ID NO: 145288 - protein, 10 aa, Influenza A virus
NIVRRASVSA

SEQ ID NO: 145289 - protein, 10 aa, Influenza A virus
NIVRRATVSA

SEQ ID NO: 145290 - protein, 9 aa, Influenza A virus
NKATKRLTI

SEQ ID NO: 145291 - protein, 9 aa, Influenza A virus
NKATKRLTV

SEQ ID NO: 145292 - protein, 10 aa, Influenza A virus
NKATKRLTVL

SEQ ID NO: 145293 - protein, 11 aa, Influenza A virus
NKIEFEPFQSL

SEQ ID NO: 145294 - protein, 11 aa, Influenza A virus
NKLEFEPFQSL

SEQ ID NO: 145295 - protein, 8 aa, Influenza A virus
NKMEFEPF

SEQ ID NO: 145296 - protein, 11 aa, Influenza A virus
NKMEFEPFQSL

SEQ ID NO: 145297 - protein, 11 aa, Influenza A virus
NKMEFESFQSL

SEQ ID NO: 145298 - protein, 10 aa, Influenza A virus
NKRYGPALSI

SEQ ID NO: 145299 - protein, 10 aa, Influenza A virus
NLAKGEKANV

SEQ ID NO: 145300 - protein, 9 aa, Influenza A virus
NLMSQSRTR

SEQ ID NO: 145301 - protein, 9 aa, Influenza A virus
NLQALKLTV

SEQ ID NO: 145302 - protein, 9 aa, Influenza A virus
NLQTLKIIV

SEQ ID NO: 145303 - protein, 9 aa, Influenza A virus
NLQTLKIKV

SEQ ID NO: 145304 - protein, 9 aa, Influenza A virus
NLQTLKIQI

SEQ ID NO: 145305 - protein, 9 aa, Influenza A virus
NLQTLKIRV

SEQ ID NO: 145306 - protein, 9 aa, Influenza A virus
NLQTLKLKV

SEQ ID NO: 145307 - protein, 9 aa, Influenza A virus
NLQTLKLNV

SEQ ID NO: 145308 - protein, 9 aa, Influenza A virus
NLQTLKLRV

SEQ ID NO: 145309 - protein, 9 aa, Influenza A virus
NLQTLKLTV

SEQ ID NO: 145310 - protein, 9 aa, Influenza A virus
NPAILYNKM

SEQ ID NO: 145311 - protein, 9 aa, Influenza A virus
NPALRMKWM

SEQ ID NO: 145312 - protein, 10 aa, Influenza A virus
NPALRMKWMM

SEQ ID NO: 145313 - protein, 9 aa, Influenza A virus
NPAMLYNKM

SEQ ID NO: 145314 - protein, 9 aa, Influenza A virus
NPDEGTTGV

SEQ ID NO: 145315 - protein, 9 aa, Influenza A virus
NPGHANLSA

SEQ ID NO: 145316 - protein, 10 aa, Influenza A virus
NPMHQLLRHF

SEQ ID NO: 145317 - protein, 10 aa, Influenza A virus
NPREEQAVDI

SEQ ID NO: 145318 - protein, 9 aa, Influenza A virus
NPSLRMKWM

SEQ ID NO: 145319 - protein, 10 aa, Influenza A virus
NPSLRMKWMM

SEQ ID NO: 145320 - protein, 9 aa, Influenza A virus
NPTMLYNKI

SEQ ID NO: 145321 - protein, 9 aa, Influenza A virus
NPTMLYNKL

SEQ ID NO: 145322 - protein, 9 aa, Influenza A virus
NPTMLYNKM

SEQ ID NO: 145323 - protein, 10 aa, Influenza A virus
NQRLNPMHQL

SEQ ID NO: 145324 - protein, 10 aa, Influenza A virus
NRANQRLNPM

SEQ ID NO: 145325 - protein, 9 aa, Influenza A virus
NRNGPATSA

SEQ ID NO: 145326 - protein, 9 aa, Influenza A virus
NRNGPTTSA

SEQ ID NO: 145327 - protein, 9 aa, Influenza A virus
NRTTKRLTV

SEQ ID NO: 145328 - protein, 9 aa, Influenza A virus
NSPAFNYNK

SEQ ID NO: 145329 - protein, 9 aa, Influenza A virus
NSPIFNYNK

SEQ ID NO: 145330 - protein, 9 aa, Influenza A virus
NSPVFNYNK

SEQ ID NO: 145331 - protein, 10 aa, Influenza A virus
NSPVFNYNKV

SEQ ID NO: 145332 - protein, 9 aa, Influenza A virus
NSPVFNYNR

SEQ ID NO: 145333 - protein, 9 aa, Influenza A virus
NSPVFNYSK

SEQ ID NO: 145334 - protein, 10 aa, Influenza A virus
NTEMSLRGIR

SEQ ID NO: 145335 - protein, 9 aa, Influenza A virus
NTEMSLRGV

SEQ ID NO: 145336 - protein, 10 aa, Influenza A virus
NTEMSLRGVR

SEQ ID NO: 145337 - protein, 9 aa, Influenza A virus
NTIHYPKIY

SEQ ID NO: 145338 - protein, 10 aa, Influenza A virus
NTIHYPKIYK

SEQ ID NO: 145339 - protein, 9 aa, Influenza A virus
NTNDAGSDR

SEQ ID NO: 145340 - protein, 10 aa, Influenza A virus
NTNDAGSDRV

SEQ ID NO: 145341 - protein, 9 aa, Influenza A virus
NTVHYPKIY

SEQ ID NO: 145342 - protein, 10 aa, Influenza A virus
NTVHYPKIYK

SEQ ID NO: 145343 - protein, 9 aa, Influenza A virus
NTVHYPKVY

SEQ ID NO: 145344 - protein, 10 aa, Influenza A virus
NTVHYPKVYK

SEQ ID NO: 145345 - protein, 9 aa, Influenza A virus
NTYFEKVER

SEQ ID NO: 145346 - protein, 10 aa, Influenza A virus
NTYFEKVERL

SEQ ID NO: 145347 - protein, 11 aa, Influenza A virus
NTYFEKVERLK

SEQ ID NO: 145348 - protein, 10 aa, Influenza A virus
NTYQWIIKNW

SEQ ID NO: 145349 - protein, 8 aa, Influenza A virus
NTYQWIIR

SEQ ID NO: 145350 - protein, 10 aa, Influenza A virus
NTYQWIIRNW

SEQ ID NO: 145351 - protein, 8 aa, Influenza A virus
NTYQWVIR

SEQ ID NO: 145352 - protein, 10 aa, Influenza A virus
NTYQWVIRNW

SEQ ID NO: 145353 - protein, 9 aa, Influenza A virus
NVHEGYEEF

SEQ ID NO: 145354 - protein, 9 aa, Influenza A virus
NVILSPEEV

SEQ ID NO: 145355 - protein, 9 aa, Influenza A virus
NVLLSPEEV

SEQ ID NO: 145356 - protein, 9 aa, Influenza A virus
NVMGMIGIL

SEQ ID NO: 145357 - protein, 9 aa, Influenza A virus
NVMGMIGIM

SEQ ID NO: 145358 - protein, 8 aa, Influenza A virus
NVMGMIGV

SEQ ID NO: 145359 - protein, 9 aa, Influenza A virus
NVMGMIGVL

SEQ ID NO: 145360 - protein, 9 aa, Influenza A virus
NVMGMVGIL

SEQ ID NO: 145361 - protein, 8 aa, Influenza A virus
NVMGMVGV

SEQ ID NO: 145362 - protein, 9 aa, Influenza A virus
NVMGMVGVL

SEQ ID NO: 145363 - protein, 9 aa, Influenza A virus
NVRGSGMRI

SEQ ID NO: 145364 - protein, 9 aa, Influenza A virus
NVRGSGMRV

SEQ ID NO: 145365 - protein, 10 aa, Influenza A virus
NVRGSGMRVL

SEQ ID NO: 145366 - protein, 9 aa, Influenza A virus
NWEAVKIQW

SEQ ID NO: 145367 - protein, 9 aa, Influenza A virus
NWEIVKIQW

SEQ ID NO: 145368 - protein, 9 aa, Influenza A virus
NWEMIKIQW

SEQ ID NO: 145369 - protein, 9 aa, Influenza A virus
NWETVKIQW

SEQ ID NO: 145370 - protein, 9 aa, Influenza A virus
NYNKATKRL

SEQ ID NO: 145371 - protein, 11 aa, Influenza A virus
NYNKATKRLTI

SEQ ID NO: 145372 - protein, 9 aa, Influenza A virus
NYNKGTKRL

SEQ ID NO: 145373 - protein, 9 aa, Influenza A virus
NYNKSTKRL

SEQ ID NO: 145374 - protein, 9 aa, Influenza A virus
NYNKTTKRL

SEQ ID NO: 145375 - protein, 11 aa, Influenza A virus
NYNKTTKRLTI

SEQ ID NO: 145376 - protein, 9 aa, Influenza A virus
NYNKVTKRL

SEQ ID NO: 145377 - protein, 9 aa, Influenza A virus
NYNRTTKRL

SEQ ID NO: 145378 - protein, 9 aa, Influenza A virus
NYSKATKRL

SEQ ID NO: 145379 - protein, 9 aa, Influenza A virus
PALSINELR

SEQ ID NO: 145380 - protein, 10 aa, Influenza A virus
PATGTVHYPK

SEQ ID NO: 145381 - protein, 10 aa, Influenza A virus
PATSAVHYPK

SEQ ID NO: 145382 - protein, 10 aa, Influenza A virus
PATSTVHYPK

SEQ ID NO: 145383 - protein, 9 aa, Influenza A virus
PESILVNTY

SEQ ID NO: 145384 - protein, 9 aa, Influenza A virus
PESVLINTY

SEQ ID NO: 145385 - protein, 9 aa, Influenza A virus
PESVLVNTY

SEQ ID NO: 145386 - protein, 11 aa, Influenza A virus
PIFNYNKTTKR

SEQ ID NO: 145387 - protein, 10 aa, Influenza A virus
PITNTVHYPK

SEQ ID NO: 145388 - protein, 10 aa, Influenza A virus
PKIYKTYFEK

SEQ ID NO: 145389 - protein, 10 aa, Influenza A virus
PKIYKTYFER

SEQ ID NO: 145390 - protein, 11 aa, Influenza A virus
PKQSRMQFSSF

SEQ ID NO: 145391 - protein, 10 aa, Influenza A virus
PKVHKTYFEK

SEQ ID NO: 145392 - protein, 10 aa, Influenza A virus
PKVYKPYFEK

SEQ ID NO: 145393 - protein, 10 aa, Influenza A virus
PKVYKTYFDK

SEQ ID NO: 145394 - protein, 10 aa, Influenza A virus
PKVYKTYFEK

SEQ ID NO: 145395 - protein, 10 aa, Influenza A virus
PKVYNTYFEK

SEQ ID NO: 145396 - protein, 10 aa, Influenza A virus
PKVYRTYFEK

SEQ ID NO: 145397 - protein, 10 aa, Influenza A virus
PKVYTTYFEK

SEQ ID NO: 145398 - protein, 9 aa, Influenza A virus
PLAITWWNR

SEQ ID NO: 145399 - protein, 9 aa, Influenza A virus
PLAVTWWNR

SEQ ID NO: 145400 - protein, 10 aa, Influenza A virus
PLLVAYMLER

SEQ ID NO: 145401 - protein, 10 aa, Influenza A virus
PLMEAYMLER

SEQ ID NO: 145402 - protein, 10 aa, Influenza A virus
PLMVAYILER

SEQ ID NO: 145403 - protein, 10 aa, Influenza A virus
PLMVAYMFER

SEQ ID NO: 145404 - protein, 10 aa, Influenza A virus
PLMVAYMLER

SEQ ID NO: 145405 - protein, 10 aa, Influenza A virus
PMTNTVHYPK

SEQ ID NO: 145406 - protein, 10 aa, Influenza A virus
PMTSTIHYPK

SEQ ID NO: 145407 - protein, 10 aa, Influenza A virus
PMTSTVHYPK

SEQ ID NO: 145408 - protein, 11 aa, Influenza A virus
PMTSTVHYPKV

SEQ ID NO: 145409 - protein, 11 aa, Influenza A virus
PSLRMKWMMAM

SEQ ID NO: 145410 - protein, 11 aa, Influenza A virus
PSRMQFSSLTV

SEQ ID NO: 145411 - protein, 11 aa, Influenza A virus
PSTEMSLRGLR

SEQ ID NO: 145412 - protein, 11 aa, Influenza A virus
PSTEMSMRGLR

SEQ ID NO: 145413 - protein, 10 aa, Influenza A virus
PTASTIHYPK

SEQ ID NO: 145414 - protein, 10 aa, Influenza A virus
PTASTVHYPK

SEQ ID NO: 145415 - protein, 10 aa, Influenza A virus
PTAVTTHYPK

SEQ ID NO: 145416 - protein, 10 aa, Influenza A virus
PTTSAVHYPK

SEQ ID NO: 145417 - protein, 11 aa, Influenza A virus
PTTSAVHYPKV

SEQ ID NO: 145418 - protein, 10 aa, Influenza A virus
PTTSAVYYPK

SEQ ID NO: 145419 - protein, 11 aa, Influenza A virus
PTTSAVYYPKV

SEQ ID NO: 145420 - protein, 10 aa, Influenza A virus
PTTSTAHYPK

SEQ ID NO: 145421 - protein, 10 aa, Influenza A virus
PTTSTIHYPK

SEQ ID NO: 145422 - protein, 10 aa, Influenza A virus
PTTSTVHYPK

SEQ ID NO: 145423 - protein, 10 aa, Influenza A virus
PVANTIHYPK

SEQ ID NO: 145424 - protein, 10 aa, Influenza A virus
PVASTIHYPK

SEQ ID NO: 145425 - protein, 10 aa, Influenza A virus
PVASTVHYPK

SEQ ID NO: 145426 - protein, 11 aa, Influenza A virus
PVFNYNKTTKR

SEQ ID NO: 145427 - protein, 11 aa, Influenza A virus
PVFNYNKVTKR

SEQ ID NO: 145428 - protein, 10 aa, Influenza A virus
PVFNYNRTTK

SEQ ID NO: 145429 - protein, 11 aa, Influenza A virus
PVFNYNRTTKR

SEQ ID NO: 145430 - protein, 10 aa, Influenza A virus
PVFNYSKATK

SEQ ID NO: 145431 - protein, 11 aa, Influenza A virus
PVFNYSKATKR

SEQ ID NO: 145432 - protein, 9 aa, Influenza A virus
PVHFRNHVK

SEQ ID NO: 145433 - protein, 9 aa, Influenza A virus
PVRFRNQVK

SEQ ID NO: 145434 - protein, 10 aa, Influenza A virus
PVSGGTSSVY

SEQ ID NO: 145435 - protein, 10 aa, Influenza A virus
PVTNTVHYPK

SEQ ID NO: 145436 - protein, 10 aa, Influenza A virus
PVTSTVHYPK

SEQ ID NO: 145437 - protein, 9 aa, Influenza A virus
PYFEKVERL

SEQ ID NO: 145438 - protein, 10 aa, Influenza A virus
QAVDICKAAM

SEQ ID NO: 145439 - protein, 10 aa, Influenza A virus
QAVEICKAAM

SEQ ID NO: 145440 - protein, 10 aa, Influenza A virus
QAVGICKAAM

SEQ ID NO: 145441 - protein, 8 aa, Influenza A virus
QECKISPL

SEQ ID NO: 145442 - protein, 9 aa, Influenza A virus
QECKISPLM

SEQ ID NO: 145443 - protein, 11 aa, Influenza A virus
QECKISPLMVA

SEQ ID NO: 145444 - protein, 9 aa, Influenza A virus
QEDCMIKAV

SEQ ID NO: 145445 - protein, 9 aa, Influenza A virus
QEDCMVKAV

SEQ ID NO: 145446 - protein, 9 aa, Influenza A virus
QEDCVIKAV

SEQ ID NO: 145447 - protein, 9 aa, Influenza A virus
QEECMIKAV

SEQ ID NO: 145448 - protein, 9 aa, Influenza A virus
QEKNPALRM

SEQ ID NO: 145449 - protein, 11 aa, Influenza A virus
QEKNPALRMKW

SEQ ID NO: 145450 - protein, 9 aa, Influenza A virus
QEKNPSLRM

SEQ ID NO: 145451 - protein, 11 aa, Influenza A virus
QEKNPSLRMKW

SEQ ID NO: 145452 - protein, 9 aa, Influenza A virus
QFSSFTVNV

SEQ ID NO: 145453 - protein, 10 aa, Influenza A virus
QFSSFTVNVR

SEQ ID NO: 145454 - protein, 10 aa, Influenza A virus
QFSSLAVNVR

SEQ ID NO: 145455 - protein, 10 aa, Influenza A virus
QFSSLTINVR

SEQ ID NO: 145456 - protein, 10 aa, Influenza A virus
QFSSLTVNVR

SEQ ID NO: 145457 - protein, 9 aa, Influenza A virus
QGACWEQLY

SEQ ID NO: 145458 - protein, 10 aa, Influenza A virus
QGMEKLTITY

SEQ ID NO: 145459 - protein, 10 aa, Influenza A virus
QGTEKLAITY

SEQ ID NO: 145460 - protein, 10 aa, Influenza A virus
QGTEKLTIIY

SEQ ID NO: 145461 - protein, 10 aa, Influenza A virus
QGTEKLTITY

SEQ ID NO: 145462 - protein, 10 aa, Influenza A virus
QGTERLTITY

SEQ ID NO: 145463 - protein, 9 aa, Influenza A virus
QIHEGYEEF

SEQ ID NO: 145464 - protein, 8 aa, Influenza A virus
QIIKLLPF

SEQ ID NO: 145465 - protein, 9 aa, Influenza A virus
QIIKLLPFA

SEQ ID NO: 145466 - protein, 10 aa, Influenza A virus
QIIKLLPFAA

SEQ ID NO: 145467 - protein, 8 aa, Influenza A virus
QIINLLPF

SEQ ID NO: 145468 - protein, 9 aa, Influenza A virus
QIINLLPFA

SEQ ID NO: 145469 - protein, 10 aa, Influenza A virus
QIINLLPFAA

SEQ ID NO: 145470 - protein, 9 aa, Influenza A virus
QLLTSESQL

SEQ ID NO: 145471 - protein, 10 aa, Influenza A virus
QLLTSESQLK

SEQ ID NO: 145472 - protein, 9 aa, Influenza A virus
QLMITKEKK

SEQ ID NO: 145473 - protein, 9 aa, Influenza A virus
QLMVTKEKK

SEQ ID NO: 145474 - protein, 9 aa, Influenza A virus
QLYTPGGEV

SEQ ID NO: 145475 - protein, 10 aa, Influenza A virus
QLYTPGGEVR

SEQ ID NO: 145476 - protein, 8 aa, Influenza A virus
QMIKLLPF

SEQ ID NO: 145477 - protein, 9 aa, Influenza A virus
QMIKLLPFA

SEQ ID NO: 145478 - protein, 10 aa, Influenza A virus
QMIKLLPFAA

SEQ ID NO: 145479 - protein, 11 aa, Influenza A virus
QMIKLLPFAAA

SEQ ID NO: 145480 - protein, 9 aa, Influenza A virus
QMRDVIGTF

SEQ ID NO: 145481 - protein, 10 aa, Influenza A virus
QMRDVIGTFD

SEQ ID NO: 145482 - protein, 9 aa, Influenza A virus
QMRDVLGTF

SEQ ID NO: 145483 - protein, 10 aa, Influenza A virus
QMRDVLGTFD

SEQ ID NO: 145484 - protein, 9 aa, Influenza A virus
QMYAPGGEV

SEQ ID NO: 145485 - protein, 10 aa, Influenza A virus
QMYAPGGEVR

SEQ ID NO: 145486 - protein, 9 aa, Influenza A virus
QMYTPGGEA

SEQ ID NO: 145487 - protein, 10 aa, Influenza A virus
QMYTPGGEAR

SEQ ID NO: 145488 - protein, 9 aa, Influenza A virus
QMYTPGGEV

SEQ ID NO: 145489 - protein, 10 aa, Influenza A virus
QMYTPGGEVK

SEQ ID NO: 145490 - protein, 10 aa, Influenza A virus
QMYTPGGEVR

SEQ ID NO: 145491 - protein, 9 aa, Influenza A virus
QMYTPGGRV

SEQ ID NO: 145492 - protein, 8 aa, Influenza A virus
QPRTREIL

SEQ ID NO: 145493 - protein, 8 aa, Influenza A virus
QQIGGTRM

SEQ ID NO: 145494 - protein, 9 aa, Influenza A virus
QQIGGTRMV

SEQ ID NO: 145495 - protein, 9 aa, Influenza A virus
QQMRDVIGT

SEQ ID NO: 145496 - protein, 10 aa, Influenza A virus
QQMRDVIGTF

SEQ ID NO: 145497 - protein, 9 aa, Influenza A virus
QQMRDVLGT

SEQ ID NO: 145498 - protein, 10 aa, Influenza A virus
QQMRDVLGTF

SEQ ID NO: 145499 - protein, 9 aa, Influenza A virus
QRLNPMHQL

SEQ ID NO: 145500 - protein, 10 aa, Influenza A virus
QRLNPMHQLL

SEQ ID NO: 145501 - protein, 11 aa, Influenza A virus
QRLNPMHQLLR

SEQ ID NO: 145502 - protein, 11 aa, Influenza A virus
QRLVQLIISGK

SEQ ID NO: 145503 - protein, 9 aa, Influenza A virus
QSGMQFSSL

SEQ ID NO: 145504 - protein, 9 aa, Influenza A virus
QSLIPKAAR

SEQ ID NO: 145505 - protein, 10 aa, Influenza A virus
QSLIPKAARA

SEQ ID NO: 145506 - protein, 9 aa, Influenza A virus
QSLIPKAIR

SEQ ID NO: 145507 - protein, 9 aa, Influenza A virus
QSLVLKAAR

SEQ ID NO: 145508 - protein, 9 aa, Influenza A virus
QSLVPKAAR

SEQ ID NO: 145509 - protein, 9 aa, Influenza A virus
QSLVPKAIR

SEQ ID NO: 145510 - protein, 9 aa, Influenza A virus
QSLVPKATR

SEQ ID NO: 145511 - protein, 9 aa, Influenza A virus
QSLVPKAVR

SEQ ID NO: 145512 - protein, 9 aa, Influenza A virus
QSLVPRATR

SEQ ID NO: 145513 - protein, 8 aa, Influenza A virus
QSMIIAAR

SEQ ID NO: 145514 - protein, 10 aa, Influenza A virus
QSMIIAARNI

SEQ ID NO: 145515 - protein, 9 aa, Influenza A virus
QSPTMLYNK

SEQ ID NO: 145516 - protein, 9 aa, Influenza A virus
QSRIQFSSL

SEQ ID NO: 145517 - protein, 10 aa, Influenza A virus
QSRIQFSSLT

SEQ ID NO: 145518 - protein, 11 aa, Influenza A virus
QSRIQFSSLTV

SEQ ID NO: 145519 - protein, 9 aa, Influenza A virus
QSRMQFSSF

SEQ ID NO: 145520 - protein, 10 aa, Influenza A virus
QSRMQFSSFT

SEQ ID NO: 145521 - protein, 11 aa, Influenza A virus
QSRMQFSSFTV

SEQ ID NO: 145522 - protein, 9 aa, Influenza A virus
QSRMQFSSL

SEQ ID NO: 145523 - protein, 10 aa, Influenza A virus
QSRMQFSSLA

SEQ ID NO: 145524 - protein, 11 aa, Influenza A virus
QSRMQFSSLAV

SEQ ID NO: 145525 - protein, 10 aa, Influenza A virus
QSRMQFSSLT

SEQ ID NO: 145526 - protein, 11 aa, Influenza A virus
QSRMQFSSLTV

SEQ ID NO: 145527 - protein, 9 aa, Influenza A virus
QSRTREILT

SEQ ID NO: 145528 - protein, 10 aa, Influenza A virus
QSRTREILTK

SEQ ID NO: 145529 - protein, 10 aa, Influenza A virus
QSRTREILTR

SEQ ID NO: 145530 - protein, 9 aa, Influenza A virus
QSRTRGILT

SEQ ID NO: 145531 - protein, 10 aa, Influenza A virus
QSRTRGILTK

SEQ ID NO: 145532 - protein, 10 aa, Influenza A virus
QSRTRGILTR

SEQ ID NO: 145533 - protein, 9 aa, Influenza A virus
QTATKRIQM

SEQ ID NO: 145534 - protein, 11 aa, Influenza A virus
QTATKRIQMAI

SEQ ID NO: 145535 - protein, 11 aa, Influenza A virus
QTATKRIRMAI

SEQ ID NO: 145536 - protein, 9 aa, Influenza A virus
QTATKRLRM

SEQ ID NO: 145537 - protein, 10 aa, Influenza A virus
QTTSTVHYPK

SEQ ID NO: 145538 - protein, 11 aa, Influenza A virus
QTTSTVHYPKV

SEQ ID NO: 145539 - protein, 9 aa, Influenza A virus
QVPATLYNK

SEQ ID NO: 145540 - protein, 10 aa, Influenza A virus
QVSADPLASL

SEQ ID NO: 145541 - protein, 10 aa, Influenza A virus
QVTNTVHYPK

SEQ ID NO: 145542 - protein, 10 aa, Influenza A virus
QWIIKNWETV

SEQ ID NO: 145543 - protein, 9 aa, Influenza A virus
QWIIRNWEI

SEQ ID NO: 145544 - protein, 9 aa, Influenza A virus
QWIIRNWEM

SEQ ID NO: 145545 - protein, 10 aa, Influenza A virus
QWIIRNWEMI

SEQ ID NO: 145546 - protein, 11 aa, Influenza A virus
QWIIRNWEMIK

SEQ ID NO: 145547 - protein, 10 aa, Influenza A virus
QWIIRNWETV

SEQ ID NO: 145548 - protein, 9 aa, Influenza A virus
QWSHNPTML

SEQ ID NO: 145549 - protein, 10 aa, Influenza A virus
QWSHNPTMLY

SEQ ID NO: 145550 - protein, 10 aa, Influenza A virus
QWSQDPTILY

SEQ ID NO: 145551 - protein, 10 aa, Influenza A virus
QWSQDPTMLY

SEQ ID NO: 145552 - protein, 9 aa, Influenza A virus
QWSQDPTVL

SEQ ID NO: 145553 - protein, 10 aa, Influenza A virus
QWSQDPTVLY

SEQ ID NO: 145554 - protein, 10 aa, Influenza A virus
QWSQEPTMLY

SEQ ID NO: 145555 - protein, 9 aa, Influenza A virus
QWSQNPAIL

SEQ ID NO: 145556 - protein, 10 aa, Influenza A virus
QWSQNPAILY

SEQ ID NO: 145557 - protein, 9 aa, Influenza A virus
QWSQNPAML

SEQ ID NO: 145558 - protein, 10 aa, Influenza A virus
QWSQNPAMLY

SEQ ID NO: 145559 - protein, 9 aa, Influenza A virus
QWSQNPTML

SEQ ID NO: 145560 - protein, 10 aa, Influenza A virus
QWSQNPTMLY

SEQ ID NO: 145561 - protein, 9 aa, Influenza A virus
QWSQSPTML

SEQ ID NO: 145562 - protein, 10 aa, Influenza A virus
QWSQSPTMLY

SEQ ID NO: 145563 - protein, 9 aa, Influenza A virus
QWSQVPATL

SEQ ID NO: 145564 - protein, 10 aa, Influenza A virus
QWSQVPATLY

SEQ ID NO: 145565 - protein, 9 aa, Influenza A virus
QYSGFVRAL

SEQ ID NO: 145566 - protein, 10 aa, Influenza A virus
QYSGFVRALF

SEQ ID NO: 145567 - protein, 11 aa, Influenza A virus
QYSGFVRALFQ

SEQ ID NO: 145568 - protein, 9 aa, Influenza A virus
QYSGFVRTL

SEQ ID NO: 145569 - protein, 10 aa, Influenza A virus
QYSGFVRTLF

SEQ ID NO: 145570 - protein, 11 aa, Influenza A virus
QYSGFVRTLFQ

SEQ ID NO: 145571 - protein, 9 aa, Influenza A virus
RAAVSADPL

SEQ ID NO: 145572 - protein, 9 aa, Influenza A virus
RAERVVVSI

SEQ ID NO: 145573 - protein, 8 aa, Influenza A virus
RALFQQMR

SEQ ID NO: 145574 - protein, 10 aa, Influenza A virus
RALFQQMRDV

SEQ ID NO: 145575 - protein, 9 aa, Influenza A virus
RAMVSADPL

SEQ ID NO: 145576 - protein, 10 aa, Influenza A virus
RAMVSADPLA

SEQ ID NO: 145577 - protein, 9 aa, Influenza A virus
RANQRLNPM

SEQ ID NO: 145578 - protein, 9 aa, Influenza A virus
RAQVSADPL

SEQ ID NO: 145579 - protein, 10 aa, Influenza A virus
RAQVSADPLA

SEQ ID NO: 145580 - protein, 9 aa, Influenza A virus
RAQYSGFVR

SEQ ID NO: 145581 - protein, 10 aa, Influenza A virus
RAQYSGFVRT

SEQ ID NO: 145582 - protein, 11 aa, Influenza A virus
RAQYSGFVRTL

SEQ ID NO: 145583 - protein, 9 aa, Influenza A virus
RASVSADPL

SEQ ID NO: 145584 - protein, 9 aa, Influenza A virus
RATAIIRKA

SEQ ID NO: 145585 - protein, 11 aa, Influenza A virus
RATAIIRKATR

SEQ ID NO: 145586 - protein, 11 aa, Influenza A virus
RATAILKKATR

SEQ ID NO: 145587 - protein, 9 aa, Influenza A virus
RATAILRKA

SEQ ID NO: 145588 - protein, 11 aa, Influenza A virus
RATAILRKATR

SEQ ID NO: 145589 - protein, 11 aa, Influenza A virus
RATAILRKETR

SEQ ID NO: 145590 - protein, 11 aa, Influenza A virus
RATAILRKSTK

SEQ ID NO: 145591 - protein, 11 aa, Influenza A virus
RATAILRKTTR

SEQ ID NO: 145592 - protein, 9 aa, Influenza A virus
RATAIVRKA

SEQ ID NO: 145593 - protein, 11 aa, Influenza A virus
RATAIVRKATR

SEQ ID NO: 145594 - protein, 9 aa, Influenza A virus
RATATLRKA

SEQ ID NO: 145595 - protein, 11 aa, Influenza A virus
RATATLRKATR

SEQ ID NO: 145596 - protein, 10 aa, Influenza A virus
RATRGQYSGF

SEQ ID NO: 145597 - protein, 10 aa, Influenza A virus
RATRSQYSGF

SEQ ID NO: 145598 - protein, 9 aa, Influenza A virus
RATVSADPL

SEQ ID NO: 145599 - protein, 9 aa, Influenza A virus
RATVSTDPL

SEQ ID NO: 145600 - protein, 9 aa, Influenza A virus
RAVVSIDRF

SEQ ID NO: 145601 - protein, 10 aa, Influenza A virus
RAVVSIDRFL

SEQ ID NO: 145602 - protein, 11 aa, Influenza A virus
RAVVSIDRFLR

SEQ ID NO: 145603 - protein, 8 aa, Influenza A virus
RDCKISPL

SEQ ID NO: 145604 - protein, 10 aa, Influenza A virus
RDEQSIAEAI

SEQ ID NO: 145605 - protein, 10 aa, Influenza A virus
RDEQSIAEAV

SEQ ID NO: 145606 - protein, 10 aa, Influenza A virus
RDEQSIVEAI

SEQ ID NO: 145607 - protein, 10 aa, Influenza A virus
RDEQSVAEAI

SEQ ID NO: 145608 - protein, 10 aa, Influenza A virus
RDLLSQSRTR

SEQ ID NO: 145609 - protein, 10 aa, Influenza A virus
RDLMLQSRTR

SEQ ID NO: 145610 - protein, 10 aa, Influenza A virus
RDLMSQPRTR

SEQ ID NO: 145611 - protein, 10 aa, Influenza A virus
RDLMSQSRTR

SEQ ID NO: 145612 - protein, 8 aa, Influenza A virus
RDLRGNVL

SEQ ID NO: 145613 - protein, 9 aa, Influenza A virus
RDLRGNVLL

SEQ ID NO: 145614 - protein, 10 aa, Influenza A virus
RDLRGNVLLS

SEQ ID NO: 145615 - protein, 8 aa, Influenza A virus
RDQQGNVL

SEQ ID NO: 145616 - protein, 9 aa, Influenza A virus
RDQQGNVLL

SEQ ID NO: 145617 - protein, 9 aa, Influenza A virus
RDQRGNILL

SEQ ID NO: 145618 - protein, 10 aa, Influenza A virus
RDQRGNILLS

SEQ ID NO: 145619 - protein, 9 aa, Influenza A virus
RDQRGNVIL

SEQ ID NO: 145620 - protein, 10 aa, Influenza A virus
RDQRGNVILS

SEQ ID NO: 145621 - protein, 8 aa, Influenza A virus
RDQRGNVL

SEQ ID NO: 145622 - protein, 9 aa, Influenza A virus
RDQRGNVLL

SEQ ID NO: 145623 - protein, 10 aa, Influenza A virus
RDQRGNVLLS

SEQ ID NO: 145624 - protein, 10 aa, Influenza A virus
RDVIGTFDTV

SEQ ID NO: 145625 - protein, 10 aa, Influenza A virus
RDVLGTFDTA

SEQ ID NO: 145626 - protein, 10 aa, Influenza A virus
RDVLGTFDTI

SEQ ID NO: 145627 - protein, 10 aa, Influenza A virus
RDVLGTFDTV

SEQ ID NO: 145628 - protein, 9 aa, Influenza A virus
REDKRYGPA

SEQ ID NO: 145629 - protein, 10 aa, Influenza A virus
REDKRYGPAL

SEQ ID NO: 145630 - protein, 9 aa, Influenza A virus
REDPDEGTA

SEQ ID NO: 145631 - protein, 9 aa, Influenza A virus
REDRRYGPA

SEQ ID NO: 145632 - protein, 10 aa, Influenza A virus
REDRRYGPAL

SEQ ID NO: 145633 - protein, 10 aa, Influenza A virus
REEEILTGNL

SEQ ID NO: 145634 - protein, 10 aa, Influenza A virus
REEELLTGNL

SEQ ID NO: 145635 - protein, 10 aa, Influenza A virus
REEEMLTGNL

SEQ ID NO: 145636 - protein, 10 aa, Influenza A virus
REEEVLTGNL

SEQ ID NO: 145637 - protein, 9 aa, Influenza A virus
REELKNCNI

SEQ ID NO: 145638 - protein, 9 aa, Influenza A virus
REELQDCKI

SEQ ID NO: 145639 - protein, 10 aa, Influenza A virus
REELQDCKIA

SEQ ID NO: 145640 - protein, 9 aa, Influenza A virus
REEQAVDIC

SEQ ID NO: 145641 - protein, 9 aa, Influenza A virus
REILTKTTV

SEQ ID NO: 145642 - protein, 10 aa, Influenza A virus
REILTKTTVD

SEQ ID NO: 145643 - protein, 8 aa, Influenza A virus
REILTRTT

SEQ ID NO: 145644 - protein, 9 aa, Influenza A virus
REILTRTTV

SEQ ID NO: 145645 - protein, 10 aa, Influenza A virus
REILTRTTVD

SEQ ID NO: 145646 - protein, 8 aa, Influenza A virus
REILTTTT

SEQ ID NO: 145647 - protein, 9 aa, Influenza A virus
REILTTTTV

SEQ ID NO: 145648 - protein, 10 aa, Influenza A virus
REILTTTTVD

SEQ ID NO: 145649 - protein, 9 aa, Influenza A virus
RELVRKTRF

SEQ ID NO: 145650 - protein, 10 aa, Influenza A virus
RELVRKTRFL

SEQ ID NO: 145651 - protein, 11 aa, Influenza A virus
RELVRKTRFLP

SEQ ID NO: 145652 - protein, 9 aa, Influenza A virus
RFLRIRDQR

SEQ ID NO: 145653 - protein, 10 aa, Influenza A virus
RFLRIRDQRG

SEQ ID NO: 145654 - protein, 9 aa, Influenza A virus
RFLRVRDLR

SEQ ID NO: 145655 - protein, 10 aa, Influenza A virus
RFLRVRDLRG

SEQ ID NO: 145656 - protein, 9 aa, Influenza A virus
RFLRVRDQR

SEQ ID NO: 145657 - protein, 10 aa, Influenza A virus
RFLRVRDQRG

SEQ ID NO: 145658 - protein, 9 aa, Influenza A virus
RFRNQVKIR

SEQ ID NO: 145659 - protein, 10 aa, Influenza A virus
RFRNQVKIRR

SEQ ID NO: 145660 - protein, 11 aa, Influenza A virus
RFRNQVKIRRR

SEQ ID NO: 145661 - protein, 9 aa, Influenza A virus
RGDLNFINR

SEQ ID NO: 145662 - protein, 9 aa, Influenza A virus
RGDLNFMNR

SEQ ID NO: 145663 - protein, 9 aa, Influenza A virus
RGDLNFVNR

SEQ ID NO: 145664 - protein, 11 aa, Influenza A virus
RGFLILGKEDR

SEQ ID NO: 145665 - protein, 11 aa, Influenza A virus
RGFLILGKEER

SEQ ID NO: 145666 - protein, 11 aa, Influenza A virus
RGFLILGKGDR

SEQ ID NO: 145667 - protein, 8 aa, Influenza A virus
RGFLILGR

SEQ ID NO: 145668 - protein, 11 aa, Influenza A virus
RGFLILGREDR

SEQ ID NO: 145669 - protein, 9 aa, Influenza A virus
RGILTRTTV

SEQ ID NO: 145670 - protein, 10 aa, Influenza A virus
RGIRISKMGV

SEQ ID NO: 145671 - protein, 10 aa, Influenza A virus
RGIRISKTGV

SEQ ID NO: 145672 - protein, 10 aa, Influenza A virus
RGIRVSKMGV

SEQ ID NO: 145673 - protein, 9 aa, Influenza A virus
RGKYSGFVR

SEQ ID NO: 145674 - protein, 11 aa, Influenza A virus
RGKYSGFVRTL

SEQ ID NO: 145675 - protein, 10 aa, Influenza A virus
RGLRVSKMGV

SEQ ID NO: 145676 - protein, 9 aa, Influenza A virus
RGNSPAFNY

SEQ ID NO: 145677 - protein, 11 aa, Influenza A virus
RGNSPAFNYNK

SEQ ID NO: 145678 - protein, 9 aa, Influenza A virus
RGNSPIFNY

SEQ ID NO: 145679 - protein, 11 aa, Influenza A virus
RGNSPIFNYNK

SEQ ID NO: 145680 - protein, 9 aa, Influenza A virus
RGNSPVFNY

SEQ ID NO: 145681 - protein, 11 aa, Influenza A virus
RGNSPVFNYNK

SEQ ID NO: 145682 - protein, 11 aa, Influenza A virus
RGNSPVFNYNR

SEQ ID NO: 145683 - protein, 11 aa, Influenza A virus
RGNSPVFNYSK

SEQ ID NO: 145684 - protein, 9 aa, Influenza A virus
RGQYSGFVR

SEQ ID NO: 145685 - protein, 10 aa, Influenza A virus
RGQYSGFVRA

SEQ ID NO: 145686 - protein, 11 aa, Influenza A virus
RGQYSGFVRAL

SEQ ID NO: 145687 - protein, 11 aa, Influenza A virus
RGQYSGFVRTL

SEQ ID NO: 145688 - protein, 9 aa, Influenza A virus
RGSGMRIIV

SEQ ID NO: 145689 - protein, 10 aa, Influenza A virus
RGSGMRIIVR

SEQ ID NO: 145690 - protein, 9 aa, Influenza A virus
RGSGMRILI

SEQ ID NO: 145691 - protein, 10 aa, Influenza A virus
RGSGMRILIR

SEQ ID NO: 145692 - protein, 9 aa, Influenza A virus
RGSGMRILV

SEQ ID NO: 145693 - protein, 10 aa, Influenza A virus
RGSGMRILVR

SEQ ID NO: 145694 - protein, 9 aa, Influenza A virus
RGSGMRVLV

SEQ ID NO: 145695 - protein, 10 aa, Influenza A virus
RGSGMRVLVR

SEQ ID NO: 145696 - protein, 9 aa, Influenza A virus
RGTFGPVHF

SEQ ID NO: 145697 - protein, 10 aa, Influenza A virus
RGTFGPVHFR

SEQ ID NO: 145698 - protein, 11 aa, Influenza A virus
RGTFGPVHFRN

SEQ ID NO: 145699 - protein, 10 aa, Influenza A virus
RGVRISKMGV

SEQ ID NO: 145700 - protein, 10 aa, Influenza A virus
RGVRVSKMGV

SEQ ID NO: 145701 - protein, 10 aa, Influenza A virus
RGVRVSKTGV

SEQ ID NO: 145702 - protein, 11 aa, Influenza A virus
RHFHKDAKVLF

SEQ ID NO: 145703 - protein, 10 aa, Influenza A virus
RHFQKDAKAL

SEQ ID NO: 145704 - protein, 11 aa, Influenza A virus
RHFQKDAKALF

SEQ ID NO: 145705 - protein, 11 aa, Influenza A virus
RHFQKDAKILF

SEQ ID NO: 145706 - protein, 9 aa, Influenza A virus
RHFQKDAKL

SEQ ID NO: 145707 - protein, 11 aa, Influenza A virus
RHFQKDAKLLF

SEQ ID NO: 145708 - protein, 11 aa, Influenza A virus
RHFQKDAKTLF

SEQ ID NO: 145709 - protein, 10 aa, Influenza A virus
RHFQKDAKVL

SEQ ID NO: 145710 - protein, 11 aa, Influenza A virus
RHFQKDAKVLF

SEQ ID NO: 145711 - protein, 9 aa, Influenza A virus
RHFQKGAEV

SEQ ID NO: 145712 - protein, 10 aa, Influenza A virus
RHFQKGAEVL

SEQ ID NO: 145713 - protein, 11 aa, Influenza A virus
RHFQKGAEVLF

SEQ ID NO: 145714 - protein, 10 aa, Influenza A virus
RHGTFGPVHF

SEQ ID NO: 145715 - protein, 11 aa, Influenza A virus
RHGTFGPVHFR

SEQ ID NO: 145716 - protein, 9 aa, Influenza A virus
RIIEMIPER

SEQ ID NO: 145717 - protein, 9 aa, Influenza A virus
RIIEMVPER

SEQ ID NO: 145718 - protein, 9 aa, Influenza A virus
RIIETIPER

SEQ ID NO: 145719 - protein, 10 aa, Influenza A virus
RIIVRGNSPV

SEQ ID NO: 145720 - protein, 11 aa, Influenza A virus
RIIVRGNSPVF

SEQ ID NO: 145721 - protein, 9 aa, Influenza A virus
RIKELRDLL

SEQ ID NO: 145722 - protein, 10 aa, Influenza A virus
RIKELRDLLS

SEQ ID NO: 145723 - protein, 9 aa, Influenza A virus
RIKELRDLM

SEQ ID NO: 145724 - protein, 10 aa, Influenza A virus
RIKELRDLML

SEQ ID NO: 145725 - protein, 10 aa, Influenza A virus
RIKELRDLMS

SEQ ID NO: 145726 - protein, 9 aa, Influenza A virus
RIKELRNLM

SEQ ID NO: 145727 - protein, 10 aa, Influenza A virus
RIKELRNLMS

SEQ ID NO: 145728 - protein, 9 aa, Influenza A virus
RIKGLRDLM

SEQ ID NO: 145729 - protein, 10 aa, Influenza A virus
RIKGLRDLMS

SEQ ID NO: 145730 - protein, 10 aa, Influenza A virus
RILIRGNSPV

SEQ ID NO: 145731 - protein, 11 aa, Influenza A virus
RILIRGNSPVF

SEQ ID NO: 145732 - protein, 11 aa, Influenza A virus
RILTSDSQLTI

SEQ ID NO: 145733 - protein, 10 aa, Influenza A virus
RILTSESQLM

SEQ ID NO: 145734 - protein, 11 aa, Influenza A virus
RILTSESQLMI

SEQ ID NO: 145735 - protein, 11 aa, Influenza A virus
RILTSESQLMV

SEQ ID NO: 145736 - protein, 11 aa, Influenza A virus
RILTSESQLPI

SEQ ID NO: 145737 - protein, 11 aa, Influenza A virus
RILTSESQLTI

SEQ ID NO: 145738 - protein, 10 aa, Influenza A virus
RILVRGNSPA

SEQ ID NO: 145739 - protein, 11 aa, Influenza A virus
RILVRGNSPAF

SEQ ID NO: 145740 - protein, 10 aa, Influenza A virus
RILVRGNSPI

SEQ ID NO: 145741 - protein, 11 aa, Influenza A virus
RILVRGNSPIF

SEQ ID NO: 145742 - protein, 10 aa, Influenza A virus
RILVRGNSPV

SEQ ID NO: 145743 - protein, 11 aa, Influenza A virus
RILVRGNSPVF

SEQ ID NO: 145744 - protein, 9 aa, Influenza A virus
RIMEMIPEK

SEQ ID NO: 145745 - protein, 10 aa, Influenza A virus
RIMEMIPEKN

SEQ ID NO: 145746 - protein, 9 aa, Influenza A virus
RIMEMIPER

SEQ ID NO: 145747 - protein, 10 aa, Influenza A virus
RIMEMIPERN

SEQ ID NO: 145748 - protein, 8 aa, Influenza A virus
RIMEMIPK

SEQ ID NO: 145749 - protein, 9 aa, Influenza A virus
RIMEMIPKR

SEQ ID NO: 145750 - protein, 10 aa, Influenza A virus
RIMEMIPKRN

SEQ ID NO: 145751 - protein, 9 aa, Influenza A virus
RIMGMIPER

SEQ ID NO: 145752 - protein, 10 aa, Influenza A virus
RIMGMIPERN

SEQ ID NO: 145753 - protein, 9 aa, Influenza A virus
RIMVSPLAV

SEQ ID NO: 145754 - protein, 10 aa, Influenza A virus
RIMVSPLAVT

SEQ ID NO: 145755 - protein, 11 aa, Influenza A virus
RIMVSPLAVTW

SEQ ID NO: 145756 - protein, 9 aa, Influenza A virus
RIQFSSLTV

SEQ ID NO: 145757 - protein, 11 aa, Influenza A virus
RIQFSSLTVNV

SEQ ID NO: 145758 - protein, 9 aa, Influenza A virus
RIRDQRGNV

SEQ ID NO: 145759 - protein, 10 aa, Influenza A virus
RIRDQRGNVL

SEQ ID NO: 145760 - protein, 11 aa, Influenza A virus
RIRDQRGNVLL

SEQ ID NO: 145761 - protein, 9 aa, Influenza A virus
RISGSSVKR

SEQ ID NO: 145762 - protein, 10 aa, Influenza A virus
RISKMGVDEY

SEQ ID NO: 145763 - protein, 10 aa, Influenza A virus
RISKTGVDEY

SEQ ID NO: 145764 - protein, 8 aa, Influenza A virus
RISSSFSF

SEQ ID NO: 145765 - protein, 9 aa, Influenza A virus
RISSSFSFA

SEQ ID NO: 145766 - protein, 10 aa, Influenza A virus
RISSSFSFAG

SEQ ID NO: 145767 - protein, 11 aa, Influenza A virus
RISSSFSFAGF

SEQ ID NO: 145768 - protein, 9 aa, Influenza A virus
RISSSFSFG

SEQ ID NO: 145769 - protein, 10 aa, Influenza A virus
RISSSFSFGG

SEQ ID NO: 145770 - protein, 11 aa, Influenza A virus
RISSSFSFGGF

SEQ ID NO: 145771 - protein, 9 aa, Influenza A virus
RITEMIPER

SEQ ID NO: 145772 - protein, 9 aa, Influenza A virus
RITEMVPER

SEQ ID NO: 145773 - protein, 9 aa, Influenza A virus
RITETIPER

SEQ ID NO: 145774 - protein, 9 aa, Influenza A virus
RIVVSIDRF

SEQ ID NO: 145775 - protein, 11 aa, Influenza A virus
RIVVSIDRFLR

SEQ ID NO: 145776 - protein, 10 aa, Influenza A virus
RKATQRLVQL

SEQ ID NO: 145777 - protein, 11 aa, Influenza A virus
RKATRKLIQLI

SEQ ID NO: 145778 - protein, 11 aa, Influenza A virus
RKATRRLIQLI

SEQ ID NO: 145779 - protein, 11 aa, Influenza A virus
RKATRRLVQLI

SEQ ID NO: 145780 - protein, 11 aa, Influenza A virus
RKATRRMIQLI

SEQ ID NO: 145781 - protein, 10 aa, Influenza A virus
RKEEVLTGNL

SEQ ID NO: 145782 - protein, 10 aa, Influenza A virus
RKETRRLIQL

SEQ ID NO: 145783 - protein, 11 aa, Influenza A virus
RKETRRLIQLI

SEQ ID NO: 145784 - protein, 11 aa, Influenza A virus
RKLIQLIVSGR

SEQ ID NO: 145785 - protein, 10 aa, Influenza A virus
RKTRFLPVAG

SEQ ID NO: 145786 - protein, 10 aa, Influenza A virus
RKTRFLPVSG

SEQ ID NO: 145787 - protein, 11 aa, Influenza A virus
RKTTRRLIQLI

SEQ ID NO: 145788 - protein, 10 aa, Influenza A virus
RLIQLIVGGR

SEQ ID NO: 145789 - protein, 10 aa, Influenza A virus
RLIQLIVSGK

SEQ ID NO: 145790 - protein, 10 aa, Influenza A virus
RLIQLIVSGR

SEQ ID NO: 145791 - protein, 9 aa, Influenza A virus
RLKHGTFGP

SEQ ID NO: 145792 - protein, 10 aa, Influenza A virus
RLKHGTFGPV

SEQ ID NO: 145793 - protein, 11 aa, Influenza A virus
RLKHGTFGPVR

SEQ ID NO: 145794 - protein, 9 aa, Influenza A virus
RLKNGTFGP

SEQ ID NO: 145795 - protein, 10 aa, Influenza A virus
RLKNGTFGPV

SEQ ID NO: 145796 - protein, 9 aa, Influenza A virus
RLKRGTFGP

SEQ ID NO: 145797 - protein, 10 aa, Influenza A virus
RLKRGTFGPV

SEQ ID NO: 145798 - protein, 8 aa, Influenza A virus
RLNPMHQL

SEQ ID NO: 145799 - protein, 9 aa, Influenza A virus
RLNPMHQLL

SEQ ID NO: 145800 - protein, 10 aa, Influenza A virus
RLNPMHQLLR

SEQ ID NO: 145801 - protein, 11 aa, Influenza A virus
RLNPMHQLLRH

SEQ ID NO: 145802 - protein, 9 aa, Influenza A virus
RLRHGTFGP

SEQ ID NO: 145803 - protein, 10 aa, Influenza A virus
RLRHGTFGPV

SEQ ID NO: 145804 - protein, 10 aa, Influenza A virus
RLTITYSSSM

SEQ ID NO: 145805 - protein, 10 aa, Influenza A virus
RLVQLIISGK

SEQ ID NO: 145806 - protein, 10 aa, Influenza A virus
RLVQLIVSGR

SEQ ID NO: 145807 - protein, 9 aa, Influenza A virus
RMIQLIVSG

SEQ ID NO: 145808 - protein, 10 aa, Influenza A virus
RMIQLIVSGR

SEQ ID NO: 145809 - protein, 11 aa, Influenza A virus
RMIQLIVSGRD

SEQ ID NO: 145810 - protein, 9 aa, Influenza A virus
RMKHGTFGP

SEQ ID NO: 145811 - protein, 10 aa, Influenza A virus
RMKHGTFGPV

SEQ ID NO: 145812 - protein, 8 aa, Influenza A virus
RMKWMMAM

SEQ ID NO: 145813 - protein, 9 aa, Influenza A virus
RMKWMMAMK

SEQ ID NO: 145814 - protein, 10 aa, Influenza A virus
RMMDILRQNP

SEQ ID NO: 145815 - protein, 11 aa, Influenza A virus
RMMDILRQNPT

SEQ ID NO: 145816 - protein, 9 aa, Influenza A virus
RMQFSSFTV

SEQ ID NO: 145817 - protein, 10 aa, Influenza A virus
RMQFSSFTVN

SEQ ID NO: 145818 - protein, 11 aa, Influenza A virus
RMQFSSFTVNV

SEQ ID NO: 145819 - protein, 9 aa, Influenza A virus
RMQFSSLAV

SEQ ID NO: 145820 - protein, 10 aa, Influenza A virus
RMQFSSLAVN

SEQ ID NO: 145821 - protein, 11 aa, Influenza A virus
RMQFSSLAVNV

SEQ ID NO: 145822 - protein, 9 aa, Influenza A virus
RMQFSSLTV

SEQ ID NO: 145823 - protein, 10 aa, Influenza A virus
RMQFSSLTVN

SEQ ID NO: 145824 - protein, 11 aa, Influenza A virus
RMQFSSLTVNV

SEQ ID NO: 145825 - protein, 11 aa, Influenza A virus
RMVDILKQNPT

SEQ ID NO: 145826 - protein, 11 aa, Influenza A virus
RMVDILRQNPT

SEQ ID NO: 145827 - protein, 11 aa, Influenza A virus
RMVEILRQNPR

SEQ ID NO: 145828 - protein, 9 aa, Influenza A virus
RNDDVGQSL

SEQ ID NO: 145829 - protein, 9 aa, Influenza A virus
RNDDVIQSM

SEQ ID NO: 145830 - protein, 9 aa, Influenza A virus
RNDQGQTLW

SEQ ID NO: 145831 - protein, 9 aa, Influenza A virus
RNEQGQALW

SEQ ID NO: 145832 - protein, 9 aa, Influenza A virus
RNEQGQILW

SEQ ID NO: 145833 - protein, 9 aa, Influenza A virus
RNEQGQMLW

SEQ ID NO: 145834 - protein, 9 aa, Influenza A virus
RNEQGQTLW

SEQ ID NO: 145835 - protein, 11 aa, Influenza A virus
RNEQGQTLWSR

SEQ ID NO: 145836 - protein, 11 aa, Influenza A virus
RNGPATGTVHY

SEQ ID NO: 145837 - protein, 11 aa, Influenza A virus
RNGPMTSTIHY

SEQ ID NO: 145838 - protein, 11 aa, Influenza A virus
RNGPMTSTVHY

SEQ ID NO: 145839 - protein, 10 aa, Influenza A virus
RNGPTTSAVY

SEQ ID NO: 145840 - protein, 11 aa, Influenza A virus
RNGPTTSAVYY

SEQ ID NO: 145841 - protein, 11 aa, Influenza A virus
RNGQTTSTVHY

SEQ ID NO: 145842 - protein, 11 aa, Influenza A virus
RNGQVTNTVHY

SEQ ID NO: 145843 - protein, 9 aa, Influenza A virus
RNHVKIRRR

SEQ ID NO: 145844 - protein, 9 aa, Influenza A virus
RNIVKRATV

SEQ ID NO: 145845 - protein, 11 aa, Influenza A virus
RNIVKRATVSA

SEQ ID NO: 145846 - protein, 9 aa, Influenza A virus
RNIVRRAAV

SEQ ID NO: 145847 - protein, 11 aa, Influenza A virus
RNIVRRAAVSA

SEQ ID NO: 145848 - protein, 8 aa, Influenza A virus
RNIVRRAM

SEQ ID NO: 145849 - protein, 9 aa, Influenza A virus
RNIVRRAMV

SEQ ID NO: 145850 - protein, 11 aa, Influenza A virus
RNIVRRAMVSA

SEQ ID NO: 145851 - protein, 9 aa, Influenza A virus
RNIVRRAQV

SEQ ID NO: 145852 - protein, 11 aa, Influenza A virus
RNIVRRAQVSA

SEQ ID NO: 145853 - protein, 9 aa, Influenza A virus
RNIVRRASV

SEQ ID NO: 145854 - protein, 11 aa, Influenza A virus
RNIVRRASVSA

SEQ ID NO: 145855 - protein, 9 aa, Influenza A virus
RNIVRRATV

SEQ ID NO: 145856 - protein, 11 aa, Influenza A virus
RNIVRRATVSA

SEQ ID NO: 145857 - protein, 11 aa, Influenza A virus
RNIVRRATVST

SEQ ID NO: 145858 - protein, 10 aa, Influenza A virus
RNLMSQSRTR

SEQ ID NO: 145859 - protein, 9 aa, Influenza A virus
RNQIKIRRR

SEQ ID NO: 145860 - protein, 9 aa, Influenza A virus
RNQVKIRRR

SEQ ID NO: 145861 - protein, 10 aa, Influenza A virus
RNWEAVKIQW

SEQ ID NO: 145862 - protein, 10 aa, Influenza A virus
RNWEIVKIQW

SEQ ID NO: 145863 - protein, 10 aa, Influenza A virus
RNWEMIKIQW

SEQ ID NO: 145864 - protein, 10 aa, Influenza A virus
RNWETVKIQW

SEQ ID NO: 145865 - protein, 9 aa, Influenza A virus
RQEKNPALR

SEQ ID NO: 145866 - protein, 10 aa, Influenza A virus
RQEKNPALRM

SEQ ID NO: 145867 - protein, 9 aa, Influenza A virus
RQEKNPSLR

SEQ ID NO: 145868 - protein, 10 aa, Influenza A virus
RQEKNPSLRM

SEQ ID NO: 145869 - protein, 9 aa, Influenza A virus
RQGDVVLVM

SEQ ID NO: 145870 - protein, 10 aa, Influenza A virus
RQGDVVLVMK

SEQ ID NO: 145871 - protein, 11 aa, Influenza A virus
RQGDVVLVMKR

SEQ ID NO: 145872 - protein, 10 aa, Influenza A virus
RRAAVSADPL

SEQ ID NO: 145873 - protein, 11 aa, Influenza A virus
RRAAVSADPLA

SEQ ID NO: 145874 - protein, 10 aa, Influenza A virus
RRAMVSADPL

SEQ ID NO: 145875 - protein, 11 aa, Influenza A virus
RRAMVSADPLA

SEQ ID NO: 145876 - protein, 10 aa, Influenza A virus
RRAQVSADPL

SEQ ID NO: 145877 - protein, 11 aa, Influenza A virus
RRAQVSADPLA

SEQ ID NO: 145878 - protein, 10 aa, Influenza A virus
RRASVSADPL

SEQ ID NO: 145879 - protein, 11 aa, Influenza A virus
RRASVSADPLA

SEQ ID NO: 145880 - protein, 8 aa, Influenza A virus
RRATAILR

SEQ ID NO: 145881 - protein, 9 aa, Influenza A virus
RRATAILRK

SEQ ID NO: 145882 - protein, 10 aa, Influenza A virus
RRATAILRKA

SEQ ID NO: 145883 - protein, 10 aa, Influenza A virus
RRATAILRKS

SEQ ID NO: 145884 - protein, 10 aa, Influenza A virus
RRATAILRKT

SEQ ID NO: 145885 - protein, 10 aa, Influenza A virus
RRATVSADPL

SEQ ID NO: 145886 - protein, 11 aa, Influenza A virus
RRATVSADPLA

SEQ ID NO: 145887 - protein, 10 aa, Influenza A virus
RRATVSTDPL

SEQ ID NO: 145888 - protein, 11 aa, Influenza A virus
RRATVSTDPLA

SEQ ID NO: 145889 - protein, 11 aa, Influenza A virus
RRATVSTDPLS

SEQ ID NO: 145890 - protein, 11 aa, Influenza A virus
RREEEILTGNL

SEQ ID NO: 145891 - protein, 10 aa, Influenza A virus
RRIMEMIPER

SEQ ID NO: 145892 - protein, 11 aa, Influenza A virus
RRIMEMIPERN

SEQ ID NO: 145893 - protein, 10 aa, Influenza A virus
RRITEMIPER

SEQ ID NO: 145894 - protein, 8 aa, Influenza A virus
RRLIQLIV

SEQ ID NO: 145895 - protein, 9 aa, Influenza A virus
RRLIQLIVG

SEQ ID NO: 145896 - protein, 10 aa, Influenza A virus
RRLIQLIVGG

SEQ ID NO: 145897 - protein, 11 aa, Influenza A virus
RRLIQLIVGGR

SEQ ID NO: 145898 - protein, 9 aa, Influenza A virus
RRLIQLIVS

SEQ ID NO: 145899 - protein, 10 aa, Influenza A virus
RRLIQLIVSG

SEQ ID NO: 145900 - protein, 11 aa, Influenza A virus
RRLIQLIVSGK

SEQ ID NO: 145901 - protein, 11 aa, Influenza A virus
RRLIQLIVSGR

SEQ ID NO: 145902 - protein, 8 aa, Influenza A virus
RRLVQLIV

SEQ ID NO: 145903 - protein, 9 aa, Influenza A virus
RRLVQLIVS

SEQ ID NO: 145904 - protein, 10 aa, Influenza A virus
RRLVQLIVSG

SEQ ID NO: 145905 - protein, 11 aa, Influenza A virus
RRLVQLIVSGR

SEQ ID NO: 145906 - protein, 8 aa, Influenza A virus
RRMIQLIV

SEQ ID NO: 145907 - protein, 9 aa, Influenza A virus
RRMIQLIVS

SEQ ID NO: 145908 - protein, 10 aa, Influenza A virus
RRMIQLIVSG

SEQ ID NO: 145909 - protein, 11 aa, Influenza A virus
RRMIQLIVSGR

SEQ ID NO: 145910 - protein, 10 aa, Influenza A virus
RRRVDINPGH

SEQ ID NO: 145911 - protein, 10 aa, Influenza A virus
RRRVDMNPGH

SEQ ID NO: 145912 - protein, 9 aa, Influenza A virus
RRVDINPGH

SEQ ID NO: 145913 - protein, 10 aa, Influenza A virus
RRVDINPGHA

SEQ ID NO: 145914 - protein, 9 aa, Influenza A virus
RRVDMNPGH

SEQ ID NO: 145915 - protein, 10 aa, Influenza A virus
RRVDMNPGHA

SEQ ID NO: 145916 - protein, 9 aa, Influenza A virus
RRVDTNPGH

SEQ ID NO: 145917 - protein, 9 aa, Influenza A virus
RRVDVNPGH

SEQ ID NO: 145918 - protein, 10 aa, Influenza A virus
RRVDVNPGHA

SEQ ID NO: 145919 - protein, 9 aa, Influenza A virus
RRYGPALSI

SEQ ID NO: 145920 - protein, 10 aa, Influenza A virus
RRYGPALSIN

SEQ ID NO: 145921 - protein, 11 aa, Influenza A virus
RRYGPALSINE

SEQ ID NO: 145922 - protein, 11 aa, Influenza A virus
RRYGPALSINQ

SEQ ID NO: 145923 - protein, 9 aa, Influenza A virus
RSIVRRATV

SEQ ID NO: 145924 - protein, 10 aa, Influenza A virus
RSIVRRATVS

SEQ ID NO: 145925 - protein, 11 aa, Influenza A virus
RSIVRRATVSA

SEQ ID NO: 145926 - protein, 9 aa, Influenza A virus
RSQYSGFVR

SEQ ID NO: 145927 - protein, 10 aa, Influenza A virus
RSQYSGFVRT

SEQ ID NO: 145928 - protein, 11 aa, Influenza A virus
RSQYSGFVRTL

SEQ ID NO: 145929 - protein, 8 aa, Influenza A virus
RTKGFSVK

SEQ ID NO: 145930 - protein, 9 aa, Influenza A virus
RTKGFSVKR

SEQ ID NO: 145931 - protein, 10 aa, Influenza A virus
RTKGFSVKRE

SEQ ID NO: 145932 - protein, 8 aa, Influenza A virus
RTLFQQMR

SEQ ID NO: 145933 - protein, 10 aa, Influenza A virus
RTLFQQMRDV

SEQ ID NO: 145934 - protein, 11 aa, Influenza A virus
RTLFQQMRDVI

SEQ ID NO: 145935 - protein, 11 aa, Influenza A virus
RTLFQQMRDVL

SEQ ID NO: 145936 - protein, 9 aa, Influenza A virus
RTLTSESQL

SEQ ID NO: 145937 - protein, 11 aa, Influenza A virus
RTLTSESQLTI

SEQ ID NO: 145938 - protein, 8 aa, Influenza A virus
RTNGSSVK

SEQ ID NO: 145939 - protein, 9 aa, Influenza A virus
RTNGSSVKK

SEQ ID NO: 145940 - protein, 8 aa, Influenza A virus
RTREILTK

SEQ ID NO: 145941 - protein, 9 aa, Influenza A virus
RTREILTKT

SEQ ID NO: 145942 - protein, 10 aa, Influenza A virus
RTREILTKTT

SEQ ID NO: 145943 - protein, 11 aa, Influenza A virus
RTREILTKTTV

SEQ ID NO: 145944 - protein, 8 aa, Influenza A virus
RTREILTR

SEQ ID NO: 145945 - protein, 9 aa, Influenza A virus
RTREILTRT

SEQ ID NO: 145946 - protein, 10 aa, Influenza A virus
RTREILTRTT

SEQ ID NO: 145947 - protein, 11 aa, Influenza A virus
RTREILTRTTV

SEQ ID NO: 145948 - protein, 8 aa, Influenza A virus
RTREILTT

SEQ ID NO: 145949 - protein, 9 aa, Influenza A virus
RTREILTTT

SEQ ID NO: 145950 - protein, 10 aa, Influenza A virus
RTREILTTTT

SEQ ID NO: 145951 - protein, 11 aa, Influenza A virus
RTREILTTTTV

SEQ ID NO: 145952 - protein, 8 aa, Influenza A virus
RTRGILTK

SEQ ID NO: 145953 - protein, 9 aa, Influenza A virus
RTRGILTKT

SEQ ID NO: 145954 - protein, 10 aa, Influenza A virus
RTRGILTKTT

SEQ ID NO: 145955 - protein, 11 aa, Influenza A virus
RTRGILTKTTV

SEQ ID NO: 145956 - protein, 8 aa, Influenza A virus
RTRGILTR

SEQ ID NO: 145957 - protein, 9 aa, Influenza A virus
RTRGILTRT

SEQ ID NO: 145958 - protein, 10 aa, Influenza A virus
RTRGILTRTT

SEQ ID NO: 145959 - protein, 11 aa, Influenza A virus
RTRGILTRTTV

SEQ ID NO: 145960 - protein, 9 aa, Influenza A virus
RTSDAGSDR

SEQ ID NO: 145961 - protein, 11 aa, Influenza A virus
RTSDAGSDRVM

SEQ ID NO: 145962 - protein, 9 aa, Influenza A virus
RTSGSSFTK

SEQ ID NO: 145963 - protein, 10 aa, Influenza A virus
RTSGSSFTKE

SEQ ID NO: 145964 - protein, 9 aa, Influenza A virus
RTSGSSIKK

SEQ ID NO: 145965 - protein, 9 aa, Influenza A virus
RTSGSSIKR

SEQ ID NO: 145966 - protein, 9 aa, Influenza A virus
RTSGSSTKK

SEQ ID NO: 145967 - protein, 9 aa, Influenza A virus
RTSGSSTKR

SEQ ID NO: 145968 - protein, 9 aa, Influenza A virus
RTSGSSVER

SEQ ID NO: 145969 - protein, 9 aa, Influenza A virus
RTSGSSVKK

SEQ ID NO: 145970 - protein, 9 aa, Influenza A virus
RTSGSSVKR

SEQ ID NO: 145971 - protein, 9 aa, Influenza A virus
RTSGSSVNR

SEQ ID NO: 145972 - protein, 10 aa, Influenza A virus
RTSGSSVNRK

SEQ ID NO: 145973 - protein, 9 aa, Influenza A virus
RTSGTSVKK

SEQ ID NO: 145974 - protein, 9 aa, Influenza A virus
RTSGTSVRR

SEQ ID NO: 145975 - protein, 9 aa, Influenza A virus
RTTKRLTVL

SEQ ID NO: 145976 - protein, 10 aa, Influenza A virus
RTTKRLTVLG

SEQ ID NO: 145977 - protein, 11 aa, Influenza A virus
RTTKRLTVLGK

SEQ ID NO: 145978 - protein, 9 aa, Influenza A virus
RTTVDHMAI

SEQ ID NO: 145979 - protein, 10 aa, Influenza A virus
RTTVDHMAII

SEQ ID NO: 145980 - protein, 11 aa, Influenza A virus
RTTVDHMAIIK

SEQ ID NO: 145981 - protein, 9 aa, Influenza A virus
RTYFEKVER

SEQ ID NO: 145982 - protein, 10 aa, Influenza A virus
RTYFEKVERL

SEQ ID NO: 145983 - protein, 11 aa, Influenza A virus
RTYFEKVERLK

SEQ ID NO: 145984 - protein, 10 aa, Influenza A virus
RVERLKHGTF

SEQ ID NO: 145985 - protein, 9 aa, Influenza A virus
RVHDGYEEF

SEQ ID NO: 145986 - protein, 9 aa, Influenza A virus
RVHEGYEEF

SEQ ID NO: 145987 - protein, 11 aa, Influenza A virus
RVHEGYEEFTI

SEQ ID NO: 145988 - protein, 9 aa, Influenza A virus
RVLVRGNSP

SEQ ID NO: 145989 - protein, 10 aa, Influenza A virus
RVLVRGNSPV

SEQ ID NO: 145990 - protein, 11 aa, Influenza A virus
RVLVRGNSPVF

SEQ ID NO: 145991 - protein, 8 aa, Influenza A virus
RVMISPLA

SEQ ID NO: 145992 - protein, 9 aa, Influenza A virus
RVMISPLAV

SEQ ID NO: 145993 - protein, 10 aa, Influenza A virus
RVMISPLAVT

SEQ ID NO: 145994 - protein, 11 aa, Influenza A virus
RVMISPLAVTW

SEQ ID NO: 145995 - protein, 8 aa, Influenza A virus
RVMVSPLA

SEQ ID NO: 145996 - protein, 9 aa, Influenza A virus
RVMVSPLAI

SEQ ID NO: 145997 - protein, 10 aa, Influenza A virus
RVMVSPLAIT

SEQ ID NO: 145998 - protein, 11 aa, Influenza A virus
RVMVSPLAITW

SEQ ID NO: 145999 - protein, 9 aa, Influenza A virus
RVMVSPLAV

SEQ ID NO: 146000 - protein, 10 aa, Influenza A virus
RVMVSPLAVT

SEQ ID NO: 146001 - protein, 11 aa, Influenza A virus
RVMVSPLAVTW

SEQ ID NO: 146002 - protein, 9 aa, Influenza A virus
RVNEGYEEF

SEQ ID NO: 146003 - protein, 9 aa, Influenza A virus
RVRDLRGNV

SEQ ID NO: 146004 - protein, 10 aa, Influenza A virus
RVRDLRGNVL

SEQ ID NO: 146005 - protein, 11 aa, Influenza A virus
RVRDLRGNVLL

SEQ ID NO: 146006 - protein, 9 aa, Influenza A virus
RVRDQQGNV

SEQ ID NO: 146007 - protein, 10 aa, Influenza A virus
RVRDQQGNVL

SEQ ID NO: 146008 - protein, 11 aa, Influenza A virus
RVRDQQGNVLL

SEQ ID NO: 146009 - protein, 9 aa, Influenza A virus
RVRDQRGNI

SEQ ID NO: 146010 - protein, 10 aa, Influenza A virus
RVRDQRGNIL

SEQ ID NO: 146011 - protein, 11 aa, Influenza A virus
RVRDQRGNILL

SEQ ID NO: 146012 - protein, 9 aa, Influenza A virus
RVRDQRGNV

SEQ ID NO: 146013 - protein, 10 aa, Influenza A virus
RVRDQRGNVI

SEQ ID NO: 146014 - protein, 11 aa, Influenza A virus
RVRDQRGNVIL

SEQ ID NO: 146015 - protein, 10 aa, Influenza A virus
RVRDQRGNVL

SEQ ID NO: 146016 - protein, 11 aa, Influenza A virus
RVRDQRGNVLL

SEQ ID NO: 146017 - protein, 10 aa, Influenza A virus
RVSKMGVDEY

SEQ ID NO: 146018 - protein, 10 aa, Influenza A virus
RVSKTGVDEY

SEQ ID NO: 146019 - protein, 9 aa, Influenza A virus
RVVVSIDRF

SEQ ID NO: 146020 - protein, 10 aa, Influenza A virus
RVVVSIDRFL

SEQ ID NO: 146021 - protein, 11 aa, Influenza A virus
RVVVSIDRFLR

SEQ ID NO: 146022 - protein, 8 aa, Influenza A virus
RYGPALSI

SEQ ID NO: 146023 - protein, 11 aa, Influenza A virus
RYGPALSINEL

SEQ ID NO: 146024 - protein, 11 aa, Influenza A virus
RYGPALSINQL

SEQ ID NO: 146025 - protein, 11 aa, Influenza A virus
RYGPALSISEL

SEQ ID NO: 146026 - protein, 9 aa, Influenza A virus
RYTSGRQEK

SEQ ID NO: 146027 - protein, 8 aa, Influenza A virus
SADPLASL

SEQ ID NO: 146028 - protein, 9 aa, Influenza A virus
SADPLASLL

SEQ ID NO: 146029 - protein, 11 aa, Influenza A virus
SADPLASLLEM

SEQ ID NO: 146030 - protein, 9 aa, Influenza A virus
SAEKIVVSI

SEQ ID NO: 146031 - protein, 10 aa, Influenza A virus
SAEMSLRGVR

SEQ ID NO: 146032 - protein, 9 aa, Influenza A virus
SAERVVVSI

SEQ ID NO: 146033 - protein, 9 aa, Influenza A virus
SAKEAQDVI

SEQ ID NO: 146034 - protein, 9 aa, Influenza A virus
SAVHYPKIY

SEQ ID NO: 146035 - protein, 10 aa, Influenza A virus
SAVHYPKIYK

SEQ ID NO: 146036 - protein, 9 aa, Influenza A virus
SAVHYPKVY

SEQ ID NO: 146037 - protein, 10 aa, Influenza A virus
SAVHYPKVYK

SEQ ID NO: 146038 - protein, 8 aa, Influenza A virus
SAVLRGFL

SEQ ID NO: 146039 - protein, 9 aa, Influenza A virus
SAVLRGFLI

SEQ ID NO: 146040 - protein, 10 aa, Influenza A virus
SAVLRGFLIL

SEQ ID NO: 146041 - protein, 11 aa, Influenza A virus
SAVLRGFLILA

SEQ ID NO: 146042 - protein, 9 aa, Influenza A virus
SAVLRGIPI

SEQ ID NO: 146043 - protein, 10 aa, Influenza A virus
SAVLRGIPIL

SEQ ID NO: 146044 - protein, 9 aa, Influenza A virus
SAVYYPKVY

SEQ ID NO: 146045 - protein, 10 aa, Influenza A virus
SAVYYPKVYK

SEQ ID NO: 146046 - protein, 11 aa, Influenza A virus
SAVYYPKVYKT

SEQ ID NO: 146047 - protein, 9 aa, Influenza A virus
SDRIMVSPL

SEQ ID NO: 146048 - protein, 10 aa, Influenza A virus
SDRIMVSPLA

SEQ ID NO: 146049 - protein, 11 aa, Influenza A virus
SDRIMVSPLAV

SEQ ID NO: 146050 - protein, 9 aa, Influenza A virus
SDRVMISPL

SEQ ID NO: 146051 - protein, 9 aa, Influenza A virus
SDRVMVSPL

SEQ ID NO: 146052 - protein, 9 aa, Influenza A virus
SEAQGTEKL

SEQ ID NO: 146053 - protein, 11 aa, Influenza A virus
SEAQGTEKLTI

SEQ ID NO: 146054 - protein, 9 aa, Influenza A virus
SESVLVNTY

SEQ ID NO: 146055 - protein, 10 aa, Influenza A virus
SESVLVNTYQ

SEQ ID NO: 146056 - protein, 11 aa, Influenza A virus
SESVLVNTYQW

SEQ ID NO: 146057 - protein, 9 aa, Influenza A virus
SETHGTEKL

SEQ ID NO: 146058 - protein, 9 aa, Influenza A virus
SETHGTERL

SEQ ID NO: 146059 - protein, 9 aa, Influenza A virus
SETQGMEKL

SEQ ID NO: 146060 - protein, 9 aa, Influenza A virus
SETQGTEKL

SEQ ID NO: 146061 - protein, 10 aa, Influenza A virus
SETQGTEKLA

SEQ ID NO: 146062 - protein, 9 aa, Influenza A virus
SETQGTERL

SEQ ID NO: 146063 - protein, 8 aa, Influenza A virus
SFAGFTFK

SEQ ID NO: 146064 - protein, 9 aa, Influenza A virus
SFAGFTFKR

SEQ ID NO: 146065 - protein, 10 aa, Influenza A virus
SFAGFTFKRT

SEQ ID NO: 146066 - protein, 8 aa, Influenza A virus
SFGGFTFK

SEQ ID NO: 146067 - protein, 9 aa, Influenza A virus
SFGGFTFKR

SEQ ID NO: 146068 - protein, 10 aa, Influenza A virus
SFGGFTFKRI

SEQ ID NO: 146069 - protein, 10 aa, Influenza A virus
SFGGFTFKRT

SEQ ID NO: 146070 - protein, 11 aa, Influenza A virus
SFGGFTFKRTK

SEQ ID NO: 146071 - protein, 8 aa, Influenza A virus
SFQSLVPK

SEQ ID NO: 146072 - protein, 11 aa, Influenza A virus
SFQSLVPKAAR

SEQ ID NO: 146073 - protein, 9 aa, Influenza A virus
SFSFAGFTF

SEQ ID NO: 146074 - protein, 10 aa, Influenza A virus
SFSFAGFTFK

SEQ ID NO: 146075 - protein, 11 aa, Influenza A virus
SFSFAGFTFKR

SEQ ID NO: 146076 - protein, 9 aa, Influenza A virus
SFSFGGFTF

SEQ ID NO: 146077 - protein, 10 aa, Influenza A virus
SFSFGGFTFK

SEQ ID NO: 146078 - protein, 11 aa, Influenza A virus
SFSFGGFTFKR

SEQ ID NO: 146079 - protein, 11 aa, Influenza A virus
SGGTSSVYIEV

SEQ ID NO: 146080 - protein, 10 aa, Influenza A virus
SGMQFSSLTI

SEQ ID NO: 146081 - protein, 10 aa, Influenza A virus
SGRQEKNPAL

SEQ ID NO: 146082 - protein, 10 aa, Influenza A virus
SGRQEKNPSL

SEQ ID NO: 146083 - protein, 9 aa, Influenza A virus
SGVESAVLR

SEQ ID NO: 146084 - protein, 11 aa, Influenza A virus
SGVESAVLRGF

SEQ ID NO: 146085 - protein, 8 aa, Influenza A virus
SHNPTMLY

SEQ ID NO: 146086 - protein, 10 aa, Influenza A virus
SHNPTMLYNK

SEQ ID NO: 146087 - protein, 8 aa, Influenza A virus
SIAEAIIV

SEQ ID NO: 146088 - protein, 9 aa, Influenza A virus
SIAEAIIVA

SEQ ID NO: 146089 - protein, 10 aa, Influenza A virus
SIAEAIIVAI

SEQ ID NO: 146090 - protein, 11 aa, Influenza A virus
SIAEAIIVAIV

SEQ ID NO: 146091 - protein, 10 aa, Influenza A virus
SIAEAIIVAM

SEQ ID NO: 146092 - protein, 11 aa, Influenza A virus
SIAEAIIVAMV

SEQ ID NO: 146093 - protein, 9 aa, Influenza A virus
SIAEAVIVA

SEQ ID NO: 146094 - protein, 10 aa, Influenza A virus
SIAEAVIVAM

SEQ ID NO: 146095 - protein, 11 aa, Influenza A virus
SIAEAVIVAMV

SEQ ID NO: 146096 - protein, 9 aa, Influenza A virus
SIDNVMGMI

SEQ ID NO: 146097 - protein, 9 aa, Influenza A virus
SIDRFLRIR

SEQ ID NO: 146098 - protein, 9 aa, Influenza A virus
SIDRFLRVR

SEQ ID NO: 146099 - protein, 9 aa, Influenza A virus
SIEMSMRGV

SEQ ID NO: 146100 - protein, 10 aa, Influenza A virus
SIEMSMRGVR

SEQ ID NO: 146101 - protein, 11 aa, Influenza A virus
SILTDSQTATK

SEQ ID NO: 146102 - protein, 9 aa, Influenza A virus
SILVNTYQW

SEQ ID NO: 146103 - protein, 10 aa, Influenza A virus
SILVNTYQWI

SEQ ID NO: 146104 - protein, 10 aa, Influenza A virus
SINELRNLAK

SEQ ID NO: 146105 - protein, 10 aa, Influenza A virus
SINELSKLTK

SEQ ID NO: 146106 - protein, 10 aa, Influenza A virus
SINELSNIAK

SEQ ID NO: 146107 - protein, 9 aa, Influenza A virus
SINELSNLA

SEQ ID NO: 146108 - protein, 10 aa, Influenza A virus
SINELSNLAK

SEQ ID NO: 146109 - protein, 10 aa, Influenza A virus
SINELSNLTK

SEQ ID NO: 146110 - protein, 9 aa, Influenza A virus
SINELSSLA

SEQ ID NO: 146111 - protein, 10 aa, Influenza A virus
SINELSSLAK

SEQ ID NO: 146112 - protein, 9 aa, Influenza A virus
SINELSTLA

SEQ ID NO: 146113 - protein, 10 aa, Influenza A virus
SINELSTLAK

SEQ ID NO: 146114 - protein, 9 aa, Influenza A virus
SINQLSSLA

SEQ ID NO: 146115 - protein, 10 aa, Influenza A virus
SINQLSSLAK

SEQ ID NO: 146116 - protein, 9 aa, Influenza A virus
SISELGNLA

SEQ ID NO: 146117 - protein, 10 aa, Influenza A virus
SISELGNLAK

SEQ ID NO: 146118 - protein, 9 aa, Influenza A virus
SISELSNLA

SEQ ID NO: 146119 - protein, 10 aa, Influenza A virus
SISELSNLAK

SEQ ID NO: 146120 - protein, 9 aa, Influenza A virus
SIVEAIIVA

SEQ ID NO: 146121 - protein, 10 aa, Influenza A virus
SIVEAIIVAM

SEQ ID NO: 146122 - protein, 11 aa, Influenza A virus
SIVEAIIVAMV

SEQ ID NO: 146123 - protein, 9 aa, Influenza A virus
SIVEAIVVA

SEQ ID NO: 146124 - protein, 10 aa, Influenza A virus
SIVEAIVVAM

SEQ ID NO: 146125 - protein, 11 aa, Influenza A virus
SIVEAIVVAMV

SEQ ID NO: 146126 - protein, 10 aa, Influenza A virus
SIVRRATVSA

SEQ ID NO: 146127 - protein, 9 aa, Influenza A virus
SIYIEVLHL

SEQ ID NO: 146128 - protein, 10 aa, Influenza A virus
SIYIEVLHLT

SEQ ID NO: 146129 - protein, 8 aa, Influenza A virus
SKMGVDEY

SEQ ID NO: 146130 - protein, 10 aa, Influenza A virus
SKMGVDEYSR

SEQ ID NO: 146131 - protein, 11 aa, Influenza A virus
SKMGVDEYSSM

SEQ ID NO: 146132 - protein, 10 aa, Influenza A virus
SKMNDAGSDR

SEQ ID NO: 146133 - protein, 10 aa, Influenza A virus
SKTNDAGSDR

SEQ ID NO: 146134 - protein, 10 aa, Influenza A virus
SKTSDAGSDR

SEQ ID NO: 146135 - protein, 10 aa, Influenza A virus
SKVNDAGSDR

SEQ ID NO: 146136 - protein, 10 aa, Influenza A virus
SLAKGEKANV

SEQ ID NO: 146137 - protein, 11 aa, Influenza A virus
SLAKGEKANVL

SEQ ID NO: 146138 - protein, 9 aa, Influenza A virus
SLIIAARNI

SEQ ID NO: 146139 - protein, 10 aa, Influenza A virus
SLIIAARNIV

SEQ ID NO: 146140 - protein, 11 aa, Influenza A virus
SLIIAARNIVK

SEQ ID NO: 146141 - protein, 11 aa, Influenza A virus
SLIIAARNIVR

SEQ ID NO: 146142 - protein, 9 aa, Influenza A virus
SLIIAARSI

SEQ ID NO: 146143 - protein, 10 aa, Influenza A virus
SLIIAARSIV

SEQ ID NO: 146144 - protein, 11 aa, Influenza A virus
SLIIAARSIVR

SEQ ID NO: 146145 - protein, 9 aa, Influenza A virus
SLIPKAARA

SEQ ID NO: 146146 - protein, 11 aa, Influenza A virus
SLIPKAARAQY

SEQ ID NO: 146147 - protein, 11 aa, Influenza A virus
SLIPKAARGQY

SEQ ID NO: 146148 - protein, 11 aa, Influenza A virus
SLIPKAIRGQY

SEQ ID NO: 146149 - protein, 9 aa, Influenza A virus
SLIVAARNI

SEQ ID NO: 146150 - protein, 10 aa, Influenza A virus
SLIVAARNIV

SEQ ID NO: 146151 - protein, 11 aa, Influenza A virus
SLIVAARNIVR

SEQ ID NO: 146152 - protein, 9 aa, Influenza A virus
SLLEMCHGT

SEQ ID NO: 146153 - protein, 11 aa, Influenza A virus
SLLEMCHGTQI

SEQ ID NO: 146154 - protein, 11 aa, Influenza A virus
SLLEMCHSQQI

SEQ ID NO: 146155 - protein, 9 aa, Influenza A virus
SLLEMCHST

SEQ ID NO: 146156 - protein, 10 aa, Influenza A virus
SLLEMCHSTL

SEQ ID NO: 146157 - protein, 11 aa, Influenza A virus
SLLEMCHSTLI

SEQ ID NO: 146158 - protein, 11 aa, Influenza A virus
SLLEMCHSTQI

SEQ ID NO: 146159 - protein, 9 aa, Influenza A virus
SLMWEINGP

SEQ ID NO: 146160 - protein, 9 aa, Influenza A virus
SLRGIRISK

SEQ ID NO: 146161 - protein, 10 aa, Influenza A virus
SLRGIRISKM

SEQ ID NO: 146162 - protein, 9 aa, Influenza A virus
SLRGIRVSK

SEQ ID NO: 146163 - protein, 10 aa, Influenza A virus
SLRGIRVSKM

SEQ ID NO: 146164 - protein, 9 aa, Influenza A virus
SLRGLRVSK

SEQ ID NO: 146165 - protein, 10 aa, Influenza A virus
SLRGLRVSKM

SEQ ID NO: 146166 - protein, 9 aa, Influenza A virus
SLRGVRVSK

SEQ ID NO: 146167 - protein, 10 aa, Influenza A virus
SLRGVRVSKM

SEQ ID NO: 146168 - protein, 8 aa, Influenza A virus
SLRMKWMM

SEQ ID NO: 146169 - protein, 9 aa, Influenza A virus
SLRMKWMMA

SEQ ID NO: 146170 - protein, 10 aa, Influenza A virus
SLRMKWMMAM

SEQ ID NO: 146171 - protein, 11 aa, Influenza A virus
SLRMKWMMAMK

SEQ ID NO: 146172 - protein, 9 aa, Influenza A virus
SLVIAARNI

SEQ ID NO: 146173 - protein, 10 aa, Influenza A virus
SLVIAARNIV

SEQ ID NO: 146174 - protein, 11 aa, Influenza A virus
SLVIAARNIVR

SEQ ID NO: 146175 - protein, 11 aa, Influenza A virus
SLVLKAARGQY

SEQ ID NO: 146176 - protein, 9 aa, Influenza A virus
SLVPKAARA

SEQ ID NO: 146177 - protein, 11 aa, Influenza A virus
SLVPKAARAQY

SEQ ID NO: 146178 - protein, 10 aa, Influenza A virus
SLVPKAARGK

SEQ ID NO: 146179 - protein, 11 aa, Influenza A virus
SLVPKAARGKY

SEQ ID NO: 146180 - protein, 11 aa, Influenza A virus
SLVPKAARGQY

SEQ ID NO: 146181 - protein, 11 aa, Influenza A virus
SLVPKAARSQY

SEQ ID NO: 146182 - protein, 11 aa, Influenza A virus
SLVPKAIRGQY

SEQ ID NO: 146183 - protein, 11 aa, Influenza A virus
SLVPKATRGQY

SEQ ID NO: 146184 - protein, 11 aa, Influenza A virus
SLVPKAVRGQY

SEQ ID NO: 146185 - protein, 11 aa, Influenza A virus
SLVPRATRGQY

SEQ ID NO: 146186 - protein, 11 aa, Influenza A virus
SLVPRATRSQY

SEQ ID NO: 146187 - protein, 9 aa, Influenza A virus
SMERVVVSI

SEQ ID NO: 146188 - protein, 11 aa, Influenza A virus
SMERVVVSIDR

SEQ ID NO: 146189 - protein, 9 aa, Influenza A virus
SMIIAARNI

SEQ ID NO: 146190 - protein, 10 aa, Influenza A virus
SMIIAARNIV

SEQ ID NO: 146191 - protein, 11 aa, Influenza A virus
SMIIAARNIVR

SEQ ID NO: 146192 - protein, 9 aa, Influenza A virus
SMMWEINGP

SEQ ID NO: 146193 - protein, 9 aa, Influenza A virus
SMMWEINGS

SEQ ID NO: 146194 - protein, 9 aa, Influenza A virus
SMMWEVNGP

SEQ ID NO: 146195 - protein, 9 aa, Influenza A virus
SMRGIRISK

SEQ ID NO: 146196 - protein, 10 aa, Influenza A virus
SMRGIRISKM

SEQ ID NO: 146197 - protein, 9 aa, Influenza A virus
SMRGIRVSK

SEQ ID NO: 146198 - protein, 10 aa, Influenza A virus
SMRGIRVSKM

SEQ ID NO: 146199 - protein, 9 aa, Influenza A virus
SMRGLRVSK

SEQ ID NO: 146200 - protein, 10 aa, Influenza A virus
SMRGLRVSKM

SEQ ID NO: 146201 - protein, 9 aa, Influenza A virus
SMRGVRISK

SEQ ID NO: 146202 - protein, 10 aa, Influenza A virus
SMRGVRISKM

SEQ ID NO: 146203 - protein, 9 aa, Influenza A virus
SMRGVRVSK

SEQ ID NO: 146204 - protein, 10 aa, Influenza A virus
SMRGVRVSKM

SEQ ID NO: 146205 - protein, 9 aa, Influenza A virus
SMYIEVLHL

SEQ ID NO: 146206 - protein, 10 aa, Influenza A virus
SMYIEVLHLT

SEQ ID NO: 146207 - protein, 10 aa, Influenza A virus
SNTNDAGSDR

SEQ ID NO: 146208 - protein, 9 aa, Influenza A virus
SPEEVSETH

SEQ ID NO: 146209 - protein, 8 aa, Influenza A virus
SPLAITWW

SEQ ID NO: 146210 - protein, 10 aa, Influenza A virus
SPLAITWWNR

SEQ ID NO: 146211 - protein, 8 aa, Influenza A virus
SPLAVTWW

SEQ ID NO: 146212 - protein, 10 aa, Influenza A virus
SPLAVTWWNR

SEQ ID NO: 146213 - protein, 8 aa, Influenza A virus
SPLLVAYM

SEQ ID NO: 146214 - protein, 9 aa, Influenza A virus
SPLLVAYML

SEQ ID NO: 146215 - protein, 11 aa, Influenza A virus
SPLLVAYMLER

SEQ ID NO: 146216 - protein, 8 aa, Influenza A virus
SPLMVAYM

SEQ ID NO: 146217 - protein, 9 aa, Influenza A virus
SPLMVAYML

SEQ ID NO: 146218 - protein, 11 aa, Influenza A virus
SPLMVAYMLER

SEQ ID NO: 146219 - protein, 9 aa, Influenza A virus
SPTMLYNKM

SEQ ID NO: 146220 - protein, 11 aa, Influenza A virus
SPTMLYNKMEF

SEQ ID NO: 146221 - protein, 9 aa, Influenza A virus
SPVFNYNKA

SEQ ID NO: 146222 - protein, 9 aa, Influenza A virus
SPVFNYNKV

SEQ ID NO: 146223 - protein, 9 aa, Influenza A virus
SPVFNYSKA

SEQ ID NO: 146224 - protein, 10 aa, Influenza A virus
SPVFNYSKAT

SEQ ID NO: 146225 - protein, 9 aa, Influenza A virus
SQDDCMIKA

SEQ ID NO: 146226 - protein, 10 aa, Influenza A virus
SQDDCMIKAV

SEQ ID NO: 146227 - protein, 8 aa, Influenza A virus
SQDPTILY

SEQ ID NO: 146228 - protein, 10 aa, Influenza A virus
SQDPTILYNK

SEQ ID NO: 146229 - protein, 8 aa, Influenza A virus
SQDPTMLY

SEQ ID NO: 146230 - protein, 10 aa, Influenza A virus
SQDPTMLYNK

SEQ ID NO: 146231 - protein, 8 aa, Influenza A virus
SQDPTVLY

SEQ ID NO: 146232 - protein, 10 aa, Influenza A virus
SQDPTVLYNK

SEQ ID NO: 146233 - protein, 10 aa, Influenza A virus
SQEDCMIKAV

SEQ ID NO: 146234 - protein, 10 aa, Influenza A virus
SQEDCMVKAV

SEQ ID NO: 146235 - protein, 10 aa, Influenza A virus
SQEDCVIKAV

SEQ ID NO: 146236 - protein, 10 aa, Influenza A virus
SQEECMIKAV

SEQ ID NO: 146237 - protein, 8 aa, Influenza A virus
SQEPTMLY

SEQ ID NO: 146238 - protein, 10 aa, Influenza A virus
SQEPTMLYNK

SEQ ID NO: 146239 - protein, 9 aa, Influenza A virus
SQLKITQEK

SEQ ID NO: 146240 - protein, 10 aa, Influenza A virus
SQLKITQEKK

SEQ ID NO: 146241 - protein, 9 aa, Influenza A virus
SQLMITKEK

SEQ ID NO: 146242 - protein, 10 aa, Influenza A virus
SQLMITKEKK

SEQ ID NO: 146243 - protein, 9 aa, Influenza A virus
SQLMVTKEK

SEQ ID NO: 146244 - protein, 10 aa, Influenza A virus
SQLMVTKEKK

SEQ ID NO: 146245 - protein, 9 aa, Influenza A virus
SQLPITKEK

SEQ ID NO: 146246 - protein, 10 aa, Influenza A virus
SQLPITKEKK

SEQ ID NO: 146247 - protein, 9 aa, Influenza A virus
SQLTITKEK

SEQ ID NO: 146248 - protein, 10 aa, Influenza A virus
SQLTITKEKK

SEQ ID NO: 146249 - protein, 10 aa, Influenza A virus
SQLTITKEKR

SEQ ID NO: 146250 - protein, 9 aa, Influenza A virus
SQLTITREK

SEQ ID NO: 146251 - protein, 10 aa, Influenza A virus
SQLTITREKK

SEQ ID NO: 146252 - protein, 9 aa, Influenza A virus
SQLTTTKEK

SEQ ID NO: 146253 - protein, 8 aa, Influenza A virus
SQNPAILY

SEQ ID NO: 146254 - protein, 10 aa, Influenza A virus
SQNPAILYNK

SEQ ID NO: 146255 - protein, 11 aa, Influenza A virus
SQNPAILYNKM

SEQ ID NO: 146256 - protein, 8 aa, Influenza A virus
SQNPAMLY

SEQ ID NO: 146257 - protein, 10 aa, Influenza A virus
SQNPAMLYNK

SEQ ID NO: 146258 - protein, 11 aa, Influenza A virus
SQNPAMLYNKM

SEQ ID NO: 146259 - protein, 8 aa, Influenza A virus
SQNPTMLY

SEQ ID NO: 146260 - protein, 10 aa, Influenza A virus
SQNPTMLYNK

SEQ ID NO: 146261 - protein, 11 aa, Influenza A virus
SQNPTMLYNKM

SEQ ID NO: 146262 - protein, 9 aa, Influenza A virus
SQQIGGTRM

SEQ ID NO: 146263 - protein, 10 aa, Influenza A virus
SQQIGGTRMV

SEQ ID NO: 146264 - protein, 8 aa, Influenza A virus
SQSPTMLY

SEQ ID NO: 146265 - protein, 10 aa, Influenza A virus
SQSPTMLYNK

SEQ ID NO: 146266 - protein, 11 aa, Influenza A virus
SQSPTMLYNKM

SEQ ID NO: 146267 - protein, 9 aa, Influenza A virus
SQSRTREIL

SEQ ID NO: 146268 - protein, 11 aa, Influenza A virus
SQSRTREILTK

SEQ ID NO: 146269 - protein, 11 aa, Influenza A virus
SQSRTREILTR

SEQ ID NO: 146270 - protein, 9 aa, Influenza A virus
SQSRTRGIL

SEQ ID NO: 146271 - protein, 10 aa, Influenza A virus
SQSRTRGILT

SEQ ID NO: 146272 - protein, 11 aa, Influenza A virus
SQSRTRGILTK

SEQ ID NO: 146273 - protein, 11 aa, Influenza A virus
SQSRTRGILTR

SEQ ID NO: 146274 - protein, 10 aa, Influenza A virus
SQTATKRIQM

SEQ ID NO: 146275 - protein, 9 aa, Influenza A virus
SQTATKRIR

SEQ ID NO: 146276 - protein, 10 aa, Influenza A virus
SQTATKRIRM

SEQ ID NO: 146277 - protein, 9 aa, Influenza A virus
SQTATKRLR

SEQ ID NO: 146278 - protein, 10 aa, Influenza A virus
SQTATKRLRM

SEQ ID NO: 146279 - protein, 8 aa, Influenza A virus
SQVPATLY

SEQ ID NO: 146280 - protein, 10 aa, Influenza A virus
SQVPATLYNK

SEQ ID NO: 146281 - protein, 11 aa, Influenza A virus
SQVPATLYNKM

SEQ ID NO: 146282 - protein, 8 aa, Influenza A virus
SQYSGFVR

SEQ ID NO: 146283 - protein, 9 aa, Influenza A virus
SQYSGFVRT

SEQ ID NO: 146284 - protein, 10 aa, Influenza A virus
SQYSGFVRTL

SEQ ID NO: 146285 - protein, 11 aa, Influenza A virus
SQYSGFVRTLF

SEQ ID NO: 146286 - protein, 10 aa, Influenza A virus
SRAERVVVSI

SEQ ID NO: 146287 - protein, 8 aa, Influenza A virus
SRIQFSSL

SEQ ID NO: 146288 - protein, 9 aa, Influenza A virus
SRIQFSSLT

SEQ ID NO: 146289 - protein, 10 aa, Influenza A virus
SRIQFSSLTV

SEQ ID NO: 146290 - protein, 8 aa, Influenza A virus
SRMQFSSF

SEQ ID NO: 146291 - protein, 9 aa, Influenza A virus
SRMQFSSFT

SEQ ID NO: 146292 - protein, 10 aa, Influenza A virus
SRMQFSSFTV

SEQ ID NO: 146293 - protein, 11 aa, Influenza A virus
SRMQFSSFTVN

SEQ ID NO: 146294 - protein, 8 aa, Influenza A virus
SRMQFSSL

SEQ ID NO: 146295 - protein, 9 aa, Influenza A virus
SRMQFSSLA

SEQ ID NO: 146296 - protein, 10 aa, Influenza A virus
SRMQFSSLAV

SEQ ID NO: 146297 - protein, 11 aa, Influenza A virus
SRMQFSSLAVN

SEQ ID NO: 146298 - protein, 9 aa, Influenza A virus
SRMQFSSLT

SEQ ID NO: 146299 - protein, 10 aa, Influenza A virus
SRMQFSSLTV

SEQ ID NO: 146300 - protein, 11 aa, Influenza A virus
SRMQFSSLTVN

SEQ ID NO: 146301 - protein, 9 aa, Influenza A virus
SRTREILTK

SEQ ID NO: 146302 - protein, 9 aa, Influenza A virus
SRTREILTR

SEQ ID NO: 146303 - protein, 10 aa, Influenza A virus
SRTREILTTT

SEQ ID NO: 146304 - protein, 9 aa, Influenza A virus
SRTRGILTK

SEQ ID NO: 146305 - protein, 10 aa, Influenza A virus
SRTRGILTKT

SEQ ID NO: 146306 - protein, 9 aa, Influenza A virus
SRTRGILTR

SEQ ID NO: 146307 - protein, 10 aa, Influenza A virus
SRTRGILTRT

SEQ ID NO: 146308 - protein, 10 aa, Influenza A virus
SRTSDAGSDR

SEQ ID NO: 146309 - protein, 10 aa, Influenza A virus
SSAEKIVVSI

SEQ ID NO: 146310 - protein, 8 aa, Influenza A virus
SSAERVVV

SEQ ID NO: 146311 - protein, 10 aa, Influenza A virus
SSAERVVVSI

SEQ ID NO: 146312 - protein, 8 aa, Influenza A virus
SSFSFAGF

SEQ ID NO: 146313 - protein, 9 aa, Influenza A virus
SSFSFAGFT

SEQ ID NO: 146314 - protein, 10 aa, Influenza A virus
SSFSFAGFTF

SEQ ID NO: 146315 - protein, 11 aa, Influenza A virus
SSFSFAGFTFK

SEQ ID NO: 146316 - protein, 8 aa, Influenza A virus
SSFSFGGF

SEQ ID NO: 146317 - protein, 10 aa, Influenza A virus
SSFSFGGFTF

SEQ ID NO: 146318 - protein, 11 aa, Influenza A virus
SSFSFGGFTFK

SEQ ID NO: 146319 - protein, 9 aa, Influenza A virus
SSFTKEEEV

SEQ ID NO: 146320 - protein, 8 aa, Influenza A virus
SSFTVNVR

SEQ ID NO: 146321 - protein, 9 aa, Influenza A virus
SSIKREEEL

SEQ ID NO: 146322 - protein, 9 aa, Influenza A virus
SSIKREEEV

SEQ ID NO: 146323 - protein, 8 aa, Influenza A virus
SSIYIEVL

SEQ ID NO: 146324 - protein, 10 aa, Influenza A virus
SSIYIEVLHL

SEQ ID NO: 146325 - protein, 10 aa, Influenza A virus
SSLLEMCHST

SEQ ID NO: 146326 - protein, 8 aa, Influenza A virus
SSMERVVV

SEQ ID NO: 146327 - protein, 9 aa, Influenza A virus
SSMERVVVS

SEQ ID NO: 146328 - protein, 10 aa, Influenza A virus
SSMERVVVSI

SEQ ID NO: 146329 - protein, 10 aa, Influenza A virus
SSMMWEINGS

SEQ ID NO: 146330 - protein, 8 aa, Influenza A virus
SSMYIEVL

SEQ ID NO: 146331 - protein, 9 aa, Influenza A virus
SSMYIEVLH

SEQ ID NO: 146332 - protein, 10 aa, Influenza A virus
SSMYIEVLHL

SEQ ID NO: 146333 - protein, 9 aa, Influenza A virus
SSSFSFAGF

SEQ ID NO: 146334 - protein, 11 aa, Influenza A virus
SSSFSFAGFTF

SEQ ID NO: 146335 - protein, 9 aa, Influenza A virus
SSSFSFGGF

SEQ ID NO: 146336 - protein, 11 aa, Influenza A virus
SSSFSFGGFTF

SEQ ID NO: 146337 - protein, 10 aa, Influenza A virus
SSTEMSMRGV

SEQ ID NO: 146338 - protein, 11 aa, Influenza A virus
SSTEMSMRGVR

SEQ ID NO: 146339 - protein, 10 aa, Influenza A virus
SSTERIVVSI

SEQ ID NO: 146340 - protein, 10 aa, Influenza A virus
SSTERVVVSI

SEQ ID NO: 146341 - protein, 9 aa, Influenza A virus
SSVEREEEV

SEQ ID NO: 146342 - protein, 9 aa, Influenza A virus
SSVKKEEEM

SEQ ID NO: 146343 - protein, 9 aa, Influenza A virus
SSVKREEEM

SEQ ID NO: 146344 - protein, 9 aa, Influenza A virus
SSVNRKEEV

SEQ ID NO: 146345 - protein, 10 aa, Influenza A virus
SSVYIEVLHL

SEQ ID NO: 146346 - protein, 10 aa, Influenza A virus
SSVYVEVLHL

SEQ ID NO: 146347 - protein, 9 aa, Influenza A virus
STAHYPKVY

SEQ ID NO: 146348 - protein, 10 aa, Influenza A virus
STAHYPKVYK

SEQ ID NO: 146349 - protein, 11 aa, Influenza A virus
STAHYPKVYKT

SEQ ID NO: 146350 - protein, 8 aa, Influenza A virus
STDPLASL

SEQ ID NO: 146351 - protein, 9 aa, Influenza A virus
STDPLASLL

SEQ ID NO: 146352 - protein, 11 aa, Influenza A virus
STDPLASLLEM

SEQ ID NO: 146353 - protein, 8 aa, Influenza A virus
STDPLSSL

SEQ ID NO: 146354 - protein, 9 aa, Influenza A virus
STDPLSSLL

SEQ ID NO: 146355 - protein, 11 aa, Influenza A virus
STDPLSSLLEM

SEQ ID NO: 146356 - protein, 10 aa, Influenza A virus
STEKSMRGIR

SEQ ID NO: 146357 - protein, 11 aa, Influenza A virus
STEKVVVSIDR

SEQ ID NO: 146358 - protein, 10 aa, Influenza A virus
STEMSLRGIR

SEQ ID NO: 146359 - protein, 10 aa, Influenza A virus
STEMSLRGLR

SEQ ID NO: 146360 - protein, 11 aa, Influenza A virus
STEMSLRGLRV

SEQ ID NO: 146361 - protein, 10 aa, Influenza A virus
STEMSLRGVR

SEQ ID NO: 146362 - protein, 10 aa, Influenza A virus
STEMSMRGIR

SEQ ID NO: 146363 - protein, 10 aa, Influenza A virus
STEMSMRGLR

SEQ ID NO: 146364 - protein, 10 aa, Influenza A virus
STEMSMRGVR

SEQ ID NO: 146365 - protein, 11 aa, Influenza A virus
STERAVVSIDR

SEQ ID NO: 146366 - protein, 9 aa, Influenza A virus
STERIVVSI

SEQ ID NO: 146367 - protein, 11 aa, Influenza A virus
STERIVVSIDR

SEQ ID NO: 146368 - protein, 9 aa, Influenza A virus
STERVVVSI

SEQ ID NO: 146369 - protein, 11 aa, Influenza A virus
STERVVVSIDR

SEQ ID NO: 146370 - protein, 10 aa, Influenza A virus
STEVSLRGVR

SEQ ID NO: 146371 - protein, 10 aa, Influenza A virus
STEVSMRGVR

SEQ ID NO: 146372 - protein, 9 aa, Influenza A virus
STGMSLRGV

SEQ ID NO: 146373 - protein, 10 aa, Influenza A virus
STGMSLRGVR

SEQ ID NO: 146374 - protein, 9 aa, Influenza A virus
STIHYPKIY

SEQ ID NO: 146375 - protein, 10 aa, Influenza A virus
STIHYPKIYK

SEQ ID NO: 146376 - protein, 11 aa, Influenza A virus
STIHYPKIYKT

SEQ ID NO: 146377 - protein, 9 aa, Influenza A virus
STIHYPKVY

SEQ ID NO: 146378 - protein, 10 aa, Influenza A virus
STIHYPKVYK

SEQ ID NO: 146379 - protein, 11 aa, Influenza A virus
STIHYPKVYKT

SEQ ID NO: 146380 - protein, 10 aa, Influenza A virus
STIHYPKVYR

SEQ ID NO: 146381 - protein, 11 aa, Influenza A virus
STIHYPKVYRT

SEQ ID NO: 146382 - protein, 8 aa, Influenza A virus
STKRLTVL

SEQ ID NO: 146383 - protein, 9 aa, Influenza A virus
STKRLTVLG

SEQ ID NO: 146384 - protein, 10 aa, Influenza A virus
STKRLTVLGK

SEQ ID NO: 146385 - protein, 9 aa, Influenza A virus
STKRLVQLI

SEQ ID NO: 146386 - protein, 10 aa, Influenza A virus
STKRLVQLIV

SEQ ID NO: 146387 - protein, 9 aa, Influenza A virus
STLIGGTRM

SEQ ID NO: 146388 - protein, 10 aa, Influenza A virus
STLIGGTRMV

SEQ ID NO: 146389 - protein, 9 aa, Influenza A virus
STQIGGIKM

SEQ ID NO: 146390 - protein, 10 aa, Influenza A virus
STQIGGIKMV

SEQ ID NO: 146391 - protein, 9 aa, Influenza A virus
STQIGGIRM

SEQ ID NO: 146392 - protein, 10 aa, Influenza A virus
STQIGGIRMV

SEQ ID NO: 146393 - protein, 9 aa, Influenza A virus
STQIGGLRM

SEQ ID NO: 146394 - protein, 10 aa, Influenza A virus
STQIGGLRMV

SEQ ID NO: 146395 - protein, 9 aa, Influenza A virus
STQIGGTKM

SEQ ID NO: 146396 - protein, 10 aa, Influenza A virus
STQIGGTKMV

SEQ ID NO: 146397 - protein, 9 aa, Influenza A virus
STQIGGTRM

SEQ ID NO: 146398 - protein, 10 aa, Influenza A virus
STQIGGTRMM

SEQ ID NO: 146399 - protein, 10 aa, Influenza A virus
STQIGGTRMV

SEQ ID NO: 146400 - protein, 9 aa, Influenza A virus
STQIGGVRM

SEQ ID NO: 146401 - protein, 10 aa, Influenza A virus
STQIGGVRMV

SEQ ID NO: 146402 - protein, 9 aa, Influenza A virus
STSGVESAV

SEQ ID NO: 146403 - protein, 10 aa, Influenza A virus
STSGVESAVL

SEQ ID NO: 146404 - protein, 11 aa, Influenza A virus
STSGVESAVLR

SEQ ID NO: 146405 - protein, 9 aa, Influenza A virus
STVHYPKIY

SEQ ID NO: 146406 - protein, 10 aa, Influenza A virus
STVHYPKIYK

SEQ ID NO: 146407 - protein, 11 aa, Influenza A virus
STVHYPKIYKT

SEQ ID NO: 146408 - protein, 10 aa, Influenza A virus
STVHYPKVHK

SEQ ID NO: 146409 - protein, 9 aa, Influenza A virus
STVHYPKVY

SEQ ID NO: 146410 - protein, 10 aa, Influenza A virus
STVHYPKVYK

SEQ ID NO: 146411 - protein, 11 aa, Influenza A virus
STVHYPKVYKP

SEQ ID NO: 146412 - protein, 11 aa, Influenza A virus
STVHYPKVYKT

SEQ ID NO: 146413 - protein, 10 aa, Influenza A virus
STVHYPKVYR

SEQ ID NO: 146414 - protein, 11 aa, Influenza A virus
STVHYPKVYRT

SEQ ID NO: 146415 - protein, 9 aa, Influenza A virus
STVMSMRGV

SEQ ID NO: 146416 - protein, 10 aa, Influenza A virus
STVMSMRGVR

SEQ ID NO: 146417 - protein, 9 aa, Influenza A virus
SVAEAIIVA

SEQ ID NO: 146418 - protein, 10 aa, Influenza A virus
SVAEAIIVAM

SEQ ID NO: 146419 - protein, 11 aa, Influenza A virus
SVAEAIIVAMV

SEQ ID NO: 146420 - protein, 9 aa, Influenza A virus
SVLINTYQW

SEQ ID NO: 146421 - protein, 10 aa, Influenza A virus
SVLINTYQWI

SEQ ID NO: 146422 - protein, 10 aa, Influenza A virus
SVLINTYQWV

SEQ ID NO: 146423 - protein, 11 aa, Influenza A virus
SVLINTYQWVI

SEQ ID NO: 146424 - protein, 9 aa, Influenza A virus
SVLVNTYQW

SEQ ID NO: 146425 - protein, 10 aa, Influenza A virus
SVLVNTYQWI

SEQ ID NO: 146426 - protein, 10 aa, Influenza A virus
SVLVNTYQWV

SEQ ID NO: 146427 - protein, 9 aa, Influenza A virus
SVMGMIGIL

SEQ ID NO: 146428 - protein, 8 aa, Influenza A virus
SVMGMVGV

SEQ ID NO: 146429 - protein, 9 aa, Influenza A virus
SVMGMVGVL

SEQ ID NO: 146430 - protein, 10 aa, Influenza A virus
SVSADPLASL

SEQ ID NO: 146431 - protein, 11 aa, Influenza A virus
SVSADPLASLL

SEQ ID NO: 146432 - protein, 9 aa, Influenza A virus
SVYIEVLHL

SEQ ID NO: 146433 - protein, 10 aa, Influenza A virus
SVYIEVLHLT

SEQ ID NO: 146434 - protein, 9 aa, Influenza A virus
SVYVEVLHL

SEQ ID NO: 146435 - protein, 10 aa, Influenza A virus
SVYVEVLHLT

SEQ ID NO: 146436 - protein, 9 aa, Influenza A virus
TADKKITEM

SEQ ID NO: 146437 - protein, 9 aa, Influenza A virus
TADKRIIEM

SEQ ID NO: 146438 - protein, 9 aa, Influenza A virus
TADKRIMEM

SEQ ID NO: 146439 - protein, 9 aa, Influenza A virus
TADKRIMGM

SEQ ID NO: 146440 - protein, 9 aa, Influenza A virus
TADKRITEM

SEQ ID NO: 146441 - protein, 9 aa, Influenza A virus
TADRRIMEM

SEQ ID NO: 146442 - protein, 9 aa, Influenza A virus
TADRRITEM

SEQ ID NO: 146443 - protein, 9 aa, Influenza A virus
TAGVESAVL

SEQ ID NO: 146444 - protein, 10 aa, Influenza A virus
TAGVESAVLR

SEQ ID NO: 146445 - protein, 8 aa, Influenza A virus
TAHYPKVY

SEQ ID NO: 146446 - protein, 9 aa, Influenza A virus
TAHYPKVYK

SEQ ID NO: 146447 - protein, 9 aa, Influenza A virus
TAIIRKATR

SEQ ID NO: 146448 - protein, 10 aa, Influenza A virus
TAIIRKATRR

SEQ ID NO: 146449 - protein, 9 aa, Influenza A virus
TAILKKATR

SEQ ID NO: 146450 - protein, 10 aa, Influenza A virus
TAILKKATRR

SEQ ID NO: 146451 - protein, 10 aa, Influenza A virus
TAILRKATQR

SEQ ID NO: 146452 - protein, 9 aa, Influenza A virus
TAILRKATR

SEQ ID NO: 146453 - protein, 10 aa, Influenza A virus
TAILRKATRK

SEQ ID NO: 146454 - protein, 10 aa, Influenza A virus
TAILRKATRR

SEQ ID NO: 146455 - protein, 9 aa, Influenza A virus
TAILRKETR

SEQ ID NO: 146456 - protein, 10 aa, Influenza A virus
TAILRKETRR

SEQ ID NO: 146457 - protein, 9 aa, Influenza A virus
TAILRKSTK

SEQ ID NO: 146458 - protein, 10 aa, Influenza A virus
TAILRKSTKR

SEQ ID NO: 146459 - protein, 9 aa, Influenza A virus
TAILRKTTR

SEQ ID NO: 146460 - protein, 10 aa, Influenza A virus
TAILRKTTRR

SEQ ID NO: 146461 - protein, 9 aa, Influenza A virus
TAIVRKATR

SEQ ID NO: 146462 - protein, 10 aa, Influenza A virus
TAIVRKATRR

SEQ ID NO: 146463 - protein, 10 aa, Influenza A virus
TAQIIKLLPF

SEQ ID NO: 146464 - protein, 9 aa, Influenza A virus
TASTIHYPK

SEQ ID NO: 146465 - protein, 10 aa, Influenza A virus
TASTIHYPKV

SEQ ID NO: 146466 - protein, 11 aa, Influenza A virus
TASTIHYPKVY

SEQ ID NO: 146467 - protein, 9 aa, Influenza A virus
TASTVHYPK

SEQ ID NO: 146468 - protein, 10 aa, Influenza A virus
TASTVHYPKV

SEQ ID NO: 146469 - protein, 11 aa, Influenza A virus
TASTVHYPKVY

SEQ ID NO: 146470 - protein, 8 aa, Influenza A virus
TATKRIQM

SEQ ID NO: 146471 - protein, 10 aa, Influenza A virus
TATKRIQMAI

SEQ ID NO: 146472 - protein, 10 aa, Influenza A virus
TATKRIRMAI

SEQ ID NO: 146473 - protein, 8 aa, Influenza A virus
TATKRLRM

SEQ ID NO: 146474 - protein, 10 aa, Influenza A virus
TATKRLRMAI

SEQ ID NO: 146475 - protein, 9 aa, Influenza A virus
TATLRKATR

SEQ ID NO: 146476 - protein, 10 aa, Influenza A virus
TATLRKATRR

SEQ ID NO: 146477 - protein, 9 aa, Influenza A virus
TAVTTHYPK

SEQ ID NO: 146478 - protein, 10 aa, Influenza A virus
TAVTTHYPKV

SEQ ID NO: 146479 - protein, 11 aa, Influenza A virus
TAVTTHYPKVY

SEQ ID NO: 146480 - protein, 10 aa, Influenza A virus
TDPLASLLEM

SEQ ID NO: 146481 - protein, 10 aa, Influenza A virus
TDPLSSLLEM

SEQ ID NO: 146482 - protein, 9 aa, Influenza A virus
TEDPGEGTA

SEQ ID NO: 146483 - protein, 8 aa, Influenza A virus
TEKLAITY

SEQ ID NO: 146484 - protein, 8 aa, Influenza A virus
TEKLTIIY

SEQ ID NO: 146485 - protein, 8 aa, Influenza A virus
TEKLTITY

SEQ ID NO: 146486 - protein, 8 aa, Influenza A virus
TEKVVVSI

SEQ ID NO: 146487 - protein, 8 aa, Influenza A virus
TEMSLRGI

SEQ ID NO: 146488 - protein, 10 aa, Influenza A virus
TEMSLRGIRI

SEQ ID NO: 146489 - protein, 10 aa, Influenza A virus
TEMSLRGIRV

SEQ ID NO: 146490 - protein, 8 aa, Influenza A virus
TEMSLRGL

SEQ ID NO: 146491 - protein, 10 aa, Influenza A virus
TEMSLRGLRV

SEQ ID NO: 146492 - protein, 8 aa, Influenza A virus
TEMSLRGV

SEQ ID NO: 146493 - protein, 10 aa, Influenza A virus
TEMSLRGVRV

SEQ ID NO: 146494 - protein, 8 aa, Influenza A virus
TEMSMRGI

SEQ ID NO: 146495 - protein, 10 aa, Influenza A virus
TEMSMRGIRV

SEQ ID NO: 146496 - protein, 8 aa, Influenza A virus
TEMSMRGL

SEQ ID NO: 146497 - protein, 10 aa, Influenza A virus
TEMSMRGLRV

SEQ ID NO: 146498 - protein, 8 aa, Influenza A virus
TEMSMRGV

SEQ ID NO: 146499 - protein, 10 aa, Influenza A virus
TEMSMRGVRI

SEQ ID NO: 146500 - protein, 10 aa, Influenza A virus
TEMSMRGVRV

SEQ ID NO: 146501 - protein, 8 aa, Influenza A virus
TERAVVSI

SEQ ID NO: 146502 - protein, 8 aa, Influenza A virus
TERIVVSI

SEQ ID NO: 146503 - protein, 8 aa, Influenza A virus
TERLTITY

SEQ ID NO: 146504 - protein, 8 aa, Influenza A virus
TERVVVSI

SEQ ID NO: 146505 - protein, 10 aa, Influenza A virus
TEVSLRGVRV

SEQ ID NO: 146506 - protein, 10 aa, Influenza A virus
TEVSMRGVRV

SEQ ID NO: 146507 - protein, 8 aa, Influenza A virus
TFGPVHFR

SEQ ID NO: 146508 - protein, 8 aa, Influenza A virus
TFGPVRFR

SEQ ID NO: 146509 - protein, 11 aa, Influenza A virus
TFKRTKGFSVK

SEQ ID NO: 146510 - protein, 10 aa, Influenza A virus
TFKRTSGSSF

SEQ ID NO: 146511 - protein, 11 aa, Influenza A virus
TFKRTSGTSVR

SEQ ID NO: 146512 - protein, 9 aa, Influenza A virus
TGIESAVLR

SEQ ID NO: 146513 - protein, 11 aa, Influenza A virus
TGIESAVLRGF

SEQ ID NO: 146514 - protein, 9 aa, Influenza A virus
TGMSLRGVR

SEQ ID NO: 146515 - protein, 11 aa, Influenza A virus
TGTVHYPKVYK

SEQ ID NO: 146516 - protein, 9 aa, Influenza A virus
TGVESAVLR

SEQ ID NO: 146517 - protein, 11 aa, Influenza A virus
TGVESAVLRGF

SEQ ID NO: 146518 - protein, 9 aa, Influenza A virus
THGTEKLTI

SEQ ID NO: 146519 - protein, 11 aa, Influenza A virus
THGTEKLTITY

SEQ ID NO: 146520 - protein, 9 aa, Influenza A virus
THGTERLTI

SEQ ID NO: 146521 - protein, 11 aa, Influenza A virus
THGTERLTITY

SEQ ID NO: 146522 - protein, 9 aa, Influenza A virus
THYPKVYKT

SEQ ID NO: 146523 - protein, 10 aa, Influenza A virus
THYPKVYKTY

SEQ ID NO: 146524 - protein, 11 aa, Influenza A virus
THYPKVYKTYF

SEQ ID NO: 146525 - protein, 9 aa, Influenza A virus
TIHYPKIYK

SEQ ID NO: 146526 - protein, 9 aa, Influenza A virus
TIHYPKVYK

SEQ ID NO: 146527 - protein, 9 aa, Influenza A virus
TIHYPKVYR

SEQ ID NO: 146528 - protein, 10 aa, Influenza A virus
TIHYPKVYRT

SEQ ID NO: 146529 - protein, 9 aa, Influenza A virus
TIIYSSSMM

SEQ ID NO: 146530 - protein, 10 aa, Influenza A virus
TIIYSSSMMW

SEQ ID NO: 146531 - protein, 9 aa, Influenza A virus
TILYNKIEF

SEQ ID NO: 146532 - protein, 9 aa, Influenza A virus
TILYNKMEF

SEQ ID NO: 146533 - protein, 10 aa, Influenza A virus
TINVRGSGMR

SEQ ID NO: 146534 - protein, 10 aa, Influenza A virus
TIQIIKLLPF

SEQ ID NO: 146535 - protein, 9 aa, Influenza A virus
TITYSSSLM

SEQ ID NO: 146536 - protein, 10 aa, Influenza A virus
TITYSSSLMW

SEQ ID NO: 146537 - protein, 11 aa, Influenza A virus
TITYSSSLMWE

SEQ ID NO: 146538 - protein, 10 aa, Influenza A virus
TITYSSSMMW

SEQ ID NO: 146539 - protein, 11 aa, Influenza A virus
TITYSSSMMWE

SEQ ID NO: 146540 - protein, 8 aa, Influenza A virus
TKRIRMAI

SEQ ID NO: 146541 - protein, 8 aa, Influenza A virus
TKRLRMAI

SEQ ID NO: 146542 - protein, 10 aa, Influenza A virus
TLAKGEKANV

SEQ ID NO: 146543 - protein, 8 aa, Influenza A virus
TLFQNWGI

SEQ ID NO: 146544 - protein, 11 aa, Influenza A virus
TLFQNWGIEPI

SEQ ID NO: 146545 - protein, 9 aa, Influenza A virus
TLFQQMRDV

SEQ ID NO: 146546 - protein, 10 aa, Influenza A virus
TLFQQMRDVI

SEQ ID NO: 146547 - protein, 10 aa, Influenza A virus
TLFQQMRDVL

SEQ ID NO: 146548 - protein, 9 aa, Influenza A virus
TLIGGTRMV

SEQ ID NO: 146549 - protein, 10 aa, Influenza A virus
TLIGGTRMVD

SEQ ID NO: 146550 - protein, 11 aa, Influenza A virus
TLIGGTRMVDI

SEQ ID NO: 146551 - protein, 10 aa, Influenza A virus
TLKIIVHEGY

SEQ ID NO: 146552 - protein, 10 aa, Influenza A virus
TLKIKVHEGY

SEQ ID NO: 146553 - protein, 10 aa, Influenza A virus
TLKIQIHEGY

SEQ ID NO: 146554 - protein, 10 aa, Influenza A virus
TLKIRVHDGY

SEQ ID NO: 146555 - protein, 9 aa, Influenza A virus
TLKIRVHEG

SEQ ID NO: 146556 - protein, 10 aa, Influenza A virus
TLKIRVHEGY

SEQ ID NO: 146557 - protein, 10 aa, Influenza A virus
TLKIRVNEGY

SEQ ID NO: 146558 - protein, 9 aa, Influenza A virus
TLKLKVHEG

SEQ ID NO: 146559 - protein, 10 aa, Influenza A virus
TLKLKVHEGF

SEQ ID NO: 146560 - protein, 10 aa, Influenza A virus
TLKLKVHEGY

SEQ ID NO: 146561 - protein, 10 aa, Influenza A virus
TLKLNVHEGY

SEQ ID NO: 146562 - protein, 9 aa, Influenza A virus
TLKLRVHEG

SEQ ID NO: 146563 - protein, 10 aa, Influenza A virus
TLKLRVHEGY

SEQ ID NO: 146564 - protein, 10 aa, Influenza A virus
TLKLTVHEGY

SEQ ID NO: 146565 - protein, 9 aa, Influenza A virus
TLRKATRRL

SEQ ID NO: 146566 - protein, 10 aa, Influenza A virus
TLTSESQLTI

SEQ ID NO: 146567 - protein, 9 aa, Influenza A virus
TLWSKANDA

SEQ ID NO: 146568 - protein, 9 aa, Influenza A virus
TLWSKINDA

SEQ ID NO: 146569 - protein, 9 aa, Influenza A virus
TLWSKMNDA

SEQ ID NO: 146570 - protein, 9 aa, Influenza A virus
TLWSKMSDA

SEQ ID NO: 146571 - protein, 9 aa, Influenza A virus
TLWSKTNDA

SEQ ID NO: 146572 - protein, 9 aa, Influenza A virus
TLWSKTSDA

SEQ ID NO: 146573 - protein, 9 aa, Influenza A virus
TLWSKVNDA

SEQ ID NO: 146574 - protein, 9 aa, Influenza A virus
TLWSNTNDA

SEQ ID NO: 146575 - protein, 9 aa, Influenza A virus
TLWSRTSDA

SEQ ID NO: 146576 - protein, 8 aa, Influenza A virus
TLYNKMEF

SEQ ID NO: 146577 - protein, 11 aa, Influenza A virus
TLYNKMEFEPF

SEQ ID NO: 146578 - protein, 9 aa, Influenza A virus
TMLYNKIEF

SEQ ID NO: 146579 - protein, 9 aa, Influenza A virus
TMLYNKLEF

SEQ ID NO: 146580 - protein, 9 aa, Influenza A virus
TMLYNKMEF

SEQ ID NO: 146581 - protein, 9 aa, Influenza A virus
TMVGKKATA

SEQ ID NO: 146582 - protein, 10 aa, Influenza A virus
TMVGKKATAI

SEQ ID NO: 146583 - protein, 9 aa, Influenza A virus
TMVGKRATA

SEQ ID NO: 146584 - protein, 10 aa, Influenza A virus
TMVGKRATAI

SEQ ID NO: 146585 - protein, 11 aa, Influenza A virus
TMVGKRATAIV

SEQ ID NO: 146586 - protein, 11 aa, Influenza A virus
TMVGKRATATL

SEQ ID NO: 146587 - protein, 9 aa, Influenza A virus
TMVGRRATA

SEQ ID NO: 146588 - protein, 10 aa, Influenza A virus
TMVGRRATAI

SEQ ID NO: 146589 - protein, 11 aa, Influenza A virus
TNTVHYPKIYK

SEQ ID NO: 146590 - protein, 11 aa, Influenza A virus
TNTVHYPKVYK

SEQ ID NO: 146591 - protein, 8 aa, Influenza A virus
TPNAEMSL

SEQ ID NO: 146592 - protein, 9 aa, Influenza A virus
TPNAEMSLR

SEQ ID NO: 146593 - protein, 8 aa, Influenza A virus
TPNTEMSL

SEQ ID NO: 146594 - protein, 9 aa, Influenza A virus
TPNTEMSLR

SEQ ID NO: 146595 - protein, 8 aa, Influenza A virus
TPSAEMSL

SEQ ID NO: 146596 - protein, 9 aa, Influenza A virus
TPSAEMSLR

SEQ ID NO: 146597 - protein, 8 aa, Influenza A virus
TPSIEMSM

SEQ ID NO: 146598 - protein, 9 aa, Influenza A virus
TPSIEMSMR

SEQ ID NO: 146599 - protein, 8 aa, Influenza A virus
TPSTEMSL

SEQ ID NO: 146600 - protein, 9 aa, Influenza A virus
TPSTEMSLR

SEQ ID NO: 146601 - protein, 9 aa, Influenza A virus
TPSTEMSMR

SEQ ID NO: 146602 - protein, 11 aa, Influenza A virus
TPSTEMSMRGL

SEQ ID NO: 146603 - protein, 8 aa, Influenza A virus
TPSTEVSL

SEQ ID NO: 146604 - protein, 9 aa, Influenza A virus
TPSTEVSLR

SEQ ID NO: 146605 - protein, 8 aa, Influenza A virus
TPSTGMSL

SEQ ID NO: 146606 - protein, 9 aa, Influenza A virus
TPSTGMSLR

SEQ ID NO: 146607 - protein, 8 aa, Influenza A virus
TPSTVMSM

SEQ ID NO: 146608 - protein, 9 aa, Influenza A virus
TPSTVMSMR

SEQ ID NO: 146609 - protein, 10 aa, Influenza A virus
TQGACWEQLY

SEQ ID NO: 146610 - protein, 11 aa, Influenza A virus
TQGMEKLTITY

SEQ ID NO: 146611 - protein, 10 aa, Influenza A virus
TQGTCWEQLY

SEQ ID NO: 146612 - protein, 9 aa, Influenza A virus
TQGTCWEQM

SEQ ID NO: 146613 - protein, 10 aa, Influenza A virus
TQGTCWEQMY

SEQ ID NO: 146614 - protein, 11 aa, Influenza A virus
TQGTERLTITY

SEQ ID NO: 146615 - protein, 8 aa, Influenza A virus
TQIGGIKM

SEQ ID NO: 146616 - protein, 9 aa, Influenza A virus
TQIGGIKMV

SEQ ID NO: 146617 - protein, 8 aa, Influenza A virus
TQIGGIRM

SEQ ID NO: 146618 - protein, 9 aa, Influenza A virus
TQIGGIRMV

SEQ ID NO: 146619 - protein, 11 aa, Influenza A virus
TQIGGIRMVEI

SEQ ID NO: 146620 - protein, 11 aa, Influenza A virus
TQIGGIRMVNI

SEQ ID NO: 146621 - protein, 8 aa, Influenza A virus
TQIGGLRM

SEQ ID NO: 146622 - protein, 9 aa, Influenza A virus
TQIGGLRMV

SEQ ID NO: 146623 - protein, 8 aa, Influenza A virus
TQIGGTKM

SEQ ID NO: 146624 - protein, 9 aa, Influenza A virus
TQIGGTKMV

SEQ ID NO: 146625 - protein, 8 aa, Influenza A virus
TQIGGTRM

SEQ ID NO: 146626 - protein, 9 aa, Influenza A virus
TQIGGTRMM

SEQ ID NO: 146627 - protein, 9 aa, Influenza A virus
TQIGGTRMV

SEQ ID NO: 146628 - protein, 8 aa, Influenza A virus
TQIGGVRM

SEQ ID NO: 146629 - protein, 9 aa, Influenza A virus
TQIGGVRMV

SEQ ID NO: 146630 - protein, 9 aa, Influenza A virus
TQIIKLLPF

SEQ ID NO: 146631 - protein, 10 aa, Influenza A virus
TQIIKLLPFA

SEQ ID NO: 146632 - protein, 9 aa, Influenza A virus
TQMIKLLPF

SEQ ID NO: 146633 - protein, 10 aa, Influenza A virus
TQMIKLLPFA

SEQ ID NO: 146634 - protein, 11 aa, Influenza A virus
TQMIKLLPFAA

SEQ ID NO: 146635 - protein, 9 aa, Influenza A virus
TQRLVQLII

SEQ ID NO: 146636 - protein, 10 aa, Influenza A virus
TREILTKTTV

SEQ ID NO: 146637 - protein, 10 aa, Influenza A virus
TREILTRTTV

SEQ ID NO: 146638 - protein, 10 aa, Influenza A virus
TREILTTTTV

SEQ ID NO: 146639 - protein, 10 aa, Influenza A virus
TRGILTRTTV

SEQ ID NO: 146640 - protein, 10 aa, Influenza A virus
TRGQYSGFVR

SEQ ID NO: 146641 - protein, 9 aa, Influenza A virus
TRKLIQLIV

SEQ ID NO: 146642 - protein, 9 aa, Influenza A virus
TRRLIQLIV

SEQ ID NO: 146643 - protein, 9 aa, Influenza A virus
TRRLVQLIV

SEQ ID NO: 146644 - protein, 9 aa, Influenza A virus
TRRMIQLIV

SEQ ID NO: 146645 - protein, 9 aa, Influenza A virus
TRSQYSGFV

SEQ ID NO: 146646 - protein, 10 aa, Influenza A virus
TRSQYSGFVR

SEQ ID NO: 146647 - protein, 9 aa, Influenza A virus
TRTTVDHMA

SEQ ID NO: 146648 - protein, 10 aa, Influenza A virus
TRTTVDHMAI

SEQ ID NO: 146649 - protein, 8 aa, Influenza A virus
TSAVHYPK

SEQ ID NO: 146650 - protein, 9 aa, Influenza A virus
TSAVHYPKI

SEQ ID NO: 146651 - protein, 10 aa, Influenza A virus
TSAVHYPKIY

SEQ ID NO: 146652 - protein, 11 aa, Influenza A virus
TSAVHYPKIYK

SEQ ID NO: 146653 - protein, 9 aa, Influenza A virus
TSAVHYPKV

SEQ ID NO: 146654 - protein, 10 aa, Influenza A virus
TSAVHYPKVY

SEQ ID NO: 146655 - protein, 11 aa, Influenza A virus
TSAVHYPKVYK

SEQ ID NO: 146656 - protein, 8 aa, Influenza A virus
TSAVYYPK

SEQ ID NO: 146657 - protein, 9 aa, Influenza A virus
TSAVYYPKV

SEQ ID NO: 146658 - protein, 10 aa, Influenza A virus
TSAVYYPKVY

SEQ ID NO: 146659 - protein, 11 aa, Influenza A virus
TSAVYYPKVYK

SEQ ID NO: 146660 - protein, 9 aa, Influenza A virus
TSDAGSDRV

SEQ ID NO: 146661 - protein, 10 aa, Influenza A virus
TSDAGSDRVM

SEQ ID NO: 146662 - protein, 8 aa, Influenza A virus
TSDSQLTI

SEQ ID NO: 146663 - protein, 10 aa, Influenza A virus
TSDSQLTITK

SEQ ID NO: 146664 - protein, 10 aa, Influenza A virus
TSESQLMITK

SEQ ID NO: 146665 - protein, 10 aa, Influenza A virus
TSESQLMVTK

SEQ ID NO: 146666 - protein, 10 aa, Influenza A virus
TSESQLPITK

SEQ ID NO: 146667 - protein, 10 aa, Influenza A virus
TSESQLTITK

SEQ ID NO: 146668 - protein, 10 aa, Influenza A virus
TSESQLTITR

SEQ ID NO: 146669 - protein, 10 aa, Influenza A virus
TSESQLTTTK

SEQ ID NO: 146670 - protein, 9 aa, Influenza A virus
TSGSSVNRK

SEQ ID NO: 146671 - protein, 10 aa, Influenza A virus
TSGVESAVLR

SEQ ID NO: 146672 - protein, 9 aa, Influenza A virus
TSSIYIEVL

SEQ ID NO: 146673 - protein, 9 aa, Influenza A virus
TSSMYIEVL

SEQ ID NO: 146674 - protein, 9 aa, Influenza A virus
TSSTEMSMR

SEQ ID NO: 146675 - protein, 9 aa, Influenza A virus
TSSVYIEVL

SEQ ID NO: 146676 - protein, 9 aa, Influenza A virus
TSSVYVEVL

SEQ ID NO: 146677 - protein, 9 aa, Influenza A virus
TSTAHYPKV

SEQ ID NO: 146678 - protein, 10 aa, Influenza A virus
TSTAHYPKVY

SEQ ID NO: 146679 - protein, 11 aa, Influenza A virus
TSTAHYPKVYK

SEQ ID NO: 146680 - protein, 8 aa, Influenza A virus
TSTIHYPK

SEQ ID NO: 146681 - protein, 9 aa, Influenza A virus
TSTIHYPKI

SEQ ID NO: 146682 - protein, 10 aa, Influenza A virus
TSTIHYPKIY

SEQ ID NO: 146683 - protein, 11 aa, Influenza A virus
TSTIHYPKIYK

SEQ ID NO: 146684 - protein, 9 aa, Influenza A virus
TSTIHYPKV

SEQ ID NO: 146685 - protein, 10 aa, Influenza A virus
TSTIHYPKVY

SEQ ID NO: 146686 - protein, 11 aa, Influenza A virus
TSTIHYPKVYK

SEQ ID NO: 146687 - protein, 9 aa, Influenza A virus
TSTVHYPKI

SEQ ID NO: 146688 - protein, 10 aa, Influenza A virus
TSTVHYPKIY

SEQ ID NO: 146689 - protein, 11 aa, Influenza A virus
TSTVHYPKIYK

SEQ ID NO: 146690 - protein, 9 aa, Influenza A virus
TSTVHYPKV

SEQ ID NO: 146691 - protein, 10 aa, Influenza A virus
TSTVHYPKVY

SEQ ID NO: 146692 - protein, 11 aa, Influenza A virus
TSTVHYPKVYK

SEQ ID NO: 146693 - protein, 10 aa, Influenza A virus
TTGIESAVLR

SEQ ID NO: 146694 - protein, 11 aa, Influenza A virus
TTGIESAVLRG

SEQ ID NO: 146695 - protein, 10 aa, Influenza A virus
TTGVESAVLR

SEQ ID NO: 146696 - protein, 9 aa, Influenza A virus
TTHYPKVYK

SEQ ID NO: 146697 - protein, 9 aa, Influenza A virus
TTKRLTILG

SEQ ID NO: 146698 - protein, 10 aa, Influenza A virus
TTKRLTILGK

SEQ ID NO: 146699 - protein, 9 aa, Influenza A virus
TTKRLTVLG

SEQ ID NO: 146700 - protein, 10 aa, Influenza A virus
TTKRLTVLGK

SEQ ID NO: 146701 - protein, 10 aa, Influenza A virus
TTQIIKLLPF

SEQ ID NO: 146702 - protein, 10 aa, Influenza A virus
TTQMIKLLPF

SEQ ID NO: 146703 - protein, 11 aa, Influenza A virus
TTQMIKLLPFA

SEQ ID NO: 146704 - protein, 9 aa, Influenza A virus
TTRRLIQLI

SEQ ID NO: 146705 - protein, 10 aa, Influenza A virus
TTRRLIQLIV

SEQ ID NO: 146706 - protein, 9 aa, Influenza A virus
TTSAVHYPK

SEQ ID NO: 146707 - protein, 10 aa, Influenza A virus
TTSAVHYPKI

SEQ ID NO: 146708 - protein, 11 aa, Influenza A virus
TTSAVHYPKIY

SEQ ID NO: 146709 - protein, 10 aa, Influenza A virus
TTSAVHYPKV

SEQ ID NO: 146710 - protein, 11 aa, Influenza A virus
TTSAVHYPKVY

SEQ ID NO: 146711 - protein, 9 aa, Influenza A virus
TTSAVYYPK

SEQ ID NO: 146712 - protein, 10 aa, Influenza A virus
TTSAVYYPKV

SEQ ID NO: 146713 - protein, 11 aa, Influenza A virus
TTSAVYYPKVY

SEQ ID NO: 146714 - protein, 9 aa, Influenza A virus
TTSTAHYPK

SEQ ID NO: 146715 - protein, 10 aa, Influenza A virus
TTSTAHYPKV

SEQ ID NO: 146716 - protein, 11 aa, Influenza A virus
TTSTAHYPKVY

SEQ ID NO: 146717 - protein, 9 aa, Influenza A virus
TTSTIHYPK

SEQ ID NO: 146718 - protein, 10 aa, Influenza A virus
TTSTIHYPKV

SEQ ID NO: 146719 - protein, 11 aa, Influenza A virus
TTSTIHYPKVY

SEQ ID NO: 146720 - protein, 9 aa, Influenza A virus
TTSTVHYPK

SEQ ID NO: 146721 - protein, 10 aa, Influenza A virus
TTSTVHYPKI

SEQ ID NO: 146722 - protein, 11 aa, Influenza A virus
TTSTVHYPKIY

SEQ ID NO: 146723 - protein, 10 aa, Influenza A virus
TTSTVHYPKV

SEQ ID NO: 146724 - protein, 11 aa, Influenza A virus
TTSTVHYPKVY

SEQ ID NO: 146725 - protein, 9 aa, Influenza A virus
TTTTVDHMA

SEQ ID NO: 146726 - protein, 10 aa, Influenza A virus
TTTTVDHMAI

SEQ ID NO: 146727 - protein, 9 aa, Influenza A virus
TTTVDHMAI

SEQ ID NO: 146728 - protein, 10 aa, Influenza A virus
TTTVDHMAII

SEQ ID NO: 146729 - protein, 11 aa, Influenza A virus
TTTVDHMAIIK

SEQ ID NO: 146730 - protein, 9 aa, Influenza A virus
TTVDHMAII

SEQ ID NO: 146731 - protein, 10 aa, Influenza A virus
TTVDHMAIIK

SEQ ID NO: 146732 - protein, 11 aa, Influenza A virus
TTVDHMAIIKK

SEQ ID NO: 146733 - protein, 11 aa, Influenza A virus
TTVDHMAIIKR

SEQ ID NO: 146734 - protein, 9 aa, Influenza A virus
TTYFEKVER

SEQ ID NO: 146735 - protein, 10 aa, Influenza A virus
TTYFEKVERL

SEQ ID NO: 146736 - protein, 11 aa, Influenza A virus
TTYFEKVERLK

SEQ ID NO: 146737 - protein, 9 aa, Influenza A virus
TVDHMAIIK

SEQ ID NO: 146738 - protein, 10 aa, Influenza A virus
TVDHMAIIKK

SEQ ID NO: 146739 - protein, 10 aa, Influenza A virus
TVDHMAIIKR

SEQ ID NO: 146740 - protein, 11 aa, Influenza A virus
TVDHMAIIKRY

SEQ ID NO: 146741 - protein, 9 aa, Influenza A virus
TVHEGYEEF

SEQ ID NO: 146742 - protein, 9 aa, Influenza A virus
TVHYPKIYK

SEQ ID NO: 146743 - protein, 10 aa, Influenza A virus
TVHYPKIYKT

SEQ ID NO: 146744 - protein, 9 aa, Influenza A virus
TVHYPKVHK

SEQ ID NO: 146745 - protein, 9 aa, Influenza A virus
TVHYPKVYK

SEQ ID NO: 146746 - protein, 11 aa, Influenza A virus
TVHYPKVYNTY

SEQ ID NO: 146747 - protein, 9 aa, Influenza A virus
TVHYPKVYR

SEQ ID NO: 146748 - protein, 10 aa, Influenza A virus
TVHYPKVYRT

SEQ ID NO: 146749 - protein, 11 aa, Influenza A virus
TVHYPKVYTTY

SEQ ID NO: 146750 - protein, 9 aa, Influenza A virus
TVKIQWSQS

SEQ ID NO: 146751 - protein, 9 aa, Influenza A virus
TVKIQWSQV

SEQ ID NO: 146752 - protein, 11 aa, Influenza A virus
TVLGKDAGALR

SEQ ID NO: 146753 - protein, 9 aa, Influenza A virus
TVLYNKMEF

SEQ ID NO: 146754 - protein, 9 aa, Influenza A virus
TVMSMRGVR

SEQ ID NO: 146755 - protein, 10 aa, Influenza A virus
TVMSMRGVRV

SEQ ID NO: 146756 - protein, 10 aa, Influenza A virus
TVNVRGSGMR

SEQ ID NO: 146757 - protein, 10 aa, Influenza A virus
TVQIIKLLPF

SEQ ID NO: 146758 - protein, 10 aa, Influenza A virus
TVQIINLLPF

SEQ ID NO: 146759 - protein, 10 aa, Influenza A virus
TVSADPLASL

SEQ ID NO: 146760 - protein, 11 aa, Influenza A virus
TVSADPLASLL

SEQ ID NO: 146761 - protein, 10 aa, Influenza A virus
TVSTDPLASL

SEQ ID NO: 146762 - protein, 10 aa, Influenza A virus
TVSTDPLSSL

SEQ ID NO: 146763 - protein, 11 aa, Influenza A virus
TVSTDPLSSLL

SEQ ID NO: 146764 - protein, 9 aa, Influenza A virus
TWWNRNGPI

SEQ ID NO: 146765 - protein, 9 aa, Influenza A virus
TWWNRNGPM

SEQ ID NO: 146766 - protein, 9 aa, Influenza A virus
TWWNRNGPV

SEQ ID NO: 146767 - protein, 8 aa, Influenza A virus
TYFDKVER

SEQ ID NO: 146768 - protein, 9 aa, Influenza A virus
TYFDKVERL

SEQ ID NO: 146769 - protein, 10 aa, Influenza A virus
TYFDKVERLK

SEQ ID NO: 146770 - protein, 8 aa, Influenza A virus
TYFEKAER

SEQ ID NO: 146771 - protein, 9 aa, Influenza A virus
TYFEKAERL

SEQ ID NO: 146772 - protein, 10 aa, Influenza A virus
TYFEKAERLK

SEQ ID NO: 146773 - protein, 8 aa, Influenza A virus
TYFEKIER

SEQ ID NO: 146774 - protein, 9 aa, Influenza A virus
TYFEKIERL

SEQ ID NO: 146775 - protein, 10 aa, Influenza A virus
TYFEKIERLK

SEQ ID NO: 146776 - protein, 8 aa, Influenza A virus
TYFEKVER

SEQ ID NO: 146777 - protein, 9 aa, Influenza A virus
TYFEKVERL

SEQ ID NO: 146778 - protein, 10 aa, Influenza A virus
TYFEKVERLK

SEQ ID NO: 146779 - protein, 11 aa, Influenza A virus
TYFEKVERLKR

SEQ ID NO: 146780 - protein, 10 aa, Influenza A virus
TYFEKVERLR

SEQ ID NO: 146781 - protein, 9 aa, Influenza A virus
TYFEKVERM

SEQ ID NO: 146782 - protein, 10 aa, Influenza A virus
TYFEKVERMK

SEQ ID NO: 146783 - protein, 8 aa, Influenza A virus
TYFEKVGR

SEQ ID NO: 146784 - protein, 9 aa, Influenza A virus
TYFEKVGRL

SEQ ID NO: 146785 - protein, 10 aa, Influenza A virus
TYFEKVGRLK

SEQ ID NO: 146786 - protein, 8 aa, Influenza A virus
TYFERVER

SEQ ID NO: 146787 - protein, 9 aa, Influenza A virus
TYFERVERL

SEQ ID NO: 146788 - protein, 10 aa, Influenza A virus
TYFERVERLK

SEQ ID NO: 146789 - protein, 9 aa, Influenza A virus
TYQWIIKNW

SEQ ID NO: 146790 - protein, 9 aa, Influenza A virus
TYQWIIRNW

SEQ ID NO: 146791 - protein, 11 aa, Influenza A virus
TYQWIIRNWEI

SEQ ID NO: 146792 - protein, 11 aa, Influenza A virus
TYQWIIRNWEM

SEQ ID NO: 146793 - protein, 9 aa, Influenza A virus
TYQWVIRNW

SEQ ID NO: 146794 - protein, 8 aa, Influenza A virus
TYSSSLMW

SEQ ID NO: 146795 - protein, 10 aa, Influenza A virus
TYSSSLMWEI

SEQ ID NO: 146796 - protein, 8 aa, Influenza A virus
TYSSSMMW

SEQ ID NO: 146797 - protein, 10 aa, Influenza A virus
TYSSSMMWEI

SEQ ID NO: 146798 - protein, 10 aa, Influenza A virus
TYSSSMMWEV

SEQ ID NO: 146799 - protein, 9 aa, Influenza A virus
VAARNIVRR

SEQ ID NO: 146800 - protein, 9 aa, Influenza A virus
VAEAIIVAM

SEQ ID NO: 146801 - protein, 10 aa, Influenza A virus
VAEAIIVAMV

SEQ ID NO: 146802 - protein, 9 aa, Influenza A virus
VAGGTSSIY

SEQ ID NO: 146803 - protein, 8 aa, Influenza A virus
VAGGTSSM

SEQ ID NO: 146804 - protein, 9 aa, Influenza A virus
VAGGTSSMY

SEQ ID NO: 146805 - protein, 9 aa, Influenza A virus
VAGGTSSVY

SEQ ID NO: 146806 - protein, 9 aa, Influenza A virus
VANTIHYPK

SEQ ID NO: 146807 - protein, 9 aa, Influenza A virus
VASTIHYPK

SEQ ID NO: 146808 - protein, 11 aa, Influenza A virus
VASTIHYPKIY

SEQ ID NO: 146809 - protein, 9 aa, Influenza A virus
VASTVHYPK

SEQ ID NO: 146810 - protein, 11 aa, Influenza A virus
VASTVHYPKIY

SEQ ID NO: 146811 - protein, 9 aa, Influenza A virus
VAYILEREL

SEQ ID NO: 146812 - protein, 9 aa, Influenza A virus
VAYMFEREL

SEQ ID NO: 146813 - protein, 10 aa, Influenza A virus
VAYMFERELV

SEQ ID NO: 146814 - protein, 11 aa, Influenza A virus
VAYMFERELVR

SEQ ID NO: 146815 - protein, 9 aa, Influenza A virus
VAYMLEREL

SEQ ID NO: 146816 - protein, 10 aa, Influenza A virus
VAYMLERELV

SEQ ID NO: 146817 - protein, 11 aa, Influenza A virus
VAYMLERELVR

SEQ ID NO: 146818 - protein, 10 aa, Influenza A virus
VDEYSSAEKI

SEQ ID NO: 146819 - protein, 10 aa, Influenza A virus
VDQSLIIAAR

SEQ ID NO: 146820 - protein, 10 aa, Influenza A virus
VDQSLIVAAR

SEQ ID NO: 146821 - protein, 10 aa, Influenza A virus
VDQSLVIAAR

SEQ ID NO: 146822 - protein, 8 aa, Influenza A virus
VEAIIVAM

SEQ ID NO: 146823 - protein, 9 aa, Influenza A virus
VEAIIVAMV

SEQ ID NO: 146824 - protein, 10 aa, Influenza A virus
VEAIIVAMVF

SEQ ID NO: 146825 - protein, 8 aa, Influenza A virus
VEAIVVAM

SEQ ID NO: 146826 - protein, 9 aa, Influenza A virus
VEAIVVAMV

SEQ ID NO: 146827 - protein, 10 aa, Influenza A virus
VEAIVVAMVF

SEQ ID NO: 146828 - protein, 8 aa, Influenza A virus
VEICKAAM

SEQ ID NO: 146829 - protein, 10 aa, Influenza A virus
VEICKAAMGL

SEQ ID NO: 146830 - protein, 10 aa, Influenza A virus
VEPIDNVMGM

SEQ ID NO: 146831 - protein, 9 aa, Influenza A virus
VERLKHGTF

SEQ ID NO: 146832 - protein, 9 aa, Influenza A virus
VERLKNGTF

SEQ ID NO: 146833 - protein, 9 aa, Influenza A virus
VERLKRGTF

SEQ ID NO: 146834 - protein, 9 aa, Influenza A virus
VERLRHGTF

SEQ ID NO: 146835 - protein, 9 aa, Influenza A virus
VERMKHGTF

SEQ ID NO: 146836 - protein, 9 aa, Influenza A virus
VESAVLRGF

SEQ ID NO: 146837 - protein, 10 aa, Influenza A virus
VESAVLRGFL

SEQ ID NO: 146838 - protein, 11 aa, Influenza A virus
VESAVLRGFLI

SEQ ID NO: 146839 - protein, 9 aa, Influenza A virus
VESAVLRGI

SEQ ID NO: 146840 - protein, 11 aa, Influenza A virus
VESAVLRGIPI

SEQ ID NO: 146841 - protein, 9 aa, Influenza A virus
VFNYNKATK

SEQ ID NO: 146842 - protein, 10 aa, Influenza A virus
VFNYNKATKR

SEQ ID NO: 146843 - protein, 10 aa, Influenza A virus
VFNYNKGTKR

SEQ ID NO: 146844 - protein, 9 aa, Influenza A virus
VFNYNKSTK

SEQ ID NO: 146845 - protein, 10 aa, Influenza A virus
VFNYNKSTKR

SEQ ID NO: 146846 - protein, 9 aa, Influenza A virus
VFNYNKTTK

SEQ ID NO: 146847 - protein, 10 aa, Influenza A virus
VFNYNKTTKR

SEQ ID NO: 146848 - protein, 9 aa, Influenza A virus
VFNYNKVTK

SEQ ID NO: 146849 - protein, 10 aa, Influenza A virus
VFNYNKVTKR

SEQ ID NO: 146850 - protein, 9 aa, Influenza A virus
VFNYNRTTK

SEQ ID NO: 146851 - protein, 10 aa, Influenza A virus
VFNYNRTTKR

SEQ ID NO: 146852 - protein, 9 aa, Influenza A virus
VFNYSKATK

SEQ ID NO: 146853 - protein, 10 aa, Influenza A virus
VFNYSKATKR

SEQ ID NO: 146854 - protein, 10 aa, Influenza A virus
VFPNEVGAKI

SEQ ID NO: 146855 - protein, 10 aa, Influenza A virus
VFPNEVGAQL

SEQ ID NO: 146856 - protein, 11 aa, Influenza A virus
VFPNEVGAQLL

SEQ ID NO: 146857 - protein, 10 aa, Influenza A virus
VFPNEVGARI

SEQ ID NO: 146858 - protein, 11 aa, Influenza A virus
VFPNEVGARTL

SEQ ID NO: 146859 - protein, 11 aa, Influenza A virus
VGICKAAMGLR

SEQ ID NO: 146860 - protein, 10 aa, Influenza A virus
VGKKATAILR

SEQ ID NO: 146861 - protein, 10 aa, Influenza A virus
VGKRATAIIR

SEQ ID NO: 146862 - protein, 10 aa, Influenza A virus
VGKRATAILK

SEQ ID NO: 146863 - protein, 10 aa, Influenza A virus
VGKRATAILR

SEQ ID NO: 146864 - protein, 10 aa, Influenza A virus
VGKRATAIVR

SEQ ID NO: 146865 - protein, 10 aa, Influenza A virus
VGKRATATLR

SEQ ID NO: 146866 - protein, 10 aa, Influenza A virus
VGQSLIIAAR

SEQ ID NO: 146867 - protein, 9 aa, Influenza A virus
VGRLKHGTF

SEQ ID NO: 146868 - protein, 9 aa, Influenza A virus
VGRRATAIL

SEQ ID NO: 146869 - protein, 10 aa, Influenza A virus
VGRRATAILR

SEQ ID NO: 146870 - protein, 10 aa, Influenza A virus
VHDGYEEFTM

SEQ ID NO: 146871 - protein, 10 aa, Influenza A virus
VHEGFEEFTM

SEQ ID NO: 146872 - protein, 10 aa, Influenza A virus
VHEGYEEFTI

SEQ ID NO: 146873 - protein, 10 aa, Influenza A virus
VHEGYEEFTM

SEQ ID NO: 146874 - protein, 9 aa, Influenza A virus
VHFGNQVKI

SEQ ID NO: 146875 - protein, 10 aa, Influenza A virus
VHFRNHVKIR

SEQ ID NO: 146876 - protein, 9 aa, Influenza A virus
VHFRNQIKI

SEQ ID NO: 146877 - protein, 9 aa, Influenza A virus
VHFRNQVKI

SEQ ID NO: 146878 - protein, 11 aa, Influenza A virus
VHKTYFEKVER

SEQ ID NO: 146879 - protein, 10 aa, Influenza A virus
VHYPKIYKTY

SEQ ID NO: 146880 - protein, 11 aa, Influenza A virus
VHYPKIYKTYF

SEQ ID NO: 146881 - protein, 10 aa, Influenza A virus
VHYPKVHKTY

SEQ ID NO: 146882 - protein, 11 aa, Influenza A virus
VHYPKVHKTYF

SEQ ID NO: 146883 - protein, 10 aa, Influenza A virus
VHYPKVYKPY

SEQ ID NO: 146884 - protein, 11 aa, Influenza A virus
VHYPKVYKPYF

SEQ ID NO: 146885 - protein, 10 aa, Influenza A virus
VHYPKVYKTY

SEQ ID NO: 146886 - protein, 11 aa, Influenza A virus
VHYPKVYKTYF

SEQ ID NO: 146887 - protein, 10 aa, Influenza A virus
VHYPKVYNTY

SEQ ID NO: 146888 - protein, 11 aa, Influenza A virus
VHYPKVYNTYF

SEQ ID NO: 146889 - protein, 8 aa, Influenza A virus
VHYPKVYR

SEQ ID NO: 146890 - protein, 10 aa, Influenza A virus
VHYPKVYRTY

SEQ ID NO: 146891 - protein, 11 aa, Influenza A virus
VHYPKVYRTYF

SEQ ID NO: 146892 - protein, 9 aa, Influenza A virus
VHYPKVYTT

SEQ ID NO: 146893 - protein, 10 aa, Influenza A virus
VHYPKVYTTY

SEQ ID NO: 146894 - protein, 11 aa, Influenza A virus
VHYPKVYTTYF

SEQ ID NO: 146895 - protein, 9 aa, Influenza A virus
VIAARNIVR

SEQ ID NO: 146896 - protein, 10 aa, Influenza A virus
VIAARNIVRR

SEQ ID NO: 146897 - protein, 11 aa, Influenza A virus
VIMEVVFPNEV

SEQ ID NO: 146898 - protein, 9 aa, Influenza A virus
VIQSMIIAA

SEQ ID NO: 146899 - protein, 10 aa, Influenza A virus
VIQSMIIAAR

SEQ ID NO: 146900 - protein, 9 aa, Influenza A virus
VIRNWETVK

SEQ ID NO: 146901 - protein, 10 aa, Influenza A virus
VKAVRGDLNF

SEQ ID NO: 146902 - protein, 11 aa, Influenza A virus
VKIQWSHNPTM

SEQ ID NO: 146903 - protein, 11 aa, Influenza A virus
VKIQWSQDPTM

SEQ ID NO: 146904 - protein, 11 aa, Influenza A virus
VKIQWSQEPTM

SEQ ID NO: 146905 - protein, 11 aa, Influenza A virus
VKIQWSQNPAM

SEQ ID NO: 146906 - protein, 11 aa, Influenza A virus
VKIQWSQNPTM

SEQ ID NO: 146907 - protein, 11 aa, Influenza A virus
VKIQWSQSPTM

SEQ ID NO: 146908 - protein, 9 aa, Influenza A virus
VKIRRRVDM

SEQ ID NO: 146909 - protein, 8 aa, Influenza A virus
VLFLNWGI

SEQ ID NO: 146910 - protein, 11 aa, Influenza A virus
VLFLNWGIEHI

SEQ ID NO: 146911 - protein, 11 aa, Influenza A virus
VLFLNWGIEPI

SEQ ID NO: 146912 - protein, 8 aa, Influenza A virus
VLFQNWGI

SEQ ID NO: 146913 - protein, 11 aa, Influenza A virus
VLFQNWGIEHI

SEQ ID NO: 146914 - protein, 11 aa, Influenza A virus
VLFQNWGIEPI

SEQ ID NO: 146915 - protein, 10 aa, Influenza A virus
VLFQNWGIET

SEQ ID NO: 146916 - protein, 11 aa, Influenza A virus
VLFQNWGIETI

SEQ ID NO: 146917 - protein, 8 aa, Influenza A virus
VLFQNWGV

SEQ ID NO: 146918 - protein, 11 aa, Influenza A virus
VLFQNWGVEPI

SEQ ID NO: 146919 - protein, 8 aa, Influenza A virus
VLFQSWGI

SEQ ID NO: 146920 - protein, 11 aa, Influenza A virus
VLFQSWGIEPI

SEQ ID NO: 146921 - protein, 10 aa, Influenza A virus
VLGKDAGALI

SEQ ID NO: 146922 - protein, 10 aa, Influenza A virus
VLGKDAGALM

SEQ ID NO: 146923 - protein, 10 aa, Influenza A virus
VLGKDAGALR

SEQ ID NO: 146924 - protein, 9 aa, Influenza A virus
VLGKDAGPL

SEQ ID NO: 146925 - protein, 10 aa, Influenza A virus
VLGTFDTAQI

SEQ ID NO: 146926 - protein, 10 aa, Influenza A virus
VLGTFDTIQI

SEQ ID NO: 146927 - protein, 11 aa, Influenza A virus
VLGTFDTIQII

SEQ ID NO: 146928 - protein, 10 aa, Influenza A virus
VLGTFDTTQI

SEQ ID NO: 146929 - protein, 11 aa, Influenza A virus
VLGTFDTTQII

SEQ ID NO: 146930 - protein, 11 aa, Influenza A virus
VLGTFDTTQMI

SEQ ID NO: 146931 - protein, 8 aa, Influenza A virus
VLGTFDTV

SEQ ID NO: 146932 - protein, 10 aa, Influenza A virus
VLGTFDTVQI

SEQ ID NO: 146933 - protein, 11 aa, Influenza A virus
VLGTFDTVQII

SEQ ID NO: 146934 - protein, 10 aa, Influenza A virus
VLHLTQGACW

SEQ ID NO: 146935 - protein, 10 aa, Influenza A virus
VLHLTQGTCW

SEQ ID NO: 146936 - protein, 9 aa, Influenza A virus
VLIGQGDVV

SEQ ID NO: 146937 - protein, 10 aa, Influenza A virus
VLIGQGDVVL

SEQ ID NO: 146938 - protein, 11 aa, Influenza A virus
VLIGQGDVVLV

SEQ ID NO: 146939 - protein, 9 aa, Influenza A virus
VLIMQGDVV

SEQ ID NO: 146940 - protein, 10 aa, Influenza A virus
VLIMQGDVVL

SEQ ID NO: 146941 - protein, 11 aa, Influenza A virus
VLIMQGDVVLV

SEQ ID NO: 146942 - protein, 8 aa, Influenza A virus
VLINTYQW

SEQ ID NO: 146943 - protein, 9 aa, Influenza A virus
VLINTYQWI

SEQ ID NO: 146944 - protein, 10 aa, Influenza A virus
VLINTYQWII

SEQ ID NO: 146945 - protein, 11 aa, Influenza A virus
VLINTYQWIIR

SEQ ID NO: 146946 - protein, 9 aa, Influenza A virus
VLINTYQWV

SEQ ID NO: 146947 - protein, 10 aa, Influenza A virus
VLINTYQWVI

SEQ ID NO: 146948 - protein, 11 aa, Influenza A virus
VLINTYQWVIR

SEQ ID NO: 146949 - protein, 9 aa, Influenza A virus
VLIRQGDVV

SEQ ID NO: 146950 - protein, 10 aa, Influenza A virus
VLIRQGDVVL

SEQ ID NO: 146951 - protein, 11 aa, Influenza A virus
VLIRQGDVVLV

SEQ ID NO: 146952 - protein, 9 aa, Influenza A virus
VLKAARGQY

SEQ ID NO: 146953 - protein, 11 aa, Influenza A virus
VLLSPEEVSEA

SEQ ID NO: 146954 - protein, 9 aa, Influenza A virus
VLPDLTPST

SEQ ID NO: 146955 - protein, 9 aa, Influenza A virus
VLPDMTPST

SEQ ID NO: 146956 - protein, 11 aa, Influenza A virus
VLPDMTPSTEM

SEQ ID NO: 146957 - protein, 11 aa, Influenza A virus
VLPDMTPSTEV

SEQ ID NO: 146958 - protein, 9 aa, Influenza A virus
VLRGFLILA

SEQ ID NO: 146959 - protein, 10 aa, Influenza A virus
VLRGFLILAK

SEQ ID NO: 146960 - protein, 9 aa, Influenza A virus
VLRGFLILG

SEQ ID NO: 146961 - protein, 10 aa, Influenza A virus
VLRGFLILGK

SEQ ID NO: 146962 - protein, 10 aa, Influenza A virus
VLRGFLILGR

SEQ ID NO: 146963 - protein, 9 aa, Influenza A virus
VLRGIPILG

SEQ ID NO: 146964 - protein, 10 aa, Influenza A virus
VLRGIPILGK

SEQ ID NO: 146965 - protein, 9 aa, Influenza A virus
VLTGNLQAL

SEQ ID NO: 146966 - protein, 10 aa, Influenza A virus
VLTGNLQALK

SEQ ID NO: 146967 - protein, 9 aa, Influenza A virus
VLTGNLQTL

SEQ ID NO: 146968 - protein, 10 aa, Influenza A virus
VLTGNLQTLK

SEQ ID NO: 146969 - protein, 8 aa, Influenza A virus
VLVNTYQW

SEQ ID NO: 146970 - protein, 9 aa, Influenza A virus
VLVNTYQWI

SEQ ID NO: 146971 - protein, 10 aa, Influenza A virus
VLVNTYQWII

SEQ ID NO: 146972 - protein, 11 aa, Influenza A virus
VLVNTYQWIIR

SEQ ID NO: 146973 - protein, 9 aa, Influenza A virus
VLVNTYQWV

SEQ ID NO: 146974 - protein, 10 aa, Influenza A virus
VLVNTYQWVI

SEQ ID NO: 146975 - protein, 11 aa, Influenza A virus
VLVNTYQWVIR

SEQ ID NO: 146976 - protein, 9 aa, Influenza A virus
VLVRGNSPV

SEQ ID NO: 146977 - protein, 10 aa, Influenza A virus
VLVRGNSPVF

SEQ ID NO: 146978 - protein, 8 aa, Influenza A virus
VLYNKMEF

SEQ ID NO: 146979 - protein, 11 aa, Influenza A virus
VLYNKMEFEPF

SEQ ID NO: 146980 - protein, 11 aa, Influenza A virus
VMGMIGILPDL

SEQ ID NO: 146981 - protein, 11 aa, Influenza A virus
VMGMIGILPGM

SEQ ID NO: 146982 - protein, 11 aa, Influenza A virus
VMGMIGVLPDL

SEQ ID NO: 146983 - protein, 8 aa, Influenza A virus
VMISPLAV

SEQ ID NO: 146984 - protein, 9 aa, Influenza A virus
VMISPLAVT

SEQ ID NO: 146985 - protein, 10 aa, Influenza A virus
VMISPLAVTW

SEQ ID NO: 146986 - protein, 11 aa, Influenza A virus
VMISPLAVTWW

SEQ ID NO: 146987 - protein, 10 aa, Influenza A virus
VMKRKRDFSI

SEQ ID NO: 146988 - protein, 11 aa, Influenza A virus
VMKRKRDFSIL

SEQ ID NO: 146989 - protein, 10 aa, Influenza A virus
VMKRKRDSSI

SEQ ID NO: 146990 - protein, 11 aa, Influenza A virus
VMKRKRDSSIL

SEQ ID NO: 146991 - protein, 9 aa, Influenza A virus
VMKRKRNSS

SEQ ID NO: 146992 - protein, 10 aa, Influenza A virus
VMKRKRNSSI

SEQ ID NO: 146993 - protein, 11 aa, Influenza A virus
VMKRKRNSSIL

SEQ ID NO: 146994 - protein, 9 aa, Influenza A virus
VMSMRGVRV

SEQ ID NO: 146995 - protein, 11 aa, Influenza A virus
VMSMRGVRVSK

SEQ ID NO: 146996 - protein, 9 aa, Influenza A virus
VMVSPLAIT

SEQ ID NO: 146997 - protein, 10 aa, Influenza A virus
VMVSPLAITW

SEQ ID NO: 146998 - protein, 11 aa, Influenza A virus
VMVSPLAITWW

SEQ ID NO: 146999 - protein, 8 aa, Influenza A virus
VMVSPLAV

SEQ ID NO: 147000 - protein, 9 aa, Influenza A virus
VMVSPLAVT

SEQ ID NO: 147001 - protein, 10 aa, Influenza A virus
VMVSPLAVTW

SEQ ID NO: 147002 - protein, 11 aa, Influenza A virus
VMVSPLAVTWW

SEQ ID NO: 147003 - protein, 11 aa, Influenza A virus
VNTYQWIIRNW

SEQ ID NO: 147004 - protein, 9 aa, Influenza A virus
VNTYQWVIR

SEQ ID NO: 147005 - protein, 11 aa, Influenza A virus
VNTYQWVIRNW

SEQ ID NO: 147006 - protein, 10 aa, Influenza A virus
VNVRGSGMRV

SEQ ID NO: 147007 - protein, 9 aa, Influenza A virus
VPATLYNKM

SEQ ID NO: 147008 - protein, 11 aa, Influenza A virus
VPATLYNKMEF

SEQ ID NO: 147009 - protein, 11 aa, Influenza A virus
VPERNEQGQTL

SEQ ID NO: 147010 - protein, 9 aa, Influenza A virus
VPKAARAQY

SEQ ID NO: 147011 - protein, 9 aa, Influenza A virus
VPKAARSQY

SEQ ID NO: 147012 - protein, 9 aa, Influenza A virus
VPRATRGQY

SEQ ID NO: 147013 - protein, 9 aa, Influenza A virus
VPRATRSQY

SEQ ID NO: 147014 - protein, 10 aa, Influenza A virus
VPRATRSQYS

SEQ ID NO: 147015 - protein, 9 aa, Influenza A virus
VQIIKLLPF

SEQ ID NO: 147016 - protein, 10 aa, Influenza A virus
VQIIKLLPFA

SEQ ID NO: 147017 - protein, 9 aa, Influenza A virus
VQIINLLPF

SEQ ID NO: 147018 - protein, 10 aa, Influenza A virus
VQIINLLPFA

SEQ ID NO: 147019 - protein, 9 aa, Influenza A virus
VRALFQQMR

SEQ ID NO: 147020 - protein, 9 aa, Influenza A virus
VRDLRGNVL

SEQ ID NO: 147021 - protein, 10 aa, Influenza A virus
VRDLRGNVLL

SEQ ID NO: 147022 - protein, 9 aa, Influenza A virus
VRDQQGNVL

SEQ ID NO: 147023 - protein, 10 aa, Influenza A virus
VRDQQGNVLL

SEQ ID NO: 147024 - protein, 10 aa, Influenza A virus
VRDQRGNILL

SEQ ID NO: 147025 - protein, 10 aa, Influenza A virus
VRDQRGNVIL

SEQ ID NO: 147026 - protein, 9 aa, Influenza A virus
VRDQRGNVL

SEQ ID NO: 147027 - protein, 10 aa, Influenza A virus
VRDQRGNVLL

SEQ ID NO: 147028 - protein, 9 aa, Influenza A virus
VRFRNQVKI

SEQ ID NO: 147029 - protein, 10 aa, Influenza A virus
VRFRNQVKIR

SEQ ID NO: 147030 - protein, 11 aa, Influenza A virus
VRFRNQVKIRR

SEQ ID NO: 147031 - protein, 10 aa, Influenza A virus
VRGNSPAFNY

SEQ ID NO: 147032 - protein, 10 aa, Influenza A virus
VRGNSPIFNY

SEQ ID NO: 147033 - protein, 10 aa, Influenza A virus
VRGNSPVFNY

SEQ ID NO: 147034 - protein, 10 aa, Influenza A virus
VRGQYSGFVR

SEQ ID NO: 147035 - protein, 9 aa, Influenza A virus
VRGSGMRII

SEQ ID NO: 147036 - protein, 9 aa, Influenza A virus
VRGSGMRIL

SEQ ID NO: 147037 - protein, 10 aa, Influenza A virus
VRGSGMRILI

SEQ ID NO: 147038 - protein, 10 aa, Influenza A virus
VRGSGMRILV

SEQ ID NO: 147039 - protein, 9 aa, Influenza A virus
VRGSGMRVL

SEQ ID NO: 147040 - protein, 10 aa, Influenza A virus
VRGSGMRVLV

SEQ ID NO: 147041 - protein, 9 aa, Influenza A virus
VRKATRRLV

SEQ ID NO: 147042 - protein, 9 aa, Influenza A virus
VRKTRFLPV

SEQ ID NO: 147043 - protein, 10 aa, Influenza A virus
VRNDDIDQSL

SEQ ID NO: 147044 - protein, 10 aa, Influenza A virus
VRNDDVDQSL

SEQ ID NO: 147045 - protein, 10 aa, Influenza A virus
VRNDDVGQSL

SEQ ID NO: 147046 - protein, 10 aa, Influenza A virus
VRNDDVIQSM

SEQ ID NO: 147047 - protein, 11 aa, Influenza A virus
VRRAAVSADPL

SEQ ID NO: 147048 - protein, 11 aa, Influenza A virus
VRRAMVSADPL

SEQ ID NO: 147049 - protein, 11 aa, Influenza A virus
VRRASVSADPL

SEQ ID NO: 147050 - protein, 11 aa, Influenza A virus
VRRATVSADPL

SEQ ID NO: 147051 - protein, 11 aa, Influenza A virus
VRRATVSTDPL

SEQ ID NO: 147052 - protein, 9 aa, Influenza A virus
VRTLFQQMR

SEQ ID NO: 147053 - protein, 9 aa, Influenza A virus
VSADPLASL

SEQ ID NO: 147054 - protein, 10 aa, Influenza A virus
VSADPLASLL

SEQ ID NO: 147055 - protein, 10 aa, Influenza A virus
VSEAQGTEKL

SEQ ID NO: 147056 - protein, 9 aa, Influenza A virus
VSETQGMEK

SEQ ID NO: 147057 - protein, 9 aa, Influenza A virus
VSGGTSSVY

SEQ ID NO: 147058 - protein, 8 aa, Influenza A virus
VSIDRFLR

SEQ ID NO: 147059 - protein, 9 aa, Influenza A virus
VSIDRFLRI

SEQ ID NO: 147060 - protein, 10 aa, Influenza A virus
VSIDRFLRIR

SEQ ID NO: 147061 - protein, 9 aa, Influenza A virus
VSIDRFLRV

SEQ ID NO: 147062 - protein, 10 aa, Influenza A virus
VSIDRFLRVR

SEQ ID NO: 147063 - protein, 9 aa, Influenza A virus
VSKMGVDEY

SEQ ID NO: 147064 - protein, 11 aa, Influenza A virus
VSKMGVDEYSR

SEQ ID NO: 147065 - protein, 9 aa, Influenza A virus
VSKTGVDEY

SEQ ID NO: 147066 - protein, 10 aa, Influenza A virus
VSLRGVRVSK

SEQ ID NO: 147067 - protein, 11 aa, Influenza A virus
VSLRGVRVSKM

SEQ ID NO: 147068 - protein, 10 aa, Influenza A virus
VSMRGVRVSK

SEQ ID NO: 147069 - protein, 11 aa, Influenza A virus
VSMRGVRVSKM

SEQ ID NO: 147070 - protein, 8 aa, Influenza A virus
VSPLAITW

SEQ ID NO: 147071 - protein, 9 aa, Influenza A virus
VSPLAITWW

SEQ ID NO: 147072 - protein, 11 aa, Influenza A virus
VSPLAITWWNR

SEQ ID NO: 147073 - protein, 8 aa, Influenza A virus
VSPLAVTW

SEQ ID NO: 147074 - protein, 9 aa, Influenza A virus
VSPLAVTWW

SEQ ID NO: 147075 - protein, 11 aa, Influenza A virus
VSPLAVTWWNR

SEQ ID NO: 147076 - protein, 9 aa, Influenza A virus
VSTDPLASL

SEQ ID NO: 147077 - protein, 10 aa, Influenza A virus
VSTDPLASLL

SEQ ID NO: 147078 - protein, 9 aa, Influenza A virus
VSTDPLSSL

SEQ ID NO: 147079 - protein, 10 aa, Influenza A virus
VSTDPLSSLL

SEQ ID NO: 147080 - protein, 9 aa, Influenza A virus
VTKRLTVLG

SEQ ID NO: 147081 - protein, 10 aa, Influenza A virus
VTKRLTVLGK

SEQ ID NO: 147082 - protein, 10 aa, Influenza A virus
VTNDDVDHSL

SEQ ID NO: 147083 - protein, 9 aa, Influenza A virus
VTNTVHYPK

SEQ ID NO: 147084 - protein, 10 aa, Influenza A virus
VTNTVHYPKV

SEQ ID NO: 147085 - protein, 11 aa, Influenza A virus
VTNTVHYPKVY

SEQ ID NO: 147086 - protein, 9 aa, Influenza A virus
VTSTVHYPK

SEQ ID NO: 147087 - protein, 10 aa, Influenza A virus
VTSTVHYPKI

SEQ ID NO: 147088 - protein, 11 aa, Influenza A virus
VTSTVHYPKIY

SEQ ID NO: 147089 - protein, 10 aa, Influenza A virus
VTSTVHYPKV

SEQ ID NO: 147090 - protein, 11 aa, Influenza A virus
VTSTVHYPKVY

SEQ ID NO: 147091 - protein, 9 aa, Influenza A virus
VTTHYPKVY

SEQ ID NO: 147092 - protein, 10 aa, Influenza A virus
VTTHYPKVYK

SEQ ID NO: 147093 - protein, 10 aa, Influenza A virus
VTWWNRNGPM

SEQ ID NO: 147094 - protein, 10 aa, Influenza A virus
VTWWNRNGPV

SEQ ID NO: 147095 - protein, 10 aa, Influenza A virus
VTWWNRNGQV

SEQ ID NO: 147096 - protein, 9 aa, Influenza A virus
VVFPNEVGA

SEQ ID NO: 147097 - protein, 10 aa, Influenza A virus
VVFPNEVGAK

SEQ ID NO: 147098 - protein, 11 aa, Influenza A virus
VVFPNEVGAQL

SEQ ID NO: 147099 - protein, 10 aa, Influenza A virus
VVFPNEVGAR

SEQ ID NO: 147100 - protein, 9 aa, Influenza A virus
VVLVMKRKR

SEQ ID NO: 147101 - protein, 10 aa, Influenza A virus
VVSIDRFLRI

SEQ ID NO: 147102 - protein, 11 aa, Influenza A virus
VVSIDRFLRIR

SEQ ID NO: 147103 - protein, 10 aa, Influenza A virus
VVSIDRFLRV

SEQ ID NO: 147104 - protein, 11 aa, Influenza A virus
VVSIDRFLRVR

SEQ ID NO: 147105 - protein, 10 aa, Influenza A virus
VVVSIDRFLR

SEQ ID NO: 147106 - protein, 11 aa, Influenza A virus
VVVSIDRFLRI

SEQ ID NO: 147107 - protein, 11 aa, Influenza A virus
VVVSIDRFLRV

SEQ ID NO: 147108 - protein, 8 aa, Influenza A virus
VYIEVLHL

SEQ ID NO: 147109 - protein, 9 aa, Influenza A virus
VYIEVLHLT

SEQ ID NO: 147110 - protein, 8 aa, Influenza A virus
VYKPYFEK

SEQ ID NO: 147111 - protein, 9 aa, Influenza A virus
VYKPYFEKV

SEQ ID NO: 147112 - protein, 11 aa, Influenza A virus
VYKPYFEKVER

SEQ ID NO: 147113 - protein, 9 aa, Influenza A virus
VYKTYFDKV

SEQ ID NO: 147114 - protein, 11 aa, Influenza A virus
VYKTYFDKVER

SEQ ID NO: 147115 - protein, 9 aa, Influenza A virus
VYKTYFEKI

SEQ ID NO: 147116 - protein, 11 aa, Influenza A virus
VYKTYFEKIER

SEQ ID NO: 147117 - protein, 9 aa, Influenza A virus
VYKTYFEKV

SEQ ID NO: 147118 - protein, 11 aa, Influenza A virus
VYKTYFEKVER

SEQ ID NO: 147119 - protein, 11 aa, Influenza A virus
VYKTYFEKVGR

SEQ ID NO: 147120 - protein, 8 aa, Influenza A virus
VYNTYFEK

SEQ ID NO: 147121 - protein, 9 aa, Influenza A virus
VYNTYFEKV

SEQ ID NO: 147122 - protein, 11 aa, Influenza A virus
VYNTYFEKVER

SEQ ID NO: 147123 - protein, 8 aa, Influenza A virus
VYRTYFEK

SEQ ID NO: 147124 - protein, 9 aa, Influenza A virus
VYRTYFEKV

SEQ ID NO: 147125 - protein, 11 aa, Influenza A virus
VYRTYFEKVER

SEQ ID NO: 147126 - protein, 9 aa, Influenza A virus
VYTTYFEKV

SEQ ID NO: 147127 - protein, 11 aa, Influenza A virus
VYTTYFEKVER

SEQ ID NO: 147128 - protein, 8 aa, Influenza A virus
VYVEVLHL

SEQ ID NO: 147129 - protein, 9 aa, Influenza A virus
VYVEVLHLT

SEQ ID NO: 147130 - protein, 8 aa, Influenza A virus
VYYPKVYK

SEQ ID NO: 147131 - protein, 9 aa, Influenza A virus
VYYPKVYKT

SEQ ID NO: 147132 - protein, 10 aa, Influenza A virus
VYYPKVYKTY

SEQ ID NO: 147133 - protein, 11 aa, Influenza A virus
VYYPKVYKTYF

SEQ ID NO: 147134 - protein, 8 aa, Influenza A virus
WEAVKIQW

SEQ ID NO: 147135 - protein, 9 aa, Influenza A virus
WEINGPESI

SEQ ID NO: 147136 - protein, 10 aa, Influenza A virus
WEINGPESIL

SEQ ID NO: 147137 - protein, 11 aa, Influenza A virus
WEINGPESILV

SEQ ID NO: 147138 - protein, 9 aa, Influenza A virus
WEINGPESV

SEQ ID NO: 147139 - protein, 10 aa, Influenza A virus
WEINGPESVL

SEQ ID NO: 147140 - protein, 11 aa, Influenza A virus
WEINGPESVLI

SEQ ID NO: 147141 - protein, 11 aa, Influenza A virus
WEINGPESVLV

SEQ ID NO: 147142 - protein, 9 aa, Influenza A virus
WEINGSESV

SEQ ID NO: 147143 - protein, 10 aa, Influenza A virus
WEINGSESVL

SEQ ID NO: 147144 - protein, 11 aa, Influenza A virus
WEINGSESVLV

SEQ ID NO: 147145 - protein, 8 aa, Influenza A virus
WEIVKIQW

SEQ ID NO: 147146 - protein, 8 aa, Influenza A virus
WEMIKIQW

SEQ ID NO: 147147 - protein, 9 aa, Influenza A virus
WEMIKIQWS

SEQ ID NO: 147148 - protein, 11 aa, Influenza A virus
WEQLYTPGGEV

SEQ ID NO: 147149 - protein, 11 aa, Influenza A virus
WEQMYAPGGEV

SEQ ID NO: 147150 - protein, 9 aa, Influenza A virus
WEQMYTPGG

SEQ ID NO: 147151 - protein, 11 aa, Influenza A virus
WEQMYTPGGEA

SEQ ID NO: 147152 - protein, 11 aa, Influenza A virus
WEQMYTPGGEV

SEQ ID NO: 147153 - protein, 9 aa, Influenza A virus
WEVNGPESV

SEQ ID NO: 147154 - protein, 10 aa, Influenza A virus
WEVNGPESVL

SEQ ID NO: 147155 - protein, 11 aa, Influenza A virus
WEVNGPESVLV

SEQ ID NO: 147156 - protein, 9 aa, Influenza A virus
WGIEHIDNV

SEQ ID NO: 147157 - protein, 9 aa, Influenza A virus
WGIEHIDSV

SEQ ID NO: 147158 - protein, 9 aa, Influenza A virus
WGIEPIDNV

SEQ ID NO: 147159 - protein, 9 aa, Influenza A virus
WGIESIDNV

SEQ ID NO: 147160 - protein, 9 aa, Influenza A virus
WGIETIDNV

SEQ ID NO: 147161 - protein, 9 aa, Influenza A virus
WGVEPIDNV

SEQ ID NO: 147162 - protein, 9 aa, Influenza A virus
WIIKNWETV

SEQ ID NO: 147163 - protein, 10 aa, Influenza A virus
WIIKNWETVK

SEQ ID NO: 147164 - protein, 9 aa, Influenza A virus
WIIRNWEAV

SEQ ID NO: 147165 - protein, 10 aa, Influenza A virus
WIIRNWEAVK

SEQ ID NO: 147166 - protein, 9 aa, Influenza A virus
WIIRNWEIV

SEQ ID NO: 147167 - protein, 10 aa, Influenza A virus
WIIRNWEIVK

SEQ ID NO: 147168 - protein, 8 aa, Influenza A virus
WIIRNWEM

SEQ ID NO: 147169 - protein, 9 aa, Influenza A virus
WIIRNWEMI

SEQ ID NO: 147170 - protein, 10 aa, Influenza A virus
WIIRNWEMIK

SEQ ID NO: 147171 - protein, 9 aa, Influenza A virus
WIIRNWETV

SEQ ID NO: 147172 - protein, 10 aa, Influenza A virus
WIIRNWETVK

SEQ ID NO: 147173 - protein, 9 aa, Influenza A virus
WMMAMKYPI

SEQ ID NO: 147174 - protein, 10 aa, Influenza A virus
WMMAMKYPIT

SEQ ID NO: 147175 - protein, 11 aa, Influenza A virus
WMMAMKYPITA

SEQ ID NO: 147176 - protein, 8 aa, Influenza A virus
WSHNPTML

SEQ ID NO: 147177 - protein, 9 aa, Influenza A virus
WSHNPTMLY

SEQ ID NO: 147178 - protein, 11 aa, Influenza A virus
WSHNPTMLYNK

SEQ ID NO: 147179 - protein, 9 aa, Influenza A virus
WSQDPTILY

SEQ ID NO: 147180 - protein, 11 aa, Influenza A virus
WSQDPTILYNK

SEQ ID NO: 147181 - protein, 9 aa, Influenza A virus
WSQDPTMLY

SEQ ID NO: 147182 - protein, 10 aa, Influenza A virus
WSQDPTMLYN

SEQ ID NO: 147183 - protein, 11 aa, Influenza A virus
WSQDPTMLYNK

SEQ ID NO: 147184 - protein, 9 aa, Influenza A virus
WSQDPTVLY

SEQ ID NO: 147185 - protein, 11 aa, Influenza A virus
WSQDPTVLYNK

SEQ ID NO: 147186 - protein, 9 aa, Influenza A virus
WSQEPTMLY

SEQ ID NO: 147187 - protein, 11 aa, Influenza A virus
WSQEPTMLYNK

SEQ ID NO: 147188 - protein, 9 aa, Influenza A virus
WSQNPAILY

SEQ ID NO: 147189 - protein, 11 aa, Influenza A virus
WSQNPAILYNK

SEQ ID NO: 147190 - protein, 9 aa, Influenza A virus
WSQNPAMLY

SEQ ID NO: 147191 - protein, 11 aa, Influenza A virus
WSQNPAMLYNK

SEQ ID NO: 147192 - protein, 9 aa, Influenza A virus
WSQNPTMLY

SEQ ID NO: 147193 - protein, 10 aa, Influenza A virus
WSQNPTMLYN

SEQ ID NO: 147194 - protein, 11 aa, Influenza A virus
WSQNPTMLYNK

SEQ ID NO: 147195 - protein, 9 aa, Influenza A virus
WSQSPTMLY

SEQ ID NO: 147196 - protein, 10 aa, Influenza A virus
WSQSPTMLYN

SEQ ID NO: 147197 - protein, 11 aa, Influenza A virus
WSQSPTMLYNK

SEQ ID NO: 147198 - protein, 8 aa, Influenza A virus
WSQVPATL

SEQ ID NO: 147199 - protein, 9 aa, Influenza A virus
WSQVPATLY

SEQ ID NO: 147200 - protein, 11 aa, Influenza A virus
WSQVPATLYNK

SEQ ID NO: 147201 - protein, 9 aa, Influenza A virus
WVIRNWETV

SEQ ID NO: 147202 - protein, 10 aa, Influenza A virus
WVIRNWETVK

SEQ ID NO: 147203 - protein, 8 aa, Influenza A virus
WWNRNGPM

SEQ ID NO: 147204 - protein, 11 aa, Influenza A virus
YEEFTIVGRRA

SEQ ID NO: 147205 - protein, 8 aa, Influenza A virus
YFDKVERL

SEQ ID NO: 147206 - protein, 10 aa, Influenza A virus
YFEKVERLKR

SEQ ID NO: 147207 - protein, 9 aa, Influenza A virus
YFEKVERLR

SEQ ID NO: 147208 - protein, 8 aa, Influenza A virus
YFEKVERM

SEQ ID NO: 147209 - protein, 8 aa, Influenza A virus
YFEKVGRL

SEQ ID NO: 147210 - protein, 9 aa, Influenza A virus
YFERVERLK

SEQ ID NO: 147211 - protein, 10 aa, Influenza A virus
YGPALSINEL

SEQ ID NO: 147212 - protein, 11 aa, Influenza A virus
YGPALSINELR

SEQ ID NO: 147213 - protein, 10 aa, Influenza A virus
YGPALSINQL

SEQ ID NO: 147214 - protein, 10 aa, Influenza A virus
YGPALSISEL

SEQ ID NO: 147215 - protein, 9 aa, Influenza A virus
YILERELVR

SEQ ID NO: 147216 - protein, 10 aa, Influenza A virus
YILERELVRK

SEQ ID NO: 147217 - protein, 10 aa, Influenza A virus
YKPYFEKVER

SEQ ID NO: 147218 - protein, 11 aa, Influenza A virus
YKPYFEKVERL

SEQ ID NO: 147219 - protein, 10 aa, Influenza A virus
YKTYFDKVER

SEQ ID NO: 147220 - protein, 11 aa, Influenza A virus
YKTYFDKVERL

SEQ ID NO: 147221 - protein, 10 aa, Influenza A virus
YKTYFEKAER

SEQ ID NO: 147222 - protein, 11 aa, Influenza A virus
YKTYFEKAERL

SEQ ID NO: 147223 - protein, 10 aa, Influenza A virus
YKTYFEKIER

SEQ ID NO: 147224 - protein, 11 aa, Influenza A virus
YKTYFEKIERL

SEQ ID NO: 147225 - protein, 10 aa, Influenza A virus
YKTYFEKVER

SEQ ID NO: 147226 - protein, 11 aa, Influenza A virus
YKTYFEKVERL

SEQ ID NO: 147227 - protein, 11 aa, Influenza A virus
YKTYFEKVERM

SEQ ID NO: 147228 - protein, 10 aa, Influenza A virus
YKTYFEKVGR

SEQ ID NO: 147229 - protein, 11 aa, Influenza A virus
YKTYFEKVGRL

SEQ ID NO: 147230 - protein, 10 aa, Influenza A virus
YKTYFERVER

SEQ ID NO: 147231 - protein, 11 aa, Influenza A virus
YKTYFERVERL

SEQ ID NO: 147232 - protein, 8 aa, Influenza A virus
YMFERELV

SEQ ID NO: 147233 - protein, 9 aa, Influenza A virus
YMFERELVR

SEQ ID NO: 147234 - protein, 10 aa, Influenza A virus
YMFERELVRK

SEQ ID NO: 147235 - protein, 11 aa, Influenza A virus
YMFERELVRKT

SEQ ID NO: 147236 - protein, 8 aa, Influenza A virus
YMLERELV

SEQ ID NO: 147237 - protein, 9 aa, Influenza A virus
YMLERELVR

SEQ ID NO: 147238 - protein, 10 aa, Influenza A virus
YMLERELVRK

SEQ ID NO: 147239 - protein, 10 aa, Influenza A virus
YNKATKRLTI

SEQ ID NO: 147240 - protein, 11 aa, Influenza A virus
YNKATKRLTIL

SEQ ID NO: 147241 - protein, 10 aa, Influenza A virus
YNKATKRLTV

SEQ ID NO: 147242 - protein, 11 aa, Influenza A virus
YNKATKRLTVL

SEQ ID NO: 147243 - protein, 10 aa, Influenza A virus
YNKGTKRLTV

SEQ ID NO: 147244 - protein, 11 aa, Influenza A virus
YNKGTKRLTVL

SEQ ID NO: 147245 - protein, 9 aa, Influenza A virus
YNKIEFEPF

SEQ ID NO: 147246 - protein, 9 aa, Influenza A virus
YNKLEFEPF

SEQ ID NO: 147247 - protein, 9 aa, Influenza A virus
YNKMEFEPF

SEQ ID NO: 147248 - protein, 9 aa, Influenza A virus
YNKMEFESF

SEQ ID NO: 147249 - protein, 10 aa, Influenza A virus
YNKSTKRLTV

SEQ ID NO: 147250 - protein, 11 aa, Influenza A virus
YNKSTKRLTVL

SEQ ID NO: 147251 - protein, 10 aa, Influenza A virus
YNKTTKRLTI

SEQ ID NO: 147252 - protein, 11 aa, Influenza A virus
YNKTTKRLTIL

SEQ ID NO: 147253 - protein, 10 aa, Influenza A virus
YNKTTKRLTV

SEQ ID NO: 147254 - protein, 11 aa, Influenza A virus
YNKTTKRLTVL

SEQ ID NO: 147255 - protein, 10 aa, Influenza A virus
YNKVTKRLTV

SEQ ID NO: 147256 - protein, 11 aa, Influenza A virus
YNKVTKRLTVL

SEQ ID NO: 147257 - protein, 10 aa, Influenza A virus
YNRTTKRLTV

SEQ ID NO: 147258 - protein, 11 aa, Influenza A virus
YNRTTKRLTVL

SEQ ID NO: 147259 - protein, 10 aa, Influenza A virus
YNTYFEKVER

SEQ ID NO: 147260 - protein, 11 aa, Influenza A virus
YNTYFEKVERL

SEQ ID NO: 147261 - protein, 9 aa, Influenza A virus
YPITADKKI

SEQ ID NO: 147262 - protein, 9 aa, Influenza A virus
YPITADKRI

SEQ ID NO: 147263 - protein, 10 aa, Influenza A virus
YPITADKRII

SEQ ID NO: 147264 - protein, 10 aa, Influenza A virus
YPITADKRIM

SEQ ID NO: 147265 - protein, 9 aa, Influenza A virus
YPITADRRI

SEQ ID NO: 147266 - protein, 10 aa, Influenza A virus
YPITADRRIM

SEQ ID NO: 147267 - protein, 9 aa, Influenza A virus
YPKIYKTYF

SEQ ID NO: 147268 - protein, 11 aa, Influenza A virus
YPKIYKTYFEK

SEQ ID NO: 147269 - protein, 11 aa, Influenza A virus
YPKIYKTYFER

SEQ ID NO: 147270 - protein, 9 aa, Influenza A virus
YPKVHKTYF

SEQ ID NO: 147271 - protein, 9 aa, Influenza A virus
YPKVYKPYF

SEQ ID NO: 147272 - protein, 11 aa, Influenza A virus
YPKVYKPYFEK

SEQ ID NO: 147273 - protein, 9 aa, Influenza A virus
YPKVYKTYF

SEQ ID NO: 147274 - protein, 11 aa, Influenza A virus
YPKVYKTYFEK

SEQ ID NO: 147275 - protein, 8 aa, Influenza A virus
YPKVYNTY

SEQ ID NO: 147276 - protein, 9 aa, Influenza A virus
YPKVYNTYF

SEQ ID NO: 147277 - protein, 11 aa, Influenza A virus
YPKVYNTYFEK

SEQ ID NO: 147278 - protein, 8 aa, Influenza A virus
YPKVYRTY

SEQ ID NO: 147279 - protein, 9 aa, Influenza A virus
YPKVYRTYF

SEQ ID NO: 147280 - protein, 11 aa, Influenza A virus
YPKVYRTYFEK

SEQ ID NO: 147281 - protein, 8 aa, Influenza A virus
YPKVYTTY

SEQ ID NO: 147282 - protein, 9 aa, Influenza A virus
YPKVYTTYF

SEQ ID NO: 147283 - protein, 11 aa, Influenza A virus
YPKVYTTYFEK

SEQ ID NO: 147284 - protein, 10 aa, Influenza A virus
YQWIIKNWET

SEQ ID NO: 147285 - protein, 11 aa, Influenza A virus
YQWIIKNWETV

SEQ ID NO: 147286 - protein, 10 aa, Influenza A virus
YQWIIRNWEA

SEQ ID NO: 147287 - protein, 11 aa, Influenza A virus
YQWIIRNWEAV

SEQ ID NO: 147288 - protein, 10 aa, Influenza A virus
YQWIIRNWEI

SEQ ID NO: 147289 - protein, 11 aa, Influenza A virus
YQWIIRNWEIV

SEQ ID NO: 147290 - protein, 10 aa, Influenza A virus
YQWIIRNWEM

SEQ ID NO: 147291 - protein, 11 aa, Influenza A virus
YQWIIRNWEMI

SEQ ID NO: 147292 - protein, 10 aa, Influenza A virus
YQWIIRNWET

SEQ ID NO: 147293 - protein, 11 aa, Influenza A virus
YQWIIRNWETV

SEQ ID NO: 147294 - protein, 10 aa, Influenza A virus
YQWVIRNWET

SEQ ID NO: 147295 - protein, 11 aa, Influenza A virus
YQWVIRNWETV

SEQ ID NO: 147296 - protein, 10 aa, Influenza A virus
YRTYFEKVER

SEQ ID NO: 147297 - protein, 11 aa, Influenza A virus
YRTYFEKVERL

SEQ ID NO: 147298 - protein, 8 aa, Influenza A virus
YSGFVRAL

SEQ ID NO: 147299 - protein, 9 aa, Influenza A virus
YSGFVRALF

SEQ ID NO: 147300 - protein, 8 aa, Influenza A virus
YSGFVRTL

SEQ ID NO: 147301 - protein, 9 aa, Influenza A virus
YSGFVRTLF

SEQ ID NO: 147302 - protein, 10 aa, Influenza A virus
YSKATKRLTV

SEQ ID NO: 147303 - protein, 11 aa, Influenza A virus
YSKATKRLTVL

SEQ ID NO: 147304 - protein, 8 aa, Influenza A virus
YSNAERVV

SEQ ID NO: 147305 - protein, 9 aa, Influenza A virus
YSNAERVVV

SEQ ID NO: 147306 - protein, 9 aa, Influenza A virus
YSRAERVVV

SEQ ID NO: 147307 - protein, 9 aa, Influenza A virus
YSSAEKIVV

SEQ ID NO: 147308 - protein, 8 aa, Influenza A virus
YSSAERVV

SEQ ID NO: 147309 - protein, 9 aa, Influenza A virus
YSSAERVVV

SEQ ID NO: 147310 - protein, 8 aa, Influenza A virus
YSSMERVV

SEQ ID NO: 147311 - protein, 9 aa, Influenza A virus
YSSMERVVV

SEQ ID NO: 147312 - protein, 11 aa, Influenza A virus
YSSMERVVVSI

SEQ ID NO: 147313 - protein, 9 aa, Influenza A virus
YSSSLMWEI

SEQ ID NO: 147314 - protein, 10 aa, Influenza A virus
YSSSLMWEIN

SEQ ID NO: 147315 - protein, 9 aa, Influenza A virus
YSSSMMWEI

SEQ ID NO: 147316 - protein, 10 aa, Influenza A virus
YSSSMMWEIN

SEQ ID NO: 147317 - protein, 9 aa, Influenza A virus
YSSSMMWEV

SEQ ID NO: 147318 - protein, 10 aa, Influenza A virus
YSSSMMWEVN

SEQ ID NO: 147319 - protein, 9 aa, Influenza A virus
YSSTEKVVV

SEQ ID NO: 147320 - protein, 8 aa, Influenza A virus
YSSTERAV

SEQ ID NO: 147321 - protein, 9 aa, Influenza A virus
YSSTERAVV

SEQ ID NO: 147322 - protein, 9 aa, Influenza A virus
YSSTERIVV

SEQ ID NO: 147323 - protein, 8 aa, Influenza A virus
YSSTERVV

SEQ ID NO: 147324 - protein, 9 aa, Influenza A virus
YSSTERVVV

SEQ ID NO: 147325 - protein, 10 aa, Influenza A virus
YTTYFEKVER

SEQ ID NO: 147326 - protein, 11 aa, Influenza A virus
YTTYFEKVERL

SEQ ID NO: 147327 - protein, 9 aa, Influenza A virus
YYPKVYKTY

SEQ ID NO: 147328 - protein, 10 aa, Influenza A virus
YYPKVYKTYF

SEQ ID NO: 147329 - protein, 11 aa, Influenza A virus
YYPKVYKTYFE

SEQ ID NO: 147330 - protein, 9 aa, Influenza A virus
AAICTHLEI

SEQ ID NO: 147331 - protein, 9 aa, Influenza A virus
AAICTHLEV

SEQ ID NO: 147332 - protein, 9 aa, Influenza A virus
AAICTHMEV

SEQ ID NO: 147333 - protein, 11 aa, Influenza A virus
AAICTHMEVSF

SEQ ID NO: 147334 - protein, 9 aa, Influenza A virus
AAMDDFQLI

SEQ ID NO: 147335 - protein, 11 aa, Influenza A virus
AAMDDFQLIPM

SEQ ID NO: 147336 - protein, 9 aa, Influenza A virus
AAMDDFQVI

SEQ ID NO: 147337 - protein, 11 aa, Influenza A virus
AAMDDFQVIPM

SEQ ID NO: 147338 - protein, 9 aa, Influenza A virus
AAMDEFQLI

SEQ ID NO: 147339 - protein, 10 aa, Influenza A virus
AAPIEHIASM

SEQ ID NO: 147340 - protein, 10 aa, Influenza A virus
ACELTDSIWI

SEQ ID NO: 147341 - protein, 10 aa, Influenza A virus
ACELTDSSWI

SEQ ID NO: 147342 - protein, 10 aa, Influenza A virus
ACELTDSSWL

SEQ ID NO: 147343 - protein, 10 aa, Influenza A virus
ACELTESSWI

SEQ ID NO: 147344 - protein, 10 aa, Influenza A virus
ACELTNSIWI

SEQ ID NO: 147345 - protein, 10 aa, Influenza A virus
ACFMYSDFHF

SEQ ID NO: 147346 - protein, 11 aa, Influenza A virus
ACFMYSDFHFI

SEQ ID NO: 147347 - protein, 10 aa, Influenza A virus
ADQSLPPNFF

SEQ ID NO: 147348 - protein, 10 aa, Influenza A virus
AEIQDIESEK

SEQ ID NO: 147349 - protein, 10 aa, Influenza A virus
AEKPKFLPDL

SEQ ID NO: 147350 - protein, 9 aa, Influenza A virus
AEQSLPPNF

SEQ ID NO: 147351 - protein, 8 aa, Influenza A virus
AESRKILL

SEQ ID NO: 147352 - protein, 9 aa, Influenza A virus
AESRKILLI

SEQ ID NO: 147353 - protein, 10 aa, Influenza A virus
AESRKILLIV

SEQ ID NO: 147354 - protein, 8 aa, Influenza A virus
AESRKLLL

SEQ ID NO: 147355 - protein, 9 aa, Influenza A virus
AESRKLLLI

SEQ ID NO: 147356 - protein, 10 aa, Influenza A virus
AESRKLLLIA

SEQ ID NO: 147357 - protein, 10 aa, Influenza A virus
AESRKLLLIT

SEQ ID NO: 147358 - protein, 10 aa, Influenza A virus
AESRKLLLIV

SEQ ID NO: 147359 - protein, 9 aa, Influenza A virus
AESRKLLLV

SEQ ID NO: 147360 - protein, 10 aa, Influenza A virus
AESRKLLLVV

SEQ ID NO: 147361 - protein, 8 aa, Influenza A virus
AESRRLLL

SEQ ID NO: 147362 - protein, 9 aa, Influenza A virus
AESRRLLLI

SEQ ID NO: 147363 - protein, 10 aa, Influenza A virus
AESRRLLLIV

SEQ ID NO: 147364 - protein, 10 aa, Influenza A virus
AESSIKEKDM

SEQ ID NO: 147365 - protein, 10 aa, Influenza A virus
AESSVKEKDM

SEQ ID NO: 147366 - protein, 8 aa, Influenza A virus
AEVSHCRA

SEQ ID NO: 147367 - protein, 9 aa, Influenza A virus
AEVSHCRAT

SEQ ID NO: 147368 - protein, 11 aa, Influenza A virus
AEVSHCRATEY

SEQ ID NO: 147369 - protein, 9 aa, Influenza A virus
AEVSQCRAT

SEQ ID NO: 147370 - protein, 11 aa, Influenza A virus
AEVSQCRATEY

SEQ ID NO: 147371 - protein, 9 aa, Influenza A virus
AEVSRCRAT

SEQ ID NO: 147372 - protein, 11 aa, Influenza A virus
AEVSRCRATEY

SEQ ID NO: 147373 - protein, 10 aa, Influenza A virus
AGMRRNYFTA

SEQ ID NO: 147374 - protein, 9 aa, Influenza A virus
AIAPVSRPM

SEQ ID NO: 147375 - protein, 10 aa, Influenza A virus
AIAPVSRPMF

SEQ ID NO: 147376 - protein, 11 aa, Influenza A virus
AIAPVSRPMFL

SEQ ID NO: 147377 - protein, 10 aa, Influenza A virus
AICTHMEVSF

SEQ ID NO: 147378 - protein, 11 aa, Influenza A virus
AIEECLINDPW

SEQ ID NO: 147379 - protein, 9 aa, Influenza A virus
AIGHVSRPM

SEQ ID NO: 147380 - protein, 9 aa, Influenza A virus
AIGQMSRPM

SEQ ID NO: 147381 - protein, 9 aa, Influenza A virus
AIGQVARPM

SEQ ID NO: 147382 - protein, 9 aa, Influenza A virus
AIGQVLRPM

SEQ ID NO: 147383 - protein, 9 aa, Influenza A virus
AIGQVSRPM

SEQ ID NO: 147384 - protein, 9 aa, Influenza A virus
AIKCIRTFF

SEQ ID NO: 147385 - protein, 10 aa, Influenza A virus
AIKCIRTFFG

SEQ ID NO: 147386 - protein, 9 aa, Influenza A virus
AIKCMKTFF

SEQ ID NO: 147387 - protein, 9 aa, Influenza A virus
AIKCMRTFF

SEQ ID NO: 147388 - protein, 10 aa, Influenza A virus
AIKCMRTFFG

SEQ ID NO: 147389 - protein, 9 aa, Influenza A virus
AINCMKTFF

SEQ ID NO: 147390 - protein, 9 aa, Influenza A virus
AIRCMKTFF

SEQ ID NO: 147391 - protein, 10 aa, Influenza A virus
AIRCMKTFFG

SEQ ID NO: 147392 - protein, 9 aa, Influenza A virus
AKSVFNCLY

SEQ ID NO: 147393 - protein, 9 aa, Influenza A virus
AKSVFNNLY

SEQ ID NO: 147394 - protein, 9 aa, Influenza A virus
AKSVFNSLY

SEQ ID NO: 147395 - protein, 10 aa, Influenza A virus
ALGEKMAPEK

SEQ ID NO: 147396 - protein, 11 aa, Influenza A virus
ALGEKMAPEKV

SEQ ID NO: 147397 - protein, 10 aa, Influenza A virus
ALGENMAPEK

SEQ ID NO: 147398 - protein, 11 aa, Influenza A virus
ALGENMAPEKL

SEQ ID NO: 147399 - protein, 11 aa, Influenza A virus
ALGENMAPEKV

SEQ ID NO: 147400 - protein, 9 aa, Influenza A virus
ALGQVSRPM

SEQ ID NO: 147401 - protein, 10 aa, Influenza A virus
ALGQVSRPMF

SEQ ID NO: 147402 - protein, 11 aa, Influenza A virus
ALGQVSRPMFL

SEQ ID NO: 147403 - protein, 9 aa, Influenza A virus
ALKDNLEPG

SEQ ID NO: 147404 - protein, 10 aa, Influenza A virus
ALKDNLEPGT

SEQ ID NO: 147405 - protein, 11 aa, Influenza A virus
ALKDNLEPGTF

SEQ ID NO: 147406 - protein, 9 aa, Influenza A virus
ALLKHRFEI

SEQ ID NO: 147407 - protein, 10 aa, Influenza A virus
ALLKHRFEII

SEQ ID NO: 147408 - protein, 10 aa, Influenza A virus
ALLKHRFEIM

SEQ ID NO: 147409 - protein, 9 aa, Influenza A virus
ALLNASCAA

SEQ ID NO: 147410 - protein, 10 aa, Influenza A virus
ALLNASCAAM

SEQ ID NO: 147411 - protein, 9 aa, Influenza A virus
ALLNASSAA

SEQ ID NO: 147412 - protein, 10 aa, Influenza A virus
ALLNASSAAM

SEQ ID NO: 147413 - protein, 10 aa, Influenza A virus
ALRDKLEPGT

SEQ ID NO: 147414 - protein, 11 aa, Influenza A virus
ALRDKLEPGTF

SEQ ID NO: 147415 - protein, 9 aa, Influenza A virus
ALRDNLEPG

SEQ ID NO: 147416 - protein, 10 aa, Influenza A virus
ALRDNLEPGT

SEQ ID NO: 147417 - protein, 11 aa, Influenza A virus
ALRDNLEPGTF

SEQ ID NO: 147418 - protein, 9 aa, Influenza A virus
AMAWTVVNS

SEQ ID NO: 147419 - protein, 10 aa, Influenza A virus
AMAWTVVNSI

SEQ ID NO: 147420 - protein, 10 aa, Influenza A virus
AMDDFQLIPM

SEQ ID NO: 147421 - protein, 11 aa, Influenza A virus
AMDDFQLIPMI

SEQ ID NO: 147422 - protein, 10 aa, Influenza A virus
AMDDFQVIPM

SEQ ID NO: 147423 - protein, 11 aa, Influenza A virus
AMDDFQVIPMI

SEQ ID NO: 147424 - protein, 10 aa, Influenza A virus
AMDEFQLIPM

SEQ ID NO: 147425 - protein, 11 aa, Influenza A virus
AMDEFQLIPMI

SEQ ID NO: 147426 - protein, 9 aa, Influenza A virus
AMKEYGEDL

SEQ ID NO: 147427 - protein, 10 aa, Influenza A virus
AMKEYGEDLK

SEQ ID NO: 147428 - protein, 11 aa, Influenza A virus
AMKEYGEDLKV

SEQ ID NO: 147429 - protein, 10 aa, Influenza A virus
AMKEYGEDPK

SEQ ID NO: 147430 - protein, 10 aa, Influenza A virus
AMKEYGEDPR

SEQ ID NO: 147431 - protein, 9 aa, Influenza A virus
AMKEYGEDR

SEQ ID NO: 147432 - protein, 9 aa, Influenza A virus
AMKEYGENL

SEQ ID NO: 147433 - protein, 10 aa, Influenza A virus
AMKEYGENLK

SEQ ID NO: 147434 - protein, 11 aa, Influenza A virus
AMKEYGENLKI

SEQ ID NO: 147435 - protein, 10 aa, Influenza A virus
AMKEYGENPK

SEQ ID NO: 147436 - protein, 11 aa, Influenza A virus
AMKEYGENPKI

SEQ ID NO: 147437 - protein, 10 aa, Influenza A virus
AMRRLADQSL

SEQ ID NO: 147438 - protein, 9 aa, Influenza A virus
ANRGLWDSF

SEQ ID NO: 147439 - protein, 10 aa, Influenza A virus
ANRGLWDSFR

SEQ ID NO: 147440 - protein, 9 aa, Influenza A virus
ANYSLPPNF

SEQ ID NO: 147441 - protein, 9 aa, Influenza A virus
APIEHIAGM

SEQ ID NO: 147442 - protein, 9 aa, Influenza A virus
APIEHIASI

SEQ ID NO: 147443 - protein, 9 aa, Influenza A virus
APIEHIASM

SEQ ID NO: 147444 - protein, 10 aa, Influenza A virus
APIEHIASMR

SEQ ID NO: 147445 - protein, 9 aa, Influenza A virus
APIEYIASM

SEQ ID NO: 147446 - protein, 10 aa, Influenza A virus
APIEYIASMR

SEQ ID NO: 147447 - protein, 9 aa, Influenza A virus
APLEHIASM

SEQ ID NO: 147448 - protein, 10 aa, Influenza A virus
APLEHIASMR

SEQ ID NO: 147449 - protein, 9 aa, Influenza A virus
APRPTFLYV

SEQ ID NO: 147450 - protein, 10 aa, Influenza A virus
APRPTFLYVR

SEQ ID NO: 147451 - protein, 8 aa, Influenza A virus
APVSRPMF

SEQ ID NO: 147452 - protein, 9 aa, Influenza A virus
APVSRPMFL

SEQ ID NO: 147453 - protein, 10 aa, Influenza A virus
APVSRPMFLY

SEQ ID NO: 147454 - protein, 11 aa, Influenza A virus
APVSRPMFLYV

SEQ ID NO: 147455 - protein, 9 aa, Influenza A virus
AQLEGFSAE

SEQ ID NO: 147456 - protein, 10 aa, Influenza A virus
AQLEGFSAES

SEQ ID NO: 147457 - protein, 11 aa, Influenza A virus
AQLEGFSAESR

SEQ ID NO: 147458 - protein, 9 aa, Influenza A virus
AQSFNPMIV

SEQ ID NO: 147459 - protein, 9 aa, Influenza A virus
ARIDPFLRT

SEQ ID NO: 147460 - protein, 10 aa, Influenza A virus
ARIDPFLRTT

SEQ ID NO: 147461 - protein, 9 aa, Influenza A virus
ARIEPFFKT

SEQ ID NO: 147462 - protein, 10 aa, Influenza A virus
ARIEPFFKTT

SEQ ID NO: 147463 - protein, 10 aa, Influenza A virus
ARIEPFLKST

SEQ ID NO: 147464 - protein, 9 aa, Influenza A virus
ARIEPFLKT

SEQ ID NO: 147465 - protein, 10 aa, Influenza A virus
ARIEPFLKTT

SEQ ID NO: 147466 - protein, 9 aa, Influenza A virus
ARIEPFLRT

SEQ ID NO: 147467 - protein, 10 aa, Influenza A virus
ARIEPFLRTT

SEQ ID NO: 147468 - protein, 9 aa, Influenza A virus
ARIEPFSKT

SEQ ID NO: 147469 - protein, 9 aa, Influenza A virus
ARIKTRLFT

SEQ ID NO: 147470 - protein, 10 aa, Influenza A virus
ARIKTRLFTI

SEQ ID NO: 147471 - protein, 11 aa, Influenza A virus
ARIKTRLFTIR

SEQ ID NO: 147472 - protein, 9 aa, Influenza A virus
ARIKTRLYT

SEQ ID NO: 147473 - protein, 10 aa, Influenza A virus
ARIKTRLYTI

SEQ ID NO: 147474 - protein, 11 aa, Influenza A virus
ARIKTRLYTIR

SEQ ID NO: 147475 - protein, 10 aa, Influenza A virus
ARVKTRLFTI

SEQ ID NO: 147476 - protein, 11 aa, Influenza A virus
ARVKTRLFTIR

SEQ ID NO: 147477 - protein, 9 aa, Influenza A virus
ASCAAMDEF

SEQ ID NO: 147478 - protein, 8 aa, Influenza A virus
ASIRRNYF

SEQ ID NO: 147479 - protein, 9 aa, Influenza A virus
ASIRRNYFT

SEQ ID NO: 147480 - protein, 10 aa, Influenza A virus
ASIRRNYFTA

SEQ ID NO: 147481 - protein, 8 aa, Influenza A virus
ASMRRNYF

SEQ ID NO: 147482 - protein, 9 aa, Influenza A virus
ASMRRNYFT

SEQ ID NO: 147483 - protein, 10 aa, Influenza A virus
ASMRRNYFTA

SEQ ID NO: 147484 - protein, 10 aa, Influenza A virus
ASMRRNYFTS

SEQ ID NO: 147485 - protein, 9 aa, Influenza A virus
ASRGLWDSF

SEQ ID NO: 147486 - protein, 10 aa, Influenza A virus
ASRGLWDSFH

SEQ ID NO: 147487 - protein, 10 aa, Influenza A virus
ASRGLWDSFR

SEQ ID NO: 147488 - protein, 9 aa, Influenza A virus
ASSAAMDDF

SEQ ID NO: 147489 - protein, 9 aa, Influenza A virus
ASWFNSFLA

SEQ ID NO: 147490 - protein, 10 aa, Influenza A virus
ASWFNSFLAH

SEQ ID NO: 147491 - protein, 11 aa, Influenza A virus
ASWFNSFLAHV

SEQ ID NO: 147492 - protein, 10 aa, Influenza A virus
ASWFNSFLTH

SEQ ID NO: 147493 - protein, 10 aa, Influenza A virus
ASWIQNEFNK

SEQ ID NO: 147494 - protein, 8 aa, Influenza A virus
ASWIQSEF

SEQ ID NO: 147495 - protein, 10 aa, Influenza A virus
ASWIQSEFNK

SEQ ID NO: 147496 - protein, 8 aa, Influenza A virus
ASWVQSEF

SEQ ID NO: 147497 - protein, 10 aa, Influenza A virus
ASWVQSEFNK

SEQ ID NO: 147498 - protein, 9 aa, Influenza A virus
ATEYIMKGV

SEQ ID NO: 147499 - protein, 10 aa, Influenza A virus
ATEYIMKGVY

SEQ ID NO: 147500 - protein, 11 aa, Influenza A virus
AVEECLINDPW

SEQ ID NO: 147501 - protein, 9 aa, Influenza A virus
AVGQVSRPM

SEQ ID NO: 147502 - protein, 9 aa, Influenza A virus
AVRCMKTFF

SEQ ID NO: 147503 - protein, 10 aa, Influenza A virus
AVRCMKTFFG

SEQ ID NO: 147504 - protein, 11 aa, Influenza A virus
AVRCMKTFFGW

SEQ ID NO: 147505 - protein, 9 aa, Influenza A virus
AWKQVLAEI

SEQ ID NO: 147506 - protein, 9 aa, Influenza A virus
AWKQVLAEL

SEQ ID NO: 147507 - protein, 11 aa, Influenza A virus
AWKQVLAELQY

SEQ ID NO: 147508 - protein, 9 aa, Influenza A virus
AWKQVQAEL

SEQ ID NO: 147509 - protein, 9 aa, Influenza A virus
AWNQVLAEL

SEQ ID NO: 147510 - protein, 10 aa, Influenza A virus
AWNQVLAELK

SEQ ID NO: 147511 - protein, 11 aa, Influenza A virus
AYVDGFKPNGY

SEQ ID NO: 147512 - protein, 9 aa, Influenza A virus
CAAMDDFQV

SEQ ID NO: 147513 - protein, 10 aa, Influenza A virus
CCQRSKFLLM

SEQ ID NO: 147514 - protein, 9 aa, Influenza A virus
CELTDSGWI

SEQ ID NO: 147515 - protein, 11 aa, Influenza A virus
CELTDSGWIEL

SEQ ID NO: 147516 - protein, 9 aa, Influenza A virus
CELTDSIWI

SEQ ID NO: 147517 - protein, 11 aa, Influenza A virus
CELTDSIWIEL

SEQ ID NO: 147518 - protein, 8 aa, Influenza A virus
CELTDSSW

SEQ ID NO: 147519 - protein, 9 aa, Influenza A virus
CELTDSSWI

SEQ ID NO: 147520 - protein, 11 aa, Influenza A virus
CELTDSSWIEL

SEQ ID NO: 147521 - protein, 9 aa, Influenza A virus
CELTDSSWL

SEQ ID NO: 147522 - protein, 11 aa, Influenza A virus
CELTDSSWLEL

SEQ ID NO: 147523 - protein, 9 aa, Influenza A virus
CELTDSSWM

SEQ ID NO: 147524 - protein, 11 aa, Influenza A virus
CELTDSSWMEL

SEQ ID NO: 147525 - protein, 9 aa, Influenza A virus
CELTDSTWI

SEQ ID NO: 147526 - protein, 11 aa, Influenza A virus
CELTDSTWIEL

SEQ ID NO: 147527 - protein, 9 aa, Influenza A virus
CELTDSVWI

SEQ ID NO: 147528 - protein, 11 aa, Influenza A virus
CELTDSVWIEL

SEQ ID NO: 147529 - protein, 8 aa, Influenza A virus
CELTESSW

SEQ ID NO: 147530 - protein, 9 aa, Influenza A virus
CELTESSWI

SEQ ID NO: 147531 - protein, 11 aa, Influenza A virus
CELTESSWIEL

SEQ ID NO: 147532 - protein, 8 aa, Influenza A virus
CELTNSIW

SEQ ID NO: 147533 - protein, 9 aa, Influenza A virus
CELTNSIWI

SEQ ID NO: 147534 - protein, 11 aa, Influenza A virus
CELTNSIWIEL

SEQ ID NO: 147535 - protein, 8 aa, Influenza A virus
CFENFRAY

SEQ ID NO: 147536 - protein, 9 aa, Influenza A virus
CFENFRAYV

SEQ ID NO: 147537 - protein, 9 aa, Influenza A virus
CFMYSDFHF

SEQ ID NO: 147538 - protein, 10 aa, Influenza A virus
CFMYSDFHFI

SEQ ID NO: 147539 - protein, 10 aa, Influenza A virus
CFMYSDFHFV

SEQ ID NO: 147540 - protein, 11 aa, Influenza A virus
CFMYSDFHFVD

SEQ ID NO: 147541 - protein, 9 aa, Influenza A virus
CFNPIIVEL

SEQ ID NO: 147542 - protein, 9 aa, Influenza A virus
CFNPMIIEL

SEQ ID NO: 147543 - protein, 9 aa, Influenza A virus
CFNPMIVEL

SEQ ID NO: 147544 - protein, 9 aa, Influenza A virus
CFNPMVVEL

SEQ ID NO: 147545 - protein, 9 aa, Influenza A virus
CFQRSKFLL

SEQ ID NO: 147546 - protein, 10 aa, Influenza A virus
CFQRSKFLLM

SEQ ID NO: 147547 - protein, 9 aa, Influenza A virus
CHQRSKFLL

SEQ ID NO: 147548 - protein, 10 aa, Influenza A virus
CHQRSKFLLM

SEQ ID NO: 147549 - protein, 9 aa, Influenza A virus
CIENFRAYV

SEQ ID NO: 147550 - protein, 11 aa, Influenza A virus
CIESKLSQMSK

SEQ ID NO: 147551 - protein, 9 aa, Influenza A virus
CILEIGDML

SEQ ID NO: 147552 - protein, 10 aa, Influenza A virus
CILEIGDMLL

SEQ ID NO: 147553 - protein, 11 aa, Influenza A virus
CILEIGDMLLR

SEQ ID NO: 147554 - protein, 9 aa, Influenza A virus
CILEIGDMV

SEQ ID NO: 147555 - protein, 11 aa, Influenza A virus
CILEIGDMVLR

SEQ ID NO: 147556 - protein, 9 aa, Influenza A virus
CIRTFFGWK

SEQ ID NO: 147557 - protein, 10 aa, Influenza A virus
CKNISDLKQY

SEQ ID NO: 147558 - protein, 9 aa, Influenza A virus
CLENFRAYV

SEQ ID NO: 147559 - protein, 8 aa, Influenza A virus
CLINDPWV

SEQ ID NO: 147560 - protein, 9 aa, Influenza A virus
CLINDPWVL

SEQ ID NO: 147561 - protein, 10 aa, Influenza A virus
CLINDPWVLL

SEQ ID NO: 147562 - protein, 9 aa, Influenza A virus
CLLQSLQQI

SEQ ID NO: 147563 - protein, 9 aa, Influenza A virus
CLLQSLQQV

SEQ ID NO: 147564 - protein, 10 aa, Influenza A virus
CLLQSLQQVE

SEQ ID NO: 147565 - protein, 9 aa, Influenza A virus
CLPHLLQQI

SEQ ID NO: 147566 - protein, 11 aa, Influenza A virus
CLYASPQLEGF

SEQ ID NO: 147567 - protein, 9 aa, Influenza A virus
CMKTFFGWK

SEQ ID NO: 147568 - protein, 9 aa, Influenza A virus
CMKTFFGWR

SEQ ID NO: 147569 - protein, 9 aa, Influenza A virus
CMRTFFGWK

SEQ ID NO: 147570 - protein, 10 aa, Influenza A virus
CNTTGIEKPK

SEQ ID NO: 147571 - protein, 10 aa, Influenza A virus
CNTTGVDKPK

SEQ ID NO: 147572 - protein, 10 aa, Influenza A virus
CNTTGVEKPK

SEQ ID NO: 147573 - protein, 10 aa, Influenza A virus
CNTTGVGKPK

SEQ ID NO: 147574 - protein, 10 aa, Influenza A virus
CNTTGVGKPR

SEQ ID NO: 147575 - protein, 9 aa, Influenza A virus
CPFQSLQQI

SEQ ID NO: 147576 - protein, 8 aa, Influenza A virus
CQRSKFLL

SEQ ID NO: 147577 - protein, 9 aa, Influenza A virus
CQRSKFLLM

SEQ ID NO: 147578 - protein, 9 aa, Influenza A virus
CRATEYIMK

SEQ ID NO: 147579 - protein, 9 aa, Influenza A virus
CRTLLAKSV

SEQ ID NO: 147580 - protein, 10 aa, Influenza A virus
CRTLLAKSVF

SEQ ID NO: 147581 - protein, 9 aa, Influenza A virus
CSQRSKFLL

SEQ ID NO: 147582 - protein, 10 aa, Influenza A virus
CSQRSKFLLM

SEQ ID NO: 147583 - protein, 9 aa, Influenza A virus
CSQRSKVMM

SEQ ID NO: 147584 - protein, 10 aa, Influenza A virus
CSQRSKVMMM

SEQ ID NO: 147585 - protein, 9 aa, Influenza A virus
CTHLEACFM

SEQ ID NO: 147586 - protein, 10 aa, Influenza A virus
CTHLEACFMY

SEQ ID NO: 147587 - protein, 9 aa, Influenza A virus
CTHLEICFM

SEQ ID NO: 147588 - protein, 10 aa, Influenza A virus
CTHLEICFMY

SEQ ID NO: 147589 - protein, 10 aa, Influenza A virus
CTHLEVCFMY

SEQ ID NO: 147590 - protein, 9 aa, Influenza A virus
CTHMEVCFM

SEQ ID NO: 147591 - protein, 10 aa, Influenza A virus
CTHMEVCFMY

SEQ ID NO: 147592 - protein, 9 aa, Influenza A virus
CTHMEVSFM

SEQ ID NO: 147593 - protein, 10 aa, Influenza A virus
CTHMEVSFMY

SEQ ID NO: 147594 - protein, 9 aa, Influenza A virus
CVHEIGDML

SEQ ID NO: 147595 - protein, 11 aa, Influenza A virus
CVHEIGDMLLR

SEQ ID NO: 147596 - protein, 9 aa, Influenza A virus
CVLEIGDMI

SEQ ID NO: 147597 - protein, 11 aa, Influenza A virus
CVLEIGDMILR

SEQ ID NO: 147598 - protein, 9 aa, Influenza A virus
CVLEIGDML

SEQ ID NO: 147599 - protein, 10 aa, Influenza A virus
CVLEIGDMLL

SEQ ID NO: 147600 - protein, 11 aa, Influenza A virus
CVLEIGDMLLR

SEQ ID NO: 147601 - protein, 9 aa, Influenza A virus
CVLEIGEML

SEQ ID NO: 147602 - protein, 10 aa, Influenza A virus
CVLEIGEMLL

SEQ ID NO: 147603 - protein, 11 aa, Influenza A virus
CVLEIGEMLLR

SEQ ID NO: 147604 - protein, 9 aa, Influenza A virus
CVLEVGDML

SEQ ID NO: 147605 - protein, 10 aa, Influenza A virus
CVLEVGDMLL

SEQ ID NO: 147606 - protein, 11 aa, Influenza A virus
CVLEVGDMLLR

SEQ ID NO: 147607 - protein, 11 aa, Influenza A virus
CVLRIGDMLLR

SEQ ID NO: 147608 - protein, 8 aa, Influenza A virus
CYQRSKFL

SEQ ID NO: 147609 - protein, 9 aa, Influenza A virus
CYQRSKFLL

SEQ ID NO: 147610 - protein, 10 aa, Influenza A virus
CYQRSKFLLM

SEQ ID NO: 147611 - protein, 9 aa, Influenza A virus
DAAPIEHIA

SEQ ID NO: 147612 - protein, 9 aa, Influenza A virus
DAIKCIRTF

SEQ ID NO: 147613 - protein, 9 aa, Influenza A virus
DAIKCMKTF

SEQ ID NO: 147614 - protein, 9 aa, Influenza A virus
DAIKCMRTF

SEQ ID NO: 147615 - protein, 9 aa, Influenza A virus
DAINCMKTF

SEQ ID NO: 147616 - protein, 9 aa, Influenza A virus
DAIRCMKTF

SEQ ID NO: 147617 - protein, 9 aa, Influenza A virus
DAVRCMKTF

SEQ ID NO: 147618 - protein, 9 aa, Influenza A virus
DCKDVSDLR

SEQ ID NO: 147619 - protein, 8 aa, Influenza A virus
DEFQLIPM

SEQ ID NO: 147620 - protein, 9 aa, Influenza A virus
DEFQLIPMI

SEQ ID NO: 147621 - protein, 10 aa, Influenza A virus
DEIGEDIAPL

SEQ ID NO: 147622 - protein, 11 aa, Influenza A virus
DEPEARSLASW

SEQ ID NO: 147623 - protein, 11 aa, Influenza A virus
DEPEFRSLASW

SEQ ID NO: 147624 - protein, 8 aa, Influenza A virus
DEPELRSF

SEQ ID NO: 147625 - protein, 11 aa, Influenza A virus
DEPELRSFSSW

SEQ ID NO: 147626 - protein, 11 aa, Influenza A virus
DEPELRSISSW

SEQ ID NO: 147627 - protein, 11 aa, Influenza A virus
DEPELRSLASW

SEQ ID NO: 147628 - protein, 11 aa, Influenza A virus
DEPELRSLSSW

SEQ ID NO: 147629 - protein, 11 aa, Influenza A virus
DEPEQRSLASW

SEQ ID NO: 147630 - protein, 11 aa, Influenza A virus
DEPESRSLASW

SEQ ID NO: 147631 - protein, 11 aa, Influenza A virus
DEPKLRSLSSW

SEQ ID NO: 147632 - protein, 9 aa, Influenza A virus
DEQGESIVV

SEQ ID NO: 147633 - protein, 9 aa, Influenza A virus
DERGESIIV

SEQ ID NO: 147634 - protein, 9 aa, Influenza A virus
DERSESIIV

SEQ ID NO: 147635 - protein, 10 aa, Influenza A virus
DFEDEKKIPR

SEQ ID NO: 147636 - protein, 8 aa, Influenza A virus
DFHFIDER

SEQ ID NO: 147637 - protein, 10 aa, Influenza A virus
DFHFINEQGR

SEQ ID NO: 147638 - protein, 8 aa, Influenza A virus
DFHFINER

SEQ ID NO: 147639 - protein, 8 aa, Influenza A virus
DFHFVDER

SEQ ID NO: 147640 - protein, 10 aa, Influenza A virus
DFQLIPMISK

SEQ ID NO: 147641 - protein, 10 aa, Influenza A virus
DFVAQSFNPM

SEQ ID NO: 147642 - protein, 9 aa, Influenza A virus
DIAPIEHIA

SEQ ID NO: 147643 - protein, 11 aa, Influenza A virus
DIAPIEHIASI

SEQ ID NO: 147644 - protein, 11 aa, Influenza A virus
DIAPIEHIASM

SEQ ID NO: 147645 - protein, 9 aa, Influenza A virus
DIAPIEYIA

SEQ ID NO: 147646 - protein, 11 aa, Influenza A virus
DIAPIEYIASM

SEQ ID NO: 147647 - protein, 11 aa, Influenza A virus
DIAPLEHIASM

SEQ ID NO: 147648 - protein, 10 aa, Influenza A virus
DIENEEKIPR

SEQ ID NO: 147649 - protein, 10 aa, Influenza A virus
DIENEGKIPR

SEQ ID NO: 147650 - protein, 10 aa, Influenza A virus
DIESEEKIPR

SEQ ID NO: 147651 - protein, 10 aa, Influenza A virus
DIESEKKVPR

SEQ ID NO: 147652 - protein, 10 aa, Influenza A virus
DIETEEKIPR

SEQ ID NO: 147653 - protein, 9 aa, Influenza A virus
DLYDYKEDR

SEQ ID NO: 147654 - protein, 9 aa, Influenza A virus
DLYDYKENR

SEQ ID NO: 147655 - protein, 9 aa, Influenza A virus
DLYDYKGNR

SEQ ID NO: 147656 - protein, 9 aa, Influenza A virus
DLYDYKKNR

SEQ ID NO: 147657 - protein, 9 aa, Influenza A virus
DLYDYRENR

SEQ ID NO: 147658 - protein, 8 aa, Influenza A virus
DMILRSAI

SEQ ID NO: 147659 - protein, 8 aa, Influenza A virus
DMILRTAI

SEQ ID NO: 147660 - protein, 8 aa, Influenza A virus
DMLIRSAI

SEQ ID NO: 147661 - protein, 11 aa, Influenza A virus
DMLIRSAIGQV

SEQ ID NO: 147662 - protein, 8 aa, Influenza A virus
DMLLRSAI

SEQ ID NO: 147663 - protein, 9 aa, Influenza A virus
DMLLRSAIA

SEQ ID NO: 147664 - protein, 11 aa, Influenza A virus
DMLLRSAIAPV

SEQ ID NO: 147665 - protein, 11 aa, Influenza A virus
DMLLRSAIGHV

SEQ ID NO: 147666 - protein, 11 aa, Influenza A virus
DMLLRSAIGQV

SEQ ID NO: 147667 - protein, 8 aa, Influenza A virus
DMLLRSAL

SEQ ID NO: 147668 - protein, 11 aa, Influenza A virus
DMLLRSALGQV

SEQ ID NO: 147669 - protein, 8 aa, Influenza A virus
DMLLRSTI

SEQ ID NO: 147670 - protein, 10 aa, Influenza A virus
DMLLRSTIGR

SEQ ID NO: 147671 - protein, 11 aa, Influenza A virus
DMLLRSTIGRV

SEQ ID NO: 147672 - protein, 8 aa, Influenza A virus
DMLLRTAI

SEQ ID NO: 147673 - protein, 11 aa, Influenza A virus
DMLLRTAIGQV

SEQ ID NO: 147674 - protein, 8 aa, Influenza A virus
DMLLRTAV

SEQ ID NO: 147675 - protein, 11 aa, Influenza A virus
DMLLRTAVGQV

SEQ ID NO: 147676 - protein, 8 aa, Influenza A virus
DMLLRTEI

SEQ ID NO: 147677 - protein, 8 aa, Influenza A virus
DMLLRTSI

SEQ ID NO: 147678 - protein, 11 aa, Influenza A virus
DMLLRTSIGQV

SEQ ID NO: 147679 - protein, 10 aa, Influenza A virus
DMTKDFFENK

SEQ ID NO: 147680 - protein, 10 aa, Influenza A virus
DMTKEFFENK

SEQ ID NO: 147681 - protein, 10 aa, Influenza A virus
DMTKEFFENR

SEQ ID NO: 147682 - protein, 10 aa, Influenza A virus
DMTKEFFESK

SEQ ID NO: 147683 - protein, 10 aa, Influenza A virus
DMTKEFFKNK

SEQ ID NO: 147684 - protein, 10 aa, Influenza A virus
DMTREFFENK

SEQ ID NO: 147685 - protein, 8 aa, Influenza A virus
DMVLRTAI

SEQ ID NO: 147686 - protein, 9 aa, Influenza A virus
DPFLRTTPR

SEQ ID NO: 147687 - protein, 11 aa, Influenza A virus
DPFLRTTPRPL

SEQ ID NO: 147688 - protein, 10 aa, Influenza A virus
DPWVLLNASW

SEQ ID NO: 147689 - protein, 9 aa, Influenza A virus
DRAMAWTVV

SEQ ID NO: 147690 - protein, 10 aa, Influenza A virus
DRFIEIGVTR

SEQ ID NO: 147691 - protein, 11 aa, Influenza A virus
DRFIEIGVTRR

SEQ ID NO: 147692 - protein, 10 aa, Influenza A virus
DRFIKIGVTR

SEQ ID NO: 147693 - protein, 11 aa, Influenza A virus
DRFIKIGVTRR

SEQ ID NO: 147694 - protein, 10 aa, Influenza A virus
DSIWIELDEI

SEQ ID NO: 147695 - protein, 9 aa, Influenza A virus
DSNALLKHR

SEQ ID NO: 147696 - protein, 10 aa, Influenza A virus
DSSWIELDEI

SEQ ID NO: 147697 - protein, 10 aa, Influenza A virus
DSVWIELDEI

SEQ ID NO: 147698 - protein, 9 aa, Influenza A virus
DVAPIEHIA

SEQ ID NO: 147699 - protein, 11 aa, Influenza A virus
DVAPIEHIAGM

SEQ ID NO: 147700 - protein, 11 aa, Influenza A virus
DVAPIEHIASI

SEQ ID NO: 147701 - protein, 11 aa, Influenza A virus
DVAPIEHIASM

SEQ ID NO: 147702 - protein, 9 aa, Influenza A virus
DVAPIEYIA

SEQ ID NO: 147703 - protein, 11 aa, Influenza A virus
DVAPIEYIASM

SEQ ID NO: 147704 - protein, 10 aa, Influenza A virus
DVENEEKIPK

SEQ ID NO: 147705 - protein, 9 aa, Influenza A virus
DVSDLKQYY

SEQ ID NO: 147706 - protein, 10 aa, Influenza A virus
DVTKEFFENK

SEQ ID NO: 147707 - protein, 10 aa, Influenza A virus
DVVNFVSMEF

SEQ ID NO: 147708 - protein, 10 aa, Influenza A virus
DVVNYVSMEF

SEQ ID NO: 147709 - protein, 10 aa, Influenza A virus
DVVTFVSMEF

SEQ ID NO: 147710 - protein, 9 aa, Influenza A virus
DYKEDRFIK

SEQ ID NO: 147711 - protein, 11 aa, Influenza A virus
DYSLPPNFSSL

SEQ ID NO: 147712 - protein, 11 aa, Influenza A virus
EACFMYSDFHF

SEQ ID NO: 147713 - protein, 9 aa, Influenza A virus
EAQSSVKEK

SEQ ID NO: 147714 - protein, 10 aa, Influenza A virus
EAWPIGESPK

SEQ ID NO: 147715 - protein, 9 aa, Influenza A virus
ECKDVSDLK

SEQ ID NO: 147716 - protein, 10 aa, Influenza A virus
EDIAPIEHIA

SEQ ID NO: 147717 - protein, 10 aa, Influenza A virus
EDIAPIEYIA

SEQ ID NO: 147718 - protein, 11 aa, Influenza A virus
EDRFIEIGVTR

SEQ ID NO: 147719 - protein, 11 aa, Influenza A virus
EDRFIKIGVTR

SEQ ID NO: 147720 - protein, 10 aa, Influenza A virus
EDVAPIEHIA

SEQ ID NO: 147721 - protein, 10 aa, Influenza A virus
EDVAPIEYIA

SEQ ID NO: 147722 - protein, 8 aa, Influenza A virus
EEFVRQCF

SEQ ID NO: 147723 - protein, 11 aa, Influenza A virus
EEFVRQCFNPM

SEQ ID NO: 147724 - protein, 10 aa, Influenza A virus
EEKFEISGTM

SEQ ID NO: 147725 - protein, 10 aa, Influenza A virus
EEKFEITGTM

SEQ ID NO: 147726 - protein, 9 aa, Influenza A virus
EEMATKADY

SEQ ID NO: 147727 - protein, 11 aa, Influenza A virus
EEMATKADYTL

SEQ ID NO: 147728 - protein, 9 aa, Influenza A virus
EEMATKEDY

SEQ ID NO: 147729 - protein, 11 aa, Influenza A virus
EEMATKEDYTL

SEQ ID NO: 147730 - protein, 9 aa, Influenza A virus
EEMATKSDY

SEQ ID NO: 147731 - protein, 11 aa, Influenza A virus
EEMATKSDYTL

SEQ ID NO: 147732 - protein, 9 aa, Influenza A virus
EEMATKTDY

SEQ ID NO: 147733 - protein, 11 aa, Influenza A virus
EEMATKTDYTL

SEQ ID NO: 147734 - protein, 10 aa, Influenza A virus
EERFEIRGTM

SEQ ID NO: 147735 - protein, 9 aa, Influenza A virus
EERFEITGA

SEQ ID NO: 147736 - protein, 10 aa, Influenza A virus
EERFEITGAM

SEQ ID NO: 147737 - protein, 10 aa, Influenza A virus
EERFEITGTM

SEQ ID NO: 147738 - protein, 10 aa, Influenza A virus
EESSIGKVCR

SEQ ID NO: 147739 - protein, 8 aa, Influenza A virus
EETHIHIF

SEQ ID NO: 147740 - protein, 10 aa, Influenza A virus
EETHIHIFSF

SEQ ID NO: 147741 - protein, 10 aa, Influenza A virus
EETIEEKFEI

SEQ ID NO: 147742 - protein, 10 aa, Influenza A virus
EETIEERFEI

SEQ ID NO: 147743 - protein, 11 aa, Influenza A virus
EETIEERFEIR

SEQ ID NO: 147744 - protein, 10 aa, Influenza A virus
EETVEERFEI

SEQ ID NO: 147745 - protein, 9 aa, Influenza A virus
EFFENKSEK

SEQ ID NO: 147746 - protein, 10 aa, Influenza A virus
EFFENKSETW

SEQ ID NO: 147747 - protein, 10 aa, Influenza A virus
EFFENNSETW

SEQ ID NO: 147748 - protein, 10 aa, Influenza A virus
EFFENRSETW

SEQ ID NO: 147749 - protein, 10 aa, Influenza A virus
EFVRQCFNPM

SEQ ID NO: 147750 - protein, 9 aa, Influenza A virus
EGFSAESRK

SEQ ID NO: 147751 - protein, 9 aa, Influenza A virus
EGFSAESRR

SEQ ID NO: 147752 - protein, 10 aa, Influenza A virus
EGIPLHDAIK

SEQ ID NO: 147753 - protein, 9 aa, Influenza A virus
EGIPLYDAI

SEQ ID NO: 147754 - protein, 10 aa, Influenza A virus
EGIPLYDAIK

SEQ ID NO: 147755 - protein, 10 aa, Influenza A virus
EGIPLYDAIR

SEQ ID NO: 147756 - protein, 9 aa, Influenza A virus
EGIPLYDAV

SEQ ID NO: 147757 - protein, 10 aa, Influenza A virus
EGIPLYDAVR

SEQ ID NO: 147758 - protein, 9 aa, Influenza A virus
EGKLSQMSR

SEQ ID NO: 147759 - protein, 11 aa, Influenza A virus
EGLYEAIEECL

SEQ ID NO: 147760 - protein, 11 aa, Influenza A virus
EGLYGAIEECL

SEQ ID NO: 147761 - protein, 8 aa, Influenza A virus
EGRRRTNL

SEQ ID NO: 147762 - protein, 11 aa, Influenza A virus
EICFMYSDFHF

SEQ ID NO: 147763 - protein, 9 aa, Influenza A virus
EIGEDAAPI

SEQ ID NO: 147764 - protein, 9 aa, Influenza A virus
EIGEDIAPI

SEQ ID NO: 147765 - protein, 9 aa, Influenza A virus
EIGEDIAPL

SEQ ID NO: 147766 - protein, 9 aa, Influenza A virus
EIGEDVAPI

SEQ ID NO: 147767 - protein, 11 aa, Influenza A virus
EIGEMLLRTAI

SEQ ID NO: 147768 - protein, 9 aa, Influenza A virus
EIGENVAPI

SEQ ID NO: 147769 - protein, 9 aa, Influenza A virus
EIHIYYLEK

SEQ ID NO: 147770 - protein, 9 aa, Influenza A virus
EIIEGRDRA

SEQ ID NO: 147771 - protein, 10 aa, Influenza A virus
EIIEGRDRAM

SEQ ID NO: 147772 - protein, 10 aa, Influenza A virus
EIIEGRDRNV

SEQ ID NO: 147773 - protein, 10 aa, Influenza A virus
EIIEGRDRTI

SEQ ID NO: 147774 - protein, 10 aa, Influenza A virus
EIIEGRDRTV

SEQ ID NO: 147775 - protein, 9 aa, Influenza A virus
EIQDFEDEK

SEQ ID NO: 147776 - protein, 10 aa, Influenza A virus
EIQDFEDEKK

SEQ ID NO: 147777 - protein, 9 aa, Influenza A virus
EIQDIEDEK

SEQ ID NO: 147778 - protein, 10 aa, Influenza A virus
EIQDIEDEKK

SEQ ID NO: 147779 - protein, 9 aa, Influenza A virus
EIQDIESEK

SEQ ID NO: 147780 - protein, 10 aa, Influenza A virus
EIQDIESEKK

SEQ ID NO: 147781 - protein, 10 aa, Influenza A virus
EIRRCLLQSL

SEQ ID NO: 147782 - protein, 9 aa, Influenza A virus
EITGTMCRL

SEQ ID NO: 147783 - protein, 9 aa, Influenza A virus
EITGTMRNV

SEQ ID NO: 147784 - protein, 10 aa, Influenza A virus
EKANKIKSEK

SEQ ID NO: 147785 - protein, 10 aa, Influenza A virus
EKANKVKSEK

SEQ ID NO: 147786 - protein, 9 aa, Influenza A virus
EKFEISGTM

SEQ ID NO: 147787 - protein, 11 aa, Influenza A virus
EKFEISGTMRR

SEQ ID NO: 147788 - protein, 9 aa, Influenza A virus
EKFEITGTM

SEQ ID NO: 147789 - protein, 11 aa, Influenza A virus
EKFEITGTMRR

SEQ ID NO: 147790 - protein, 10 aa, Influenza A virus
EKTHIHIFSF

SEQ ID NO: 147791 - protein, 10 aa, Influenza A virus
ELAEKAMKEY

SEQ ID NO: 147792 - protein, 10 aa, Influenza A virus
ELAEKTMKEY

SEQ ID NO: 147793 - protein, 10 aa, Influenza A virus
ELAERAMKEY

SEQ ID NO: 147794 - protein, 9 aa, Influenza A virus
ELDDPNALL

SEQ ID NO: 147795 - protein, 9 aa, Influenza A virus
ELDEIGENV

SEQ ID NO: 147796 - protein, 9 aa, Influenza A virus
ELGDPNALL

SEQ ID NO: 147797 - protein, 10 aa, Influenza A virus
ELGDPNALLK

SEQ ID NO: 147798 - protein, 9 aa, Influenza A virus
ELGDPSALL

SEQ ID NO: 147799 - protein, 10 aa, Influenza A virus
ELGDPSALLK

SEQ ID NO: 147800 - protein, 10 aa, Influenza A virus
ELKDIENEEK

SEQ ID NO: 147801 - protein, 10 aa, Influenza A virus
ELQDIENEEK

SEQ ID NO: 147802 - protein, 10 aa, Influenza A virus
ELQDIENEGK

SEQ ID NO: 147803 - protein, 10 aa, Influenza A virus
ELQDIENGEK

SEQ ID NO: 147804 - protein, 10 aa, Influenza A virus
ELQDIESEEK

SEQ ID NO: 147805 - protein, 10 aa, Influenza A virus
ELQDIETEEK

SEQ ID NO: 147806 - protein, 10 aa, Influenza A virus
ELQDVENEEK

SEQ ID NO: 147807 - protein, 10 aa, Influenza A virus
ELQYIENEEK

SEQ ID NO: 147808 - protein, 10 aa, Influenza A virus
ELTDSIWIEL

SEQ ID NO: 147809 - protein, 10 aa, Influenza A virus
ELTDSSWIEL

SEQ ID NO: 147810 - protein, 10 aa, Influenza A virus
ELTDSSWLEL

SEQ ID NO: 147811 - protein, 10 aa, Influenza A virus
ELTDSSWMEL

SEQ ID NO: 147812 - protein, 10 aa, Influenza A virus
ELTDSTWIEL

SEQ ID NO: 147813 - protein, 10 aa, Influenza A virus
ELTDSVWIEL

SEQ ID NO: 147814 - protein, 10 aa, Influenza A virus
ELTESSWIEL

SEQ ID NO: 147815 - protein, 10 aa, Influenza A virus
ELTNSIWIEL

SEQ ID NO: 147816 - protein, 8 aa, Influenza A virus
EMANRGLW

SEQ ID NO: 147817 - protein, 8 aa, Influenza A virus
EMASRGLW

SEQ ID NO: 147818 - protein, 10 aa, Influenza A virus
EMATKADYTL

SEQ ID NO: 147819 - protein, 10 aa, Influenza A virus
EMATKSDYTL

SEQ ID NO: 147820 - protein, 10 aa, Influenza A virus
EMATKTDYTL

SEQ ID NO: 147821 - protein, 8 aa, Influenza A virus
EMLLRTAI

SEQ ID NO: 147822 - protein, 11 aa, Influenza A virus
EMLLRTAIGQV

SEQ ID NO: 147823 - protein, 10 aa, Influenza A virus
EMRPCLLQSL

SEQ ID NO: 147824 - protein, 10 aa, Influenza A virus
EMRRCLLQSL

SEQ ID NO: 147825 - protein, 10 aa, Influenza A virus
EMRRCPFQSL

SEQ ID NO: 147826 - protein, 9 aa, Influenza A virus
ENKSETWPV

SEQ ID NO: 147827 - protein, 9 aa, Influenza A virus
ENKSKTWPI

SEQ ID NO: 147828 - protein, 9 aa, Influenza A virus
ENNSETWPI

SEQ ID NO: 147829 - protein, 9 aa, Influenza A virus
ENRFIEIGV

SEQ ID NO: 147830 - protein, 11 aa, Influenza A virus
ENRFIEIGVTR

SEQ ID NO: 147831 - protein, 9 aa, Influenza A virus
ENRFIEVGV

SEQ ID NO: 147832 - protein, 11 aa, Influenza A virus
ENRFIEVGVTR

SEQ ID NO: 147833 - protein, 11 aa, Influenza A virus
ENRFTEIGVTR

SEQ ID NO: 147834 - protein, 9 aa, Influenza A virus
ENRFVEIGV

SEQ ID NO: 147835 - protein, 11 aa, Influenza A virus
ENRFVEIGVTR

SEQ ID NO: 147836 - protein, 10 aa, Influenza A virus
ENTHIHIFSF

SEQ ID NO: 147837 - protein, 10 aa, Influenza A virus
ENVAPIEHIA

SEQ ID NO: 147838 - protein, 10 aa, Influenza A virus
EPDTRSLASW

SEQ ID NO: 147839 - protein, 10 aa, Influenza A virus
EPEARSLASW

SEQ ID NO: 147840 - protein, 9 aa, Influenza A virus
EPEDPNALL

SEQ ID NO: 147841 - protein, 10 aa, Influenza A virus
EPEFRSLASW

SEQ ID NO: 147842 - protein, 10 aa, Influenza A virus
EPELRSFSSW

SEQ ID NO: 147843 - protein, 10 aa, Influenza A virus
EPELRSISSW

SEQ ID NO: 147844 - protein, 10 aa, Influenza A virus
EPELRSLASW

SEQ ID NO: 147845 - protein, 10 aa, Influenza A virus
EPELRSLSSW

SEQ ID NO: 147846 - protein, 10 aa, Influenza A virus
EPEPRSLASW

SEQ ID NO: 147847 - protein, 10 aa, Influenza A virus
EPEQRSLASW

SEQ ID NO: 147848 - protein, 10 aa, Influenza A virus
EPERRSPASW

SEQ ID NO: 147849 - protein, 10 aa, Influenza A virus
EPESRSLASW

SEQ ID NO: 147850 - protein, 10 aa, Influenza A virus
EPETRSLASW

SEQ ID NO: 147851 - protein, 9 aa, Influenza A virus
EPFFKTTPR

SEQ ID NO: 147852 - protein, 9 aa, Influenza A virus
EPFLKSTPR

SEQ ID NO: 147853 - protein, 11 aa, Influenza A virus
EPFLKSTPRPL

SEQ ID NO: 147854 - protein, 9 aa, Influenza A virus
EPFLKTTPR

SEQ ID NO: 147855 - protein, 11 aa, Influenza A virus
EPFLKTTPRPL

SEQ ID NO: 147856 - protein, 9 aa, Influenza A virus
EPFLRTTPR

SEQ ID NO: 147857 - protein, 11 aa, Influenza A virus
EPFLRTTPRPL

SEQ ID NO: 147858 - protein, 9 aa, Influenza A virus
EPFSKTTPR

SEQ ID NO: 147859 - protein, 11 aa, Influenza A virus
EPFSKTTPRPL

SEQ ID NO: 147860 - protein, 9 aa, Influenza A virus
EPGDPNALL

SEQ ID NO: 147861 - protein, 9 aa, Influenza A virus
EPGDSNALL

SEQ ID NO: 147862 - protein, 11 aa, Influenza A virus
EPGTFDIGGLY

SEQ ID NO: 147863 - protein, 11 aa, Influenza A virus
EPGTFDLEGLY

SEQ ID NO: 147864 - protein, 11 aa, Influenza A virus
EPGTFDLGGLY

SEQ ID NO: 147865 - protein, 11 aa, Influenza A virus
EPGTFNLGGLY

SEQ ID NO: 147866 - protein, 11 aa, Influenza A virus
EPHKWERSCVL

SEQ ID NO: 147867 - protein, 11 aa, Influenza A virus
EPHKWERYCVL

SEQ ID NO: 147868 - protein, 11 aa, Influenza A virus
EPHRWEKYCVL

SEQ ID NO: 147869 - protein, 10 aa, Influenza A virus
EPIIVKPHEK

SEQ ID NO: 147870 - protein, 10 aa, Influenza A virus
EPKLRSLSSW

SEQ ID NO: 147871 - protein, 10 aa, Influenza A virus
EPQPRSLASW

SEQ ID NO: 147872 - protein, 9 aa, Influenza A virus
EPRSLASWI

SEQ ID NO: 147873 - protein, 10 aa, Influenza A virus
EPTIVKPHEK

SEQ ID NO: 147874 - protein, 10 aa, Influenza A virus
EPTVVKPHEK

SEQ ID NO: 147875 - protein, 10 aa, Influenza A virus
EPYIVKPHER

SEQ ID NO: 147876 - protein, 9 aa, Influenza A virus
ERFEIKGTM

SEQ ID NO: 147877 - protein, 11 aa, Influenza A virus
ERFEIKGTMRR

SEQ ID NO: 147878 - protein, 9 aa, Influenza A virus
ERFEIRGTM

SEQ ID NO: 147879 - protein, 10 aa, Influenza A virus
ERFEIRGTMR

SEQ ID NO: 147880 - protein, 11 aa, Influenza A virus
ERFEIRGTMRR

SEQ ID NO: 147881 - protein, 9 aa, Influenza A virus
ERFEITGAM

SEQ ID NO: 147882 - protein, 10 aa, Influenza A virus
ERFEITGAMR

SEQ ID NO: 147883 - protein, 11 aa, Influenza A virus
ERFEITGAMRR

SEQ ID NO: 147884 - protein, 9 aa, Influenza A virus
ERFEITGTM

SEQ ID NO: 147885 - protein, 11 aa, Influenza A virus
ERFEITGTMCR

SEQ ID NO: 147886 - protein, 10 aa, Influenza A virus
ERFEITGTMR

SEQ ID NO: 147887 - protein, 11 aa, Influenza A virus
ERFEITGTMRR

SEQ ID NO: 147888 - protein, 10 aa, Influenza A virus
ERGINPNYLL

SEQ ID NO: 147889 - protein, 10 aa, Influenza A virus
ERGINSNYLL

SEQ ID NO: 147890 - protein, 9 aa, Influenza A virus
ESGDPNALL

SEQ ID NO: 147891 - protein, 10 aa, Influenza A virus
ESGDPNALLK

SEQ ID NO: 147892 - protein, 10 aa, Influenza A virus
ESIIEAESSV

SEQ ID NO: 147893 - protein, 9 aa, Influenza A virus
ESKLSQMSK

SEQ ID NO: 147894 - protein, 9 aa, Influenza A virus
ESKSETWPI

SEQ ID NO: 147895 - protein, 10 aa, Influenza A virus
ESMIEAESSI

SEQ ID NO: 147896 - protein, 10 aa, Influenza A virus
ESMIEAESSV

SEQ ID NO: 147897 - protein, 10 aa, Influenza A virus
ESMIEAQSSV

SEQ ID NO: 147898 - protein, 11 aa, Influenza A virus
ESMIEAQSSVK

SEQ ID NO: 147899 - protein, 10 aa, Influenza A virus
ESMTEAESSV

SEQ ID NO: 147900 - protein, 10 aa, Influenza A virus
ESMVEAESSV

SEQ ID NO: 147901 - protein, 9 aa, Influenza A virus
ESRARIKTR

SEQ ID NO: 147902 - protein, 9 aa, Influenza A virus
ESRARVKTR

SEQ ID NO: 147903 - protein, 9 aa, Influenza A virus
ESRKLLLIA

SEQ ID NO: 147904 - protein, 9 aa, Influenza A virus
ESSDPNALL

SEQ ID NO: 147905 - protein, 10 aa, Influenza A virus
ESSDPNALLK

SEQ ID NO: 147906 - protein, 9 aa, Influenza A virus
ESSIGKVCR

SEQ ID NO: 147907 - protein, 11 aa, Influenza A virus
ESSVKEKDMTR

SEQ ID NO: 147908 - protein, 10 aa, Influenza A virus
ESSWIELDEI

SEQ ID NO: 147909 - protein, 10 aa, Influenza A virus
ETEEKIPRTK

SEQ ID NO: 147910 - protein, 9 aa, Influenza A virus
ETHIHIFSF

SEQ ID NO: 147911 - protein, 10 aa, Influenza A virus
ETHIHIFSFT

SEQ ID NO: 147912 - protein, 9 aa, Influenza A virus
ETIEEKFEI

SEQ ID NO: 147913 - protein, 10 aa, Influenza A virus
ETIEEKFEIT

SEQ ID NO: 147914 - protein, 9 aa, Influenza A virus
ETIEERFEI

SEQ ID NO: 147915 - protein, 10 aa, Influenza A virus
ETIEERFEIK

SEQ ID NO: 147916 - protein, 10 aa, Influenza A virus
ETIEERFEIR

SEQ ID NO: 147917 - protein, 10 aa, Influenza A virus
ETIEERFEIT

SEQ ID NO: 147918 - protein, 9 aa, Influenza A virus
ETRSLASWI

SEQ ID NO: 147919 - protein, 9 aa, Influenza A virus
ETVEERFEI

SEQ ID NO: 147920 - protein, 10 aa, Influenza A virus
ETWPIGESPK

SEQ ID NO: 147921 - protein, 10 aa, Influenza A virus
ETWPVGESPK

SEQ ID NO: 147922 - protein, 10 aa, Influenza A virus
ETWTIGESPK

SEQ ID NO: 147923 - protein, 11 aa, Influenza A virus
EVCFMYSDFHF

SEQ ID NO: 147924 - protein, 9 aa, Influenza A virus
EVGDPNALL

SEQ ID NO: 147925 - protein, 10 aa, Influenza A virus
EVGDPNALLK

SEQ ID NO: 147926 - protein, 9 aa, Influenza A virus
EVHIYYLEK

SEQ ID NO: 147927 - protein, 10 aa, Influenza A virus
EVHIYYLEKA

SEQ ID NO: 147928 - protein, 9 aa, Influenza A virus
EVHTYYLEK

SEQ ID NO: 147929 - protein, 9 aa, Influenza A virus
EVHVYYLEK

SEQ ID NO: 147930 - protein, 10 aa, Influenza A virus
EVHVYYLEKA

SEQ ID NO: 147931 - protein, 9 aa, Influenza A virus
EVNAKIEPF

SEQ ID NO: 147932 - protein, 10 aa, Influenza A virus
EVNAKIEPFL

SEQ ID NO: 147933 - protein, 11 aa, Influenza A virus
EVNAKIEPFLK

SEQ ID NO: 147934 - protein, 9 aa, Influenza A virus
EVNARIDPF

SEQ ID NO: 147935 - protein, 10 aa, Influenza A virus
EVNARIDPFL

SEQ ID NO: 147936 - protein, 11 aa, Influenza A virus
EVNARIDPFLR

SEQ ID NO: 147937 - protein, 9 aa, Influenza A virus
EVNARIEPF

SEQ ID NO: 147938 - protein, 11 aa, Influenza A virus
EVNARIEPFFK

SEQ ID NO: 147939 - protein, 10 aa, Influenza A virus
EVNARIEPFL

SEQ ID NO: 147940 - protein, 11 aa, Influenza A virus
EVNARIEPFLK

SEQ ID NO: 147941 - protein, 11 aa, Influenza A virus
EVNARIEPFLR

SEQ ID NO: 147942 - protein, 11 aa, Influenza A virus
EVNARIEPFSK

SEQ ID NO: 147943 - protein, 9 aa, Influenza A virus
EVNTRIEPF

SEQ ID NO: 147944 - protein, 11 aa, Influenza A virus
EVNTRIEPFSK

SEQ ID NO: 147945 - protein, 9 aa, Influenza A virus
EVSFMYSDF

SEQ ID NO: 147946 - protein, 10 aa, Influenza A virus
EVSFMYSDFH

SEQ ID NO: 147947 - protein, 11 aa, Influenza A virus
EVSFMYSDFHF

SEQ ID NO: 147948 - protein, 10 aa, Influenza A virus
EVSHCRATEY

SEQ ID NO: 147949 - protein, 11 aa, Influenza A virus
EVSHCRATEYI

SEQ ID NO: 147950 - protein, 10 aa, Influenza A virus
EVSQCRATEY

SEQ ID NO: 147951 - protein, 11 aa, Influenza A virus
EVSQCRATEYI

SEQ ID NO: 147952 - protein, 10 aa, Influenza A virus
EVSRCRATEY

SEQ ID NO: 147953 - protein, 11 aa, Influenza A virus
EVSRCRATEYI

SEQ ID NO: 147954 - protein, 8 aa, Influenza A virus
EYIASMRR

SEQ ID NO: 147955 - protein, 11 aa, Influenza A virus
EYIASMRRNYF

SEQ ID NO: 147956 - protein, 9 aa, Influenza A virus
EYIMKGVYI

SEQ ID NO: 147957 - protein, 8 aa, Influenza A virus
FAAICTHL

SEQ ID NO: 147958 - protein, 10 aa, Influenza A virus
FAAICTHLEA

SEQ ID NO: 147959 - protein, 10 aa, Influenza A virus
FAAICTHLEI

SEQ ID NO: 147960 - protein, 10 aa, Influenza A virus
FAAICTHLEV

SEQ ID NO: 147961 - protein, 8 aa, Influenza A virus
FAAICTHM

SEQ ID NO: 147962 - protein, 10 aa, Influenza A virus
FAAICTHMEV

SEQ ID NO: 147963 - protein, 9 aa, Influenza A virus
FCLENFRAY

SEQ ID NO: 147964 - protein, 10 aa, Influenza A virus
FCLENFRAYV

SEQ ID NO: 147965 - protein, 10 aa, Influenza A virus
FDIGGLYESI

SEQ ID NO: 147966 - protein, 9 aa, Influenza A virus
FDLEGLYEA

SEQ ID NO: 147967 - protein, 10 aa, Influenza A virus
FDLEGLYEAI

SEQ ID NO: 147968 - protein, 9 aa, Influenza A virus
FDLEGLYGA

SEQ ID NO: 147969 - protein, 10 aa, Influenza A virus
FDLEGLYGAI

SEQ ID NO: 147970 - protein, 9 aa, Influenza A virus
FDLGGLYEA

SEQ ID NO: 147971 - protein, 10 aa, Influenza A virus
FDLGGLYEAI

SEQ ID NO: 147972 - protein, 10 aa, Influenza A virus
FDLGGLYEAV

SEQ ID NO: 147973 - protein, 10 aa, Influenza A virus
FDLGGLYESI

SEQ ID NO: 147974 - protein, 10 aa, Influenza A virus
FDLGGLYGAI

SEQ ID NO: 147975 - protein, 10 aa, Influenza A virus
FEDCKDINDL

SEQ ID NO: 147976 - protein, 10 aa, Influenza A virus
FEDCKDISDL

SEQ ID NO: 147977 - protein, 10 aa, Influenza A virus
FEDCKDVGDL

SEQ ID NO: 147978 - protein, 10 aa, Influenza A virus
FEDCKDVNDL

SEQ ID NO: 147979 - protein, 10 aa, Influenza A virus
FEDCKDVSDL

SEQ ID NO: 147980 - protein, 10 aa, Influenza A virus
FEDCKNISDL

SEQ ID NO: 147981 - protein, 10 aa, Influenza A virus
FEDCKNVSDL

SEQ ID NO: 147982 - protein, 10 aa, Influenza A virus
FEDCRDFSDL

SEQ ID NO: 147983 - protein, 10 aa, Influenza A virus
FEECKDVSDL

SEQ ID NO: 147984 - protein, 10 aa, Influenza A virus
FEIIEGRDRA

SEQ ID NO: 147985 - protein, 10 aa, Influenza A virus
FEIKGTMRRL

SEQ ID NO: 147986 - protein, 11 aa, Influenza A virus
FEIKGTMRRLA

SEQ ID NO: 147987 - protein, 10 aa, Influenza A virus
FEIRGTMRRL

SEQ ID NO: 147988 - protein, 11 aa, Influenza A virus
FEIRGTMRRLA

SEQ ID NO: 147989 - protein, 10 aa, Influenza A virus
FEISGTMRRL

SEQ ID NO: 147990 - protein, 11 aa, Influenza A virus
FEISGTMRRLA

SEQ ID NO: 147991 - protein, 10 aa, Influenza A virus
FEITGAMRRL

SEQ ID NO: 147992 - protein, 11 aa, Influenza A virus
FEITGAMRRLA

SEQ ID NO: 147993 - protein, 10 aa, Influenza A virus
FEITGTMCRL

SEQ ID NO: 147994 - protein, 11 aa, Influenza A virus
FEITGTMCRLA

SEQ ID NO: 147995 - protein, 10 aa, Influenza A virus
FEITGTMRKL

SEQ ID NO: 147996 - protein, 11 aa, Influenza A virus
FEITGTMRKLA

SEQ ID NO: 147997 - protein, 10 aa, Influenza A virus
FEITGTMRNV

SEQ ID NO: 147998 - protein, 11 aa, Influenza A virus
FEITGTMRNVA

SEQ ID NO: 147999 - protein, 10 aa, Influenza A virus
FEITGTMRRL

SEQ ID NO: 148000 - protein, 11 aa, Influenza A virus
FEITGTMRRLA

SEQ ID NO: 148001 - protein, 10 aa, Influenza A virus
FENCRDISDL

SEQ ID NO: 148002 - protein, 8 aa, Influenza A virus
FENFRAYV

SEQ ID NO: 148003 - protein, 11 aa, Influenza A virus
FENFRAYVDGF

SEQ ID NO: 148004 - protein, 9 aa, Influenza A virus
FENKSEAWP

SEQ ID NO: 148005 - protein, 10 aa, Influenza A virus
FENKSEAWPI

SEQ ID NO: 148006 - protein, 10 aa, Influenza A virus
FENKSEKWPI

SEQ ID NO: 148007 - protein, 9 aa, Influenza A virus
FENKSETWP

SEQ ID NO: 148008 - protein, 10 aa, Influenza A virus
FENKSETWPI

SEQ ID NO: 148009 - protein, 10 aa, Influenza A virus
FENKSETWPV

SEQ ID NO: 148010 - protein, 10 aa, Influenza A virus
FENKSETWTI

SEQ ID NO: 148011 - protein, 9 aa, Influenza A virus
FENKSKTWP

SEQ ID NO: 148012 - protein, 10 aa, Influenza A virus
FENKSKTWPI

SEQ ID NO: 148013 - protein, 9 aa, Influenza A virus
FENNSETWP

SEQ ID NO: 148014 - protein, 10 aa, Influenza A virus
FENNSETWPI

SEQ ID NO: 148015 - protein, 9 aa, Influenza A virus
FENRSETWP

SEQ ID NO: 148016 - protein, 10 aa, Influenza A virus
FENRSETWPI

SEQ ID NO: 148017 - protein, 10 aa, Influenza A virus
FESKSETWPI

SEQ ID NO: 148018 - protein, 8 aa, Influenza A virus
FFCLENFR

SEQ ID NO: 148019 - protein, 10 aa, Influenza A virus
FFCLENFRAY

SEQ ID NO: 148020 - protein, 11 aa, Influenza A virus
FFCLENFRAYV

SEQ ID NO: 148021 - protein, 9 aa, Influenza A virus
FFENKSEAW

SEQ ID NO: 148022 - protein, 9 aa, Influenza A virus
FFENKSEKW

SEQ ID NO: 148023 - protein, 9 aa, Influenza A virus
FFENKSETW

SEQ ID NO: 148024 - protein, 9 aa, Influenza A virus
FFENKSKTW

SEQ ID NO: 148025 - protein, 9 aa, Influenza A virus
FFENNSETW

SEQ ID NO: 148026 - protein, 9 aa, Influenza A virus
FFENRSETW

SEQ ID NO: 148027 - protein, 9 aa, Influenza A virus
FFESKSETW

SEQ ID NO: 148028 - protein, 9 aa, Influenza A virus
FFGWKEPSI

SEQ ID NO: 148029 - protein, 9 aa, Influenza A virus
FFGWKEPSV

SEQ ID NO: 148030 - protein, 9 aa, Influenza A virus
FFGWKEPTI

SEQ ID NO: 148031 - protein, 9 aa, Influenza A virus
FFGWKEPTV

SEQ ID NO: 148032 - protein, 8 aa, Influenza A virus
FFGWKEPY

SEQ ID NO: 148033 - protein, 9 aa, Influenza A virus
FFGWKEPYI

SEQ ID NO: 148034 - protein, 9 aa, Influenza A virus
FFGWKEPYV

SEQ ID NO: 148035 - protein, 10 aa, Influenza A virus
FFGWKEPYVV

SEQ ID NO: 148036 - protein, 9 aa, Influenza A virus
FFKNKSETW

SEQ ID NO: 148037 - protein, 9 aa, Influenza A virus
FFKTTPRPI

SEQ ID NO: 148038 - protein, 10 aa, Influenza A virus
FFKTTPRPIR

SEQ ID NO: 148039 - protein, 11 aa, Influenza A virus
FFKTTPRPIRL

SEQ ID NO: 148040 - protein, 9 aa, Influenza A virus
FGWKEPSVV

SEQ ID NO: 148041 - protein, 9 aa, Influenza A virus
FGWKEPTVV

SEQ ID NO: 148042 - protein, 9 aa, Influenza A virus
FGWKEPYIV

SEQ ID NO: 148043 - protein, 9 aa, Influenza A virus
FGWKEPYVV

SEQ ID NO: 148044 - protein, 11 aa, Influenza A virus
FHFIDEQGESI

SEQ ID NO: 148045 - protein, 11 aa, Influenza A virus
FHFIDERGDSI

SEQ ID NO: 148046 - protein, 11 aa, Influenza A virus
FHFIDERGESI

SEQ ID NO: 148047 - protein, 11 aa, Influenza A virus
FHFINELGESV

SEQ ID NO: 148048 - protein, 11 aa, Influenza A virus
FHFINEQGESI

SEQ ID NO: 148049 - protein, 11 aa, Influenza A virus
FHFVDERGESI

SEQ ID NO: 148050 - protein, 9 aa, Influenza A virus
FIDEQGESI

SEQ ID NO: 148051 - protein, 10 aa, Influenza A virus
FIDEQGESIV

SEQ ID NO: 148052 - protein, 11 aa, Influenza A virus
FIDEQGESIVV

SEQ ID NO: 148053 - protein, 9 aa, Influenza A virus
FIDERGDSI

SEQ ID NO: 148054 - protein, 10 aa, Influenza A virus
FIDERGDSII

SEQ ID NO: 148055 - protein, 11 aa, Influenza A virus
FIDERGDSIIV

SEQ ID NO: 148056 - protein, 9 aa, Influenza A virus
FIDERGESI

SEQ ID NO: 148057 - protein, 10 aa, Influenza A virus
FIDERGESII

SEQ ID NO: 148058 - protein, 11 aa, Influenza A virus
FIDERGESIIV

SEQ ID NO: 148059 - protein, 10 aa, Influenza A virus
FIDERGESKI

SEQ ID NO: 148060 - protein, 10 aa, Influenza A virus
FIDERGESTI

SEQ ID NO: 148061 - protein, 11 aa, Influenza A virus
FIDERGESTIV

SEQ ID NO: 148062 - protein, 9 aa, Influenza A virus
FIDERSESI

SEQ ID NO: 148063 - protein, 10 aa, Influenza A virus
FIDERSESII

SEQ ID NO: 148064 - protein, 11 aa, Influenza A virus
FIDERSESIIV

SEQ ID NO: 148065 - protein, 9 aa, Influenza A virus
FIEIGVTRR

SEQ ID NO: 148066 - protein, 9 aa, Influenza A virus
FIEVGVTRR

SEQ ID NO: 148067 - protein, 9 aa, Influenza A virus
FIIKGRSHL

SEQ ID NO: 148068 - protein, 10 aa, Influenza A virus
FIIKGRSHLR

SEQ ID NO: 148069 - protein, 9 aa, Influenza A virus
FIKIGVTRR

SEQ ID NO: 148070 - protein, 11 aa, Influenza A virus
FIKIGVTRREV

SEQ ID NO: 148071 - protein, 9 aa, Influenza A virus
FINELGESV

SEQ ID NO: 148072 - protein, 10 aa, Influenza A virus
FINELGESVI

SEQ ID NO: 148073 - protein, 11 aa, Influenza A virus
FINELGESVII

SEQ ID NO: 148074 - protein, 9 aa, Influenza A virus
FINEQGESI

SEQ ID NO: 148075 - protein, 10 aa, Influenza A virus
FINEQGESII

SEQ ID NO: 148076 - protein, 11 aa, Influenza A virus
FINEQGESIIV

SEQ ID NO: 148077 - protein, 10 aa, Influenza A virus
FINEQGESIM

SEQ ID NO: 148078 - protein, 11 aa, Influenza A virus
FINEQGESIMV

SEQ ID NO: 148079 - protein, 10 aa, Influenza A virus
FINEQGESIV

SEQ ID NO: 148080 - protein, 11 aa, Influenza A virus
FINEQGESIVV

SEQ ID NO: 148081 - protein, 10 aa, Influenza A virus
FINEQGESTI

SEQ ID NO: 148082 - protein, 11 aa, Influenza A virus
FINEQGESTIV

SEQ ID NO: 148083 - protein, 9 aa, Influenza A virus
FINEQGRSI

SEQ ID NO: 148084 - protein, 10 aa, Influenza A virus
FINEQGRSII

SEQ ID NO: 148085 - protein, 11 aa, Influenza A virus
FINEQGRSIIV

SEQ ID NO: 148086 - protein, 9 aa, Influenza A virus
FINERGESI

SEQ ID NO: 148087 - protein, 10 aa, Influenza A virus
FINERGESII

SEQ ID NO: 148088 - protein, 11 aa, Influenza A virus
FINERGESIIV

SEQ ID NO: 148089 - protein, 9 aa, Influenza A virus
FIPDLYDYK

SEQ ID NO: 148090 - protein, 9 aa, Influenza A virus
FIVKGRSHL

SEQ ID NO: 148091 - protein, 10 aa, Influenza A virus
FIVKGRSHLR

SEQ ID NO: 148092 - protein, 9 aa, Influenza A virus
FLIKGRSHL

SEQ ID NO: 148093 - protein, 10 aa, Influenza A virus
FLIKGRSHLR

SEQ ID NO: 148094 - protein, 9 aa, Influenza A virus
FLKSTPRPL

SEQ ID NO: 148095 - protein, 10 aa, Influenza A virus
FLKSTPRPLR

SEQ ID NO: 148096 - protein, 11 aa, Influenza A virus
FLKSTPRPLRL

SEQ ID NO: 148097 - protein, 9 aa, Influenza A virus
FLKTTPRPI

SEQ ID NO: 148098 - protein, 10 aa, Influenza A virus
FLKTTPRPIK

SEQ ID NO: 148099 - protein, 11 aa, Influenza A virus
FLKTTPRPIKL

SEQ ID NO: 148100 - protein, 10 aa, Influenza A virus
FLKTTPRPIR

SEQ ID NO: 148101 - protein, 11 aa, Influenza A virus
FLKTTPRPIRL

SEQ ID NO: 148102 - protein, 9 aa, Influenza A virus
FLKTTPRPL

SEQ ID NO: 148103 - protein, 10 aa, Influenza A virus
FLKTTPRPLK

SEQ ID NO: 148104 - protein, 11 aa, Influenza A virus
FLKTTPRPLKL

SEQ ID NO: 148105 - protein, 10 aa, Influenza A virus
FLKTTPRPLR

SEQ ID NO: 148106 - protein, 11 aa, Influenza A virus
FLKTTPRPLRL

SEQ ID NO: 148107 - protein, 9 aa, Influenza A virus
FLLMDALKF

SEQ ID NO: 148108 - protein, 10 aa, Influenza A virus
FLLMDALKFS

SEQ ID NO: 148109 - protein, 11 aa, Influenza A virus
FLLMDALKFSI

SEQ ID NO: 148110 - protein, 9 aa, Influenza A virus
FLLMDALKL

SEQ ID NO: 148111 - protein, 10 aa, Influenza A virus
FLLMDALKLN

SEQ ID NO: 148112 - protein, 11 aa, Influenza A virus
FLLMDALKLNI

SEQ ID NO: 148113 - protein, 10 aa, Influenza A virus
FLLMDALKLS

SEQ ID NO: 148114 - protein, 11 aa, Influenza A virus
FLLMDALKLSI

SEQ ID NO: 148115 - protein, 9 aa, Influenza A virus
FLLMDSLKL

SEQ ID NO: 148116 - protein, 10 aa, Influenza A virus
FLLMDSLKLS

SEQ ID NO: 148117 - protein, 11 aa, Influenza A virus
FLLMDSLKLSI

SEQ ID NO: 148118 - protein, 9 aa, Influenza A virus
FLPDLYDYK

SEQ ID NO: 148119 - protein, 10 aa, Influenza A virus
FLPDLYDYKG

SEQ ID NO: 148120 - protein, 10 aa, Influenza A virus
FLPDLYDYKK

SEQ ID NO: 148121 - protein, 9 aa, Influenza A virus
FLPDLYDYR

SEQ ID NO: 148122 - protein, 9 aa, Influenza A virus
FLRTTPRPL

SEQ ID NO: 148123 - protein, 10 aa, Influenza A virus
FLRTTPRPLR

SEQ ID NO: 148124 - protein, 11 aa, Influenza A virus
FLRTTPRPLRL

SEQ ID NO: 148125 - protein, 9 aa, Influenza A virus
FLYMRTNGT

SEQ ID NO: 148126 - protein, 10 aa, Influenza A virus
FLYMRTNGTS

SEQ ID NO: 148127 - protein, 11 aa, Influenza A virus
FLYMRTNGTSK

SEQ ID NO: 148128 - protein, 9 aa, Influenza A virus
FLYVRTNGT

SEQ ID NO: 148129 - protein, 10 aa, Influenza A virus
FLYVRTNGTS

SEQ ID NO: 148130 - protein, 11 aa, Influenza A virus
FLYVRTNGTSK

SEQ ID NO: 148131 - protein, 9 aa, Influenza A virus
FLYVTTNGT

SEQ ID NO: 148132 - protein, 10 aa, Influenza A virus
FLYVTTNGTS

SEQ ID NO: 148133 - protein, 11 aa, Influenza A virus
FLYVTTNGTSK

SEQ ID NO: 148134 - protein, 8 aa, Influenza A virus
FMYSDFHF

SEQ ID NO: 148135 - protein, 9 aa, Influenza A virus
FMYSDFHFI

SEQ ID NO: 148136 - protein, 10 aa, Influenza A virus
FMYSDFHFID

SEQ ID NO: 148137 - protein, 11 aa, Influenza A virus
FMYSDFHFIDE

SEQ ID NO: 148138 - protein, 10 aa, Influenza A virus
FMYSDFHFIN

SEQ ID NO: 148139 - protein, 11 aa, Influenza A virus
FMYSDFHFINE

SEQ ID NO: 148140 - protein, 9 aa, Influenza A virus
FMYSDFHFV

SEQ ID NO: 148141 - protein, 10 aa, Influenza A virus
FMYSDFHFVD

SEQ ID NO: 148142 - protein, 11 aa, Influenza A virus
FMYSDFHFVDE

SEQ ID NO: 148143 - protein, 9 aa, Influenza A virus
FNLGGLYEA

SEQ ID NO: 148144 - protein, 10 aa, Influenza A virus
FNLGGLYEAI

SEQ ID NO: 148145 - protein, 10 aa, Influenza A virus
FNPMIIELAE

SEQ ID NO: 148146 - protein, 10 aa, Influenza A virus
FNPMIVELAE

SEQ ID NO: 148147 - protein, 10 aa, Influenza A virus
FNPMVVELAE

SEQ ID NO: 148148 - protein, 9 aa, Influenza A virus
FNSFLAHAL

SEQ ID NO: 148149 - protein, 10 aa, Influenza A virus
FNSFLAHALK

SEQ ID NO: 148150 - protein, 9 aa, Influenza A virus
FNSFLAHVL

SEQ ID NO: 148151 - protein, 10 aa, Influenza A virus
FNSFLAHVLK

SEQ ID NO: 148152 - protein, 9 aa, Influenza A virus
FNSFLTHAL

SEQ ID NO: 148153 - protein, 10 aa, Influenza A virus
FNSFLTHALK

SEQ ID NO: 148154 - protein, 10 aa, Influenza A virus
FNSFLTHALR

SEQ ID NO: 148155 - protein, 9 aa, Influenza A virus
FNSFLTHAV

SEQ ID NO: 148156 - protein, 10 aa, Influenza A virus
FNSFLTHAVK

SEQ ID NO: 148157 - protein, 10 aa, Influenza A virus
FNSLYASPQL

SEQ ID NO: 148158 - protein, 10 aa, Influenza A virus
FNSLYSSPQL

SEQ ID NO: 148159 - protein, 9 aa, Influenza A virus
FQLIPMISK

SEQ ID NO: 148160 - protein, 10 aa, Influenza A virus
FQLIPMISKC

SEQ ID NO: 148161 - protein, 8 aa, Influenza A virus
FQRSKFLL

SEQ ID NO: 148162 - protein, 9 aa, Influenza A virus
FQRSKFLLM

SEQ ID NO: 148163 - protein, 10 aa, Influenza A virus
FQSLQQIESM

SEQ ID NO: 148164 - protein, 11 aa, Influenza A virus
FQSLQQIESMI

SEQ ID NO: 148165 - protein, 9 aa, Influenza A virus
FQVIPMISK

SEQ ID NO: 148166 - protein, 9 aa, Influenza A virus
FRAYVDGFK

SEQ ID NO: 148167 - protein, 9 aa, Influenza A virus
FSAESRKIL

SEQ ID NO: 148168 - protein, 10 aa, Influenza A virus
FSAESRKILL

SEQ ID NO: 148169 - protein, 11 aa, Influenza A virus
FSAESRKILLI

SEQ ID NO: 148170 - protein, 8 aa, Influenza A virus
FSAESRKL

SEQ ID NO: 148171 - protein, 9 aa, Influenza A virus
FSAESRKLL

SEQ ID NO: 148172 - protein, 10 aa, Influenza A virus
FSAESRKLLL

SEQ ID NO: 148173 - protein, 11 aa, Influenza A virus
FSAESRKLLLI

SEQ ID NO: 148174 - protein, 11 aa, Influenza A virus
FSAESRKLLLV

SEQ ID NO: 148175 - protein, 8 aa, Influenza A virus
FSAESRRL

SEQ ID NO: 148176 - protein, 9 aa, Influenza A virus
FSAESRRLL

SEQ ID NO: 148177 - protein, 10 aa, Influenza A virus
FSAESRRLLL

SEQ ID NO: 148178 - protein, 11 aa, Influenza A virus
FSAESRRLLLI

SEQ ID NO: 148179 - protein, 10 aa, Influenza A virus
FSCFENFRAY

SEQ ID NO: 148180 - protein, 11 aa, Influenza A virus
FSCFENFRAYV

SEQ ID NO: 148181 - protein, 8 aa, Influenza A virus
FSCIENFR

SEQ ID NO: 148182 - protein, 10 aa, Influenza A virus
FSCIENFRAY

SEQ ID NO: 148183 - protein, 11 aa, Influenza A virus
FSCIENFRAYV

SEQ ID NO: 148184 - protein, 10 aa, Influenza A virus
FSCLENFRAY

SEQ ID NO: 148185 - protein, 11 aa, Influenza A virus
FSCLENFRAYV

SEQ ID NO: 148186 - protein, 8 aa, Influenza A virus
FSFTGEEM

SEQ ID NO: 148187 - protein, 9 aa, Influenza A virus
FSFTGEEMA

SEQ ID NO: 148188 - protein, 11 aa, Influenza A virus
FSFTGEEMATK

SEQ ID NO: 148189 - protein, 8 aa, Influenza A virus
FSFTGEGM

SEQ ID NO: 148190 - protein, 9 aa, Influenza A virus
FSFTGEGMA

SEQ ID NO: 148191 - protein, 11 aa, Influenza A virus
FSFTGEGMATK

SEQ ID NO: 148192 - protein, 9 aa, Influenza A virus
FSKTTPRPL

SEQ ID NO: 148193 - protein, 10 aa, Influenza A virus
FSKTTPRPLR

SEQ ID NO: 148194 - protein, 10 aa, Influenza A virus
FSLTDPRLEL

SEQ ID NO: 148195 - protein, 11 aa, Influenza A virus
FSLTDPRLEPY

SEQ ID NO: 148196 - protein, 8 aa, Influenza A virus
FSSFDNFR

SEQ ID NO: 148197 - protein, 9 aa, Influenza A virus
FSSFDNFRA

SEQ ID NO: 148198 - protein, 10 aa, Influenza A virus
FSSFDNFRAY

SEQ ID NO: 148199 - protein, 11 aa, Influenza A virus
FSSFDNFRAYV

SEQ ID NO: 148200 - protein, 8 aa, Influenza A virus
FSSIENFR

SEQ ID NO: 148201 - protein, 10 aa, Influenza A virus
FSSIENFRAY

SEQ ID NO: 148202 - protein, 11 aa, Influenza A virus
FSSIENFRAYV

SEQ ID NO: 148203 - protein, 10 aa, Influenza A virus
FSSLDNFRAY

SEQ ID NO: 148204 - protein, 11 aa, Influenza A virus
FSSLDNFRAYV

SEQ ID NO: 148205 - protein, 10 aa, Influenza A virus
FSSLEKFRAY

SEQ ID NO: 148206 - protein, 11 aa, Influenza A virus
FSSLEKFRAYV

SEQ ID NO: 148207 - protein, 10 aa, Influenza A virus
FSSLENFRAY

SEQ ID NO: 148208 - protein, 11 aa, Influenza A virus
FSSLENFRAYV

SEQ ID NO: 148209 - protein, 9 aa, Influenza A virus
FSSLENFRV

SEQ ID NO: 148210 - protein, 10 aa, Influenza A virus
FSSLENFRVY

SEQ ID NO: 148211 - protein, 11 aa, Influenza A virus
FSSLENFRVYV

SEQ ID NO: 148212 - protein, 9 aa, Influenza A virus
FSSWIQNEF

SEQ ID NO: 148213 - protein, 11 aa, Influenza A virus
FSSWIQNEFNK

SEQ ID NO: 148214 - protein, 9 aa, Influenza A virus
FTAEVSHCR

SEQ ID NO: 148215 - protein, 10 aa, Influenza A virus
FTAEVSHCRA

SEQ ID NO: 148216 - protein, 11 aa, Influenza A virus
FTAEVSHCRAT

SEQ ID NO: 148217 - protein, 9 aa, Influenza A virus
FTAEVSQCR

SEQ ID NO: 148218 - protein, 10 aa, Influenza A virus
FTAEVSQCRA

SEQ ID NO: 148219 - protein, 9 aa, Influenza A virus
FTAEVSRCR

SEQ ID NO: 148220 - protein, 10 aa, Influenza A virus
FTAEVSRCRA

SEQ ID NO: 148221 - protein, 8 aa, Influenza A virus
FTEIGVTR

SEQ ID NO: 148222 - protein, 9 aa, Influenza A virus
FTEIGVTRR

SEQ ID NO: 148223 - protein, 9 aa, Influenza A virus
FTGEEMATK

SEQ ID NO: 148224 - protein, 10 aa, Influenza A virus
FTGEEMATKA

SEQ ID NO: 148225 - protein, 9 aa, Influenza A virus
FTGEGMATK

SEQ ID NO: 148226 - protein, 10 aa, Influenza A virus
FTGEGMATKA

SEQ ID NO: 148227 - protein, 10 aa, Influenza A virus
FTIRQEMANR

SEQ ID NO: 148228 - protein, 10 aa, Influenza A virus
FTIRQEMASR

SEQ ID NO: 148229 - protein, 9 aa, Influenza A virus
FTSEVSHCR

SEQ ID NO: 148230 - protein, 10 aa, Influenza A virus
FTSEVSHCRA

SEQ ID NO: 148231 - protein, 9 aa, Influenza A virus
FVAQSFNPM

SEQ ID NO: 148232 - protein, 10 aa, Influenza A virus
FVAQSFNPMI

SEQ ID NO: 148233 - protein, 11 aa, Influenza A virus
FVAQSFNPMIV

SEQ ID NO: 148234 - protein, 9 aa, Influenza A virus
FVDERGESI

SEQ ID NO: 148235 - protein, 10 aa, Influenza A virus
FVDERGESII

SEQ ID NO: 148236 - protein, 9 aa, Influenza A virus
FVEIGVTRR

SEQ ID NO: 148237 - protein, 9 aa, Influenza A virus
FVIKGRSHL

SEQ ID NO: 148238 - protein, 10 aa, Influenza A virus
FVIKGRSHLR

SEQ ID NO: 148239 - protein, 9 aa, Influenza A virus
FVRQCFNPI

SEQ ID NO: 148240 - protein, 10 aa, Influenza A virus
FVRQCFNPII

SEQ ID NO: 148241 - protein, 9 aa, Influenza A virus
FVRQCFNPM

SEQ ID NO: 148242 - protein, 10 aa, Influenza A virus
FVRQCFNPMI

SEQ ID NO: 148243 - protein, 10 aa, Influenza A virus
FVRQCFNPMV

SEQ ID NO: 148244 - protein, 11 aa, Influenza A virus
FVRQCFNPMVV

SEQ ID NO: 148245 - protein, 9 aa, Influenza A virus
FVSMEFSLT

SEQ ID NO: 148246 - protein, 11 aa, Influenza A virus
GAMRRLADQSL

SEQ ID NO: 148247 - protein, 9 aa, Influenza A virus
GDMILRSAI

SEQ ID NO: 148248 - protein, 9 aa, Influenza A virus
GDMILRTAI

SEQ ID NO: 148249 - protein, 9 aa, Influenza A virus
GDMLIRSAI

SEQ ID NO: 148250 - protein, 9 aa, Influenza A virus
GDMLLRSAI

SEQ ID NO: 148251 - protein, 9 aa, Influenza A virus
GDMLLRSAL

SEQ ID NO: 148252 - protein, 9 aa, Influenza A virus
GDMLLRSTI

SEQ ID NO: 148253 - protein, 11 aa, Influenza A virus
GDMLLRSTIGR

SEQ ID NO: 148254 - protein, 9 aa, Influenza A virus
GDMLLRTAI

SEQ ID NO: 148255 - protein, 9 aa, Influenza A virus
GDMLLRTAV

SEQ ID NO: 148256 - protein, 9 aa, Influenza A virus
GDMLLRTEI

SEQ ID NO: 148257 - protein, 9 aa, Influenza A virus
GDMLLRTSI

SEQ ID NO: 148258 - protein, 9 aa, Influenza A virus
GDMVLRTAI

SEQ ID NO: 148259 - protein, 10 aa, Influenza A virus
GDSNALLKHR

SEQ ID NO: 148260 - protein, 10 aa, Influenza A virus
GEDAAPIEHI

SEQ ID NO: 148261 - protein, 11 aa, Influenza A virus
GEDAAPIEHIA

SEQ ID NO: 148262 - protein, 10 aa, Influenza A virus
GEDIAPIEHI

SEQ ID NO: 148263 - protein, 11 aa, Influenza A virus
GEDIAPIEHIA

SEQ ID NO: 148264 - protein, 10 aa, Influenza A virus
GEDIAPIEYI

SEQ ID NO: 148265 - protein, 11 aa, Influenza A virus
GEDIAPIEYIA

SEQ ID NO: 148266 - protein, 10 aa, Influenza A virus
GEDIAPLEHI

SEQ ID NO: 148267 - protein, 11 aa, Influenza A virus
GEDIAPLEHIA

SEQ ID NO: 148268 - protein, 10 aa, Influenza A virus
GEDVAPIEHI

SEQ ID NO: 148269 - protein, 11 aa, Influenza A virus
GEDVAPIEHIA

SEQ ID NO: 148270 - protein, 10 aa, Influenza A virus
GEDVAPIEYI

SEQ ID NO: 148271 - protein, 11 aa, Influenza A virus
GEDVAPIEYIA

SEQ ID NO: 148272 - protein, 10 aa, Influenza A virus
GEEMATKADY

SEQ ID NO: 148273 - protein, 10 aa, Influenza A virus
GEEMATKEDY

SEQ ID NO: 148274 - protein, 10 aa, Influenza A virus
GEEMATKSDY

SEQ ID NO: 148275 - protein, 10 aa, Influenza A virus
GEEMATKTDY

SEQ ID NO: 148276 - protein, 9 aa, Influenza A virus
GEETIEEKF

SEQ ID NO: 148277 - protein, 9 aa, Influenza A virus
GEETIEERF

SEQ ID NO: 148278 - protein, 11 aa, Influenza A virus
GEETIEERFEI

SEQ ID NO: 148279 - protein, 9 aa, Influenza A virus
GEGIPLHDA

SEQ ID NO: 148280 - protein, 10 aa, Influenza A virus
GEGIPLHDAI

SEQ ID NO: 148281 - protein, 9 aa, Influenza A virus
GEGIPLYDA

SEQ ID NO: 148282 - protein, 10 aa, Influenza A virus
GEGIPLYDAI

SEQ ID NO: 148283 - protein, 10 aa, Influenza A virus
GEGIPLYDAV

SEQ ID NO: 148284 - protein, 10 aa, Influenza A virus
GEGMATKADY

SEQ ID NO: 148285 - protein, 9 aa, Influenza A virus
GEKMAPEKV

SEQ ID NO: 148286 - protein, 8 aa, Influenza A virus
GEMLLRTA

SEQ ID NO: 148287 - protein, 9 aa, Influenza A virus
GEMLLRTAI

SEQ ID NO: 148288 - protein, 10 aa, Influenza A virus
GEMLLRTAIG

SEQ ID NO: 148289 - protein, 9 aa, Influenza A virus
GENMAPEKL

SEQ ID NO: 148290 - protein, 9 aa, Influenza A virus
GENMAPEKV

SEQ ID NO: 148291 - protein, 10 aa, Influenza A virus
GENVAPIEHI

SEQ ID NO: 148292 - protein, 11 aa, Influenza A virus
GENVAPIEHIA

SEQ ID NO: 148293 - protein, 9 aa, Influenza A virus
GESIIIEPG

SEQ ID NO: 148294 - protein, 8 aa, Influenza A virus
GESIIVEL

SEQ ID NO: 148295 - protein, 9 aa, Influenza A virus
GESIIVEPG

SEQ ID NO: 148296 - protein, 9 aa, Influenza A virus
GESIIVESS

SEQ ID NO: 148297 - protein, 8 aa, Influenza A virus
GESIMVEL

SEQ ID NO: 148298 - protein, 8 aa, Influenza A virus
GESIVVEL

SEQ ID NO: 148299 - protein, 8 aa, Influenza A virus
GESTIVEL

SEQ ID NO: 148300 - protein, 9 aa, Influenza A virus
GESTIVESS

SEQ ID NO: 148301 - protein, 11 aa, Influenza A virus
GFIIKGRSHLR

SEQ ID NO: 148302 - protein, 11 aa, Influenza A virus
GFIVKGRSHLR

SEQ ID NO: 148303 - protein, 10 aa, Influenza A virus
GFLIKGRSHL

SEQ ID NO: 148304 - protein, 11 aa, Influenza A virus
GFLIKGRSHLR

SEQ ID NO: 148305 - protein, 11 aa, Influenza A virus
GFVIKGRSHLR

SEQ ID NO: 148306 - protein, 10 aa, Influenza A virus
GGLYEAIEEC

SEQ ID NO: 148307 - protein, 11 aa, Influenza A virus
GGLYEAIEECL

SEQ ID NO: 148308 - protein, 10 aa, Influenza A virus
GGLYEAVEEC

SEQ ID NO: 148309 - protein, 11 aa, Influenza A virus
GGLYEAVEECL

SEQ ID NO: 148310 - protein, 10 aa, Influenza A virus
GGLYESIEEC

SEQ ID NO: 148311 - protein, 11 aa, Influenza A virus
GGLYESIEECL

SEQ ID NO: 148312 - protein, 10 aa, Influenza A virus
GGLYGAIEEC

SEQ ID NO: 148313 - protein, 11 aa, Influenza A virus
GGLYGAIEECL

SEQ ID NO: 148314 - protein, 9 aa, Influenza A virus
GHVSRPMFL

SEQ ID NO: 148315 - protein, 10 aa, Influenza A virus
GHVSRPMFLY

SEQ ID NO: 148316 - protein, 11 aa, Influenza A virus
GHVSRPMFLYV

SEQ ID NO: 148317 - protein, 9 aa, Influenza A virus
GINPNYLLA

SEQ ID NO: 148318 - protein, 10 aa, Influenza A virus
GINPNYLLAW

SEQ ID NO: 148319 - protein, 11 aa, Influenza A virus
GINPNYLLAWK

SEQ ID NO: 148320 - protein, 10 aa, Influenza A virus
GINPNYLLSW

SEQ ID NO: 148321 - protein, 11 aa, Influenza A virus
GINPNYLLSWK

SEQ ID NO: 148322 - protein, 11 aa, Influenza A virus
GINPNYLLSWR

SEQ ID NO: 148323 - protein, 10 aa, Influenza A virus
GINPNYLLTW

SEQ ID NO: 148324 - protein, 11 aa, Influenza A virus
GINPNYLLTWK

SEQ ID NO: 148325 - protein, 9 aa, Influenza A virus
GINPNYLLV

SEQ ID NO: 148326 - protein, 10 aa, Influenza A virus
GINPNYLLVW

SEQ ID NO: 148327 - protein, 11 aa, Influenza A virus
GINPNYLLVWK

SEQ ID NO: 148328 - protein, 11 aa, Influenza A virus
GINPNYLMAWK

SEQ ID NO: 148329 - protein, 11 aa, Influenza A virus
GINPNYLQAWK

SEQ ID NO: 148330 - protein, 9 aa, Influenza A virus
GINSNYLLA

SEQ ID NO: 148331 - protein, 10 aa, Influenza A virus
GINSNYLLAW

SEQ ID NO: 148332 - protein, 11 aa, Influenza A virus
GINSNYLLAWK

SEQ ID NO: 148333 - protein, 10 aa, Influenza A virus
GINSNYLLSW

SEQ ID NO: 148334 - protein, 11 aa, Influenza A virus
GINSNYLLSWK

SEQ ID NO: 148335 - protein, 11 aa, Influenza A virus
GINSNYLQSWK

SEQ ID NO: 148336 - protein, 11 aa, Influenza A virus
GIPLYDAIKCI

SEQ ID NO: 148337 - protein, 11 aa, Influenza A virus
GIPLYDAINCM

SEQ ID NO: 148338 - protein, 9 aa, Influenza A virus
GKIPRTKNM

SEQ ID NO: 148339 - protein, 10 aa, Influenza A virus
GKLSQMSKEV

SEQ ID NO: 148340 - protein, 10 aa, Influenza A virus
GKLSQMSREV

SEQ ID NO: 148341 - protein, 10 aa, Influenza A virus
GKVCRTLLAK

SEQ ID NO: 148342 - protein, 9 aa, Influenza A virus
GLWDSFHQS

SEQ ID NO: 148343 - protein, 11 aa, Influenza A virus
GLWDSFHQSER

SEQ ID NO: 148344 - protein, 9 aa, Influenza A virus
GLWDSFRQS

SEQ ID NO: 148345 - protein, 11 aa, Influenza A virus
GLWDSFRQSER

SEQ ID NO: 148346 - protein, 9 aa, Influenza A virus
GLYEAIEEC

SEQ ID NO: 148347 - protein, 10 aa, Influenza A virus
GLYEAIEECL

SEQ ID NO: 148348 - protein, 11 aa, Influenza A virus
GLYEAIEECLI

SEQ ID NO: 148349 - protein, 9 aa, Influenza A virus
GLYEAVEEC

SEQ ID NO: 148350 - protein, 10 aa, Influenza A virus
GLYEAVEECL

SEQ ID NO: 148351 - protein, 11 aa, Influenza A virus
GLYEAVEECLI

SEQ ID NO: 148352 - protein, 9 aa, Influenza A virus
GLYESIEEC

SEQ ID NO: 148353 - protein, 10 aa, Influenza A virus
GLYESIEECL

SEQ ID NO: 148354 - protein, 11 aa, Influenza A virus
GLYESIEECLI

SEQ ID NO: 148355 - protein, 9 aa, Influenza A virus
GLYGAIEEC

SEQ ID NO: 148356 - protein, 10 aa, Influenza A virus
GLYGAIEECL

SEQ ID NO: 148357 - protein, 11 aa, Influenza A virus
GLYGAIEECLI

SEQ ID NO: 148358 - protein, 10 aa, Influenza A virus
GMATKADYTL

SEQ ID NO: 148359 - protein, 9 aa, Influenza A virus
GMEEGSIGK

SEQ ID NO: 148360 - protein, 10 aa, Influenza A virus
GMEEGSIGKV

SEQ ID NO: 148361 - protein, 9 aa, Influenza A virus
GMEIRRCLL

SEQ ID NO: 148362 - protein, 9 aa, Influenza A virus
GMEMRRCLL

SEQ ID NO: 148363 - protein, 9 aa, Influenza A virus
GMEMRRCPF

SEQ ID NO: 148364 - protein, 9 aa, Influenza A virus
GMRRNYFTA

SEQ ID NO: 148365 - protein, 11 aa, Influenza A virus
GMRRNYFTAEV

SEQ ID NO: 148366 - protein, 11 aa, Influenza A virus
GNRFIEIGVTR

SEQ ID NO: 148367 - protein, 10 aa, Influenza A virus
GPLCSQRSKV

SEQ ID NO: 148368 - protein, 11 aa, Influenza A virus
GPLCSQRSKVM

SEQ ID NO: 148369 - protein, 8 aa, Influenza A virus
GQAPRPTF

SEQ ID NO: 148370 - protein, 9 aa, Influenza A virus
GQAPRPTFL

SEQ ID NO: 148371 - protein, 10 aa, Influenza A virus
GQAPRPTFLY

SEQ ID NO: 148372 - protein, 11 aa, Influenza A virus
GQAPRPTFLYV

SEQ ID NO: 148373 - protein, 8 aa, Influenza A virus
GQMSRPMF

SEQ ID NO: 148374 - protein, 9 aa, Influenza A virus
GQMSRPMFL

SEQ ID NO: 148375 - protein, 10 aa, Influenza A virus
GQMSRPMFLY

SEQ ID NO: 148376 - protein, 11 aa, Influenza A virus
GQMSRPMFLYV

SEQ ID NO: 148377 - protein, 8 aa, Influenza A virus
GQVARPMF

SEQ ID NO: 148378 - protein, 9 aa, Influenza A virus
GQVARPMFL

SEQ ID NO: 148379 - protein, 10 aa, Influenza A virus
GQVARPMFLY

SEQ ID NO: 148380 - protein, 11 aa, Influenza A virus
GQVARPMFLYV

SEQ ID NO: 148381 - protein, 8 aa, Influenza A virus
GQVLRPMF

SEQ ID NO: 148382 - protein, 9 aa, Influenza A virus
GQVLRPMFL

SEQ ID NO: 148383 - protein, 10 aa, Influenza A virus
GQVLRPMFLY

SEQ ID NO: 148384 - protein, 11 aa, Influenza A virus
GQVLRPMFLYV

SEQ ID NO: 148385 - protein, 8 aa, Influenza A virus
GQVSRPIF

SEQ ID NO: 148386 - protein, 9 aa, Influenza A virus
GQVSRPIFL

SEQ ID NO: 148387 - protein, 10 aa, Influenza A virus
GQVSRPIFLY

SEQ ID NO: 148388 - protein, 11 aa, Influenza A virus
GQVSRPIFLYV

SEQ ID NO: 148389 - protein, 8 aa, Influenza A virus
GQVSRPMF

SEQ ID NO: 148390 - protein, 9 aa, Influenza A virus
GQVSRPMFL

SEQ ID NO: 148391 - protein, 10 aa, Influenza A virus
GQVSRPMFLY

SEQ ID NO: 148392 - protein, 11 aa, Influenza A virus
GQVSRPMFLYM

SEQ ID NO: 148393 - protein, 11 aa, Influenza A virus
GQVSRPMFLYV

SEQ ID NO: 148394 - protein, 10 aa, Influenza A virus
GRDRAMAWTV

SEQ ID NO: 148395 - protein, 10 aa, Influenza A virus
GRDRNMAWTV

SEQ ID NO: 148396 - protein, 10 aa, Influenza A virus
GRDRNVAWTV

SEQ ID NO: 148397 - protein, 10 aa, Influenza A virus
GRDRTIAWTV

SEQ ID NO: 148398 - protein, 10 aa, Influenza A virus
GRDRTMAWTI

SEQ ID NO: 148399 - protein, 10 aa, Influenza A virus
GRDRTMAWTV

SEQ ID NO: 148400 - protein, 10 aa, Influenza A virus
GRDRTVAWTV

SEQ ID NO: 148401 - protein, 10 aa, Influenza A virus
GRRKTNLYGF

SEQ ID NO: 148402 - protein, 11 aa, Influenza A virus
GRRKTNLYGFL

SEQ ID NO: 148403 - protein, 10 aa, Influenza A virus
GRRRTNLYGF

SEQ ID NO: 148404 - protein, 8 aa, Influenza A virus
GRSIIVEL

SEQ ID NO: 148405 - protein, 9 aa, Influenza A virus
GRVSRPMFL

SEQ ID NO: 148406 - protein, 10 aa, Influenza A virus
GRVSRPMFLY

SEQ ID NO: 148407 - protein, 11 aa, Influenza A virus
GRVSRPMFLYV

SEQ ID NO: 148408 - protein, 9 aa, Influenza A virus
GTFDIGGLY

SEQ ID NO: 148409 - protein, 10 aa, Influenza A virus
GTFDIGGLYE

SEQ ID NO: 148410 - protein, 9 aa, Influenza A virus
GTFDLEGLY

SEQ ID NO: 148411 - protein, 11 aa, Influenza A virus
GTFDLEGLYEA

SEQ ID NO: 148412 - protein, 11 aa, Influenza A virus
GTFDLEGLYGA

SEQ ID NO: 148413 - protein, 9 aa, Influenza A virus
GTFDLGGLY

SEQ ID NO: 148414 - protein, 10 aa, Influenza A virus
GTFDLGGLYE

SEQ ID NO: 148415 - protein, 11 aa, Influenza A virus
GTFDLGGLYEA

SEQ ID NO: 148416 - protein, 10 aa, Influenza A virus
GTFDLGGLYG

SEQ ID NO: 148417 - protein, 11 aa, Influenza A virus
GTFDLGGLYGA

SEQ ID NO: 148418 - protein, 9 aa, Influenza A virus
GTFNLGGLY

SEQ ID NO: 148419 - protein, 10 aa, Influenza A virus
GTFNLGGLYE

SEQ ID NO: 148420 - protein, 11 aa, Influenza A virus
GTFNLGGLYEA

SEQ ID NO: 148421 - protein, 9 aa, Influenza A virus
GTMRRLADY

SEQ ID NO: 148422 - protein, 11 aa, Influenza A virus
GTMRRLADYSL

SEQ ID NO: 148423 - protein, 9 aa, Influenza A virus
GTMRRLANY

SEQ ID NO: 148424 - protein, 10 aa, Influenza A virus
GTMRRLANYS

SEQ ID NO: 148425 - protein, 11 aa, Influenza A virus
GTMRRLANYSL

SEQ ID NO: 148426 - protein, 9 aa, Influenza A virus
GTSKIKMKW

SEQ ID NO: 148427 - protein, 9 aa, Influenza A virus
GVDINTALL

SEQ ID NO: 148428 - protein, 9 aa, Influenza A virus
GVEDGSIGK

SEQ ID NO: 148429 - protein, 9 aa, Influenza A virus
GVEEGSIGK

SEQ ID NO: 148430 - protein, 9 aa, Influenza A virus
GVEESSIGK

SEQ ID NO: 148431 - protein, 11 aa, Influenza A virus
GVTRREVHTYY

SEQ ID NO: 148432 - protein, 9 aa, Influenza A virus
GVYINSALL

SEQ ID NO: 148433 - protein, 9 aa, Influenza A virus
GVYINTALL

SEQ ID NO: 148434 - protein, 9 aa, Influenza A virus
GWKEPIIVK

SEQ ID NO: 148435 - protein, 9 aa, Influenza A virus
GWKEPNIIK

SEQ ID NO: 148436 - protein, 9 aa, Influenza A virus
GWKEPNIVK

SEQ ID NO: 148437 - protein, 9 aa, Influenza A virus
GWKEPNVVK

SEQ ID NO: 148438 - protein, 9 aa, Influenza A virus
GWKEPSIVK

SEQ ID NO: 148439 - protein, 9 aa, Influenza A virus
GWKEPSVVK

SEQ ID NO: 148440 - protein, 9 aa, Influenza A virus
GWKEPTIVK

SEQ ID NO: 148441 - protein, 9 aa, Influenza A virus
GWKEPTVVK

SEQ ID NO: 148442 - protein, 9 aa, Influenza A virus
GWKEPYIVK

SEQ ID NO: 148443 - protein, 9 aa, Influenza A virus
GWKEPYVVK

SEQ ID NO: 148444 - protein, 9 aa, Influenza A virus
GWREPNIIK

SEQ ID NO: 148445 - protein, 10 aa, Influenza A virus
GYIEGKLSQM

SEQ ID NO: 148446 - protein, 10 aa, Influenza A virus
HCRATEYIMK

SEQ ID NO: 148447 - protein, 10 aa, Influenza A virus
HDAIKCMKTF

SEQ ID NO: 148448 - protein, 8 aa, Influenza A virus
HEGEGIPL

SEQ ID NO: 148449 - protein, 9 aa, Influenza A virus
HEGEGIPLY

SEQ ID NO: 148450 - protein, 8 aa, Influenza A virus
HEIGDMLL

SEQ ID NO: 148451 - protein, 11 aa, Influenza A virus
HEIGDMLLRTA

SEQ ID NO: 148452 - protein, 9 aa, Influenza A virus
HEKGINLNY

SEQ ID NO: 148453 - protein, 10 aa, Influenza A virus
HEKGINLNYL

SEQ ID NO: 148454 - protein, 11 aa, Influenza A virus
HEKGINLNYLL

SEQ ID NO: 148455 - protein, 9 aa, Influenza A virus
HEKGINPNY

SEQ ID NO: 148456 - protein, 10 aa, Influenza A virus
HEKGINPNYL

SEQ ID NO: 148457 - protein, 11 aa, Influenza A virus
HEKGINPNYLL

SEQ ID NO: 148458 - protein, 11 aa, Influenza A virus
HEKGINPNYLM

SEQ ID NO: 148459 - protein, 9 aa, Influenza A virus
HEKGINSNY

SEQ ID NO: 148460 - protein, 10 aa, Influenza A virus
HEKGINSNYL

SEQ ID NO: 148461 - protein, 11 aa, Influenza A virus
HEKGINSNYLL

SEQ ID NO: 148462 - protein, 9 aa, Influenza A virus
HERGINPNY

SEQ ID NO: 148463 - protein, 10 aa, Influenza A virus
HERGINPNYL

SEQ ID NO: 148464 - protein, 11 aa, Influenza A virus
HERGINPNYLL

SEQ ID NO: 148465 - protein, 9 aa, Influenza A virus
HERGINSNY

SEQ ID NO: 148466 - protein, 10 aa, Influenza A virus
HERGINSNYL

SEQ ID NO: 148467 - protein, 11 aa, Influenza A virus
HERGINSNYLL

SEQ ID NO: 148468 - protein, 10 aa, Influenza A virus
HFINELGESV

SEQ ID NO: 148469 - protein, 9 aa, Influenza A virus
HGKGINPNY

SEQ ID NO: 148470 - protein, 9 aa, Influenza A virus
HIAGMRRNY

SEQ ID NO: 148471 - protein, 9 aa, Influenza A virus
HIASIRRNY

SEQ ID NO: 148472 - protein, 10 aa, Influenza A virus
HIASIRRNYF

SEQ ID NO: 148473 - protein, 9 aa, Influenza A virus
HIASMRRNY

SEQ ID NO: 148474 - protein, 10 aa, Influenza A virus
HIASMRRNYF

SEQ ID NO: 148475 - protein, 10 aa, Influenza A virus
HIFSFTGEEM

SEQ ID NO: 148476 - protein, 10 aa, Influenza A virus
HIFSFTGEGM

SEQ ID NO: 148477 - protein, 10 aa, Influenza A virus
HIYYLEKANK

SEQ ID NO: 148478 - protein, 9 aa, Influenza A virus
HKKGINPNY

SEQ ID NO: 148479 - protein, 9 aa, Influenza A virus
HKWEKYCIL

SEQ ID NO: 148480 - protein, 9 aa, Influenza A virus
HKWEKYCVH

SEQ ID NO: 148481 - protein, 9 aa, Influenza A virus
HKWEKYCVL

SEQ ID NO: 148482 - protein, 9 aa, Influenza A virus
HKWEKYSIL

SEQ ID NO: 148483 - protein, 9 aa, Influenza A virus
HKWERSCVL

SEQ ID NO: 148484 - protein, 9 aa, Influenza A virus
HKWERYCVL

SEQ ID NO: 148485 - protein, 9 aa, Influenza A virus
HLLQQIESM

SEQ ID NO: 148486 - protein, 10 aa, Influenza A virus
HLLQQIESMI

SEQ ID NO: 148487 - protein, 9 aa, Influenza A virus
HLRNDTDVV

SEQ ID NO: 148488 - protein, 11 aa, Influenza A virus
HLRNDTDVVNF

SEQ ID NO: 148489 - protein, 11 aa, Influenza A virus
HLRNDTDVVNY

SEQ ID NO: 148490 - protein, 11 aa, Influenza A virus
HLRNDTDVVTF

SEQ ID NO: 148491 - protein, 8 aa, Influenza A virus
HMEVCFMY

SEQ ID NO: 148492 - protein, 8 aa, Influenza A virus
HMEVSFMY

SEQ ID NO: 148493 - protein, 9 aa, Influenza A virus
HNWEKYCVL

SEQ ID NO: 148494 - protein, 8 aa, Influenza A virus
HQRSKFLL

SEQ ID NO: 148495 - protein, 9 aa, Influenza A virus
HQRSKFLLM

SEQ ID NO: 148496 - protein, 11 aa, Influenza A virus
HQRSKFLLMDA

SEQ ID NO: 148497 - protein, 9 aa, Influenza A virus
HRFEIIEGR

SEQ ID NO: 148498 - protein, 9 aa, Influenza A virus
HRFEIMEGR

SEQ ID NO: 148499 - protein, 8 aa, Influenza A virus
HRWEKYCV

SEQ ID NO: 148500 - protein, 9 aa, Influenza A virus
HRWEKYCVL

SEQ ID NO: 148501 - protein, 10 aa, Influenza A virus
HRWEKYCVLR

SEQ ID NO: 148502 - protein, 11 aa, Influenza A virus
HRWEKYCVLRI

SEQ ID NO: 148503 - protein, 10 aa, Influenza A virus
HSDEPELRSL

SEQ ID NO: 148504 - protein, 10 aa, Influenza A virus
HTYYLEKANK

SEQ ID NO: 148505 - protein, 9 aa, Influenza A virus
HVSRPMFLY

SEQ ID NO: 148506 - protein, 10 aa, Influenza A virus
HVSRPMFLYV

SEQ ID NO: 148507 - protein, 11 aa, Influenza A virus
HVSRPMFLYVR

SEQ ID NO: 148508 - protein, 10 aa, Influenza A virus
HVYYLEKANK

SEQ ID NO: 148509 - protein, 9 aa, Influenza A virus
IAGMRRNYF

SEQ ID NO: 148510 - protein, 10 aa, Influenza A virus
IAPIEHIASI

SEQ ID NO: 148511 - protein, 10 aa, Influenza A virus
IAPIEHIASM

SEQ ID NO: 148512 - protein, 10 aa, Influenza A virus
IAPIEYIASM

SEQ ID NO: 148513 - protein, 10 aa, Influenza A virus
IAPLEHIASM

SEQ ID NO: 148514 - protein, 8 aa, Influenza A virus
IAPVSRPM

SEQ ID NO: 148515 - protein, 9 aa, Influenza A virus
IAPVSRPMF

SEQ ID NO: 148516 - protein, 10 aa, Influenza A virus
IAPVSRPMFL

SEQ ID NO: 148517 - protein, 11 aa, Influenza A virus
IAPVSRPMFLY

SEQ ID NO: 148518 - protein, 9 aa, Influenza A virus
IAQALRDNL

SEQ ID NO: 148519 - protein, 8 aa, Influenza A virus
IASIRRNY

SEQ ID NO: 148520 - protein, 9 aa, Influenza A virus
IASIRRNYF

SEQ ID NO: 148521 - protein, 8 aa, Influenza A virus
IASMRRNY

SEQ ID NO: 148522 - protein, 9 aa, Influenza A virus
IASMRRNYF

SEQ ID NO: 148523 - protein, 9 aa, Influenza A virus
IAWTVINSI

SEQ ID NO: 148524 - protein, 10 aa, Influenza A virus
ICFMYSDFHF

SEQ ID NO: 148525 - protein, 11 aa, Influenza A virus
ICFMYSDFHFI

SEQ ID NO: 148526 - protein, 10 aa, Influenza A virus
ICTHMEVSFM

SEQ ID NO: 148527 - protein, 11 aa, Influenza A virus
ICTHMEVSFMY

SEQ ID NO: 148528 - protein, 10 aa, Influenza A virus
IDPFLRTTPR

SEQ ID NO: 148529 - protein, 10 aa, Influenza A virus
IEECLINDPW

SEQ ID NO: 148530 - protein, 11 aa, Influenza A virus
IEEKFEISGTM

SEQ ID NO: 148531 - protein, 11 aa, Influenza A virus
IEEKFEITGTM

SEQ ID NO: 148532 - protein, 10 aa, Influenza A virus
IEERFEITGA

SEQ ID NO: 148533 - protein, 11 aa, Influenza A virus
IEERFEITGAM

SEQ ID NO: 148534 - protein, 11 aa, Influenza A virus
IEERFEITGTM

SEQ ID NO: 148535 - protein, 10 aa, Influenza A virus
IEGKLSQMSK

SEQ ID NO: 148536 - protein, 9 aa, Influenza A virus
IEGRDRAMA

SEQ ID NO: 148537 - protein, 10 aa, Influenza A virus
IEGRDRAMAW

SEQ ID NO: 148538 - protein, 10 aa, Influenza A virus
IEGRDRNMAW

SEQ ID NO: 148539 - protein, 9 aa, Influenza A virus
IEGRDRNVA

SEQ ID NO: 148540 - protein, 10 aa, Influenza A virus
IEGRDRNVAW

SEQ ID NO: 148541 - protein, 9 aa, Influenza A virus
IEGRDRTIA

SEQ ID NO: 148542 - protein, 10 aa, Influenza A virus
IEGRDRTIAW

SEQ ID NO: 148543 - protein, 9 aa, Influenza A virus
IEGRDRTMA

SEQ ID NO: 148544 - protein, 10 aa, Influenza A virus
IEGRDRTMAW

SEQ ID NO: 148545 - protein, 9 aa, Influenza A virus
IEGRDRTVA

SEQ ID NO: 148546 - protein, 10 aa, Influenza A virus
IEGRDRTVAW

SEQ ID NO: 148547 - protein, 10 aa, Influenza A virus
IEKPKFLPDL

SEQ ID NO: 148548 - protein, 10 aa, Influenza A virus
IELDEIGEDV

SEQ ID NO: 148549 - protein, 10 aa, Influenza A virus
IELDEIGENV

SEQ ID NO: 148550 - protein, 8 aa, Influenza A virus
IENFRAYV

SEQ ID NO: 148551 - protein, 10 aa, Influenza A virus
IEPFFKTTPR

SEQ ID NO: 148552 - protein, 10 aa, Influenza A virus
IEPFLKTTPR

SEQ ID NO: 148553 - protein, 10 aa, Influenza A virus
IEPFLRTTPR

SEQ ID NO: 148554 - protein, 10 aa, Influenza A virus
IEPFSKTTPR

SEQ ID NO: 148555 - protein, 10 aa, Influenza A virus
IEPGDSNALL

SEQ ID NO: 148556 - protein, 9 aa, Influenza A virus
IESGDPNAL

SEQ ID NO: 148557 - protein, 10 aa, Influenza A virus
IESGDPNALL

SEQ ID NO: 148558 - protein, 10 aa, Influenza A virus
IESKLSQMSK

SEQ ID NO: 148559 - protein, 11 aa, Influenza A virus
IESMIEAESSI

SEQ ID NO: 148560 - protein, 11 aa, Influenza A virus
IESMIEAESSV

SEQ ID NO: 148561 - protein, 11 aa, Influenza A virus
IESMIEAQSSV

SEQ ID NO: 148562 - protein, 11 aa, Influenza A virus
IESMTEAESSV

SEQ ID NO: 148563 - protein, 11 aa, Influenza A virus
IESMVEAESSV

SEQ ID NO: 148564 - protein, 9 aa, Influenza A virus
IETNKFAAI

SEQ ID NO: 148565 - protein, 9 aa, Influenza A virus
IETNKLAAI

SEQ ID NO: 148566 - protein, 11 aa, Influenza A virus
IEYIASMRRNY

SEQ ID NO: 148567 - protein, 10 aa, Influenza A virus
IFLYVRTNGT

SEQ ID NO: 148568 - protein, 9 aa, Influenza A virus
IFSFTGEEM

SEQ ID NO: 148569 - protein, 9 aa, Influenza A virus
IFSFTGEGM

SEQ ID NO: 148570 - protein, 10 aa, Influenza A virus
IGDMILRTAI

SEQ ID NO: 148571 - protein, 10 aa, Influenza A virus
IGDMLIRSAI

SEQ ID NO: 148572 - protein, 10 aa, Influenza A virus
IGDMLLRSAI

SEQ ID NO: 148573 - protein, 10 aa, Influenza A virus
IGDMLLRSAL

SEQ ID NO: 148574 - protein, 10 aa, Influenza A virus
IGDMLLRSTI

SEQ ID NO: 148575 - protein, 10 aa, Influenza A virus
IGDMLLRTAI

SEQ ID NO: 148576 - protein, 10 aa, Influenza A virus
IGDMLLRTAV

SEQ ID NO: 148577 - protein, 10 aa, Influenza A virus
IGDMLLRTSI

SEQ ID NO: 148578 - protein, 10 aa, Influenza A virus
IGDMVLRTAI

SEQ ID NO: 148579 - protein, 10 aa, Influenza A virus
IGEMLLRTAI

SEQ ID NO: 148580 - protein, 11 aa, Influenza A virus
IGGLYESIEEC

SEQ ID NO: 148581 - protein, 9 aa, Influenza A virus
IGHVSRPMF

SEQ ID NO: 148582 - protein, 11 aa, Influenza A virus
IGHVSRPMFLY

SEQ ID NO: 148583 - protein, 9 aa, Influenza A virus
IGQAPRPTF

SEQ ID NO: 148584 - protein, 11 aa, Influenza A virus
IGQAPRPTFLY

SEQ ID NO: 148585 - protein, 9 aa, Influenza A virus
IGQMSRPMF

SEQ ID NO: 148586 - protein, 10 aa, Influenza A virus
IGQMSRPMFL

SEQ ID NO: 148587 - protein, 11 aa, Influenza A virus
IGQMSRPMFLY

SEQ ID NO: 148588 - protein, 11 aa, Influenza A virus
IGQVARPMFLY

SEQ ID NO: 148589 - protein, 11 aa, Influenza A virus
IGQVLRPMFLY

SEQ ID NO: 148590 - protein, 11 aa, Influenza A virus
IGQVSRPMFLY

SEQ ID NO: 148591 - protein, 10 aa, Influenza A virus
IGRVSRPMFL

SEQ ID NO: 148592 - protein, 11 aa, Influenza A virus
IGRVSRPMFLY

SEQ ID NO: 148593 - protein, 11 aa, Influenza A virus
IGVTRREVHTY

SEQ ID NO: 148594 - protein, 9 aa, Influenza A virus
IHIYYLEKA

SEQ ID NO: 148595 - protein, 8 aa, Influenza A virus
IIKGRSHL

SEQ ID NO: 148596 - protein, 9 aa, Influenza A virus
IIKGRSHLR

SEQ ID NO: 148597 - protein, 10 aa, Influenza A virus
IKCIRTFFGW

SEQ ID NO: 148598 - protein, 10 aa, Influenza A virus
IKCMKTFFGW

SEQ ID NO: 148599 - protein, 11 aa, Influenza A virus
IKCMKTFFGWR

SEQ ID NO: 148600 - protein, 10 aa, Influenza A virus
IKCMRTFFGW

SEQ ID NO: 148601 - protein, 11 aa, Influenza A virus
IKCMRTFFGWK

SEQ ID NO: 148602 - protein, 10 aa, Influenza A virus
IKLPDGPPCF

SEQ ID NO: 148603 - protein, 10 aa, Influenza A virus
IKLPNGPPCY

SEQ ID NO: 148604 - protein, 9 aa, Influenza A virus
IKMKWGMEI

SEQ ID NO: 148605 - protein, 10 aa, Influenza A virus
IKMKWGMEIR

SEQ ID NO: 148606 - protein, 11 aa, Influenza A virus
IKMKWGMEIRR

SEQ ID NO: 148607 - protein, 9 aa, Influenza A virus
IKMKWGMEM

SEQ ID NO: 148608 - protein, 10 aa, Influenza A virus
IKMKWGMEMR

SEQ ID NO: 148609 - protein, 11 aa, Influenza A virus
IKMKWGMEMRR

SEQ ID NO: 148610 - protein, 10 aa, Influenza A virus
IKMKWGMETR

SEQ ID NO: 148611 - protein, 11 aa, Influenza A virus
IKMKWGMETRR

SEQ ID NO: 148612 - protein, 10 aa, Influenza A virus
IKNMKKTSPL

SEQ ID NO: 148613 - protein, 11 aa, Influenza A virus
IKNMKKTSPLK

SEQ ID NO: 148614 - protein, 11 aa, Influenza A virus
IKSEETHIHIF

SEQ ID NO: 148615 - protein, 11 aa, Influenza A virus
IKSEKTHIHIF

SEQ ID NO: 148616 - protein, 9 aa, Influenza A virus
IKSENTHIH

SEQ ID NO: 148617 - protein, 11 aa, Influenza A virus
IKSENTHIHIF

SEQ ID NO: 148618 - protein, 9 aa, Influenza A virus
ILEIGDMLL

SEQ ID NO: 148619 - protein, 10 aa, Influenza A virus
ILEIGDMLLR

SEQ ID NO: 148620 - protein, 9 aa, Influenza A virus
ILEIGDMVL

SEQ ID NO: 148621 - protein, 10 aa, Influenza A virus
ILEIGDMVLR

SEQ ID NO: 148622 - protein, 8 aa, Influenza A virus
ILLIVQAL

SEQ ID NO: 148623 - protein, 9 aa, Influenza A virus
ILLIVQALR

SEQ ID NO: 148624 - protein, 9 aa, Influenza A virus
ILRSAIGQM

SEQ ID NO: 148625 - protein, 11 aa, Influenza A virus
ILRSAIGQMSR

SEQ ID NO: 148626 - protein, 9 aa, Influenza A virus
ILRTAIGHV

SEQ ID NO: 148627 - protein, 11 aa, Influenza A virus
ILRTAIGHVSR

SEQ ID NO: 148628 - protein, 9 aa, Influenza A virus
ILRTAIGQV

SEQ ID NO: 148629 - protein, 11 aa, Influenza A virus
ILRTAIGQVSR

SEQ ID NO: 148630 - protein, 9 aa, Influenza A virus
IMEGRDRTM

SEQ ID NO: 148631 - protein, 10 aa, Influenza A virus
IMKGVDINTA

SEQ ID NO: 148632 - protein, 11 aa, Influenza A virus
IMKGVDINTAL

SEQ ID NO: 148633 - protein, 9 aa, Influenza A virus
IMKGVYINS

SEQ ID NO: 148634 - protein, 10 aa, Influenza A virus
IMKGVYINSA

SEQ ID NO: 148635 - protein, 11 aa, Influenza A virus
IMKGVYINSAL

SEQ ID NO: 148636 - protein, 9 aa, Influenza A virus
IMKGVYINT

SEQ ID NO: 148637 - protein, 10 aa, Influenza A virus
IMKGVYINTA

SEQ ID NO: 148638 - protein, 11 aa, Influenza A virus
IMKGVYINTAL

SEQ ID NO: 148639 - protein, 10 aa, Influenza A virus
IMVELDDPNA

SEQ ID NO: 148640 - protein, 11 aa, Influenza A virus
IMVELDDPNAL

SEQ ID NO: 148641 - protein, 10 aa, Influenza A virus
INCMKTFFGW

SEQ ID NO: 148642 - protein, 11 aa, Influenza A virus
INCMKTFFGWK

SEQ ID NO: 148643 - protein, 9 aa, Influenza A virus
INLNYLLAW

SEQ ID NO: 148644 - protein, 10 aa, Influenza A virus
INLNYLLAWK

SEQ ID NO: 148645 - protein, 10 aa, Influenza A virus
INPNYLLSWR

SEQ ID NO: 148646 - protein, 10 aa, Influenza A virus
INSICNTTGV

SEQ ID NO: 148647 - protein, 9 aa, Influenza A virus
INSNYLLAW

SEQ ID NO: 148648 - protein, 10 aa, Influenza A virus
INSNYLLAWK

SEQ ID NO: 148649 - protein, 9 aa, Influenza A virus
INSNYLLSW

SEQ ID NO: 148650 - protein, 10 aa, Influenza A virus
INSNYLLSWK

SEQ ID NO: 148651 - protein, 9 aa, Influenza A virus
INSNYLQSW

SEQ ID NO: 148652 - protein, 10 aa, Influenza A virus
INSNYLQSWK

SEQ ID NO: 148653 - protein, 11 aa, Influenza A virus
IPDLYDYKENR

SEQ ID NO: 148654 - protein, 10 aa, Influenza A virus
IPLHDAIKCM

SEQ ID NO: 148655 - protein, 10 aa, Influenza A virus
IPLYDAIKCI

SEQ ID NO: 148656 - protein, 10 aa, Influenza A virus
IPLYDAIKCM

SEQ ID NO: 148657 - protein, 10 aa, Influenza A virus
IPLYDAINCM

SEQ ID NO: 148658 - protein, 10 aa, Influenza A virus
IPLYDAIRCM

SEQ ID NO: 148659 - protein, 10 aa, Influenza A virus
IPLYDAVRCM

SEQ ID NO: 148660 - protein, 10 aa, Influenza A virus
IPMISKCRTK

SEQ ID NO: 148661 - protein, 10 aa, Influenza A virus
IPMISKCRTR

SEQ ID NO: 148662 - protein, 11 aa, Influenza A virus
IQNEFNKACEL

SEQ ID NO: 148663 - protein, 11 aa, Influenza A virus
IQSEFNKACEL

SEQ ID NO: 148664 - protein, 10 aa, Influenza A virus
IRCMKTFFGW

SEQ ID NO: 148665 - protein, 11 aa, Influenza A virus
IRCMKTFFGWK

SEQ ID NO: 148666 - protein, 10 aa, Influenza A virus
IRLPDGPPCF

SEQ ID NO: 148667 - protein, 10 aa, Influenza A virus
IRLPNGPPCF

SEQ ID NO: 148668 - protein, 10 aa, Influenza A virus
IRQEMANRGL

SEQ ID NO: 148669 - protein, 11 aa, Influenza A virus
IRQEMANRGLW

SEQ ID NO: 148670 - protein, 10 aa, Influenza A virus
IRQEMASRGL

SEQ ID NO: 148671 - protein, 11 aa, Influenza A virus
IRQEMASRGLW

SEQ ID NO: 148672 - protein, 9 aa, Influenza A virus
IRRCLLQSL

SEQ ID NO: 148673 - protein, 10 aa, Influenza A virus
IRSAIGQMSR

SEQ ID NO: 148674 - protein, 10 aa, Influenza A virus
IRSAIGQVSR

SEQ ID NO: 148675 - protein, 11 aa, Influenza A virus
IRTFFGWKEPY

SEQ ID NO: 148676 - protein, 10 aa, Influenza A virus
ISKCRTKEGR

SEQ ID NO: 148677 - protein, 10 aa, Influenza A virus
ISKCRTREGR

SEQ ID NO: 148678 - protein, 9 aa, Influenza A virus
ISSWIQNEF

SEQ ID NO: 148679 - protein, 11 aa, Influenza A virus
ISSWIQNEFNK

SEQ ID NO: 148680 - protein, 9 aa, Influenza A virus
ITGAMRRLA

SEQ ID NO: 148681 - protein, 9 aa, Influenza A virus
ITGTMRRLA

SEQ ID NO: 148682 - protein, 11 aa, Influenza A virus
ITGTMRRLADY

SEQ ID NO: 148683 - protein, 11 aa, Influenza A virus
ITGTMRRLANY

SEQ ID NO: 148684 - protein, 10 aa, Influenza A virus
IVELAEKTMK

SEQ ID NO: 148685 - protein, 9 aa, Influenza A virus
IVELAERAM

SEQ ID NO: 148686 - protein, 10 aa, Influenza A virus
IVELAERAMK

SEQ ID NO: 148687 - protein, 10 aa, Influenza A virus
IVELDDPNAL

SEQ ID NO: 148688 - protein, 11 aa, Influenza A virus
IVELDDPNALL

SEQ ID NO: 148689 - protein, 10 aa, Influenza A virus
IVELGDPNAL

SEQ ID NO: 148690 - protein, 11 aa, Influenza A virus
IVELGDPNALL

SEQ ID NO: 148691 - protein, 10 aa, Influenza A virus
IVELGDPSAL

SEQ ID NO: 148692 - protein, 11 aa, Influenza A virus
IVELGDPSALL

SEQ ID NO: 148693 - protein, 10 aa, Influenza A virus
IVESSDPNAL

SEQ ID NO: 148694 - protein, 10 aa, Influenza A virus
IVEVGDPNAL

SEQ ID NO: 148695 - protein, 9 aa, Influenza A virus
IVKGRSHLR

SEQ ID NO: 148696 - protein, 9 aa, Influenza A virus
IYYLEKANK

SEQ ID NO: 148697 - protein, 10 aa, Influenza A virus
IYYLEKANKI

SEQ ID NO: 148698 - protein, 10 aa, Influenza A virus
IYYLEKANKV

SEQ ID NO: 148699 - protein, 10 aa, Influenza A virus
KACELTDSGW

SEQ ID NO: 148700 - protein, 9 aa, Influenza A virus
KACELTDSI

SEQ ID NO: 148701 - protein, 10 aa, Influenza A virus
KACELTDSIW

SEQ ID NO: 148702 - protein, 11 aa, Influenza A virus
KACELTDSIWI

SEQ ID NO: 148703 - protein, 10 aa, Influenza A virus
KACELTDSSW

SEQ ID NO: 148704 - protein, 11 aa, Influenza A virus
KACELTDSSWI

SEQ ID NO: 148705 - protein, 11 aa, Influenza A virus
KACELTDSSWL

SEQ ID NO: 148706 - protein, 11 aa, Influenza A virus
KACELTDSSWM

SEQ ID NO: 148707 - protein, 10 aa, Influenza A virus
KACELTDSTW

SEQ ID NO: 148708 - protein, 11 aa, Influenza A virus
KACELTDSTWI

SEQ ID NO: 148709 - protein, 9 aa, Influenza A virus
KACELTDSV

SEQ ID NO: 148710 - protein, 10 aa, Influenza A virus
KACELTDSVW

SEQ ID NO: 148711 - protein, 11 aa, Influenza A virus
KACELTDSVWI

SEQ ID NO: 148712 - protein, 10 aa, Influenza A virus
KACELTESSW

SEQ ID NO: 148713 - protein, 11 aa, Influenza A virus
KACELTESSWI

SEQ ID NO: 148714 - protein, 9 aa, Influenza A virus
KACELTNSI

SEQ ID NO: 148715 - protein, 10 aa, Influenza A virus
KACELTNSIW

SEQ ID NO: 148716 - protein, 11 aa, Influenza A virus
KACELTNSIWI

SEQ ID NO: 148717 - protein, 11 aa, Influenza A virus
KAMKEYGEDPR

SEQ ID NO: 148718 - protein, 10 aa, Influenza A virus
KAMKEYGEDR

SEQ ID NO: 148719 - protein, 10 aa, Influenza A virus
KAMKEYGENL

SEQ ID NO: 148720 - protein, 11 aa, Influenza A virus
KAMKEYGENLK

SEQ ID NO: 148721 - protein, 11 aa, Influenza A virus
KAMKEYGENPK

SEQ ID NO: 148722 - protein, 9 aa, Influenza A virus
KANKIKSEK

SEQ ID NO: 148723 - protein, 9 aa, Influenza A virus
KANKTKSEK

SEQ ID NO: 148724 - protein, 9 aa, Influenza A virus
KANKVKSEK

SEQ ID NO: 148725 - protein, 9 aa, Influenza A virus
KCIRTFFGW

SEQ ID NO: 148726 - protein, 10 aa, Influenza A virus
KCIRTFFGWK

SEQ ID NO: 148727 - protein, 9 aa, Influenza A virus
KCMKTFFGW

SEQ ID NO: 148728 - protein, 10 aa, Influenza A virus
KCMKTFFGWK

SEQ ID NO: 148729 - protein, 10 aa, Influenza A virus
KCMKTFFGWR

SEQ ID NO: 148730 - protein, 9 aa, Influenza A virus
KCMRTFFGW

SEQ ID NO: 148731 - protein, 10 aa, Influenza A virus
KCMRTFFGWK

SEQ ID NO: 148732 - protein, 11 aa, Influenza A virus
KDMTKDFFENK

SEQ ID NO: 148733 - protein, 11 aa, Influenza A virus
KDMTKEFFENK

SEQ ID NO: 148734 - protein, 11 aa, Influenza A virus
KDMTKEFFENR

SEQ ID NO: 148735 - protein, 11 aa, Influenza A virus
KDMTKEFFESK

SEQ ID NO: 148736 - protein, 9 aa, Influenza A virus
KDMTKEFFK

SEQ ID NO: 148737 - protein, 11 aa, Influenza A virus
KDMTKEFFKNK

SEQ ID NO: 148738 - protein, 11 aa, Influenza A virus
KDMTREFFENK

SEQ ID NO: 148739 - protein, 10 aa, Influenza A virus
KDVSDLKQYY

SEQ ID NO: 148740 - protein, 11 aa, Influenza A virus
KDVTKEFFENK

SEQ ID NO: 148741 - protein, 8 aa, Influenza A virus
KEDRFIEI

SEQ ID NO: 148742 - protein, 10 aa, Influenza A virus
KEDRFIEIGV

SEQ ID NO: 148743 - protein, 8 aa, Influenza A virus
KEDRFIKI

SEQ ID NO: 148744 - protein, 10 aa, Influenza A virus
KEDRFIKIGV

SEQ ID NO: 148745 - protein, 10 aa, Influenza A virus
KEFFENKSEA

SEQ ID NO: 148746 - protein, 11 aa, Influenza A virus
KEFFENKSEAW

SEQ ID NO: 148747 - protein, 10 aa, Influenza A virus
KEFFENKSEK

SEQ ID NO: 148748 - protein, 11 aa, Influenza A virus
KEFFENKSEKW

SEQ ID NO: 148749 - protein, 11 aa, Influenza A virus
KEFFENKSETW

SEQ ID NO: 148750 - protein, 11 aa, Influenza A virus
KEFFENKSKTW

SEQ ID NO: 148751 - protein, 11 aa, Influenza A virus
KEFFENNSETW

SEQ ID NO: 148752 - protein, 11 aa, Influenza A virus
KEFFENRSETW

SEQ ID NO: 148753 - protein, 11 aa, Influenza A virus
KEFFESKSETW

SEQ ID NO: 148754 - protein, 11 aa, Influenza A virus
KEFFKNKSETW

SEQ ID NO: 148755 - protein, 9 aa, Influenza A virus
KEGRRKTNL

SEQ ID NO: 148756 - protein, 10 aa, Influenza A virus
KEGRRKTNLY

SEQ ID NO: 148757 - protein, 9 aa, Influenza A virus
KEGRRRTNL

SEQ ID NO: 148758 - protein, 10 aa, Influenza A virus
KEGRRRTNLY

SEQ ID NO: 148759 - protein, 9 aa, Influenza A virus
KEKDMTKDF

SEQ ID NO: 148760 - protein, 10 aa, Influenza A virus
KEKDMTKDFF

SEQ ID NO: 148761 - protein, 9 aa, Influenza A virus
KEKDMTKEF

SEQ ID NO: 148762 - protein, 10 aa, Influenza A virus
KEKDMTKEFF

SEQ ID NO: 148763 - protein, 9 aa, Influenza A virus
KEKDMTREF

SEQ ID NO: 148764 - protein, 10 aa, Influenza A virus
KEKDMTREFF

SEQ ID NO: 148765 - protein, 9 aa, Influenza A virus
KEKDVTKEF

SEQ ID NO: 148766 - protein, 10 aa, Influenza A virus
KEKDVTKEFF

SEQ ID NO: 148767 - protein, 8 aa, Influenza A virus
KENRFIEI

SEQ ID NO: 148768 - protein, 10 aa, Influenza A virus
KENRFIEIGV

SEQ ID NO: 148769 - protein, 8 aa, Influenza A virus
KENRFIEV

SEQ ID NO: 148770 - protein, 9 aa, Influenza A virus
KENRFIEVG

SEQ ID NO: 148771 - protein, 10 aa, Influenza A virus
KENRFIEVGV

SEQ ID NO: 148772 - protein, 8 aa, Influenza A virus
KENRFTEI

SEQ ID NO: 148773 - protein, 10 aa, Influenza A virus
KENRFTEIGV

SEQ ID NO: 148774 - protein, 8 aa, Influenza A virus
KENRFVEI

SEQ ID NO: 148775 - protein, 10 aa, Influenza A virus
KENRFVEIGV

SEQ ID NO: 148776 - protein, 11 aa, Influenza A virus
KEPYIVKPHER

SEQ ID NO: 148777 - protein, 9 aa, Influenza A virus
KEVNAKIEP

SEQ ID NO: 148778 - protein, 10 aa, Influenza A virus
KEVNAKIEPF

SEQ ID NO: 148779 - protein, 11 aa, Influenza A virus
KEVNAKIEPFL

SEQ ID NO: 148780 - protein, 9 aa, Influenza A virus
KEVNARIDP

SEQ ID NO: 148781 - protein, 10 aa, Influenza A virus
KEVNARIDPF

SEQ ID NO: 148782 - protein, 11 aa, Influenza A virus
KEVNARIDPFL

SEQ ID NO: 148783 - protein, 9 aa, Influenza A virus
KEVNARIEP

SEQ ID NO: 148784 - protein, 10 aa, Influenza A virus
KEVNARIEPF

SEQ ID NO: 148785 - protein, 11 aa, Influenza A virus
KEVNARIEPFL

SEQ ID NO: 148786 - protein, 9 aa, Influenza A virus
KEVNTRIEP

SEQ ID NO: 148787 - protein, 10 aa, Influenza A virus
KEVNTRIEPF

SEQ ID NO: 148788 - protein, 9 aa, Influenza A virus
KEYGEDLKI

SEQ ID NO: 148789 - protein, 9 aa, Influenza A virus
KEYGEDLKV

SEQ ID NO: 148790 - protein, 9 aa, Influenza A virus
KEYGEDPKI

SEQ ID NO: 148791 - protein, 9 aa, Influenza A virus
KEYGEDPKL

SEQ ID NO: 148792 - protein, 9 aa, Influenza A virus
KEYGEDPRI

SEQ ID NO: 148793 - protein, 9 aa, Influenza A virus
KEYGEDRKI

SEQ ID NO: 148794 - protein, 9 aa, Influenza A virus
KEYGENLKI

SEQ ID NO: 148795 - protein, 9 aa, Influenza A virus
KEYGENPKI

SEQ ID NO: 148796 - protein, 9 aa, Influenza A virus
KFAAICTHL

SEQ ID NO: 148797 - protein, 11 aa, Influenza A virus
KFAAICTHLEI

SEQ ID NO: 148798 - protein, 9 aa, Influenza A virus
KFAAICTHM

SEQ ID NO: 148799 - protein, 8 aa, Influenza A virus
KFEISGTM

SEQ ID NO: 148800 - protein, 9 aa, Influenza A virus
KFEISGTMR

SEQ ID NO: 148801 - protein, 10 aa, Influenza A virus
KFEISGTMRR

SEQ ID NO: 148802 - protein, 8 aa, Influenza A virus
KFEITGTM

SEQ ID NO: 148803 - protein, 9 aa, Influenza A virus
KFEITGTMR

SEQ ID NO: 148804 - protein, 10 aa, Influenza A virus
KFEITGTMRK

SEQ ID NO: 148805 - protein, 10 aa, Influenza A virus
KFEITGTMRR

SEQ ID NO: 148806 - protein, 9 aa, Influenza A virus
KFIPDLYDY

SEQ ID NO: 148807 - protein, 10 aa, Influenza A virus
KFIPDLYDYK

SEQ ID NO: 148808 - protein, 9 aa, Influenza A virus
KFLLMDALK

SEQ ID NO: 148809 - protein, 10 aa, Influenza A virus
KFLLMDALKF

SEQ ID NO: 148810 - protein, 10 aa, Influenza A virus
KFLLMDALKL

SEQ ID NO: 148811 - protein, 9 aa, Influenza A virus
KFLLMDSLK

SEQ ID NO: 148812 - protein, 10 aa, Influenza A virus
KFLLMDSLKL

SEQ ID NO: 148813 - protein, 9 aa, Influenza A virus
KFLPDLYDY

SEQ ID NO: 148814 - protein, 10 aa, Influenza A virus
KFLPDLYDYK

SEQ ID NO: 148815 - protein, 11 aa, Influenza A virus
KFLPDLYDYKK

SEQ ID NO: 148816 - protein, 10 aa, Influenza A virus
KFLPDLYDYR

SEQ ID NO: 148817 - protein, 11 aa, Influenza A virus
KFLPDLYDYRE

SEQ ID NO: 148818 - protein, 9 aa, Influenza A virus
KFRAYVDGF

SEQ ID NO: 148819 - protein, 9 aa, Influenza A virus
KGINLNYLL

SEQ ID NO: 148820 - protein, 11 aa, Influenza A virus
KGINLNYLLAW

SEQ ID NO: 148821 - protein, 10 aa, Influenza A virus
KGINPNYLLA

SEQ ID NO: 148822 - protein, 11 aa, Influenza A virus
KGINPNYLLAW

SEQ ID NO: 148823 - protein, 11 aa, Influenza A virus
KGINPNYLLSW

SEQ ID NO: 148824 - protein, 11 aa, Influenza A virus
KGINPNYLLTW

SEQ ID NO: 148825 - protein, 10 aa, Influenza A virus
KGINPNYLLV

SEQ ID NO: 148826 - protein, 11 aa, Influenza A virus
KGINPNYLLVW

SEQ ID NO: 148827 - protein, 9 aa, Influenza A virus
KGINPNYLM

SEQ ID NO: 148828 - protein, 11 aa, Influenza A virus
KGINPNYLMAW

SEQ ID NO: 148829 - protein, 11 aa, Influenza A virus
KGINPNYLQAW

SEQ ID NO: 148830 - protein, 10 aa, Influenza A virus
KGINSNYLLA

SEQ ID NO: 148831 - protein, 11 aa, Influenza A virus
KGINSNYLLAW

SEQ ID NO: 148832 - protein, 11 aa, Influenza A virus
KGINSNYLLSW

SEQ ID NO: 148833 - protein, 10 aa, Influenza A virus
KGMEEGSIGK

SEQ ID NO: 148834 - protein, 10 aa, Influenza A virus
KGNRFIEIGV

SEQ ID NO: 148835 - protein, 10 aa, Influenza A virus
KGVEDGSIGK

SEQ ID NO: 148836 - protein, 10 aa, Influenza A virus
KGVEEGSIGK

SEQ ID NO: 148837 - protein, 10 aa, Influenza A virus
KGVEESSIGK

SEQ ID NO: 148838 - protein, 10 aa, Influenza A virus
KGVYINTALL

SEQ ID NO: 148839 - protein, 10 aa, Influenza A virus
KHRFEIIEGR

SEQ ID NO: 148840 - protein, 10 aa, Influenza A virus
KHRFEIMEGR

SEQ ID NO: 148841 - protein, 11 aa, Influenza A virus
KIEPFLKTTPR

SEQ ID NO: 148842 - protein, 10 aa, Influenza A virus
KIETNKFAAI

SEQ ID NO: 148843 - protein, 10 aa, Influenza A virus
KIETNKLAAI

SEQ ID NO: 148844 - protein, 9 aa, Influenza A virus
KIGVTRREV

SEQ ID NO: 148845 - protein, 10 aa, Influenza A virus
KIKMKWGMEI

SEQ ID NO: 148846 - protein, 11 aa, Influenza A virus
KIKMKWGMEIR

SEQ ID NO: 148847 - protein, 10 aa, Influenza A virus
KIKMKWGMEM

SEQ ID NO: 148848 - protein, 11 aa, Influenza A virus
KIKMKWGMEMR

SEQ ID NO: 148849 - protein, 10 aa, Influenza A virus
KIKMKWGMET

SEQ ID NO: 148850 - protein, 11 aa, Influenza A virus
KIKMKWGMETR

SEQ ID NO: 148851 - protein, 11 aa, Influenza A virus
KIKSEETHIHI

SEQ ID NO: 148852 - protein, 9 aa, Influenza A virus
KIKSEKTHI

SEQ ID NO: 148853 - protein, 11 aa, Influenza A virus
KIKSEKTHIHI

SEQ ID NO: 148854 - protein, 9 aa, Influenza A virus
KIKSENTHI

SEQ ID NO: 148855 - protein, 11 aa, Influenza A virus
KIKSENTHIHI

SEQ ID NO: 148856 - protein, 9 aa, Influenza A virus
KILLIVQAL

SEQ ID NO: 148857 - protein, 10 aa, Influenza A virus
KILLIVQALR

SEQ ID NO: 148858 - protein, 10 aa, Influenza A virus
KIPKTKNMKK

SEQ ID NO: 148859 - protein, 9 aa, Influenza A virus
KIPKTKNMR

SEQ ID NO: 148860 - protein, 10 aa, Influenza A virus
KIPKTKNMRK

SEQ ID NO: 148861 - protein, 9 aa, Influenza A virus
KIPRIKNMK

SEQ ID NO: 148862 - protein, 10 aa, Influenza A virus
KIPRIKNMKK

SEQ ID NO: 148863 - protein, 9 aa, Influenza A virus
KIPRTKNMK

SEQ ID NO: 148864 - protein, 10 aa, Influenza A virus
KIPRTKNMKK

SEQ ID NO: 148865 - protein, 9 aa, Influenza A virus
KIPRTKTMK

SEQ ID NO: 148866 - protein, 10 aa, Influenza A virus
KIPRTKTMKK

SEQ ID NO: 148867 - protein, 9 aa, Influenza A virus
KIPRVKNMK

SEQ ID NO: 148868 - protein, 10 aa, Influenza A virus
KIPRVKNMKK

SEQ ID NO: 148869 - protein, 10 aa, Influenza A virus
KKGINPNYLL

SEQ ID NO: 148870 - protein, 9 aa, Influenza A virus
KKIPRIKNM

SEQ ID NO: 148871 - protein, 9 aa, Influenza A virus
KKIPRVKNM

SEQ ID NO: 148872 - protein, 10 aa, Influenza A virus
KKTSHLKWAL

SEQ ID NO: 148873 - protein, 10 aa, Influenza A virus
KKTSPLKWAL

SEQ ID NO: 148874 - protein, 10 aa, Influenza A virus
KKTSQLMWAL

SEQ ID NO: 148875 - protein, 9 aa, Influenza A virus
KLAAICTHL

SEQ ID NO: 148876 - protein, 10 aa, Influenza A virus
KLAAICTHLE

SEQ ID NO: 148877 - protein, 11 aa, Influenza A virus
KLAAICTHLEV

SEQ ID NO: 148878 - protein, 11 aa, Influenza A virus
KLADQSLPPNF

SEQ ID NO: 148879 - protein, 10 aa, Influenza A virus
KLDFEDCKNV

SEQ ID NO: 148880 - protein, 9 aa, Influenza A virus
KLEPGTFDL

SEQ ID NO: 148881 - protein, 9 aa, Influenza A virus
KLETNKFAA

SEQ ID NO: 148882 - protein, 10 aa, Influenza A virus
KLETNKFAAI

SEQ ID NO: 148883 - protein, 9 aa, Influenza A virus
KLLLIAQAL

SEQ ID NO: 148884 - protein, 10 aa, Influenza A virus
KLLLIAQALR

SEQ ID NO: 148885 - protein, 9 aa, Influenza A virus
KLLLITQAL

SEQ ID NO: 148886 - protein, 10 aa, Influenza A virus
KLLLITQALR

SEQ ID NO: 148887 - protein, 9 aa, Influenza A virus
KLLLIVQAL

SEQ ID NO: 148888 - protein, 10 aa, Influenza A virus
KLLLIVQALR

SEQ ID NO: 148889 - protein, 9 aa, Influenza A virus
KLLLVVQAL

SEQ ID NO: 148890 - protein, 10 aa, Influenza A virus
KLLLVVQALK

SEQ ID NO: 148891 - protein, 10 aa, Influenza A virus
KLLLVVQALR

SEQ ID NO: 148892 - protein, 9 aa, Influenza A virus
KLLPDLYDY

SEQ ID NO: 148893 - protein, 10 aa, Influenza A virus
KLLPDLYDYK

SEQ ID NO: 148894 - protein, 9 aa, Influenza A virus
KLPDGPPCF

SEQ ID NO: 148895 - protein, 11 aa, Influenza A virus
KLPDGPPCFQR

SEQ ID NO: 148896 - protein, 11 aa, Influenza A virus
KLPDGPPCSQR

SEQ ID NO: 148897 - protein, 9 aa, Influenza A virus
KLPNGPPCY

SEQ ID NO: 148898 - protein, 11 aa, Influenza A virus
KLPNGPPCYQR

SEQ ID NO: 148899 - protein, 9 aa, Influenza A virus
KLRSLSSWI

SEQ ID NO: 148900 - protein, 9 aa, Influenza A virus
KLSQMSKEV

SEQ ID NO: 148901 - protein, 9 aa, Influenza A virus
KLSQMSREV

SEQ ID NO: 148902 - protein, 9 aa, Influenza A virus
KMAPEKVDF

SEQ ID NO: 148903 - protein, 9 aa, Influenza A virus
KMKWGMEIR

SEQ ID NO: 148904 - protein, 10 aa, Influenza A virus
KMKWGMEIRR

SEQ ID NO: 148905 - protein, 8 aa, Influenza A virus
KMKWGMEM

SEQ ID NO: 148906 - protein, 9 aa, Influenza A virus
KMKWGMEMR

SEQ ID NO: 148907 - protein, 10 aa, Influenza A virus
KMKWGMEMRP

SEQ ID NO: 148908 - protein, 10 aa, Influenza A virus
KMKWGMEMRR

SEQ ID NO: 148909 - protein, 11 aa, Influenza A virus
KMKWGMEMRRC

SEQ ID NO: 148910 - protein, 9 aa, Influenza A virus
KMKWGMETR

SEQ ID NO: 148911 - protein, 10 aa, Influenza A virus
KMKWGMETRR

SEQ ID NO: 148912 - protein, 10 aa, Influenza A virus
KNIKKTSQLK

SEQ ID NO: 148913 - protein, 9 aa, Influenza A virus
KNISDLKQY

SEQ ID NO: 148914 - protein, 9 aa, Influenza A virus
KNKSETWPI

SEQ ID NO: 148915 - protein, 10 aa, Influenza A virus
KNMKKTGQLK

SEQ ID NO: 148916 - protein, 9 aa, Influenza A virus
KNMKKTSHL

SEQ ID NO: 148917 - protein, 10 aa, Influenza A virus
KNMKKTSHLK

SEQ ID NO: 148918 - protein, 9 aa, Influenza A virus
KNMKKTSPL

SEQ ID NO: 148919 - protein, 10 aa, Influenza A virus
KNMKKTSPLK

SEQ ID NO: 148920 - protein, 9 aa, Influenza A virus
KNMKKTSQL

SEQ ID NO: 148921 - protein, 10 aa, Influenza A virus
KNMKKTSQLK

SEQ ID NO: 148922 - protein, 11 aa, Influenza A virus
KNMKKTSQLKW

SEQ ID NO: 148923 - protein, 10 aa, Influenza A virus
KNMKKTSQLM

SEQ ID NO: 148924 - protein, 11 aa, Influenza A virus
KNMKKTSQLMW

SEQ ID NO: 148925 - protein, 9 aa, Influenza A virus
KNMRKTSQL

SEQ ID NO: 148926 - protein, 10 aa, Influenza A virus
KNMRKTSQLK

SEQ ID NO: 148927 - protein, 11 aa, Influenza A virus
KNMRKTSQLKW

SEQ ID NO: 148928 - protein, 9 aa, Influenza A virus
KNRFIEIGV

SEQ ID NO: 148929 - protein, 11 aa, Influenza A virus
KNRFIEIGVTR

SEQ ID NO: 148930 - protein, 9 aa, Influenza A virus
KNVSDLKQY

SEQ ID NO: 148931 - protein, 9 aa, Influenza A virus
KPELRSLAS

SEQ ID NO: 148932 - protein, 10 aa, Influenza A virus
KPELRSLASW

SEQ ID NO: 148933 - protein, 11 aa, Influenza A virus
KPELRSLASWI

SEQ ID NO: 148934 - protein, 9 aa, Influenza A virus
KPHEKGINL

SEQ ID NO: 148935 - protein, 9 aa, Influenza A virus
KPHERGINS

SEQ ID NO: 148936 - protein, 8 aa, Influenza A virus
KPKFIPDL

SEQ ID NO: 148937 - protein, 8 aa, Influenza A virus
KPKFLPDL

SEQ ID NO: 148938 - protein, 8 aa, Influenza A virus
KPKLLPDL

SEQ ID NO: 148939 - protein, 10 aa, Influenza A virus
KPNGCIEGKL

SEQ ID NO: 148940 - protein, 10 aa, Influenza A virus
KPNGYIEGKL

SEQ ID NO: 148941 - protein, 8 aa, Influenza A virus
KPRFLPDL

SEQ ID NO: 148942 - protein, 9 aa, Influenza A virus
KPRFLPDLY

SEQ ID NO: 148943 - protein, 9 aa, Influenza A virus
KPRSLASWI

SEQ ID NO: 148944 - protein, 10 aa, Influenza A virus
KPRSLASWIQ

SEQ ID NO: 148945 - protein, 10 aa, Influenza A virus
KQLLAELQDI

SEQ ID NO: 148946 - protein, 10 aa, Influenza A virus
KQVLAEIQDF

SEQ ID NO: 148947 - protein, 10 aa, Influenza A virus
KQVLAELQDV

SEQ ID NO: 148948 - protein, 9 aa, Influenza A virus
KQVLAELQY

SEQ ID NO: 148949 - protein, 10 aa, Influenza A virus
KQVLAELQYI

SEQ ID NO: 148950 - protein, 10 aa, Influenza A virus
KQVLEELQDI

SEQ ID NO: 148951 - protein, 10 aa, Influenza A virus
KQYDGDEPEF

SEQ ID NO: 148952 - protein, 11 aa, Influenza A virus
KQYDGDEPEFR

SEQ ID NO: 148953 - protein, 11 aa, Influenza A virus
KQYDSDEPEAR

SEQ ID NO: 148954 - protein, 10 aa, Influenza A virus
KQYDSDEPEF

SEQ ID NO: 148955 - protein, 11 aa, Influenza A virus
KQYDSDEPEFR

SEQ ID NO: 148956 - protein, 10 aa, Influenza A virus
KQYDSDEPEL

SEQ ID NO: 148957 - protein, 11 aa, Influenza A virus
KQYDSDEPELR

SEQ ID NO: 148958 - protein, 11 aa, Influenza A virus
KQYDSDEPEPR

SEQ ID NO: 148959 - protein, 11 aa, Influenza A virus
KQYDSDEPEQR

SEQ ID NO: 148960 - protein, 10 aa, Influenza A virus
KQYDSDEPER

SEQ ID NO: 148961 - protein, 11 aa, Influenza A virus
KQYDSDEPERR

SEQ ID NO: 148962 - protein, 11 aa, Influenza A virus
KQYDSDEPESR

SEQ ID NO: 148963 - protein, 11 aa, Influenza A virus
KQYDSDEPETR

SEQ ID NO: 148964 - protein, 9 aa, Influenza A virus
KQYDSDEPK

SEQ ID NO: 148965 - protein, 10 aa, Influenza A virus
KQYDSDEPKL

SEQ ID NO: 148966 - protein, 11 aa, Influenza A virus
KQYDSDEPKLR

SEQ ID NO: 148967 - protein, 10 aa, Influenza A virus
KQYDSDKPEL

SEQ ID NO: 148968 - protein, 11 aa, Influenza A virus
KQYDSDKPELR

SEQ ID NO: 148969 - protein, 11 aa, Influenza A virus
KQYDSEEPEPR

SEQ ID NO: 148970 - protein, 10 aa, Influenza A virus
KQYHSDEPEL

SEQ ID NO: 148971 - protein, 11 aa, Influenza A virus
KQYHSDEPELR

SEQ ID NO: 148972 - protein, 11 aa, Influenza A virus
KQYNSDEPEQR

SEQ ID NO: 148973 - protein, 10 aa, Influenza A virus
KQYYSDEPEL

SEQ ID NO: 148974 - protein, 11 aa, Influenza A virus
KQYYSDEPELR

SEQ ID NO: 148975 - protein, 9 aa, Influenza A virus
KSEETHIHI

SEQ ID NO: 148976 - protein, 10 aa, Influenza A virus
KSEETHIHIF

SEQ ID NO: 148977 - protein, 9 aa, Influenza A virus
KSEKTHIHI

SEQ ID NO: 148978 - protein, 10 aa, Influenza A virus
KSEKTHIHIF

SEQ ID NO: 148979 - protein, 10 aa, Influenza A virus
KSEKWPIGES

SEQ ID NO: 148980 - protein, 9 aa, Influenza A virus
KSENTHIHI

SEQ ID NO: 148981 - protein, 10 aa, Influenza A virus
KSENTHIHIF

SEQ ID NO: 148982 - protein, 9 aa, Influenza A virus
KSKTWPIGE

SEQ ID NO: 148983 - protein, 10 aa, Influenza A virus
KSKTWPIGES

SEQ ID NO: 148984 - protein, 8 aa, Influenza A virus
KSTPRPLR

SEQ ID NO: 148985 - protein, 9 aa, Influenza A virus
KSTPRPLRL

SEQ ID NO: 148986 - protein, 8 aa, Influenza A virus
KSVFNCLY

SEQ ID NO: 148987 - protein, 9 aa, Influenza A virus
KSVFNCLYA

SEQ ID NO: 148988 - protein, 8 aa, Influenza A virus
KSVFNNLY

SEQ ID NO: 148989 - protein, 9 aa, Influenza A virus
KSVFNNLYA

SEQ ID NO: 148990 - protein, 8 aa, Influenza A virus
KSVFNSLY

SEQ ID NO: 148991 - protein, 9 aa, Influenza A virus
KSVFNSLYA

SEQ ID NO: 148992 - protein, 10 aa, Influenza A virus
KSVFNSLYAS

SEQ ID NO: 148993 - protein, 9 aa, Influenza A virus
KSVFNSLYS

SEQ ID NO: 148994 - protein, 10 aa, Influenza A virus
KSVFNSLYSS

SEQ ID NO: 148995 - protein, 9 aa, Influenza A virus
KTFFGWKEP

SEQ ID NO: 148996 - protein, 10 aa, Influenza A virus
KTFFGWKEPI

SEQ ID NO: 148997 - protein, 11 aa, Influenza A virus
KTFFGWKEPII

SEQ ID NO: 148998 - protein, 11 aa, Influenza A virus
KTFFGWKEPNI

SEQ ID NO: 148999 - protein, 11 aa, Influenza A virus
KTFFGWKEPNV

SEQ ID NO: 149000 - protein, 10 aa, Influenza A virus
KTFFGWKEPS

SEQ ID NO: 149001 - protein, 11 aa, Influenza A virus
KTFFGWKEPSI

SEQ ID NO: 149002 - protein, 10 aa, Influenza A virus
KTFFGWKEPT

SEQ ID NO: 149003 - protein, 11 aa, Influenza A virus
KTFFGWKEPTI

SEQ ID NO: 149004 - protein, 9 aa, Influenza A virus
KTFFGWREP

SEQ ID NO: 149005 - protein, 10 aa, Influenza A virus
KTFFGWREPN

SEQ ID NO: 149006 - protein, 11 aa, Influenza A virus
KTFFGWREPNI

SEQ ID NO: 149007 - protein, 9 aa, Influenza A virus
KTGQLKWAL

SEQ ID NO: 149008 - protein, 8 aa, Influenza A virus
KTHIHIFS

SEQ ID NO: 149009 - protein, 9 aa, Influenza A virus
KTHIHIFSF

SEQ ID NO: 149010 - protein, 10 aa, Influenza A virus
KTHIHIFSFT

SEQ ID NO: 149011 - protein, 9 aa, Influenza A virus
KTKNMKKTG

SEQ ID NO: 149012 - protein, 9 aa, Influenza A virus
KTKNMKKTS

SEQ ID NO: 149013 - protein, 11 aa, Influenza A virus
KTKNMKKTSHL

SEQ ID NO: 149014 - protein, 11 aa, Influenza A virus
KTKNMKKTSQL

SEQ ID NO: 149015 - protein, 9 aa, Influenza A virus
KTKNMRKTS

SEQ ID NO: 149016 - protein, 10 aa, Influenza A virus
KTKNMRKTSQ

SEQ ID NO: 149017 - protein, 11 aa, Influenza A virus
KTKNMRKTSQL

SEQ ID NO: 149018 - protein, 9 aa, Influenza A virus
KTKSEKTHI

SEQ ID NO: 149019 - protein, 11 aa, Influenza A virus
KTKSEKTHIHI

SEQ ID NO: 149020 - protein, 10 aa, Influenza A virus
KTMKEYGEDL

SEQ ID NO: 149021 - protein, 11 aa, Influenza A virus
KTMKEYGEDLK

SEQ ID NO: 149022 - protein, 11 aa, Influenza A virus
KTMKEYGEDPK

SEQ ID NO: 149023 - protein, 10 aa, Influenza A virus
KTMKEYGENL

SEQ ID NO: 149024 - protein, 11 aa, Influenza A virus
KTMKEYGENLK

SEQ ID NO: 149025 - protein, 11 aa, Influenza A virus
KTMKEYGENPK

SEQ ID NO: 149026 - protein, 9 aa, Influenza A virus
KTMKKTSQL

SEQ ID NO: 149027 - protein, 10 aa, Influenza A virus
KTMKKTSQLK

SEQ ID NO: 149028 - protein, 11 aa, Influenza A virus
KTMKKTSQLKW

SEQ ID NO: 149029 - protein, 9 aa, Influenza A virus
KTNLYGFII

SEQ ID NO: 149030 - protein, 10 aa, Influenza A virus
KTNLYGFIIK

SEQ ID NO: 149031 - protein, 9 aa, Influenza A virus
KTNLYGFIV

SEQ ID NO: 149032 - protein, 10 aa, Influenza A virus
KTNLYGFIVK

SEQ ID NO: 149033 - protein, 9 aa, Influenza A virus
KTNLYGFLI

SEQ ID NO: 149034 - protein, 10 aa, Influenza A virus
KTNLYGFLIK

SEQ ID NO: 149035 - protein, 9 aa, Influenza A virus
KTNLYGFVI

SEQ ID NO: 149036 - protein, 10 aa, Influenza A virus
KTNLYGFVIK

SEQ ID NO: 149037 - protein, 9 aa, Influenza A virus
KTPKTKNMK

SEQ ID NO: 149038 - protein, 10 aa, Influenza A virus
KTPKTKNMKK

SEQ ID NO: 149039 - protein, 8 aa, Influenza A virus
KTRLFTIR

SEQ ID NO: 149040 - protein, 9 aa, Influenza A virus
KTRLFTIRQ

SEQ ID NO: 149041 - protein, 10 aa, Influenza A virus
KTRLFTIRQE

SEQ ID NO: 149042 - protein, 11 aa, Influenza A virus
KTRLFTIRQEM

SEQ ID NO: 149043 - protein, 8 aa, Influenza A virus
KTRLYTIR

SEQ ID NO: 149044 - protein, 9 aa, Influenza A virus
KTRLYTIRQ

SEQ ID NO: 149045 - protein, 10 aa, Influenza A virus
KTRLYTIRQE

SEQ ID NO: 149046 - protein, 11 aa, Influenza A virus
KTRLYTIRQEM

SEQ ID NO: 149047 - protein, 9 aa, Influenza A virus
KTSHLKWAL

SEQ ID NO: 149048 - protein, 10 aa, Influenza A virus
KTSHLKWALG

SEQ ID NO: 149049 - protein, 9 aa, Influenza A virus
KTSPLKWAL

SEQ ID NO: 149050 - protein, 10 aa, Influenza A virus
KTSPLKWALG

SEQ ID NO: 149051 - protein, 9 aa, Influenza A virus
KTSQLKWAL

SEQ ID NO: 149052 - protein, 9 aa, Influenza A virus
KTSQLMWAL

SEQ ID NO: 149053 - protein, 10 aa, Influenza A virus
KTSQLMWALG

SEQ ID NO: 149054 - protein, 8 aa, Influenza A virus
KTTPRPIK

SEQ ID NO: 149055 - protein, 9 aa, Influenza A virus
KTTPRPIKL

SEQ ID NO: 149056 - protein, 8 aa, Influenza A virus
KTTPRPIR

SEQ ID NO: 149057 - protein, 9 aa, Influenza A virus
KTTPRPIRL

SEQ ID NO: 149058 - protein, 11 aa, Influenza A virus
KTTPRPIRLPN

SEQ ID NO: 149059 - protein, 8 aa, Influenza A virus
KTTPRPLK

SEQ ID NO: 149060 - protein, 9 aa, Influenza A virus
KTTPRPLKL

SEQ ID NO: 149061 - protein, 8 aa, Influenza A virus
KTTPRPLR

SEQ ID NO: 149062 - protein, 9 aa, Influenza A virus
KTTPRPLRI

SEQ ID NO: 149063 - protein, 11 aa, Influenza A virus
KTTPRPLRIPG

SEQ ID NO: 149064 - protein, 9 aa, Influenza A virus
KTTPRPLRL

SEQ ID NO: 149065 - protein, 11 aa, Influenza A virus
KTTPRPLRLPC

SEQ ID NO: 149066 - protein, 11 aa, Influenza A virus
KTTPRPLRLPE

SEQ ID NO: 149067 - protein, 11 aa, Influenza A virus
KTTPRPLRLPG

SEQ ID NO: 149068 - protein, 11 aa, Influenza A virus
KTTPRPLRLPN

SEQ ID NO: 149069 - protein, 11 aa, Influenza A virus
KTTPRPLRTPG

SEQ ID NO: 149070 - protein, 10 aa, Influenza A virus
KTWPIGESPK

SEQ ID NO: 149071 - protein, 10 aa, Influenza A virus
KVCRTLLAKS

SEQ ID NO: 149072 - protein, 10 aa, Influenza A virus
KVETNKFAAI

SEQ ID NO: 149073 - protein, 9 aa, Influenza A virus
KVKSEKTHI

SEQ ID NO: 149074 - protein, 11 aa, Influenza A virus
KVKSEKTHIHI

SEQ ID NO: 149075 - protein, 9 aa, Influenza A virus
KVMMMDALK

SEQ ID NO: 149076 - protein, 10 aa, Influenza A virus
KVMMMDALKL

SEQ ID NO: 149077 - protein, 9 aa, Influenza A virus
KVPRTKNIK

SEQ ID NO: 149078 - protein, 10 aa, Influenza A virus
KVPRTKNIKK

SEQ ID NO: 149079 - protein, 10 aa, Influenza A virus
KWEKYCILEI

SEQ ID NO: 149080 - protein, 10 aa, Influenza A virus
KWEKYCVHEI

SEQ ID NO: 149081 - protein, 10 aa, Influenza A virus
KWEKYCVLEI

SEQ ID NO: 149082 - protein, 10 aa, Influenza A virus
KWEKYCVLEV

SEQ ID NO: 149083 - protein, 10 aa, Influenza A virus
KWEKYSILEI

SEQ ID NO: 149084 - protein, 10 aa, Influenza A virus
KWERSCVLEI

SEQ ID NO: 149085 - protein, 10 aa, Influenza A virus
KWERYCVLEI

SEQ ID NO: 149086 - protein, 10 aa, Influenza A virus
KWGMEMRPCL

SEQ ID NO: 149087 - protein, 11 aa, Influenza A virus
KWGMEMRRCPF

SEQ ID NO: 149088 - protein, 11 aa, Influenza A virus
KYCILEIGDML

SEQ ID NO: 149089 - protein, 11 aa, Influenza A virus
KYCVHEIGDML

SEQ ID NO: 149090 - protein, 11 aa, Influenza A virus
KYCVLEIGDMI

SEQ ID NO: 149091 - protein, 11 aa, Influenza A virus
KYCVLEIGDML

SEQ ID NO: 149092 - protein, 10 aa, Influenza A virus
KYCVLEIGEM

SEQ ID NO: 149093 - protein, 11 aa, Influenza A virus
KYCVLEIGEML

SEQ ID NO: 149094 - protein, 11 aa, Influenza A virus
KYCVLEVGDML

SEQ ID NO: 149095 - protein, 11 aa, Influenza A virus
KYCVLRIGDML

SEQ ID NO: 149096 - protein, 10 aa, Influenza A virus
KYSILEIGDM

SEQ ID NO: 149097 - protein, 8 aa, Influenza A virus
LAAICTHL

SEQ ID NO: 149098 - protein, 10 aa, Influenza A virus
LAAICTHLEV

SEQ ID NO: 149099 - protein, 11 aa, Influenza A virus
LADQSLPPNFF

SEQ ID NO: 149100 - protein, 10 aa, Influenza A virus
LADYSLPPNF

SEQ ID NO: 149101 - protein, 9 aa, Influenza A virus
LAEKAMKEY

SEQ ID NO: 149102 - protein, 9 aa, Influenza A virus
LAEKTMKEY

SEQ ID NO: 149103 - protein, 9 aa, Influenza A virus
LAERAMKEY

SEQ ID NO: 149104 - protein, 9 aa, Influenza A virus
LAKSVFNCL

SEQ ID NO: 149105 - protein, 10 aa, Influenza A virus
LAKSVFNCLY

SEQ ID NO: 149106 - protein, 9 aa, Influenza A virus
LAKSVFNNL

SEQ ID NO: 149107 - protein, 10 aa, Influenza A virus
LAKSVFNNLY

SEQ ID NO: 149108 - protein, 9 aa, Influenza A virus
LAKSVFNSL

SEQ ID NO: 149109 - protein, 10 aa, Influenza A virus
LAKSVFNSLY

SEQ ID NO: 149110 - protein, 10 aa, Influenza A virus
LANQSLPPNF

SEQ ID NO: 149111 - protein, 10 aa, Influenza A virus
LANYSLPPNF

SEQ ID NO: 149112 - protein, 9 aa, Influenza A virus
LASWIQNEF

SEQ ID NO: 149113 - protein, 11 aa, Influenza A virus
LASWIQNEFNK

SEQ ID NO: 149114 - protein, 9 aa, Influenza A virus
LASWIQSEF

SEQ ID NO: 149115 - protein, 11 aa, Influenza A virus
LASWIQSEFNK

SEQ ID NO: 149116 - protein, 9 aa, Influenza A virus
LASWVQSEF

SEQ ID NO: 149117 - protein, 11 aa, Influenza A virus
LASWVQSEFNK

SEQ ID NO: 149118 - protein, 10 aa, Influenza A virus
LAWKQVLAEL

SEQ ID NO: 149119 - protein, 10 aa, Influenza A virus
LAWNQVLAEL

SEQ ID NO: 149120 - protein, 11 aa, Influenza A virus
LAWNQVLAELK

SEQ ID NO: 149121 - protein, 10 aa, Influenza A virus
LEACFMYSDF

SEQ ID NO: 149122 - protein, 10 aa, Influenza A virus
LEGFSAESRR

SEQ ID NO: 149123 - protein, 8 aa, Influenza A virus
LEGLYEAI

SEQ ID NO: 149124 - protein, 11 aa, Influenza A virus
LEGLYEAIEEC

SEQ ID NO: 149125 - protein, 8 aa, Influenza A virus
LEGLYGAI

SEQ ID NO: 149126 - protein, 10 aa, Influenza A virus
LEICFMYSDF

SEQ ID NO: 149127 - protein, 10 aa, Influenza A virus
LEIDEIGEDI

SEQ ID NO: 149128 - protein, 8 aa, Influenza A virus
LEIGDMIL

SEQ ID NO: 149129 - protein, 11 aa, Influenza A virus
LEIGDMILRSA

SEQ ID NO: 149130 - protein, 11 aa, Influenza A virus
LEIGDMILRTA

SEQ ID NO: 149131 - protein, 8 aa, Influenza A virus
LEIGDMLI

SEQ ID NO: 149132 - protein, 11 aa, Influenza A virus
LEIGDMLIRSA

SEQ ID NO: 149133 - protein, 8 aa, Influenza A virus
LEIGDMLL

SEQ ID NO: 149134 - protein, 11 aa, Influenza A virus
LEIGDMLLRSA

SEQ ID NO: 149135 - protein, 11 aa, Influenza A virus
LEIGDMLLRTA

SEQ ID NO: 149136 - protein, 8 aa, Influenza A virus
LEIGDMVL

SEQ ID NO: 149137 - protein, 11 aa, Influenza A virus
LEIGDMVLRTA

SEQ ID NO: 149138 - protein, 8 aa, Influenza A virus
LEIGEMLL

SEQ ID NO: 149139 - protein, 11 aa, Influenza A virus
LEIGEMLLRTA

SEQ ID NO: 149140 - protein, 8 aa, Influenza A virus
LEKFRAYV

SEQ ID NO: 149141 - protein, 10 aa, Influenza A virus
LELDEIGEDV

SEQ ID NO: 149142 - protein, 11 aa, Influenza A virus
LELHKWEKYSI

SEQ ID NO: 149143 - protein, 8 aa, Influenza A virus
LENFRAYV

SEQ ID NO: 149144 - protein, 8 aa, Influenza A virus
LENFRVYV

SEQ ID NO: 149145 - protein, 9 aa, Influenza A virus
LETNKFAAI

SEQ ID NO: 149146 - protein, 10 aa, Influenza A virus
LEVCFMYSDF

SEQ ID NO: 149147 - protein, 8 aa, Influenza A virus
LEVGDMLL

SEQ ID NO: 149148 - protein, 8 aa, Influenza A virus
LFTIRQEM

SEQ ID NO: 149149 - protein, 11 aa, Influenza A virus
LFTIRQEMANR

SEQ ID NO: 149150 - protein, 11 aa, Influenza A virus
LFTIRQEMASR

SEQ ID NO: 149151 - protein, 8 aa, Influenza A virus
LGDPNALL

SEQ ID NO: 149152 - protein, 8 aa, Influenza A virus
LGDPSALL

SEQ ID NO: 149153 - protein, 9 aa, Influenza A virus
LGDPSALLK

SEQ ID NO: 149154 - protein, 11 aa, Influenza A virus
LGGLYEAIEEC

SEQ ID NO: 149155 - protein, 11 aa, Influenza A virus
LGGLYEAVEEC

SEQ ID NO: 149156 - protein, 11 aa, Influenza A virus
LGGLYESIEEC

SEQ ID NO: 149157 - protein, 11 aa, Influenza A virus
LGQVSRPMFLY

SEQ ID NO: 149158 - protein, 9 aa, Influenza A virus
LHKWEKYSI

SEQ ID NO: 149159 - protein, 10 aa, Influenza A virus
LIAQALRDNL

SEQ ID NO: 149160 - protein, 8 aa, Influenza A virus
LIKGRSHL

SEQ ID NO: 149161 - protein, 9 aa, Influenza A virus
LIKGRSHLR

SEQ ID NO: 149162 - protein, 9 aa, Influenza A virus
LINDPWVLL

SEQ ID NO: 149163 - protein, 9 aa, Influenza A virus
LIPMISKCR

SEQ ID NO: 149164 - protein, 9 aa, Influenza A virus
LIRSAIGQM

SEQ ID NO: 149165 - protein, 11 aa, Influenza A virus
LIRSAIGQMSR

SEQ ID NO: 149166 - protein, 9 aa, Influenza A virus
LIRSAIGQV

SEQ ID NO: 149167 - protein, 11 aa, Influenza A virus
LIRSAIGQVSR

SEQ ID NO: 149168 - protein, 10 aa, Influenza A virus
LIVQALGDNL

SEQ ID NO: 149169 - protein, 10 aa, Influenza A virus
LKDNLEPGTF

SEQ ID NO: 149170 - protein, 8 aa, Influenza A virus
LKHRFEIM

SEQ ID NO: 149171 - protein, 11 aa, Influenza A virus
LKQYDGDEPEF

SEQ ID NO: 149172 - protein, 11 aa, Influenza A virus
LKQYDSDEPEF

SEQ ID NO: 149173 - protein, 9 aa, Influenza A virus
LKWALGEKM

SEQ ID NO: 149174 - protein, 9 aa, Influenza A virus
LKWALGENM

SEQ ID NO: 149175 - protein, 9 aa, Influenza A virus
LLAKSVFNC

SEQ ID NO: 149176 - protein, 10 aa, Influenza A virus
LLAKSVFNCL

SEQ ID NO: 149177 - protein, 11 aa, Influenza A virus
LLAKSVFNCLY

SEQ ID NO: 149178 - protein, 10 aa, Influenza A virus
LLAKSVFNNL

SEQ ID NO: 149179 - protein, 11 aa, Influenza A virus
LLAKSVFNNLY

SEQ ID NO: 149180 - protein, 9 aa, Influenza A virus
LLAKSVFNS

SEQ ID NO: 149181 - protein, 10 aa, Influenza A virus
LLAKSVFNSL

SEQ ID NO: 149182 - protein, 11 aa, Influenza A virus
LLAKSVFNSLY

SEQ ID NO: 149183 - protein, 8 aa, Influenza A virus
LLAWKQVL

SEQ ID NO: 149184 - protein, 9 aa, Influenza A virus
LLAWKQVLA

SEQ ID NO: 149185 - protein, 11 aa, Influenza A virus
LLAWKQVLAEI

SEQ ID NO: 149186 - protein, 11 aa, Influenza A virus
LLAWKQVLAEL

SEQ ID NO: 149187 - protein, 9 aa, Influenza A virus
LLAWKQVQA

SEQ ID NO: 149188 - protein, 11 aa, Influenza A virus
LLAWKQVQAEL

SEQ ID NO: 149189 - protein, 9 aa, Influenza A virus
LLAWNQVLA

SEQ ID NO: 149190 - protein, 11 aa, Influenza A virus
LLAWNQVLAEL

SEQ ID NO: 149191 - protein, 10 aa, Influenza A virus
LLIVQALRDK

SEQ ID NO: 149192 - protein, 9 aa, Influenza A virus
LLKHRFEII

SEQ ID NO: 149193 - protein, 9 aa, Influenza A virus
LLKHRFEIM

SEQ ID NO: 149194 - protein, 9 aa, Influenza A virus
LLLIAQALR

SEQ ID NO: 149195 - protein, 9 aa, Influenza A virus
LLLITQALR

SEQ ID NO: 149196 - protein, 9 aa, Influenza A virus
LLLIVQALR

SEQ ID NO: 149197 - protein, 9 aa, Influenza A virus
LLLVVQALK

SEQ ID NO: 149198 - protein, 9 aa, Influenza A virus
LLLVVQALR

SEQ ID NO: 149199 - protein, 8 aa, Influenza A virus
LLMDALKF

SEQ ID NO: 149200 - protein, 9 aa, Influenza A virus
LLMDALKFS

SEQ ID NO: 149201 - protein, 10 aa, Influenza A virus
LLMDALKFSI

SEQ ID NO: 149202 - protein, 11 aa, Influenza A virus
LLMDALKFSIE

SEQ ID NO: 149203 - protein, 8 aa, Influenza A virus
LLMDALKL

SEQ ID NO: 149204 - protein, 10 aa, Influenza A virus
LLMDALKLNI

SEQ ID NO: 149205 - protein, 11 aa, Influenza A virus
LLMDALKLNIE

SEQ ID NO: 149206 - protein, 9 aa, Influenza A virus
LLMDALKLS

SEQ ID NO: 149207 - protein, 10 aa, Influenza A virus
LLMDALKLSI

SEQ ID NO: 149208 - protein, 11 aa, Influenza A virus
LLMDALKLSIE

SEQ ID NO: 149209 - protein, 8 aa, Influenza A virus
LLMDSLKL

SEQ ID NO: 149210 - protein, 9 aa, Influenza A virus
LLMDSLKLS

SEQ ID NO: 149211 - protein, 10 aa, Influenza A virus
LLMDSLKLSI

SEQ ID NO: 149212 - protein, 11 aa, Influenza A virus
LLMDSLKLSIE

SEQ ID NO: 149213 - protein, 9 aa, Influenza A virus
LLNASCAAM

SEQ ID NO: 149214 - protein, 9 aa, Influenza A virus
LLNASSAAM

SEQ ID NO: 149215 - protein, 9 aa, Influenza A virus
LLNASWFNS

SEQ ID NO: 149216 - protein, 10 aa, Influenza A virus
LLNASWFNSF

SEQ ID NO: 149217 - protein, 11 aa, Influenza A virus
LLNASWFNSFL

SEQ ID NO: 149218 - protein, 9 aa, Influenza A virus
LLPDLYDYK

SEQ ID NO: 149219 - protein, 9 aa, Influenza A virus
LLQQIESMI

SEQ ID NO: 149220 - protein, 11 aa, Influenza A virus
LLQQIESMIEA

SEQ ID NO: 149221 - protein, 11 aa, Influenza A virus
LLQSLQQIESI

SEQ ID NO: 149222 - protein, 8 aa, Influenza A virus
LLQSLQQV

SEQ ID NO: 149223 - protein, 9 aa, Influenza A virus
LLRSAIAPV

SEQ ID NO: 149224 - protein, 10 aa, Influenza A virus
LLRSAIAPVS

SEQ ID NO: 149225 - protein, 11 aa, Influenza A virus
LLRSAIAPVSR

SEQ ID NO: 149226 - protein, 9 aa, Influenza A virus
LLRSAIGHV

SEQ ID NO: 149227 - protein, 10 aa, Influenza A virus
LLRSAIGHVS

SEQ ID NO: 149228 - protein, 11 aa, Influenza A virus
LLRSAIGHVSR

SEQ ID NO: 149229 - protein, 9 aa, Influenza A virus
LLRSAIGQM

SEQ ID NO: 149230 - protein, 11 aa, Influenza A virus
LLRSAIGQMSR

SEQ ID NO: 149231 - protein, 9 aa, Influenza A virus
LLRSAIGQV

SEQ ID NO: 149232 - protein, 10 aa, Influenza A virus
LLRSAIGQVS

SEQ ID NO: 149233 - protein, 11 aa, Influenza A virus
LLRSAIGQVSR

SEQ ID NO: 149234 - protein, 9 aa, Influenza A virus
LLRSALGQV

SEQ ID NO: 149235 - protein, 10 aa, Influenza A virus
LLRSALGQVS

SEQ ID NO: 149236 - protein, 11 aa, Influenza A virus
LLRSALGQVSR

SEQ ID NO: 149237 - protein, 9 aa, Influenza A virus
LLRSTIGRV

SEQ ID NO: 149238 - protein, 11 aa, Influenza A virus
LLRSTIGRVSR

SEQ ID NO: 149239 - protein, 9 aa, Influenza A virus
LLRTAIGQA

SEQ ID NO: 149240 - protein, 11 aa, Influenza A virus
LLRTAIGQAPR

SEQ ID NO: 149241 - protein, 9 aa, Influenza A virus
LLRTAIGQV

SEQ ID NO: 149242 - protein, 10 aa, Influenza A virus
LLRTAIGQVL

SEQ ID NO: 149243 - protein, 11 aa, Influenza A virus
LLRTAIGQVLR

SEQ ID NO: 149244 - protein, 11 aa, Influenza A virus
LLRTAIGQVSR

SEQ ID NO: 149245 - protein, 9 aa, Influenza A virus
LLRTAVGQV

SEQ ID NO: 149246 - protein, 11 aa, Influenza A virus
LLRTAVGQVSR

SEQ ID NO: 149247 - protein, 9 aa, Influenza A virus
LLRTEIGQV

SEQ ID NO: 149248 - protein, 9 aa, Influenza A virus
LLRTSIGQV

SEQ ID NO: 149249 - protein, 11 aa, Influenza A virus
LLRTSIGQVSR

SEQ ID NO: 149250 - protein, 9 aa, Influenza A virus
LLSWKQLLA

SEQ ID NO: 149251 - protein, 11 aa, Influenza A virus
LLSWKQLLAEL

SEQ ID NO: 149252 - protein, 9 aa, Influenza A virus
LLSWKQVLA

SEQ ID NO: 149253 - protein, 11 aa, Influenza A virus
LLSWKQVLAEL

SEQ ID NO: 149254 - protein, 11 aa, Influenza A virus
LLSWKQVLEEL

SEQ ID NO: 149255 - protein, 8 aa, Influenza A virus
LLSWRQVL

SEQ ID NO: 149256 - protein, 9 aa, Influenza A virus
LLSWRQVLA

SEQ ID NO: 149257 - protein, 11 aa, Influenza A virus
LLSWRQVLAEL

SEQ ID NO: 149258 - protein, 9 aa, Influenza A virus
LLTWKQVLA

SEQ ID NO: 149259 - protein, 11 aa, Influenza A virus
LLTWKQVLAEL

SEQ ID NO: 149260 - protein, 9 aa, Influenza A virus
LLVWKQVLA

SEQ ID NO: 149261 - protein, 11 aa, Influenza A virus
LLVWKQVLAEL

SEQ ID NO: 149262 - protein, 8 aa, Influenza A virus
LMAWKQVL

SEQ ID NO: 149263 - protein, 9 aa, Influenza A virus
LMAWKQVLA

SEQ ID NO: 149264 - protein, 11 aa, Influenza A virus
LMAWKQVLAEL

SEQ ID NO: 149265 - protein, 9 aa, Influenza A virus
LMDALKFSI

SEQ ID NO: 149266 - protein, 10 aa, Influenza A virus
LMDALKFSIE

SEQ ID NO: 149267 - protein, 9 aa, Influenza A virus
LMDALKLNI

SEQ ID NO: 149268 - protein, 9 aa, Influenza A virus
LMDALKLSI

SEQ ID NO: 149269 - protein, 9 aa, Influenza A virus
LMDSLKLSI

SEQ ID NO: 149270 - protein, 9 aa, Influenza A virus
LMWALGENM

SEQ ID NO: 149271 - protein, 10 aa, Influenza A virus
LMWALGENMA

SEQ ID NO: 149272 - protein, 9 aa, Influenza A virus
LNASWFNSF

SEQ ID NO: 149273 - protein, 10 aa, Influenza A virus
LNASWFNSFL

SEQ ID NO: 149274 - protein, 11 aa, Influenza A virus
LPDLYDYRENR

SEQ ID NO: 149275 - protein, 8 aa, Influenza A virus
LPHLLQQI

SEQ ID NO: 149276 - protein, 11 aa, Influenza A virus
LPHLLQQIESM

SEQ ID NO: 149277 - protein, 8 aa, Influenza A virus
LPPNFFCL

SEQ ID NO: 149278 - protein, 8 aa, Influenza A virus
LPPNFSCL

SEQ ID NO: 149279 - protein, 8 aa, Influenza A virus
LPPNFSSF

SEQ ID NO: 149280 - protein, 11 aa, Influenza A virus
LPPNFSSFDNF

SEQ ID NO: 149281 - protein, 8 aa, Influenza A virus
LPPNFSSI

SEQ ID NO: 149282 - protein, 11 aa, Influenza A virus
LPPNFSSIENF

SEQ ID NO: 149283 - protein, 8 aa, Influenza A virus
LPPNFSSL

SEQ ID NO: 149284 - protein, 11 aa, Influenza A virus
LPPNFSSLDNF

SEQ ID NO: 149285 - protein, 11 aa, Influenza A virus
LPPNFSSLEKF

SEQ ID NO: 149286 - protein, 11 aa, Influenza A virus
LPPNFSSLENF

SEQ ID NO: 149287 - protein, 8 aa, Influenza A virus
LQAWKQVL

SEQ ID NO: 149288 - protein, 9 aa, Influenza A virus
LQAWKQVLA

SEQ ID NO: 149289 - protein, 11 aa, Influenza A virus
LQAWKQVLAEL

SEQ ID NO: 149290 - protein, 10 aa, Influenza A virus
LQQIESIIEA

SEQ ID NO: 149291 - protein, 10 aa, Influenza A virus
LQQIESMIEA

SEQ ID NO: 149292 - protein, 10 aa, Influenza A virus
LQQIESMTEA

SEQ ID NO: 149293 - protein, 10 aa, Influenza A virus
LQQIESMVEA

SEQ ID NO: 149294 - protein, 10 aa, Influenza A virus
LQQVESMVEA

SEQ ID NO: 149295 - protein, 10 aa, Influenza A virus
LQSLQQIESM

SEQ ID NO: 149296 - protein, 10 aa, Influenza A virus
LQSLQQVESM

SEQ ID NO: 149297 - protein, 11 aa, Influenza A virus
LQSWKQVLAEL

SEQ ID NO: 149298 - protein, 10 aa, Influenza A virus
LQYIENEEKI

SEQ ID NO: 149299 - protein, 9 aa, Influenza A virus
LRIGDMLLR

SEQ ID NO: 149300 - protein, 10 aa, Influenza A virus
LRLPCGPPCF

SEQ ID NO: 149301 - protein, 10 aa, Influenza A virus
LRLPDGPPCF

SEQ ID NO: 149302 - protein, 10 aa, Influenza A virus
LRLPGGPPCF

SEQ ID NO: 149303 - protein, 10 aa, Influenza A virus
LRNDTDVVNF

SEQ ID NO: 149304 - protein, 10 aa, Influenza A virus
LRNDTDVVNY

SEQ ID NO: 149305 - protein, 10 aa, Influenza A virus
LRNDTDVVTF

SEQ ID NO: 149306 - protein, 10 aa, Influenza A virus
LRPMFLYVRT

SEQ ID NO: 149307 - protein, 8 aa, Influenza A virus
LRSAIAPV

SEQ ID NO: 149308 - protein, 10 aa, Influenza A virus
LRSAIAPVSR

SEQ ID NO: 149309 - protein, 10 aa, Influenza A virus
LRSAIGHVSR

SEQ ID NO: 149310 - protein, 10 aa, Influenza A virus
LRSAIGQMSR

SEQ ID NO: 149311 - protein, 10 aa, Influenza A virus
LRSAIGQVSR

SEQ ID NO: 149312 - protein, 10 aa, Influenza A virus
LRSALGQVSR

SEQ ID NO: 149313 - protein, 10 aa, Influenza A virus
LRSTIGRVSR

SEQ ID NO: 149314 - protein, 10 aa, Influenza A virus
LRTAIGHVSR

SEQ ID NO: 149315 - protein, 10 aa, Influenza A virus
LRTAIGQAPR

SEQ ID NO: 149316 - protein, 9 aa, Influenza A virus
LRTAIGQVA

SEQ ID NO: 149317 - protein, 10 aa, Influenza A virus
LRTAIGQVAR

SEQ ID NO: 149318 - protein, 9 aa, Influenza A virus
LRTAIGQVL

SEQ ID NO: 149319 - protein, 10 aa, Influenza A virus
LRTAIGQVLR

SEQ ID NO: 149320 - protein, 10 aa, Influenza A virus
LRTAIGQVSR

SEQ ID NO: 149321 - protein, 10 aa, Influenza A virus
LRTAVGQVSR

SEQ ID NO: 149322 - protein, 10 aa, Influenza A virus
LRTEIGQVSR

SEQ ID NO: 149323 - protein, 10 aa, Influenza A virus
LRTPGGPPCY

SEQ ID NO: 149324 - protein, 10 aa, Influenza A virus
LRTSIGQVSR

SEQ ID NO: 149325 - protein, 9 aa, Influenza A virus
LRTTPRPLR

SEQ ID NO: 149326 - protein, 10 aa, Influenza A virus
LRTTPRPLRL

SEQ ID NO: 149327 - protein, 11 aa, Influenza A virus
LSQMSKEVNAR

SEQ ID NO: 149328 - protein, 11 aa, Influenza A virus
LSQMSKEVNTR

SEQ ID NO: 149329 - protein, 11 aa, Influenza A virus
LSQMSREVNAR

SEQ ID NO: 149330 - protein, 9 aa, Influenza A virus
LSSWIQNEF

SEQ ID NO: 149331 - protein, 10 aa, Influenza A virus
LSSWIQNEFN

SEQ ID NO: 149332 - protein, 11 aa, Influenza A virus
LSSWIQNEFNK

SEQ ID NO: 149333 - protein, 10 aa, Influenza A virus
LSWKQLLAEL

SEQ ID NO: 149334 - protein, 10 aa, Influenza A virus
LSWKQVLAEL

SEQ ID NO: 149335 - protein, 10 aa, Influenza A virus
LSWKQVLEEL

SEQ ID NO: 149336 - protein, 10 aa, Influenza A virus
LSWRQVLAEL

SEQ ID NO: 149337 - protein, 10 aa, Influenza A virus
LTDPRFEPHK

SEQ ID NO: 149338 - protein, 11 aa, Influenza A virus
LTDPRFEPHKW

SEQ ID NO: 149339 - protein, 8 aa, Influenza A virus
LTDPRLEL

SEQ ID NO: 149340 - protein, 9 aa, Influenza A virus
LTDPRLELH

SEQ ID NO: 149341 - protein, 10 aa, Influenza A virus
LTDPRLELHK

SEQ ID NO: 149342 - protein, 11 aa, Influenza A virus
LTDPRLELHKW

SEQ ID NO: 149343 - protein, 10 aa, Influenza A virus
LTDPRLEPHK

SEQ ID NO: 149344 - protein, 11 aa, Influenza A virus
LTDPRLEPHKW

SEQ ID NO: 149345 - protein, 11 aa, Influenza A virus
LTDPRLEPHNW

SEQ ID NO: 149346 - protein, 11 aa, Influenza A virus
LTDPRLEPHRW

SEQ ID NO: 149347 - protein, 9 aa, Influenza A virus
LTDPRLEPY

SEQ ID NO: 149348 - protein, 10 aa, Influenza A virus
LTDPRLEPYK

SEQ ID NO: 149349 - protein, 11 aa, Influenza A virus
LTDPRLEPYKW

SEQ ID NO: 149350 - protein, 9 aa, Influenza A virus
LTDSGWIEL

SEQ ID NO: 149351 - protein, 9 aa, Influenza A virus
LTDSIWIEL

SEQ ID NO: 149352 - protein, 9 aa, Influenza A virus
LTDSSWIEL

SEQ ID NO: 149353 - protein, 9 aa, Influenza A virus
LTDSSWLEI

SEQ ID NO: 149354 - protein, 9 aa, Influenza A virus
LTDSSWLEL

SEQ ID NO: 149355 - protein, 9 aa, Influenza A virus
LTDSSWMEL

SEQ ID NO: 149356 - protein, 9 aa, Influenza A virus
LTDSTWIEL

SEQ ID NO: 149357 - protein, 9 aa, Influenza A virus
LTDSVWIEL

SEQ ID NO: 149358 - protein, 9 aa, Influenza A virus
LTEKAMKEY

SEQ ID NO: 149359 - protein, 9 aa, Influenza A virus
LTESSWIEL

SEQ ID NO: 149360 - protein, 9 aa, Influenza A virus
LTNSIWIEL

SEQ ID NO: 149361 - protein, 10 aa, Influenza A virus
LTWKQVLAEL

SEQ ID NO: 149362 - protein, 10 aa, Influenza A virus
LVVQALRDNL

SEQ ID NO: 149363 - protein, 10 aa, Influenza A virus
LVWKQVLAEL

SEQ ID NO: 149364 - protein, 10 aa, Influenza A virus
LWDSFHQSER

SEQ ID NO: 149365 - protein, 10 aa, Influenza A virus
LWDSFRQSER

SEQ ID NO: 149366 - protein, 10 aa, Influenza A virus
LYASAQLEGF

SEQ ID NO: 149367 - protein, 11 aa, Influenza A virus
LYASAQLEGFS

SEQ ID NO: 149368 - protein, 10 aa, Influenza A virus
LYASPQLEGF

SEQ ID NO: 149369 - protein, 11 aa, Influenza A virus
LYASPQLEGFS

SEQ ID NO: 149370 - protein, 9 aa, Influenza A virus
LYDAIKCIR

SEQ ID NO: 149371 - protein, 11 aa, Influenza A virus
LYDAIKCIRTF

SEQ ID NO: 149372 - protein, 8 aa, Influenza A virus
LYDAIKCM

SEQ ID NO: 149373 - protein, 9 aa, Influenza A virus
LYDAIKCMK

SEQ ID NO: 149374 - protein, 11 aa, Influenza A virus
LYDAIKCMKTF

SEQ ID NO: 149375 - protein, 9 aa, Influenza A virus
LYDAIKCMR

SEQ ID NO: 149376 - protein, 11 aa, Influenza A virus
LYDAIKCMRTF

SEQ ID NO: 149377 - protein, 8 aa, Influenza A virus
LYDAINCM

SEQ ID NO: 149378 - protein, 9 aa, Influenza A virus
LYDAINCMK

SEQ ID NO: 149379 - protein, 11 aa, Influenza A virus
LYDAINCMKTF

SEQ ID NO: 149380 - protein, 8 aa, Influenza A virus
LYDAIRCM

SEQ ID NO: 149381 - protein, 9 aa, Influenza A virus
LYDAIRCMK

SEQ ID NO: 149382 - protein, 11 aa, Influenza A virus
LYDAIRCMKTF

SEQ ID NO: 149383 - protein, 8 aa, Influenza A virus
LYDAVRCM

SEQ ID NO: 149384 - protein, 9 aa, Influenza A virus
LYDAVRCMK

SEQ ID NO: 149385 - protein, 11 aa, Influenza A virus
LYDAVRCMKTF

SEQ ID NO: 149386 - protein, 9 aa, Influenza A virus
LYDYKEDRF

SEQ ID NO: 149387 - protein, 9 aa, Influenza A virus
LYDYKENRF

SEQ ID NO: 149388 - protein, 10 aa, Influenza A virus
LYDYKENRFI

SEQ ID NO: 149389 - protein, 9 aa, Influenza A virus
LYDYKGNRF

SEQ ID NO: 149390 - protein, 10 aa, Influenza A virus
LYDYKGNRFI

SEQ ID NO: 149391 - protein, 9 aa, Influenza A virus
LYDYKKNRF

SEQ ID NO: 149392 - protein, 9 aa, Influenza A virus
LYDYRENRF

SEQ ID NO: 149393 - protein, 10 aa, Influenza A virus
LYDYRENRFI

SEQ ID NO: 149394 - protein, 9 aa, Influenza A virus
LYGAIEECL

SEQ ID NO: 149395 - protein, 10 aa, Influenza A virus
LYGAIEECLI

SEQ ID NO: 149396 - protein, 9 aa, Influenza A virus
LYGFIIKGR

SEQ ID NO: 149397 - protein, 9 aa, Influenza A virus
LYGFIVKGR

SEQ ID NO: 149398 - protein, 9 aa, Influenza A virus
LYGFLIKGR

SEQ ID NO: 149399 - protein, 9 aa, Influenza A virus
LYGFVIKGR

SEQ ID NO: 149400 - protein, 10 aa, Influenza A virus
LYMRTNGTSK

SEQ ID NO: 149401 - protein, 11 aa, Influenza A virus
LYMRTNGTSKI

SEQ ID NO: 149402 - protein, 10 aa, Influenza A virus
LYSSPQLEGF

SEQ ID NO: 149403 - protein, 8 aa, Influenza A virus
LYTIRQEM

SEQ ID NO: 149404 - protein, 11 aa, Influenza A virus
LYTIRQEMASR

SEQ ID NO: 149405 - protein, 10 aa, Influenza A virus
LYVRTNGTSK

SEQ ID NO: 149406 - protein, 11 aa, Influenza A virus
LYVRTNGTSKI

SEQ ID NO: 149407 - protein, 11 aa, Influenza A virus
LYVTTNGTSKI

SEQ ID NO: 149408 - protein, 10 aa, Influenza A virus
MANRGLWDSF

SEQ ID NO: 149409 - protein, 11 aa, Influenza A virus
MANRGLWDSFR

SEQ ID NO: 149410 - protein, 10 aa, Influenza A virus
MASRGLWDSF

SEQ ID NO: 149411 - protein, 11 aa, Influenza A virus
MASRGLWDSFR

SEQ ID NO: 149412 - protein, 9 aa, Influenza A virus
MATKADYTL

SEQ ID NO: 149413 - protein, 9 aa, Influenza A virus
MATKEDYTL

SEQ ID NO: 149414 - protein, 9 aa, Influenza A virus
MATKSDYTL

SEQ ID NO: 149415 - protein, 9 aa, Influenza A virus
MATKTDYTL

SEQ ID NO: 149416 - protein, 9 aa, Influenza A virus
MAWKQVLAE

SEQ ID NO: 149417 - protein, 10 aa, Influenza A virus
MAWKQVLAEL

SEQ ID NO: 149418 - protein, 9 aa, Influenza A virus
MAWTIVNSI

SEQ ID NO: 149419 - protein, 9 aa, Influenza A virus
MAWTVINSI

SEQ ID NO: 149420 - protein, 9 aa, Influenza A virus
MAWTVVNSI

SEQ ID NO: 149421 - protein, 9 aa, Influenza A virus
MCRLADQSL

SEQ ID NO: 149422 - protein, 8 aa, Influenza A virus
MDALKFSI

SEQ ID NO: 149423 - protein, 10 aa, Influenza A virus
MDEFQLIPMI

SEQ ID NO: 149424 - protein, 9 aa, Influenza A virus
MEDFVAQSF

SEQ ID NO: 149425 - protein, 9 aa, Influenza A virus
MEDFVRQCF

SEQ ID NO: 149426 - protein, 9 aa, Influenza A virus
MEEFVRQCF

SEQ ID NO: 149427 - protein, 9 aa, Influenza A virus
MEEGSIGKV

SEQ ID NO: 149428 - protein, 9 aa, Influenza A virus
MEFSLTDPR

SEQ ID NO: 149429 - protein, 10 aa, Influenza A virus
MEFSLTDPRF

SEQ ID NO: 149430 - protein, 10 aa, Influenza A virus
MEFSLTDPRL

SEQ ID NO: 149431 - protein, 9 aa, Influenza A virus
MEGRDRTMA

SEQ ID NO: 149432 - protein, 10 aa, Influenza A virus
MEGRDRTMAW

SEQ ID NO: 149433 - protein, 8 aa, Influenza A virus
MEIRRCLL

SEQ ID NO: 149434 - protein, 11 aa, Influenza A virus
MEIRRCLLQSL

SEQ ID NO: 149435 - protein, 10 aa, Influenza A virus
MELDEIGEDV

SEQ ID NO: 149436 - protein, 11 aa, Influenza A virus
MELDEIGEDVA

SEQ ID NO: 149437 - protein, 8 aa, Influenza A virus
MEMRPCLL

SEQ ID NO: 149438 - protein, 9 aa, Influenza A virus
MEMRPCLLQ

SEQ ID NO: 149439 - protein, 10 aa, Influenza A virus
MEMRPCLLQS

SEQ ID NO: 149440 - protein, 11 aa, Influenza A virus
MEMRPCLLQSL

SEQ ID NO: 149441 - protein, 8 aa, Influenza A virus
MEMRRCLL

SEQ ID NO: 149442 - protein, 10 aa, Influenza A virus
MEMRRCLLQS

SEQ ID NO: 149443 - protein, 11 aa, Influenza A virus
MEMRRCLLQSL

SEQ ID NO: 149444 - protein, 8 aa, Influenza A virus
MEMRRCPF

SEQ ID NO: 149445 - protein, 10 aa, Influenza A virus
MEMRRCPFQS

SEQ ID NO: 149446 - protein, 11 aa, Influenza A virus
MEMRRCPFQSL

SEQ ID NO: 149447 - protein, 9 aa, Influenza A virus
METRRCLPH

SEQ ID NO: 149448 - protein, 10 aa, Influenza A virus
METRRCLPHL

SEQ ID NO: 149449 - protein, 11 aa, Influenza A virus
METRRCLPHLL

SEQ ID NO: 149450 - protein, 10 aa, Influenza A virus
MEVCFMYSDF

SEQ ID NO: 149451 - protein, 8 aa, Influenza A virus
MEVSFMYS

SEQ ID NO: 149452 - protein, 9 aa, Influenza A virus
MEVSFMYSD

SEQ ID NO: 149453 - protein, 10 aa, Influenza A virus
MEVSFMYSDF

SEQ ID NO: 149454 - protein, 10 aa, Influenza A virus
MFLYMRTNGT

SEQ ID NO: 149455 - protein, 10 aa, Influenza A virus
MFLYVRTNGT

SEQ ID NO: 149456 - protein, 10 aa, Influenza A virus
MFLYVTTNGT

SEQ ID NO: 149457 - protein, 9 aa, Influenza A virus
MIEAESSIK

SEQ ID NO: 149458 - protein, 9 aa, Influenza A virus
MIEAESSVK

SEQ ID NO: 149459 - protein, 9 aa, Influenza A virus
MIEAQSSVK

SEQ ID NO: 149460 - protein, 9 aa, Influenza A virus
MIIELAEKA

SEQ ID NO: 149461 - protein, 10 aa, Influenza A virus
MIIELAEKAM

SEQ ID NO: 149462 - protein, 11 aa, Influenza A virus
MIIELAEKAMK

SEQ ID NO: 149463 - protein, 10 aa, Influenza A virus
MILRSAIGQM

SEQ ID NO: 149464 - protein, 10 aa, Influenza A virus
MILRTAIGHV

SEQ ID NO: 149465 - protein, 10 aa, Influenza A virus
MILRTAIGQV

SEQ ID NO: 149466 - protein, 11 aa, Influenza A virus
MISKCRTKEGR

SEQ ID NO: 149467 - protein, 8 aa, Influenza A virus
MISKCRTR

SEQ ID NO: 149468 - protein, 11 aa, Influenza A virus
MISKCRTREGR

SEQ ID NO: 149469 - protein, 9 aa, Influenza A virus
MIVELAEKA

SEQ ID NO: 149470 - protein, 10 aa, Influenza A virus
MIVELAEKAM

SEQ ID NO: 149471 - protein, 11 aa, Influenza A virus
MIVELAEKAMK

SEQ ID NO: 149472 - protein, 11 aa, Influenza A virus
MIVELAEKTMK

SEQ ID NO: 149473 - protein, 8 aa, Influenza A virus
MIVELAER

SEQ ID NO: 149474 - protein, 9 aa, Influenza A virus
MIVELAERA

SEQ ID NO: 149475 - protein, 10 aa, Influenza A virus
MIVELAERAM

SEQ ID NO: 149476 - protein, 11 aa, Influenza A virus
MIVELAERAMK

SEQ ID NO: 149477 - protein, 9 aa, Influenza A virus
MIVELTEKA

SEQ ID NO: 149478 - protein, 10 aa, Influenza A virus
MIVELTEKAM

SEQ ID NO: 149479 - protein, 11 aa, Influenza A virus
MIVELTEKAMK

SEQ ID NO: 149480 - protein, 10 aa, Influenza A virus
MKEYGEDLKI

SEQ ID NO: 149481 - protein, 10 aa, Influenza A virus
MKEYGEDLKV

SEQ ID NO: 149482 - protein, 10 aa, Influenza A virus
MKEYGEDPKL

SEQ ID NO: 149483 - protein, 10 aa, Influenza A virus
MKEYGENLKI

SEQ ID NO: 149484 - protein, 10 aa, Influenza A virus
MKEYGENPKI

SEQ ID NO: 149485 - protein, 10 aa, Influenza A virus
MKGVDINTAL

SEQ ID NO: 149486 - protein, 9 aa, Influenza A virus
MKGVYINSA

SEQ ID NO: 149487 - protein, 10 aa, Influenza A virus
MKGVYINSAL

SEQ ID NO: 149488 - protein, 11 aa, Influenza A virus
MKGVYINSALL

SEQ ID NO: 149489 - protein, 9 aa, Influenza A virus
MKGVYINTA

SEQ ID NO: 149490 - protein, 10 aa, Influenza A virus
MKGVYINTAL

SEQ ID NO: 149491 - protein, 11 aa, Influenza A virus
MKGVYINTALL

SEQ ID NO: 149492 - protein, 8 aa, Influenza A virus
MKKTSQLM

SEQ ID NO: 149493 - protein, 9 aa, Influenza A virus
MKKTSQLMW

SEQ ID NO: 149494 - protein, 9 aa, Influenza A virus
MKWGMEMRR

SEQ ID NO: 149495 - protein, 10 aa, Influenza A virus
MLIRSAIGQM

SEQ ID NO: 149496 - protein, 10 aa, Influenza A virus
MLIRSAIGQV

SEQ ID NO: 149497 - protein, 11 aa, Influenza A virus
MLIRSAIGQVS

SEQ ID NO: 149498 - protein, 10 aa, Influenza A virus
MLLRSAIAPV

SEQ ID NO: 149499 - protein, 11 aa, Influenza A virus
MLLRSAIAPVS

SEQ ID NO: 149500 - protein, 10 aa, Influenza A virus
MLLRSAIGHV

SEQ ID NO: 149501 - protein, 10 aa, Influenza A virus
MLLRSAIGQM

SEQ ID NO: 149502 - protein, 10 aa, Influenza A virus
MLLRSAIGQV

SEQ ID NO: 149503 - protein, 11 aa, Influenza A virus
MLLRSAIGQVS

SEQ ID NO: 149504 - protein, 10 aa, Influenza A virus
MLLRSALGQV

SEQ ID NO: 149505 - protein, 11 aa, Influenza A virus
MLLRSALGQVS

SEQ ID NO: 149506 - protein, 9 aa, Influenza A virus
MLLRSTIGR

SEQ ID NO: 149507 - protein, 10 aa, Influenza A virus
MLLRSTIGRV

SEQ ID NO: 149508 - protein, 11 aa, Influenza A virus
MLLRSTIGRVS

SEQ ID NO: 149509 - protein, 10 aa, Influenza A virus
MLLRTAIGQA

SEQ ID NO: 149510 - protein, 10 aa, Influenza A virus
MLLRTAIGQV

SEQ ID NO: 149511 - protein, 11 aa, Influenza A virus
MLLRTAIGQVL

SEQ ID NO: 149512 - protein, 10 aa, Influenza A virus
MLLRTAVGQV

SEQ ID NO: 149513 - protein, 10 aa, Influenza A virus
MLLRTEIGQV

SEQ ID NO: 149514 - protein, 10 aa, Influenza A virus
MLLRTSIGQV

SEQ ID NO: 149515 - protein, 11 aa, Influenza A virus
MLLRTSIGQVS

SEQ ID NO: 149516 - protein, 9 aa, Influenza A virus
MMDALKLSI

SEQ ID NO: 149517 - protein, 10 aa, Influenza A virus
MMDALKLSIE

SEQ ID NO: 149518 - protein, 8 aa, Influenza A virus
MMMDALKL

SEQ ID NO: 149519 - protein, 9 aa, Influenza A virus
MMMDALKLS

SEQ ID NO: 149520 - protein, 10 aa, Influenza A virus
MMMDALKLSI

SEQ ID NO: 149521 - protein, 11 aa, Influenza A virus
MMMDALKLSIE

SEQ ID NO: 149522 - protein, 9 aa, Influenza A virus
MRKLADQSL

SEQ ID NO: 149523 - protein, 11 aa, Influenza A virus
MRKTSQLKWAL

SEQ ID NO: 149524 - protein, 9 aa, Influenza A virus
MRNVADQSL

SEQ ID NO: 149525 - protein, 9 aa, Influenza A virus
MRPCLLQSL

SEQ ID NO: 149526 - protein, 9 aa, Influenza A virus
MRRCLLQSL

SEQ ID NO: 149527 - protein, 10 aa, Influenza A virus
MRRCLLQSLQ

SEQ ID NO: 149528 - protein, 9 aa, Influenza A virus
MRRCPFQSL

SEQ ID NO: 149529 - protein, 10 aa, Influenza A virus
MRRCPFQSLQ

SEQ ID NO: 149530 - protein, 9 aa, Influenza A virus
MRRLADQSL

SEQ ID NO: 149531 - protein, 9 aa, Influenza A virus
MRRLADYSL

SEQ ID NO: 149532 - protein, 9 aa, Influenza A virus
MRRLAEQSL

SEQ ID NO: 149533 - protein, 9 aa, Influenza A virus
MRRLANQSL

SEQ ID NO: 149534 - protein, 9 aa, Influenza A virus
MRRLANYSL

SEQ ID NO: 149535 - protein, 10 aa, Influenza A virus
MRRLANYSLP

SEQ ID NO: 149536 - protein, 8 aa, Influenza A virus
MRRNYFTA

SEQ ID NO: 149537 - protein, 10 aa, Influenza A virus
MRRNYFTAEV

SEQ ID NO: 149538 - protein, 10 aa, Influenza A virus
MRRNYFTSEV

SEQ ID NO: 149539 - protein, 8 aa, Influenza A virus
MRTFFGWK

SEQ ID NO: 149540 - protein, 10 aa, Influenza A virus
MRTFFGWKEP

SEQ ID NO: 149541 - protein, 11 aa, Influenza A virus
MRTFFGWKEPY

SEQ ID NO: 149542 - protein, 9 aa, Influenza A virus
MRTNGTSKI

SEQ ID NO: 149543 - protein, 10 aa, Influenza A virus
MRTNGTSKIK

SEQ ID NO: 149544 - protein, 9 aa, Influenza A virus
MSKEVNAKI

SEQ ID NO: 149545 - protein, 8 aa, Influenza A virus
MSKEVNAR

SEQ ID NO: 149546 - protein, 9 aa, Influenza A virus
MSKEVNARI

SEQ ID NO: 149547 - protein, 8 aa, Influenza A virus
MSKEVNTR

SEQ ID NO: 149548 - protein, 9 aa, Influenza A virus
MSKEVNTRI

SEQ ID NO: 149549 - protein, 8 aa, Influenza A virus
MSREVNAR

SEQ ID NO: 149550 - protein, 9 aa, Influenza A virus
MSREVNARI

SEQ ID NO: 149551 - protein, 8 aa, Influenza A virus
MSRPMFLY

SEQ ID NO: 149552 - protein, 9 aa, Influenza A virus
MSRPMFLYV

SEQ ID NO: 149553 - protein, 10 aa, Influenza A virus
MSRPMFLYVR

SEQ ID NO: 149554 - protein, 11 aa, Influenza A virus
MSRPMFLYVRT

SEQ ID NO: 149555 - protein, 9 aa, Influenza A virus
MTEAESSVK

SEQ ID NO: 149556 - protein, 9 aa, Influenza A virus
MTKDFFENK

SEQ ID NO: 149557 - protein, 9 aa, Influenza A virus
MTKEFFENK

SEQ ID NO: 149558 - protein, 11 aa, Influenza A virus
MTKEFFENKSK

SEQ ID NO: 149559 - protein, 9 aa, Influenza A virus
MTKEFFENR

SEQ ID NO: 149560 - protein, 10 aa, Influenza A virus
MTKEFFENRS

SEQ ID NO: 149561 - protein, 9 aa, Influenza A virus
MTKEFFESK

SEQ ID NO: 149562 - protein, 9 aa, Influenza A virus
MTKEFFKNK

SEQ ID NO: 149563 - protein, 9 aa, Influenza A virus
MTREFFENK

SEQ ID NO: 149564 - protein, 10 aa, Influenza A virus
MTREFFENKS

SEQ ID NO: 149565 - protein, 9 aa, Influenza A virus
MVEAESSVK

SEQ ID NO: 149566 - protein, 10 aa, Influenza A virus
MVELDDPNAL

SEQ ID NO: 149567 - protein, 11 aa, Influenza A virus
MVELDDPNALL

SEQ ID NO: 149568 - protein, 10 aa, Influenza A virus
MVLRTAIGQV

SEQ ID NO: 149569 - protein, 8 aa, Influenza A virus
MVVELAEK

SEQ ID NO: 149570 - protein, 9 aa, Influenza A virus
MVVELAEKA

SEQ ID NO: 149571 - protein, 10 aa, Influenza A virus
MVVELAEKAM

SEQ ID NO: 149572 - protein, 11 aa, Influenza A virus
MVVELAEKAMK

SEQ ID NO: 149573 - protein, 8 aa, Influenza A virus
MYSDFHFI

SEQ ID NO: 149574 - protein, 11 aa, Influenza A virus
MYSDFHFIDER

SEQ ID NO: 149575 - protein, 11 aa, Influenza A virus
MYSDFHFINEL

SEQ ID NO: 149576 - protein, 11 aa, Influenza A virus
MYSDFHFINER

SEQ ID NO: 149577 - protein, 8 aa, Influenza A virus
MYSDFHFV

SEQ ID NO: 149578 - protein, 11 aa, Influenza A virus
MYSDFHFVDER

SEQ ID NO: 149579 - protein, 9 aa, Influenza A virus
NAKIEPFLK

SEQ ID NO: 149580 - protein, 10 aa, Influenza A virus
NALLKHRFEI

SEQ ID NO: 149581 - protein, 11 aa, Influenza A virus
NALLKHRFEIM

SEQ ID NO: 149582 - protein, 9 aa, Influenza A virus
NARIDPFLR

SEQ ID NO: 149583 - protein, 9 aa, Influenza A virus
NARIEPFFK

SEQ ID NO: 149584 - protein, 9 aa, Influenza A virus
NARIEPFLK

SEQ ID NO: 149585 - protein, 9 aa, Influenza A virus
NARIEPFLR

SEQ ID NO: 149586 - protein, 9 aa, Influenza A virus
NARIEPFSK

SEQ ID NO: 149587 - protein, 10 aa, Influenza A virus
NASCAAMDEF

SEQ ID NO: 149588 - protein, 8 aa, Influenza A virus
NASWFNSF

SEQ ID NO: 149589 - protein, 9 aa, Influenza A virus
NASWFNSFL

SEQ ID NO: 149590 - protein, 10 aa, Influenza A virus
NASWFNSFLA

SEQ ID NO: 149591 - protein, 10 aa, Influenza A virus
NASWFNSFLT

SEQ ID NO: 149592 - protein, 9 aa, Influenza A virus
NCMKTFFGW

SEQ ID NO: 149593 - protein, 10 aa, Influenza A virus
NCMKTFFGWK

SEQ ID NO: 149594 - protein, 9 aa, Influenza A virus
NCRDISDLR

SEQ ID NO: 149595 - protein, 9 aa, Influenza A virus
NEFNKACEL

SEQ ID NO: 149596 - protein, 9 aa, Influenza A virus
NELGESVII

SEQ ID NO: 149597 - protein, 9 aa, Influenza A virus
NEQGESIIV

SEQ ID NO: 149598 - protein, 11 aa, Influenza A virus
NEQGESIIVEL

SEQ ID NO: 149599 - protein, 9 aa, Influenza A virus
NEQGESIMV

SEQ ID NO: 149600 - protein, 11 aa, Influenza A virus
NEQGESIMVEL

SEQ ID NO: 149601 - protein, 9 aa, Influenza A virus
NEQGESIVV

SEQ ID NO: 149602 - protein, 11 aa, Influenza A virus
NEQGESIVVEL

SEQ ID NO: 149603 - protein, 9 aa, Influenza A virus
NEQGESTIV

SEQ ID NO: 149604 - protein, 11 aa, Influenza A virus
NEQGESTIVEL

SEQ ID NO: 149605 - protein, 9 aa, Influenza A virus
NEQGRSIIV

SEQ ID NO: 149606 - protein, 11 aa, Influenza A virus
NEQGRSIIVEL

SEQ ID NO: 149607 - protein, 9 aa, Influenza A virus
NERGESIII

SEQ ID NO: 149608 - protein, 9 aa, Influenza A virus
NERGESIIV

SEQ ID NO: 149609 - protein, 9 aa, Influenza A virus
NFFCLENFR

SEQ ID NO: 149610 - protein, 10 aa, Influenza A virus
NFFCLENFRA

SEQ ID NO: 149611 - protein, 11 aa, Influenza A virus
NFFCLENFRAY

SEQ ID NO: 149612 - protein, 9 aa, Influenza A virus
NFRAYVDGF

SEQ ID NO: 149613 - protein, 10 aa, Influenza A virus
NFRAYVDGFK

SEQ ID NO: 149614 - protein, 9 aa, Influenza A virus
NFRVYVDGF

SEQ ID NO: 149615 - protein, 9 aa, Influenza A virus
NFSCFENFR

SEQ ID NO: 149616 - protein, 11 aa, Influenza A virus
NFSCFENFRAY

SEQ ID NO: 149617 - protein, 9 aa, Influenza A virus
NFSCIENFR

SEQ ID NO: 149618 - protein, 11 aa, Influenza A virus
NFSCIENFRAY

SEQ ID NO: 149619 - protein, 9 aa, Influenza A virus
NFSCLENFR

SEQ ID NO: 149620 - protein, 11 aa, Influenza A virus
NFSCLENFRAY

SEQ ID NO: 149621 - protein, 9 aa, Influenza A virus
NFSSFDNFR

SEQ ID NO: 149622 - protein, 11 aa, Influenza A virus
NFSSFDNFRAY

SEQ ID NO: 149623 - protein, 9 aa, Influenza A virus
NFSSIENFR

SEQ ID NO: 149624 - protein, 11 aa, Influenza A virus
NFSSIENFRAY

SEQ ID NO: 149625 - protein, 9 aa, Influenza A virus
NFSSLDNFR

SEQ ID NO: 149626 - protein, 11 aa, Influenza A virus
NFSSLDNFRAY

SEQ ID NO: 149627 - protein, 9 aa, Influenza A virus
NFSSLEKFR

SEQ ID NO: 149628 - protein, 9 aa, Influenza A virus
NFSSLENFR

SEQ ID NO: 149629 - protein, 11 aa, Influenza A virus
NFSSLENFRAY

SEQ ID NO: 149630 - protein, 11 aa, Influenza A virus
NFSSLENFRVY

SEQ ID NO: 149631 - protein, 9 aa, Influenza A virus
NFVSMEFSL

SEQ ID NO: 149632 - protein, 10 aa, Influenza A virus
NGTSKIKMKW

SEQ ID NO: 149633 - protein, 9 aa, Influenza A virus
NHEGEGIPL

SEQ ID NO: 149634 - protein, 8 aa, Influenza A virus
NIKKTSQL

SEQ ID NO: 149635 - protein, 9 aa, Influenza A virus
NIKKTSQLK

SEQ ID NO: 149636 - protein, 11 aa, Influenza A virus
NKACELTDSGW

SEQ ID NO: 149637 - protein, 11 aa, Influenza A virus
NKACELTDSIW

SEQ ID NO: 149638 - protein, 11 aa, Influenza A virus
NKACELTDSSW

SEQ ID NO: 149639 - protein, 11 aa, Influenza A virus
NKACELTDSTW

SEQ ID NO: 149640 - protein, 11 aa, Influenza A virus
NKACELTDSVW

SEQ ID NO: 149641 - protein, 11 aa, Influenza A virus
NKACELTESSW

SEQ ID NO: 149642 - protein, 11 aa, Influenza A virus
NKACELTNSIW

SEQ ID NO: 149643 - protein, 9 aa, Influenza A virus
NKFAAICTH

SEQ ID NO: 149644 - protein, 10 aa, Influenza A virus
NKFAAICTHL

SEQ ID NO: 149645 - protein, 10 aa, Influenza A virus
NKFAAICTHM

SEQ ID NO: 149646 - protein, 10 aa, Influenza A virus
NKLAAICTHL

SEQ ID NO: 149647 - protein, 9 aa, Influenza A virus
NLEPGTFDI

SEQ ID NO: 149648 - protein, 9 aa, Influenza A virus
NLEPGTFDL

SEQ ID NO: 149649 - protein, 9 aa, Influenza A virus
NLEPGTFNL

SEQ ID NO: 149650 - protein, 9 aa, Influenza A virus
NLGGLYEAI

SEQ ID NO: 149651 - protein, 9 aa, Influenza A virus
NLNYLLAWK

SEQ ID NO: 149652 - protein, 11 aa, Influenza A virus
NLNYLLAWKQV

SEQ ID NO: 149653 - protein, 11 aa, Influenza A virus
NLYASAQLEGF

SEQ ID NO: 149654 - protein, 9 aa, Influenza A virus
NLYGFIIKG

SEQ ID NO: 149655 - protein, 10 aa, Influenza A virus
NLYGFIIKGR

SEQ ID NO: 149656 - protein, 9 aa, Influenza A virus
NLYGFIVKG

SEQ ID NO: 149657 - protein, 10 aa, Influenza A virus
NLYGFIVKGR

SEQ ID NO: 149658 - protein, 9 aa, Influenza A virus
NLYGFLIKG

SEQ ID NO: 149659 - protein, 10 aa, Influenza A virus
NLYGFLIKGR

SEQ ID NO: 149660 - protein, 9 aa, Influenza A virus
NLYGFVIKG

SEQ ID NO: 149661 - protein, 10 aa, Influenza A virus
NLYGFVIKGR

SEQ ID NO: 149662 - protein, 9 aa, Influenza A virus
NMAPEKLDF

SEQ ID NO: 149663 - protein, 9 aa, Influenza A virus
NMAPEKVDF

SEQ ID NO: 149664 - protein, 9 aa, Influenza A virus
NMAWTVVNS

SEQ ID NO: 149665 - protein, 10 aa, Influenza A virus
NMAWTVVNSI

SEQ ID NO: 149666 - protein, 8 aa, Influenza A virus
NMKKTGQL

SEQ ID NO: 149667 - protein, 9 aa, Influenza A virus
NMKKTGQLK

SEQ ID NO: 149668 - protein, 8 aa, Influenza A virus
NMKKTSHL

SEQ ID NO: 149669 - protein, 9 aa, Influenza A virus
NMKKTSHLK

SEQ ID NO: 149670 - protein, 8 aa, Influenza A virus
NMKKTSPL

SEQ ID NO: 149671 - protein, 9 aa, Influenza A virus
NMKKTSPLK

SEQ ID NO: 149672 - protein, 8 aa, Influenza A virus
NMKKTSQL

SEQ ID NO: 149673 - protein, 9 aa, Influenza A virus
NMKKTSQLK

SEQ ID NO: 149674 - protein, 9 aa, Influenza A virus
NMKKTSQLM

SEQ ID NO: 149675 - protein, 10 aa, Influenza A virus
NMKKTSQLMW

SEQ ID NO: 149676 - protein, 8 aa, Influenza A virus
NMRKTSQL

SEQ ID NO: 149677 - protein, 9 aa, Influenza A virus
NMRKTSQLK

SEQ ID NO: 149678 - protein, 10 aa, Influenza A virus
NPIIVELAEK

SEQ ID NO: 149679 - protein, 8 aa, Influenza A virus
NPMIIELA

SEQ ID NO: 149680 - protein, 9 aa, Influenza A virus
NPMIIELAE

SEQ ID NO: 149681 - protein, 11 aa, Influenza A virus
NPMIIELAEKA

SEQ ID NO: 149682 - protein, 8 aa, Influenza A virus
NPMIVELA

SEQ ID NO: 149683 - protein, 9 aa, Influenza A virus
NPMIVELAE

SEQ ID NO: 149684 - protein, 11 aa, Influenza A virus
NPMIVELAEKA

SEQ ID NO: 149685 - protein, 10 aa, Influenza A virus
NPMIVELAER

SEQ ID NO: 149686 - protein, 11 aa, Influenza A virus
NPMIVELAERA

SEQ ID NO: 149687 - protein, 11 aa, Influenza A virus
NPMIVELTEKA

SEQ ID NO: 149688 - protein, 8 aa, Influenza A virus
NPMVVELA

SEQ ID NO: 149689 - protein, 9 aa, Influenza A virus
NPMVVELAE

SEQ ID NO: 149690 - protein, 11 aa, Influenza A virus
NPMVVELAEKA

SEQ ID NO: 149691 - protein, 8 aa, Influenza A virus
NPNYLLAW

SEQ ID NO: 149692 - protein, 9 aa, Influenza A virus
NPNYLLAWK

SEQ ID NO: 149693 - protein, 8 aa, Influenza A virus
NPNYLLSW

SEQ ID NO: 149694 - protein, 9 aa, Influenza A virus
NPNYLLSWK

SEQ ID NO: 149695 - protein, 11 aa, Influenza A virus
NPNYLLSWKQL

SEQ ID NO: 149696 - protein, 9 aa, Influenza A virus
NPNYLLSWR

SEQ ID NO: 149697 - protein, 8 aa, Influenza A virus
NPNYLLTW

SEQ ID NO: 149698 - protein, 9 aa, Influenza A virus
NPNYLLTWK

SEQ ID NO: 149699 - protein, 8 aa, Influenza A virus
NPNYLLVW

SEQ ID NO: 149700 - protein, 9 aa, Influenza A virus
NPNYLLVWK

SEQ ID NO: 149701 - protein, 8 aa, Influenza A virus
NPNYLMAW

SEQ ID NO: 149702 - protein, 9 aa, Influenza A virus
NPNYLMAWK

SEQ ID NO: 149703 - protein, 9 aa, Influenza A virus
NPNYLQAWK

SEQ ID NO: 149704 - protein, 11 aa, Influenza A virus
NPSHEGEGIPL

SEQ ID NO: 149705 - protein, 11 aa, Influenza A virus
NQSLPPNFSSL

SEQ ID NO: 149706 - protein, 10 aa, Influenza A virus
NRFIEIGVTR

SEQ ID NO: 149707 - protein, 11 aa, Influenza A virus
NRFIEIGVTRR

SEQ ID NO: 149708 - protein, 10 aa, Influenza A virus
NRFIEVGVTR

SEQ ID NO: 149709 - protein, 11 aa, Influenza A virus
NRFIEVGVTRR

SEQ ID NO: 149710 - protein, 10 aa, Influenza A virus
NRFTEIGVTR

SEQ ID NO: 149711 - protein, 11 aa, Influenza A virus
NRFTEIGVTRR

SEQ ID NO: 149712 - protein, 10 aa, Influenza A virus
NRFVEIGVTR

SEQ ID NO: 149713 - protein, 11 aa, Influenza A virus
NRFVEIGVTRR

SEQ ID NO: 149714 - protein, 8 aa, Influenza A virus
NSFLAHAL

SEQ ID NO: 149715 - protein, 9 aa, Influenza A virus
NSFLAHALK

SEQ ID NO: 149716 - protein, 8 aa, Influenza A virus
NSFLAHVL

SEQ ID NO: 149717 - protein, 9 aa, Influenza A virus
NSFLAHVLK

SEQ ID NO: 149718 - protein, 8 aa, Influenza A virus
NSFLTHAL

SEQ ID NO: 149719 - protein, 9 aa, Influenza A virus
NSFLTHALK

SEQ ID NO: 149720 - protein, 9 aa, Influenza A virus
NSFLTHALR

SEQ ID NO: 149721 - protein, 9 aa, Influenza A virus
NSFLTHAVK

SEQ ID NO: 149722 - protein, 9 aa, Influenza A virus
NSICNTTGA

SEQ ID NO: 149723 - protein, 11 aa, Influenza A virus
NSICNTTGAEK

SEQ ID NO: 149724 - protein, 9 aa, Influenza A virus
NSICNTTGI

SEQ ID NO: 149725 - protein, 9 aa, Influenza A virus
NSICNTTGV

SEQ ID NO: 149726 - protein, 11 aa, Influenza A virus
NSICNTTGVEK

SEQ ID NO: 149727 - protein, 11 aa, Influenza A virus
NSICNTTGVGK

SEQ ID NO: 149728 - protein, 9 aa, Influenza A virus
NSICNTTRA

SEQ ID NO: 149729 - protein, 11 aa, Influenza A virus
NSICNTTRAEK

SEQ ID NO: 149730 - protein, 9 aa, Influenza A virus
NSICNTTRV

SEQ ID NO: 149731 - protein, 11 aa, Influenza A virus
NSICNTTRVEK

SEQ ID NO: 149732 - protein, 10 aa, Influenza A virus
NSIWIELDEI

SEQ ID NO: 149733 - protein, 9 aa, Influenza A virus
NSLYASPQL

SEQ ID NO: 149734 - protein, 9 aa, Influenza A virus
NSLYSSPQL

SEQ ID NO: 149735 - protein, 8 aa, Influenza A virus
NSNYLLAW

SEQ ID NO: 149736 - protein, 9 aa, Influenza A virus
NSNYLLAWK

SEQ ID NO: 149737 - protein, 8 aa, Influenza A virus
NSNYLLSW

SEQ ID NO: 149738 - protein, 9 aa, Influenza A virus
NSNYLLSWK

SEQ ID NO: 149739 - protein, 8 aa, Influenza A virus
NSNYLQSW

SEQ ID NO: 149740 - protein, 9 aa, Influenza A virus
NSNYLQSWK

SEQ ID NO: 149741 - protein, 9 aa, Influenza A virus
NTALLNASC

SEQ ID NO: 149742 - protein, 10 aa, Influenza A virus
NTALLNASCA

SEQ ID NO: 149743 - protein, 11 aa, Influenza A virus
NTALLNASCAA

SEQ ID NO: 149744 - protein, 9 aa, Influenza A virus
NTALLNASS

SEQ ID NO: 149745 - protein, 10 aa, Influenza A virus
NTALLNASSA

SEQ ID NO: 149746 - protein, 9 aa, Influenza A virus
NTHIHIFSF

SEQ ID NO: 149747 - protein, 10 aa, Influenza A virus
NTHIHIFSFT

SEQ ID NO: 149748 - protein, 9 aa, Influenza A virus
NTRIEPFSK

SEQ ID NO: 149749 - protein, 10 aa, Influenza A virus
NTRIEPFSKT

SEQ ID NO: 149750 - protein, 9 aa, Influenza A virus
NTTGAEKPK

SEQ ID NO: 149751 - protein, 9 aa, Influenza A virus
NTTGIEKPK

SEQ ID NO: 149752 - protein, 9 aa, Influenza A virus
NTTGVDKPK

SEQ ID NO: 149753 - protein, 9 aa, Influenza A virus
NTTGVEKPK

SEQ ID NO: 149754 - protein, 9 aa, Influenza A virus
NTTGVGKPK

SEQ ID NO: 149755 - protein, 9 aa, Influenza A virus
NTTGVGKPR

SEQ ID NO: 149756 - protein, 9 aa, Influenza A virus
NTTRAEKPK

SEQ ID NO: 149757 - protein, 9 aa, Influenza A virus
NTTRVEKPK

SEQ ID NO: 149758 - protein, 9 aa, Influenza A virus
NVAPIEHIA

SEQ ID NO: 149759 - protein, 11 aa, Influenza A virus
NVAPIEHIASM

SEQ ID NO: 149760 - protein, 9 aa, Influenza A virus
NVAWTVVNS

SEQ ID NO: 149761 - protein, 10 aa, Influenza A virus
NVAWTVVNSI

SEQ ID NO: 149762 - protein, 9 aa, Influenza A virus
NYFTAEVSH

SEQ ID NO: 149763 - protein, 11 aa, Influenza A virus
NYFTAEVSHCR

SEQ ID NO: 149764 - protein, 11 aa, Influenza A virus
NYFTAEVSQCR

SEQ ID NO: 149765 - protein, 9 aa, Influenza A virus
NYFTAEVSR

SEQ ID NO: 149766 - protein, 11 aa, Influenza A virus
NYFTAEVSRCR

SEQ ID NO: 149767 - protein, 9 aa, Influenza A virus
NYFTSEVSH

SEQ ID NO: 149768 - protein, 11 aa, Influenza A virus
NYFTSEVSHCR

SEQ ID NO: 149769 - protein, 9 aa, Influenza A virus
NYLLAWKQV

SEQ ID NO: 149770 - protein, 10 aa, Influenza A virus
NYLLAWKQVL

SEQ ID NO: 149771 - protein, 11 aa, Influenza A virus
NYLLAWKQVLA

SEQ ID NO: 149772 - protein, 11 aa, Influenza A virus
NYLLAWKQVQA

SEQ ID NO: 149773 - protein, 9 aa, Influenza A virus
NYLLAWNQV

SEQ ID NO: 149774 - protein, 10 aa, Influenza A virus
NYLLAWNQVL

SEQ ID NO: 149775 - protein, 11 aa, Influenza A virus
NYLLAWNQVLA

SEQ ID NO: 149776 - protein, 9 aa, Influenza A virus
NYLLSWKQL

SEQ ID NO: 149777 - protein, 10 aa, Influenza A virus
NYLLSWKQLL

SEQ ID NO: 149778 - protein, 11 aa, Influenza A virus
NYLLSWKQLLA

SEQ ID NO: 149779 - protein, 9 aa, Influenza A virus
NYLLSWKQV

SEQ ID NO: 149780 - protein, 10 aa, Influenza A virus
NYLLSWKQVL

SEQ ID NO: 149781 - protein, 11 aa, Influenza A virus
NYLLSWKQVLA

SEQ ID NO: 149782 - protein, 9 aa, Influenza A virus
NYLLSWRQV

SEQ ID NO: 149783 - protein, 10 aa, Influenza A virus
NYLLSWRQVL

SEQ ID NO: 149784 - protein, 11 aa, Influenza A virus
NYLLSWRQVLA

SEQ ID NO: 149785 - protein, 9 aa, Influenza A virus
NYLLTWKQV

SEQ ID NO: 149786 - protein, 10 aa, Influenza A virus
NYLLTWKQVL

SEQ ID NO: 149787 - protein, 11 aa, Influenza A virus
NYLLTWKQVLA

SEQ ID NO: 149788 - protein, 9 aa, Influenza A virus
NYLLVWKQV

SEQ ID NO: 149789 - protein, 10 aa, Influenza A virus
NYLLVWKQVL

SEQ ID NO: 149790 - protein, 9 aa, Influenza A virus
NYLMAWKQV

SEQ ID NO: 149791 - protein, 10 aa, Influenza A virus
NYLMAWKQVL

SEQ ID NO: 149792 - protein, 11 aa, Influenza A virus
NYLMAWKQVLA

SEQ ID NO: 149793 - protein, 9 aa, Influenza A virus
NYLQAWKQV

SEQ ID NO: 149794 - protein, 10 aa, Influenza A virus
NYLQAWKQVL

SEQ ID NO: 149795 - protein, 9 aa, Influenza A virus
NYLQSWKQV

SEQ ID NO: 149796 - protein, 10 aa, Influenza A virus
NYLQSWKQVL

SEQ ID NO: 149797 - protein, 8 aa, Influenza A virus
NYSLPPNF

SEQ ID NO: 149798 - protein, 11 aa, Influenza A virus
NYSLPPNFSSL

SEQ ID NO: 149799 - protein, 9 aa, Influenza A virus
NYVSMEFSL

SEQ ID NO: 149800 - protein, 10 aa, Influenza A virus
PCYQRSKFLL

SEQ ID NO: 149801 - protein, 9 aa, Influenza A virus
PEARSLASW

SEQ ID NO: 149802 - protein, 9 aa, Influenza A virus
PEFRSLASW

SEQ ID NO: 149803 - protein, 9 aa, Influenza A virus
PELRSFSSW

SEQ ID NO: 149804 - protein, 9 aa, Influenza A virus
PELRSISSW

SEQ ID NO: 149805 - protein, 9 aa, Influenza A virus
PELRSLASW

SEQ ID NO: 149806 - protein, 9 aa, Influenza A virus
PELRSLSSW

SEQ ID NO: 149807 - protein, 9 aa, Influenza A virus
PEQRSLASW

SEQ ID NO: 149808 - protein, 9 aa, Influenza A virus
PESRSLASW

SEQ ID NO: 149809 - protein, 10 aa, Influenza A virus
PFLKSTPRPL

SEQ ID NO: 149810 - protein, 10 aa, Influenza A virus
PFLKTTPRPI

SEQ ID NO: 149811 - protein, 10 aa, Influenza A virus
PFLKTTPRPL

SEQ ID NO: 149812 - protein, 10 aa, Influenza A virus
PFLRTTPRPL

SEQ ID NO: 149813 - protein, 10 aa, Influenza A virus
PGTFDIGGLY

SEQ ID NO: 149814 - protein, 10 aa, Influenza A virus
PGTFDLEGLY

SEQ ID NO: 149815 - protein, 10 aa, Influenza A virus
PGTFDLGGLY

SEQ ID NO: 149816 - protein, 10 aa, Influenza A virus
PGTFNLGGLY

SEQ ID NO: 149817 - protein, 10 aa, Influenza A virus
PHRWEKYCVL

SEQ ID NO: 149818 - protein, 11 aa, Influenza A virus
PKFIPDLYDYK

SEQ ID NO: 149819 - protein, 11 aa, Influenza A virus
PKFLPDLYDYK

SEQ ID NO: 149820 - protein, 11 aa, Influenza A virus
PKFLPDLYDYR

SEQ ID NO: 149821 - protein, 10 aa, Influenza A virus
PKPRSLASWI

SEQ ID NO: 149822 - protein, 10 aa, Influenza A virus
PLYDAIKCIR

SEQ ID NO: 149823 - protein, 10 aa, Influenza A virus
PLYDAIKCMR

SEQ ID NO: 149824 - protein, 10 aa, Influenza A virus
PLYDAINCMK

SEQ ID NO: 149825 - protein, 10 aa, Influenza A virus
PLYDAIRCMK

SEQ ID NO: 149826 - protein, 10 aa, Influenza A virus
PLYDAVRCMK

SEQ ID NO: 149827 - protein, 9 aa, Influenza A virus
PMISKCRTR

SEQ ID NO: 149828 - protein, 10 aa, Influenza A virus
PNFFCLENFR

SEQ ID NO: 149829 - protein, 10 aa, Influenza A virus
PNFSCFENFR

SEQ ID NO: 149830 - protein, 10 aa, Influenza A virus
PNFSCIENFR

SEQ ID NO: 149831 - protein, 10 aa, Influenza A virus
PNFSCLENFR

SEQ ID NO: 149832 - protein, 10 aa, Influenza A virus
PNFSSFDNFR

SEQ ID NO: 149833 - protein, 10 aa, Influenza A virus
PNFSSIENFR

SEQ ID NO: 149834 - protein, 10 aa, Influenza A virus
PNFSSLDNFR

SEQ ID NO: 149835 - protein, 10 aa, Influenza A virus
PNFSSLENFR

SEQ ID NO: 149836 - protein, 11 aa, Influenza A virus
PNYLLAWNQVL

SEQ ID NO: 149837 - protein, 11 aa, Influenza A virus
PNYLLSWKQLL

SEQ ID NO: 149838 - protein, 11 aa, Influenza A virus
PNYLMAWKQVL

SEQ ID NO: 149839 - protein, 11 aa, Influenza A virus
PRFLPDLYDYK

SEQ ID NO: 149840 - protein, 10 aa, Influenza A virus
PRLEPHKWER

SEQ ID NO: 149841 - protein, 10 aa, Influenza A virus
PRLEPHNWEK

SEQ ID NO: 149842 - protein, 10 aa, Influenza A virus
PRLEPHRWEK

SEQ ID NO: 149843 - protein, 11 aa, Influenza A virus
PRPLRLPDGPL

SEQ ID NO: 149844 - protein, 9 aa, Influenza A virus
PVSRPMFLY

SEQ ID NO: 149845 - protein, 10 aa, Influenza A virus
PVSRPMFLYV

SEQ ID NO: 149846 - protein, 11 aa, Influenza A virus
PVSRPMFLYVR

SEQ ID NO: 149847 - protein, 9 aa, Influenza A virus
PWVLLNASW

SEQ ID NO: 149848 - protein, 10 aa, Influenza A virus
PWVLLNASWF

SEQ ID NO: 149849 - protein, 9 aa, Influenza A virus
QAPRPTFLY

SEQ ID NO: 149850 - protein, 10 aa, Influenza A virus
QAPRPTFLYV

SEQ ID NO: 149851 - protein, 8 aa, Influenza A virus
QEMANRGL

SEQ ID NO: 149852 - protein, 9 aa, Influenza A virus
QEMANRGLW

SEQ ID NO: 149853 - protein, 10 aa, Influenza A virus
QEMANRGLWD

SEQ ID NO: 149854 - protein, 8 aa, Influenza A virus
QEMASRGL

SEQ ID NO: 149855 - protein, 9 aa, Influenza A virus
QEMASRGLW

SEQ ID NO: 149856 - protein, 10 aa, Influenza A virus
QEMASRGLWD

SEQ ID NO: 149857 - protein, 11 aa, Influenza A virus
QEMASRGLWDS

SEQ ID NO: 149858 - protein, 9 aa, Influenza A virus
QLIPMISKC

SEQ ID NO: 149859 - protein, 10 aa, Influenza A virus
QLIPMISKCR

SEQ ID NO: 149860 - protein, 9 aa, Influenza A virus
QLKWALGEK

SEQ ID NO: 149861 - protein, 9 aa, Influenza A virus
QLLAELQDI

SEQ ID NO: 149862 - protein, 10 aa, Influenza A virus
QLMWALGENM

SEQ ID NO: 149863 - protein, 11 aa, Influenza A virus
QLMWALGENMA

SEQ ID NO: 149864 - protein, 9 aa, Influenza A virus
QMSKEVNAK

SEQ ID NO: 149865 - protein, 10 aa, Influenza A virus
QMSKEVNAKI

SEQ ID NO: 149866 - protein, 9 aa, Influenza A virus
QMSKEVNAR

SEQ ID NO: 149867 - protein, 10 aa, Influenza A virus
QMSKEVNARI

SEQ ID NO: 149868 - protein, 9 aa, Influenza A virus
QMSKEVNTR

SEQ ID NO: 149869 - protein, 10 aa, Influenza A virus
QMSKEVNTRI

SEQ ID NO: 149870 - protein, 9 aa, Influenza A virus
QMSREVNAR

SEQ ID NO: 149871 - protein, 10 aa, Influenza A virus
QMSREVNARI

SEQ ID NO: 149872 - protein, 9 aa, Influenza A virus
QMSRPMFLY

SEQ ID NO: 149873 - protein, 10 aa, Influenza A virus
QMSRPMFLYV

SEQ ID NO: 149874 - protein, 11 aa, Influenza A virus
QMSRPMFLYVR

SEQ ID NO: 149875 - protein, 10 aa, Influenza A virus
QNEFNKACEL

SEQ ID NO: 149876 - protein, 9 aa, Influenza A virus
QPRSLASWI

SEQ ID NO: 149877 - protein, 9 aa, Influenza A virus
QQIESIIEA

SEQ ID NO: 149878 - protein, 9 aa, Influenza A virus
QQIESMIEA

SEQ ID NO: 149879 - protein, 9 aa, Influenza A virus
QQIESMTEA

SEQ ID NO: 149880 - protein, 9 aa, Influenza A virus
QQIESMVEA

SEQ ID NO: 149881 - protein, 9 aa, Influenza A virus
QQVESMVEA

SEQ ID NO: 149882 - protein, 10 aa, Influenza A virus
QRSKFLLMDA

SEQ ID NO: 149883 - protein, 11 aa, Influenza A virus
QRSKFLLMDAL

SEQ ID NO: 149884 - protein, 11 aa, Influenza A virus
QRSKFLLMDSL

SEQ ID NO: 149885 - protein, 11 aa, Influenza A virus
QRSKVMMMDAL

SEQ ID NO: 149886 - protein, 10 aa, Influenza A virus
QSEFNKACEL

SEQ ID NO: 149887 - protein, 10 aa, Influenza A virus
QSFNPMIVEL

SEQ ID NO: 149888 - protein, 10 aa, Influenza A virus
QSLPPNFFCL

SEQ ID NO: 149889 - protein, 10 aa, Influenza A virus
QSLPPNFSCF

SEQ ID NO: 149890 - protein, 10 aa, Influenza A virus
QSLPPNFSCI

SEQ ID NO: 149891 - protein, 10 aa, Influenza A virus
QSLPPNFSCL

SEQ ID NO: 149892 - protein, 10 aa, Influenza A virus
QSLPPNFSSF

SEQ ID NO: 149893 - protein, 10 aa, Influenza A virus
QSLPPNFSSI

SEQ ID NO: 149894 - protein, 10 aa, Influenza A virus
QSLPPNFSSL

SEQ ID NO: 149895 - protein, 9 aa, Influenza A virus
QSLQQIESI

SEQ ID NO: 149896 - protein, 9 aa, Influenza A virus
QSLQQIESM

SEQ ID NO: 149897 - protein, 9 aa, Influenza A virus
QSLQQVESM

SEQ ID NO: 149898 - protein, 10 aa, Influenza A virus
QSWKQVLAEL

SEQ ID NO: 149899 - protein, 9 aa, Influenza A virus
QVARPMFLY

SEQ ID NO: 149900 - protein, 10 aa, Influenza A virus
QVARPMFLYV

SEQ ID NO: 149901 - protein, 11 aa, Influenza A virus
QVARPMFLYVR

SEQ ID NO: 149902 - protein, 10 aa, Influenza A virus
QVIPMISKCR

SEQ ID NO: 149903 - protein, 9 aa, Influenza A virus
QVLAELQDI

SEQ ID NO: 149904 - protein, 9 aa, Influenza A virus
QVLAELQDV

SEQ ID NO: 149905 - protein, 9 aa, Influenza A virus
QVLAELQYI

SEQ ID NO: 149906 - protein, 9 aa, Influenza A virus
QVLEELQDI

SEQ ID NO: 149907 - protein, 9 aa, Influenza A virus
QVLRPMFLY

SEQ ID NO: 149908 - protein, 10 aa, Influenza A virus
QVLRPMFLYV

SEQ ID NO: 149909 - protein, 11 aa, Influenza A virus
QVLRPMFLYVR

SEQ ID NO: 149910 - protein, 9 aa, Influenza A virus
QVSRPIFLY

SEQ ID NO: 149911 - protein, 10 aa, Influenza A virus
QVSRPIFLYV

SEQ ID NO: 149912 - protein, 11 aa, Influenza A virus
QVSRPIFLYVR

SEQ ID NO: 149913 - protein, 9 aa, Influenza A virus
QVSRPMFLY

SEQ ID NO: 149914 - protein, 10 aa, Influenza A virus
QVSRPMFLYM

SEQ ID NO: 149915 - protein, 11 aa, Influenza A virus
QVSRPMFLYMR

SEQ ID NO: 149916 - protein, 10 aa, Influenza A virus
QVSRPMFLYV

SEQ ID NO: 149917 - protein, 11 aa, Influenza A virus
QVSRPMFLYVR

SEQ ID NO: 149918 - protein, 9 aa, Influenza A virus
QYDGDEPEF

SEQ ID NO: 149919 - protein, 9 aa, Influenza A virus
QYDSDEPEF

SEQ ID NO: 149920 - protein, 9 aa, Influenza A virus
QYHSDEPEL

SEQ ID NO: 149921 - protein, 9 aa, Influenza A virus
QYIENEEKI

SEQ ID NO: 149922 - protein, 9 aa, Influenza A virus
QYYSDEPEL

SEQ ID NO: 149923 - protein, 10 aa, Influenza A virus
QYYSDEPELR

SEQ ID NO: 149924 - protein, 8 aa, Influenza A virus
RAMAWTVV

SEQ ID NO: 149925 - protein, 9 aa, Influenza A virus
RAMAWTVVN

SEQ ID NO: 149926 - protein, 10 aa, Influenza A virus
RAMAWTVVNS

SEQ ID NO: 149927 - protein, 11 aa, Influenza A virus
RAMAWTVVNSI

SEQ ID NO: 149928 - protein, 11 aa, Influenza A virus
RAMKEYGEDLK

SEQ ID NO: 149929 - protein, 9 aa, Influenza A virus
RARIKTRLF

SEQ ID NO: 149930 - protein, 10 aa, Influenza A virus
RARIKTRLFT

SEQ ID NO: 149931 - protein, 11 aa, Influenza A virus
RARIKTRLFTI

SEQ ID NO: 149932 - protein, 9 aa, Influenza A virus
RARIKTRLY

SEQ ID NO: 149933 - protein, 10 aa, Influenza A virus
RARIKTRLYT

SEQ ID NO: 149934 - protein, 11 aa, Influenza A virus
RARIKTRLYTI

SEQ ID NO: 149935 - protein, 9 aa, Influenza A virus
RARVKTRLF

SEQ ID NO: 149936 - protein, 10 aa, Influenza A virus
RARVKTRLFT

SEQ ID NO: 149937 - protein, 11 aa, Influenza A virus
RARVKTRLFTI

SEQ ID NO: 149938 - protein, 10 aa, Influenza A virus
RATEYIMKGV

SEQ ID NO: 149939 - protein, 11 aa, Influenza A virus
RATEYIMKGVY

SEQ ID NO: 149940 - protein, 10 aa, Influenza A virus
RCLLQSLQQI

SEQ ID NO: 149941 - protein, 10 aa, Influenza A virus
RCLLQSLQQV

SEQ ID NO: 149942 - protein, 10 aa, Influenza A virus
RCLPHLLQQI

SEQ ID NO: 149943 - protein, 9 aa, Influenza A virus
RCMKTFFGW

SEQ ID NO: 149944 - protein, 10 aa, Influenza A virus
RCMKTFFGWK

SEQ ID NO: 149945 - protein, 10 aa, Influenza A virus
RCPFQSLQQI

SEQ ID NO: 149946 - protein, 10 aa, Influenza A virus
RCRATEYIMK

SEQ ID NO: 149947 - protein, 9 aa, Influenza A virus
RDRAMAWTV

SEQ ID NO: 149948 - protein, 10 aa, Influenza A virus
RDRAMAWTVV

SEQ ID NO: 149949 - protein, 9 aa, Influenza A virus
RDRNMAWTV

SEQ ID NO: 149950 - protein, 10 aa, Influenza A virus
RDRNMAWTVV

SEQ ID NO: 149951 - protein, 9 aa, Influenza A virus
RDRNVAWTV

SEQ ID NO: 149952 - protein, 10 aa, Influenza A virus
RDRNVAWTVV

SEQ ID NO: 149953 - protein, 9 aa, Influenza A virus
RDRTIAWTV

SEQ ID NO: 149954 - protein, 10 aa, Influenza A virus
RDRTIAWTVI

SEQ ID NO: 149955 - protein, 9 aa, Influenza A virus
RDRTMAWTI

SEQ ID NO: 149956 - protein, 10 aa, Influenza A virus
RDRTMAWTIV

SEQ ID NO: 149957 - protein, 9 aa, Influenza A virus
RDRTMAWTV

SEQ ID NO: 149958 - protein, 10 aa, Influenza A virus
RDRTMAWTVI

SEQ ID NO: 149959 - protein, 10 aa, Influenza A virus
RDRTMAWTVV

SEQ ID NO: 149960 - protein, 9 aa, Influenza A virus
RDRTVAWTV

SEQ ID NO: 149961 - protein, 10 aa, Influenza A virus
RDRTVAWTVV

SEQ ID NO: 149962 - protein, 10 aa, Influenza A virus
REFFENKSET

SEQ ID NO: 149963 - protein, 11 aa, Influenza A virus
REFFENKSETW

SEQ ID NO: 149964 - protein, 9 aa, Influenza A virus
REGRRKTNL

SEQ ID NO: 149965 - protein, 10 aa, Influenza A virus
REGRRKTNLY

SEQ ID NO: 149966 - protein, 8 aa, Influenza A virus
REIHIYYL

SEQ ID NO: 149967 - protein, 9 aa, Influenza A virus
REIHIYYLE

SEQ ID NO: 149968 - protein, 10 aa, Influenza A virus
REIHIYYLEK

SEQ ID NO: 149969 - protein, 11 aa, Influenza A virus
REIHIYYLEKA

SEQ ID NO: 149970 - protein, 8 aa, Influenza A virus
RENRFIEI

SEQ ID NO: 149971 - protein, 9 aa, Influenza A virus
RENRFIEIG

SEQ ID NO: 149972 - protein, 10 aa, Influenza A virus
RENRFIEIGV

SEQ ID NO: 149973 - protein, 8 aa, Influenza A virus
REVHIYYL

SEQ ID NO: 149974 - protein, 10 aa, Influenza A virus
REVHIYYLEK

SEQ ID NO: 149975 - protein, 11 aa, Influenza A virus
REVHIYYLEKA

SEQ ID NO: 149976 - protein, 8 aa, Influenza A virus
REVHTYYL

SEQ ID NO: 149977 - protein, 10 aa, Influenza A virus
REVHTYYLEK

SEQ ID NO: 149978 - protein, 11 aa, Influenza A virus
REVHTYYLEKA

SEQ ID NO: 149979 - protein, 8 aa, Influenza A virus
REVHVYYL

SEQ ID NO: 149980 - protein, 10 aa, Influenza A virus
REVHVYYLEK

SEQ ID NO: 149981 - protein, 11 aa, Influenza A virus
REVHVYYLEKA

SEQ ID NO: 149982 - protein, 9 aa, Influenza A virus
REVNARIEP

SEQ ID NO: 149983 - protein, 10 aa, Influenza A virus
REVNARIEPF

SEQ ID NO: 149984 - protein, 11 aa, Influenza A virus
REVNARIEPFL

SEQ ID NO: 149985 - protein, 8 aa, Influenza A virus
RFEIIEGR

SEQ ID NO: 149986 - protein, 10 aa, Influenza A virus
RFEIIEGRDR

SEQ ID NO: 149987 - protein, 8 aa, Influenza A virus
RFEIKGTM

SEQ ID NO: 149988 - protein, 9 aa, Influenza A virus
RFEIKGTMR

SEQ ID NO: 149989 - protein, 10 aa, Influenza A virus
RFEIKGTMRR

SEQ ID NO: 149990 - protein, 8 aa, Influenza A virus
RFEIMEGR

SEQ ID NO: 149991 - protein, 10 aa, Influenza A virus
RFEIMEGRDR

SEQ ID NO: 149992 - protein, 8 aa, Influenza A virus
RFEIRGTM

SEQ ID NO: 149993 - protein, 9 aa, Influenza A virus
RFEIRGTMR

SEQ ID NO: 149994 - protein, 10 aa, Influenza A virus
RFEIRGTMRR

SEQ ID NO: 149995 - protein, 8 aa, Influenza A virus
RFEITGAM

SEQ ID NO: 149996 - protein, 9 aa, Influenza A virus
RFEITGAMR

SEQ ID NO: 149997 - protein, 10 aa, Influenza A virus
RFEITGAMRR

SEQ ID NO: 149998 - protein, 8 aa, Influenza A virus
RFEITGTM

SEQ ID NO: 149999 - protein, 10 aa, Influenza A virus
RFEITGTMCR

SEQ ID NO: 150000 - protein, 9 aa, Influenza A virus
RFEITGTMR

SEQ ID NO: 150001 - protein, 10 aa, Influenza A virus
RFEITGTMRK

SEQ ID NO: 150002 - protein, 10 aa, Influenza A virus
RFEITGTMRR

SEQ ID NO: 150003 - protein, 9 aa, Influenza A virus
RFEPHKWEK

SEQ ID NO: 150004 - protein, 10 aa, Influenza A virus
RFEPHKWEKY

SEQ ID NO: 150005 - protein, 9 aa, Influenza A virus
RFIEIGVTR

SEQ ID NO: 150006 - protein, 10 aa, Influenza A virus
RFIEIGVTRR

SEQ ID NO: 150007 - protein, 11 aa, Influenza A virus
RFIEIGVTRRE

SEQ ID NO: 150008 - protein, 9 aa, Influenza A virus
RFIEVGVTR

SEQ ID NO: 150009 - protein, 10 aa, Influenza A virus
RFIEVGVTRR

SEQ ID NO: 150010 - protein, 11 aa, Influenza A virus
RFIEVGVTRRE

SEQ ID NO: 150011 - protein, 9 aa, Influenza A virus
RFIKIGVTR

SEQ ID NO: 150012 - protein, 10 aa, Influenza A virus
RFIKIGVTRR

SEQ ID NO: 150013 - protein, 11 aa, Influenza A virus
RFIKIGVTRRE

SEQ ID NO: 150014 - protein, 9 aa, Influenza A virus
RFLPDLYDY

SEQ ID NO: 150015 - protein, 10 aa, Influenza A virus
RFLPDLYDYK

SEQ ID NO: 150016 - protein, 9 aa, Influenza A virus
RFTEIGVTR

SEQ ID NO: 150017 - protein, 10 aa, Influenza A virus
RFTEIGVTRR

SEQ ID NO: 150018 - protein, 9 aa, Influenza A virus
RFVEIGVTR

SEQ ID NO: 150019 - protein, 10 aa, Influenza A virus
RFVEIGVTRR

SEQ ID NO: 150020 - protein, 9 aa, Influenza A virus
RGDSIIVEV

SEQ ID NO: 150021 - protein, 9 aa, Influenza A virus
RGINPNYLL

SEQ ID NO: 150022 - protein, 10 aa, Influenza A virus
RGINPNYLLA

SEQ ID NO: 150023 - protein, 11 aa, Influenza A virus
RGINPNYLLAW

SEQ ID NO: 150024 - protein, 9 aa, Influenza A virus
RGINSNYLL

SEQ ID NO: 150025 - protein, 11 aa, Influenza A virus
RGINSNYLLSW

SEQ ID NO: 150026 - protein, 11 aa, Influenza A virus
RGINSNYLQSW

SEQ ID NO: 150027 - protein, 10 aa, Influenza A virus
RGLWDSFHQS

SEQ ID NO: 150028 - protein, 8 aa, Influenza A virus
RGLWDSFR

SEQ ID NO: 150029 - protein, 11 aa, Influenza A virus
RIDPFLRTTPR

SEQ ID NO: 150030 - protein, 11 aa, Influenza A virus
RIEPFFKTTPR

SEQ ID NO: 150031 - protein, 11 aa, Influenza A virus
RIEPFLKSTPR

SEQ ID NO: 150032 - protein, 11 aa, Influenza A virus
RIEPFLKTTPR

SEQ ID NO: 150033 - protein, 11 aa, Influenza A virus
RIEPFLRTTPR

SEQ ID NO: 150034 - protein, 11 aa, Influenza A virus
RIEPFSKTTPR

SEQ ID NO: 150035 - protein, 10 aa, Influenza A virus
RIETNKFAAI

SEQ ID NO: 150036 - protein, 8 aa, Influenza A virus
RIGDMLLR

SEQ ID NO: 150037 - protein, 9 aa, Influenza A virus
RIKNMKKTS

SEQ ID NO: 150038 - protein, 11 aa, Influenza A virus
RIKNMKKTSPL

SEQ ID NO: 150039 - protein, 8 aa, Influenza A virus
RIKTRLFT

SEQ ID NO: 150040 - protein, 9 aa, Influenza A virus
RIKTRLFTI

SEQ ID NO: 150041 - protein, 10 aa, Influenza A virus
RIKTRLFTIR

SEQ ID NO: 150042 - protein, 11 aa, Influenza A virus
RIKTRLFTIRQ

SEQ ID NO: 150043 - protein, 9 aa, Influenza A virus
RIKTRLYTI

SEQ ID NO: 150044 - protein, 10 aa, Influenza A virus
RIKTRLYTIR

SEQ ID NO: 150045 - protein, 11 aa, Influenza A virus
RIKTRLYTIRQ

SEQ ID NO: 150046 - protein, 11 aa, Influenza A virus
RIPGGPPCHQR

SEQ ID NO: 150047 - protein, 8 aa, Influenza A virus
RKIETNKF

SEQ ID NO: 150048 - protein, 11 aa, Influenza A virus
RKIETNKFAAI

SEQ ID NO: 150049 - protein, 10 aa, Influenza A virus
RKILLIVQAL

SEQ ID NO: 150050 - protein, 11 aa, Influenza A virus
RKILLIVQALR

SEQ ID NO: 150051 - protein, 10 aa, Influenza A virus
RKLLLIAQAL

SEQ ID NO: 150052 - protein, 11 aa, Influenza A virus
RKLLLIAQALR

SEQ ID NO: 150053 - protein, 9 aa, Influenza A virus
RKLLLITQA

SEQ ID NO: 150054 - protein, 10 aa, Influenza A virus
RKLLLITQAL

SEQ ID NO: 150055 - protein, 11 aa, Influenza A virus
RKLLLITQALR

SEQ ID NO: 150056 - protein, 10 aa, Influenza A virus
RKLLLIVQAL

SEQ ID NO: 150057 - protein, 11 aa, Influenza A virus
RKLLLIVQALR

SEQ ID NO: 150058 - protein, 10 aa, Influenza A virus
RKLLLVVQAL

SEQ ID NO: 150059 - protein, 11 aa, Influenza A virus
RKLLLVVQALK

SEQ ID NO: 150060 - protein, 11 aa, Influenza A virus
RKLLLVVQALR

SEQ ID NO: 150061 - protein, 10 aa, Influenza A virus
RKTNLYGFII

SEQ ID NO: 150062 - protein, 9 aa, Influenza A virus
RKTNLYGFL

SEQ ID NO: 150063 - protein, 10 aa, Influenza A virus
RKTNLYGFLI

SEQ ID NO: 150064 - protein, 10 aa, Influenza A virus
RKTNLYGFVI

SEQ ID NO: 150065 - protein, 10 aa, Influenza A virus
RKTSQLKWAL

SEQ ID NO: 150066 - protein, 11 aa, Influenza A virus
RLADQSLPPNF

SEQ ID NO: 150067 - protein, 9 aa, Influenza A virus
RLADYSLPP

SEQ ID NO: 150068 - protein, 11 aa, Influenza A virus
RLADYSLPPNF

SEQ ID NO: 150069 - protein, 11 aa, Influenza A virus
RLAEQSLPPNF

SEQ ID NO: 150070 - protein, 11 aa, Influenza A virus
RLANQSLPPNF

SEQ ID NO: 150071 - protein, 9 aa, Influenza A virus
RLANYSLPP

SEQ ID NO: 150072 - protein, 11 aa, Influenza A virus
RLANYSLPPNF

SEQ ID NO: 150073 - protein, 9 aa, Influenza A virus
RLELHKWEK

SEQ ID NO: 150074 - protein, 10 aa, Influenza A virus
RLELHKWEKY

SEQ ID NO: 150075 - protein, 9 aa, Influenza A virus
RLEPHKWEK

SEQ ID NO: 150076 - protein, 10 aa, Influenza A virus
RLEPHKWEKY

SEQ ID NO: 150077 - protein, 9 aa, Influenza A virus
RLEPHKWER

SEQ ID NO: 150078 - protein, 10 aa, Influenza A virus
RLEPHKWERS

SEQ ID NO: 150079 - protein, 10 aa, Influenza A virus
RLEPHKWERY

SEQ ID NO: 150080 - protein, 9 aa, Influenza A virus
RLEPHNWEK

SEQ ID NO: 150081 - protein, 10 aa, Influenza A virus
RLEPHNWEKY

SEQ ID NO: 150082 - protein, 9 aa, Influenza A virus
RLEPHRWEK

SEQ ID NO: 150083 - protein, 10 aa, Influenza A virus
RLEPHRWEKY

SEQ ID NO: 150084 - protein, 9 aa, Influenza A virus
RLEPYKWEK

SEQ ID NO: 150085 - protein, 10 aa, Influenza A virus
RLEPYKWEKY

SEQ ID NO: 150086 - protein, 9 aa, Influenza A virus
RLFTIRQEM

SEQ ID NO: 150087 - protein, 10 aa, Influenza A virus
RLFTIRQEMA

SEQ ID NO: 150088 - protein, 9 aa, Influenza A virus
RLLLIVQAL

SEQ ID NO: 150089 - protein, 10 aa, Influenza A virus
RLLLIVQALG

SEQ ID NO: 150090 - protein, 9 aa, Influenza A virus
RLPCGPPCF

SEQ ID NO: 150091 - protein, 11 aa, Influenza A virus
RLPCGPPCFQR

SEQ ID NO: 150092 - protein, 11 aa, Influenza A virus
RLPDGPLCSQR

SEQ ID NO: 150093 - protein, 9 aa, Influenza A virus
RLPDGPPCC

SEQ ID NO: 150094 - protein, 11 aa, Influenza A virus
RLPDGPPCCQR

SEQ ID NO: 150095 - protein, 9 aa, Influenza A virus
RLPDGPPCF

SEQ ID NO: 150096 - protein, 11 aa, Influenza A virus
RLPDGPPCFQR

SEQ ID NO: 150097 - protein, 11 aa, Influenza A virus
RLPDGPPCSQR

SEQ ID NO: 150098 - protein, 11 aa, Influenza A virus
RLPEGPPCSQR

SEQ ID NO: 150099 - protein, 9 aa, Influenza A virus
RLPGGPPCF

SEQ ID NO: 150100 - protein, 11 aa, Influenza A virus
RLPGGPPCFQR

SEQ ID NO: 150101 - protein, 9 aa, Influenza A virus
RLPNGPPCF

SEQ ID NO: 150102 - protein, 11 aa, Influenza A virus
RLPNGPPCFQR

SEQ ID NO: 150103 - protein, 11 aa, Influenza A virus
RLPNGPPCSQR

SEQ ID NO: 150104 - protein, 9 aa, Influenza A virus
RLYTIRQEM

SEQ ID NO: 150105 - protein, 10 aa, Influenza A virus
RLYTIRQEMA

SEQ ID NO: 150106 - protein, 9 aa, Influenza A virus
RNISDLKQY

SEQ ID NO: 150107 - protein, 10 aa, Influenza A virus
RNYFTAEVSR

SEQ ID NO: 150108 - protein, 8 aa, Influenza A virus
RPCLLQSL

SEQ ID NO: 150109 - protein, 11 aa, Influenza A virus
RPCLLQSLQQI

SEQ ID NO: 150110 - protein, 9 aa, Influenza A virus
RPIFLYVRT

SEQ ID NO: 150111 - protein, 10 aa, Influenza A virus
RPIKLPNGPP

SEQ ID NO: 150112 - protein, 11 aa, Influenza A virus
RPIKLPNGPPC

SEQ ID NO: 150113 - protein, 10 aa, Influenza A virus
RPIRLPDGPP

SEQ ID NO: 150114 - protein, 10 aa, Influenza A virus
RPIRLPNGPP

SEQ ID NO: 150115 - protein, 11 aa, Influenza A virus
RPIRLPNGPPC

SEQ ID NO: 150116 - protein, 10 aa, Influenza A virus
RPLRIPGGPP

SEQ ID NO: 150117 - protein, 11 aa, Influenza A virus
RPLRIPGGPPC

SEQ ID NO: 150118 - protein, 10 aa, Influenza A virus
RPLRLPCGPP

SEQ ID NO: 150119 - protein, 10 aa, Influenza A virus
RPLRLPDGPL

SEQ ID NO: 150120 - protein, 11 aa, Influenza A virus
RPLRLPDGPLC

SEQ ID NO: 150121 - protein, 10 aa, Influenza A virus
RPLRLPDGPP

SEQ ID NO: 150122 - protein, 10 aa, Influenza A virus
RPLRLPEGPP

SEQ ID NO: 150123 - protein, 10 aa, Influenza A virus
RPLRLPGGPP

SEQ ID NO: 150124 - protein, 11 aa, Influenza A virus
RPLRLPGGPPC

SEQ ID NO: 150125 - protein, 10 aa, Influenza A virus
RPLRLPNGPP

SEQ ID NO: 150126 - protein, 10 aa, Influenza A virus
RPLRTPGGPP

SEQ ID NO: 150127 - protein, 11 aa, Influenza A virus
RPLRTPGGPPC

SEQ ID NO: 150128 - protein, 9 aa, Influenza A virus
RPMFLYMRT

SEQ ID NO: 150129 - protein, 9 aa, Influenza A virus
RPMFLYVRT

SEQ ID NO: 150130 - protein, 8 aa, Influenza A virus
RPMFLYVT

SEQ ID NO: 150131 - protein, 9 aa, Influenza A virus
RPMFLYVTT

SEQ ID NO: 150132 - protein, 9 aa, Influenza A virus
RQCFNPIIV

SEQ ID NO: 150133 - protein, 11 aa, Influenza A virus
RQCFNPIIVEL

SEQ ID NO: 150134 - protein, 9 aa, Influenza A virus
RQCFNPMII

SEQ ID NO: 150135 - protein, 11 aa, Influenza A virus
RQCFNPMIIEL

SEQ ID NO: 150136 - protein, 9 aa, Influenza A virus
RQCFNPMIV

SEQ ID NO: 150137 - protein, 11 aa, Influenza A virus
RQCFNPMIVEL

SEQ ID NO: 150138 - protein, 9 aa, Influenza A virus
RQCFNPMVV

SEQ ID NO: 150139 - protein, 11 aa, Influenza A virus
RQCFNPMVVEL

SEQ ID NO: 150140 - protein, 9 aa, Influenza A virus
RQEMANRGL

SEQ ID NO: 150141 - protein, 10 aa, Influenza A virus
RQEMANRGLW

SEQ ID NO: 150142 - protein, 9 aa, Influenza A virus
RQEMASRGL

SEQ ID NO: 150143 - protein, 10 aa, Influenza A virus
RQEMASRGLW

SEQ ID NO: 150144 - protein, 10 aa, Influenza A virus
RQVLAELQDI

SEQ ID NO: 150145 - protein, 10 aa, Influenza A virus
RQYDSDEPEL

SEQ ID NO: 150146 - protein, 11 aa, Influenza A virus
RQYDSDEPELR

SEQ ID NO: 150147 - protein, 11 aa, Influenza A virus
RQYDSDEPESR

SEQ ID NO: 150148 - protein, 9 aa, Influenza A virus
RQYDSDEPK

SEQ ID NO: 150149 - protein, 11 aa, Influenza A virus
RQYDSDEPKPR

SEQ ID NO: 150150 - protein, 9 aa, Influenza A virus
RQYDSDEPQ

SEQ ID NO: 150151 - protein, 11 aa, Influenza A virus
RQYDSDEPQPR

SEQ ID NO: 150152 - protein, 8 aa, Influenza A virus
RRCLLQSL

SEQ ID NO: 150153 - protein, 9 aa, Influenza A virus
RRCLLQSLQ

SEQ ID NO: 150154 - protein, 10 aa, Influenza A virus
RRCLLQSLQQ

SEQ ID NO: 150155 - protein, 11 aa, Influenza A virus
RRCLLQSLQQI

SEQ ID NO: 150156 - protein, 11 aa, Influenza A virus
RRCLLQSLQQV

SEQ ID NO: 150157 - protein, 8 aa, Influenza A virus
RRCLPHLL

SEQ ID NO: 150158 - protein, 9 aa, Influenza A virus
RRCLPHLLQ

SEQ ID NO: 150159 - protein, 10 aa, Influenza A virus
RRCLPHLLQQ

SEQ ID NO: 150160 - protein, 11 aa, Influenza A virus
RRCLPHLLQQI

SEQ ID NO: 150161 - protein, 8 aa, Influenza A virus
RRCPFQSL

SEQ ID NO: 150162 - protein, 9 aa, Influenza A virus
RRCPFQSLQ

SEQ ID NO: 150163 - protein, 10 aa, Influenza A virus
RRCPFQSLQQ

SEQ ID NO: 150164 - protein, 11 aa, Influenza A virus
RRCPFQSLQQI

SEQ ID NO: 150165 - protein, 9 aa, Influenza A virus
RREIHIYYL

SEQ ID NO: 150166 - protein, 10 aa, Influenza A virus
RREIHIYYLE

SEQ ID NO: 150167 - protein, 11 aa, Influenza A virus
RREIHIYYLEK

SEQ ID NO: 150168 - protein, 9 aa, Influenza A virus
RREVHIYYL

SEQ ID NO: 150169 - protein, 10 aa, Influenza A virus
RREVHIYYLE

SEQ ID NO: 150170 - protein, 11 aa, Influenza A virus
RREVHIYYLEK

SEQ ID NO: 150171 - protein, 9 aa, Influenza A virus
RREVHTYYL

SEQ ID NO: 150172 - protein, 10 aa, Influenza A virus
RREVHTYYLE

SEQ ID NO: 150173 - protein, 11 aa, Influenza A virus
RREVHTYYLEK

SEQ ID NO: 150174 - protein, 9 aa, Influenza A virus
RREVHVYYL

SEQ ID NO: 150175 - protein, 10 aa, Influenza A virus
RREVHVYYLE

SEQ ID NO: 150176 - protein, 11 aa, Influenza A virus
RREVHVYYLEK

SEQ ID NO: 150177 - protein, 9 aa, Influenza A virus
RRKTNLYGF

SEQ ID NO: 150178 - protein, 10 aa, Influenza A virus
RRKTNLYGFI

SEQ ID NO: 150179 - protein, 11 aa, Influenza A virus
RRKTNLYGFII

SEQ ID NO: 150180 - protein, 11 aa, Influenza A virus
RRKTNLYGFIV

SEQ ID NO: 150181 - protein, 10 aa, Influenza A virus
RRKTNLYGFL

SEQ ID NO: 150182 - protein, 11 aa, Influenza A virus
RRKTNLYGFLI

SEQ ID NO: 150183 - protein, 10 aa, Influenza A virus
RRKTNLYGFV

SEQ ID NO: 150184 - protein, 11 aa, Influenza A virus
RRKTNLYGFVI

SEQ ID NO: 150185 - protein, 8 aa, Influenza A virus
RRLADQSL

SEQ ID NO: 150186 - protein, 8 aa, Influenza A virus
RRLADYSL

SEQ ID NO: 150187 - protein, 10 aa, Influenza A virus
RRLADYSLPP

SEQ ID NO: 150188 - protein, 8 aa, Influenza A virus
RRLAEQSL

SEQ ID NO: 150189 - protein, 8 aa, Influenza A virus
RRLANQSL

SEQ ID NO: 150190 - protein, 8 aa, Influenza A virus
RRLANYSL

SEQ ID NO: 150191 - protein, 9 aa, Influenza A virus
RRLANYSLP

SEQ ID NO: 150192 - protein, 10 aa, Influenza A virus
RRLANYSLPP

SEQ ID NO: 150193 - protein, 9 aa, Influenza A virus
RRLLLIVQA

SEQ ID NO: 150194 - protein, 10 aa, Influenza A virus
RRLLLIVQAL

SEQ ID NO: 150195 - protein, 11 aa, Influenza A virus
RRLLLIVQALG

SEQ ID NO: 150196 - protein, 9 aa, Influenza A virus
RRNYFTAEV

SEQ ID NO: 150197 - protein, 10 aa, Influenza A virus
RRNYFTAEVS

SEQ ID NO: 150198 - protein, 11 aa, Influenza A virus
RRNYFTAEVSR

SEQ ID NO: 150199 - protein, 9 aa, Influenza A virus
RRNYFTSEV

SEQ ID NO: 150200 - protein, 9 aa, Influenza A virus
RRRTNLYGF

SEQ ID NO: 150201 - protein, 10 aa, Influenza A virus
RRRTNLYGFI

SEQ ID NO: 150202 - protein, 11 aa, Influenza A virus
RRRTNLYGFIV

SEQ ID NO: 150203 - protein, 8 aa, Influenza A virus
RRSPASWI

SEQ ID NO: 150204 - protein, 8 aa, Influenza A virus
RRTNLYGF

SEQ ID NO: 150205 - protein, 9 aa, Influenza A virus
RRTNLYGFI

SEQ ID NO: 150206 - protein, 10 aa, Influenza A virus
RRTNLYGFIV

SEQ ID NO: 150207 - protein, 11 aa, Influenza A virus
RRTNLYGFIVK

SEQ ID NO: 150208 - protein, 9 aa, Influenza A virus
RSAIAPVSR

SEQ ID NO: 150209 - protein, 11 aa, Influenza A virus
RSAIAPVSRPM

SEQ ID NO: 150210 - protein, 9 aa, Influenza A virus
RSAIGHVSR

SEQ ID NO: 150211 - protein, 10 aa, Influenza A virus
RSAIGHVSRP

SEQ ID NO: 150212 - protein, 11 aa, Influenza A virus
RSAIGHVSRPM

SEQ ID NO: 150213 - protein, 9 aa, Influenza A virus
RSAIGQMSR

SEQ ID NO: 150214 - protein, 11 aa, Influenza A virus
RSAIGQMSRPM

SEQ ID NO: 150215 - protein, 9 aa, Influenza A virus
RSAIGQVSR

SEQ ID NO: 150216 - protein, 11 aa, Influenza A virus
RSAIGQVSRPM

SEQ ID NO: 150217 - protein, 9 aa, Influenza A virus
RSALGQVSR

SEQ ID NO: 150218 - protein, 11 aa, Influenza A virus
RSALGQVSRPM

SEQ ID NO: 150219 - protein, 9 aa, Influenza A virus
RSFSSWIQN

SEQ ID NO: 150220 - protein, 11 aa, Influenza A virus
RSFSSWIQNEF

SEQ ID NO: 150221 - protein, 10 aa, Influenza A virus
RSHLRNDTDV

SEQ ID NO: 150222 - protein, 9 aa, Influenza A virus
RSISSWIQN

SEQ ID NO: 150223 - protein, 11 aa, Influenza A virus
RSISSWIQNEF

SEQ ID NO: 150224 - protein, 9 aa, Influenza A virus
RSKFLLMDA

SEQ ID NO: 150225 - protein, 10 aa, Influenza A virus
RSKFLLMDAL

SEQ ID NO: 150226 - protein, 11 aa, Influenza A virus
RSKFLLMDALK

SEQ ID NO: 150227 - protein, 9 aa, Influenza A virus
RSKFLLMDS

SEQ ID NO: 150228 - protein, 10 aa, Influenza A virus
RSKFLLMDSL

SEQ ID NO: 150229 - protein, 11 aa, Influenza A virus
RSKFLLMDSLK

SEQ ID NO: 150230 - protein, 9 aa, Influenza A virus
RSKVMMMDA

SEQ ID NO: 150231 - protein, 10 aa, Influenza A virus
RSKVMMMDAL

SEQ ID NO: 150232 - protein, 11 aa, Influenza A virus
RSKVMMMDALK

SEQ ID NO: 150233 - protein, 11 aa, Influenza A virus
RSLASWIQNEF

SEQ ID NO: 150234 - protein, 9 aa, Influenza A virus
RSLASWIQS

SEQ ID NO: 150235 - protein, 11 aa, Influenza A virus
RSLASWIQSEF

SEQ ID NO: 150236 - protein, 9 aa, Influenza A virus
RSLASWVQS

SEQ ID NO: 150237 - protein, 11 aa, Influenza A virus
RSLASWVQSEF

SEQ ID NO: 150238 - protein, 11 aa, Influenza A virus
RSLSSWIQNEF

SEQ ID NO: 150239 - protein, 11 aa, Influenza A virus
RSPASWIQSEF

SEQ ID NO: 150240 - protein, 9 aa, Influenza A virus
RSTIGRVSR

SEQ ID NO: 150241 - protein, 11 aa, Influenza A virus
RSTIGRVSRPM

SEQ ID NO: 150242 - protein, 9 aa, Influenza A virus
RTAIGHVSR

SEQ ID NO: 150243 - protein, 10 aa, Influenza A virus
RTAIGHVSRP

SEQ ID NO: 150244 - protein, 11 aa, Influenza A virus
RTAIGHVSRPM

SEQ ID NO: 150245 - protein, 9 aa, Influenza A virus
RTAIGQAPR

SEQ ID NO: 150246 - protein, 10 aa, Influenza A virus
RTAIGQAPRP

SEQ ID NO: 150247 - protein, 9 aa, Influenza A virus
RTAIGQVAR

SEQ ID NO: 150248 - protein, 11 aa, Influenza A virus
RTAIGQVARPM

SEQ ID NO: 150249 - protein, 8 aa, Influenza A virus
RTAIGQVL

SEQ ID NO: 150250 - protein, 9 aa, Influenza A virus
RTAIGQVLR

SEQ ID NO: 150251 - protein, 10 aa, Influenza A virus
RTAIGQVLRP

SEQ ID NO: 150252 - protein, 11 aa, Influenza A virus
RTAIGQVLRPM

SEQ ID NO: 150253 - protein, 9 aa, Influenza A virus
RTAIGQVSR

SEQ ID NO: 150254 - protein, 11 aa, Influenza A virus
RTAIGQVSRPM

SEQ ID NO: 150255 - protein, 9 aa, Influenza A virus
RTAVGQVSR

SEQ ID NO: 150256 - protein, 11 aa, Influenza A virus
RTAVGQVSRPI

SEQ ID NO: 150257 - protein, 11 aa, Influenza A virus
RTAVGQVSRPM

SEQ ID NO: 150258 - protein, 9 aa, Influenza A virus
RTEIGQVSR

SEQ ID NO: 150259 - protein, 9 aa, Influenza A virus
RTFFGWKEP

SEQ ID NO: 150260 - protein, 11 aa, Influenza A virus
RTFFGWKEPNI

SEQ ID NO: 150261 - protein, 11 aa, Influenza A virus
RTFFGWKEPNV

SEQ ID NO: 150262 - protein, 10 aa, Influenza A virus
RTFFGWKEPS

SEQ ID NO: 150263 - protein, 11 aa, Influenza A virus
RTFFGWKEPSV

SEQ ID NO: 150264 - protein, 10 aa, Influenza A virus
RTFFGWKEPT

SEQ ID NO: 150265 - protein, 11 aa, Influenza A virus
RTFFGWKEPTV

SEQ ID NO: 150266 - protein, 10 aa, Influenza A virus
RTFFGWKEPY

SEQ ID NO: 150267 - protein, 11 aa, Influenza A virus
RTFFGWKEPYI

SEQ ID NO: 150268 - protein, 11 aa, Influenza A virus
RTFFGWKEPYV

SEQ ID NO: 150269 - protein, 8 aa, Influenza A virus
RTIAWTVI

SEQ ID NO: 150270 - protein, 10 aa, Influenza A virus
RTIAWTVINS

SEQ ID NO: 150271 - protein, 11 aa, Influenza A virus
RTIAWTVINSI

SEQ ID NO: 150272 - protein, 8 aa, Influenza A virus
RTKEGRRK

SEQ ID NO: 150273 - protein, 9 aa, Influenza A virus
RTKEGRRKT

SEQ ID NO: 150274 - protein, 11 aa, Influenza A virus
RTKEGRRKTNL

SEQ ID NO: 150275 - protein, 9 aa, Influenza A virus
RTKEGRRRT

SEQ ID NO: 150276 - protein, 11 aa, Influenza A virus
RTKEGRRRTNL

SEQ ID NO: 150277 - protein, 9 aa, Influenza A virus
RTKNIKKTS

SEQ ID NO: 150278 - protein, 11 aa, Influenza A virus
RTKNIKKTSQL

SEQ ID NO: 150279 - protein, 9 aa, Influenza A virus
RTKNMKKTS

SEQ ID NO: 150280 - protein, 11 aa, Influenza A virus
RTKNMKKTSQL

SEQ ID NO: 150281 - protein, 9 aa, Influenza A virus
RTKTMKKTS

SEQ ID NO: 150282 - protein, 11 aa, Influenza A virus
RTKTMKKTSQL

SEQ ID NO: 150283 - protein, 9 aa, Influenza A virus
RTLLAKSVF

SEQ ID NO: 150284 - protein, 8 aa, Influenza A virus
RTMAWTIV

SEQ ID NO: 150285 - protein, 9 aa, Influenza A virus
RTMAWTIVN

SEQ ID NO: 150286 - protein, 10 aa, Influenza A virus
RTMAWTIVNS

SEQ ID NO: 150287 - protein, 11 aa, Influenza A virus
RTMAWTIVNSI

SEQ ID NO: 150288 - protein, 8 aa, Influenza A virus
RTMAWTVI

SEQ ID NO: 150289 - protein, 9 aa, Influenza A virus
RTMAWTVIN

SEQ ID NO: 150290 - protein, 10 aa, Influenza A virus
RTMAWTVINS

SEQ ID NO: 150291 - protein, 11 aa, Influenza A virus
RTMAWTVINSI

SEQ ID NO: 150292 - protein, 8 aa, Influenza A virus
RTMAWTVV

SEQ ID NO: 150293 - protein, 9 aa, Influenza A virus
RTMAWTVVN

SEQ ID NO: 150294 - protein, 10 aa, Influenza A virus
RTMAWTVVNS

SEQ ID NO: 150295 - protein, 11 aa, Influenza A virus
RTMAWTVVNSI

SEQ ID NO: 150296 - protein, 9 aa, Influenza A virus
RTNGTSKIK

SEQ ID NO: 150297 - protein, 10 aa, Influenza A virus
RTNGTSKIKM

SEQ ID NO: 150298 - protein, 11 aa, Influenza A virus
RTNGTSKIKMK

SEQ ID NO: 150299 - protein, 9 aa, Influenza A virus
RTNLYGFIV

SEQ ID NO: 150300 - protein, 10 aa, Influenza A virus
RTNLYGFIVK

SEQ ID NO: 150301 - protein, 9 aa, Influenza A virus
RTPGGPPCY

SEQ ID NO: 150302 - protein, 11 aa, Influenza A virus
RTPGGPPCYQR

SEQ ID NO: 150303 - protein, 8 aa, Influenza A virus
RTREGRRK

SEQ ID NO: 150304 - protein, 9 aa, Influenza A virus
RTREGRRKT

SEQ ID NO: 150305 - protein, 10 aa, Influenza A virus
RTREGRRKTN

SEQ ID NO: 150306 - protein, 11 aa, Influenza A virus
RTREGRRKTNL

SEQ ID NO: 150307 - protein, 9 aa, Influenza A virus
RTSIGQVSR

SEQ ID NO: 150308 - protein, 11 aa, Influenza A virus
RTSIGQVSRPM

SEQ ID NO: 150309 - protein, 8 aa, Influenza A virus
RTTPRPLR

SEQ ID NO: 150310 - protein, 9 aa, Influenza A virus
RTTPRPLRL

SEQ ID NO: 150311 - protein, 11 aa, Influenza A virus
RTTPRPLRLPE

SEQ ID NO: 150312 - protein, 11 aa, Influenza A virus
RTVAWTVVNSI

SEQ ID NO: 150313 - protein, 9 aa, Influenza A virus
RVKNMKKTS

SEQ ID NO: 150314 - protein, 11 aa, Influenza A virus
RVKNMKKTSPL

SEQ ID NO: 150315 - protein, 8 aa, Influenza A virus
RVKTRLFT

SEQ ID NO: 150316 - protein, 9 aa, Influenza A virus
RVKTRLFTI

SEQ ID NO: 150317 - protein, 10 aa, Influenza A virus
RVKTRLFTIR

SEQ ID NO: 150318 - protein, 11 aa, Influenza A virus
RVKTRLFTIRQ

SEQ ID NO: 150319 - protein, 9 aa, Influenza A virus
RVSRPMFLY

SEQ ID NO: 150320 - protein, 10 aa, Influenza A virus
RVSRPMFLYV

SEQ ID NO: 150321 - protein, 11 aa, Influenza A virus
RVSRPMFLYVR

SEQ ID NO: 150322 - protein, 9 aa, Influenza A virus
RWEKYCVLR

SEQ ID NO: 150323 - protein, 10 aa, Influenza A virus
RWEKYCVLRI

SEQ ID NO: 150324 - protein, 11 aa, Influenza A virus
RYCVLEIGDML

SEQ ID NO: 150325 - protein, 9 aa, Influenza A virus
SAAMDDFQL

SEQ ID NO: 150326 - protein, 9 aa, Influenza A virus
SAESRKILL

SEQ ID NO: 150327 - protein, 9 aa, Influenza A virus
SAESRKLLL

SEQ ID NO: 150328 - protein, 10 aa, Influenza A virus
SAESRKLLLI

SEQ ID NO: 150329 - protein, 9 aa, Influenza A virus
SAESRRLLL

SEQ ID NO: 150330 - protein, 10 aa, Influenza A virus
SAESRRLLLI

SEQ ID NO: 150331 - protein, 10 aa, Influenza A virus
SAIAPVSRPM

SEQ ID NO: 150332 - protein, 11 aa, Influenza A virus
SAIAPVSRPMF

SEQ ID NO: 150333 - protein, 10 aa, Influenza A virus
SAIGHVSRPM

SEQ ID NO: 150334 - protein, 11 aa, Influenza A virus
SAIGHVSRPMF

SEQ ID NO: 150335 - protein, 10 aa, Influenza A virus
SAIGQMSRPM

SEQ ID NO: 150336 - protein, 11 aa, Influenza A virus
SAIGQMSRPMF

SEQ ID NO: 150337 - protein, 10 aa, Influenza A virus
SAIGQVSRPM

SEQ ID NO: 150338 - protein, 11 aa, Influenza A virus
SAIGQVSRPMF

SEQ ID NO: 150339 - protein, 10 aa, Influenza A virus
SALGQVSRPM

SEQ ID NO: 150340 - protein, 11 aa, Influenza A virus
SALGQVSRPMF

SEQ ID NO: 150341 - protein, 10 aa, Influenza A virus
SALLKHRFEI

SEQ ID NO: 150342 - protein, 10 aa, Influenza A virus
SALLNASCAA

SEQ ID NO: 150343 - protein, 9 aa, Influenza A virus
SCFENFRAY

SEQ ID NO: 150344 - protein, 10 aa, Influenza A virus
SCFENFRAYV

SEQ ID NO: 150345 - protein, 9 aa, Influenza A virus
SCIENFRAY

SEQ ID NO: 150346 - protein, 10 aa, Influenza A virus
SCIENFRAYV

SEQ ID NO: 150347 - protein, 9 aa, Influenza A virus
SCLENFRAY

SEQ ID NO: 150348 - protein, 10 aa, Influenza A virus
SCLENFRAYV

SEQ ID NO: 150349 - protein, 9 aa, Influenza A virus
SDFHFIDER

SEQ ID NO: 150350 - protein, 9 aa, Influenza A virus
SDFHFINEL

SEQ ID NO: 150351 - protein, 11 aa, Influenza A virus
SDFHFINEQGR

SEQ ID NO: 150352 - protein, 9 aa, Influenza A virus
SDFHFINER

SEQ ID NO: 150353 - protein, 9 aa, Influenza A virus
SDFHFVDER

SEQ ID NO: 150354 - protein, 9 aa, Influenza A virus
SEAWPIGES

SEQ ID NO: 150355 - protein, 10 aa, Influenza A virus
SEAWPIGESP

SEQ ID NO: 150356 - protein, 9 aa, Influenza A virus
SEEPEPRSL

SEQ ID NO: 150357 - protein, 10 aa, Influenza A virus
SEEPEPRSLA

SEQ ID NO: 150358 - protein, 9 aa, Influenza A virus
SEETHIHIF

SEQ ID NO: 150359 - protein, 11 aa, Influenza A virus
SEETHIHIFSF

SEQ ID NO: 150360 - protein, 9 aa, Influenza A virus
SEFNKACEL

SEQ ID NO: 150361 - protein, 10 aa, Influenza A virus
SEFNKACELT

SEQ ID NO: 150362 - protein, 8 aa, Influenza A virus
SEKTHIHI

SEQ ID NO: 150363 - protein, 9 aa, Influenza A virus
SEKTHIHIF

SEQ ID NO: 150364 - protein, 11 aa, Influenza A virus
SEKTHIHIFSF

SEQ ID NO: 150365 - protein, 10 aa, Influenza A virus
SEKWPIGESP

SEQ ID NO: 150366 - protein, 8 aa, Influenza A virus
SENTHIHI

SEQ ID NO: 150367 - protein, 9 aa, Influenza A virus
SENTHIHIF

SEQ ID NO: 150368 - protein, 10 aa, Influenza A virus
SENTHIHIFS

SEQ ID NO: 150369 - protein, 11 aa, Influenza A virus
SENTHIHIFSF

SEQ ID NO: 150370 - protein, 9 aa, Influenza A virus
SESIIVESG

SEQ ID NO: 150371 - protein, 10 aa, Influenza A virus
SETWPIGESP

SEQ ID NO: 150372 - protein, 11 aa, Influenza A virus
SETWPIGESPK

SEQ ID NO: 150373 - protein, 10 aa, Influenza A virus
SETWPVGESP

SEQ ID NO: 150374 - protein, 11 aa, Influenza A virus
SETWPVGESPK

SEQ ID NO: 150375 - protein, 10 aa, Influenza A virus
SETWTIGESP

SEQ ID NO: 150376 - protein, 11 aa, Influenza A virus
SETWTIGESPK

SEQ ID NO: 150377 - protein, 8 aa, Influenza A virus
SEVSHCRA

SEQ ID NO: 150378 - protein, 9 aa, Influenza A virus
SEVSHCRAT

SEQ ID NO: 150379 - protein, 11 aa, Influenza A virus
SEVSHCRATEY

SEQ ID NO: 150380 - protein, 8 aa, Influenza A virus
SFDNFRAY

SEQ ID NO: 150381 - protein, 9 aa, Influenza A virus
SFDNFRAYV

SEQ ID NO: 150382 - protein, 8 aa, Influenza A virus
SFLAHALK

SEQ ID NO: 150383 - protein, 8 aa, Influenza A virus
SFLAHVLK

SEQ ID NO: 150384 - protein, 8 aa, Influenza A virus
SFLTHALK

SEQ ID NO: 150385 - protein, 8 aa, Influenza A virus
SFLTHALR

SEQ ID NO: 150386 - protein, 9 aa, Influenza A virus
SFMYSDFHF

SEQ ID NO: 150387 - protein, 10 aa, Influenza A virus
SFMYSDFHFI

SEQ ID NO: 150388 - protein, 11 aa, Influenza A virus
SFMYSDFHFIN

SEQ ID NO: 150389 - protein, 9 aa, Influenza A virus
SFNPMIVEL

SEQ ID NO: 150390 - protein, 10 aa, Influenza A virus
SFSSWIQNEF

SEQ ID NO: 150391 - protein, 10 aa, Influenza A virus
SFTGEEMATK

SEQ ID NO: 150392 - protein, 10 aa, Influenza A virus
SFTGEGMATK

SEQ ID NO: 150393 - protein, 9 aa, Influenza A virus
SGDPNALLK

SEQ ID NO: 150394 - protein, 9 aa, Influenza A virus
SHCRATEYI

SEQ ID NO: 150395 - protein, 9 aa, Influenza A virus
SHEGEGIPL

SEQ ID NO: 150396 - protein, 10 aa, Influenza A virus
SHEGEGIPLY

SEQ ID NO: 150397 - protein, 10 aa, Influenza A virus
SHLRNDTDVV

SEQ ID NO: 150398 - protein, 10 aa, Influenza A virus
SICNTTGAEK

SEQ ID NO: 150399 - protein, 10 aa, Influenza A virus
SICNTTGIEK

SEQ ID NO: 150400 - protein, 10 aa, Influenza A virus
SICNTTGVDK

SEQ ID NO: 150401 - protein, 10 aa, Influenza A virus
SICNTTGVEK

SEQ ID NO: 150402 - protein, 10 aa, Influenza A virus
SICNTTGVGK

SEQ ID NO: 150403 - protein, 10 aa, Influenza A virus
SICNTTRAEK

SEQ ID NO: 150404 - protein, 10 aa, Influenza A virus
SICNTTRVEK

SEQ ID NO: 150405 - protein, 11 aa, Influenza A virus
SIEECLINDPW

SEQ ID NO: 150406 - protein, 9 aa, Influenza A virus
SIENFRAYV

SEQ ID NO: 150407 - protein, 9 aa, Influenza A virus
SIGQVSRPM

SEQ ID NO: 150408 - protein, 10 aa, Influenza A virus
SIGQVSRPMF

SEQ ID NO: 150409 - protein, 9 aa, Influenza A virus
SIIEAESSV

SEQ ID NO: 150410 - protein, 10 aa, Influenza A virus
SIIEAESSVK

SEQ ID NO: 150411 - protein, 9 aa, Influenza A virus
SIKEKDMTK

SEQ ID NO: 150412 - protein, 9 aa, Influenza A virus
SILEIGDMV

SEQ ID NO: 150413 - protein, 10 aa, Influenza A virus
SILEIGDMVL

SEQ ID NO: 150414 - protein, 11 aa, Influenza A virus
SILEIGDMVLR

SEQ ID NO: 150415 - protein, 9 aa, Influenza A virus
SIRRNYFTA

SEQ ID NO: 150416 - protein, 11 aa, Influenza A virus
SIRRNYFTAEV

SEQ ID NO: 150417 - protein, 10 aa, Influenza A virus
SISSWIQNEF

SEQ ID NO: 150418 - protein, 9 aa, Influenza A virus
SIWIELDEI

SEQ ID NO: 150419 - protein, 10 aa, Influenza A virus
SKEVNARIEP

SEQ ID NO: 150420 - protein, 9 aa, Influenza A virus
SKFLLMDAL

SEQ ID NO: 150421 - protein, 10 aa, Influenza A virus
SKFLLMDALK

SEQ ID NO: 150422 - protein, 11 aa, Influenza A virus
SKFLLMDALKF

SEQ ID NO: 150423 - protein, 9 aa, Influenza A virus
SKFLLMDSL

SEQ ID NO: 150424 - protein, 10 aa, Influenza A virus
SKFLLMDSLK

SEQ ID NO: 150425 - protein, 9 aa, Influenza A virus
SKIKMKWGM

SEQ ID NO: 150426 - protein, 11 aa, Influenza A virus
SKIKMKWGMEM

SEQ ID NO: 150427 - protein, 10 aa, Influenza A virus
SKLSQMSKEV

SEQ ID NO: 150428 - protein, 11 aa, Influenza A virus
SKTWPIGESPK

SEQ ID NO: 150429 - protein, 9 aa, Influenza A virus
SKVMMMDAL

SEQ ID NO: 150430 - protein, 10 aa, Influenza A virus
SKVMMMDALK

SEQ ID NO: 150431 - protein, 11 aa, Influenza A virus
SKVMMMDALKL

SEQ ID NO: 150432 - protein, 10 aa, Influenza A virus
SLASWIQNEF

SEQ ID NO: 150433 - protein, 10 aa, Influenza A virus
SLASWIQSEF

SEQ ID NO: 150434 - protein, 10 aa, Influenza A virus
SLASWVQSEF

SEQ ID NO: 150435 - protein, 8 aa, Influenza A virus
SLDNFRAY

SEQ ID NO: 150436 - protein, 9 aa, Influenza A virus
SLDNFRAYV

SEQ ID NO: 150437 - protein, 10 aa, Influenza A virus
SLDNFRAYVD

SEQ ID NO: 150438 - protein, 9 aa, Influenza A virus
SLEKFRAYV

SEQ ID NO: 150439 - protein, 8 aa, Influenza A virus
SLENFRAY

SEQ ID NO: 150440 - protein, 9 aa, Influenza A virus
SLENFRAYV

SEQ ID NO: 150441 - protein, 8 aa, Influenza A virus
SLENFRVY

SEQ ID NO: 150442 - protein, 9 aa, Influenza A virus
SLENFRVYV

SEQ ID NO: 150443 - protein, 10 aa, Influenza A virus
SLENFRVYVD

SEQ ID NO: 150444 - protein, 9 aa, Influenza A virus
SLPPNFFCL

SEQ ID NO: 150445 - protein, 9 aa, Influenza A virus
SLPPNFSCF

SEQ ID NO: 150446 - protein, 9 aa, Influenza A virus
SLPPNFSCI

SEQ ID NO: 150447 - protein, 9 aa, Influenza A virus
SLPPNFSCL

SEQ ID NO: 150448 - protein, 9 aa, Influenza A virus
SLPPNFSSF

SEQ ID NO: 150449 - protein, 9 aa, Influenza A virus
SLPPNFSSI

SEQ ID NO: 150450 - protein, 10 aa, Influenza A virus
SLPPNFSSIE

SEQ ID NO: 150451 - protein, 9 aa, Influenza A virus
SLPPNFSSL

SEQ ID NO: 150452 - protein, 10 aa, Influenza A virus
SLPPNFSSLD

SEQ ID NO: 150453 - protein, 10 aa, Influenza A virus
SLPPNFSSLE

SEQ ID NO: 150454 - protein, 11 aa, Influenza A virus
SLPPNFSSLEK

SEQ ID NO: 150455 - protein, 9 aa, Influenza A virus
SLQQIESII

SEQ ID NO: 150456 - protein, 11 aa, Influenza A virus
SLQQIESIIEA

SEQ ID NO: 150457 - protein, 9 aa, Influenza A virus
SLQQIESMI

SEQ ID NO: 150458 - protein, 11 aa, Influenza A virus
SLQQIESMIEA

SEQ ID NO: 150459 - protein, 11 aa, Influenza A virus
SLQQIESMTEA

SEQ ID NO: 150460 - protein, 9 aa, Influenza A virus
SLQQIESMV

SEQ ID NO: 150461 - protein, 11 aa, Influenza A virus
SLQQIESMVEA

SEQ ID NO: 150462 - protein, 9 aa, Influenza A virus
SLQQVESMV

SEQ ID NO: 150463 - protein, 11 aa, Influenza A virus
SLQQVESMVEA

SEQ ID NO: 150464 - protein, 10 aa, Influenza A virus
SLSSWIQNEF

SEQ ID NO: 150465 - protein, 11 aa, Influenza A virus
SLTDPRFEPHK

SEQ ID NO: 150466 - protein, 9 aa, Influenza A virus
SLTDPRLEL

SEQ ID NO: 150467 - protein, 11 aa, Influenza A virus
SLTDPRLELHK

SEQ ID NO: 150468 - protein, 11 aa, Influenza A virus
SLTDPRLEPHK

SEQ ID NO: 150469 - protein, 11 aa, Influenza A virus
SLTDPRLEPHR

SEQ ID NO: 150470 - protein, 10 aa, Influenza A virus
SLTDPRLEPY

SEQ ID NO: 150471 - protein, 11 aa, Influenza A virus
SLTDPRLEPYK

SEQ ID NO: 150472 - protein, 8 aa, Influenza A virus
SLYASPQL

SEQ ID NO: 150473 - protein, 11 aa, Influenza A virus
SLYASPQLEGF

SEQ ID NO: 150474 - protein, 8 aa, Influenza A virus
SLYSSPQL

SEQ ID NO: 150475 - protein, 11 aa, Influenza A virus
SLYSSPQLEGF

SEQ ID NO: 150476 - protein, 10 aa, Influenza A virus
SMEFSLTDPR

SEQ ID NO: 150477 - protein, 9 aa, Influenza A virus
SMIEAESSI

SEQ ID NO: 150478 - protein, 10 aa, Influenza A virus
SMIEAESSIK

SEQ ID NO: 150479 - protein, 9 aa, Influenza A virus
SMIEAESSV

SEQ ID NO: 150480 - protein, 10 aa, Influenza A virus
SMIEAESSVK

SEQ ID NO: 150481 - protein, 9 aa, Influenza A virus
SMIEAQSSV

SEQ ID NO: 150482 - protein, 10 aa, Influenza A virus
SMIEAQSSVK

SEQ ID NO: 150483 - protein, 9 aa, Influenza A virus
SMRRNYFTA

SEQ ID NO: 150484 - protein, 11 aa, Influenza A virus
SMRRNYFTAEV

SEQ ID NO: 150485 - protein, 9 aa, Influenza A virus
SMRRNYFTS

SEQ ID NO: 150486 - protein, 11 aa, Influenza A virus
SMRRNYFTSEV

SEQ ID NO: 150487 - protein, 9 aa, Influenza A virus
SMTEAESSV

SEQ ID NO: 150488 - protein, 10 aa, Influenza A virus
SMTEAESSVK

SEQ ID NO: 150489 - protein, 9 aa, Influenza A virus
SMVEAESSV

SEQ ID NO: 150490 - protein, 10 aa, Influenza A virus
SMVEAESSVK

SEQ ID NO: 150491 - protein, 11 aa, Influenza A virus
SNALLKHRFEI

SEQ ID NO: 150492 - protein, 10 aa, Influenza A virus
SNYLLAWKQV

SEQ ID NO: 150493 - protein, 11 aa, Influenza A virus
SNYLLAWKQVL

SEQ ID NO: 150494 - protein, 11 aa, Influenza A virus
SNYLLSWKQVL

SEQ ID NO: 150495 - protein, 10 aa, Influenza A virus
SNYLQSWKQV

SEQ ID NO: 150496 - protein, 10 aa, Influenza A virus
SPASWIQSEF

SEQ ID NO: 150497 - protein, 10 aa, Influenza A virus
SPKGMEEGSI

SEQ ID NO: 150498 - protein, 10 aa, Influenza A virus
SPKGVEDGSI

SEQ ID NO: 150499 - protein, 10 aa, Influenza A virus
SPKGVEEGSI

SEQ ID NO: 150500 - protein, 10 aa, Influenza A virus
SPKGVEESSI

SEQ ID NO: 150501 - protein, 10 aa, Influenza A virus
SPNGVEEGSI

SEQ ID NO: 150502 - protein, 9 aa, Influenza A virus
SPQLEGFSA

SEQ ID NO: 150503 - protein, 8 aa, Influenza A virus
SQCRATEY

SEQ ID NO: 150504 - protein, 9 aa, Influenza A virus
SQCRATEYI

SEQ ID NO: 150505 - protein, 10 aa, Influenza A virus
SQCRATEYIM

SEQ ID NO: 150506 - protein, 11 aa, Influenza A virus
SQCRATEYIMK

SEQ ID NO: 150507 - protein, 10 aa, Influenza A virus
SQLKWALGEK

SEQ ID NO: 150508 - protein, 11 aa, Influenza A virus
SQLKWALGEKM

SEQ ID NO: 150509 - protein, 11 aa, Influenza A virus
SQLKWALGENM

SEQ ID NO: 150510 - protein, 11 aa, Influenza A virus
SQLMWALGENM

SEQ ID NO: 150511 - protein, 9 aa, Influenza A virus
SQMSKEVNA

SEQ ID NO: 150512 - protein, 10 aa, Influenza A virus
SQMSKEVNAK

SEQ ID NO: 150513 - protein, 11 aa, Influenza A virus
SQMSKEVNAKI

SEQ ID NO: 150514 - protein, 10 aa, Influenza A virus
SQMSKEVNAR

SEQ ID NO: 150515 - protein, 11 aa, Influenza A virus
SQMSKEVNARI

SEQ ID NO: 150516 - protein, 10 aa, Influenza A virus
SQMSKEVNTR

SEQ ID NO: 150517 - protein, 11 aa, Influenza A virus
SQMSKEVNTRI

SEQ ID NO: 150518 - protein, 9 aa, Influenza A virus
SQMSREVNA

SEQ ID NO: 150519 - protein, 10 aa, Influenza A virus
SQMSREVNAR

SEQ ID NO: 150520 - protein, 11 aa, Influenza A virus
SQMSREVNARI

SEQ ID NO: 150521 - protein, 8 aa, Influenza A virus
SQRSKFLL

SEQ ID NO: 150522 - protein, 9 aa, Influenza A virus
SQRSKFLLM

SEQ ID NO: 150523 - protein, 11 aa, Influenza A virus
SQRSKFLLMDA

SEQ ID NO: 150524 - protein, 8 aa, Influenza A virus
SQRSKVMM

SEQ ID NO: 150525 - protein, 9 aa, Influenza A virus
SQRSKVMMM

SEQ ID NO: 150526 - protein, 9 aa, Influenza A virus
SRARIKTRL

SEQ ID NO: 150527 - protein, 10 aa, Influenza A virus
SRARIKTRLF

SEQ ID NO: 150528 - protein, 10 aa, Influenza A virus
SRARIKTRLY

SEQ ID NO: 150529 - protein, 9 aa, Influenza A virus
SRARVKTRL

SEQ ID NO: 150530 - protein, 10 aa, Influenza A virus
SRARVKTRLF

SEQ ID NO: 150531 - protein, 9 aa, Influenza A virus
SRCRATEYI

SEQ ID NO: 150532 - protein, 10 aa, Influenza A virus
SRCRATEYIM

SEQ ID NO: 150533 - protein, 10 aa, Influenza A virus
SREVNARIEP

SEQ ID NO: 150534 - protein, 11 aa, Influenza A virus
SRGLWDSFHQS

SEQ ID NO: 150535 - protein, 9 aa, Influenza A virus
SRGLWDSFR

SEQ ID NO: 150536 - protein, 10 aa, Influenza A virus
SRKILLIVQA

SEQ ID NO: 150537 - protein, 11 aa, Influenza A virus
SRKILLIVQAL

SEQ ID NO: 150538 - protein, 10 aa, Influenza A virus
SRKLLLIAQA

SEQ ID NO: 150539 - protein, 11 aa, Influenza A virus
SRKLLLIAQAL

SEQ ID NO: 150540 - protein, 10 aa, Influenza A virus
SRKLLLITQA

SEQ ID NO: 150541 - protein, 11 aa, Influenza A virus
SRKLLLITQAL

SEQ ID NO: 150542 - protein, 10 aa, Influenza A virus
SRKLLLIVQA

SEQ ID NO: 150543 - protein, 11 aa, Influenza A virus
SRKLLLIVQAL

SEQ ID NO: 150544 - protein, 10 aa, Influenza A virus
SRKLLLVVQA

SEQ ID NO: 150545 - protein, 11 aa, Influenza A virus
SRKLLLVVQAL

SEQ ID NO: 150546 - protein, 8 aa, Influenza A virus
SRPMFLYM

SEQ ID NO: 150547 - protein, 9 aa, Influenza A virus
SRPMFLYMR

SEQ ID NO: 150548 - protein, 10 aa, Influenza A virus
SRPMFLYMRT

SEQ ID NO: 150549 - protein, 10 aa, Influenza A virus
SRPMFLYVTT

SEQ ID NO: 150550 - protein, 10 aa, Influenza A virus
SRRLLLIVQA

SEQ ID NO: 150551 - protein, 11 aa, Influenza A virus
SRRLLLIVQAL

SEQ ID NO: 150552 - protein, 8 aa, Influenza A virus
SSDPNALL

SEQ ID NO: 150553 - protein, 9 aa, Influenza A virus
SSDPNALLK

SEQ ID NO: 150554 - protein, 9 aa, Influenza A virus
SSFDNFRAY

SEQ ID NO: 150555 - protein, 10 aa, Influenza A virus
SSFDNFRAYV

SEQ ID NO: 150556 - protein, 9 aa, Influenza A virus
SSIENFRAY

SEQ ID NO: 150557 - protein, 10 aa, Influenza A virus
SSIENFRAYV

SEQ ID NO: 150558 - protein, 10 aa, Influenza A virus
SSIGKVCRTL

SEQ ID NO: 150559 - protein, 10 aa, Influenza A virus
SSIKEKDMTK

SEQ ID NO: 150560 - protein, 9 aa, Influenza A virus
SSLDNFRAY

SEQ ID NO: 150561 - protein, 10 aa, Influenza A virus
SSLDNFRAYV

SEQ ID NO: 150562 - protein, 9 aa, Influenza A virus
SSLEKFRAY

SEQ ID NO: 150563 - protein, 10 aa, Influenza A virus
SSLEKFRAYV

SEQ ID NO: 150564 - protein, 9 aa, Influenza A virus
SSLENFRAY

SEQ ID NO: 150565 - protein, 10 aa, Influenza A virus
SSLENFRAYV

SEQ ID NO: 150566 - protein, 9 aa, Influenza A virus
SSLENFRVY

SEQ ID NO: 150567 - protein, 10 aa, Influenza A virus
SSLENFRVYV

SEQ ID NO: 150568 - protein, 10 aa, Influenza A virus
SSVKEKDMTK

SEQ ID NO: 150569 - protein, 10 aa, Influenza A virus
SSVKEKDMTR

SEQ ID NO: 150570 - protein, 10 aa, Influenza A virus
SSVKEKDVTK

SEQ ID NO: 150571 - protein, 8 aa, Influenza A virus
SSWIQNEF

SEQ ID NO: 150572 - protein, 10 aa, Influenza A virus
SSWIQNEFNK

SEQ ID NO: 150573 - protein, 9 aa, Influenza A virus
SSWLELDEI

SEQ ID NO: 150574 - protein, 9 aa, Influenza A virus
SSWMELDEI

SEQ ID NO: 150575 - protein, 8 aa, Influenza A virus
STIGRVSR

SEQ ID NO: 150576 - protein, 10 aa, Influenza A virus
STIGRVSRPM

SEQ ID NO: 150577 - protein, 11 aa, Influenza A virus
STIGRVSRPMF

SEQ ID NO: 150578 - protein, 9 aa, Influenza A virus
STWIELDEI

SEQ ID NO: 150579 - protein, 9 aa, Influenza A virus
SVFNCLYAS

SEQ ID NO: 150580 - protein, 9 aa, Influenza A virus
SVFNNLYAS

SEQ ID NO: 150581 - protein, 10 aa, Influenza A virus
SVFNNLYASA

SEQ ID NO: 150582 - protein, 9 aa, Influenza A virus
SVFNSLYAS

SEQ ID NO: 150583 - protein, 9 aa, Influenza A virus
SVFNSLYSS

SEQ ID NO: 150584 - protein, 9 aa, Influenza A virus
SVKEKDMTK

SEQ ID NO: 150585 - protein, 9 aa, Influenza A virus
SVKEKDMTR

SEQ ID NO: 150586 - protein, 9 aa, Influenza A virus
SVKEKDVTK

SEQ ID NO: 150587 - protein, 9 aa, Influenza A virus
SVWIELDEI

SEQ ID NO: 150588 - protein, 9 aa, Influenza A virus
SWFNSFLAH

SEQ ID NO: 150589 - protein, 11 aa, Influenza A virus
SWFNSFLAHAL

SEQ ID NO: 150590 - protein, 10 aa, Influenza A virus
SWFNSFLAHV

SEQ ID NO: 150591 - protein, 11 aa, Influenza A virus
SWFNSFLAHVL

SEQ ID NO: 150592 - protein, 9 aa, Influenza A virus
SWFNSFLTH

SEQ ID NO: 150593 - protein, 11 aa, Influenza A virus
SWFNSFLTHAL

SEQ ID NO: 150594 - protein, 11 aa, Influenza A virus
SWFNSFLTHAV

SEQ ID NO: 150595 - protein, 9 aa, Influenza A virus
SWIQNEFNK

SEQ ID NO: 150596 - protein, 9 aa, Influenza A virus
SWIQSEFNK

SEQ ID NO: 150597 - protein, 9 aa, Influenza A virus
SWKQLLAEL

SEQ ID NO: 150598 - protein, 9 aa, Influenza A virus
SWKQVLAEL

SEQ ID NO: 150599 - protein, 9 aa, Influenza A virus
SWKQVLEEL

SEQ ID NO: 150600 - protein, 8 aa, Influenza A virus
SWMELDEI

SEQ ID NO: 150601 - protein, 9 aa, Influenza A virus
SWRQVLAEL

SEQ ID NO: 150602 - protein, 9 aa, Influenza A virus
SWVQSEFNK

SEQ ID NO: 150603 - protein, 10 aa, Influenza A virus
TAIGHVSRPM

SEQ ID NO: 150604 - protein, 11 aa, Influenza A virus
TAIGHVSRPMF

SEQ ID NO: 150605 - protein, 8 aa, Influenza A virus
TAIGQAPR

SEQ ID NO: 150606 - protein, 10 aa, Influenza A virus
TAIGQVARPM

SEQ ID NO: 150607 - protein, 8 aa, Influenza A virus
TAIGQVLR

SEQ ID NO: 150608 - protein, 10 aa, Influenza A virus
TAIGQVLRPM

SEQ ID NO: 150609 - protein, 10 aa, Influenza A virus
TAIGQVSRPM

SEQ ID NO: 150610 - protein, 10 aa, Influenza A virus
TALLNASCAA

SEQ ID NO: 150611 - protein, 9 aa, Influenza A virus
TALLNASSA

SEQ ID NO: 150612 - protein, 10 aa, Influenza A virus
TALLNASSAA

SEQ ID NO: 150613 - protein, 10 aa, Influenza A virus
TAVGQVSRPI

SEQ ID NO: 150614 - protein, 10 aa, Influenza A virus
TAVGQVSRPM

SEQ ID NO: 150615 - protein, 9 aa, Influenza A virus
TDVVNFVSM

SEQ ID NO: 150616 - protein, 9 aa, Influenza A virus
TDVVTFVSM

SEQ ID NO: 150617 - protein, 10 aa, Influenza A virus
TEIGQVSRPM

SEQ ID NO: 150618 - protein, 10 aa, Influenza A virus
TEIGVTRREI

SEQ ID NO: 150619 - protein, 8 aa, Influenza A virus
TESSWIEL

SEQ ID NO: 150620 - protein, 10 aa, Influenza A virus
TEYIMKGVDI

SEQ ID NO: 150621 - protein, 9 aa, Influenza A virus
TEYIMKGVY

SEQ ID NO: 150622 - protein, 10 aa, Influenza A virus
TEYIMKGVYI

SEQ ID NO: 150623 - protein, 8 aa, Influenza A virus
TFDIGGLY

SEQ ID NO: 150624 - protein, 8 aa, Influenza A virus
TFDLGGLY

SEQ ID NO: 150625 - protein, 11 aa, Influenza A virus
TFDLGGLYEAV

SEQ ID NO: 150626 - protein, 9 aa, Influenza A virus
TFFGWKEPI

SEQ ID NO: 150627 - protein, 10 aa, Influenza A virus
TFFGWKEPTI

SEQ ID NO: 150628 - protein, 9 aa, Influenza A virus
TFFGWKEPY

SEQ ID NO: 150629 - protein, 10 aa, Influenza A virus
TFFGWKEPYV

SEQ ID NO: 150630 - protein, 10 aa, Influenza A virus
TFLYVRTNGT

SEQ ID NO: 150631 - protein, 8 aa, Influenza A virus
TFNLGGLY

SEQ ID NO: 150632 - protein, 9 aa, Influenza A virus
TFVSMEFSL

SEQ ID NO: 150633 - protein, 8 aa, Influenza A virus
TGQLKWAL

SEQ ID NO: 150634 - protein, 10 aa, Influenza A virus
TGTMRRLADY

SEQ ID NO: 150635 - protein, 10 aa, Influenza A virus
TGTMRRLANY

SEQ ID NO: 150636 - protein, 8 aa, Influenza A virus
THIHIFSF

SEQ ID NO: 150637 - protein, 9 aa, Influenza A virus
THLEACFMY

SEQ ID NO: 150638 - protein, 9 aa, Influenza A virus
THLEICFMY

SEQ ID NO: 150639 - protein, 9 aa, Influenza A virus
THLEVCFMY

SEQ ID NO: 150640 - protein, 9 aa, Influenza A virus
THMEVCFMY

SEQ ID NO: 150641 - protein, 8 aa, Influenza A virus
THMEVSFM

SEQ ID NO: 150642 - protein, 9 aa, Influenza A virus
THMEVSFMY

SEQ ID NO: 150643 - protein, 10 aa, Influenza A virus
TIAWTVINSI

SEQ ID NO: 150644 - protein, 9 aa, Influenza A virus
TIEERFEIR

SEQ ID NO: 150645 - protein, 9 aa, Influenza A virus
TIRQEMANR

SEQ ID NO: 150646 - protein, 9 aa, Influenza A virus
TIRQEMASR

SEQ ID NO: 150647 - protein, 10 aa, Influenza A virus
TKNMRKTSQL

SEQ ID NO: 150648 - protein, 11 aa, Influenza A virus
TKNMRKTSQLK

SEQ ID NO: 150649 - protein, 11 aa, Influenza A virus
TKTMKKTSQLK

SEQ ID NO: 150650 - protein, 10 aa, Influenza A virus
TLDEESRARV

SEQ ID NO: 150651 - protein, 10 aa, Influenza A virus
TLLAKSVFNC

SEQ ID NO: 150652 - protein, 11 aa, Influenza A virus
TLLAKSVFNCL

SEQ ID NO: 150653 - protein, 11 aa, Influenza A virus
TLLAKSVFNNL

SEQ ID NO: 150654 - protein, 11 aa, Influenza A virus
TLLAKSVFNSL

SEQ ID NO: 150655 - protein, 9 aa, Influenza A virus
TMAWTIVNS

SEQ ID NO: 150656 - protein, 10 aa, Influenza A virus
TMAWTIVNSI

SEQ ID NO: 150657 - protein, 9 aa, Influenza A virus
TMAWTVINS

SEQ ID NO: 150658 - protein, 10 aa, Influenza A virus
TMAWTVINSI

SEQ ID NO: 150659 - protein, 9 aa, Influenza A virus
TMAWTVVNS

SEQ ID NO: 150660 - protein, 10 aa, Influenza A virus
TMAWTVVNSI

SEQ ID NO: 150661 - protein, 10 aa, Influenza A virus
TMCRLADQSL

SEQ ID NO: 150662 - protein, 9 aa, Influenza A virus
TMKEYGEDL

SEQ ID NO: 150663 - protein, 10 aa, Influenza A virus
TMKEYGEDLK

SEQ ID NO: 150664 - protein, 9 aa, Influenza A virus
TMKEYGENL

SEQ ID NO: 150665 - protein, 10 aa, Influenza A virus
TMKEYGENLK

SEQ ID NO: 150666 - protein, 10 aa, Influenza A virus
TMKEYGENPK

SEQ ID NO: 150667 - protein, 8 aa, Influenza A virus
TMKKTSQL

SEQ ID NO: 150668 - protein, 9 aa, Influenza A virus
TMKKTSQLK

SEQ ID NO: 150669 - protein, 10 aa, Influenza A virus
TMKKTSQLKW

SEQ ID NO: 150670 - protein, 10 aa, Influenza A virus
TMRKLADQSL

SEQ ID NO: 150671 - protein, 10 aa, Influenza A virus
TMRNVADQSL

SEQ ID NO: 150672 - protein, 10 aa, Influenza A virus
TMRRLADQSL

SEQ ID NO: 150673 - protein, 10 aa, Influenza A virus
TMRRLADYSL

SEQ ID NO: 150674 - protein, 10 aa, Influenza A virus
TMRRLAEQSL

SEQ ID NO: 150675 - protein, 10 aa, Influenza A virus
TMRRLANQSL

SEQ ID NO: 150676 - protein, 8 aa, Influenza A virus
TMRRLANY

SEQ ID NO: 150677 - protein, 9 aa, Influenza A virus
TMRRLANYS

SEQ ID NO: 150678 - protein, 10 aa, Influenza A virus
TMRRLANYSL

SEQ ID NO: 150679 - protein, 11 aa, Influenza A virus
TNGTSKIKMKW

SEQ ID NO: 150680 - protein, 11 aa, Influenza A virus
TNKLAAICTHL

SEQ ID NO: 150681 - protein, 8 aa, Influenza A virus
TPRPIRLP

SEQ ID NO: 150682 - protein, 9 aa, Influenza A virus
TPRPIRLPD

SEQ ID NO: 150683 - protein, 10 aa, Influenza A virus
TPRPIRLPDG

SEQ ID NO: 150684 - protein, 9 aa, Influenza A virus
TPRPIRLPN

SEQ ID NO: 150685 - protein, 10 aa, Influenza A virus
TPRPIRLPNG

SEQ ID NO: 150686 - protein, 8 aa, Influenza A virus
TPRPLRIP

SEQ ID NO: 150687 - protein, 9 aa, Influenza A virus
TPRPLRIPG

SEQ ID NO: 150688 - protein, 10 aa, Influenza A virus
TPRPLRIPGG

SEQ ID NO: 150689 - protein, 8 aa, Influenza A virus
TPRPLRLP

SEQ ID NO: 150690 - protein, 9 aa, Influenza A virus
TPRPLRLPC

SEQ ID NO: 150691 - protein, 10 aa, Influenza A virus
TPRPLRLPCG

SEQ ID NO: 150692 - protein, 9 aa, Influenza A virus
TPRPLRLPD

SEQ ID NO: 150693 - protein, 10 aa, Influenza A virus
TPRPLRLPDG

SEQ ID NO: 150694 - protein, 9 aa, Influenza A virus
TPRPLRLPE

SEQ ID NO: 150695 - protein, 10 aa, Influenza A virus
TPRPLRLPEG

SEQ ID NO: 150696 - protein, 9 aa, Influenza A virus
TPRPLRLPG

SEQ ID NO: 150697 - protein, 10 aa, Influenza A virus
TPRPLRLPGG

SEQ ID NO: 150698 - protein, 9 aa, Influenza A virus
TPRPLRLPN

SEQ ID NO: 150699 - protein, 10 aa, Influenza A virus
TPRPLRLPNG

SEQ ID NO: 150700 - protein, 8 aa, Influenza A virus
TPRPLRTP

SEQ ID NO: 150701 - protein, 9 aa, Influenza A virus
TPRPLRTPG

SEQ ID NO: 150702 - protein, 10 aa, Influenza A virus
TPRPLRTPGG

SEQ ID NO: 150703 - protein, 9 aa, Influenza A virus
TRAEKPKFL

SEQ ID NO: 150704 - protein, 10 aa, Influenza A virus
TRLFTIRQEM

SEQ ID NO: 150705 - protein, 10 aa, Influenza A virus
TRLYTIRQEM

SEQ ID NO: 150706 - protein, 9 aa, Influenza A virus
TRRCLPHLL

SEQ ID NO: 150707 - protein, 9 aa, Influenza A virus
TRREIHIYY

SEQ ID NO: 150708 - protein, 10 aa, Influenza A virus
TRREIHIYYL

SEQ ID NO: 150709 - protein, 9 aa, Influenza A virus
TRREVHIYY

SEQ ID NO: 150710 - protein, 10 aa, Influenza A virus
TRREVHIYYL

SEQ ID NO: 150711 - protein, 9 aa, Influenza A virus
TRREVHTYY

SEQ ID NO: 150712 - protein, 10 aa, Influenza A virus
TRREVHTYYL

SEQ ID NO: 150713 - protein, 9 aa, Influenza A virus
TRREVHVYY

SEQ ID NO: 150714 - protein, 10 aa, Influenza A virus
TRREVHVYYL

SEQ ID NO: 150715 - protein, 9 aa, Influenza A virus
TRVEKPKFL

SEQ ID NO: 150716 - protein, 8 aa, Influenza A virus
TSHLKWAL

SEQ ID NO: 150717 - protein, 10 aa, Influenza A virus
TSIGQVSRPM

SEQ ID NO: 150718 - protein, 11 aa, Influenza A virus
TSIGQVSRPMF

SEQ ID NO: 150719 - protein, 8 aa, Influenza A virus
TSKIKMKW

SEQ ID NO: 150720 - protein, 8 aa, Influenza A virus
TSQLKWAL

SEQ ID NO: 150721 - protein, 9 aa, Influenza A virus
TTGVGKPKF

SEQ ID NO: 150722 - protein, 9 aa, Influenza A virus
TTGVGKPRF

SEQ ID NO: 150723 - protein, 9 aa, Influenza A virus
TTNGTSKIK

SEQ ID NO: 150724 - protein, 10 aa, Influenza A virus
TTPRPLRIPG

SEQ ID NO: 150725 - protein, 10 aa, Influenza A virus
TTPRPLRLPC

SEQ ID NO: 150726 - protein, 10 aa, Influenza A virus
TTPRPLRLPG

SEQ ID NO: 150727 - protein, 10 aa, Influenza A virus
TTPRPLRTPG

SEQ ID NO: 150728 - protein, 9 aa, Influenza A virus
TTRAEKPKF

SEQ ID NO: 150729 - protein, 9 aa, Influenza A virus
TTRVEKPKF

SEQ ID NO: 150730 - protein, 9 aa, Influenza A virus
TVAWTVVNS

SEQ ID NO: 150731 - protein, 10 aa, Influenza A virus
TVAWTVVNSI

SEQ ID NO: 150732 - protein, 9 aa, Influenza A virus
TVINSICNT

SEQ ID NO: 150733 - protein, 11 aa, Influenza A virus
TVVNSICNTTR

SEQ ID NO: 150734 - protein, 9 aa, Influenza A virus
TWKQVLAEL

SEQ ID NO: 150735 - protein, 9 aa, Influenza A virus
TYYLEKANK

SEQ ID NO: 150736 - protein, 10 aa, Influenza A virus
TYYLEKANKI

SEQ ID NO: 150737 - protein, 10 aa, Influenza A virus
VADQSLPPNF

SEQ ID NO: 150738 - protein, 10 aa, Influenza A virus
VAPIEHIAGM

SEQ ID NO: 150739 - protein, 10 aa, Influenza A virus
VAPIEHIASI

SEQ ID NO: 150740 - protein, 10 aa, Influenza A virus
VAPIEHIASM

SEQ ID NO: 150741 - protein, 10 aa, Influenza A virus
VAPIEYIASM

SEQ ID NO: 150742 - protein, 8 aa, Influenza A virus
VAQSFNPM

SEQ ID NO: 150743 - protein, 9 aa, Influenza A virus
VAQSFNPMI

SEQ ID NO: 150744 - protein, 8 aa, Influenza A virus
VARPMFLY

SEQ ID NO: 150745 - protein, 9 aa, Influenza A virus
VARPMFLYV

SEQ ID NO: 150746 - protein, 10 aa, Influenza A virus
VARPMFLYVR

SEQ ID NO: 150747 - protein, 9 aa, Influenza A virus
VAWTVVNSI

SEQ ID NO: 150748 - protein, 10 aa, Influenza A virus
VCFMYSDFHF

SEQ ID NO: 150749 - protein, 11 aa, Influenza A virus
VCFMYSDFHFI

SEQ ID NO: 150750 - protein, 11 aa, Influenza A virus
VCFMYSDFHFV

SEQ ID NO: 150751 - protein, 11 aa, Influenza A virus
VCRTLLAKSVF

SEQ ID NO: 150752 - protein, 10 aa, Influenza A virus
VEECLINDPW

SEQ ID NO: 150753 - protein, 11 aa, Influenza A virus
VEERFEITGTM

SEQ ID NO: 150754 - protein, 10 aa, Influenza A virus
VEKPKFIPDL

SEQ ID NO: 150755 - protein, 10 aa, Influenza A virus
VEKPKFLPDL

SEQ ID NO: 150756 - protein, 10 aa, Influenza A virus
VEKPKLLPDL

SEQ ID NO: 150757 - protein, 8 aa, Influenza A virus
VELAERAM

SEQ ID NO: 150758 - protein, 9 aa, Influenza A virus
VELDDPNAL

SEQ ID NO: 150759 - protein, 10 aa, Influenza A virus
VELDDPNALL

SEQ ID NO: 150760 - protein, 9 aa, Influenza A virus
VELGDPNAL

SEQ ID NO: 150761 - protein, 10 aa, Influenza A virus
VELGDPNALL

SEQ ID NO: 150762 - protein, 9 aa, Influenza A virus
VELGDPSAL

SEQ ID NO: 150763 - protein, 10 aa, Influenza A virus
VELGDPSALL

SEQ ID NO: 150764 - protein, 10 aa, Influenza A virus
VEPEDPNALL

SEQ ID NO: 150765 - protein, 9 aa, Influenza A virus
VEPGDSNAL

SEQ ID NO: 150766 - protein, 10 aa, Influenza A virus
VEPGDSNALL

SEQ ID NO: 150767 - protein, 9 aa, Influenza A virus
VESGDPNAL

SEQ ID NO: 150768 - protein, 10 aa, Influenza A virus
VESGDPNALL

SEQ ID NO: 150769 - protein, 11 aa, Influenza A virus
VESMVEAESSV

SEQ ID NO: 150770 - protein, 9 aa, Influenza A virus
VESSDPNAL

SEQ ID NO: 150771 - protein, 10 aa, Influenza A virus
VESSDPNALL

SEQ ID NO: 150772 - protein, 9 aa, Influenza A virus
VETNKFAAI

SEQ ID NO: 150773 - protein, 9 aa, Influenza A virus
VEVGDPNAL

SEQ ID NO: 150774 - protein, 10 aa, Influenza A virus
VEVGDPNALL

SEQ ID NO: 150775 - protein, 11 aa, Influenza A virus
VFNSLYASPQL

SEQ ID NO: 150776 - protein, 11 aa, Influenza A virus
VFNSLYSSPQL

SEQ ID NO: 150777 - protein, 10 aa, Influenza A virus
VGDMLLRSAI

SEQ ID NO: 150778 - protein, 8 aa, Influenza A virus
VGDPNALL

SEQ ID NO: 150779 - protein, 10 aa, Influenza A virus
VGKPRFLPDL

SEQ ID NO: 150780 - protein, 11 aa, Influenza A virus
VGQVSRPIFLY

SEQ ID NO: 150781 - protein, 11 aa, Influenza A virus
VGQVSRPMFLY

SEQ ID NO: 150782 - protein, 9 aa, Influenza A virus
VHEIGDMLL

SEQ ID NO: 150783 - protein, 9 aa, Influenza A virus
VHIYYLEKA

SEQ ID NO: 150784 - protein, 8 aa, Influenza A virus
VIKGRSHL

SEQ ID NO: 150785 - protein, 9 aa, Influenza A virus
VIKGRSHLR

SEQ ID NO: 150786 - protein, 11 aa, Influenza A virus
VINSICNTTGV

SEQ ID NO: 150787 - protein, 9 aa, Influenza A virus
VIPMISKCR

SEQ ID NO: 150788 - protein, 10 aa, Influenza A virus
VKEKDMTREF

SEQ ID NO: 150789 - protein, 10 aa, Influenza A virus
VKNMKKTSPL

SEQ ID NO: 150790 - protein, 11 aa, Influenza A virus
VKNMKKTSPLK

SEQ ID NO: 150791 - protein, 10 aa, Influenza A virus
VKPHEKGINL

SEQ ID NO: 150792 - protein, 11 aa, Influenza A virus
VKSEKTHIHIF

SEQ ID NO: 150793 - protein, 10 aa, Influenza A virus
VLAEIQDIES

SEQ ID NO: 150794 - protein, 10 aa, Influenza A virus
VLAELQDIET

SEQ ID NO: 150795 - protein, 8 aa, Influenza A virus
VLAELQYI

SEQ ID NO: 150796 - protein, 9 aa, Influenza A virus
VLEIGDMIL

SEQ ID NO: 150797 - protein, 10 aa, Influenza A virus
VLEIGDMILR

SEQ ID NO: 150798 - protein, 9 aa, Influenza A virus
VLEIGDMLI

SEQ ID NO: 150799 - protein, 9 aa, Influenza A virus
VLEIGDMLL

SEQ ID NO: 150800 - protein, 10 aa, Influenza A virus
VLEIGDMLLR

SEQ ID NO: 150801 - protein, 9 aa, Influenza A virus
VLEIGEMLL

SEQ ID NO: 150802 - protein, 10 aa, Influenza A virus
VLEIGEMLLR

SEQ ID NO: 150803 - protein, 9 aa, Influenza A virus
VLEVGDMLL

SEQ ID NO: 150804 - protein, 10 aa, Influenza A virus
VLEVGDMLLR

SEQ ID NO: 150805 - protein, 10 aa, Influenza A virus
VLLNASWFNS

SEQ ID NO: 150806 - protein, 11 aa, Influenza A virus
VLLNASWFNSF

SEQ ID NO: 150807 - protein, 9 aa, Influenza A virus
VLRIGDMLL

SEQ ID NO: 150808 - protein, 10 aa, Influenza A virus
VLRIGDMLLR

SEQ ID NO: 150809 - protein, 8 aa, Influenza A virus
VLRPMFLY

SEQ ID NO: 150810 - protein, 9 aa, Influenza A virus
VLRPMFLYV

SEQ ID NO: 150811 - protein, 10 aa, Influenza A virus
VLRPMFLYVR

SEQ ID NO: 150812 - protein, 11 aa, Influenza A virus
VLRPMFLYVRT

SEQ ID NO: 150813 - protein, 9 aa, Influenza A virus
VLRTAIGQV

SEQ ID NO: 150814 - protein, 10 aa, Influenza A virus
VLRTAIGQVA

SEQ ID NO: 150815 - protein, 11 aa, Influenza A virus
VLRTAIGQVAR

SEQ ID NO: 150816 - protein, 9 aa, Influenza A virus
VMMMDALKL

SEQ ID NO: 150817 - protein, 11 aa, Influenza A virus
VMMMDALKLSI

SEQ ID NO: 150818 - protein, 10 aa, Influenza A virus
VNARIDPFLR

SEQ ID NO: 150819 - protein, 10 aa, Influenza A virus
VNARIEPFFK

SEQ ID NO: 150820 - protein, 10 aa, Influenza A virus
VNARIEPFLK

SEQ ID NO: 150821 - protein, 10 aa, Influenza A virus
VNARIEPFLR

SEQ ID NO: 150822 - protein, 8 aa, Influenza A virus
VNFVSMEF

SEQ ID NO: 150823 - protein, 10 aa, Influenza A virus
VNSICNTTGV

SEQ ID NO: 150824 - protein, 9 aa, Influenza A virus
VNSICNTTR

SEQ ID NO: 150825 - protein, 10 aa, Influenza A virus
VNTRIEPFSK

SEQ ID NO: 150826 - protein, 8 aa, Influenza A virus
VNYVSMEF

SEQ ID NO: 150827 - protein, 10 aa, Influenza A virus
VNYVSMEFSL

SEQ ID NO: 150828 - protein, 11 aa, Influenza A virus
VQSEFNKACEL

SEQ ID NO: 150829 - protein, 10 aa, Influenza A virus
VRCMKTFFGW

SEQ ID NO: 150830 - protein, 11 aa, Influenza A virus
VRCMKTFFGWK

SEQ ID NO: 150831 - protein, 9 aa, Influenza A virus
VRQCFNPII

SEQ ID NO: 150832 - protein, 10 aa, Influenza A virus
VRQCFNPIIV

SEQ ID NO: 150833 - protein, 9 aa, Influenza A virus
VRQCFNPMI

SEQ ID NO: 150834 - protein, 10 aa, Influenza A virus
VRQCFNPMII

SEQ ID NO: 150835 - protein, 10 aa, Influenza A virus
VRQCFNPMIV

SEQ ID NO: 150836 - protein, 9 aa, Influenza A virus
VRQCFNPMV

SEQ ID NO: 150837 - protein, 10 aa, Influenza A virus
VRQCFNPMVV

SEQ ID NO: 150838 - protein, 9 aa, Influenza A virus
VRTNGTSKI

SEQ ID NO: 150839 - protein, 8 aa, Influenza A virus
VSDLKQYY

SEQ ID NO: 150840 - protein, 8 aa, Influenza A virus
VSFMYSDF

SEQ ID NO: 150841 - protein, 10 aa, Influenza A virus
VSFMYSDFHF

SEQ ID NO: 150842 - protein, 11 aa, Influenza A virus
VSFMYSDFHFI

SEQ ID NO: 150843 - protein, 9 aa, Influenza A virus
VSHCRATEY

SEQ ID NO: 150844 - protein, 11 aa, Influenza A virus
VSMEFSLTDPR

SEQ ID NO: 150845 - protein, 9 aa, Influenza A virus
VSQCRATEY

SEQ ID NO: 150846 - protein, 9 aa, Influenza A virus
VSRCRATEY

SEQ ID NO: 150847 - protein, 10 aa, Influenza A virus
VSRCRATEYI

SEQ ID NO: 150848 - protein, 8 aa, Influenza A virus
VSRPIFLY

SEQ ID NO: 150849 - protein, 9 aa, Influenza A virus
VSRPIFLYV

SEQ ID NO: 150850 - protein, 10 aa, Influenza A virus
VSRPIFLYVR

SEQ ID NO: 150851 - protein, 11 aa, Influenza A virus
VSRPIFLYVRT

SEQ ID NO: 150852 - protein, 8 aa, Influenza A virus
VSRPMFLY

SEQ ID NO: 150853 - protein, 9 aa, Influenza A virus
VSRPMFLYM

SEQ ID NO: 150854 - protein, 10 aa, Influenza A virus
VSRPMFLYMR

SEQ ID NO: 150855 - protein, 9 aa, Influenza A virus
VSRPMFLYV

SEQ ID NO: 150856 - protein, 10 aa, Influenza A virus
VSRPMFLYVR

SEQ ID NO: 150857 - protein, 10 aa, Influenza A virus
VSRPMFLYVT

SEQ ID NO: 150858 - protein, 8 aa, Influenza A virus
VTFVSMEF

SEQ ID NO: 150859 - protein, 10 aa, Influenza A virus
VTFVSMEFSL

SEQ ID NO: 150860 - protein, 9 aa, Influenza A virus
VTKEFFENK

SEQ ID NO: 150861 - protein, 9 aa, Influenza A virus
VTRREIHIY

SEQ ID NO: 150862 - protein, 10 aa, Influenza A virus
VTRREIHIYY

SEQ ID NO: 150863 - protein, 11 aa, Influenza A virus
VTRREIHIYYL

SEQ ID NO: 150864 - protein, 9 aa, Influenza A virus
VTRREVHIY

SEQ ID NO: 150865 - protein, 10 aa, Influenza A virus
VTRREVHIYY

SEQ ID NO: 150866 - protein, 11 aa, Influenza A virus
VTRREVHIYYL

SEQ ID NO: 150867 - protein, 9 aa, Influenza A virus
VTRREVHTY

SEQ ID NO: 150868 - protein, 10 aa, Influenza A virus
VTRREVHTYY

SEQ ID NO: 150869 - protein, 11 aa, Influenza A virus
VTRREVHTYYL

SEQ ID NO: 150870 - protein, 9 aa, Influenza A virus
VTRREVHVY

SEQ ID NO: 150871 - protein, 10 aa, Influenza A virus
VTRREVHVYY

SEQ ID NO: 150872 - protein, 11 aa, Influenza A virus
VTRREVHVYYL

SEQ ID NO: 150873 - protein, 9 aa, Influenza A virus
VTTNGTSKI

SEQ ID NO: 150874 - protein, 10 aa, Influenza A virus
VTTNGTSKIK

SEQ ID NO: 150875 - protein, 10 aa, Influenza A virus
VVELAEKAMK

SEQ ID NO: 150876 - protein, 10 aa, Influenza A virus
VVELDDPNAL

SEQ ID NO: 150877 - protein, 11 aa, Influenza A virus
VVELDDPNALL

SEQ ID NO: 150878 - protein, 10 aa, Influenza A virus
VVELGDPNAL

SEQ ID NO: 150879 - protein, 11 aa, Influenza A virus
VVELGDPNALL

SEQ ID NO: 150880 - protein, 9 aa, Influenza A virus
VVNFVSMEF

SEQ ID NO: 150881 - protein, 11 aa, Influenza A virus
VVNSICNTTGV

SEQ ID NO: 150882 - protein, 10 aa, Influenza A virus
VVNSICNTTR

SEQ ID NO: 150883 - protein, 9 aa, Influenza A virus
VVNYVSMEF

SEQ ID NO: 150884 - protein, 11 aa, Influenza A virus
VVNYVSMEFSL

SEQ ID NO: 150885 - protein, 9 aa, Influenza A virus
VVTFVSMEF

SEQ ID NO: 150886 - protein, 9 aa, Influenza A virus
VWKQVLAEL

SEQ ID NO: 150887 - protein, 8 aa, Influenza A virus
VYINSALL

SEQ ID NO: 150888 - protein, 10 aa, Influenza A virus
VYINSALLNA

SEQ ID NO: 150889 - protein, 8 aa, Influenza A virus
VYINTALL

SEQ ID NO: 150890 - protein, 9 aa, Influenza A virus
VYYLEKANK

SEQ ID NO: 150891 - protein, 10 aa, Influenza A virus
VYYLEKANKI

SEQ ID NO: 150892 - protein, 9 aa, Influenza A virus
WEKYCILEI

SEQ ID NO: 150893 - protein, 9 aa, Influenza A virus
WEKYCVHEI

SEQ ID NO: 150894 - protein, 9 aa, Influenza A virus
WEKYCVLEI

SEQ ID NO: 150895 - protein, 9 aa, Influenza A virus
WEKYCVLEV

SEQ ID NO: 150896 - protein, 9 aa, Influenza A virus
WEKYCVLRI

SEQ ID NO: 150897 - protein, 9 aa, Influenza A virus
WEKYSILEI

SEQ ID NO: 150898 - protein, 9 aa, Influenza A virus
WERSCVLEI

SEQ ID NO: 150899 - protein, 9 aa, Influenza A virus
WERYCVLEI

SEQ ID NO: 150900 - protein, 10 aa, Influenza A virus
WFNSFLAHAL

SEQ ID NO: 150901 - protein, 11 aa, Influenza A virus
WFNSFLAHALK

SEQ ID NO: 150902 - protein, 9 aa, Influenza A virus
WFNSFLAHV

SEQ ID NO: 150903 - protein, 10 aa, Influenza A virus
WFNSFLAHVL

SEQ ID NO: 150904 - protein, 11 aa, Influenza A virus
WFNSFLAHVLK

SEQ ID NO: 150905 - protein, 10 aa, Influenza A virus
WFNSFLTHAL

SEQ ID NO: 150906 - protein, 11 aa, Influenza A virus
WFNSFLTHALK

SEQ ID NO: 150907 - protein, 11 aa, Influenza A virus
WFNSFLTHALR

SEQ ID NO: 150908 - protein, 10 aa, Influenza A virus
WFNSFLTHAV

SEQ ID NO: 150909 - protein, 11 aa, Influenza A virus
WFNSFLTHAVK

SEQ ID NO: 150910 - protein, 9 aa, Influenza A virus
WGMEIRRCL

SEQ ID NO: 150911 - protein, 10 aa, Influenza A virus
WGMEIRRCLL

SEQ ID NO: 150912 - protein, 9 aa, Influenza A virus
WGMEMRPCL

SEQ ID NO: 150913 - protein, 10 aa, Influenza A virus
WGMEMRPCLL

SEQ ID NO: 150914 - protein, 9 aa, Influenza A virus
WGMEMRRCL

SEQ ID NO: 150915 - protein, 10 aa, Influenza A virus
WGMEMRRCLL

SEQ ID NO: 150916 - protein, 10 aa, Influenza A virus
WGMEMRRCPF

SEQ ID NO: 150917 - protein, 9 aa, Influenza A virus
WGMETRRCL

SEQ ID NO: 150918 - protein, 11 aa, Influenza A virus
WIELDEIGENV

SEQ ID NO: 150919 - protein, 10 aa, Influenza A virus
WKQVLAELQY

SEQ ID NO: 150920 - protein, 11 aa, Influenza A virus
WKQVLAELQYI

SEQ ID NO: 150921 - protein, 9 aa, Influenza A virus
WPIGESPEG

SEQ ID NO: 150922 - protein, 10 aa, Influenza A virus
WPIGESPEGV

SEQ ID NO: 150923 - protein, 10 aa, Influenza A virus
WPIGESPKGM

SEQ ID NO: 150924 - protein, 10 aa, Influenza A virus
WPIGESPNGV

SEQ ID NO: 150925 - protein, 8 aa, Influenza A virus
WRQVLAEL

SEQ ID NO: 150926 - protein, 11 aa, Influenza A virus
WRQVLAELQDI

SEQ ID NO: 150927 - protein, 10 aa, Influenza A virus
WTIGESPKGV

SEQ ID NO: 150928 - protein, 9 aa, Influenza A virus
YASAQLEGF

SEQ ID NO: 150929 - protein, 9 aa, Influenza A virus
YASPQLEGF

SEQ ID NO: 150930 - protein, 11 aa, Influenza A virus
YASPQLEGFSA

SEQ ID NO: 150931 - protein, 10 aa, Influenza A virus
YCILEIGDML

SEQ ID NO: 150932 - protein, 11 aa, Influenza A virus
YCILEIGDMLL

SEQ ID NO: 150933 - protein, 10 aa, Influenza A virus
YCILEIGDMV

SEQ ID NO: 150934 - protein, 10 aa, Influenza A virus
YCVHEIGDML

SEQ ID NO: 150935 - protein, 11 aa, Influenza A virus
YCVHEIGDMLL

SEQ ID NO: 150936 - protein, 10 aa, Influenza A virus
YCVLEIGDMI

SEQ ID NO: 150937 - protein, 10 aa, Influenza A virus
YCVLEIGDML

SEQ ID NO: 150938 - protein, 11 aa, Influenza A virus
YCVLEIGDMLL

SEQ ID NO: 150939 - protein, 9 aa, Influenza A virus
YCVLEIGEM

SEQ ID NO: 150940 - protein, 10 aa, Influenza A virus
YCVLEIGEML

SEQ ID NO: 150941 - protein, 11 aa, Influenza A virus
YCVLEIGEMLL

SEQ ID NO: 150942 - protein, 10 aa, Influenza A virus
YCVLEVGDML

SEQ ID NO: 150943 - protein, 11 aa, Influenza A virus
YCVLEVGDMLL

SEQ ID NO: 150944 - protein, 11 aa, Influenza A virus
YCVLRIGDMLL

SEQ ID NO: 150945 - protein, 10 aa, Influenza A virus
YDAIKCIRTF

SEQ ID NO: 150946 - protein, 10 aa, Influenza A virus
YDAIKCMKTF

SEQ ID NO: 150947 - protein, 10 aa, Influenza A virus
YDAIKCMRTF

SEQ ID NO: 150948 - protein, 10 aa, Influenza A virus
YDAINCMKTF

SEQ ID NO: 150949 - protein, 10 aa, Influenza A virus
YDAIRCMKTF

SEQ ID NO: 150950 - protein, 10 aa, Influenza A virus
YDAVRCMKTF

SEQ ID NO: 150951 - protein, 9 aa, Influenza A virus
YDYKKNRFI

SEQ ID NO: 150952 - protein, 8 aa, Influenza A virus
YEAIEECL

SEQ ID NO: 150953 - protein, 9 aa, Influenza A virus
YEAIEECLI

SEQ ID NO: 150954 - protein, 8 aa, Influenza A virus
YEAVEECL

SEQ ID NO: 150955 - protein, 9 aa, Influenza A virus
YEAVEECLI

SEQ ID NO: 150956 - protein, 8 aa, Influenza A virus
YESIEECL

SEQ ID NO: 150957 - protein, 9 aa, Influenza A virus
YESIEECLI

SEQ ID NO: 150958 - protein, 10 aa, Influenza A virus
YFTAEVSHCR

SEQ ID NO: 150959 - protein, 10 aa, Influenza A virus
YFTAEVSQCR

SEQ ID NO: 150960 - protein, 10 aa, Influenza A virus
YFTAEVSRCR

SEQ ID NO: 150961 - protein, 10 aa, Influenza A virus
YFTSEVSHCR

SEQ ID NO: 150962 - protein, 8 aa, Influenza A virus
YHSDEPEL

SEQ ID NO: 150963 - protein, 11 aa, Influenza A virus
YHSDEPELRSL

SEQ ID NO: 150964 - protein, 9 aa, Influenza A virus
YIASMRRNY

SEQ ID NO: 150965 - protein, 10 aa, Influenza A virus
YIASMRRNYF

SEQ ID NO: 150966 - protein, 9 aa, Influenza A virus
YIEGKLSQM

SEQ ID NO: 150967 - protein, 10 aa, Influenza A virus
YIENEEKIPK

SEQ ID NO: 150968 - protein, 10 aa, Influenza A virus
YIMKGVDINT

SEQ ID NO: 150969 - protein, 11 aa, Influenza A virus
YIMKGVDINTA

SEQ ID NO: 150970 - protein, 8 aa, Influenza A virus
YIMKGVYI

SEQ ID NO: 150971 - protein, 11 aa, Influenza A virus
YIMKGVYINSA

SEQ ID NO: 150972 - protein, 10 aa, Influenza A virus
YIMKGVYINT

SEQ ID NO: 150973 - protein, 11 aa, Influenza A virus
YIMKGVYINTA

SEQ ID NO: 150974 - protein, 9 aa, Influenza A virus
YINSALLNA

SEQ ID NO: 150975 - protein, 9 aa, Influenza A virus
YINTALLNA

SEQ ID NO: 150976 - protein, 9 aa, Influenza A virus
YKENRFVEI

SEQ ID NO: 150977 - protein, 9 aa, Influenza A virus
YKGNRFIEI

SEQ ID NO: 150978 - protein, 9 aa, Influenza A virus
YKKNRFIEI

SEQ ID NO: 150979 - protein, 9 aa, Influenza A virus
YKWEKYCVL

SEQ ID NO: 150980 - protein, 8 aa, Influenza A virus
YLEKANKV

SEQ ID NO: 150981 - protein, 8 aa, Influenza A virus
YLLAWKQV

SEQ ID NO: 150982 - protein, 9 aa, Influenza A virus
YLLAWKQVL

SEQ ID NO: 150983 - protein, 10 aa, Influenza A virus
YLLAWKQVLA

SEQ ID NO: 150984 - protein, 11 aa, Influenza A virus
YLLAWKQVLAE

SEQ ID NO: 150985 - protein, 10 aa, Influenza A virus
YLLAWKQVQA

SEQ ID NO: 150986 - protein, 8 aa, Influenza A virus
YLLAWNQV

SEQ ID NO: 150987 - protein, 9 aa, Influenza A virus
YLLAWNQVL

SEQ ID NO: 150988 - protein, 10 aa, Influenza A virus
YLLAWNQVLA

SEQ ID NO: 150989 - protein, 11 aa, Influenza A virus
YLLAWNQVLAE

SEQ ID NO: 150990 - protein, 8 aa, Influenza A virus
YLLSWKQL

SEQ ID NO: 150991 - protein, 9 aa, Influenza A virus
YLLSWKQLL

SEQ ID NO: 150992 - protein, 10 aa, Influenza A virus
YLLSWKQLLA

SEQ ID NO: 150993 - protein, 11 aa, Influenza A virus
YLLSWKQLLAE

SEQ ID NO: 150994 - protein, 8 aa, Influenza A virus
YLLSWKQV

SEQ ID NO: 150995 - protein, 9 aa, Influenza A virus
YLLSWKQVL

SEQ ID NO: 150996 - protein, 10 aa, Influenza A virus
YLLSWKQVLA

SEQ ID NO: 150997 - protein, 11 aa, Influenza A virus
YLLSWKQVLAE

SEQ ID NO: 150998 - protein, 10 aa, Influenza A virus
YLLSWKQVLE

SEQ ID NO: 150999 - protein, 8 aa, Influenza A virus
YLLSWRQV

SEQ ID NO: 151000 - protein, 9 aa, Influenza A virus
YLLSWRQVL

SEQ ID NO: 151001 - protein, 10 aa, Influenza A virus
YLLSWRQVLA

SEQ ID NO: 151002 - protein, 11 aa, Influenza A virus
YLLSWRQVLAE

SEQ ID NO: 151003 - protein, 8 aa, Influenza A virus
YLLTWKQV

SEQ ID NO: 151004 - protein, 9 aa, Influenza A virus
YLLTWKQVL

SEQ ID NO: 151005 - protein, 10 aa, Influenza A virus
YLLTWKQVLA

SEQ ID NO: 151006 - protein, 8 aa, Influenza A virus
YLLVWKQV

SEQ ID NO: 151007 - protein, 9 aa, Influenza A virus
YLLVWKQVL

SEQ ID NO: 151008 - protein, 10 aa, Influenza A virus
YLLVWKQVLA

SEQ ID NO: 151009 - protein, 8 aa, Influenza A virus
YLMAWKQV

SEQ ID NO: 151010 - protein, 9 aa, Influenza A virus
YLMAWKQVL

SEQ ID NO: 151011 - protein, 10 aa, Influenza A virus
YLMAWKQVLA

SEQ ID NO: 151012 - protein, 11 aa, Influenza A virus
YLMAWKQVLAE

SEQ ID NO: 151013 - protein, 8 aa, Influenza A virus
YLQAWKQV

SEQ ID NO: 151014 - protein, 9 aa, Influenza A virus
YLQAWKQVL

SEQ ID NO: 151015 - protein, 10 aa, Influenza A virus
YLQAWKQVLA

SEQ ID NO: 151016 - protein, 8 aa, Influenza A virus
YLQSWKQV

SEQ ID NO: 151017 - protein, 9 aa, Influenza A virus
YLQSWKQVL

SEQ ID NO: 151018 - protein, 10 aa, Influenza A virus
YLQSWKQVLA

SEQ ID NO: 151019 - protein, 9 aa, Influenza A virus
YMRTNGTSK

SEQ ID NO: 151020 - protein, 10 aa, Influenza A virus
YMRTNGTSKI

SEQ ID NO: 151021 - protein, 8 aa, Influenza A virus
YQRSKFLL

SEQ ID NO: 151022 - protein, 9 aa, Influenza A virus
YQRSKFLLM

SEQ ID NO: 151023 - protein, 10 aa, Influenza A virus
YQRSKFLLMD

SEQ ID NO: 151024 - protein, 9 aa, Influenza A virus
YRENRFIEI

SEQ ID NO: 151025 - protein, 10 aa, Influenza A virus
YSDEPELRSI

SEQ ID NO: 151026 - protein, 10 aa, Influenza A virus
YSDEPELRSL

SEQ ID NO: 151027 - protein, 10 aa, Influenza A virus
YSDFHFIDER

SEQ ID NO: 151028 - protein, 10 aa, Influenza A virus
YSDFHFINEL

SEQ ID NO: 151029 - protein, 10 aa, Influenza A virus
YSDFHFINER

SEQ ID NO: 151030 - protein, 10 aa, Influenza A virus
YSDFHFVDER

SEQ ID NO: 151031 - protein, 9 aa, Influenza A virus
YSILEIGDM

SEQ ID NO: 151032 - protein, 10 aa, Influenza A virus
YSILEIGDMV

SEQ ID NO: 151033 - protein, 11 aa, Influenza A virus
YSILEIGDMVL

SEQ ID NO: 151034 - protein, 10 aa, Influenza A virus
YSLPPNFSSL

SEQ ID NO: 151035 - protein, 9 aa, Influenza A virus
YSSPQLEGF

SEQ ID NO: 151036 - protein, 11 aa, Influenza A virus
YSSPQLEGFSA

SEQ ID NO: 151037 - protein, 10 aa, Influenza A virus
YTIRQEMASR

SEQ ID NO: 151038 - protein, 10 aa, Influenza A virus
YTLDDESRAR

SEQ ID NO: 151039 - protein, 10 aa, Influenza A virus
YTLDEESRAR

SEQ ID NO: 151040 - protein, 10 aa, Influenza A virus
YVDGFEPNGY

SEQ ID NO: 151041 - protein, 11 aa, Influenza A virus
YVDGFEPNGYI

SEQ ID NO: 151042 - protein, 10 aa, Influenza A virus
YVDGFKPNGY

SEQ ID NO: 151043 - protein, 11 aa, Influenza A virus
YVDGFKPNGYI

SEQ ID NO: 151044 - protein, 9 aa, Influenza A virus
YVRTNGTSK

SEQ ID NO: 151045 - protein, 9 aa, Influenza A virus
YVSMEFSLT

SEQ ID NO: 151046 - protein, 9 aa, Influenza A virus
YVTTNGTSK

SEQ ID NO: 151047 - protein, 10 aa, Influenza A virus
YVVKPHDKGI

SEQ ID NO: 151048 - protein, 10 aa, Influenza A virus
YVVKPHEKGI

SEQ ID NO: 151049 - protein, 9 aa, Influenza A virus
YYLEKANKI

SEQ ID NO: 151050 - protein, 9 aa, Influenza A virus
YYLEKANKV

SEQ ID NO: 151051 - protein, 8 aa, Influenza A virus
YYSDEPEL

SEQ ID NO: 151052 - protein, 9 aa, Influenza A virus
YYSDEPELR

SEQ ID NO: 151053 - protein, 11 aa, Influenza A virus
YYSDEPELRSI

SEQ ID NO: 151054 - protein, 11 aa, Influenza A virus
YYSDEPELRSL

SEQ ID NO: 151055 - protein, 9 aa, Influenza A virus
AALKASFLK

SEQ ID NO: 151056 - protein, 9 aa, Influenza A virus
AALRASFLK

SEQ ID NO: 151057 - protein, 10 aa, Influenza A virus
AALRASFLKC

SEQ ID NO: 151058 - protein, 11 aa, Influenza A virus
AALRASFLKCR

SEQ ID NO: 151059 - protein, 9 aa, Influenza A virus
AALRVSFLK

SEQ ID NO: 151060 - protein, 10 aa, Influenza A virus
AALRVSFLKC

SEQ ID NO: 151061 - protein, 10 aa, Influenza A virus
ADSQTKVSHR

SEQ ID NO: 151062 - protein, 9 aa, Influenza A virus
AFRRTSPAL

SEQ ID NO: 151063 - protein, 10 aa, Influenza A virus
AFRRTSPALR

SEQ ID NO: 151064 - protein, 10 aa, Influenza A virus
AGLPITVSHR

SEQ ID NO: 151065 - protein, 10 aa, Influenza A virus
AGLPNKVSHR

SEQ ID NO: 151066 - protein, 9 aa, Influenza A virus
AGLPTKVFR

SEQ ID NO: 151067 - protein, 10 aa, Influenza A virus
AGLPTKVFRR

SEQ ID NO: 151068 - protein, 10 aa, Influenza A virus
AGLPTKVSHR

SEQ ID NO: 151069 - protein, 9 aa, Influenza A virus
AGLPTKVSR

SEQ ID NO: 151070 - protein, 10 aa, Influenza A virus
AGLPTKVSRR

SEQ ID NO: 151071 - protein, 9 aa, Influenza A virus
AGLQTKVSR

SEQ ID NO: 151072 - protein, 10 aa, Influenza A virus
AGLQTKVSRR

SEQ ID NO: 151073 - protein, 9 aa, Influenza A virus
AGSLIKAFR

SEQ ID NO: 151074 - protein, 10 aa, Influenza A virus
AGSLIKAFRR

SEQ ID NO: 151075 - protein, 9 aa, Influenza A virus
AGSLTKAFR

SEQ ID NO: 151076 - protein, 10 aa, Influenza A virus
AGSLTKAFRR

SEQ ID NO: 151077 - protein, 9 aa, Influenza A virus
AGSLTKASR

SEQ ID NO: 151078 - protein, 10 aa, Influenza A virus
AGSLTKASRR

SEQ ID NO: 151079 - protein, 9 aa, Influenza A virus
AGSLTKVSR

SEQ ID NO: 151080 - protein, 10 aa, Influenza A virus
AGSLTKVSRR

SEQ ID NO: 151081 - protein, 10 aa, Influenza A virus
AGSPTKVSHR

SEQ ID NO: 151082 - protein, 9 aa, Influenza A virus
AGSPTKVSR

SEQ ID NO: 151083 - protein, 10 aa, Influenza A virus
AGSPTKVSRR

SEQ ID NO: 151084 - protein, 8 aa, Influenza A virus
ALKASFLK

SEQ ID NO: 151085 - protein, 11 aa, Influenza A virus
ALKASFLKCPK

SEQ ID NO: 151086 - protein, 8 aa, Influenza A virus
ALRASFLK

SEQ ID NO: 151087 - protein, 9 aa, Influenza A virus
ALRASFLKC

SEQ ID NO: 151088 - protein, 11 aa, Influenza A virus
ALRASFLKCPK

SEQ ID NO: 151089 - protein, 11 aa, Influenza A virus
ALRASFLKCPR

SEQ ID NO: 151090 - protein, 11 aa, Influenza A virus
ALRASFLKCQK

SEQ ID NO: 151091 - protein, 10 aa, Influenza A virus
ALRASFLKCR

SEQ ID NO: 151092 - protein, 11 aa, Influenza A virus
ALRASFLKCRK

SEQ ID NO: 151093 - protein, 9 aa, Influenza A virus
ALRILEPMW

SEQ ID NO: 151094 - protein, 10 aa, Influenza A virus
ALRILEPMWM

SEQ ID NO: 151095 - protein, 8 aa, Influenza A virus
ALRVSFLK

SEQ ID NO: 151096 - protein, 11 aa, Influenza A virus
ALRVSFLKCPK

SEQ ID NO: 151097 - protein, 9 aa, Influenza A virus
ASCLKCPKK

SEQ ID NO: 151098 - protein, 9 aa, Influenza A virus
ASFLKCPKK

SEQ ID NO: 151099 - protein, 8 aa, Influenza A virus
ASFLKCPR

SEQ ID NO: 151100 - protein, 9 aa, Influenza A virus
ASFLKCPRK

SEQ ID NO: 151101 - protein, 9 aa, Influenza A virus
ASFLKCQKK

SEQ ID NO: 151102 - protein, 9 aa, Influenza A virus
ASFLKCQKR

SEQ ID NO: 151103 - protein, 9 aa, Influenza A virus
ASFLKCRKK

SEQ ID NO: 151104 - protein, 9 aa, Influenza A virus
ASFPKCLEK

SEQ ID NO: 151105 - protein, 9 aa, Influenza A virus
ASLPTKVSR

SEQ ID NO: 151106 - protein, 10 aa, Influenza A virus
ASLPTKVSRR

SEQ ID NO: 151107 - protein, 10 aa, Influenza A virus
ASPREAKRQL

SEQ ID NO: 151108 - protein, 10 aa, Influenza A virus
ASRGLWDSFA

SEQ ID NO: 151109 - protein, 10 aa, Influenza A virus
ASRGLWDSFI

SEQ ID NO: 151110 - protein, 10 aa, Influenza A virus
ASRGLWDSFV

SEQ ID NO: 151111 - protein, 8 aa, Influenza A virus
ASRRTSPA

SEQ ID NO: 151112 - protein, 9 aa, Influenza A virus
ASRRTSPAL

SEQ ID NO: 151113 - protein, 10 aa, Influenza A virus
ASRRTSPALR

SEQ ID NO: 151114 - protein, 11 aa, Influenza A virus
ASRRTSPALRI

SEQ ID NO: 151115 - protein, 9 aa, Influenza A virus
ASSPTKVSR

SEQ ID NO: 151116 - protein, 10 aa, Influenza A virus
ASSPTKVSRR

SEQ ID NO: 151117 - protein, 9 aa, Influenza A virus
ATLRASCLK

SEQ ID NO: 151118 - protein, 10 aa, Influenza A virus
ATLRASCLKC

SEQ ID NO: 151119 - protein, 9 aa, Influenza A virus
ATLRASFLK

SEQ ID NO: 151120 - protein, 10 aa, Influenza A virus
ATLRASFLKC

SEQ ID NO: 151121 - protein, 9 aa, Influenza A virus
ATLRASFPK

SEQ ID NO: 151122 - protein, 10 aa, Influenza A virus
ATLRASFPKC

SEQ ID NO: 151123 - protein, 9 aa, Influenza A virus
ATSPTKVSR

SEQ ID NO: 151124 - protein, 10 aa, Influenza A virus
ATSPTKVSRR

SEQ ID NO: 151125 - protein, 9 aa, Influenza A virus
AVLRASFLK

SEQ ID NO: 151126 - protein, 10 aa, Influenza A virus
AVLRASFLKC

SEQ ID NO: 151127 - protein, 9 aa, Influenza A virus
CAGLPTKVF

SEQ ID NO: 151128 - protein, 10 aa, Influenza A virus
CAGLPTKVFR

SEQ ID NO: 151129 - protein, 11 aa, Influenza A virus
CAGLPTKVFRR

SEQ ID NO: 151130 - protein, 10 aa, Influenza A virus
CAGLPTKVSR

SEQ ID NO: 151131 - protein, 10 aa, Influenza A virus
CAGLQTKVSR

SEQ ID NO: 151132 - protein, 9 aa, Influenza A virus
CAGSLIKAF

SEQ ID NO: 151133 - protein, 10 aa, Influenza A virus
CAGSLIKAFR

SEQ ID NO: 151134 - protein, 11 aa, Influenza A virus
CAGSLIKAFRR

SEQ ID NO: 151135 - protein, 9 aa, Influenza A virus
CAGSLTKAF

SEQ ID NO: 151136 - protein, 10 aa, Influenza A virus
CAGSLTKAFR

SEQ ID NO: 151137 - protein, 11 aa, Influenza A virus
CAGSLTKAFRR

SEQ ID NO: 151138 - protein, 10 aa, Influenza A virus
CAGSLTKASR

SEQ ID NO: 151139 - protein, 10 aa, Influenza A virus
CAGSLTKVSR

SEQ ID NO: 151140 - protein, 10 aa, Influenza A virus
CAGSPTKVSR

SEQ ID NO: 151141 - protein, 10 aa, Influenza A virus
CASLPTKVSR

SEQ ID NO: 151142 - protein, 10 aa, Influenza A virus
CASSPTKVSR

SEQ ID NO: 151143 - protein, 11 aa, Influenza A virus
CASSPTKVSRR

SEQ ID NO: 151144 - protein, 10 aa, Influenza A virus
CATSPTKVSR

SEQ ID NO: 151145 - protein, 8 aa, Influenza A virus
DLNRTAAL

SEQ ID NO: 151146 - protein, 9 aa, Influenza A virus
DLNRTAALR

SEQ ID NO: 151147 - protein, 9 aa, Influenza A virus
DLNRTATLR

SEQ ID NO: 151148 - protein, 9 aa, Influenza A virus
DLPTKVSHR

SEQ ID NO: 151149 - protein, 10 aa, Influenza A virus
DSFASPREAK

SEQ ID NO: 151150 - protein, 11 aa, Influenza A virus
DSFASPREAKR

SEQ ID NO: 151151 - protein, 10 aa, Influenza A virus
DSFISPKEAK

SEQ ID NO: 151152 - protein, 11 aa, Influenza A virus
DSFISPKEAKK

SEQ ID NO: 151153 - protein, 10 aa, Influenza A virus
DSFVNPKEAK

SEQ ID NO: 151154 - protein, 11 aa, Influenza A virus
DSFVNPKEAKR

SEQ ID NO: 151155 - protein, 10 aa, Influenza A virus
DSFVNPREAK

SEQ ID NO: 151156 - protein, 11 aa, Influenza A virus
DSFVNPREAKR

SEQ ID NO: 151157 - protein, 10 aa, Influenza A virus
DSFVSPKEAK

SEQ ID NO: 151158 - protein, 11 aa, Influenza A virus
DSFVSPKEAKK

SEQ ID NO: 151159 - protein, 11 aa, Influenza A virus
DSFVSPKEAKR

SEQ ID NO: 151160 - protein, 9 aa, Influenza A virus
DSFVSPKEV

SEQ ID NO: 151161 - protein, 10 aa, Influenza A virus
DSFVSPKEVK

SEQ ID NO: 151162 - protein, 11 aa, Influenza A virus
DSFVSPKEVKR

SEQ ID NO: 151163 - protein, 10 aa, Influenza A virus
DSFVSPREAK

SEQ ID NO: 151164 - protein, 11 aa, Influenza A virus
DSFVSPREAKK

SEQ ID NO: 151165 - protein, 11 aa, Influenza A virus
DSFVSPREAKR

SEQ ID NO: 151166 - protein, 10 aa, Influenza A virus
DSFVSPREAR

SEQ ID NO: 151167 - protein, 11 aa, Influenza A virus
DSFVSPREARR

SEQ ID NO: 151168 - protein, 10 aa, Influenza A virus
DSFVSPREEK

SEQ ID NO: 151169 - protein, 11 aa, Influenza A virus
DSFVSPREEKR

SEQ ID NO: 151170 - protein, 9 aa, Influenza A virus
DSFVSPREV

SEQ ID NO: 151171 - protein, 10 aa, Influenza A virus
DSFVSPREVK

SEQ ID NO: 151172 - protein, 11 aa, Influenza A virus
DSFVSPREVKR

SEQ ID NO: 151173 - protein, 10 aa, Influenza A virus
DSFVSQREAK

SEQ ID NO: 151174 - protein, 11 aa, Influenza A virus
DSFVSQREAKR

SEQ ID NO: 151175 - protein, 9 aa, Influenza A virus
DSNPTATLR

SEQ ID NO: 151176 - protein, 9 aa, Influenza A virus
DSNRTAALK

SEQ ID NO: 151177 - protein, 9 aa, Influenza A virus
DSNRTAALR

SEQ ID NO: 151178 - protein, 9 aa, Influenza A virus
DSNRTATLR

SEQ ID NO: 151179 - protein, 9 aa, Influenza A virus
DSNRTAVLR

SEQ ID NO: 151180 - protein, 9 aa, Influenza A virus
DSNRTVALR

SEQ ID NO: 151181 - protein, 9 aa, Influenza A virus
DSQTKVSHR

SEQ ID NO: 151182 - protein, 9 aa, Influenza A virus
DSSRMATLR

SEQ ID NO: 151183 - protein, 10 aa, Influenza A virus
DSSRMATLRA

SEQ ID NO: 151184 - protein, 9 aa, Influenza A virus
DSSRTAALR

SEQ ID NO: 151185 - protein, 9 aa, Influenza A virus
DSSRTATLR

SEQ ID NO: 151186 - protein, 10 aa, Influenza A virus
DSSRTATLRA

SEQ ID NO: 151187 - protein, 9 aa, Influenza A virus
ELCAGLPTK

SEQ ID NO: 151188 - protein, 10 aa, Influenza A virus
ELCAGLPTKV

SEQ ID NO: 151189 - protein, 9 aa, Influenza A virus
EPMWMDLNR

SEQ ID NO: 151190 - protein, 11 aa, Influenza A virus
EPMWMDLNRTA

SEQ ID NO: 151191 - protein, 11 aa, Influenza A virus
EPMWMDSNPTA

SEQ ID NO: 151192 - protein, 9 aa, Influenza A virus
EPMWMDSNR

SEQ ID NO: 151193 - protein, 9 aa, Influenza A virus
EPMWMDSSR

SEQ ID NO: 151194 - protein, 10 aa, Influenza A virus
EPMWMDSSRM

SEQ ID NO: 151195 - protein, 11 aa, Influenza A virus
EPMWMDSSRTA

SEQ ID NO: 151196 - protein, 9 aa, Influenza A virus
EPMWMGSNR

SEQ ID NO: 151197 - protein, 11 aa, Influenza A virus
EPMWMGSNRTA

SEQ ID NO: 151198 - protein, 10 aa, Influenza A virus
EQCAGSLTKV

SEQ ID NO: 151199 - protein, 9 aa, Influenza A virus
ESMWMDSNR

SEQ ID NO: 151200 - protein, 10 aa, Influenza A virus
ESMWMDSNRT

SEQ ID NO: 151201 - protein, 9 aa, Influenza A virus
FASPREAKR

SEQ ID NO: 151202 - protein, 11 aa, Influenza A virus
FASPREAKRQL

SEQ ID NO: 151203 - protein, 9 aa, Influenza A virus
FISPKEAKK

SEQ ID NO: 151204 - protein, 8 aa, Influenza A virus
FRRTSPAL

SEQ ID NO: 151205 - protein, 9 aa, Influenza A virus
FRRTSPALR

SEQ ID NO: 151206 - protein, 10 aa, Influenza A virus
FRRTSPALRI

SEQ ID NO: 151207 - protein, 11 aa, Influenza A virus
FRRTSPALRIL

SEQ ID NO: 151208 - protein, 8 aa, Influenza A virus
FRRTSSAL

SEQ ID NO: 151209 - protein, 9 aa, Influenza A virus
FRRTSSALR

SEQ ID NO: 151210 - protein, 10 aa, Influenza A virus
FRRTSSALRI

SEQ ID NO: 151211 - protein, 11 aa, Influenza A virus
FRRTSSALRIL

SEQ ID NO: 151212 - protein, 9 aa, Influenza A virus
FVNPKEAKR

SEQ ID NO: 151213 - protein, 11 aa, Influenza A virus
FVNPKEAKRQL

SEQ ID NO: 151214 - protein, 9 aa, Influenza A virus
FVNPREAKR

SEQ ID NO: 151215 - protein, 11 aa, Influenza A virus
FVNPREAKRQL

SEQ ID NO: 151216 - protein, 9 aa, Influenza A virus
FVSPKEAKK

SEQ ID NO: 151217 - protein, 9 aa, Influenza A virus
FVSPKEAKR

SEQ ID NO: 151218 - protein, 11 aa, Influenza A virus
FVSPKEAKRQL

SEQ ID NO: 151219 - protein, 9 aa, Influenza A virus
FVSPKEVKR

SEQ ID NO: 151220 - protein, 11 aa, Influenza A virus
FVSPKEVKRQL

SEQ ID NO: 151221 - protein, 9 aa, Influenza A virus
FVSPREAKK

SEQ ID NO: 151222 - protein, 11 aa, Influenza A virus
FVSPREAKKQL

SEQ ID NO: 151223 - protein, 9 aa, Influenza A virus
FVSPREAKR

SEQ ID NO: 151224 - protein, 11 aa, Influenza A virus
FVSPREAKRQL

SEQ ID NO: 151225 - protein, 9 aa, Influenza A virus
FVSPREARR

SEQ ID NO: 151226 - protein, 11 aa, Influenza A virus
FVSPREARRQL

SEQ ID NO: 151227 - protein, 9 aa, Influenza A virus
FVSPREEKR

SEQ ID NO: 151228 - protein, 11 aa, Influenza A virus
FVSPREEKRQL

SEQ ID NO: 151229 - protein, 9 aa, Influenza A virus
FVSPREVKR

SEQ ID NO: 151230 - protein, 11 aa, Influenza A virus
FVSPREVKRQL

SEQ ID NO: 151231 - protein, 9 aa, Influenza A virus
FVSQREAKR

SEQ ID NO: 151232 - protein, 9 aa, Influenza A virus
GLCAGLPTK

SEQ ID NO: 151233 - protein, 10 aa, Influenza A virus
GLCAGLPTKV

SEQ ID NO: 151234 - protein, 9 aa, Influenza A virus
GLPIKVSHR

SEQ ID NO: 151235 - protein, 9 aa, Influenza A virus
GLPITVSHR

SEQ ID NO: 151236 - protein, 9 aa, Influenza A virus
GLPNKVSHR

SEQ ID NO: 151237 - protein, 8 aa, Influenza A virus
GLPTKVFR

SEQ ID NO: 151238 - protein, 9 aa, Influenza A virus
GLPTKVFRR

SEQ ID NO: 151239 - protein, 9 aa, Influenza A virus
GLPTKVSHL

SEQ ID NO: 151240 - protein, 10 aa, Influenza A virus
GLPTKVSHLI

SEQ ID NO: 151241 - protein, 9 aa, Influenza A virus
GLPTKVSHR

SEQ ID NO: 151242 - protein, 10 aa, Influenza A virus
GLPTKVSHRI

SEQ ID NO: 151243 - protein, 9 aa, Influenza A virus
GLPTKVSRR

SEQ ID NO: 151244 - protein, 9 aa, Influenza A virus
GLQTKVSRR

SEQ ID NO: 151245 - protein, 9 aa, Influenza A virus
GLWDSFASP

SEQ ID NO: 151246 - protein, 10 aa, Influenza A virus
GLWDSFASPR

SEQ ID NO: 151247 - protein, 9 aa, Influenza A virus
GLWDSFISP

SEQ ID NO: 151248 - protein, 10 aa, Influenza A virus
GLWDSFISPK

SEQ ID NO: 151249 - protein, 9 aa, Influenza A virus
GLWDSFVNP

SEQ ID NO: 151250 - protein, 10 aa, Influenza A virus
GLWDSFVNPK

SEQ ID NO: 151251 - protein, 10 aa, Influenza A virus
GLWDSFVNPR

SEQ ID NO: 151252 - protein, 9 aa, Influenza A virus
GLWDSFVSP

SEQ ID NO: 151253 - protein, 10 aa, Influenza A virus
GLWDSFVSPK

SEQ ID NO: 151254 - protein, 10 aa, Influenza A virus
GLWDSFVSPR

SEQ ID NO: 151255 - protein, 10 aa, Influenza A virus
GLWDSFVSQR

SEQ ID NO: 151256 - protein, 10 aa, Influenza A virus
GQCAGLPITV

SEQ ID NO: 151257 - protein, 9 aa, Influenza A virus
GQCAGLPTK

SEQ ID NO: 151258 - protein, 10 aa, Influenza A virus
GQCAGLPTKV

SEQ ID NO: 151259 - protein, 9 aa, Influenza A virus
GQCAGSLIK

SEQ ID NO: 151260 - protein, 11 aa, Influenza A virus
GQCAGSLIKAF

SEQ ID NO: 151261 - protein, 9 aa, Influenza A virus
GQCAGSLTK

SEQ ID NO: 151262 - protein, 11 aa, Influenza A virus
GQCAGSLTKAF

SEQ ID NO: 151263 - protein, 9 aa, Influenza A virus
GQCAGSPTK

SEQ ID NO: 151264 - protein, 9 aa, Influenza A virus
GQCEGLLTK

SEQ ID NO: 151265 - protein, 10 aa, Influenza A virus
GQCEGLLTKV

SEQ ID NO: 151266 - protein, 9 aa, Influenza A virus
GQCEGLPTK

SEQ ID NO: 151267 - protein, 10 aa, Influenza A virus
GQCEGLPTKV

SEQ ID NO: 151268 - protein, 10 aa, Influenza A virus
GRCAGLPITV

SEQ ID NO: 151269 - protein, 8 aa, Influenza A virus
GSLIKAFR

SEQ ID NO: 151270 - protein, 9 aa, Influenza A virus
GSLIKAFRR

SEQ ID NO: 151271 - protein, 8 aa, Influenza A virus
GSLTKAFR

SEQ ID NO: 151272 - protein, 9 aa, Influenza A virus
GSLTKAFRR

SEQ ID NO: 151273 - protein, 9 aa, Influenza A virus
GSLTKASRR

SEQ ID NO: 151274 - protein, 9 aa, Influenza A virus
GSLTKVSRR

SEQ ID NO: 151275 - protein, 9 aa, Influenza A virus
GSNRTAALR

SEQ ID NO: 151276 - protein, 10 aa, Influenza A virus
GSNRTAALRA

SEQ ID NO: 151277 - protein, 10 aa, Influenza A virus
HLISPALKNL

SEQ ID NO: 151278 - protein, 10 aa, Influenza A virus
HLISPALKTL

SEQ ID NO: 151279 - protein, 10 aa, Influenza A virus
HLTSPALKTL

SEQ ID NO: 151280 - protein, 10 aa, Influenza A virus
HMWMDSSRTA

SEQ ID NO: 151281 - protein, 10 aa, Influenza A virus
HQTSPVLITL

SEQ ID NO: 151282 - protein, 10 aa, Influenza A virus
HQTSPVLKTL

SEQ ID NO: 151283 - protein, 10 aa, Influenza A virus
HQTSQVSTTL

SEQ ID NO: 151284 - protein, 9 aa, Influenza A virus
HRISPVLKT

SEQ ID NO: 151285 - protein, 10 aa, Influenza A virus
HRISPVLKTL

SEQ ID NO: 151286 - protein, 11 aa, Influenza A virus
HRISPVLKTLG

SEQ ID NO: 151287 - protein, 9 aa, Influenza A virus
HRTSPALKI

SEQ ID NO: 151288 - protein, 10 aa, Influenza A virus
HRTSPALKIL

SEQ ID NO: 151289 - protein, 10 aa, Influenza A virus
HRTSPALKTL

SEQ ID NO: 151290 - protein, 10 aa, Influenza A virus
IKAFRRTSPA

SEQ ID NO: 151291 - protein, 11 aa, Influenza A virus
IKVSHRTSPAL

SEQ ID NO: 151292 - protein, 9 aa, Influenza A virus
ILEPMWMDL

SEQ ID NO: 151293 - protein, 11 aa, Influenza A virus
ILEPMWMDLNR

SEQ ID NO: 151294 - protein, 11 aa, Influenza A virus
ILEPMWMDSNR

SEQ ID NO: 151295 - protein, 11 aa, Influenza A virus
ILEPMWMDSSR

SEQ ID NO: 151296 - protein, 11 aa, Influenza A virus
ILEPMWMGSNR

SEQ ID NO: 151297 - protein, 11 aa, Influenza A virus
ILESMWMDSNR

SEQ ID NO: 151298 - protein, 11 aa, Influenza A virus
ISPALKNLEPM

SEQ ID NO: 151299 - protein, 8 aa, Influenza A virus
ISPALKTL

SEQ ID NO: 151300 - protein, 11 aa, Influenza A virus
ISPALKTLEPM

SEQ ID NO: 151301 - protein, 10 aa, Influenza A virus
ISPKEAKKQL

SEQ ID NO: 151302 - protein, 10 aa, Influenza A virus
ITVSHRTSPA

SEQ ID NO: 151303 - protein, 11 aa, Influenza A virus
ITVSHRTSPAL

SEQ ID NO: 151304 - protein, 9 aa, Influenza A virus
KAFRRTSPA

SEQ ID NO: 151305 - protein, 10 aa, Influenza A virus
KAFRRTSPAL

SEQ ID NO: 151306 - protein, 11 aa, Influenza A virus
KAFRRTSPALR

SEQ ID NO: 151307 - protein, 9 aa, Influenza A virus
KASFLKCPK

SEQ ID NO: 151308 - protein, 10 aa, Influenza A virus
KASFLKCPKK

SEQ ID NO: 151309 - protein, 9 aa, Influenza A virus
KASRRTSPA

SEQ ID NO: 151310 - protein, 10 aa, Influenza A virus
KASRRTSPAL

SEQ ID NO: 151311 - protein, 11 aa, Influenza A virus
KASRRTSPALR

SEQ ID NO: 151312 - protein, 10 aa, Influenza A virus
KGQCEGLLTK

SEQ ID NO: 151313 - protein, 9 aa, Influenza A virus
KKNLKSQEL

SEQ ID NO: 151314 - protein, 9 aa, Influenza A virus
KLQEPCAGL

SEQ ID NO: 151315 - protein, 10 aa, Influenza A virus
KLQEPCAGLP

SEQ ID NO: 151316 - protein, 9 aa, Influenza A virus
KLQEPCAGS

SEQ ID NO: 151317 - protein, 9 aa, Influenza A virus
KQLKKDLKL

SEQ ID NO: 151318 - protein, 9 aa, Influenza A virus
KRQLKKDLK

SEQ ID NO: 151319 - protein, 10 aa, Influenza A virus
KRQLKKDLKL

SEQ ID NO: 151320 - protein, 9 aa, Influenza A virus
KRQLKKGLK

SEQ ID NO: 151321 - protein, 9 aa, Influenza A virus
KRQLKKNLK

SEQ ID NO: 151322 - protein, 11 aa, Influenza A virus
KRQLKKNLKSL

SEQ ID NO: 151323 - protein, 9 aa, Influenza A virus
KSKGQCEGL

SEQ ID NO: 151324 - protein, 9 aa, Influenza A virus
KSLEPCADL

SEQ ID NO: 151325 - protein, 9 aa, Influenza A virus
KSLEPCAGL

SEQ ID NO: 151326 - protein, 9 aa, Influenza A virus
KSQELCAGL

SEQ ID NO: 151327 - protein, 9 aa, Influenza A virus
KSQEPCAGL

SEQ ID NO: 151328 - protein, 9 aa, Influenza A virus
KSQEPCVGL

SEQ ID NO: 151329 - protein, 9 aa, Influenza A virus
KSQEQCAGL

SEQ ID NO: 151330 - protein, 9 aa, Influenza A virus
KSQEQCASL

SEQ ID NO: 151331 - protein, 9 aa, Influenza A virus
KSQGLCAGL

SEQ ID NO: 151332 - protein, 9 aa, Influenza A virus
KSQGPCVGL

SEQ ID NO: 151333 - protein, 9 aa, Influenza A virus
KSQGQCAGL

SEQ ID NO: 151334 - protein, 9 aa, Influenza A virus
KSQGRCAGL

SEQ ID NO: 151335 - protein, 11 aa, Influenza A virus
KSQGRCAGLPI

SEQ ID NO: 151336 - protein, 8 aa, Influenza A virus
KTLEPMWM

SEQ ID NO: 151337 - protein, 10 aa, Influenza A virus
KTLEPMWMDL

SEQ ID NO: 151338 - protein, 8 aa, Influenza A virus
KTLGHMWM

SEQ ID NO: 151339 - protein, 9 aa, Influenza A virus
KVFRRTSSA

SEQ ID NO: 151340 - protein, 10 aa, Influenza A virus
KVFRRTSSAL

SEQ ID NO: 151341 - protein, 11 aa, Influenza A virus
KVFRRTSSALR

SEQ ID NO: 151342 - protein, 9 aa, Influenza A virus
KVSHLISPA

SEQ ID NO: 151343 - protein, 10 aa, Influenza A virus
KVSHLISPAL

SEQ ID NO: 151344 - protein, 11 aa, Influenza A virus
KVSHLISPALK

SEQ ID NO: 151345 - protein, 9 aa, Influenza A virus
KVSHLTSPA

SEQ ID NO: 151346 - protein, 10 aa, Influenza A virus
KVSHLTSPAL

SEQ ID NO: 151347 - protein, 11 aa, Influenza A virus
KVSHLTSPALK

SEQ ID NO: 151348 - protein, 9 aa, Influenza A virus
KVSHQTSPV

SEQ ID NO: 151349 - protein, 10 aa, Influenza A virus
KVSHQTSPVL

SEQ ID NO: 151350 - protein, 11 aa, Influenza A virus
KVSHQTSPVLK

SEQ ID NO: 151351 - protein, 9 aa, Influenza A virus
KVSHQTSQV

SEQ ID NO: 151352 - protein, 9 aa, Influenza A virus
KVSHRISPV

SEQ ID NO: 151353 - protein, 10 aa, Influenza A virus
KVSHRISPVL

SEQ ID NO: 151354 - protein, 11 aa, Influenza A virus
KVSHRISPVLK

SEQ ID NO: 151355 - protein, 9 aa, Influenza A virus
KVSHRTSPA

SEQ ID NO: 151356 - protein, 10 aa, Influenza A virus
KVSHRTSPAL

SEQ ID NO: 151357 - protein, 11 aa, Influenza A virus
KVSHRTSPALK

SEQ ID NO: 151358 - protein, 9 aa, Influenza A virus
KVSRQTSPA

SEQ ID NO: 151359 - protein, 10 aa, Influenza A virus
KVSRQTSPAL

SEQ ID NO: 151360 - protein, 11 aa, Influenza A virus
KVSRQTSPALK

SEQ ID NO: 151361 - protein, 9 aa, Influenza A virus
KVSRRTSPA

SEQ ID NO: 151362 - protein, 10 aa, Influenza A virus
KVSRRTSPAL

SEQ ID NO: 151363 - protein, 11 aa, Influenza A virus
KVSRRTSPALK

SEQ ID NO: 151364 - protein, 11 aa, Influenza A virus
KVSRRTSPALR

SEQ ID NO: 151365 - protein, 11 aa, Influenza A virus
LCAGLPTKVFR

SEQ ID NO: 151366 - protein, 11 aa, Influenza A virus
LEPMWMDSSRM

SEQ ID NO: 151367 - protein, 10 aa, Influenza A virus
LESMWMDSNR

SEQ ID NO: 151368 - protein, 10 aa, Influenza A virus
LGHMWMDSSR

SEQ ID NO: 151369 - protein, 9 aa, Influenza A virus
LIKAFRRTS

SEQ ID NO: 151370 - protein, 9 aa, Influenza A virus
LISPALKNL

SEQ ID NO: 151371 - protein, 9 aa, Influenza A virus
LISPALKTL

SEQ ID NO: 151372 - protein, 10 aa, Influenza A virus
LKASFLKCPK

SEQ ID NO: 151373 - protein, 9 aa, Influenza A virus
LKILEPMWM

SEQ ID NO: 151374 - protein, 9 aa, Influenza A virus
LKILESMWM

SEQ ID NO: 151375 - protein, 10 aa, Influenza A virus
LKLQEPCAGL

SEQ ID NO: 151376 - protein, 9 aa, Influenza A virus
LKNLEPMWM

SEQ ID NO: 151377 - protein, 9 aa, Influenza A virus
LKTLEPMWM

SEQ ID NO: 151378 - protein, 9 aa, Influenza A virus
LKTLGHMWM

SEQ ID NO: 151379 - protein, 9 aa, Influenza A virus
LLTKVSHQT

SEQ ID NO: 151380 - protein, 9 aa, Influenza A virus
LNRTAALRA

SEQ ID NO: 151381 - protein, 11 aa, Influenza A virus
LNRTAALRASF

SEQ ID NO: 151382 - protein, 9 aa, Influenza A virus
LNRTATLRA

SEQ ID NO: 151383 - protein, 11 aa, Influenza A virus
LNRTATLRASF

SEQ ID NO: 151384 - protein, 9 aa, Influenza A virus
LPIKVSHRT

SEQ ID NO: 151385 - protein, 10 aa, Influenza A virus
LPIKVSHRTS

SEQ ID NO: 151386 - protein, 9 aa, Influenza A virus
LPITVSHRT

SEQ ID NO: 151387 - protein, 10 aa, Influenza A virus
LPITVSHRTS

SEQ ID NO: 151388 - protein, 9 aa, Influenza A virus
LPNKVSHRT

SEQ ID NO: 151389 - protein, 9 aa, Influenza A virus
LPTKVFRRT

SEQ ID NO: 151390 - protein, 8 aa, Influenza A virus
LPTKVSHL

SEQ ID NO: 151391 - protein, 9 aa, Influenza A virus
LPTKVSHLI

SEQ ID NO: 151392 - protein, 9 aa, Influenza A virus
LPTKVSHLT

SEQ ID NO: 151393 - protein, 9 aa, Influenza A virus
LPTKVSHQT

SEQ ID NO: 151394 - protein, 9 aa, Influenza A virus
LPTKVSHRI

SEQ ID NO: 151395 - protein, 9 aa, Influenza A virus
LPTKVSHRT

SEQ ID NO: 151396 - protein, 10 aa, Influenza A virus
LRASCLKCPK

SEQ ID NO: 151397 - protein, 11 aa, Influenza A virus
LRASCLKCPKK

SEQ ID NO: 151398 - protein, 10 aa, Influenza A virus
LRASFLKCPK

SEQ ID NO: 151399 - protein, 11 aa, Influenza A virus
LRASFLKCPKK

SEQ ID NO: 151400 - protein, 10 aa, Influenza A virus
LRASFLKCPR

SEQ ID NO: 151401 - protein, 11 aa, Influenza A virus
LRASFLKCPRK

SEQ ID NO: 151402 - protein, 10 aa, Influenza A virus
LRASFLKCQK

SEQ ID NO: 151403 - protein, 11 aa, Influenza A virus
LRASFLKCQKK

SEQ ID NO: 151404 - protein, 9 aa, Influenza A virus
LRASFLKCR

SEQ ID NO: 151405 - protein, 10 aa, Influenza A virus
LRASFLKCRK

SEQ ID NO: 151406 - protein, 11 aa, Influenza A virus
LRASFLKCRKK

SEQ ID NO: 151407 - protein, 9 aa, Influenza A virus
LRASFPKCL

SEQ ID NO: 151408 - protein, 11 aa, Influenza A virus
LRASFPKCLEK

SEQ ID NO: 151409 - protein, 9 aa, Influenza A virus
LRILEPMWM

SEQ ID NO: 151410 - protein, 11 aa, Influenza A virus
LRILEPMWMDL

SEQ ID NO: 151411 - protein, 10 aa, Influenza A virus
LRSQEPCAGL

SEQ ID NO: 151412 - protein, 10 aa, Influenza A virus
LRSQGQCEGL

SEQ ID NO: 151413 - protein, 10 aa, Influenza A virus
LRVSFLKCPK

SEQ ID NO: 151414 - protein, 11 aa, Influenza A virus
LRVSFLKCPKK

SEQ ID NO: 151415 - protein, 9 aa, Influenza A virus
LTKAFRRTS

SEQ ID NO: 151416 - protein, 11 aa, Influenza A virus
LTKAFRRTSPA

SEQ ID NO: 151417 - protein, 9 aa, Influenza A virus
LTKASRRTS

SEQ ID NO: 151418 - protein, 11 aa, Influenza A virus
LTKASRRTSPA

SEQ ID NO: 151419 - protein, 9 aa, Influenza A virus
LTKVSHQTS

SEQ ID NO: 151420 - protein, 9 aa, Influenza A virus
LTKVSRRTS

SEQ ID NO: 151421 - protein, 11 aa, Influenza A virus
LTKVSRRTSPA

SEQ ID NO: 151422 - protein, 9 aa, Influenza A virus
LTSPALKTL

SEQ ID NO: 151423 - protein, 9 aa, Influenza A virus
LWDSFASPR

SEQ ID NO: 151424 - protein, 9 aa, Influenza A virus
LWDSFISPK

SEQ ID NO: 151425 - protein, 9 aa, Influenza A virus
LWDSFVNPK

SEQ ID NO: 151426 - protein, 9 aa, Influenza A virus
LWDSFVNPR

SEQ ID NO: 151427 - protein, 9 aa, Influenza A virus
LWDSFVSPK

SEQ ID NO: 151428 - protein, 9 aa, Influenza A virus
LWDSFVSPR

SEQ ID NO: 151429 - protein, 9 aa, Influenza A virus
LWDSFVSQR

SEQ ID NO: 151430 - protein, 11 aa, Influenza A virus
MASRGLWDSFI

SEQ ID NO: 151431 - protein, 11 aa, Influenza A virus
MASRGLWDSFV

SEQ ID NO: 151432 - protein, 8 aa, Influenza A virus
MATLRASF

SEQ ID NO: 151433 - protein, 10 aa, Influenza A virus
MATLRASFPK

SEQ ID NO: 151434 - protein, 9 aa, Influenza A virus
MDLNRTAAL

SEQ ID NO: 151435 - protein, 10 aa, Influenza A virus
MDLNRTAALR

SEQ ID NO: 151436 - protein, 9 aa, Influenza A virus
MDLNRTATL

SEQ ID NO: 151437 - protein, 10 aa, Influenza A virus
MDLNRTATLR

SEQ ID NO: 151438 - protein, 9 aa, Influenza A virus
MDSNPTATL

SEQ ID NO: 151439 - protein, 10 aa, Influenza A virus
MDSNPTATLR

SEQ ID NO: 151440 - protein, 9 aa, Influenza A virus
MDSNRTAAL

SEQ ID NO: 151441 - protein, 10 aa, Influenza A virus
MDSNRTAALK

SEQ ID NO: 151442 - protein, 10 aa, Influenza A virus
MDSNRTAALR

SEQ ID NO: 151443 - protein, 9 aa, Influenza A virus
MDSNRTATL

SEQ ID NO: 151444 - protein, 10 aa, Influenza A virus
MDSNRTATLR

SEQ ID NO: 151445 - protein, 9 aa, Influenza A virus
MDSNRTAVL

SEQ ID NO: 151446 - protein, 10 aa, Influenza A virus
MDSNRTAVLR

SEQ ID NO: 151447 - protein, 9 aa, Influenza A virus
MDSNRTVAL

SEQ ID NO: 151448 - protein, 10 aa, Influenza A virus
MDSNRTVALR

SEQ ID NO: 151449 - protein, 9 aa, Influenza A virus
MDSSRMATL

SEQ ID NO: 151450 - protein, 10 aa, Influenza A virus
MDSSRMATLR

SEQ ID NO: 151451 - protein, 11 aa, Influenza A virus
MDSSRMATLRA

SEQ ID NO: 151452 - protein, 9 aa, Influenza A virus
MDSSRTAAL

SEQ ID NO: 151453 - protein, 10 aa, Influenza A virus
MDSSRTAALR

SEQ ID NO: 151454 - protein, 11 aa, Influenza A virus
MDSSRTAALRA

SEQ ID NO: 151455 - protein, 9 aa, Influenza A virus
MDSSRTATL

SEQ ID NO: 151456 - protein, 10 aa, Influenza A virus
MDSSRTATLR

SEQ ID NO: 151457 - protein, 11 aa, Influenza A virus
MDSSRTATLRA

SEQ ID NO: 151458 - protein, 9 aa, Influenza A virus
MGSNRTAAL

SEQ ID NO: 151459 - protein, 10 aa, Influenza A virus
MGSNRTAALR

SEQ ID NO: 151460 - protein, 9 aa, Influenza A virus
MWMDLNRTA

SEQ ID NO: 151461 - protein, 11 aa, Influenza A virus
MWMDLNRTAAL

SEQ ID NO: 151462 - protein, 11 aa, Influenza A virus
MWMDLNRTATL

SEQ ID NO: 151463 - protein, 9 aa, Influenza A virus
MWMDSNPTA

SEQ ID NO: 151464 - protein, 11 aa, Influenza A virus
MWMDSNPTATL

SEQ ID NO: 151465 - protein, 9 aa, Influenza A virus
MWMDSNRTA

SEQ ID NO: 151466 - protein, 11 aa, Influenza A virus
MWMDSNRTAAL

SEQ ID NO: 151467 - protein, 11 aa, Influenza A virus
MWMDSNRTATL

SEQ ID NO: 151468 - protein, 10 aa, Influenza A virus
MWMDSNRTAV

SEQ ID NO: 151469 - protein, 11 aa, Influenza A virus
MWMDSNRTAVL

SEQ ID NO: 151470 - protein, 9 aa, Influenza A virus
MWMDSNRTV

SEQ ID NO: 151471 - protein, 11 aa, Influenza A virus
MWMDSNRTVAL

SEQ ID NO: 151472 - protein, 8 aa, Influenza A virus
MWMDSSRM

SEQ ID NO: 151473 - protein, 9 aa, Influenza A virus
MWMDSSRMA

SEQ ID NO: 151474 - protein, 11 aa, Influenza A virus
MWMDSSRMATL

SEQ ID NO: 151475 - protein, 9 aa, Influenza A virus
MWMDSSRTA

SEQ ID NO: 151476 - protein, 11 aa, Influenza A virus
MWMDSSRTAAL

SEQ ID NO: 151477 - protein, 11 aa, Influenza A virus
MWMDSSRTATL

SEQ ID NO: 151478 - protein, 9 aa, Influenza A virus
MWMGSNRTA

SEQ ID NO: 151479 - protein, 11 aa, Influenza A virus
MWMGSNRTAAL

SEQ ID NO: 151480 - protein, 11 aa, Influenza A virus
NLEPMWMDSNR

SEQ ID NO: 151481 - protein, 9 aa, Influenza A virus
NPKEAKRQL

SEQ ID NO: 151482 - protein, 9 aa, Influenza A virus
NPREAKRQL

SEQ ID NO: 151483 - protein, 10 aa, Influenza A virus
NPTATLRASF

SEQ ID NO: 151484 - protein, 11 aa, Influenza A virus
NPTATLRASFL

SEQ ID NO: 151485 - protein, 10 aa, Influenza A virus
NRTAALKASF

SEQ ID NO: 151486 - protein, 10 aa, Influenza A virus
NRTAALRASF

SEQ ID NO: 151487 - protein, 10 aa, Influenza A virus
NRTAALRVSF

SEQ ID NO: 151488 - protein, 10 aa, Influenza A virus
NRTATLRASF

SEQ ID NO: 151489 - protein, 10 aa, Influenza A virus
NRTAVLRASF

SEQ ID NO: 151490 - protein, 11 aa, Influenza A virus
NRTAVLRASFL

SEQ ID NO: 151491 - protein, 10 aa, Influenza A virus
NRTVALRASF

SEQ ID NO: 151492 - protein, 10 aa, Influenza A virus
PALKILEPMW

SEQ ID NO: 151493 - protein, 10 aa, Influenza A virus
PALKILESMW

SEQ ID NO: 151494 - protein, 10 aa, Influenza A virus
PALKNLEPMW

SEQ ID NO: 151495 - protein, 10 aa, Influenza A virus
PALKTLEPMW

SEQ ID NO: 151496 - protein, 10 aa, Influenza A virus
PALRILEPMW

SEQ ID NO: 151497 - protein, 8 aa, Influenza A virus
PREARRQL

SEQ ID NO: 151498 - protein, 11 aa, Influenza A virus
PTATLRASFLK

SEQ ID NO: 151499 - protein, 11 aa, Influenza A virus
QCAGSLIKAFR

SEQ ID NO: 151500 - protein, 11 aa, Influenza A virus
QCATSPTKVSR

SEQ ID NO: 151501 - protein, 9 aa, Influenza A virus
QELCAGLPT

SEQ ID NO: 151502 - protein, 10 aa, Influenza A virus
QELCAGLPTK

SEQ ID NO: 151503 - protein, 11 aa, Influenza A virus
QELCAGLPTKV

SEQ ID NO: 151504 - protein, 9 aa, Influenza A virus
QEPCVGLPI

SEQ ID NO: 151505 - protein, 9 aa, Influenza A virus
QEQCAGLPT

SEQ ID NO: 151506 - protein, 8 aa, Influenza A virus
QEQCAGSL

SEQ ID NO: 151507 - protein, 9 aa, Influenza A virus
QEQCAGSLT

SEQ ID NO: 151508 - protein, 11 aa, Influenza A virus
QEQCAGSLTKA

SEQ ID NO: 151509 - protein, 9 aa, Influenza A virus
QEQCAGSPT

SEQ ID NO: 151510 - protein, 9 aa, Influenza A virus
QEQCASLPT

SEQ ID NO: 151511 - protein, 11 aa, Influenza A virus
QEQCASLPTKV

SEQ ID NO: 151512 - protein, 9 aa, Influenza A virus
QEQCASSPT

SEQ ID NO: 151513 - protein, 9 aa, Influenza A virus
QEQCATSPT

SEQ ID NO: 151514 - protein, 10 aa, Influenza A virus
QGLCAGLPTK

SEQ ID NO: 151515 - protein, 9 aa, Influenza A virus
QGRCAGLPI

SEQ ID NO: 151516 - protein, 9 aa, Influenza A virus
QLKKDLKSL

SEQ ID NO: 151517 - protein, 9 aa, Influenza A virus
QLKKNLKSL

SEQ ID NO: 151518 - protein, 9 aa, Influenza A virus
QTKVSHRTS

SEQ ID NO: 151519 - protein, 11 aa, Influenza A virus
QTKVSHRTSPA

SEQ ID NO: 151520 - protein, 9 aa, Influenza A virus
QTKVSRRTS

SEQ ID NO: 151521 - protein, 11 aa, Influenza A virus
QTKVSRRTSPA

SEQ ID NO: 151522 - protein, 9 aa, Influenza A virus
QTSPALKIL

SEQ ID NO: 151523 - protein, 9 aa, Influenza A virus
QTSPVLITL

SEQ ID NO: 151524 - protein, 9 aa, Influenza A virus
QTSPVLKTL

SEQ ID NO: 151525 - protein, 9 aa, Influenza A virus
QTSQVSTTL

SEQ ID NO: 151526 - protein, 9 aa, Influenza A virus
QVSTTLEPM

SEQ ID NO: 151527 - protein, 10 aa, Influenza A virus
QVSTTLEPMW

SEQ ID NO: 151528 - protein, 9 aa, Influenza A virus
RASCLKCPK

SEQ ID NO: 151529 - protein, 10 aa, Influenza A virus
RASCLKCPKK

SEQ ID NO: 151530 - protein, 9 aa, Influenza A virus
RASFLKCPK

SEQ ID NO: 151531 - protein, 10 aa, Influenza A virus
RASFLKCPKK

SEQ ID NO: 151532 - protein, 9 aa, Influenza A virus
RASFLKCPR

SEQ ID NO: 151533 - protein, 10 aa, Influenza A virus
RASFLKCPRK

SEQ ID NO: 151534 - protein, 9 aa, Influenza A virus
RASFLKCQK

SEQ ID NO: 151535 - protein, 10 aa, Influenza A virus
RASFLKCQKK

SEQ ID NO: 151536 - protein, 10 aa, Influenza A virus
RASFLKCQKR

SEQ ID NO: 151537 - protein, 8 aa, Influenza A virus
RASFLKCR

SEQ ID NO: 151538 - protein, 9 aa, Influenza A virus
RASFLKCRK

SEQ ID NO: 151539 - protein, 10 aa, Influenza A virus
RASFLKCRKK

SEQ ID NO: 151540 - protein, 8 aa, Influenza A virus
RASFPKCL

SEQ ID NO: 151541 - protein, 10 aa, Influenza A virus
RASFPKCLEK

SEQ ID NO: 151542 - protein, 11 aa, Influenza A virus
REAKRQLKKNL

SEQ ID NO: 151543 - protein, 11 aa, Influenza A virus
REARRQLKKDL

SEQ ID NO: 151544 - protein, 11 aa, Influenza A virus
RGLWDSFASPR

SEQ ID NO: 151545 - protein, 11 aa, Influenza A virus
RGLWDSFISPK

SEQ ID NO: 151546 - protein, 11 aa, Influenza A virus
RGLWDSFVNPK

SEQ ID NO: 151547 - protein, 11 aa, Influenza A virus
RGLWDSFVNPR

SEQ ID NO: 151548 - protein, 11 aa, Influenza A virus
RGLWDSFVSPK

SEQ ID NO: 151549 - protein, 11 aa, Influenza A virus
RGLWDSFVSPR

SEQ ID NO: 151550 - protein, 11 aa, Influenza A virus
RGLWDSFVSQR

SEQ ID NO: 151551 - protein, 10 aa, Influenza A virus
RILEPMWMDL

SEQ ID NO: 151552 - protein, 9 aa, Influenza A virus
RISPVLKTL

SEQ ID NO: 151553 - protein, 9 aa, Influenza A virus
RMATLRASF

SEQ ID NO: 151554 - protein, 10 aa, Influenza A virus
RMATLRASFP

SEQ ID NO: 151555 - protein, 11 aa, Influenza A virus
RMATLRASFPK

SEQ ID NO: 151556 - protein, 9 aa, Influenza A virus
RQLKKDLKL

SEQ ID NO: 151557 - protein, 10 aa, Influenza A virus
RQLKKDLKSK

SEQ ID NO: 151558 - protein, 10 aa, Influenza A virus
RQLKKDLKSL

SEQ ID NO: 151559 - protein, 10 aa, Influenza A virus
RQLKKNLKSL

SEQ ID NO: 151560 - protein, 9 aa, Influenza A virus
RQTSPALKI

SEQ ID NO: 151561 - protein, 10 aa, Influenza A virus
RQTSPALKIL

SEQ ID NO: 151562 - protein, 9 aa, Influenza A virus
RRQLKKDLR

SEQ ID NO: 151563 - protein, 8 aa, Influenza A virus
RRTSPALK

SEQ ID NO: 151564 - protein, 9 aa, Influenza A virus
RRTSPALKI

SEQ ID NO: 151565 - protein, 10 aa, Influenza A virus
RRTSPALKIL

SEQ ID NO: 151566 - protein, 10 aa, Influenza A virus
RRTSPALKTL

SEQ ID NO: 151567 - protein, 11 aa, Influenza A virus
RRTSPALKTLE

SEQ ID NO: 151568 - protein, 9 aa, Influenza A virus
RRTSPALRI

SEQ ID NO: 151569 - protein, 10 aa, Influenza A virus
RRTSPALRIL

SEQ ID NO: 151570 - protein, 8 aa, Influenza A virus
RRTSSALR

SEQ ID NO: 151571 - protein, 9 aa, Influenza A virus
RRTSSALRI

SEQ ID NO: 151572 - protein, 10 aa, Influenza A virus
RRTSSALRIL

SEQ ID NO: 151573 - protein, 11 aa, Influenza A virus
RRTSSALRILE

SEQ ID NO: 151574 - protein, 9 aa, Influenza A virus
RSQEPCAGL

SEQ ID NO: 151575 - protein, 9 aa, Influenza A virus
RTAALKASF

SEQ ID NO: 151576 - protein, 10 aa, Influenza A virus
RTAALKASFL

SEQ ID NO: 151577 - protein, 11 aa, Influenza A virus
RTAALKASFLK

SEQ ID NO: 151578 - protein, 9 aa, Influenza A virus
RTAALRASF

SEQ ID NO: 151579 - protein, 10 aa, Influenza A virus
RTAALRASFL

SEQ ID NO: 151580 - protein, 11 aa, Influenza A virus
RTAALRASFLK

SEQ ID NO: 151581 - protein, 9 aa, Influenza A virus
RTAALRVSF

SEQ ID NO: 151582 - protein, 10 aa, Influenza A virus
RTAALRVSFL

SEQ ID NO: 151583 - protein, 11 aa, Influenza A virus
RTAALRVSFLK

SEQ ID NO: 151584 - protein, 9 aa, Influenza A virus
RTATLRASC

SEQ ID NO: 151585 - protein, 10 aa, Influenza A virus
RTATLRASCL

SEQ ID NO: 151586 - protein, 11 aa, Influenza A virus
RTATLRASCLK

SEQ ID NO: 151587 - protein, 9 aa, Influenza A virus
RTATLRASF

SEQ ID NO: 151588 - protein, 10 aa, Influenza A virus
RTATLRASFL

SEQ ID NO: 151589 - protein, 11 aa, Influenza A virus
RTATLRASFLK

SEQ ID NO: 151590 - protein, 9 aa, Influenza A virus
RTAVLRASF

SEQ ID NO: 151591 - protein, 10 aa, Influenza A virus
RTAVLRASFL

SEQ ID NO: 151592 - protein, 11 aa, Influenza A virus
RTAVLRASFLK

SEQ ID NO: 151593 - protein, 8 aa, Influenza A virus
RTSPALKI

SEQ ID NO: 151594 - protein, 9 aa, Influenza A virus
RTSPALKIL

SEQ ID NO: 151595 - protein, 9 aa, Influenza A virus
RTSPALKTL

SEQ ID NO: 151596 - protein, 8 aa, Influenza A virus
RTSPALRI

SEQ ID NO: 151597 - protein, 9 aa, Influenza A virus
RTSPALRIL

SEQ ID NO: 151598 - protein, 9 aa, Influenza A virus
RTSSALRIL

SEQ ID NO: 151599 - protein, 9 aa, Influenza A virus
RTVALRASF

SEQ ID NO: 151600 - protein, 10 aa, Influenza A virus
RTVALRASFL

SEQ ID NO: 151601 - protein, 11 aa, Influenza A virus
RTVALRASFLK

SEQ ID NO: 151602 - protein, 9 aa, Influenza A virus
RVSFLKCPK

SEQ ID NO: 151603 - protein, 10 aa, Influenza A virus
RVSFLKCPKK

SEQ ID NO: 151604 - protein, 9 aa, Influenza A virus
SALRILEPM

SEQ ID NO: 151605 - protein, 10 aa, Influenza A virus
SALRILEPMW

SEQ ID NO: 151606 - protein, 9 aa, Influenza A virus
SEEPCVGLP

SEQ ID NO: 151607 - protein, 10 aa, Influenza A virus
SEEPCVGLPT

SEQ ID NO: 151608 - protein, 9 aa, Influenza A virus
SFASPREAK

SEQ ID NO: 151609 - protein, 10 aa, Influenza A virus
SFASPREAKR

SEQ ID NO: 151610 - protein, 9 aa, Influenza A virus
SFISPKEAK

SEQ ID NO: 151611 - protein, 10 aa, Influenza A virus
SFISPKEAKK

SEQ ID NO: 151612 - protein, 9 aa, Influenza A virus
SFVNPKEAK

SEQ ID NO: 151613 - protein, 10 aa, Influenza A virus
SFVNPKEAKR

SEQ ID NO: 151614 - protein, 9 aa, Influenza A virus
SFVNPREAK

SEQ ID NO: 151615 - protein, 10 aa, Influenza A virus
SFVNPREAKR

SEQ ID NO: 151616 - protein, 9 aa, Influenza A virus
SFVSPKEAK

SEQ ID NO: 151617 - protein, 10 aa, Influenza A virus
SFVSPKEAKK

SEQ ID NO: 151618 - protein, 10 aa, Influenza A virus
SFVSPKEAKR

SEQ ID NO: 151619 - protein, 10 aa, Influenza A virus
SFVSPKEVKR

SEQ ID NO: 151620 - protein, 9 aa, Influenza A virus
SFVSPREAK

SEQ ID NO: 151621 - protein, 10 aa, Influenza A virus
SFVSPREAKK

SEQ ID NO: 151622 - protein, 10 aa, Influenza A virus
SFVSPREAKR

SEQ ID NO: 151623 - protein, 9 aa, Influenza A virus
SFVSPREAR

SEQ ID NO: 151624 - protein, 10 aa, Influenza A virus
SFVSPREARR

SEQ ID NO: 151625 - protein, 9 aa, Influenza A virus
SFVSPREEK

SEQ ID NO: 151626 - protein, 10 aa, Influenza A virus
SFVSPREEKR

SEQ ID NO: 151627 - protein, 8 aa, Influenza A virus
SFVSPREV

SEQ ID NO: 151628 - protein, 9 aa, Influenza A virus
SFVSPREVK

SEQ ID NO: 151629 - protein, 10 aa, Influenza A virus
SFVSPREVKR

SEQ ID NO: 151630 - protein, 9 aa, Influenza A virus
SFVSQREAK

SEQ ID NO: 151631 - protein, 10 aa, Influenza A virus
SFVSQREAKR

SEQ ID NO: 151632 - protein, 8 aa, Influenza A virus
SHLISPAL

SEQ ID NO: 151633 - protein, 8 aa, Influenza A virus
SHLTSPAL

SEQ ID NO: 151634 - protein, 8 aa, Influenza A virus
SHQTSPVL

SEQ ID NO: 151635 - protein, 9 aa, Influenza A virus
SHQTSPVLI

SEQ ID NO: 151636 - protein, 11 aa, Influenza A virus
SHQTSPVLITL

SEQ ID NO: 151637 - protein, 11 aa, Influenza A virus
SHQTSQVSTTL

SEQ ID NO: 151638 - protein, 9 aa, Influenza A virus
SHRISPVLK

SEQ ID NO: 151639 - protein, 11 aa, Influenza A virus
SHRISPVLKTL

SEQ ID NO: 151640 - protein, 8 aa, Influenza A virus
SHRTSPAL

SEQ ID NO: 151641 - protein, 9 aa, Influenza A virus
SHRTSPALK

SEQ ID NO: 151642 - protein, 11 aa, Influenza A virus
SLEPCAGLPTK

SEQ ID NO: 151643 - protein, 8 aa, Influenza A virus
SLIKAFRR

SEQ ID NO: 151644 - protein, 9 aa, Influenza A virus
SLIKAFRRT

SEQ ID NO: 151645 - protein, 9 aa, Influenza A virus
SLPTKVSRR

SEQ ID NO: 151646 - protein, 8 aa, Influenza A virus
SLTKAFRR

SEQ ID NO: 151647 - protein, 10 aa, Influenza A virus
SLTKAFRRTS

SEQ ID NO: 151648 - protein, 10 aa, Influenza A virus
SLTKASRRTS

SEQ ID NO: 151649 - protein, 10 aa, Influenza A virus
SLTKVSRRTS

SEQ ID NO: 151650 - protein, 8 aa, Influenza A virus
SMWMDSNR

SEQ ID NO: 151651 - protein, 9 aa, Influenza A virus
SMWMDSNRT

SEQ ID NO: 151652 - protein, 10 aa, Influenza A virus
SMWMDSNRTA

SEQ ID NO: 151653 - protein, 11 aa, Influenza A virus
SMWMDSNRTAA

SEQ ID NO: 151654 - protein, 11 aa, Influenza A virus
SNPTATLRASF

SEQ ID NO: 151655 - protein, 9 aa, Influenza A virus
SNRTAALKA

SEQ ID NO: 151656 - protein, 11 aa, Influenza A virus
SNRTAALKASF

SEQ ID NO: 151657 - protein, 9 aa, Influenza A virus
SNRTAALRA

SEQ ID NO: 151658 - protein, 11 aa, Influenza A virus
SNRTAALRASF

SEQ ID NO: 151659 - protein, 9 aa, Influenza A virus
SNRTAALRV

SEQ ID NO: 151660 - protein, 11 aa, Influenza A virus
SNRTAALRVSF

SEQ ID NO: 151661 - protein, 9 aa, Influenza A virus
SNRTATLRA

SEQ ID NO: 151662 - protein, 11 aa, Influenza A virus
SNRTATLRASF

SEQ ID NO: 151663 - protein, 9 aa, Influenza A virus
SNRTAVLRA

SEQ ID NO: 151664 - protein, 11 aa, Influenza A virus
SNRTAVLRASF

SEQ ID NO: 151665 - protein, 9 aa, Influenza A virus
SNRTVALRA

SEQ ID NO: 151666 - protein, 11 aa, Influenza A virus
SNRTVALRASF

SEQ ID NO: 151667 - protein, 10 aa, Influenza A virus
SPALKILEPM

SEQ ID NO: 151668 - protein, 9 aa, Influenza A virus
SPALKILES

SEQ ID NO: 151669 - protein, 10 aa, Influenza A virus
SPALKILESM

SEQ ID NO: 151670 - protein, 10 aa, Influenza A virus
SPALKNLEPM

SEQ ID NO: 151671 - protein, 11 aa, Influenza A virus
SPALKNLEPMW

SEQ ID NO: 151672 - protein, 10 aa, Influenza A virus
SPALKTLEPM

SEQ ID NO: 151673 - protein, 11 aa, Influenza A virus
SPALKTLEPMW

SEQ ID NO: 151674 - protein, 10 aa, Influenza A virus
SPALRILEPM

SEQ ID NO: 151675 - protein, 11 aa, Influenza A virus
SPALRILEPMW

SEQ ID NO: 151676 - protein, 9 aa, Influenza A virus
SPKEAKKQL

SEQ ID NO: 151677 - protein, 9 aa, Influenza A virus
SPKEAKRQL

SEQ ID NO: 151678 - protein, 9 aa, Influenza A virus
SPKEVKRQL

SEQ ID NO: 151679 - protein, 9 aa, Influenza A virus
SPREAKKQL

SEQ ID NO: 151680 - protein, 10 aa, Influenza A virus
SPREAKKQLK

SEQ ID NO: 151681 - protein, 9 aa, Influenza A virus
SPREAKRQL

SEQ ID NO: 151682 - protein, 10 aa, Influenza A virus
SPREAKRQLK

SEQ ID NO: 151683 - protein, 9 aa, Influenza A virus
SPREARRQL

SEQ ID NO: 151684 - protein, 10 aa, Influenza A virus
SPREARRQLK

SEQ ID NO: 151685 - protein, 9 aa, Influenza A virus
SPREEKRQL

SEQ ID NO: 151686 - protein, 9 aa, Influenza A virus
SPREVKRQL

SEQ ID NO: 151687 - protein, 10 aa, Influenza A virus
SPREVKRQLK

SEQ ID NO: 151688 - protein, 10 aa, Influenza A virus
SPTKVSHRTS

SEQ ID NO: 151689 - protein, 10 aa, Influenza A virus
SPTKVSRRTS

SEQ ID NO: 151690 - protein, 9 aa, Influenza A virus
SPVLITLEP

SEQ ID NO: 151691 - protein, 10 aa, Influenza A virus
SPVLITLEPM

SEQ ID NO: 151692 - protein, 11 aa, Influenza A virus
SPVLITLEPMW

SEQ ID NO: 151693 - protein, 10 aa, Influenza A virus
SPVLKTLEPM

SEQ ID NO: 151694 - protein, 11 aa, Influenza A virus
SPVLKTLEPMW

SEQ ID NO: 151695 - protein, 10 aa, Influenza A virus
SPVLKTLGHM

SEQ ID NO: 151696 - protein, 11 aa, Influenza A virus
SPVLKTLGHMW

SEQ ID NO: 151697 - protein, 10 aa, Influenza A virus
SQELCAGLPT

SEQ ID NO: 151698 - protein, 11 aa, Influenza A virus
SQELCAGLPTK

SEQ ID NO: 151699 - protein, 10 aa, Influenza A virus
SQEPCVGLPI

SEQ ID NO: 151700 - protein, 10 aa, Influenza A virus
SQEQCAGLPT

SEQ ID NO: 151701 - protein, 9 aa, Influenza A virus
SQEQCAGSL

SEQ ID NO: 151702 - protein, 10 aa, Influenza A virus
SQEQCAGSLT

SEQ ID NO: 151703 - protein, 10 aa, Influenza A virus
SQEQCAGSPT

SEQ ID NO: 151704 - protein, 10 aa, Influenza A virus
SQEQCASLPT

SEQ ID NO: 151705 - protein, 10 aa, Influenza A virus
SQEQCASSPT

SEQ ID NO: 151706 - protein, 10 aa, Influenza A virus
SQEQCATSPT

SEQ ID NO: 151707 - protein, 11 aa, Influenza A virus
SQGLCAGLPTK

SEQ ID NO: 151708 - protein, 10 aa, Influenza A virus
SQGQCAGLPI

SEQ ID NO: 151709 - protein, 9 aa, Influenza A virus
SQGQCAGSL

SEQ ID NO: 151710 - protein, 10 aa, Influenza A virus
SQGQCAGSLI

SEQ ID NO: 151711 - protein, 10 aa, Influenza A virus
SQGRCAGLPI

SEQ ID NO: 151712 - protein, 9 aa, Influenza A virus
SQREAKRQL

SEQ ID NO: 151713 - protein, 10 aa, Influenza A virus
SQREAKRQLK

SEQ ID NO: 151714 - protein, 10 aa, Influenza A virus
SQTKVSHRTS

SEQ ID NO: 151715 - protein, 10 aa, Influenza A virus
SQVSTTLEPM

SEQ ID NO: 151716 - protein, 11 aa, Influenza A virus
SQVSTTLEPMW

SEQ ID NO: 151717 - protein, 9 aa, Influenza A virus
SRGLWDSFI

SEQ ID NO: 151718 - protein, 9 aa, Influenza A virus
SRGLWDSFV

SEQ ID NO: 151719 - protein, 9 aa, Influenza A virus
SRMATLRAS

SEQ ID NO: 151720 - protein, 10 aa, Influenza A virus
SRMATLRASF

SEQ ID NO: 151721 - protein, 11 aa, Influenza A virus
SRMATLRASFP

SEQ ID NO: 151722 - protein, 9 aa, Influenza A virus
SRQTSPALK

SEQ ID NO: 151723 - protein, 10 aa, Influenza A virus
SRQTSPALKI

SEQ ID NO: 151724 - protein, 11 aa, Influenza A virus
SRQTSPALKIL

SEQ ID NO: 151725 - protein, 9 aa, Influenza A virus
SRRTSPALK

SEQ ID NO: 151726 - protein, 10 aa, Influenza A virus
SRRTSPALKI

SEQ ID NO: 151727 - protein, 11 aa, Influenza A virus
SRRTSPALKTL

SEQ ID NO: 151728 - protein, 10 aa, Influenza A virus
SRRTSPALRI

SEQ ID NO: 151729 - protein, 11 aa, Influenza A virus
SRRTSPALRIL

SEQ ID NO: 151730 - protein, 10 aa, Influenza A virus
SRTAALRASF

SEQ ID NO: 151731 - protein, 11 aa, Influenza A virus
SRTAALRASFL

SEQ ID NO: 151732 - protein, 10 aa, Influenza A virus
SRTATLRASF

SEQ ID NO: 151733 - protein, 11 aa, Influenza A virus
SRTATLRASFL

SEQ ID NO: 151734 - protein, 10 aa, Influenza A virus
SSALRILEPM

SEQ ID NO: 151735 - protein, 11 aa, Influenza A virus
SSALRILEPMW

SEQ ID NO: 151736 - protein, 9 aa, Influenza A virus
SSPTKVSRR

SEQ ID NO: 151737 - protein, 8 aa, Influenza A virus
SSRMATLR

SEQ ID NO: 151738 - protein, 9 aa, Influenza A virus
SSRMATLRA

SEQ ID NO: 151739 - protein, 10 aa, Influenza A virus
SSRMATLRAS

SEQ ID NO: 151740 - protein, 11 aa, Influenza A virus
SSRMATLRASF

SEQ ID NO: 151741 - protein, 8 aa, Influenza A virus
SSRTAALR

SEQ ID NO: 151742 - protein, 9 aa, Influenza A virus
SSRTAALRA

SEQ ID NO: 151743 - protein, 10 aa, Influenza A virus
SSRTAALRAS

SEQ ID NO: 151744 - protein, 11 aa, Influenza A virus
SSRTAALRASF

SEQ ID NO: 151745 - protein, 9 aa, Influenza A virus
SSRTATLRA

SEQ ID NO: 151746 - protein, 10 aa, Influenza A virus
SSRTATLRAS

SEQ ID NO: 151747 - protein, 11 aa, Influenza A virus
SSRTATLRASF

SEQ ID NO: 151748 - protein, 8 aa, Influenza A virus
STTLEPMW

SEQ ID NO: 151749 - protein, 9 aa, Influenza A virus
STTLEPMWM

SEQ ID NO: 151750 - protein, 8 aa, Influenza A virus
TAALKASF

SEQ ID NO: 151751 - protein, 9 aa, Influenza A virus
TAALKASFL

SEQ ID NO: 151752 - protein, 10 aa, Influenza A virus
TAALKASFLK

SEQ ID NO: 151753 - protein, 8 aa, Influenza A virus
TAALRASF

SEQ ID NO: 151754 - protein, 9 aa, Influenza A virus
TAALRASFL

SEQ ID NO: 151755 - protein, 10 aa, Influenza A virus
TAALRASFLK

SEQ ID NO: 151756 - protein, 8 aa, Influenza A virus
TAALRVSF

SEQ ID NO: 151757 - protein, 9 aa, Influenza A virus
TAALRVSFL

SEQ ID NO: 151758 - protein, 10 aa, Influenza A virus
TAALRVSFLK

SEQ ID NO: 151759 - protein, 9 aa, Influenza A virus
TATLRASCL

SEQ ID NO: 151760 - protein, 10 aa, Influenza A virus
TATLRASCLK

SEQ ID NO: 151761 - protein, 8 aa, Influenza A virus
TATLRASF

SEQ ID NO: 151762 - protein, 9 aa, Influenza A virus
TATLRASFL

SEQ ID NO: 151763 - protein, 10 aa, Influenza A virus
TATLRASFLK

SEQ ID NO: 151764 - protein, 8 aa, Influenza A virus
TAVLRASF

SEQ ID NO: 151765 - protein, 9 aa, Influenza A virus
TAVLRASFL

SEQ ID NO: 151766 - protein, 10 aa, Influenza A virus
TAVLRASFLK

SEQ ID NO: 151767 - protein, 10 aa, Influenza A virus
TKAFRRTSPA

SEQ ID NO: 151768 - protein, 10 aa, Influenza A virus
TKVFRRTSSA

SEQ ID NO: 151769 - protein, 10 aa, Influenza A virus
TKVSHLISPA

SEQ ID NO: 151770 - protein, 10 aa, Influenza A virus
TKVSHLTSPA

SEQ ID NO: 151771 - protein, 10 aa, Influenza A virus
TKVSHQTSPV

SEQ ID NO: 151772 - protein, 10 aa, Influenza A virus
TKVSHQTSQV

SEQ ID NO: 151773 - protein, 10 aa, Influenza A virus
TKVSHRISPV

SEQ ID NO: 151774 - protein, 9 aa, Influenza A virus
TLEPMWMDL

SEQ ID NO: 151775 - protein, 11 aa, Influenza A virus
TLEPMWMDLNR

SEQ ID NO: 151776 - protein, 11 aa, Influenza A virus
TLEPMWMDSNR

SEQ ID NO: 151777 - protein, 11 aa, Influenza A virus
TLEPMWMDSSR

SEQ ID NO: 151778 - protein, 11 aa, Influenza A virus
TLGHMWMDSSR

SEQ ID NO: 151779 - protein, 11 aa, Influenza A virus
TLRASCLKCPK

SEQ ID NO: 151780 - protein, 8 aa, Influenza A virus
TLRASFLK

SEQ ID NO: 151781 - protein, 11 aa, Influenza A virus
TLRASFLKCPK

SEQ ID NO: 151782 - protein, 8 aa, Influenza A virus
TLRASFPK

SEQ ID NO: 151783 - protein, 9 aa, Influenza A virus
TLRASFPKC

SEQ ID NO: 151784 - protein, 10 aa, Influenza A virus
TLRASFPKCL

SEQ ID NO: 151785 - protein, 11 aa, Influenza A virus
TSPALKTLEPM

SEQ ID NO: 151786 - protein, 11 aa, Influenza A virus
TSPALRILEPM

SEQ ID NO: 151787 - protein, 9 aa, Influenza A virus
TSPTKVSRR

SEQ ID NO: 151788 - protein, 11 aa, Influenza A virus
TSQVSTTLEPM

SEQ ID NO: 151789 - protein, 8 aa, Influenza A virus
TSSALRIL

SEQ ID NO: 151790 - protein, 9 aa, Influenza A virus
TVALRASFL

SEQ ID NO: 151791 - protein, 10 aa, Influenza A virus
TVALRASFLK

SEQ ID NO: 151792 - protein, 9 aa, Influenza A virus
TVSHRTSPA

SEQ ID NO: 151793 - protein, 11 aa, Influenza A virus
TVSHRTSPALK

SEQ ID NO: 151794 - protein, 8 aa, Influenza A virus
VALRASFL

SEQ ID NO: 151795 - protein, 9 aa, Influenza A virus
VALRASFLK

SEQ ID NO: 151796 - protein, 9 aa, Influenza A virus
VFRRTSSAL

SEQ ID NO: 151797 - protein, 10 aa, Influenza A virus
VFRRTSSALR

SEQ ID NO: 151798 - protein, 10 aa, Influenza A virus
VGLPIKVSHR

SEQ ID NO: 151799 - protein, 10 aa, Influenza A virus
VGLPTKVSHR

SEQ ID NO: 151800 - protein, 9 aa, Influenza A virus
VLITLEPMW

SEQ ID NO: 151801 - protein, 10 aa, Influenza A virus
VLITLEPMWM

SEQ ID NO: 151802 - protein, 9 aa, Influenza A virus
VLKTLEPMW

SEQ ID NO: 151803 - protein, 9 aa, Influenza A virus
VLKTLGHMW

SEQ ID NO: 151804 - protein, 8 aa, Influenza A virus
VLRASFLK

SEQ ID NO: 151805 - protein, 11 aa, Influenza A virus
VLRASFLKCQK

SEQ ID NO: 151806 - protein, 10 aa, Influenza A virus
VNPKEAKRQL

SEQ ID NO: 151807 - protein, 10 aa, Influenza A virus
VNPREAKRQL

SEQ ID NO: 151808 - protein, 9 aa, Influenza A virus
VSFLKCPKK

SEQ ID NO: 151809 - protein, 9 aa, Influenza A virus
VSHLISPAL

SEQ ID NO: 151810 - protein, 10 aa, Influenza A virus
VSHLISPALK

SEQ ID NO: 151811 - protein, 9 aa, Influenza A virus
VSHLTSPAL

SEQ ID NO: 151812 - protein, 10 aa, Influenza A virus
VSHLTSPALK

SEQ ID NO: 151813 - protein, 9 aa, Influenza A virus
VSHQTSPVL

SEQ ID NO: 151814 - protein, 10 aa, Influenza A virus
VSHQTSPVLI

SEQ ID NO: 151815 - protein, 10 aa, Influenza A virus
VSHQTSPVLK

SEQ ID NO: 151816 - protein, 9 aa, Influenza A virus
VSHRISPVL

SEQ ID NO: 151817 - protein, 10 aa, Influenza A virus
VSHRISPVLK

SEQ ID NO: 151818 - protein, 9 aa, Influenza A virus
VSHRTSPAL

SEQ ID NO: 151819 - protein, 10 aa, Influenza A virus
VSHRTSPALK

SEQ ID NO: 151820 - protein, 10 aa, Influenza A virus
VSPKEAKKQL

SEQ ID NO: 151821 - protein, 10 aa, Influenza A virus
VSPKEAKRQL

SEQ ID NO: 151822 - protein, 10 aa, Influenza A virus
VSPKEVKRQL

SEQ ID NO: 151823 - protein, 10 aa, Influenza A virus
VSPREAKKQL

SEQ ID NO: 151824 - protein, 10 aa, Influenza A virus
VSPREAKRQL

SEQ ID NO: 151825 - protein, 10 aa, Influenza A virus
VSPREARRQL

SEQ ID NO: 151826 - protein, 10 aa, Influenza A virus
VSPREEKRQL

SEQ ID NO: 151827 - protein, 10 aa, Influenza A virus
VSPREVKRQL

SEQ ID NO: 151828 - protein, 9 aa, Influenza A virus
VSRQTSPAL

SEQ ID NO: 151829 - protein, 10 aa, Influenza A virus
VSRQTSPALK

SEQ ID NO: 151830 - protein, 11 aa, Influenza A virus
VSRQTSPALKI

SEQ ID NO: 151831 - protein, 8 aa, Influenza A virus
VSRRTSPA

SEQ ID NO: 151832 - protein, 9 aa, Influenza A virus
VSRRTSPAL

SEQ ID NO: 151833 - protein, 10 aa, Influenza A virus
VSRRTSPALK

SEQ ID NO: 151834 - protein, 10 aa, Influenza A virus
VSRRTSPALR

SEQ ID NO: 151835 - protein, 9 aa, Influenza A virus
VSTTLEPMW

SEQ ID NO: 151836 - protein, 10 aa, Influenza A virus
VSTTLEPMWM

SEQ ID NO: 151837 - protein, 11 aa, Influenza A virus
WDSFVSPREAR

SEQ ID NO: 151838 - protein, 9 aa, Influenza A virus
WMDLNRTAA

SEQ ID NO: 151839 - protein, 10 aa, Influenza A virus
WMDLNRTAAL

SEQ ID NO: 151840 - protein, 11 aa, Influenza A virus
WMDLNRTAALR

SEQ ID NO: 151841 - protein, 10 aa, Influenza A virus
WMDLNRTATL

SEQ ID NO: 151842 - protein, 11 aa, Influenza A virus
WMDLNRTATLR

SEQ ID NO: 151843 - protein, 9 aa, Influenza A virus
WMDSNPTAT

SEQ ID NO: 151844 - protein, 10 aa, Influenza A virus
WMDSNPTATL

SEQ ID NO: 151845 - protein, 11 aa, Influenza A virus
WMDSNPTATLR

SEQ ID NO: 151846 - protein, 9 aa, Influenza A virus
WMDSNRTAA

SEQ ID NO: 151847 - protein, 10 aa, Influenza A virus
WMDSNRTAAL

SEQ ID NO: 151848 - protein, 11 aa, Influenza A virus
WMDSNRTAALK

SEQ ID NO: 151849 - protein, 11 aa, Influenza A virus
WMDSNRTAALR

SEQ ID NO: 151850 - protein, 10 aa, Influenza A virus
WMDSNRTATL

SEQ ID NO: 151851 - protein, 11 aa, Influenza A virus
WMDSNRTATLR

SEQ ID NO: 151852 - protein, 9 aa, Influenza A virus
WMDSNRTAV

SEQ ID NO: 151853 - protein, 10 aa, Influenza A virus
WMDSNRTAVL

SEQ ID NO: 151854 - protein, 11 aa, Influenza A virus
WMDSNRTAVLR

SEQ ID NO: 151855 - protein, 9 aa, Influenza A virus
WMDSNRTVA

SEQ ID NO: 151856 - protein, 10 aa, Influenza A virus
WMDSNRTVAL

SEQ ID NO: 151857 - protein, 11 aa, Influenza A virus
WMDSNRTVALR

SEQ ID NO: 151858 - protein, 9 aa, Influenza A virus
WMDSSRMAT

SEQ ID NO: 151859 - protein, 10 aa, Influenza A virus
WMDSSRMATL

SEQ ID NO: 151860 - protein, 11 aa, Influenza A virus
WMDSSRMATLR

SEQ ID NO: 151861 - protein, 9 aa, Influenza A virus
WMDSSRTAA

SEQ ID NO: 151862 - protein, 10 aa, Influenza A virus
WMDSSRTAAL

SEQ ID NO: 151863 - protein, 11 aa, Influenza A virus
WMDSSRTAALR

SEQ ID NO: 151864 - protein, 10 aa, Influenza A virus
WMDSSRTATL

SEQ ID NO: 151865 - protein, 11 aa, Influenza A virus
WMDSSRTATLR

SEQ ID NO: 151866 - protein, 9 aa, Influenza A virus
WMGSNRTAA

SEQ ID NO: 151867 - protein, 10 aa, Influenza A virus
WMGSNRTAAL

SEQ ID NO: 151868 - protein, 11 aa, Influenza A virus
WMGSNRTAALR

SEQ ID NO: 151869 - protein, 10 aa, Artificial Sequence
  Description of Artificial Sequence: Synthetic peptide
  Seed: AIATPGMQIR
AAATPGMQIK

SEQ ID NO: 151870 - protein, 10 aa, Artificial Sequence
  Description of Artificial Sequence: Synthetic peptide
  Seed: AIATPGMQIR
AAATPGMQIR

SEQ ID NO: 151871 - protein, 10 aa, Artificial Sequence
  Description of Artificial Sequence: Synthetic peptide
  Seed: ANFSMELPSF
AAFSMELPSF

SEQ ID NO: 151872 - protein, 10 aa, Artificial Sequence
  Description of Artificial Sequence: Synthetic peptide
  Seed: ANFSMELPSF
AAFSMELPSM

SEQ ID NO: 151873 - protein, 10 aa, Artificial Sequence
  Description of Artificial Sequence: Synthetic peptide
  Seed: ANFSMELPSF
AAFSMELPSY

SEQ ID NO: 151874 - protein, 10 aa, Artificial Sequence
  Description of Artificial Sequence: Synthetic peptide
  Seed: AKLANVVRKM
AALANVVRKA

SEQ ID NO: 151875 - protein, 10 aa, Artificial Sequence
  Description of Artificial Sequence: Synthetic peptide
  Seed: AKLANVVRKM
AALANVVRKI

SEQ ID NO: 151876 - protein, 10 aa, Artificial Sequence
  Description of Artificial Sequence: Synthetic peptide
  Seed: AKLANVVRKM
AALANVVRKL

SEQ ID NO: 151877 - protein, 10 aa, Artificial Sequence
  Description of Artificial Sequence: Synthetic peptide
  Seed: AKLANVVRKM
AALANVVRKV

SEQ ID NO: 151878 - protein, 9 aa, Artificial Sequence
  Description of Artificial Sequence: Synthetic peptide
  Seed: ARLGKGYMF
AALGKGYMF

SEQ ID NO: 151879 - protein, 9 aa, Artificial Sequence
  Description of Artificial Sequence: Synthetic peptide
  Seed: ARLGKGYMF
AALGKGYMY

SEQ ID NO: 151880 - protein, 10 aa, Artificial Sequence
  Description of Artificial Sequence: Synthetic peptide
  Seed: ALQLFIKDYR
AAQLFIKDYK

SEQ ID NO: 151881 - protein, 10 aa, Artificial Sequence
  Description of Artificial Sequence: Synthetic peptide
  Seed: ALQLFIKDYR
AAQLFIKDYR

SEQ ID NO: 151882 - protein, 8 aa, Artificial Sequence
  Description of Artificial Sequence: Synthetic peptide
  Seed: AISTTFPY
AASTTFPF

SEQ ID NO: 151883 - protein, 8 aa, Artificial Sequence
  Description of Artificial Sequence: Synthetic peptide
  Seed: AISTTFPY
AASTTFPY

SEQ ID NO: 151884 - protein, 9 aa, Artificial Sequence
  Description of Artificial Sequence: Synthetic peptide
  Seed: AISTTFPYT
AASTTFPYA

SEQ ID NO: 151885 - protein, 9 aa, Artificial Sequence
  Description of Artificial Sequence: Synthetic peptide
  Seed: AISTTFPYT
AASTTFPYI

SEQ ID NO: 151886 - protein, 9 aa, Artificial Sequence
  Description of Artificial Sequence: Synthetic peptide
  Seed: AISTTFPYT
AASTTFPYL

SEQ ID NO: 151887 - protein, 9 aa, Artificial Sequence
  Description of Artificial Sequence: Synthetic peptide
  Seed: AISTTFPYT
AASTTFPYV

SEQ ID NO: 151888 - protein, 9 aa, Artificial Sequence
  Description of Artificial Sequence: Synthetic peptide
  Seed: AATALANTI
AATALANTF

SEQ ID NO: 151889 - protein, 9 aa, Artificial Sequence
  Description of Artificial Sequence: Synthetic peptide
  Seed: AATALANTI
AATALANTL

SEQ ID NO: 151890 - protein, 9 aa, Artificial Sequence
  Description of Artificial Sequence: Synthetic peptide
  Seed: AATALANTI
AATALANTM

SEQ ID NO: 151891 - protein, 9 aa, Artificial Sequence
  Description of Artificial Sequence: Synthetic peptide
  Seed: AATALANTI
AATALANTV

SEQ ID NO: 151892 - protein, 9 aa, Artificial Sequence
  Description of Artificial Sequence: Synthetic peptide
  Seed: AATALANTI
AATALANTY

SEQ ID NO: 151893 - protein, 9 aa, Artificial Sequence
  Description of Artificial Sequence: Synthetic peptide
  Seed: ALTLNTMTK
AATLNTMTK

SEQ ID NO: 151894 - protein, 10 aa, Artificial Sequence
  Description of Artificial Sequence: Synthetic peptide
  Seed: ANFSMELPSF
ACFSMELPSF

SEQ ID NO: 151895 - protein, 10 aa, Artificial Sequence
  Description of Artificial Sequence: Synthetic peptide
  Seed: AKLANVVRKM
ACLANVVRKA

SEQ ID NO: 151896 - protein, 10 aa, Artificial Sequence
  Description of Artificial Sequence: Synthetic peptide
  Seed: AKLANVVRKM
ACLANVVRKI

SEQ ID NO: 151897 - protein, 10 aa, Artificial Sequence
  Description of Artificial Sequence: Synthetic peptide
  Seed: AKLANVVRKM
ACLANVVRKL

SEQ ID NO: 151898 - protein, 10 aa, Artificial Sequence
  Description of Artificial Sequence: Synthetic peptide
  Seed: AKLANVVRKM
ACLANVVRKV

SEQ ID NO: 151899 - protein, 10 aa, Artificial Sequence
  Description of Artificial Sequence: Synthetic peptide
  Seed: ALQLFIKDYR
ACQLFIKDYK

SEQ ID NO: 151900 - protein, 10 aa, Artificial Sequence
  Description of Artificial Sequence: Synthetic peptide
  Seed: ALQLFIKDYR
ACQLFIKDYR

SEQ ID NO: 151901 - protein, 9 aa, Artificial Sequence
  Description of Artificial Sequence: Synthetic peptide
  Seed: AISTTFPYT
ACSTTFPYV

SEQ ID NO: 151902 - protein, 10 aa, Artificial Sequence
  Description of Artificial Sequence: Synthetic peptide
  Seed: ANFSMELPSF
ADFSMELPSF

SEQ ID NO: 151903 - protein, 10 aa, Artificial Sequence
  Description of Artificial Sequence: Synthetic peptide
  Seed: AKLANVVRKM
ADLANVVRKA

SEQ ID NO: 151904 - protein, 10 aa, Artificial Sequence
  Description of Artificial Sequence: Synthetic peptide
  Seed: AKLANVVRKM
ADLANVVRKI

SEQ ID NO: 151905 - protein, 10 aa, Artificial Sequence
  Description of Artificial Sequence: Synthetic peptide
  Seed: AKLANVVRKM
ADLANVVRKL

SEQ ID NO: 151906 - protein, 10 aa, Artificial Sequence
  Description of Artificial Sequence: Synthetic peptide
  Seed: AKLANVVRKM
ADLANVVRKV

SEQ ID NO: 151907 - protein, 10 aa, Artificial Sequence
  Description of Artificial Sequence: Synthetic peptide
  Seed: ALQLFIKDYR
ADQLFIKDYK

SEQ ID NO: 151908 - protein, 10 aa, Artificial Sequence
  Description of Artificial Sequence: Synthetic peptide
  Seed: ALQLFIKDYR
ADQLFIKDYR

SEQ ID NO: 151909 - protein, 10 aa, Artificial Sequence
  Description of Artificial Sequence: Synthetic peptide
  Seed: ANFSMELPSF
AEFSMELPSF

SEQ ID NO: 151910 - protein, 10 aa, Artificial Sequence
  Description of Artificial Sequence: Synthetic peptide
  Seed: ANFSMELPSF
AEFSMELPSM

SEQ ID NO: 151911 - protein, 10 aa, Artificial Sequence
  Description of Artificial Sequence: Synthetic peptide
  Seed: ANFSMELPSF
AEFSMELPSY

SEQ ID NO: 151912 - protein, 10 aa, Artificial Sequence
  Description of Artificial Sequence: Synthetic peptide
  Seed: AKLANVVRKM
AELANVVRKA

SEQ ID NO: 151913 - protein, 10 aa, Artificial Sequence
  Description of Artificial Sequence: Synthetic peptide
  Seed: AKLANVVRKM
AELANVVRKI

SEQ ID NO: 151914 - protein, 10 aa, Artificial Sequence
  Description of Artificial Sequence: Synthetic peptide
  Seed: AKLANVVRKM
AELANVVRKL

SEQ ID NO: 151915 - protein, 10 aa, Artificial Sequence
  Description of Artificial Sequence: Synthetic peptide
  Seed: AKLANVVRKM
AELANVVRKV

SEQ ID NO: 151916 - protein, 9 aa, Artificial Sequence
  Description of Artificial Sequence: Synthetic peptide
  Seed: ARLGKGYMF
AELGKGYMF

SEQ ID NO: 151917 - protein, 9 aa, Artificial Sequence
  Description of Artificial Sequence: Synthetic peptide
  Seed: ARLGKGYMF
AELGKGYMY

SEQ ID NO: 151918 - protein, 10 aa, Artificial Sequence
  Description of Artificial Sequence: Synthetic peptide
  Seed: ALQLFIKDYR
AEQLFIKDYK

SEQ ID NO: 151919 - protein, 10 aa, Artificial Sequence
  Description of Artificial Sequence: Synthetic peptide
  Seed: ALQLFIKDYR
AEQLFIKDYR

SEQ ID NO: 151920 - protein, 8 aa, Artificial Sequence
  Description of Artificial Sequence: Synthetic peptide
  Seed: AISTTFPY
AESTTFPF

SEQ ID NO: 151921 - protein, 8 aa, Artificial Sequence
  Description of Artificial Sequence: Synthetic peptide
  Seed: AISTTFPY
AESTTFPY

SEQ ID NO: 151922 - protein, 10 aa, Artificial Sequence
  Description of Artificial Sequence: Synthetic peptide
  Seed: AIATPGMQIR
AFATPGMQIR

SEQ ID NO: 151923 - protein, 10 aa, Artificial Sequence
  Description of Artificial Sequence: Synthetic peptide
  Seed: ANFSMELPSF
AFFSMELPSF

SEQ ID NO: 151924 - protein, 10 aa, Artificial Sequence
  Description of Artificial Sequence: Synthetic peptide
  Seed: ANFSMELPSF
AFFSMELPSW

SEQ ID NO: 151925 - protein, 10 aa, Artificial Sequence
  Description of Artificial Sequence: Synthetic peptide
  Seed: ANFSMELPSF
AFFSMELPSY

SEQ ID NO: 151926 - protein, 10 aa, Artificial Sequence
  Description of Artificial Sequence: Synthetic peptide
  Seed: AKLANVVRKM
AFLANVVRKA

SEQ ID NO: 151927 - protein, 10 aa, Artificial Sequence
  Description of Artificial Sequence: Synthetic peptide
  Seed: AKLANVVRKM
AFLANVVRKI

SEQ ID NO: 151928 - protein, 10 aa, Artificial Sequence
  Description of Artificial Sequence: Synthetic peptide
  Seed: AKLANVVRKM
AFLANVVRKL

SEQ ID NO: 151929 - protein, 10 aa, Artificial Sequence
  Description of Artificial Sequence: Synthetic peptide
  Seed: AKLANVVRKM
AFLANVVRKM

SEQ ID NO: 151930 - protein, 10 aa, Artificial Sequence
  Description of Artificial Sequence: Synthetic peptide
  Seed: AKLANVVRKM
AFLANVVRKT

SEQ ID NO: 151931 - protein, 10 aa, Artificial Sequence
  Description of Artificial Sequence: Synthetic peptide
  Seed: AKLANVVRKM
AFLANVVRKV

SEQ ID NO: 151932 - protein, 10 aa, Artificial Sequence
  Description of Artificial Sequence: Synthetic peptide
  Seed: ALQLFIKDYR
AFQLFIKDYK

SEQ ID NO: 151933 - protein, 10 aa, Artificial Sequence
  Description of Artificial Sequence: Synthetic peptide
  Seed: ALQLFIKDYR
AFQLFIKDYR

SEQ ID NO: 151934 - protein, 8 aa, Artificial Sequence
  Description of Artificial Sequence: Synthetic peptide
  Seed: AISTTFPY
AFSTTFPF

SEQ ID NO: 151935 - protein, 8 aa, Artificial Sequence
  Description of Artificial Sequence: Synthetic peptide
  Seed: AISTTFPY
AFSTTFPY

SEQ ID NO: 151936 - protein, 10 aa, Artificial Sequence
  Description of Artificial Sequence: Synthetic peptide
  Seed: AIATPGMQIR
AGATPGMQIK

SEQ ID NO: 151937 - protein, 10 aa, Artificial Sequence
  Description of Artificial Sequence: Synthetic peptide
  Seed: AIATPGMQIR
AGATPGMQIR

SEQ ID NO: 151938 - protein, 10 aa, Artificial Sequence
  Description of Artificial Sequence: Synthetic peptide
  Seed: ANFSMELPSF
AGFSMELPSF

SEQ ID NO: 151939 - protein, 10 aa, Artificial Sequence
  Description of Artificial Sequence: Synthetic peptide
  Seed: ANFSMELPSF
AGFSMELPSY

SEQ ID NO: 151940 - protein, 10 aa, Artificial Sequence
  Description of Artificial Sequence: Synthetic peptide
  Seed: AKLANVVRKM
AGLANVVRKA

SEQ ID NO: 151941 - protein, 10 aa, Artificial Sequence
  Description of Artificial Sequence: Synthetic peptide
  Seed: AKLANVVRKM
AGLANVVRKI

SEQ ID NO: 151942 - protein, 10 aa, Artificial Sequence
  Description of Artificial Sequence: Synthetic peptide
  Seed: AKLANVVRKM
AGLANVVRKL

SEQ ID NO: 151943 - protein, 10 aa, Artificial Sequence
  Description of Artificial Sequence: Synthetic peptide
  Seed: AKLANVVRKM
AGLANVVRKV

SEQ ID NO: 151944 - protein, 10 aa, Artificial Sequence
  Description of Artificial Sequence: Synthetic peptide
  Seed: ALQLFIKDYR
AGQLFIKDYK

SEQ ID NO: 151945 - protein, 10 aa, Artificial Sequence
  Description of Artificial Sequence: Synthetic peptide
  Seed: ALQLFIKDYR
AGQLFIKDYR

SEQ ID NO: 151946 - protein, 9 aa, Artificial Sequence
  Description of Artificial Sequence: Synthetic peptide
  Seed: AISTTFPYT
AGSTTFPYV

SEQ ID NO: 151947 - protein, 10 aa, Artificial Sequence
  Description of Artificial Sequence: Synthetic peptide
  Seed: ANFSMELPSF
AHFSMELPSF

SEQ ID NO: 151948 - protein, 10 aa, Artificial Sequence
  Description of Artificial Sequence: Synthetic peptide
  Seed: ANFSMELPSF
AHFSMELPSL

SEQ ID NO: 151949 - protein, 10 aa, Artificial Sequence
  Description of Artificial Sequence: Synthetic peptide
  Seed: ANFSMELPSF
AHFSMELPSM

SEQ ID NO: 151950 - protein, 10 aa, Artificial Sequence
  Description of Artificial Sequence: Synthetic peptide
  Seed: ANFSMELPSF
AHFSMELPSY

SEQ ID NO: 151951 - protein, 10 aa, Artificial Sequence
  Description of Artificial Sequence: Synthetic peptide
  Seed: AKLANVVRKM
AHLANVVRKA

SEQ ID NO: 151952 - protein, 10 aa, Artificial Sequence
  Description of Artificial Sequence: Synthetic peptide
  Seed: AKLANVVRKM
AHLANVVRKI

SEQ ID NO: 151953 - protein, 10 aa, Artificial Sequence
  Description of Artificial Sequence: Synthetic peptide
  Seed: AKLANVVRKM
AHLANVVRKL

SEQ ID NO: 151954 - protein, 10 aa, Artificial Sequence
  Description of Artificial Sequence: Synthetic peptide
  Seed: AKLANVVRKM
AHLANVVRKV

SEQ ID NO: 151955 - protein, 9 aa, Artificial Sequence
  Description of Artificial Sequence: Synthetic peptide
  Seed: ARLGKGYMF
AHLGKGYMF

SEQ ID NO: 151956 - protein, 9 aa, Artificial Sequence
  Description of Artificial Sequence: Synthetic peptide
  Seed: ARLGKGYMF
AHLGKGYMY

SEQ ID NO: 151957 - protein, 10 aa, Artificial Sequence
  Description of Artificial Sequence: Synthetic peptide
  Seed: ALQLFIKDYR
AHQLFIKDYK

SEQ ID NO: 151958 - protein, 10 aa, Artificial Sequence
  Description of Artificial Sequence: Synthetic peptide
  Seed: ALQLFIKDYR
AHQLFIKDYR

SEQ ID NO: 151959 - protein, 8 aa, Artificial Sequence
  Description of Artificial Sequence: Synthetic peptide
  Seed: AISTTFPY
AHSTTFPF

SEQ ID NO: 151960 - protein, 8 aa, Artificial Sequence
  Description of Artificial Sequence: Synthetic peptide
  Seed: AISTTFPY
AHSTTFPY

SEQ ID NO: 151961 - protein, 10 aa, Artificial Sequence
  Description of Artificial Sequence: Synthetic peptide
  Seed: AIATPGMQIR
AIATPGMQIK

SEQ ID NO: 151962 - protein, 9 aa, Artificial Sequence
  Description of Artificial Sequence: Synthetic peptide
  Seed: AIATPGMQI
AIATPGMQV

SEQ ID NO: 151963 - protein, 10 aa, Artificial Sequence
  Description of Artificial Sequence: Synthetic peptide
  Seed: ANFSMELPSF
AIFSMELPSF

SEQ ID NO: 151964 - protein, 10 aa, Artificial Sequence
  Description of Artificial Sequence: Synthetic peptide
  Seed: ANFSMELPSF
AIFSMELPSY

SEQ ID NO: 151965 - protein, 10 aa, Artificial Sequence
  Description of Artificial Sequence: Synthetic peptide
  Seed: AKLANVVRKM
AILANVVRKA

SEQ ID NO: 151966 - protein, 10 aa, Artificial Sequence
  Description of Artificial Sequence: Synthetic peptide
  Seed: AKLANVVRKM
AILANVVRKI

SEQ ID NO: 151967 - protein, 10 aa, Artificial Sequence
  Description of Artificial Sequence: Synthetic peptide
  Seed: AKLANVVRKM
AILANVVRKL

SEQ ID NO: 151968 - protein, 10 aa, Artificial Sequence
  Description of Artificial Sequence: Synthetic peptide
  Seed: AKLANVVRKM
AILANVVRKM

SEQ ID NO: 151969 - protein, 10 aa, Artificial Sequence
  Description of Artificial Sequence: Synthetic peptide
  Seed: AKLANVVRKM
AILANVVRKV

SEQ ID NO: 151970 - protein, 10 aa, Artificial Sequence
  Description of Artificial Sequence: Synthetic peptide
  Seed: ALQLFIKDYR
AIQLFIKDYK

SEQ ID NO: 151971 - protein, 10 aa, Artificial Sequence
  Description of Artificial Sequence: Synthetic peptide
  Seed: ALQLFIKDYR
AIQLFIKDYR

SEQ ID NO: 151972 - protein, 8 aa, Artificial Sequence
  Description of Artificial Sequence: Synthetic peptide
  Seed: AISTTFPY
AISTTFPF

SEQ ID NO: 151973 - protein, 9 aa, Artificial Sequence
  Description of Artificial Sequence: Synthetic peptide
  Seed: AISTTFPYT
AISTTFPYA

SEQ ID NO: 151974 - protein, 9 aa, Artificial Sequence
  Description of Artificial Sequence: Synthetic peptide
  Seed: AISTTFPYT
AISTTFPYC

SEQ ID NO: 151975 - protein, 9 aa, Artificial Sequence
  Description of Artificial Sequence: Synthetic peptide
  Seed: AISTTFPYT
AISTTFPYI

SEQ ID NO: 151976 - protein, 9 aa, Artificial Sequence
  Description of Artificial Sequence: Synthetic peptide
  Seed: AISTTFPYT
AISTTFPYL

SEQ ID NO: 151977 - protein, 9 aa, Artificial Sequence
  Description of Artificial Sequence: Synthetic peptide
  Seed: AISTTFPYT
AISTTFPYM

SEQ ID NO: 151978 - protein, 9 aa, Artificial Sequence
  Description of Artificial Sequence: Synthetic peptide
  Seed: AISTTFPYT
AISTTFPYV

SEQ ID NO: 151979 - protein, 9 aa, Artificial Sequence
  Description of Artificial Sequence: Synthetic peptide
  Seed: ALTLNTMTK
AITLNTMTK

SEQ ID NO: 151980 - protein, 9 aa, Artificial Sequence
  Description of Artificial Sequence: Synthetic peptide
  Seed: ALTLNTMTK
AITLNTMTR

SEQ ID NO: 151981 - protein, 10 aa, Artificial Sequence
  Description of Artificial Sequence: Synthetic peptide
  Seed: ANFSMELPSF
AKFSMELPSF

SEQ ID NO: 151982 - protein, 10 aa, Artificial Sequence
  Description of Artificial Sequence: Synthetic peptide
  Seed: ANFSMELPSF
AKFSMELPSI

SEQ ID NO: 151983 - protein, 10 aa, Artificial Sequence
  Description of Artificial Sequence: Synthetic peptide
  Seed: ANFSMELPSF
AKFSMELPSL

SEQ ID NO: 151984 - protein, 10 aa, Artificial Sequence
  Description of Artificial Sequence: Synthetic peptide
  Seed: ANFSMELPSF
AKFSMELPSM

SEQ ID NO: 151985 - protein, 10 aa, Artificial Sequence
  Description of Artificial Sequence: Synthetic peptide
  Seed: ANFSMELPSF
AKFSMELPSW

SEQ ID NO: 151986 - protein, 10 aa, Artificial Sequence
  Description of Artificial Sequence: Synthetic peptide
  Seed: ANFSMELPSF
AKFSMELPSY

SEQ ID NO: 151987 - protein, 10 aa, Artificial Sequence
  Description of Artificial Sequence: Synthetic peptide
  Seed: AKLANVVRKM
AKLANVVRKA

SEQ ID NO: 151988 - protein, 10 aa, Artificial Sequence
  Description of Artificial Sequence: Synthetic peptide
  Seed: AKLANVVRKM
AKLANVVRKI

SEQ ID NO: 151989 - protein, 10 aa, Artificial Sequence
  Description of Artificial Sequence: Synthetic peptide
  Seed: AKLANVVRKM
AKLANVVRKL

SEQ ID NO: 151990 - protein, 10 aa, Artificial Sequence
  Description of Artificial Sequence: Synthetic peptide
  Seed: AKLANVVRKM
AKLANVVRKV

SEQ ID NO: 151991 - protein, 9 aa, Artificial Sequence
  Description of Artificial Sequence: Synthetic peptide
  Seed: ARLGKGYMF
AKLGKGYMF

SEQ ID NO: 151992 - protein, 9 aa, Artificial Sequence
  Description of Artificial Sequence: Synthetic peptide
  Seed: ARLGKGYMF
AKLGKGYML

SEQ ID NO: 151993 - protein, 9 aa, Artificial Sequence
  Description of Artificial Sequence: Synthetic peptide
  Seed: ARLGKGYMF
AKLGKGYMM

SEQ ID NO: 151994 - protein, 9 aa, Artificial Sequence
  Description of Artificial Sequence: Synthetic peptide
  Seed: ARLGKGYMF
AKLGKGYMY

SEQ ID NO: 151995 - protein, 10 aa, Artificial Sequence
  Description of Artificial Sequence: Synthetic peptide
  Seed: ALQLFIKDYR
AKQLFIKDYK

SEQ ID NO: 151996 - protein, 10 aa, Artificial Sequence
  Description of Artificial Sequence: Synthetic peptide
  Seed: ALQLFIKDYR
AKQLFIKDYR

SEQ ID NO: 151997 - protein, 8 aa, Artificial Sequence
  Description of Artificial Sequence: Synthetic peptide
  Seed: AISTTFPY
AKSTTFPF

SEQ ID NO: 151998 - protein, 8 aa, Artificial Sequence
  Description of Artificial Sequence: Synthetic peptide
  Seed: AISTTFPY
AKSTTFPM

SEQ ID NO: 151999 - protein, 8 aa, Artificial Sequence
  Description of Artificial Sequence: Synthetic peptide
  Seed: AISTTFPY
AKSTTFPY

SEQ ID NO: 152000 - protein, 9 aa, Artificial Sequence
  Description of Artificial Sequence: Synthetic peptide
  Seed: AIATPGMQI
ALATPGMQA

SEQ ID NO: 152001 - protein, 9 aa, Artificial Sequence
  Description of Artificial Sequence: Synthetic peptide
  Seed: AIATPGMQI
ALATPGMQI

SEQ ID NO: 152002 - protein, 10 aa, Artificial Sequence
  Description of Artificial Sequence: Synthetic peptide
  Seed: AIATPGMQIR
ALATPGMQIK

SEQ ID NO: 152003 - protein, 10 aa, Artificial Sequence
  Description of Artificial Sequence: Synthetic peptide
  Seed: AIATPGMQIR
ALATPGMQIR

SEQ ID NO: 152004 - protein, 9 aa, Artificial Sequence
  Description of Artificial Sequence: Synthetic peptide
  Seed: AIATPGMQI
ALATPGMQL

SEQ ID NO: 152005 - protein, 9 aa, Artificial Sequence
  Description of Artificial Sequence: Synthetic peptide
  Seed: AIATPGMQI
ALATPGMQM

SEQ ID NO: 152006 - protein, 9 aa, Artificial Sequence
  Description of Artificial Sequence: Synthetic peptide
  Seed: AIATPGMQI
ALATPGMQV

SEQ ID NO: 152007 - protein, 10 aa, Artificial Sequence
  Description of Artificial Sequence: Synthetic peptide
  Seed: ANFSMELPSF
ALFSMELPSF

SEQ ID NO: 152008 - protein, 10 aa, Artificial Sequence
  Description of Artificial Sequence: Synthetic peptide
  Seed: ANFSMELPSF
ALFSMELPSM

SEQ ID NO: 152009 - protein, 10 aa, Artificial Sequence
  Description of Artificial Sequence: Synthetic peptide
  Seed: ANFSMELPSF
ALFSMELPSY

SEQ ID NO: 152010 - protein, 10 aa, Artificial Sequence
  Description of Artificial Sequence: Synthetic peptide
  Seed: AKLANVVRKM
ALLANVVRKA

SEQ ID NO: 152011 - protein, 10 aa, Artificial Sequence
  Description of Artificial Sequence: Synthetic peptide
  Seed: AKLANVVRKM
ALLANVVRKI

SEQ ID NO: 152012 - protein, 10 aa, Artificial Sequence
  Description of Artificial Sequence: Synthetic peptide
  Seed: AKLANVVRKM
ALLANVVRKL

SEQ ID NO: 152013 - protein, 10 aa, Artificial Sequence
  Description of Artificial Sequence: Synthetic peptide
  Seed: AKLANVVRKM
ALLANVVRKM

SEQ ID NO: 152014 - protein, 10 aa, Artificial Sequence
  Description of Artificial Sequence: Synthetic peptide
  Seed: AKLANVVRKM
ALLANVVRKV

SEQ ID NO: 152015 - protein, 9 aa, Artificial Sequence
  Description of Artificial Sequence: Synthetic peptide
  Seed: ARLGKGYMF
ALLGKGYMF

SEQ ID NO: 152016 - protein, 9 aa, Artificial Sequence
  Description of Artificial Sequence: Synthetic peptide
  Seed: ARLGKGYMF
ALLGKGYMY

SEQ ID NO: 152017 - protein, 10 aa, Artificial Sequence
  Description of Artificial Sequence: Synthetic peptide
  Seed: ALQLFIKDYR
ALQLFIKDYK

SEQ ID NO: 152018 - protein, 8 aa, Artificial Sequence
  Description of Artificial Sequence: Synthetic peptide
  Seed: AISTTFPY
ALSTTFPF

SEQ ID NO: 152019 - protein, 8 aa, Artificial Sequence
  Description of Artificial Sequence: Synthetic peptide
  Seed: AISTTFPY
ALSTTFPY

SEQ ID NO: 152020 - protein, 9 aa, Artificial Sequence
  Description of Artificial Sequence: Synthetic peptide
  Seed: AISTTFPYT
ALSTTFPYA

SEQ ID NO: 152021 - protein, 9 aa, Artificial Sequence
  Description of Artificial Sequence: Synthetic peptide
  Seed: AISTTFPYT
ALSTTFPYC

SEQ ID NO: 152022 - protein, 9 aa, Artificial Sequence
  Description of Artificial Sequence: Synthetic peptide
  Seed: AISTTFPYT
ALSTTFPYF

SEQ ID NO: 152023 - protein, 9 aa, Artificial Sequence
  Description of Artificial Sequence: Synthetic peptide
  Seed: AISTTFPYT
ALSTTFPYI

SEQ ID NO: 152024 - protein, 9 aa, Artificial Sequence
  Description of Artificial Sequence: Synthetic peptide
  Seed: AISTTFPYT
ALSTTFPYL

SEQ ID NO: 152025 - protein, 9 aa, Artificial Sequence
  Description of Artificial Sequence: Synthetic peptide
  Seed: AISTTFPYT
ALSTTFPYM

SEQ ID NO: 152026 - protein, 9 aa, Artificial Sequence
  Description of Artificial Sequence: Synthetic peptide
  Seed: AISTTFPYT
ALSTTFPYS

SEQ ID NO: 152027 - protein, 9 aa, Artificial Sequence
  Description of Artificial Sequence: Synthetic peptide
  Seed: AISTTFPYT
ALSTTFPYT

SEQ ID NO: 152028 - protein, 9 aa, Artificial Sequence
  Description of Artificial Sequence: Synthetic peptide
  Seed: AISTTFPYT
ALSTTFPYV

SEQ ID NO: 152029 - protein, 9 aa, Artificial Sequence
  Description of Artificial Sequence: Synthetic peptide
  Seed: ALTLNTMTK
ALTLNTMTR

SEQ ID NO: 152030 - protein, 9 aa, Artificial Sequence
  Description of Artificial Sequence: Synthetic peptide
  Seed: AIATPGMQI
AMATPGMQA

SEQ ID NO: 152031 - protein, 9 aa, Artificial Sequence
  Description of Artificial Sequence: Synthetic peptide
  Seed: AIATPGMQI
AMATPGMQI

SEQ ID NO: 152032 - protein, 10 aa, Artificial Sequence
  Description of Artificial Sequence: Synthetic peptide
  Seed: AIATPGMQIR
AMATPGMQIK

SEQ ID NO: 152033 - protein, 10 aa, Artificial Sequence
  Description of Artificial Sequence: Synthetic peptide
  Seed: AIATPGMQIR
AMATPGMQIR

SEQ ID NO: 152034 - protein, 9 aa, Artificial Sequence
  Description of Artificial Sequence: Synthetic peptide
  Seed: AIATPGMQI
AMATPGMQL

SEQ ID NO: 152035 - protein, 9 aa, Artificial Sequence
  Description of Artificial Sequence: Synthetic peptide
  Seed: AIATPGMQI
AMATPGMQM

SEQ ID NO: 152036 - protein, 9 aa, Artificial Sequence
  Description of Artificial Sequence: Synthetic peptide
  Seed: AIATPGMQI
AMATPGMQT

SEQ ID NO: 152037 - protein, 9 aa, Artificial Sequence
  Description of Artificial Sequence: Synthetic peptide
  Seed: AIATPGMQI
AMATPGMQV

SEQ ID NO: 152038 - protein, 10 aa, Artificial Sequence
  Description of Artificial Sequence: Synthetic peptide
  Seed: ANFSMELPSF
AMFSMELPSF

SEQ ID NO: 152039 - protein, 10 aa, Artificial Sequence
  Description of Artificial Sequence: Synthetic peptide
  Seed: ANFSMELPSF
AMFSMELPSH

SEQ ID NO: 152040 - protein, 10 aa, Artificial Sequence
  Description of Artificial Sequence: Synthetic peptide
  Seed: ANFSMELPSF
AMFSMELPSI

SEQ ID NO: 152041 - protein, 10 aa, Artificial Sequence
  Description of Artificial Sequence: Synthetic peptide
  Seed: ANFSMELPSF
AMFSMELPSL

SEQ ID NO: 152042 - protein, 10 aa, Artificial Sequence
  Description of Artificial Sequence: Synthetic peptide
  Seed: ANFSMELPSF
AMFSMELPSM

SEQ ID NO: 152043 - protein, 10 aa, Artificial Sequence
  Description of Artificial Sequence: Synthetic peptide
  Seed: ANFSMELPSF
AMFSMELPSW

SEQ ID NO: 152044 - protein, 10 aa, Artificial Sequence
  Description of Artificial Sequence: Synthetic peptide
  Seed: ANFSMELPSF
AMFSMELPSY

SEQ ID NO: 152045 - protein, 10 aa, Artificial Sequence
  Description of Artificial Sequence: Synthetic peptide
  Seed: AKLANVVRKM
AMLANVVRKA

SEQ ID NO: 152046 - protein, 10 aa, Artificial Sequence
  Description of Artificial Sequence: Synthetic peptide
  Seed: AKLANVVRKM
AMLANVVRKI

SEQ ID NO: 152047 - protein, 10 aa, Artificial Sequence
  Description of Artificial Sequence: Synthetic peptide
  Seed: AKLANVVRKM
AMLANVVRKL

SEQ ID NO: 152048 - protein, 10 aa, Artificial Sequence
  Description of Artificial Sequence: Synthetic peptide
  Seed: AKLANVVRKM
AMLANVVRKM

SEQ ID NO: 152049 - protein, 10 aa, Artificial Sequence
  Description of Artificial Sequence: Synthetic peptide
  Seed: AKLANVVRKM
AMLANVVRKV

SEQ ID NO: 152050 - protein, 9 aa, Artificial Sequence
  Description of Artificial Sequence: Synthetic peptide
  Seed: ARLGKGYMF
AMLGKGYMF

SEQ ID NO: 152051 - protein, 9 aa, Artificial Sequence
  Description of Artificial Sequence: Synthetic peptide
  Seed: ARLGKGYMF
AMLGKGYML

SEQ ID NO: 152052 - protein, 9 aa, Artificial Sequence
  Description of Artificial Sequence: Synthetic peptide
  Seed: ARLGKGYMF
AMLGKGYMM

SEQ ID NO: 152053 - protein, 9 aa, Artificial Sequence
  Description of Artificial Sequence: Synthetic peptide
  Seed: ARLGKGYMF
AMLGKGYMY

SEQ ID NO: 152054 - protein, 9 aa, Artificial Sequence
  Description of Artificial Sequence: Synthetic peptide
  Seed: ALQLFIKDY
AMQLFIKDF

SEQ ID NO: 152055 - protein, 9 aa, Artificial Sequence
  Description of Artificial Sequence: Synthetic peptide
  Seed: ALQLFIKDY
AMQLFIKDM

SEQ ID NO: 152056 - protein, 9 aa, Artificial Sequence
  Description of Artificial Sequence: Synthetic peptide
  Seed: ALQLFIKDY
AMQLFIKDY

SEQ ID NO: 152057 - protein, 10 aa, Artificial Sequence
  Description of Artificial Sequence: Synthetic peptide
  Seed: ALQLFIKDYR
AMQLFIKDYK

SEQ ID NO: 152058 - protein, 10 aa, Artificial Sequence
  Description of Artificial Sequence: Synthetic peptide
  Seed: ALQLFIKDYR
AMQLFIKDYR

SEQ ID NO: 152059 - protein, 8 aa, Artificial Sequence
  Description of Artificial Sequence: Synthetic peptide
  Seed: AISTTFPY
AMSTTFPF

SEQ ID NO: 152060 - protein, 8 aa, Artificial Sequence
  Description of Artificial Sequence: Synthetic peptide
  Seed: AISTTFPY
AMSTTFPL

SEQ ID NO: 152061 - protein, 8 aa, Artificial Sequence
  Description of Artificial Sequence: Synthetic peptide
  Seed: AISTTFPY
AMSTTFPM

SEQ ID NO: 152062 - protein, 8 aa, Artificial Sequence
  Description of Artificial Sequence: Synthetic peptide
  Seed: AISTTFPY
AMSTTFPY

SEQ ID NO: 152063 - protein, 9 aa, Artificial Sequence
  Description of Artificial Sequence: Synthetic peptide
  Seed: AISTTFPYT
AMSTTFPYA

SEQ ID NO: 152064 - protein, 9 aa, Artificial Sequence
  Description of Artificial Sequence: Synthetic peptide
  Seed: AISTTFPYT
AMSTTFPYC

SEQ ID NO: 152065 - protein, 9 aa, Artificial Sequence
  Description of Artificial Sequence: Synthetic peptide
  Seed: AISTTFPYT
AMSTTFPYF

SEQ ID NO: 152066 - protein, 9 aa, Artificial Sequence
  Description of Artificial Sequence: Synthetic peptide
  Seed: AISTTFPYT
AMSTTFPYI

SEQ ID NO: 152067 - protein, 9 aa, Artificial Sequence
  Description of Artificial Sequence: Synthetic peptide
  Seed: AISTTFPYT
AMSTTFPYL

SEQ ID NO: 152068 - protein, 9 aa, Artificial Sequence
  Description of Artificial Sequence: Synthetic peptide
  Seed: AISTTFPYT
AMSTTFPYM

SEQ ID NO: 152069 - protein, 9 aa, Artificial Sequence
  Description of Artificial Sequence: Synthetic peptide
  Seed: AISTTFPYT
AMSTTFPYS

SEQ ID NO: 152070 - protein, 9 aa, Artificial Sequence
  Description of Artificial Sequence: Synthetic peptide
  Seed: AISTTFPYT
AMSTTFPYT

SEQ ID NO: 152071 - protein, 9 aa, Artificial Sequence
  Description of Artificial Sequence: Synthetic peptide
  Seed: AISTTFPYT
AMSTTFPYV

SEQ ID NO: 152072 - protein, 9 aa, Artificial Sequence
  Description of Artificial Sequence: Synthetic peptide
  Seed: ALTLNTMTK
AMTLNTMTK

SEQ ID NO: 152073 - protein, 9 aa, Artificial Sequence
  Description of Artificial Sequence: Synthetic peptide
  Seed: ALTLNTMTK
AMTLNTMTR

SEQ ID NO: 152074 - protein, 10 aa, Artificial Sequence
  Description of Artificial Sequence: Synthetic peptide
  Seed: ANFSMELPSF
ANFSMELPSY

SEQ ID NO: 152075 - protein, 10 aa, Artificial Sequence
  Description of Artificial Sequence: Synthetic peptide
  Seed: AKLANVVRKM
ANLANVVRKA

SEQ ID NO: 152076 - protein, 10 aa, Artificial Sequence
  Description of Artificial Sequence: Synthetic peptide
  Seed: AKLANVVRKM
ANLANVVRKI

SEQ ID NO: 152077 - protein, 10 aa, Artificial Sequence
  Description of Artificial Sequence: Synthetic peptide
  Seed: AKLANVVRKM
ANLANVVRKL

SEQ ID NO: 152078 - protein, 10 aa, Artificial Sequence
  Description of Artificial Sequence: Synthetic peptide
  Seed: AKLANVVRKM
ANLANVVRKV

SEQ ID NO: 152079 - protein, 10 aa, Artificial Sequence
  Description of Artificial Sequence: Synthetic peptide
  Seed: ALQLFIKDYR
ANQLFIKDYK

SEQ ID NO: 152080 - protein, 10 aa, Artificial Sequence
  Description of Artificial Sequence: Synthetic peptide
  Seed: ALQLFIKDYR
ANQLFIKDYR

SEQ ID NO: 152081 - protein, 10 aa, Artificial Sequence
  Description of Artificial Sequence: Synthetic peptide
  Seed: ANFSMELPSF
APFSMELPSF

SEQ ID NO: 152082 - protein, 10 aa, Artificial Sequence
  Description of Artificial Sequence: Synthetic peptide
  Seed: AKLANVVRKM
APLANVVRKA

SEQ ID NO: 152083 - protein, 10 aa, Artificial Sequence
  Description of Artificial Sequence: Synthetic peptide
  Seed: AKLANVVRKM
APLANVVRKI

SEQ ID NO: 152084 - protein, 10 aa, Artificial Sequence
  Description of Artificial Sequence: Synthetic peptide
  Seed: AKLANVVRKM
APLANVVRKL

SEQ ID NO: 152085 - protein, 10 aa, Artificial Sequence
  Description of Artificial Sequence: Synthetic peptide
  Seed: AKLANVVRKM
APLANVVRKV

SEQ ID NO: 152086 - protein, 10 aa, Artificial Sequence
  Description of Artificial Sequence: Synthetic peptide
  Seed: ALQLFIKDYR
APQLFIKDYK

SEQ ID NO: 152087 - protein, 10 aa, Artificial Sequence
  Description of Artificial Sequence: Synthetic peptide
  Seed: ALQLFIKDYR
APQLFIKDYR

SEQ ID NO: 152088 - protein, 8 aa, Artificial Sequence
  Description of Artificial Sequence: Synthetic peptide
  Seed: AISTTFPY
APSTTFPY

SEQ ID NO: 152089 - protein, 10 aa, Artificial Sequence
  Description of Artificial Sequence: Synthetic peptide
  Seed: AIATPGMQIR
AQATPGMQIK

SEQ ID NO: 152090 - protein, 10 aa, Artificial Sequence
  Description of Artificial Sequence: Synthetic peptide
  Seed: AIATPGMQIR
AQATPGMQIR

SEQ ID NO: 152091 - protein, 9 aa, Artificial Sequence
  Description of Artificial Sequence: Synthetic peptide
  Seed: AIATPGMQI
AQATPGMQV

SEQ ID NO: 152092 - protein, 10 aa, Artificial Sequence
  Description of Artificial Sequence: Synthetic peptide
  Seed: ANFSMELPSF
AQFSMELPSA

SEQ ID NO: 152093 - protein, 10 aa, Artificial Sequence
  Description of Artificial Sequence: Synthetic peptide
  Seed: ANFSMELPSF
AQFSMELPSF

SEQ ID NO: 152094 - protein, 10 aa, Artificial Sequence
  Description of Artificial Sequence: Synthetic peptide
  Seed: ANFSMELPSF
AQFSMELPSH

SEQ ID NO: 152095 - protein, 10 aa, Artificial Sequence
  Description of Artificial Sequence: Synthetic peptide
  Seed: ANFSMELPSF
AQFSMELPSI

SEQ ID NO: 152096 - protein, 10 aa, Artificial Sequence
  Description of Artificial Sequence: Synthetic peptide
  Seed: ANFSMELPSF
AQFSMELPSL

SEQ ID NO: 152097 - protein, 10 aa, Artificial Sequence
  Description of Artificial Sequence: Synthetic peptide
  Seed: ANFSMELPSF
AQFSMELPSM

SEQ ID NO: 152098 - protein, 10 aa, Artificial Sequence
  Description of Artificial Sequence: Synthetic peptide
  Seed: ANFSMELPSF
AQFSMELPSV

SEQ ID NO: 152099 - protein, 10 aa, Artificial Sequence
  Description of Artificial Sequence: Synthetic peptide
  Seed: ANFSMELPSF
AQFSMELPSW

SEQ ID NO: 152100 - protein, 10 aa, Artificial Sequence
  Description of Artificial Sequence: Synthetic peptide
  Seed: ANFSMELPSF
AQFSMELPSY

SEQ ID NO: 152101 - protein, 10 aa, Artificial Sequence
  Description of Artificial Sequence: Synthetic peptide
  Seed: AKLANVVRKM
AQLANVVRKA

SEQ ID NO: 152102 - protein, 10 aa, Artificial Sequence
  Description of Artificial Sequence: Synthetic peptide
  Seed: AKLANVVRKM
AQLANVVRKI

SEQ ID NO: 152103 - protein, 10 aa, Artificial Sequence
  Description of Artificial Sequence: Synthetic peptide
  Seed: AKLANVVRKM
AQLANVVRKL

SEQ ID NO: 152104 - protein, 10 aa, Artificial Sequence
  Description of Artificial Sequence: Synthetic peptide
  Seed: AKLANVVRKM
AQLANVVRKV

SEQ ID NO: 152105 - protein, 9 aa, Artificial Sequence
  Description of Artificial Sequence: Synthetic peptide
  Seed: ARLGKGYMF
AQLGKGYMF

SEQ ID NO: 152106 - protein, 9 aa, Artificial Sequence
  Description of Artificial Sequence: Synthetic peptide
  Seed: ARLGKGYMF
AQLGKGYMI

SEQ ID NO: 152107 - protein, 9 aa, Artificial Sequence
  Description of Artificial Sequence: Synthetic peptide
  Seed: ARLGKGYMF
AQLGKGYML

SEQ ID NO: 152108 - protein, 9 aa, Artificial Sequence
  Description of Artificial Sequence: Synthetic peptide
  Seed: ARLGKGYMF
AQLGKGYMM

SEQ ID NO: 152109 - protein, 9 aa, Artificial Sequence
  Description of Artificial Sequence: Synthetic peptide
  Seed: ARLGKGYMF
AQLGKGYMV

SEQ ID NO: 152110 - protein, 9 aa, Artificial Sequence
  Description of Artificial Sequence: Synthetic peptide
  Seed: ARLGKGYMF
AQLGKGYMW

SEQ ID NO: 152111 - protein, 9 aa, Artificial Sequence
  Description of Artificial Sequence: Synthetic peptide
  Seed: ARLGKGYMF
AQLGKGYMY

SEQ ID NO: 152112 - protein, 9 aa, Artificial Sequence
  Description of Artificial Sequence: Synthetic peptide
  Seed: ALQLFIKDY
AQQLFIKDF

SEQ ID NO: 152113 - protein, 9 aa, Artificial Sequence
  Description of Artificial Sequence: Synthetic peptide
  Seed: ALQLFIKDY
AQQLFIKDY

SEQ ID NO: 152114 - protein, 10 aa, Artificial Sequence
  Description of Artificial Sequence: Synthetic peptide
  Seed: ALQLFIKDYR
AQQLFIKDYK

SEQ ID NO: 152115 - protein, 10 aa, Artificial Sequence
  Description of Artificial Sequence: Synthetic peptide
  Seed: ALQLFIKDYR
AQQLFIKDYR

SEQ ID NO: 152116 - protein, 8 aa, Artificial Sequence
  Description of Artificial Sequence: Synthetic peptide
  Seed: AISTTFPY
AQSTTFPF

SEQ ID NO: 152117 - protein, 8 aa, Artificial Sequence
  Description of Artificial Sequence: Synthetic peptide
  Seed: AISTTFPY
AQSTTFPI

SEQ ID NO: 152118 - protein, 8 aa, Artificial Sequence
  Description of Artificial Sequence: Synthetic peptide
  Seed: AISTTFPY
AQSTTFPL

SEQ ID NO: 152119 - protein, 8 aa, Artificial Sequence
  Description of Artificial Sequence: Synthetic peptide
  Seed: AISTTFPY
AQSTTFPM

SEQ ID NO: 152120 - protein, 8 aa, Artificial Sequence
  Description of Artificial Sequence: Synthetic peptide
  Seed: AISTTFPY
AQSTTFPW

SEQ ID NO: 152121 - protein, 8 aa, Artificial Sequence
  Description of Artificial Sequence: Synthetic peptide
  Seed: AISTTFPY
AQSTTFPY

SEQ ID NO: 152122 - protein, 9 aa, Artificial Sequence
  Description of Artificial Sequence: Synthetic peptide
  Seed: AISTTFPYT
AQSTTFPYA

SEQ ID NO: 152123 - protein, 9 aa, Artificial Sequence
  Description of Artificial Sequence: Synthetic peptide
  Seed: AISTTFPYT
AQSTTFPYC

SEQ ID NO: 152124 - protein, 9 aa, Artificial Sequence
  Description of Artificial Sequence: Synthetic peptide
  Seed: AISTTFPYT
AQSTTFPYF

SEQ ID NO: 152125 - protein, 9 aa, Artificial Sequence
  Description of Artificial Sequence: Synthetic peptide
  Seed: AISTTFPYT
AQSTTFPYI

SEQ ID NO: 152126 - protein, 9 aa, Artificial Sequence
  Description of Artificial Sequence: Synthetic peptide
  Seed: AISTTFPYT
AQSTTFPYL

SEQ ID NO: 152127 - protein, 9 aa, Artificial Sequence
  Description of Artificial Sequence: Synthetic peptide
  Seed: AISTTFPYT
AQSTTFPYM

SEQ ID NO: 152128 - protein, 9 aa, Artificial Sequence
  Description of Artificial Sequence: Synthetic peptide
  Seed: AISTTFPYT
AQSTTFPYS

SEQ ID NO: 152129 - protein, 9 aa, Artificial Sequence
  Description of Artificial Sequence: Synthetic peptide
  Seed: AISTTFPYT
AQSTTFPYT

SEQ ID NO: 152130 - protein, 9 aa, Artificial Sequence
  Description of Artificial Sequence: Synthetic peptide
  Seed: AISTTFPYT
AQSTTFPYV

SEQ ID NO: 152131 - protein, 9 aa, Artificial Sequence
  Description of Artificial Sequence: Synthetic peptide
  Seed: ALTLNTMTK
AQTLNTMTK

SEQ ID NO: 152132 - protein, 10 aa, Artificial Sequence
  Description of Artificial Sequence: Synthetic peptide
  Seed: ANFSMELPSF
ARFSMELPSF

SEQ ID NO: 152133 - protein, 10 aa, Artificial Sequence
  Description of Artificial Sequence: Synthetic peptide
  Seed: ANFSMELPSF
ARFSMELPSM

SEQ ID NO: 152134 - protein, 10 aa, Artificial Sequence
  Description of Artificial Sequence: Synthetic peptide
  Seed: ANFSMELPSF
ARFSMELPSY

SEQ ID NO: 152135 - protein, 10 aa, Artificial Sequence
  Description of Artificial Sequence: Synthetic peptide
  Seed: AKLANVVRKM
ARLANVVRKA

SEQ ID NO: 152136 - protein, 10 aa, Artificial Sequence
  Description of Artificial Sequence: Synthetic peptide
  Seed: AKLANVVRKM
ARLANVVRKI

SEQ ID NO: 152137 - protein, 10 aa, Artificial Sequence
  Description of Artificial Sequence: Synthetic peptide
  Seed: AKLANVVRKM
ARLANVVRKL

SEQ ID NO: 152138 - protein, 10 aa, Artificial Sequence
  Description of Artificial Sequence: Synthetic peptide
  Seed: AKLANVVRKM
ARLANVVRKM

SEQ ID NO: 152139 - protein, 10 aa, Artificial Sequence
  Description of Artificial Sequence: Synthetic peptide
  Seed: AKLANVVRKM
ARLANVVRKV

SEQ ID NO: 152140 - protein, 9 aa, Artificial Sequence
  Description of Artificial Sequence: Synthetic peptide
  Seed: ARLGKGYMF
ARLGKGYMA

SEQ ID NO: 152141 - protein, 9 aa, Artificial Sequence
  Description of Artificial Sequence: Synthetic peptide
  Seed: ARLGKGYMF
ARLGKGYMC

SEQ ID NO: 152142 - protein, 9 aa, Artificial Sequence
  Description of Artificial Sequence: Synthetic peptide
  Seed: ARLGKGYMF
ARLGKGYMI

SEQ ID NO: 152143 - protein, 9 aa, Artificial Sequence
  Description of Artificial Sequence: Synthetic peptide
  Seed: ARLGKGYMF
ARLGKGYMK

SEQ ID NO: 152144 - protein, 9 aa, Artificial Sequence
  Description of Artificial Sequence: Synthetic peptide
  Seed: ARLGKGYMF
ARLGKGYML

SEQ ID NO: 152145 - protein, 9 aa, Artificial Sequence
  Description of Artificial Sequence: Synthetic peptide
  Seed: ARLGKGYMF
ARLGKGYMM

SEQ ID NO: 152146 - protein, 9 aa, Artificial Sequence
  Description of Artificial Sequence: Synthetic peptide
  Seed: ARLGKGYMF
ARLGKGYMR

SEQ ID NO: 152147 - protein, 9 aa, Artificial Sequence
  Description of Artificial Sequence: Synthetic peptide
  Seed: ARLGKGYMF
ARLGKGYMT

SEQ ID NO: 152148 - protein, 9 aa, Artificial Sequence
  Description of Artificial Sequence: Synthetic peptide
  Seed: ARLGKGYMF
ARLGKGYMV

SEQ ID NO: 152149 - protein, 9 aa, Artificial Sequence
  Description of Artificial Sequence: Synthetic peptide
  Seed: ARLGKGYMF
ARLGKGYMW

SEQ ID NO: 152150 - protein, 9 aa, Artificial Sequence
  Description of Artificial Sequence: Synthetic peptide
  Seed: ARLGKGYMF
ARLGKGYMY

SEQ ID NO: 152151 - protein, 10 aa, Artificial Sequence
  Description of Artificial Sequence: Synthetic peptide
  Seed: ALQLFIKDYR
ARQLFIKDYK

SEQ ID NO: 152152 - protein, 10 aa, Artificial Sequence
  Description of Artificial Sequence: Synthetic peptide
  Seed: ALQLFIKDYR
ARQLFIKDYR

SEQ ID NO: 152153 - protein, 8 aa, Artificial Sequence
  Description of Artificial Sequence: Synthetic peptide
  Seed: AISTTFPY
ARSTTFPF

SEQ ID NO: 152154 - protein, 8 aa, Artificial Sequence
  Description of Artificial Sequence: Synthetic peptide
  Seed: AISTTFPY
ARSTTFPY

SEQ ID NO: 152155 - protein, 10 aa, Artificial Sequence
  Description of Artificial Sequence: Synthetic peptide
  Seed: AIATPGMQIR
ASATPGMQIK

SEQ ID NO: 152156 - protein, 10 aa, Artificial Sequence
  Description of Artificial Sequence: Synthetic peptide
  Seed: AIATPGMQIR
ASATPGMQIR

SEQ ID NO: 152157 - protein, 10 aa, Artificial Sequence
  Description of Artificial Sequence: Synthetic peptide
  Seed: ANFSMELPSF
ASFSMELPSF

SEQ ID NO: 152158 - protein, 10 aa, Artificial Sequence
  Description of Artificial Sequence: Synthetic peptide
  Seed: ANFSMELPSF
ASFSMELPSM

SEQ ID NO: 152159 - protein, 10 aa, Artificial Sequence
  Description of Artificial Sequence: Synthetic peptide
  Seed: ANFSMELPSF
ASFSMELPSY

SEQ ID NO: 152160 - protein, 10 aa, Artificial Sequence
  Description of Artificial Sequence: Synthetic peptide
  Seed: AKLANVVRKM
ASLANVVRKA

SEQ ID NO: 152161 - protein, 10 aa, Artificial Sequence
  Description of Artificial Sequence: Synthetic peptide
  Seed: AKLANVVRKM
ASLANVVRKI

SEQ ID NO: 152162 - protein, 10 aa, Artificial Sequence
  Description of Artificial Sequence: Synthetic peptide
  Seed: AKLANVVRKM
ASLANVVRKL

SEQ ID NO: 152163 - protein, 10 aa, Artificial Sequence
  Description of Artificial Sequence: Synthetic peptide
  Seed: AKLANVVRKM
ASLANVVRKV

SEQ ID NO: 152164 - protein, 9 aa, Artificial Sequence
  Description of Artificial Sequence: Synthetic peptide
  Seed: ARLGKGYMF
ASLGKGYMF

SEQ ID NO: 152165 - protein, 9 aa, Artificial Sequence
  Description of Artificial Sequence: Synthetic peptide
  Seed: ARLGKGYMF
ASLGKGYMY

SEQ ID NO: 152166 - protein, 10 aa, Artificial Sequence
  Description of Artificial Sequence: Synthetic peptide
  Seed: ALQLFIKDYR
ASQLFIKDYK

SEQ ID NO: 152167 - protein, 10 aa, Artificial Sequence
  Description of Artificial Sequence: Synthetic peptide
  Seed: ALQLFIKDYR
ASQLFIKDYR

SEQ ID NO: 152168 - protein, 8 aa, Artificial Sequence
  Description of Artificial Sequence: Synthetic peptide
  Seed: AISTTFPY
ASSTTFPF

SEQ ID NO: 152169 - protein, 8 aa, Artificial Sequence
  Description of Artificial Sequence: Synthetic peptide
  Seed: AISTTFPY
ASSTTFPY

SEQ ID NO: 152170 - protein, 9 aa, Artificial Sequence
  Description of Artificial Sequence: Synthetic peptide
  Seed: AISTTFPYT
ASSTTFPYA

SEQ ID NO: 152171 - protein, 9 aa, Artificial Sequence
  Description of Artificial Sequence: Synthetic peptide
  Seed: AISTTFPYT
ASSTTFPYI

SEQ ID NO: 152172 - protein, 9 aa, Artificial Sequence
  Description of Artificial Sequence: Synthetic peptide
  Seed: AISTTFPYT
ASSTTFPYL

SEQ ID NO: 152173 - protein, 9 aa, Artificial Sequence
  Description of Artificial Sequence: Synthetic peptide
  Seed: AISTTFPYT
ASSTTFPYV

SEQ ID NO: 152174 - protein, 9 aa, Artificial Sequence
  Description of Artificial Sequence: Synthetic peptide
  Seed: AATALANTI
ASTALANTF

SEQ ID NO: 152175 - protein, 9 aa, Artificial Sequence
  Description of Artificial Sequence: Synthetic peptide
  Seed: AATALANTI
ASTALANTI

SEQ ID NO: 152176 - protein, 9 aa, Artificial Sequence
  Description of Artificial Sequence: Synthetic peptide
  Seed: AATALANTI
ASTALANTL

SEQ ID NO: 152177 - protein, 9 aa, Artificial Sequence
  Description of Artificial Sequence: Synthetic peptide
  Seed: AATALANTI
ASTALANTM

SEQ ID NO: 152178 - protein, 9 aa, Artificial Sequence
  Description of Artificial Sequence: Synthetic peptide
  Seed: AATALANTI
ASTALANTV

SEQ ID NO: 152179 - protein, 9 aa, Artificial Sequence
  Description of Artificial Sequence: Synthetic peptide
  Seed: AATALANTI
ASTALANTY

SEQ ID NO: 152180 - protein, 9 aa, Artificial Sequence
  Description of Artificial Sequence: Synthetic peptide
  Seed: ALTLNTMTK
ASTLNTMTK

SEQ ID NO: 152181 - protein, 9 aa, Artificial Sequence
  Description of Artificial Sequence: Synthetic peptide
  Seed: ALTLNTMTK
ASTLNTMTR

SEQ ID NO: 152182 - protein, 10 aa, Artificial Sequence
  Description of Artificial Sequence: Synthetic peptide
  Seed: AIATPGMQIR
ATATPGMQIK

SEQ ID NO: 152183 - protein, 10 aa, Artificial Sequence
  Description of Artificial Sequence: Synthetic peptide
  Seed: AIATPGMQIR
ATATPGMQIR

SEQ ID NO: 152184 - protein, 10 aa, Artificial Sequence
  Description of Artificial Sequence: Synthetic peptide
  Seed: AIATPGMQIR
ATATPGMQIY

SEQ ID NO: 152185 - protein, 9 aa, Artificial Sequence
  Description of Artificial Sequence: Synthetic peptide
  Seed: AIATPGMQI
ATATPGMQV

SEQ ID NO: 152186 - protein, 10 aa, Artificial Sequence
  Description of Artificial Sequence: Synthetic peptide
  Seed: ANFSMELPSF
ATFSMELPSF

SEQ ID NO: 152187 - protein, 10 aa, Artificial Sequence
  Description of Artificial Sequence: Synthetic peptide
  Seed: ANFSMELPSF
ATFSMELPSY

SEQ ID NO: 152188 - protein, 10 aa, Artificial Sequence
  Description of Artificial Sequence: Synthetic peptide
  Seed: AKLANVVRKM
ATLANVVRKA

SEQ ID NO: 152189 - protein, 10 aa, Artificial Sequence
  Description of Artificial Sequence: Synthetic peptide
  Seed: AKLANVVRKM
ATLANVVRKI

SEQ ID NO: 152190 - protein, 10 aa, Artificial Sequence
  Description of Artificial Sequence: Synthetic peptide
  Seed: AKLANVVRKM
ATLANVVRKL

SEQ ID NO: 152191 - protein, 10 aa, Artificial Sequence
  Description of Artificial Sequence: Synthetic peptide
  Seed: AKLANVVRKM
ATLANVVRKV

SEQ ID NO: 152192 - protein, 10 aa, Artificial Sequence
  Description of Artificial Sequence: Synthetic peptide
  Seed: ALQLFIKDYR
ATQLFIKDYK

SEQ ID NO: 152193 - protein, 10 aa, Artificial Sequence
  Description of Artificial Sequence: Synthetic peptide
  Seed: ALQLFIKDYR
ATQLFIKDYR

SEQ ID NO: 152194 - protein, 8 aa, Artificial Sequence
  Description of Artificial Sequence: Synthetic peptide
  Seed: AISTTFPY
ATSTTFPY

SEQ ID NO: 152195 - protein, 9 aa, Artificial Sequence
  Description of Artificial Sequence: Synthetic peptide
  Seed: AISTTFPYT
ATSTTFPYA

SEQ ID NO: 152196 - protein, 9 aa, Artificial Sequence
  Description of Artificial Sequence: Synthetic peptide
  Seed: AISTTFPYT
ATSTTFPYI

SEQ ID NO: 152197 - protein, 9 aa, Artificial Sequence
  Description of Artificial Sequence: Synthetic peptide
  Seed: AISTTFPYT
ATSTTFPYL

SEQ ID NO: 152198 - protein, 9 aa, Artificial Sequence
  Description of Artificial Sequence: Synthetic peptide
  Seed: AISTTFPYT
ATSTTFPYM

SEQ ID NO: 152199 - protein, 9 aa, Artificial Sequence
  Description of Artificial Sequence: Synthetic peptide
  Seed: AISTTFPYT
ATSTTFPYV

SEQ ID NO: 152200 - protein, 9 aa, Artificial Sequence
  Description of Artificial Sequence: Synthetic peptide
  Seed: AATALANTI
ATTALANTF

SEQ ID NO: 152201 - protein, 9 aa, Artificial Sequence
  Description of Artificial Sequence: Synthetic peptide
  Seed: AATALANTI
ATTALANTL

SEQ ID NO: 152202 - protein, 9 aa, Artificial Sequence
  Description of Artificial Sequence: Synthetic peptide
  Seed: AATALANTI
ATTALANTM

SEQ ID NO: 152203 - protein, 9 aa, Artificial Sequence
  Description of Artificial Sequence: Synthetic peptide
  Seed: AATALANTI
ATTALANTY

SEQ ID NO: 152204 - protein, 9 aa, Artificial Sequence
  Description of Artificial Sequence: Synthetic peptide
  Seed: ALTLNTMTK
ATTLNTMTK

SEQ ID NO: 152205 - protein, 9 aa, Artificial Sequence
  Description of Artificial Sequence: Synthetic peptide
  Seed: ALTLNTMTK
ATTLNTMTR

SEQ ID NO: 152206 - protein, 9 aa, Artificial Sequence
  Description of Artificial Sequence: Synthetic peptide
  Seed: ALTLNTMTK
ATTLNTMTY

SEQ ID NO: 152207 - protein, 10 aa, Artificial Sequence
  Description of Artificial Sequence: Synthetic peptide
  Seed: AIATPGMQIR
AVATPGMQIK

SEQ ID NO: 152208 - protein, 10 aa, Artificial Sequence
  Description of Artificial Sequence: Synthetic peptide
  Seed: AIATPGMQIR
AVATPGMQIR

SEQ ID NO: 152209 - protein, 10 aa, Artificial Sequence
  Description of Artificial Sequence: Synthetic peptide
  Seed: AIATPGMQIR
AVATPGMQIY

SEQ ID NO: 152210 - protein, 9 aa, Artificial Sequence
  Description of Artificial Sequence: Synthetic peptide
  Seed: AIATPGMQI
AVATPGMQV

SEQ ID NO: 152211 - protein, 10 aa, Artificial Sequence
  Description of Artificial Sequence: Synthetic peptide
  Seed: ANFSMELPSF
AVFSMELPSF

SEQ ID NO: 152212 - protein, 10 aa, Artificial Sequence
  Description of Artificial Sequence: Synthetic peptide
  Seed: ANFSMELPSF
AVFSMELPSM

SEQ ID NO: 152213 - protein, 10 aa, Artificial Sequence
  Description of Artificial Sequence: Synthetic peptide
  Seed: ANFSMELPSF
AVFSMELPSY

SEQ ID NO: 152214 - protein, 10 aa, Artificial Sequence
  Description of Artificial Sequence: Synthetic peptide
  Seed: AKLANVVRKM
AVLANVVRKA

SEQ ID NO: 152215 - protein, 10 aa, Artificial Sequence
  Description of Artificial Sequence: Synthetic peptide
  Seed: AKLANVVRKM
AVLANVVRKI

SEQ ID NO: 152216 - protein, 10 aa, Artificial Sequence
  Description of Artificial Sequence: Synthetic peptide
  Seed: AKLANVVRKM
AVLANVVRKL

SEQ ID NO: 152217 - protein, 10 aa, Artificial Sequence
  Description of Artificial Sequence: Synthetic peptide
  Seed: AKLANVVRKM
AVLANVVRKV

SEQ ID NO: 152218 - protein, 9 aa, Artificial Sequence
  Description of Artificial Sequence: Synthetic peptide
  Seed: ARLGKGYMF
AVLGKGYMF

SEQ ID NO: 152219 - protein, 10 aa, Artificial Sequence
  Description of Artificial Sequence: Synthetic peptide
  Seed: ALQLFIKDYR
AVQLFIKDYK

SEQ ID NO: 152220 - protein, 10 aa, Artificial Sequence
  Description of Artificial Sequence: Synthetic peptide
  Seed: ALQLFIKDYR
AVQLFIKDYR

SEQ ID NO: 152221 - protein, 8 aa, Artificial Sequence
  Description of Artificial Sequence: Synthetic peptide
  Seed: AISTTFPY
AVSTTFPF

SEQ ID NO: 152222 - protein, 8 aa, Artificial Sequence
  Description of Artificial Sequence: Synthetic peptide
  Seed: AISTTFPY
AVSTTFPY

SEQ ID NO: 152223 - protein, 9 aa, Artificial Sequence
  Description of Artificial Sequence: Synthetic peptide
  Seed: AISTTFPYT
AVSTTFPYA

SEQ ID NO: 152224 - protein, 9 aa, Artificial Sequence
  Description of Artificial Sequence: Synthetic peptide
  Seed: AISTTFPYT
AVSTTFPYC

SEQ ID NO: 152225 - protein, 9 aa, Artificial Sequence
  Description of Artificial Sequence: Synthetic peptide
  Seed: AISTTFPYT
AVSTTFPYI

SEQ ID NO: 152226 - protein, 9 aa, Artificial Sequence
  Description of Artificial Sequence: Synthetic peptide
  Seed: AISTTFPYT
AVSTTFPYL

SEQ ID NO: 152227 - protein, 9 aa, Artificial Sequence
  Description of Artificial Sequence: Synthetic peptide
  Seed: AISTTFPYT
AVSTTFPYM

SEQ ID NO: 152228 - protein, 9 aa, Artificial Sequence
  Description of Artificial Sequence: Synthetic peptide
  Seed: AISTTFPYT
AVSTTFPYT

SEQ ID NO: 152229 - protein, 9 aa, Artificial Sequence
  Description of Artificial Sequence: Synthetic peptide
  Seed: AISTTFPYT
AVSTTFPYV

SEQ ID NO: 152230 - protein, 9 aa, Artificial Sequence
  Description of Artificial Sequence: Synthetic peptide
  Seed: AATALANTI
AVTALANTM

SEQ ID NO: 152231 - protein, 9 aa, Artificial Sequence
  Description of Artificial Sequence: Synthetic peptide
  Seed: AATALANTI
AVTALANTY

SEQ ID NO: 152232 - protein, 9 aa, Artificial Sequence
  Description of Artificial Sequence: Synthetic peptide
  Seed: ALTLNTMTK
AVTLNTMTK

SEQ ID NO: 152233 - protein, 9 aa, Artificial Sequence
  Description of Artificial Sequence: Synthetic peptide
  Seed: ALTLNTMTK
AVTLNTMTR

SEQ ID NO: 152234 - protein, 9 aa, Artificial Sequence
  Description of Artificial Sequence: Synthetic peptide
  Seed: ALTLNTMTK
AVTLNTMTY

SEQ ID NO: 152235 - protein, 10 aa, Artificial Sequence
  Description of Artificial Sequence: Synthetic peptide
  Seed: AIATPGMQIR
AWATPGMQIR

SEQ ID NO: 152236 - protein, 10 aa, Artificial Sequence
  Description of Artificial Sequence: Synthetic peptide
  Seed: ANFSMELPSF
AWFSMELPSF

SEQ ID NO: 152237 - protein, 10 aa, Artificial Sequence
  Description of Artificial Sequence: Synthetic peptide
  Seed: ANFSMELPSF
AWFSMELPSI

SEQ ID NO: 152238 - protein, 10 aa, Artificial Sequence
  Description of Artificial Sequence: Synthetic peptide
  Seed: ANFSMELPSF
AWFSMELPSL

SEQ ID NO: 152239 - protein, 10 aa, Artificial Sequence
  Description of Artificial Sequence: Synthetic peptide
  Seed: ANFSMELPSF
AWFSMELPSM

SEQ ID NO: 152240 - protein, 10 aa, Artificial Sequence
  Description of Artificial Sequence: Synthetic peptide
  Seed: ANFSMELPSF
AWFSMELPSW

SEQ ID NO: 152241 - protein, 10 aa, Artificial Sequence
  Description of Artificial Sequence: Synthetic peptide
  Seed: AKLANVVRKM
AWLANVVRKA

SEQ ID NO: 152242 - protein, 10 aa, Artificial Sequence
  Description of Artificial Sequence: Synthetic peptide
  Seed: AKLANVVRKM
AWLANVVRKI

SEQ ID NO: 152243 - protein, 10 aa, Artificial Sequence
  Description of Artificial Sequence: Synthetic peptide
  Seed: AKLANVVRKM
AWLANVVRKL

SEQ ID NO: 152244 - protein, 10 aa, Artificial Sequence
  Description of Artificial Sequence: Synthetic peptide
  Seed: AKLANVVRKM
AWLANVVRKM

SEQ ID NO: 152245 - protein, 10 aa, Artificial Sequence
  Description of Artificial Sequence: Synthetic peptide
  Seed: AKLANVVRKM
AWLANVVRKV

SEQ ID NO: 152246 - protein, 10 aa, Artificial Sequence
  Description of Artificial Sequence: Synthetic peptide
  Seed: ALQLFIKDYR
AWQLFIKDYK

SEQ ID NO: 152247 - protein, 10 aa, Artificial Sequence
  Description of Artificial Sequence: Synthetic peptide
  Seed: ALQLFIKDYR
AWQLFIKDYR

SEQ ID NO: 152248 - protein, 8 aa, Artificial Sequence
  Description of Artificial Sequence: Synthetic peptide
  Seed: AISTTFPY
AWSTTFPY

SEQ ID NO: 152249 - protein, 10 aa, Artificial Sequence
  Description of Artificial Sequence: Synthetic peptide
  Seed: AIATPGMQIR
AYATPGMQIR

SEQ ID NO: 152250 - protein, 10 aa, Artificial Sequence
  Description of Artificial Sequence: Synthetic peptide
  Seed: ANFSMELPSF
AYFSMELPSF

SEQ ID NO: 152251 - protein, 10 aa, Artificial Sequence
  Description of Artificial Sequence: Synthetic peptide
  Seed: ANFSMELPSF
AYFSMELPSI

SEQ ID NO: 152252 - protein, 10 aa, Artificial Sequence
  Description of Artificial Sequence: Synthetic peptide
  Seed: ANFSMELPSF
AYFSMELPSL

SEQ ID NO: 152253 - protein, 10 aa, Artificial Sequence
  Description of Artificial Sequence: Synthetic peptide
  Seed: ANFSMELPSF
AYFSMELPSM

SEQ ID NO: 152254 - protein, 10 aa, Artificial Sequence
  Description of Artificial Sequence: Synthetic peptide
  Seed: ANFSMELPSF
AYFSMELPSV

SEQ ID NO: 152255 - protein, 10 aa, Artificial Sequence
  Description of Artificial Sequence: Synthetic peptide
  Seed: ANFSMELPSF
AYFSMELPSW

SEQ ID NO: 152256 - protein, 10 aa, Artificial Sequence
  Description of Artificial Sequence: Synthetic peptide
  Seed: ANFSMELPSF
AYFSMELPSY

SEQ ID NO: 152257 - protein, 10 aa, Artificial Sequence
  Description of Artificial Sequence: Synthetic peptide
  Seed: AKLANVVRKM
AYLANVVRKA

SEQ ID NO: 152258 - protein, 10 aa, Artificial Sequence
  Description of Artificial Sequence: Synthetic peptide
  Seed: AKLANVVRKM
AYLANVVRKI

SEQ ID NO: 152259 - protein, 10 aa, Artificial Sequence
  Description of Artificial Sequence: Synthetic peptide
  Seed: AKLANVVRKM
AYLANVVRKL

SEQ ID NO: 152260 - protein, 10 aa, Artificial Sequence
  Description of Artificial Sequence: Synthetic peptide
  Seed: AKLANVVRKM
AYLANVVRKM

SEQ ID NO: 152261 - protein, 10 aa, Artificial Sequence
  Description of Artificial Sequence: Synthetic peptide
  Seed: AKLANVVRKM
AYLANVVRKV

SEQ ID NO: 152262 - protein, 10 aa, Artificial Sequence
  Description of Artificial Sequence: Synthetic peptide
  Seed: ALQLFIKDYR
AYQLFIKDYK

SEQ ID NO: 152263 - protein, 10 aa, Artificial Sequence
  Description of Artificial Sequence: Synthetic peptide
  Seed: ALQLFIKDYR
AYQLFIKDYR

SEQ ID NO: 152264 - protein, 8 aa, Artificial Sequence
  Description of Artificial Sequence: Synthetic peptide
  Seed: AISTTFPY
AYSTTFPF

SEQ ID NO: 152265 - protein, 8 aa, Artificial Sequence
  Description of Artificial Sequence: Synthetic peptide
  Seed: AISTTFPY
AYSTTFPY

SEQ ID NO: 152266 - protein, 10 aa, Artificial Sequence
  Description of Artificial Sequence: Synthetic peptide
  Seed: DMSIGVTVIK
DASIGVTVIK

SEQ ID NO: 152267 - protein, 10 aa, Artificial Sequence
  Description of Artificial Sequence: Synthetic peptide
  Seed: DMSIGVTVIK
DASIGVTVIR

SEQ ID NO: 152268 - protein, 10 aa, Artificial Sequence
  Description of Artificial Sequence: Synthetic peptide
  Seed: DMSIGVTVIK
DCSIGVTVIK

SEQ ID NO: 152269 - protein, 10 aa, Artificial Sequence
  Description of Artificial Sequence: Synthetic peptide
  Seed: DMSIGVTVIK
DCSIGVTVIR

SEQ ID NO: 152270 - protein, 10 aa, Artificial Sequence
  Description of Artificial Sequence: Synthetic peptide
  Seed: DMSIGVTVIK
DDSIGVTVIK

SEQ ID NO: 152271 - protein, 10 aa, Artificial Sequence
  Description of Artificial Sequence: Synthetic peptide
  Seed: DMSIGVTVIK
DDSIGVTVIR

SEQ ID NO: 152272 - protein, 10 aa, Artificial Sequence
  Description of Artificial Sequence: Synthetic peptide
  Seed: DMSIGVTVIK
DESIGVTVIK

SEQ ID NO: 152273 - protein, 10 aa, Artificial Sequence
  Description of Artificial Sequence: Synthetic peptide
  Seed: DMSIGVTVIK
DESIGVTVIR

SEQ ID NO: 152274 - protein, 10 aa, Artificial Sequence
  Description of Artificial Sequence: Synthetic peptide
  Seed: DMSIGVTVIK
DFSIGVTVIK

SEQ ID NO: 152275 - protein, 10 aa, Artificial Sequence
  Description of Artificial Sequence: Synthetic peptide
  Seed: DMSIGVTVIK
DFSIGVTVIR

SEQ ID NO: 152276 - protein, 10 aa, Artificial Sequence
  Description of Artificial Sequence: Synthetic peptide
  Seed: DMSIGVTVIK
DGSIGVTVIK

SEQ ID NO: 152277 - protein, 10 aa, Artificial Sequence
  Description of Artificial Sequence: Synthetic peptide
  Seed: DMSIGVTVIK
DGSIGVTVIR

SEQ ID NO: 152278 - protein, 10 aa, Artificial Sequence
  Description of Artificial Sequence: Synthetic peptide
  Seed: DMSIGVTVIK
DHSIGVTVIK

SEQ ID NO: 152279 - protein, 10 aa, Artificial Sequence
  Description of Artificial Sequence: Synthetic peptide
  Seed: DMSIGVTVIK
DHSIGVTVIR

SEQ ID NO: 152280 - protein, 10 aa, Artificial Sequence
  Description of Artificial Sequence: Synthetic peptide
  Seed: DMSIGVTVIK
DISIGVTVIK

SEQ ID NO: 152281 - protein, 10 aa, Artificial Sequence
  Description of Artificial Sequence: Synthetic peptide
  Seed: DMSIGVTVIK
DISIGVTVIR

SEQ ID NO: 152282 - protein, 10 aa, Artificial Sequence
  Description of Artificial Sequence: Synthetic peptide
  Seed: DMSIGVTVIK
DKSIGVTVIK

SEQ ID NO: 152283 - protein, 10 aa, Artificial Sequence
  Description of Artificial Sequence: Synthetic peptide
  Seed: DMSIGVTVIK
DKSIGVTVIR

SEQ ID NO: 152284 - protein, 10 aa, Artificial Sequence
  Description of Artificial Sequence: Synthetic peptide
  Seed: DMSIGVTVIK
DLSIGVTVIK

SEQ ID NO: 152285 - protein, 10 aa, Artificial Sequence
  Description of Artificial Sequence: Synthetic peptide
  Seed: DMSIGVTVIK
DLSIGVTVIR

SEQ ID NO: 152286 - protein, 10 aa, Artificial Sequence
  Description of Artificial Sequence: Synthetic peptide
  Seed: DMSIGVTVIK
DMSIGVTVIR

SEQ ID NO: 152287 - protein, 10 aa, Artificial Sequence
  Description of Artificial Sequence: Synthetic peptide
  Seed: DMSIGVTVIK
DMSIGVTVIY

SEQ ID NO: 152288 - protein, 10 aa, Artificial Sequence
  Description of Artificial Sequence: Synthetic peptide
  Seed: DMSIGVTVIK
DNSIGVTVIK

SEQ ID NO: 152289 - protein, 10 aa, Artificial Sequence
  Description of Artificial Sequence: Synthetic peptide
  Seed: DMSIGVTVIK
DNSIGVTVIR

SEQ ID NO: 152290 - protein, 10 aa, Artificial Sequence
  Description of Artificial Sequence: Synthetic peptide
  Seed: DMSIGVTVIK
DPSIGVTVIK

SEQ ID NO: 152291 - protein, 10 aa, Artificial Sequence
  Description of Artificial Sequence: Synthetic peptide
  Seed: DMSIGVTVIK
DPSIGVTVIR

SEQ ID NO: 152292 - protein, 10 aa, Artificial Sequence
  Description of Artificial Sequence: Synthetic peptide
  Seed: DMSIGVTVIK
DQSIGVTVIK

SEQ ID NO: 152293 - protein, 10 aa, Artificial Sequence
  Description of Artificial Sequence: Synthetic peptide
  Seed: DMSIGVTVIK
DQSIGVTVIR

SEQ ID NO: 152294 - protein, 10 aa, Artificial Sequence
  Description of Artificial Sequence: Synthetic peptide
  Seed: DMSIGVTVIK
DRSIGVTVIK

SEQ ID NO: 152295 - protein, 10 aa, Artificial Sequence
  Description of Artificial Sequence: Synthetic peptide
  Seed: DMSIGVTVIK
DRSIGVTVIR

SEQ ID NO: 152296 - protein, 10 aa, Artificial Sequence
  Description of Artificial Sequence: Synthetic peptide
  Seed: DMSIGVTVIK
DSSIGVTVIK

SEQ ID NO: 152297 - protein, 10 aa, Artificial Sequence
  Description of Artificial Sequence: Synthetic peptide
  Seed: DMSIGVTVIK
DSSIGVTVIR

SEQ ID NO: 152298 - protein, 10 aa, Artificial Sequence
  Description of Artificial Sequence: Synthetic peptide
  Seed: DMSIGVTVIK
DTSIGVTVIK

SEQ ID NO: 152299 - protein, 10 aa, Artificial Sequence
  Description of Artificial Sequence: Synthetic peptide
  Seed: DMSIGVTVIK
DTSIGVTVIR

SEQ ID NO: 152300 - protein, 10 aa, Artificial Sequence
  Description of Artificial Sequence: Synthetic peptide
  Seed: DMSIGVTVIK
DTSIGVTVIY

SEQ ID NO: 152301 - protein, 10 aa, Artificial Sequence
  Description of Artificial Sequence: Synthetic peptide
  Seed: DMSIGVTVIK
DVSIGVTVIK

SEQ ID NO: 152302 - protein, 10 aa, Artificial Sequence
  Description of Artificial Sequence: Synthetic peptide
  Seed: DMSIGVTVIK
DVSIGVTVIR

SEQ ID NO: 152303 - protein, 10 aa, Artificial Sequence
  Description of Artificial Sequence: Synthetic peptide
  Seed: DMSIGVTVIK
DVSIGVTVIY

SEQ ID NO: 152304 - protein, 10 aa, Artificial Sequence
  Description of Artificial Sequence: Synthetic peptide
  Seed: DMSIGVTVIK
DWSIGVTVIK

SEQ ID NO: 152305 - protein, 10 aa, Artificial Sequence
  Description of Artificial Sequence: Synthetic peptide
  Seed: DMSIGVTVIK
DWSIGVTVIR

SEQ ID NO: 152306 - protein, 10 aa, Artificial Sequence
  Description of Artificial Sequence: Synthetic peptide
  Seed: DMSIGVTVIK
DYSIGVTVIK

SEQ ID NO: 152307 - protein, 10 aa, Artificial Sequence
  Description of Artificial Sequence: Synthetic peptide
  Seed: DMSIGVTVIK
DYSIGVTVIR

SEQ ID NO: 152308 - protein, 8 aa, Artificial Sequence
  Description of Artificial Sequence: Synthetic peptide
  Seed: EFTSFFYR
EATSFFYK

SEQ ID NO: 152309 - protein, 8 aa, Artificial Sequence
  Description of Artificial Sequence: Synthetic peptide
  Seed: EFTSFFYR
EATSFFYR

SEQ ID NO: 152310 - protein, 9 aa, Artificial Sequence
  Description of Artificial Sequence: Synthetic peptide
  Seed: EFTSFFYRY
EATSFFYRY

SEQ ID NO: 152311 - protein, 8 aa, Artificial Sequence
  Description of Artificial Sequence: Synthetic peptide
  Seed: EFTSFFYR
ECTSFFYR

SEQ ID NO: 152312 - protein, 8 aa, Artificial Sequence
  Description of Artificial Sequence: Synthetic peptide
  Seed: EFTSFFYR
EFTSFFYK

SEQ ID NO: 152313 - protein, 9 aa, Artificial Sequence
  Description of Artificial Sequence: Synthetic peptide
  Seed: EFTSFFYRY
EFTSFFYRF

SEQ ID NO: 152314 - protein, 8 aa, Artificial Sequence
  Description of Artificial Sequence: Synthetic peptide
  Seed: EFTSFFYR
EGTSFFYR

SEQ ID NO: 152315 - protein, 9 aa, Artificial Sequence
  Description of Artificial Sequence: Synthetic peptide
  Seed: EFTSFFYRY
EGTSFFYRY

SEQ ID NO: 152316 - protein, 8 aa, Artificial Sequence
  Description of Artificial Sequence: Synthetic peptide
  Seed: EFTSFFYR
EHTSFFYR

SEQ ID NO: 152317 - protein, 9 aa, Artificial Sequence
  Description of Artificial Sequence: Synthetic peptide
  Seed: EFTSFFYRY
EHTSFFYRY

SEQ ID NO: 152318 - protein, 8 aa, Artificial Sequence
  Description of Artificial Sequence: Synthetic peptide
  Seed: EFTSFFYR
EITSFFYK

SEQ ID NO: 152319 - protein, 8 aa, Artificial Sequence
  Description of Artificial Sequence: Synthetic peptide
  Seed: EFTSFFYR
EITSFFYR

SEQ ID NO: 152320 - protein, 9 aa, Artificial Sequence
  Description of Artificial Sequence: Synthetic peptide
  Seed: EFTSFFYRY
EITSFFYRY

SEQ ID NO: 152321 - protein, 8 aa, Artificial Sequence
  Description of Artificial Sequence: Synthetic peptide
  Seed: EFTSFFYR
EKTSFFYR

SEQ ID NO: 152322 - protein, 8 aa, Artificial Sequence
  Description of Artificial Sequence: Synthetic peptide
  Seed: EFTSFFYR
ELTSFFYK

SEQ ID NO: 152323 - protein, 8 aa, Artificial Sequence
  Description of Artificial Sequence: Synthetic peptide
  Seed: EFTSFFYR
ELTSFFYR

SEQ ID NO: 152324 - protein, 9 aa, Artificial Sequence
  Description of Artificial Sequence: Synthetic peptide
  Seed: EFTSFFYRY
ELTSFFYRY

SEQ ID NO: 152325 - protein, 8 aa, Artificial Sequence
  Description of Artificial Sequence: Synthetic peptide
  Seed: EFTSFFYR
EMTSFFYK

SEQ ID NO: 152326 - protein, 8 aa, Artificial Sequence
  Description of Artificial Sequence: Synthetic peptide
  Seed: EFTSFFYR
EMTSFFYR

SEQ ID NO: 152327 - protein, 9 aa, Artificial Sequence
  Description of Artificial Sequence: Synthetic peptide
  Seed: EFTSFFYRY
EMTSFFYRF

SEQ ID NO: 152328 - protein, 9 aa, Artificial Sequence
  Description of Artificial Sequence: Synthetic peptide
  Seed: EFTSFFYRY
EMTSFFYRY

SEQ ID NO: 152329 - protein, 8 aa, Artificial Sequence
  Description of Artificial Sequence: Synthetic peptide
  Seed: EFTSFFYR
ENTSFFYR

SEQ ID NO: 152330 - protein, 9 aa, Artificial Sequence
  Description of Artificial Sequence: Synthetic peptide
  Seed: EFTSFFYRY
ENTSFFYRY

SEQ ID NO: 152331 - protein, 8 aa, Artificial Sequence
  Description of Artificial Sequence: Synthetic peptide
  Seed: EFTSFFYR
EQTSFFYR

SEQ ID NO: 152332 - protein, 9 aa, Artificial Sequence
  Description of Artificial Sequence: Synthetic peptide
  Seed: EFTSFFYRY
EQTSFFYRY

SEQ ID NO: 152333 - protein, 8 aa, Artificial Sequence
  Description of Artificial Sequence: Synthetic peptide
  Seed: EFTSFFYR
ERTSFFYR

SEQ ID NO: 152334 - protein, 8 aa, Artificial Sequence
  Description of Artificial Sequence: Synthetic peptide
  Seed: EFTSFFYR
ESTSFFYK

SEQ ID NO: 152335 - protein, 8 aa, Artificial Sequence
  Description of Artificial Sequence: Synthetic peptide
  Seed: EFTSFFYR
ESTSFFYR

SEQ ID NO: 152336 - protein, 9 aa, Artificial Sequence
  Description of Artificial Sequence: Synthetic peptide
  Seed: EFTSFFYRY
ESTSFFYRY

SEQ ID NO: 152337 - protein, 8 aa, Artificial Sequence
  Description of Artificial Sequence: Synthetic peptide
  Seed: EFTSFFYR
ETTSFFYK

SEQ ID NO: 152338 - protein, 8 aa, Artificial Sequence
  Description of Artificial Sequence: Synthetic peptide
  Seed: EFTSFFYR
ETTSFFYR

SEQ ID NO: 152339 - protein, 9 aa, Artificial Sequence
  Description of Artificial Sequence: Synthetic peptide
  Seed: EFTSFFYRY
ETTSFFYRY

SEQ ID NO: 152340 - protein, 8 aa, Artificial Sequence
  Description of Artificial Sequence: Synthetic peptide
  Seed: EFTSFFYR
EVTSFFYK

SEQ ID NO: 152341 - protein, 8 aa, Artificial Sequence
  Description of Artificial Sequence: Synthetic peptide
  Seed: EFTSFFYR
EVTSFFYR

SEQ ID NO: 152342 - protein, 9 aa, Artificial Sequence
  Description of Artificial Sequence: Synthetic peptide
  Seed: EFTSFFYRY
EVTSFFYRY

SEQ ID NO: 152343 - protein, 8 aa, Artificial Sequence
  Description of Artificial Sequence: Synthetic peptide
  Seed: EFTSFFYR
EWTSFFYR

SEQ ID NO: 152344 - protein, 9 aa, Artificial Sequence
  Description of Artificial Sequence: Synthetic peptide
  Seed: EFTSFFYRY
EWTSFFYRF

SEQ ID NO: 152345 - protein, 9 aa, Artificial Sequence
  Description of Artificial Sequence: Synthetic peptide
  Seed: EFTSFFYRY
EWTSFFYRY

SEQ ID NO: 152346 - protein, 8 aa, Artificial Sequence
  Description of Artificial Sequence: Synthetic peptide
  Seed: EFTSFFYR
EYTSFFYK

SEQ ID NO: 152347 - protein, 8 aa, Artificial Sequence
  Description of Artificial Sequence: Synthetic peptide
  Seed: EFTSFFYR
EYTSFFYR

SEQ ID NO: 152348 - protein, 9 aa, Artificial Sequence
  Description of Artificial Sequence: Synthetic peptide
  Seed: EFTSFFYRY
EYTSFFYRF

SEQ ID NO: 152349 - protein, 9 aa, Artificial Sequence
  Description of Artificial Sequence: Synthetic peptide
  Seed: EFTSFFYRY
EYTSFFYRY

SEQ ID NO: 152350 - protein, 8 aa, Artificial Sequence
  Description of Artificial Sequence: Synthetic peptide
  Seed: FSMELPSF
FAMELPSF

SEQ ID NO: 152351 - protein, 10 aa, Artificial Sequence
  Description of Artificial Sequence: Synthetic peptide
  Seed: FSMELPSFGV
FAMELPSFGA

SEQ ID NO: 152352 - protein, 10 aa, Artificial Sequence
  Description of Artificial Sequence: Synthetic peptide
  Seed: FSMELPSFGV
FAMELPSFGC

SEQ ID NO: 152353 - protein, 10 aa, Artificial Sequence
  Description of Artificial Sequence: Synthetic peptide
  Seed: FSMELPSFGV
FAMELPSFGF

SEQ ID NO: 152354 - protein, 10 aa, Artificial Sequence
  Description of Artificial Sequence: Synthetic peptide
  Seed: FSMELPSFGV
FAMELPSFGI

SEQ ID NO: 152355 - protein, 10 aa, Artificial Sequence
  Description of Artificial Sequence: Synthetic peptide
  Seed: FSMELPSFGV
FAMELPSFGM

SEQ ID NO: 152356 - protein, 10 aa, Artificial Sequence
  Description of Artificial Sequence: Synthetic peptide
  Seed: FSMELPSFGV
FAMELPSFGS

SEQ ID NO: 152357 - protein, 10 aa, Artificial Sequence
  Description of Artificial Sequence: Synthetic peptide
  Seed: FSMELPSFGV
FAMELPSFGT

SEQ ID NO: 152358 - protein, 10 aa, Artificial Sequence
  Description of Artificial Sequence: Synthetic peptide
  Seed: FSMELPSFGV
FAMELPSFGV

SEQ ID NO: 152359 - protein, 11 aa, Artificial Sequence
  Description of Artificial Sequence: Synthetic peptide
  Seed: FSMELPSFGVS
FAMELPSFGVA

SEQ ID NO: 152360 - protein, 11 aa, Artificial Sequence
  Description of Artificial Sequence: Synthetic peptide
  Seed: FSMELPSFGVS
FAMELPSFGVC

SEQ ID NO: 152361 - protein, 11 aa, Artificial Sequence
  Description of Artificial Sequence: Synthetic peptide
  Seed: FSMELPSFGVS
FAMELPSFGVD

SEQ ID NO: 152362 - protein, 11 aa, Artificial Sequence
  Description of Artificial Sequence: Synthetic peptide
  Seed: FSMELPSFGVS
FAMELPSFGVE

SEQ ID NO: 152363 - protein, 11 aa, Artificial Sequence
  Description of Artificial Sequence: Synthetic peptide
  Seed: FSMELPSFGVS
FAMELPSFGVF

SEQ ID NO: 152364 - protein, 11 aa, Artificial Sequence
  Description of Artificial Sequence: Synthetic peptide
  Seed: FSMELPSFGVS
FAMELPSFGVG

SEQ ID NO: 152365 - protein, 11 aa, Artificial Sequence
  Description of Artificial Sequence: Synthetic peptide
  Seed: FSMELPSFGVS
FAMELPSFGVH

SEQ ID NO: 152366 - protein, 11 aa, Artificial Sequence
  Description of Artificial Sequence: Synthetic peptide
  Seed: FSMELPSFGVS
FAMELPSFGVI

SEQ ID NO: 152367 - protein, 11 aa, Artificial Sequence
  Description of Artificial Sequence: Synthetic peptide
  Seed: FSMELPSFGVS
FAMELPSFGVK

SEQ ID NO: 152368 - protein, 11 aa, Artificial Sequence
  Description of Artificial Sequence: Synthetic peptide
  Seed: FSMELPSFGVS
FAMELPSFGVL

SEQ ID NO: 152369 - protein, 11 aa, Artificial Sequence
  Description of Artificial Sequence: Synthetic peptide
  Seed: FSMELPSFGVS
FAMELPSFGVM

SEQ ID NO: 152370 - protein, 11 aa, Artificial Sequence
  Description of Artificial Sequence: Synthetic peptide
  Seed: FSMELPSFGVS
FAMELPSFGVN

SEQ ID NO: 152371 - protein, 11 aa, Artificial Sequence
  Description of Artificial Sequence: Synthetic peptide
  Seed: FSMELPSFGVS
FAMELPSFGVP

SEQ ID NO: 152372 - protein, 11 aa, Artificial Sequence
  Description of Artificial Sequence: Synthetic peptide
  Seed: FSMELPSFGVS
FAMELPSFGVQ

SEQ ID NO: 152373 - protein, 11 aa, Artificial Sequence
  Description of Artificial Sequence: Synthetic peptide
  Seed: FSMELPSFGVS
FAMELPSFGVR

SEQ ID NO: 152374 - protein, 11 aa, Artificial Sequence
  Description of Artificial Sequence: Synthetic peptide
  Seed: FSMELPSFGVS
FAMELPSFGVS

SEQ ID NO: 152375 - protein, 11 aa, Artificial Sequence
  Description of Artificial Sequence: Synthetic peptide
  Seed: FSMELPSFGVS
FAMELPSFGVT

SEQ ID NO: 152376 - protein, 11 aa, Artificial Sequence
  Description of Artificial Sequence: Synthetic peptide
  Seed: FSMELPSFGVS
FAMELPSFGVV

SEQ ID NO: 152377 - protein, 11 aa, Artificial Sequence
  Description of Artificial Sequence: Synthetic peptide
  Seed: FSMELPSFGVS
FAMELPSFGVW

SEQ ID NO: 152378 - protein, 11 aa, Artificial Sequence
  Description of Artificial Sequence: Synthetic peptide
  Seed: FSMELPSFGVS
FAMELPSFGVY

SEQ ID NO: 152379 - protein, 8 aa, Artificial Sequence
  Description of Artificial Sequence: Synthetic peptide
  Seed: FSMELPSF
FAMELPSI

SEQ ID NO: 152380 - protein, 8 aa, Artificial Sequence
  Description of Artificial Sequence: Synthetic peptide
  Seed: FSMELPSF
FAMELPSL

SEQ ID NO: 152381 - protein, 8 aa, Artificial Sequence
  Description of Artificial Sequence: Synthetic peptide
  Seed: FSMELPSF
FAMELPSM

SEQ ID NO: 152382 - protein, 8 aa, Artificial Sequence
  Description of Artificial Sequence: Synthetic peptide
  Seed: FSMELPSF
FAMELPSV

SEQ ID NO: 152383 - protein, 8 aa, Artificial Sequence
  Description of Artificial Sequence: Synthetic peptide
  Seed: FSMELPSF
FAMELPSW

SEQ ID NO: 152384 - protein, 8 aa, Artificial Sequence
  Description of Artificial Sequence: Synthetic peptide
  Seed: FSMELPSF
FAMELPSY

SEQ ID NO: 152385 - protein, 10 aa, Artificial Sequence
  Description of Artificial Sequence: Synthetic peptide
  Seed: FNMLSTVLGV
FAMLSTVLGA

SEQ ID NO: 152386 - protein, 10 aa, Artificial Sequence
  Description of Artificial Sequence: Synthetic peptide
  Seed: FNMLSTVLGV
FAMLSTVLGC

SEQ ID NO: 152387 - protein, 10 aa, Artificial Sequence
  Description of Artificial Sequence: Synthetic peptide
  Seed: FNMLSTVLGV
FAMLSTVLGF

SEQ ID NO: 152388 - protein, 10 aa, Artificial Sequence
  Description of Artificial Sequence: Synthetic peptide
  Seed: FNMLSTVLGV
FAMLSTVLGI

SEQ ID NO: 152389 - protein, 10 aa, Artificial Sequence
  Description of Artificial Sequence: Synthetic peptide
  Seed: FNMLSTVLGV
FAMLSTVLGL

SEQ ID NO: 152390 - protein, 10 aa, Artificial Sequence
  Description of Artificial Sequence: Synthetic peptide
  Seed: FNMLSTVLGV
FAMLSTVLGM

SEQ ID NO: 152391 - protein, 10 aa, Artificial Sequence
  Description of Artificial Sequence: Synthetic peptide
  Seed: FNMLSTVLGV
FAMLSTVLGS

SEQ ID NO: 152392 - protein, 10 aa, Artificial Sequence
  Description of Artificial Sequence: Synthetic peptide
  Seed: FNMLSTVLGV
FAMLSTVLGT

SEQ ID NO: 152393 - protein, 10 aa, Artificial Sequence
  Description of Artificial Sequence: Synthetic peptide
  Seed: FNMLSTVLGV
FAMLSTVLGV

SEQ ID NO: 152394 - protein, 11 aa, Artificial Sequence
  Description of Artificial Sequence: Synthetic peptide
  Seed: FNMLSTVLGVS
FAMLSTVLGVA

SEQ ID NO: 152395 - protein, 11 aa, Artificial Sequence
  Description of Artificial Sequence: Synthetic peptide
  Seed: FNMLSTVLGVS
FAMLSTVLGVC

SEQ ID NO: 152396 - protein, 11 aa, Artificial Sequence
  Description of Artificial Sequence: Synthetic peptide
  Seed: FNMLSTVLGVS
FAMLSTVLGVD

SEQ ID NO: 152397 - protein, 11 aa, Artificial Sequence
  Description of Artificial Sequence: Synthetic peptide
  Seed: FNMLSTVLGVS
FAMLSTVLGVE

SEQ ID NO: 152398 - protein, 11 aa, Artificial Sequence
  Description of Artificial Sequence: Synthetic peptide
  Seed: FNMLSTVLGVS
FAMLSTVLGVF

SEQ ID NO: 152399 - protein, 11 aa, Artificial Sequence
  Description of Artificial Sequence: Synthetic peptide
  Seed: FNMLSTVLGVS
FAMLSTVLGVG

SEQ ID NO: 152400 - protein, 11 aa, Artificial Sequence
  Description of Artificial Sequence: Synthetic peptide
  Seed: FNMLSTVLGVS
FAMLSTVLGVH

SEQ ID NO: 152401 - protein, 11 aa, Artificial Sequence
  Description of Artificial Sequence: Synthetic peptide
  Seed: FNMLSTVLGVS
FAMLSTVLGVI

SEQ ID NO: 152402 - protein, 11 aa, Artificial Sequence
  Description of Artificial Sequence: Synthetic peptide
  Seed: FNMLSTVLGVS
FAMLSTVLGVK

SEQ ID NO: 152403 - protein, 11 aa, Artificial Sequence
  Description of Artificial Sequence: Synthetic peptide
  Seed: FNMLSTVLGVS
FAMLSTVLGVL

SEQ ID NO: 152404 - protein, 11 aa, Artificial Sequence
  Description of Artificial Sequence: Synthetic peptide
  Seed: FNMLSTVLGVS
FAMLSTVLGVM

SEQ ID NO: 152405 - protein, 11 aa, Artificial Sequence
  Description of Artificial Sequence: Synthetic peptide
  Seed: FNMLSTVLGVS
FAMLSTVLGVN

SEQ ID NO: 152406 - protein, 11 aa, Artificial Sequence
  Description of Artificial Sequence: Synthetic peptide
  Seed: FNMLSTVLGVS
FAMLSTVLGVP

SEQ ID NO: 152407 - protein, 11 aa, Artificial Sequence
  Description of Artificial Sequence: Synthetic peptide
  Seed: FNMLSTVLGVS
FAMLSTVLGVQ

SEQ ID NO: 152408 - protein, 11 aa, Artificial Sequence
  Description of Artificial Sequence: Synthetic peptide
  Seed: FNMLSTVLGVS
FAMLSTVLGVR

SEQ ID NO: 152409 - protein, 11 aa, Artificial Sequence
  Description of Artificial Sequence: Synthetic peptide
  Seed: FNMLSTVLGVS
FAMLSTVLGVS

SEQ ID NO: 152410 - protein, 11 aa, Artificial Sequence
  Description of Artificial Sequence: Synthetic peptide
  Seed: FNMLSTVLGVS
FAMLSTVLGVT

SEQ ID NO: 152411 - protein, 11 aa, Artificial Sequence
  Description of Artificial Sequence: Synthetic peptide
  Seed: FNMLSTVLGVS
FAMLSTVLGVV

SEQ ID NO: 152412 - protein, 11 aa, Artificial Sequence
  Description of Artificial Sequence: Synthetic peptide
  Seed: FNMLSTVLGVS
FAMLSTVLGVW

SEQ ID NO: 152413 - protein, 11 aa, Artificial Sequence
  Description of Artificial Sequence: Synthetic peptide
  Seed: FNMLSTVLGVS
FAMLSTVLGVY

SEQ ID NO: 152414 - protein, 8 aa, Artificial Sequence
  Description of Artificial Sequence: Synthetic peptide
  Seed: FSNKMARL
FANKMARF

SEQ ID NO: 152415 - protein, 8 aa, Artificial Sequence
  Description of Artificial Sequence: Synthetic peptide
  Seed: FSNKMARL
FANKMARL

SEQ ID NO: 152416 - protein, 10 aa, Artificial Sequence
  Description of Artificial Sequence: Synthetic peptide
  Seed: FSNKMARLGK
FANKMARLGK

SEQ ID NO: 152417 - protein, 10 aa, Artificial Sequence
  Description of Artificial Sequence: Synthetic peptide
  Seed: FSNKMARLGK
FANKMARLGR

SEQ ID NO: 152418 - protein, 8 aa, Artificial Sequence
  Description of Artificial Sequence: Synthetic peptide
  Seed: FSNKMARL
FANKMARM

SEQ ID NO: 152419 - protein, 8 aa, Artificial Sequence
  Description of Artificial Sequence: Synthetic peptide
  Seed: FSNKMARL
FANKMARY

SEQ ID NO: 152420 - protein, 9 aa, Artificial Sequence
  Description of Artificial Sequence: Synthetic peptide
  Seed: FFPSSSYRR
FAPSSSYRK

SEQ ID NO: 152421 - protein, 9 aa, Artificial Sequence
  Description of Artificial Sequence: Synthetic peptide
  Seed: FFPSSSYRR
FAPSSSYRR

SEQ ID NO: 152422 - protein, 8 aa, Artificial Sequence
  Description of Artificial Sequence: Synthetic peptide
  Seed: FTSFFYRY
FASFFYRY

SEQ ID NO: 152423 - protein, 10 aa, Artificial Sequence
  Description of Artificial Sequence: Synthetic peptide
  Seed: FTSFFYRYGF
FASFFYRYGA

SEQ ID NO: 152424 - protein, 10 aa, Artificial Sequence
  Description of Artificial Sequence: Synthetic peptide
  Seed: FTSFFYRYGF
FASFFYRYGF

SEQ ID NO: 152425 - protein, 10 aa, Artificial Sequence
  Description of Artificial Sequence: Synthetic peptide
  Seed: FTSFFYRYGF
FASFFYRYGI

SEQ ID NO: 152426 - protein, 10 aa, Artificial Sequence
  Description of Artificial Sequence: Synthetic peptide
  Seed: FTSFFYRYGF
FASFFYRYGK

SEQ ID NO: 152427 - protein, 10 aa, Artificial Sequence
  Description of Artificial Sequence: Synthetic peptide
  Seed: FTSFFYRYGF
FASFFYRYGL

SEQ ID NO: 152428 - protein, 10 aa, Artificial Sequence
  Description of Artificial Sequence: Synthetic peptide
  Seed: FTSFFYRYGF
FASFFYRYGM

SEQ ID NO: 152429 - protein, 10 aa, Artificial Sequence
  Description of Artificial Sequence: Synthetic peptide
  Seed: FTSFFYRYGF
FASFFYRYGR

SEQ ID NO: 152430 - protein, 10 aa, Artificial Sequence
  Description of Artificial Sequence: Synthetic peptide
  Seed: FTSFFYRYGF
FASFFYRYGT

SEQ ID NO: 152431 - protein, 10 aa, Artificial Sequence
  Description of Artificial Sequence: Synthetic peptide
  Seed: FTSFFYRYGF
FASFFYRYGV

SEQ ID NO: 152432 - protein, 10 aa, Artificial Sequence
  Description of Artificial Sequence: Synthetic peptide
  Seed: FTSFFYRYGF
FASFFYRYGW

SEQ ID NO: 152433 - protein, 10 aa, Artificial Sequence
  Description of Artificial Sequence: Synthetic peptide
  Seed: FTSFFYRYGF
FASFFYRYGY

SEQ ID NO: 152434 - protein, 10 aa, Artificial Sequence
  Description of Artificial Sequence: Synthetic peptide
  Seed: FPSSSYRRPV
FASSSYRRPF

SEQ ID NO: 152435 - protein, 10 aa, Artificial Sequence
  Description of Artificial Sequence: Synthetic peptide
  Seed: FPSSSYRRPV
FASSSYRRPI

SEQ ID NO: 152436 - protein, 10 aa, Artificial Sequence
  Description of Artificial Sequence: Synthetic peptide
  Seed: FPSSSYRRPV
FASSSYRRPL

SEQ ID NO: 152437 - protein, 10 aa, Artificial Sequence
  Description of Artificial Sequence: Synthetic peptide
  Seed: FPSSSYRRPV
FASSSYRRPM

SEQ ID NO: 152438 - protein, 10 aa, Artificial Sequence
  Description of Artificial Sequence: Synthetic peptide
  Seed: FPSSSYRRPV
FASSSYRRPV

SEQ ID NO: 152439 - protein, 10 aa, Artificial Sequence
  Description of Artificial Sequence: Synthetic peptide
  Seed: FPSSSYRRPV
FASSSYRRPW

SEQ ID NO: 152440 - protein, 10 aa, Artificial Sequence
  Description of Artificial Sequence: Synthetic peptide
  Seed: FPSSSYRRPV
FASSSYRRPY

SEQ ID NO: 152441 - protein, 9 aa, Artificial Sequence
  Description of Artificial Sequence: Synthetic peptide
  Seed: FPYTGDPPY
FAYTGDPPA

SEQ ID NO: 152442 - protein, 9 aa, Artificial Sequence
  Description of Artificial Sequence: Synthetic peptide
  Seed: FPYTGDPPY
FAYTGDPPC

SEQ ID NO: 152443 - protein, 9 aa, Artificial Sequence
  Description of Artificial Sequence: Synthetic peptide
  Seed: FPYTGDPPY
FAYTGDPPE

SEQ ID NO: 152444 - protein, 9 aa, Artificial Sequence
  Description of Artificial Sequence: Synthetic peptide
  Seed: FPYTGDPPY
FAYTGDPPF

SEQ ID NO: 152445 - protein, 9 aa, Artificial Sequence
  Description of Artificial Sequence: Synthetic peptide
  Seed: FPYTGDPPY
FAYTGDPPG

SEQ ID NO: 152446 - protein, 9 aa, Artificial Sequence
  Description of Artificial Sequence: Synthetic peptide
  Seed: FPYTGDPPY
FAYTGDPPH

SEQ ID NO: 152447 - protein, 9 aa, Artificial Sequence
  Description of Artificial Sequence: Synthetic peptide
  Seed: FPYTGDPPY
FAYTGDPPI

SEQ ID NO: 152448 - protein, 9 aa, Artificial Sequence
  Description of Artificial Sequence: Synthetic peptide
  Seed: FPYTGDPPY
FAYTGDPPK

SEQ ID NO: 152449 - protein, 9 aa, Artificial Sequence
  Description of Artificial Sequence: Synthetic peptide
  Seed: FPYTGDPPY
FAYTGDPPL

SEQ ID NO: 152450 - protein, 9 aa, Artificial Sequence
  Description of Artificial Sequence: Synthetic peptide
  Seed: FPYTGDPPY
FAYTGDPPM

SEQ ID NO: 152451 - protein, 9 aa, Artificial Sequence
  Description of Artificial Sequence: Synthetic peptide
  Seed: FPYTGDPPY
FAYTGDPPN

SEQ ID NO: 152452 - protein, 9 aa, Artificial Sequence
  Description of Artificial Sequence: Synthetic peptide
  Seed: FPYTGDPPY
FAYTGDPPQ

SEQ ID NO: 152453 - protein, 9 aa, Artificial Sequence
  Description of Artificial Sequence: Synthetic peptide
  Seed: FPYTGDPPY
FAYTGDPPS

SEQ ID NO: 152454 - protein, 9 aa, Artificial Sequence
  Description of Artificial Sequence: Synthetic peptide
  Seed: FPYTGDPPY
FAYTGDPPT

SEQ ID NO: 152455 - protein, 9 aa, Artificial Sequence
  Description of Artificial Sequence: Synthetic peptide
  Seed: FPYTGDPPY
FAYTGDPPV

SEQ ID NO: 152456 - protein, 9 aa, Artificial Sequence
  Description of Artificial Sequence: Synthetic peptide
  Seed: FPYTGDPPY
FAYTGDPPW

SEQ ID NO: 152457 - protein, 9 aa, Artificial Sequence
  Description of Artificial Sequence: Synthetic peptide
  Seed: FPYTGDPPY
FAYTGDPPY

SEQ ID NO: 152458 - protein, 10 aa, Artificial Sequence
  Description of Artificial Sequence: Synthetic peptide
  Seed: FPYTGDPPYS
FAYTGDPPYA

SEQ ID NO: 152459 - protein, 10 aa, Artificial Sequence
  Description of Artificial Sequence: Synthetic peptide
  Seed: FPYTGDPPYS
FAYTGDPPYC

SEQ ID NO: 152460 - protein, 10 aa, Artificial Sequence
  Description of Artificial Sequence: Synthetic peptide
  Seed: FPYTGDPPYS
FAYTGDPPYD

SEQ ID NO: 152461 - protein, 10 aa, Artificial Sequence
  Description of Artificial Sequence: Synthetic peptide
  Seed: FPYTGDPPYS
FAYTGDPPYE

SEQ ID NO: 152462 - protein, 10 aa, Artificial Sequence
  Description of Artificial Sequence: Synthetic peptide
  Seed: FPYTGDPPYS
FAYTGDPPYF

SEQ ID NO: 152463 - protein, 10 aa, Artificial Sequence
  Description of Artificial Sequence: Synthetic peptide
  Seed: FPYTGDPPYS
FAYTGDPPYG

SEQ ID NO: 152464 - protein, 10 aa, Artificial Sequence
  Description of Artificial Sequence: Synthetic peptide
  Seed: FPYTGDPPYS
FAYTGDPPYH

SEQ ID NO: 152465 - protein, 10 aa, Artificial Sequence
  Description of Artificial Sequence: Synthetic peptide
  Seed: FPYTGDPPYS
FAYTGDPPYI

SEQ ID NO: 152466 - protein, 10 aa, Artificial Sequence
  Description of Artificial Sequence: Synthetic peptide
  Seed: FPYTGDPPYS
FAYTGDPPYK

SEQ ID NO: 152467 - protein, 10 aa, Artificial Sequence
  Description of Artificial Sequence: Synthetic peptide
  Seed: FPYTGDPPYS
FAYTGDPPYL

SEQ ID NO: 152468 - protein, 10 aa, Artificial Sequence
  Description of Artificial Sequence: Synthetic peptide
  Seed: FPYTGDPPYS
FAYTGDPPYM

SEQ ID NO: 152469 - protein, 10 aa, Artificial Sequence
  Description of Artificial Sequence: Synthetic peptide
  Seed: FPYTGDPPYS
FAYTGDPPYN

SEQ ID NO: 152470 - protein, 10 aa, Artificial Sequence
  Description of Artificial Sequence: Synthetic peptide
  Seed: FPYTGDPPYS
FAYTGDPPYP

SEQ ID NO: 152471 - protein, 10 aa, Artificial Sequence
  Description of Artificial Sequence: Synthetic peptide
  Seed: FPYTGDPPYS
FAYTGDPPYQ

SEQ ID NO: 152472 - protein, 10 aa, Artificial Sequence
  Description of Artificial Sequence: Synthetic peptide
  Seed: FPYTGDPPYS
FAYTGDPPYR

SEQ ID NO: 152473 - protein, 10 aa, Artificial Sequence
  Description of Artificial Sequence: Synthetic peptide
  Seed: FPYTGDPPYS
FAYTGDPPYS

SEQ ID NO: 152474 - protein, 11 aa, Artificial Sequence
  Description of Artificial Sequence: Synthetic peptide
  Seed: FPYTGDPPYSH
FAYTGDPPYSF

SEQ ID NO: 152475 - protein, 11 aa, Artificial Sequence
  Description of Artificial Sequence: Synthetic peptide
  Seed: FPYTGDPPYSH
FAYTGDPPYSL

SEQ ID NO: 152476 - protein, 11 aa, Artificial Sequence
  Description of Artificial Sequence: Synthetic peptide
  Seed: FPYTGDPPYSH
FAYTGDPPYSM

SEQ ID NO: 152477 - protein, 11 aa, Artificial Sequence
  Description of Artificial Sequence: Synthetic peptide
  Seed: FPYTGDPPYSH
FAYTGDPPYSW

SEQ ID NO: 152478 - protein, 11 aa, Artificial Sequence
  Description of Artificial Sequence: Synthetic peptide
  Seed: FPYTGDPPYSH
FAYTGDPPYSY

SEQ ID NO: 152479 - protein, 10 aa, Artificial Sequence
  Description of Artificial Sequence: Synthetic peptide
  Seed: FPYTGDPPYS
FAYTGDPPYT

SEQ ID NO: 152480 - protein, 10 aa, Artificial Sequence
  Description of Artificial Sequence: Synthetic peptide
  Seed: FPYTGDPPYS
FAYTGDPPYV

SEQ ID NO: 152481 - protein, 10 aa, Artificial Sequence
  Description of Artificial Sequence: Synthetic peptide
  Seed: FPYTGDPPYS
FAYTGDPPYW

SEQ ID NO: 152482 - protein, 10 aa, Artificial Sequence
  Description of Artificial Sequence: Synthetic peptide
  Seed: FPYTGDPPYS
FAYTGDPPYY

SEQ ID NO: 152483 - protein, 10 aa, Artificial Sequence
  Description of Artificial Sequence: Synthetic peptide
  Seed: FSMELPSFGV
FCMELPSFGA

SEQ ID NO: 152484 - protein, 10 aa, Artificial Sequence
  Description of Artificial Sequence: Synthetic peptide
  Seed: FSMELPSFGV
FCMELPSFGI

SEQ ID NO: 152485 - protein, 10 aa, Artificial Sequence
  Description of Artificial Sequence: Synthetic peptide
  Seed: FSMELPSFGV
FCMELPSFGL

SEQ ID NO: 152486 - protein, 10 aa, Artificial Sequence
  Description of Artificial Sequence: Synthetic peptide
  Seed: FSMELPSFGV
FCMELPSFGM

SEQ ID NO: 152487 - protein, 10 aa, Artificial Sequence
  Description of Artificial Sequence: Synthetic peptide
  Seed: FSMELPSFGV
FCMELPSFGV

SEQ ID NO: 152488 - protein, 10 aa, Artificial Sequence
  Description of Artificial Sequence: Synthetic peptide
  Seed: FNMLSTVLGV
FCMLSTVLGA

SEQ ID NO: 152489 - protein, 10 aa, Artificial Sequence
  Description of Artificial Sequence: Synthetic peptide
  Seed: FNMLSTVLGV
FCMLSTVLGC

SEQ ID NO: 152490 - protein, 10 aa, Artificial Sequence
  Description of Artificial Sequence: Synthetic peptide
  Seed: FNMLSTVLGV
FCMLSTVLGF

SEQ ID NO: 152491 - protein, 10 aa, Artificial Sequence
  Description of Artificial Sequence: Synthetic peptide
  Seed: FNMLSTVLGV
FCMLSTVLGI

SEQ ID NO: 152492 - protein, 10 aa, Artificial Sequence
  Description of Artificial Sequence: Synthetic peptide
  Seed: FNMLSTVLGV
FCMLSTVLGL

SEQ ID NO: 152493 - protein, 10 aa, Artificial Sequence
  Description of Artificial Sequence: Synthetic peptide
  Seed: FNMLSTVLGV
FCMLSTVLGM

SEQ ID NO: 152494 - protein, 10 aa, Artificial Sequence
  Description of Artificial Sequence: Synthetic peptide
  Seed: FNMLSTVLGV
FCMLSTVLGS

SEQ ID NO: 152495 - protein, 10 aa, Artificial Sequence
  Description of Artificial Sequence: Synthetic peptide
  Seed: FNMLSTVLGV
FCMLSTVLGT

SEQ ID NO: 152496 - protein, 10 aa, Artificial Sequence
  Description of Artificial Sequence: Synthetic peptide
  Seed: FNMLSTVLGV
FCMLSTVLGV

SEQ ID NO: 152497 - protein, 11 aa, Artificial Sequence
  Description of Artificial Sequence: Synthetic peptide
  Seed: FNMLSTVLGVS
FCMLSTVLGVA

SEQ ID NO: 152498 - protein, 11 aa, Artificial Sequence
  Description of Artificial Sequence: Synthetic peptide
  Seed: FNMLSTVLGVS
FCMLSTVLGVC

SEQ ID NO: 152499 - protein, 11 aa, Artificial Sequence
  Description of Artificial Sequence: Synthetic peptide
  Seed: FNMLSTVLGVS
FCMLSTVLGVD

SEQ ID NO: 152500 - protein, 11 aa, Artificial Sequence
  Description of Artificial Sequence: Synthetic peptide
  Seed: FNMLSTVLGVS
FCMLSTVLGVE

SEQ ID NO: 152501 - protein, 11 aa, Artificial Sequence
  Description of Artificial Sequence: Synthetic peptide
  Seed: FNMLSTVLGVS
FCMLSTVLGVF

SEQ ID NO: 152502 - protein, 11 aa, Artificial Sequence
  Description of Artificial Sequence: Synthetic peptide
  Seed: FNMLSTVLGVS
FCMLSTVLGVG

SEQ ID NO: 152503 - protein, 11 aa, Artificial Sequence
  Description of Artificial Sequence: Synthetic peptide
  Seed: FNMLSTVLGVS
FCMLSTVLGVH

SEQ ID NO: 152504 - protein, 11 aa, Artificial Sequence
  Description of Artificial Sequence: Synthetic peptide
  Seed: FNMLSTVLGVS
FCMLSTVLGVI

SEQ ID NO: 152505 - protein, 11 aa, Artificial Sequence
  Description of Artificial Sequence: Synthetic peptide
  Seed: FNMLSTVLGVS
FCMLSTVLGVK

SEQ ID NO: 152506 - protein, 11 aa, Artificial Sequence
  Description of Artificial Sequence: Synthetic peptide
  Seed: FNMLSTVLGVS
FCMLSTVLGVL

SEQ ID NO: 152507 - protein, 11 aa, Artificial Sequence
  Description of Artificial Sequence: Synthetic peptide
  Seed: FNMLSTVLGVS
FCMLSTVLGVM

SEQ ID NO: 152508 - protein, 11 aa, Artificial Sequence
  Description of Artificial Sequence: Synthetic peptide
  Seed: FNMLSTVLGVS
FCMLSTVLGVN

SEQ ID NO: 152509 - protein, 11 aa, Artificial Sequence
  Description of Artificial Sequence: Synthetic peptide
  Seed: FNMLSTVLGVS
FCMLSTVLGVP

SEQ ID NO: 152510 - protein, 11 aa, Artificial Sequence
  Description of Artificial Sequence: Synthetic peptide
  Seed: FNMLSTVLGVS
FCMLSTVLGVQ

SEQ ID NO: 152511 - protein, 11 aa, Artificial Sequence
  Description of Artificial Sequence: Synthetic peptide
  Seed: FNMLSTVLGVS
FCMLSTVLGVR

SEQ ID NO: 152512 - protein, 11 aa, Artificial Sequence
  Description of Artificial Sequence: Synthetic peptide
  Seed: FNMLSTVLGVS
FCMLSTVLGVS

SEQ ID NO: 152513 - protein, 11 aa, Artificial Sequence
  Description of Artificial Sequence: Synthetic peptide
  Seed: FNMLSTVLGVS
FCMLSTVLGVT

SEQ ID NO: 152514 - protein, 11 aa, Artificial Sequence
  Description of Artificial Sequence: Synthetic peptide
  Seed: FNMLSTVLGVS
FCMLSTVLGVV

SEQ ID NO: 152515 - protein, 11 aa, Artificial Sequence
  Description of Artificial Sequence: Synthetic peptide
  Seed: FNMLSTVLGVS
FCMLSTVLGVW

SEQ ID NO: 152516 - protein, 11 aa, Artificial Sequence
  Description of Artificial Sequence: Synthetic peptide
  Seed: FNMLSTVLGVS
FCMLSTVLGVY

SEQ ID NO: 152517 - protein, 10 aa, Artificial Sequence
  Description of Artificial Sequence: Synthetic peptide
  Seed: FTSFFYRYGF
FCSFFYRYGA

SEQ ID NO: 152518 - protein, 10 aa, Artificial Sequence
  Description of Artificial Sequence: Synthetic peptide
  Seed: FTSFFYRYGF
FCSFFYRYGF

SEQ ID NO: 152519 - protein, 10 aa, Artificial Sequence
  Description of Artificial Sequence: Synthetic peptide
  Seed: FTSFFYRYGF
FCSFFYRYGI

SEQ ID NO: 152520 - protein, 10 aa, Artificial Sequence
  Description of Artificial Sequence: Synthetic peptide
  Seed: FTSFFYRYGF
FCSFFYRYGL

SEQ ID NO: 152521 - protein, 10 aa, Artificial Sequence
  Description of Artificial Sequence: Synthetic peptide
  Seed: FTSFFYRYGF
FCSFFYRYGM

SEQ ID NO: 152522 - protein, 10 aa, Artificial Sequence
  Description of Artificial Sequence: Synthetic peptide
  Seed: FTSFFYRYGF
FCSFFYRYGT

SEQ ID NO: 152523 - protein, 10 aa, Artificial Sequence
  Description of Artificial Sequence: Synthetic peptide
  Seed: FTSFFYRYGF
FCSFFYRYGV

SEQ ID NO: 152524 - protein, 10 aa, Artificial Sequence
  Description of Artificial Sequence: Synthetic peptide
  Seed: FTSFFYRYGF
FCSFFYRYGW

SEQ ID NO: 152525 - protein, 10 aa, Artificial Sequence
  Description of Artificial Sequence: Synthetic peptide
  Seed: FTSFFYRYGF
FCSFFYRYGY

SEQ ID NO: 152526 - protein, 10 aa, Artificial Sequence
  Description of Artificial Sequence: Synthetic peptide
  Seed: FPSSSYRRPV
FCSSSYRRPF

SEQ ID NO: 152527 - protein, 10 aa, Artificial Sequence
  Description of Artificial Sequence: Synthetic peptide
  Seed: FPSSSYRRPV
FCSSSYRRPI

SEQ ID NO: 152528 - protein, 10 aa, Artificial Sequence
  Description of Artificial Sequence: Synthetic peptide
  Seed: FPSSSYRRPV
FCSSSYRRPL

SEQ ID NO: 152529 - protein, 10 aa, Artificial Sequence
  Description of Artificial Sequence: Synthetic peptide
  Seed: FPSSSYRRPV
FCSSSYRRPM

SEQ ID NO: 152530 - protein, 10 aa, Artificial Sequence
  Description of Artificial Sequence: Synthetic peptide
  Seed: FPSSSYRRPV
FCSSSYRRPV

SEQ ID NO: 152531 - protein, 10 aa, Artificial Sequence
  Description of Artificial Sequence: Synthetic peptide
  Seed: FPSSSYRRPV
FCSSSYRRPY

SEQ ID NO: 152532 - protein, 9 aa, Artificial Sequence
  Description of Artificial Sequence: Synthetic peptide
  Seed: FPYTGDPPY
FCYTGDPPF

SEQ ID NO: 152533 - protein, 9 aa, Artificial Sequence
  Description of Artificial Sequence: Synthetic peptide
  Seed: FPYTGDPPY
FCYTGDPPI

SEQ ID NO: 152534 - protein, 9 aa, Artificial Sequence
  Description of Artificial Sequence: Synthetic peptide
  Seed: FPYTGDPPY
FCYTGDPPL

SEQ ID NO: 152535 - protein, 9 aa, Artificial Sequence
  Description of Artificial Sequence: Synthetic peptide
  Seed: FPYTGDPPY
FCYTGDPPM

SEQ ID NO: 152536 - protein, 9 aa, Artificial Sequence
  Description of Artificial Sequence: Synthetic peptide
  Seed: FPYTGDPPY
FCYTGDPPV

SEQ ID NO: 152537 - protein, 9 aa, Artificial Sequence
  Description of Artificial Sequence: Synthetic peptide
  Seed: FPYTGDPPY
FCYTGDPPW

SEQ ID NO: 152538 - protein, 9 aa, Artificial Sequence
  Description of Artificial Sequence: Synthetic peptide
  Seed: FPYTGDPPY
FCYTGDPPY

SEQ ID NO: 152539 - protein, 11 aa, Artificial Sequence
  Description of Artificial Sequence: Synthetic peptide
  Seed: FPYTGDPPYSH
FCYTGDPPYSY

SEQ ID NO: 152540 - protein, 10 aa, Artificial Sequence
  Description of Artificial Sequence: Synthetic peptide
  Seed: FPYTGDPPYS
FCYTGDPPYY

SEQ ID NO: 152541 - protein, 10 aa, Artificial Sequence
  Description of Artificial Sequence: Synthetic peptide
  Seed: FSMELPSFGV
FDMELPSFGA

SEQ ID NO: 152542 - protein, 10 aa, Artificial Sequence
  Description of Artificial Sequence: Synthetic peptide
  Seed: FSMELPSFGV
FDMELPSFGI

SEQ ID NO: 152543 - protein, 10 aa, Artificial Sequence
  Description of Artificial Sequence: Synthetic peptide
  Seed: FSMELPSFGV
FDMELPSFGL

SEQ ID NO: 152544 - protein, 10 aa, Artificial Sequence
  Description of Artificial Sequence: Synthetic peptide
  Seed: FSMELPSFGV
FDMELPSFGM

SEQ ID NO: 152545 - protein, 10 aa, Artificial Sequence
  Description of Artificial Sequence: Synthetic peptide
  Seed: FSMELPSFGV
FDMELPSFGV

SEQ ID NO: 152546 - protein, 10 aa, Artificial Sequence
  Description of Artificial Sequence: Synthetic peptide
  Seed: FNMLSTVLGV
FDMLSTVLGA

SEQ ID NO: 152547 - protein, 10 aa, Artificial Sequence
  Description of Artificial Sequence: Synthetic peptide
  Seed: FNMLSTVLGV
FDMLSTVLGC

SEQ ID NO: 152548 - protein, 10 aa, Artificial Sequence
  Description of Artificial Sequence: Synthetic peptide
  Seed: FNMLSTVLGV
FDMLSTVLGF

SEQ ID NO: 152549 - protein, 10 aa, Artificial Sequence
  Description of Artificial Sequence: Synthetic peptide
  Seed: FNMLSTVLGV
FDMLSTVLGI

SEQ ID NO: 152550 - protein, 10 aa, Artificial Sequence
  Description of Artificial Sequence: Synthetic peptide
  Seed: FNMLSTVLGV
FDMLSTVLGL

SEQ ID NO: 152551 - protein, 10 aa, Artificial Sequence
  Description of Artificial Sequence: Synthetic peptide
  Seed: FNMLSTVLGV
FDMLSTVLGM

SEQ ID NO: 152552 - protein, 10 aa, Artificial Sequence
  Description of Artificial Sequence: Synthetic peptide
  Seed: FNMLSTVLGV
FDMLSTVLGS

SEQ ID NO: 152553 - protein, 10 aa, Artificial Sequence
  Description of Artificial Sequence: Synthetic peptide
  Seed: FNMLSTVLGV
FDMLSTVLGT

SEQ ID NO: 152554 - protein, 10 aa, Artificial Sequence
  Description of Artificial Sequence: Synthetic peptide
  Seed: FNMLSTVLGV
FDMLSTVLGV

SEQ ID NO: 152555 - protein, 11 aa, Artificial Sequence
  Description of Artificial Sequence: Synthetic peptide
  Seed: FNMLSTVLGVS
FDMLSTVLGVA

SEQ ID NO: 152556 - protein, 11 aa, Artificial Sequence
  Description of Artificial Sequence: Synthetic peptide
  Seed: FNMLSTVLGVS
FDMLSTVLGVC

SEQ ID NO: 152557 - protein, 11 aa, Artificial Sequence
  Description of Artificial Sequence: Synthetic peptide
  Seed: FNMLSTVLGVS
FDMLSTVLGVD

SEQ ID NO: 152558 - protein, 11 aa, Artificial Sequence
  Description of Artificial Sequence: Synthetic peptide
  Seed: FNMLSTVLGVS
FDMLSTVLGVE

SEQ ID NO: 152559 - protein, 11 aa, Artificial Sequence
  Description of Artificial Sequence: Synthetic peptide
  Seed: FNMLSTVLGVS
FDMLSTVLGVF

SEQ ID NO: 152560 - protein, 11 aa, Artificial Sequence
  Description of Artificial Sequence: Synthetic peptide
  Seed: FNMLSTVLGVS
FDMLSTVLGVG

SEQ ID NO: 152561 - protein, 11 aa, Artificial Sequence
  Description of Artificial Sequence: Synthetic peptide
  Seed: FNMLSTVLGVS
FDMLSTVLGVH

SEQ ID NO: 152562 - protein, 11 aa, Artificial Sequence
  Description of Artificial Sequence: Synthetic peptide
  Seed: FNMLSTVLGVS
FDMLSTVLGVI

SEQ ID NO: 152563 - protein, 11 aa, Artificial Sequence
  Description of Artificial Sequence: Synthetic peptide
  Seed: FNMLSTVLGVS
FDMLSTVLGVK

SEQ ID NO: 152564 - protein, 11 aa, Artificial Sequence
  Description of Artificial Sequence: Synthetic peptide
  Seed: FNMLSTVLGVS
FDMLSTVLGVL

SEQ ID NO: 152565 - protein, 11 aa, Artificial Sequence
  Description of Artificial Sequence: Synthetic peptide
  Seed: FNMLSTVLGVS
FDMLSTVLGVM

SEQ ID NO: 152566 - protein, 11 aa, Artificial Sequence
  Description of Artificial Sequence: Synthetic peptide
  Seed: FNMLSTVLGVS
FDMLSTVLGVN

SEQ ID NO: 152567 - protein, 11 aa, Artificial Sequence
  Description of Artificial Sequence: Synthetic peptide
  Seed: FNMLSTVLGVS
FDMLSTVLGVP

SEQ ID NO: 152568 - protein, 11 aa, Artificial Sequence
  Description of Artificial Sequence: Synthetic peptide
  Seed: FNMLSTVLGVS
FDMLSTVLGVQ

SEQ ID NO: 152569 - protein, 11 aa, Artificial Sequence
  Description of Artificial Sequence: Synthetic peptide
  Seed: FNMLSTVLGVS
FDMLSTVLGVR

SEQ ID NO: 152570 - protein, 11 aa, Artificial Sequence
  Description of Artificial Sequence: Synthetic peptide
  Seed: FNMLSTVLGVS
FDMLSTVLGVS

SEQ ID NO: 152571 - protein, 11 aa, Artificial Sequence
  Description of Artificial Sequence: Synthetic peptide
  Seed: FNMLSTVLGVS
FDMLSTVLGVT

SEQ ID NO: 152572 - protein, 11 aa, Artificial Sequence
  Description of Artificial Sequence: Synthetic peptide
  Seed: FNMLSTVLGVS
FDMLSTVLGVV

SEQ ID NO: 152573 - protein, 11 aa, Artificial Sequence
  Description of Artificial Sequence: Synthetic peptide
  Seed: FNMLSTVLGVS
FDMLSTVLGVW

SEQ ID NO: 152574 - protein, 11 aa, Artificial Sequence
  Description of Artificial Sequence: Synthetic peptide
  Seed: FNMLSTVLGVS
FDMLSTVLGVY

SEQ ID NO: 152575 - protein, 10 aa, Artificial Sequence
  Description of Artificial Sequence: Synthetic peptide
  Seed: FTSFFYRYGF
FDSFFYRYGA

SEQ ID NO: 152576 - protein, 10 aa, Artificial Sequence
  Description of Artificial Sequence: Synthetic peptide
  Seed: FTSFFYRYGF
FDSFFYRYGF

SEQ ID NO: 152577 - protein, 10 aa, Artificial Sequence
  Description of Artificial Sequence: Synthetic peptide
  Seed: FTSFFYRYGF
FDSFFYRYGI

SEQ ID NO: 152578 - protein, 10 aa, Artificial Sequence
  Description of Artificial Sequence: Synthetic peptide
  Seed: FTSFFYRYGF
FDSFFYRYGL

SEQ ID NO: 152579 - protein, 10 aa, Artificial Sequence
  Description of Artificial Sequence: Synthetic peptide
  Seed: FTSFFYRYGF
FDSFFYRYGM

SEQ ID NO: 152580 - protein, 10 aa, Artificial Sequence
  Description of Artificial Sequence: Synthetic peptide
  Seed: FTSFFYRYGF
FDSFFYRYGT

SEQ ID NO: 152581 - protein, 10 aa, Artificial Sequence
  Description of Artificial Sequence: Synthetic peptide
  Seed: FTSFFYRYGF
FDSFFYRYGV

SEQ ID NO: 152582 - protein, 10 aa, Artificial Sequence
  Description of Artificial Sequence: Synthetic peptide
  Seed: FTSFFYRYGF
FDSFFYRYGW

SEQ ID NO: 152583 - protein, 10 aa, Artificial Sequence
  Description of Artificial Sequence: Synthetic peptide
  Seed: FTSFFYRYGF
FDSFFYRYGY

SEQ ID NO: 152584 - protein, 10 aa, Artificial Sequence
  Description of Artificial Sequence: Synthetic peptide
  Seed: FPSSSYRRPV
FDSSSYRRPF

SEQ ID NO: 152585 - protein, 10 aa, Artificial Sequence
  Description of Artificial Sequence: Synthetic peptide
  Seed: FPSSSYRRPV
FDSSSYRRPI

SEQ ID NO: 152586 - protein, 10 aa, Artificial Sequence
  Description of Artificial Sequence: Synthetic peptide
  Seed: FPSSSYRRPV
FDSSSYRRPL

SEQ ID NO: 152587 - protein, 10 aa, Artificial Sequence
  Description of Artificial Sequence: Synthetic peptide
  Seed: FPSSSYRRPV
FDSSSYRRPM

SEQ ID NO: 152588 - protein, 10 aa, Artificial Sequence
  Description of Artificial Sequence: Synthetic peptide
  Seed: FPSSSYRRPV
FDSSSYRRPV

SEQ ID NO: 152589 - protein, 10 aa, Artificial Sequence
  Description of Artificial Sequence: Synthetic peptide
  Seed: FPSSSYRRPV
FDSSSYRRPY

SEQ ID NO: 152590 - protein, 9 aa, Artificial Sequence
  Description of Artificial Sequence: Synthetic peptide
  Seed: FPYTGDPPY
FDYTGDPPF

SEQ ID NO: 152591 - protein, 9 aa, Artificial Sequence
  Description of Artificial Sequence: Synthetic peptide
  Seed: FPYTGDPPY
FDYTGDPPY

SEQ ID NO: 152592 - protein, 8 aa, Artificial Sequence
  Description of Artificial Sequence: Synthetic peptide
  Seed: FSMELPSF
FEMELPSF

SEQ ID NO: 152593 - protein, 10 aa, Artificial Sequence
  Description of Artificial Sequence: Synthetic peptide
  Seed: FSMELPSFGV
FEMELPSFGA

SEQ ID NO: 152594 - protein, 10 aa, Artificial Sequence
  Description of Artificial Sequence: Synthetic peptide
  Seed: FSMELPSFGV
FEMELPSFGI

SEQ ID NO: 152595 - protein, 10 aa, Artificial Sequence
  Description of Artificial Sequence: Synthetic peptide
  Seed: FSMELPSFGV
FEMELPSFGL

SEQ ID NO: 152596 - protein, 10 aa, Artificial Sequence
  Description of Artificial Sequence: Synthetic peptide
  Seed: FSMELPSFGV
FEMELPSFGM

SEQ ID NO: 152597 - protein, 10 aa, Artificial Sequence
  Description of Artificial Sequence: Synthetic peptide
  Seed: FSMELPSFGV
FEMELPSFGV

SEQ ID NO: 152598 - protein, 8 aa, Artificial Sequence
  Description of Artificial Sequence: Synthetic peptide
  Seed: FSMELPSF
FEMELPSY

SEQ ID NO: 152599 - protein, 10 aa, Artificial Sequence
  Description of Artificial Sequence: Synthetic peptide
  Seed: FNMLSTVLGV
FEMLSTVLGA

SEQ ID NO: 152600 - protein, 10 aa, Artificial Sequence
  Description of Artificial Sequence: Synthetic peptide
  Seed: FNMLSTVLGV
FEMLSTVLGC

SEQ ID NO: 152601 - protein, 10 aa, Artificial Sequence
  Description of Artificial Sequence: Synthetic peptide
  Seed: FNMLSTVLGV
FEMLSTVLGF

SEQ ID NO: 152602 - protein, 10 aa, Artificial Sequence
  Description of Artificial Sequence: Synthetic peptide
  Seed: FNMLSTVLGV
FEMLSTVLGI

SEQ ID NO: 152603 - protein, 10 aa, Artificial Sequence
  Description of Artificial Sequence: Synthetic peptide
  Seed: FNMLSTVLGV
FEMLSTVLGL

SEQ ID NO: 152604 - protein, 10 aa, Artificial Sequence
  Description of Artificial Sequence: Synthetic peptide
  Seed: FNMLSTVLGV
FEMLSTVLGM

SEQ ID NO: 152605 - protein, 10 aa, Artificial Sequence
  Description of Artificial Sequence: Synthetic peptide
  Seed: FNMLSTVLGV
FEMLSTVLGS

SEQ ID NO: 152606 - protein, 10 aa, Artificial Sequence
  Description of Artificial Sequence: Synthetic peptide
  Seed: FNMLSTVLGV
FEMLSTVLGT

SEQ ID NO: 152607 - protein, 10 aa, Artificial Sequence
  Description of Artificial Sequence: Synthetic peptide
  Seed: FNMLSTVLGV
FEMLSTVLGV

SEQ ID NO: 152608 - protein, 11 aa, Artificial Sequence
  Description of Artificial Sequence: Synthetic peptide
  Seed: FNMLSTVLGVS
FEMLSTVLGVA

SEQ ID NO: 152609 - protein, 11 aa, Artificial Sequence
  Description of Artificial Sequence: Synthetic peptide
  Seed: FNMLSTVLGVS
FEMLSTVLGVC

SEQ ID NO: 152610 - protein, 11 aa, Artificial Sequence
  Description of Artificial Sequence: Synthetic peptide
  Seed: FNMLSTVLGVS
FEMLSTVLGVD

SEQ ID NO: 152611 - protein, 11 aa, Artificial Sequence
  Description of Artificial Sequence: Synthetic peptide
  Seed: FNMLSTVLGVS
FEMLSTVLGVE

SEQ ID NO: 152612 - protein, 11 aa, Artificial Sequence
  Description of Artificial Sequence: Synthetic peptide
  Seed: FNMLSTVLGVS
FEMLSTVLGVF

SEQ ID NO: 152613 - protein, 11 aa, Artificial Sequence
  Description of Artificial Sequence: Synthetic peptide
  Seed: FNMLSTVLGVS
FEMLSTVLGVG

SEQ ID NO: 152614 - protein, 11 aa, Artificial Sequence
  Description of Artificial Sequence: Synthetic peptide
  Seed: FNMLSTVLGVS
FEMLSTVLGVH

SEQ ID NO: 152615 - protein, 11 aa, Artificial Sequence
  Description of Artificial Sequence: Synthetic peptide
  Seed: FNMLSTVLGVS
FEMLSTVLGVI

SEQ ID NO: 152616 - protein, 11 aa, Artificial Sequence
  Description of Artificial Sequence: Synthetic peptide
  Seed: FNMLSTVLGVS
FEMLSTVLGVK

SEQ ID NO: 152617 - protein, 11 aa, Artificial Sequence
  Description of Artificial Sequence: Synthetic peptide
  Seed: FNMLSTVLGVS
FEMLSTVLGVL

SEQ ID NO: 152618 - protein, 11 aa, Artificial Sequence
  Description of Artificial Sequence: Synthetic peptide
  Seed: FNMLSTVLGVS
FEMLSTVLGVM

SEQ ID NO: 152619 - protein, 11 aa, Artificial Sequence
  Description of Artificial Sequence: Synthetic peptide
  Seed: FNMLSTVLGVS
FEMLSTVLGVN

SEQ ID NO: 152620 - protein, 11 aa, Artificial Sequence
  Description of Artificial Sequence: Synthetic peptide
  Seed: FNMLSTVLGVS
FEMLSTVLGVP

SEQ ID NO: 152621 - protein, 11 aa, Artificial Sequence
  Description of Artificial Sequence: Synthetic peptide
  Seed: FNMLSTVLGVS
FEMLSTVLGVQ

SEQ ID NO: 152622 - protein, 11 aa, Artificial Sequence
  Description of Artificial Sequence: Synthetic peptide
  Seed: FNMLSTVLGVS
FEMLSTVLGVR

SEQ ID NO: 152623 - protein, 11 aa, Artificial Sequence
  Description of Artificial Sequence: Synthetic peptide
  Seed: FNMLSTVLGVS
FEMLSTVLGVS

SEQ ID NO: 152624 - protein, 11 aa, Artificial Sequence
  Description of Artificial Sequence: Synthetic peptide
  Seed: FNMLSTVLGVS
FEMLSTVLGVT

SEQ ID NO: 152625 - protein, 11 aa, Artificial Sequence
  Description of Artificial Sequence: Synthetic peptide
  Seed: FNMLSTVLGVS
FEMLSTVLGVV

SEQ ID NO: 152626 - protein, 11 aa, Artificial Sequence
  Description of Artificial Sequence: Synthetic peptide
  Seed: FNMLSTVLGVS
FEMLSTVLGVW

SEQ ID NO: 152627 - protein, 11 aa, Artificial Sequence
  Description of Artificial Sequence: Synthetic peptide
  Seed: FNMLSTVLGVS
FEMLSTVLGVY

SEQ ID NO: 152628 - protein, 10 aa, Artificial Sequence
  Description of Artificial Sequence: Synthetic peptide
  Seed: FTSFFYRYGF
FESFFYRYGA

SEQ ID NO: 152629 - protein, 10 aa, Artificial Sequence
  Description of Artificial Sequence: Synthetic peptide
  Seed: FTSFFYRYGF
FESFFYRYGF

SEQ ID NO: 152630 - protein, 10 aa, Artificial Sequence
  Description of Artificial Sequence: Synthetic peptide
  Seed: FTSFFYRYGF
FESFFYRYGI

SEQ ID NO: 152631 - protein, 10 aa, Artificial Sequence
  Description of Artificial Sequence: Synthetic peptide
  Seed: FTSFFYRYGF
FESFFYRYGL

SEQ ID NO: 152632 - protein, 10 aa, Artificial Sequence
  Description of Artificial Sequence: Synthetic peptide
  Seed: FTSFFYRYGF
FESFFYRYGM

SEQ ID NO: 152633 - protein, 10 aa, Artificial Sequence
  Description of Artificial Sequence: Synthetic peptide
  Seed: FTSFFYRYGF
FESFFYRYGR

SEQ ID NO: 152634 - protein, 10 aa, Artificial Sequence
  Description of Artificial Sequence: Synthetic peptide
  Seed: FTSFFYRYGF
FESFFYRYGT

SEQ ID NO: 152635 - protein, 10 aa, Artificial Sequence
  Description of Artificial Sequence: Synthetic peptide
  Seed: FTSFFYRYGF
FESFFYRYGV

SEQ ID NO: 152636 - protein, 10 aa, Artificial Sequence
  Description of Artificial Sequence: Synthetic peptide
  Seed: FTSFFYRYGF
FESFFYRYGW

SEQ ID NO: 152637 - protein, 10 aa, Artificial Sequence
  Description of Artificial Sequence: Synthetic peptide
  Seed: FTSFFYRYGF
FESFFYRYGY

SEQ ID NO: 152638 - protein, 10 aa, Artificial Sequence
  Description of Artificial Sequence: Synthetic peptide
  Seed: FPSSSYRRPV
FESSSYRRPF

SEQ ID NO: 152639 - protein, 10 aa, Artificial Sequence
  Description of Artificial Sequence: Synthetic peptide
  Seed: FPSSSYRRPV
FESSSYRRPI

SEQ ID NO: 152640 - protein, 10 aa, Artificial Sequence
  Description of Artificial Sequence: Synthetic peptide
  Seed: FPSSSYRRPV
FESSSYRRPL

SEQ ID NO: 152641 - protein, 10 aa, Artificial Sequence
  Description of Artificial Sequence: Synthetic peptide
  Seed: FPSSSYRRPV
FESSSYRRPM

SEQ ID NO: 152642 - protein, 10 aa, Artificial Sequence
  Description of Artificial Sequence: Synthetic peptide
  Seed: FPSSSYRRPV
FESSSYRRPV

SEQ ID NO: 152643 - protein, 10 aa, Artificial Sequence
  Description of Artificial Sequence: Synthetic peptide
  Seed: FPSSSYRRPV
FESSSYRRPY

SEQ ID NO: 152644 - protein, 9 aa, Artificial Sequence
  Description of Artificial Sequence: Synthetic peptide
  Seed: FPYTGDPPY
FEYTGDPPA

SEQ ID NO: 152645 - protein, 9 aa, Artificial Sequence
  Description of Artificial Sequence: Synthetic peptide
  Seed: FPYTGDPPY
FEYTGDPPH

SEQ ID NO: 152646 - protein, 9 aa, Artificial Sequence
  Description of Artificial Sequence: Synthetic peptide
  Seed: FPYTGDPPY
FEYTGDPPI

SEQ ID NO: 152647 - protein, 9 aa, Artificial Sequence
  Description of Artificial Sequence: Synthetic peptide
  Seed: FPYTGDPPY
FEYTGDPPL

SEQ ID NO: 152648 - protein, 9 aa, Artificial Sequence
  Description of Artificial Sequence: Synthetic peptide
  Seed: FPYTGDPPY
FEYTGDPPM

SEQ ID NO: 152649 - protein, 9 aa, Artificial Sequence
  Description of Artificial Sequence: Synthetic peptide
  Seed: FPYTGDPPY
FEYTGDPPV

SEQ ID NO: 152650 - protein, 9 aa, Artificial Sequence
  Description of Artificial Sequence: Synthetic peptide
  Seed: FPYTGDPPY
FEYTGDPPW

SEQ ID NO: 152651 - protein, 9 aa, Artificial Sequence
  Description of Artificial Sequence: Synthetic peptide
  Seed: FPYTGDPPY
FEYTGDPPY

SEQ ID NO: 152652 - protein, 10 aa, Artificial Sequence
  Description of Artificial Sequence: Synthetic peptide
  Seed: FSMELPSFGV
FFMELPSFGA

SEQ ID NO: 152653 - protein, 10 aa, Artificial Sequence
  Description of Artificial Sequence: Synthetic peptide
  Seed: FSMELPSFGV
FFMELPSFGI

SEQ ID NO: 152654 - protein, 10 aa, Artificial Sequence
  Description of Artificial Sequence: Synthetic peptide
  Seed: FSMELPSFGV
FFMELPSFGL

SEQ ID NO: 152655 - protein, 10 aa, Artificial Sequence
  Description of Artificial Sequence: Synthetic peptide
  Seed: FSMELPSFGV
FFMELPSFGM

SEQ ID NO: 152656 - protein, 10 aa, Artificial Sequence
  Description of Artificial Sequence: Synthetic peptide
  Seed: FSMELPSFGV
FFMELPSFGT

SEQ ID NO: 152657 - protein, 10 aa, Artificial Sequence
  Description of Artificial Sequence: Synthetic peptide
  Seed: FSMELPSFGV
FFMELPSFGV

SEQ ID NO: 152658 - protein, 11 aa, Artificial Sequence
  Description of Artificial Sequence: Synthetic peptide
  Seed: FSMELPSFGVS
FFMELPSFGVA

SEQ ID NO: 152659 - protein, 11 aa, Artificial Sequence
  Description of Artificial Sequence: Synthetic peptide
  Seed: FSMELPSFGVS
FFMELPSFGVC

SEQ ID NO: 152660 - protein, 11 aa, Artificial Sequence
  Description of Artificial Sequence: Synthetic peptide
  Seed: FSMELPSFGVS
FFMELPSFGVD

SEQ ID NO: 152661 - protein, 11 aa, Artificial Sequence
  Description of Artificial Sequence: Synthetic peptide
  Seed: FSMELPSFGVS
FFMELPSFGVE

SEQ ID NO: 152662 - protein, 11 aa, Artificial Sequence
  Description of Artificial Sequence: Synthetic peptide
  Seed: FSMELPSFGVS
FFMELPSFGVF

SEQ ID NO: 152663 - protein, 11 aa, Artificial Sequence
  Description of Artificial Sequence: Synthetic peptide
  Seed: FSMELPSFGVS
FFMELPSFGVG

SEQ ID NO: 152664 - protein, 11 aa, Artificial Sequence
  Description of Artificial Sequence: Synthetic peptide
  Seed: FSMELPSFGVS
FFMELPSFGVH

SEQ ID NO: 152665 - protein, 11 aa, Artificial Sequence
  Description of Artificial Sequence: Synthetic peptide
  Seed: FSMELPSFGVS
FFMELPSFGVI

SEQ ID NO: 152666 - protein, 11 aa, Artificial Sequence
  Description of Artificial Sequence: Synthetic peptide
  Seed: FSMELPSFGVS
FFMELPSFGVK

SEQ ID NO: 152667 - protein, 11 aa, Artificial Sequence
  Description of Artificial Sequence: Synthetic peptide
  Seed: FSMELPSFGVS
FFMELPSFGVL

SEQ ID NO: 152668 - protein, 11 aa, Artificial Sequence
  Description of Artificial Sequence: Synthetic peptide
  Seed: FSMELPSFGVS
FFMELPSFGVM

SEQ ID NO: 152669 - protein, 11 aa, Artificial Sequence
  Description of Artificial Sequence: Synthetic peptide
  Seed: FSMELPSFGVS
FFMELPSFGVN

SEQ ID NO: 152670 - protein, 11 aa, Artificial Sequence
  Description of Artificial Sequence: Synthetic peptide
  Seed: FSMELPSFGVS
FFMELPSFGVP

SEQ ID NO: 152671 - protein, 11 aa, Artificial Sequence
  Description of Artificial Sequence: Synthetic peptide
  Seed: FSMELPSFGVS
FFMELPSFGVQ

SEQ ID NO: 152672 - protein, 11 aa, Artificial Sequence
  Description of Artificial Sequence: Synthetic peptide
  Seed: FSMELPSFGVS
FFMELPSFGVR

SEQ ID NO: 152673 - protein, 11 aa, Artificial Sequence
  Description of Artificial Sequence: Synthetic peptide
  Seed: FSMELPSFGVS
FFMELPSFGVS

SEQ ID NO: 152674 - protein, 11 aa, Artificial Sequence
  Description of Artificial Sequence: Synthetic peptide
  Seed: FSMELPSFGVS
FFMELPSFGVT

SEQ ID NO: 152675 - protein, 11 aa, Artificial Sequence
  Description of Artificial Sequence: Synthetic peptide
  Seed: FSMELPSFGVS
FFMELPSFGVV

SEQ ID NO: 152676 - protein, 11 aa, Artificial Sequence
  Description of Artificial Sequence: Synthetic peptide
  Seed: FSMELPSFGVS
FFMELPSFGVW

SEQ ID NO: 152677 - protein, 11 aa, Artificial Sequence
  Description of Artificial Sequence: Synthetic peptide
  Seed: FSMELPSFGVS
FFMELPSFGVY

SEQ ID NO: 152678 - protein, 10 aa, Artificial Sequence
  Description of Artificial Sequence: Synthetic peptide
  Seed: FNMLSTVLGV
FFMLSTVLGA

SEQ ID NO: 152679 - protein, 10 aa, Artificial Sequence
  Description of Artificial Sequence: Synthetic peptide
  Seed: FNMLSTVLGV
FFMLSTVLGC

SEQ ID NO: 152680 - protein, 10 aa, Artificial Sequence
  Description of Artificial Sequence: Synthetic peptide
  Seed: FNMLSTVLGV
FFMLSTVLGF

SEQ ID NO: 152681 - protein, 10 aa, Artificial Sequence
  Description of Artificial Sequence: Synthetic peptide
  Seed: FNMLSTVLGV
FFMLSTVLGI

SEQ ID NO: 152682 - protein, 10 aa, Artificial Sequence
  Description of Artificial Sequence: Synthetic peptide
  Seed: FNMLSTVLGV
FFMLSTVLGL

SEQ ID NO: 152683 - protein, 10 aa, Artificial Sequence
  Description of Artificial Sequence: Synthetic peptide
  Seed: FNMLSTVLGV
FFMLSTVLGM

SEQ ID NO: 152684 - protein, 10 aa, Artificial Sequence
  Description of Artificial Sequence: Synthetic peptide
  Seed: FNMLSTVLGV
FFMLSTVLGS

SEQ ID NO: 152685 - protein, 10 aa, Artificial Sequence
  Description of Artificial Sequence: Synthetic peptide
  Seed: FNMLSTVLGV
FFMLSTVLGT

SEQ ID NO: 152686 - protein, 10 aa, Artificial Sequence
  Description of Artificial Sequence: Synthetic peptide
  Seed: FNMLSTVLGV
FFMLSTVLGV

SEQ ID NO: 152687 - protein, 11 aa, Artificial Sequence
  Description of Artificial Sequence: Synthetic peptide
  Seed: FNMLSTVLGVS
FFMLSTVLGVA

SEQ ID NO: 152688 - protein, 11 aa, Artificial Sequence
  Description of Artificial Sequence: Synthetic peptide
  Seed: FNMLSTVLGVS
FFMLSTVLGVC

SEQ ID NO: 152689 - protein, 11 aa, Artificial Sequence
  Description of Artificial Sequence: Synthetic peptide
  Seed: FNMLSTVLGVS
FFMLSTVLGVD

SEQ ID NO: 152690 - protein, 11 aa, Artificial Sequence
  Description of Artificial Sequence: Synthetic peptide
  Seed: FNMLSTVLGVS
FFMLSTVLGVE

SEQ ID NO: 152691 - protein, 11 aa, Artificial Sequence
  Description of Artificial Sequence: Synthetic peptide
  Seed: FNMLSTVLGVS
FFMLSTVLGVF

SEQ ID NO: 152692 - protein, 11 aa, Artificial Sequence
  Description of Artificial Sequence: Synthetic peptide
  Seed: FNMLSTVLGVS
FFMLSTVLGVG

SEQ ID NO: 152693 - protein, 11 aa, Artificial Sequence
  Description of Artificial Sequence: Synthetic peptide
  Seed: FNMLSTVLGVS
FFMLSTVLGVH

SEQ ID NO: 152694 - protein, 11 aa, Artificial Sequence
  Description of Artificial Sequence: Synthetic peptide
  Seed: FNMLSTVLGVS
FFMLSTVLGVI

SEQ ID NO: 152695 - protein, 11 aa, Artificial Sequence
  Description of Artificial Sequence: Synthetic peptide
  Seed: FNMLSTVLGVS
FFMLSTVLGVK

SEQ ID NO: 152696 - protein, 11 aa, Artificial Sequence
  Description of Artificial Sequence: Synthetic peptide
  Seed: FNMLSTVLGVS
FFMLSTVLGVL

SEQ ID NO: 152697 - protein, 11 aa, Artificial Sequence
  Description of Artificial Sequence: Synthetic peptide
  Seed: FNMLSTVLGVS
FFMLSTVLGVM

SEQ ID NO: 152698 - protein, 11 aa, Artificial Sequence
  Description of Artificial Sequence: Synthetic peptide
  Seed: FNMLSTVLGVS
FFMLSTVLGVN

SEQ ID NO: 152699 - protein, 11 aa, Artificial Sequence
  Description of Artificial Sequence: Synthetic peptide
  Seed: FNMLSTVLGVS
FFMLSTVLGVP

SEQ ID NO: 152700 - protein, 11 aa, Artificial Sequence
  Description of Artificial Sequence: Synthetic peptide
  Seed: FNMLSTVLGVS
FFMLSTVLGVQ

SEQ ID NO: 152701 - protein, 11 aa, Artificial Sequence
  Description of Artificial Sequence: Synthetic peptide
  Seed: FNMLSTVLGVS
FFMLSTVLGVR

SEQ ID NO: 152702 - protein, 11 aa, Artificial Sequence
  Description of Artificial Sequence: Synthetic peptide
  Seed: FNMLSTVLGVS
FFMLSTVLGVS

SEQ ID NO: 152703 - protein, 11 aa, Artificial Sequence
  Description of Artificial Sequence: Synthetic peptide
  Seed: FNMLSTVLGVS
FFMLSTVLGVT

SEQ ID NO: 152704 - protein, 11 aa, Artificial Sequence
  Description of Artificial Sequence: Synthetic peptide
  Seed: FNMLSTVLGVS
FFMLSTVLGVV

SEQ ID NO: 152705 - protein, 11 aa, Artificial Sequence
  Description of Artificial Sequence: Synthetic peptide
  Seed: FNMLSTVLGVS
FFMLSTVLGVW

SEQ ID NO: 152706 - protein, 11 aa, Artificial Sequence
  Description of Artificial Sequence: Synthetic peptide
  Seed: FNMLSTVLGVS
FFMLSTVLGVY

SEQ ID NO: 152707 - protein, 10 aa, Artificial Sequence
  Description of Artificial Sequence: Synthetic peptide
  Seed: FSNKMARLGK
FFNKMARLGK

SEQ ID NO: 152708 - protein, 10 aa, Artificial Sequence
  Description of Artificial Sequence: Synthetic peptide
  Seed: FSNKMARLGK
FFNKMARLGR

SEQ ID NO: 152709 - protein, 9 aa, Artificial Sequence
  Description of Artificial Sequence: Synthetic peptide
  Seed: FFPSSSYRR
FFPSSSYRK

SEQ ID NO: 152710 - protein, 11 aa, Artificial Sequence
  Description of Artificial Sequence: Synthetic peptide
  Seed: FFPSSSYRRPV
FFPSSSYRRPF

SEQ ID NO: 152711 - protein, 11 aa, Artificial Sequence
  Description of Artificial Sequence: Synthetic peptide
  Seed: FFPSSSYRRPV
FFPSSSYRRPI

SEQ ID NO: 152712 - protein, 11 aa, Artificial Sequence
  Description of Artificial Sequence: Synthetic peptide
  Seed: FFPSSSYRRPV
FFPSSSYRRPL

SEQ ID NO: 152713 - protein, 11 aa, Artificial Sequence
  Description of Artificial Sequence: Synthetic peptide
  Seed: FFPSSSYRRPV
FFPSSSYRRPM

SEQ ID NO: 152714 - protein, 11 aa, Artificial Sequence
  Description of Artificial Sequence: Synthetic peptide
  Seed: FFPSSSYRRPV
FFPSSSYRRPY

SEQ ID NO: 152715 - protein, 8 aa, Artificial Sequence
  Description of Artificial Sequence: Synthetic peptide
  Seed: FTSFFYRY
FFSFFYRY

SEQ ID NO: 152716 - protein, 10 aa, Artificial Sequence
  Description of Artificial Sequence: Synthetic peptide
  Seed: FTSFFYRYGF
FFSFFYRYGA

SEQ ID NO: 152717 - protein, 10 aa, Artificial Sequence
  Description of Artificial Sequence: Synthetic peptide
  Seed: FTSFFYRYGF
FFSFFYRYGF

SEQ ID NO: 152718 - protein, 10 aa, Artificial Sequence
  Description of Artificial Sequence: Synthetic peptide
  Seed: FTSFFYRYGF
FFSFFYRYGI

SEQ ID NO: 152719 - protein, 10 aa, Artificial Sequence
  Description of Artificial Sequence: Synthetic peptide
  Seed: FTSFFYRYGF
FFSFFYRYGL

SEQ ID NO: 152720 - protein, 10 aa, Artificial Sequence
  Description of Artificial Sequence: Synthetic peptide
  Seed: FTSFFYRYGF
FFSFFYRYGM

SEQ ID NO: 152721 - protein, 10 aa, Artificial Sequence
  Description of Artificial Sequence: Synthetic peptide
  Seed: FTSFFYRYGF
FFSFFYRYGR

SEQ ID NO: 152722 - protein, 10 aa, Artificial Sequence
  Description of Artificial Sequence: Synthetic peptide
  Seed: FTSFFYRYGF
FFSFFYRYGT

SEQ ID NO: 152723 - protein, 10 aa, Artificial Sequence
  Description of Artificial Sequence: Synthetic peptide
  Seed: FTSFFYRYGF
FFSFFYRYGV

SEQ ID NO: 152724 - protein, 10 aa, Artificial Sequence
  Description of Artificial Sequence: Synthetic peptide
  Seed: FTSFFYRYGF
FFSFFYRYGW

SEQ ID NO: 152725 - protein, 10 aa, Artificial Sequence
  Description of Artificial Sequence: Synthetic peptide
  Seed: FTSFFYRYGF
FFSFFYRYGY

SEQ ID NO: 152726 - protein, 10 aa, Artificial Sequence
  Description of Artificial Sequence: Synthetic peptide
  Seed: FPSSSYRRPV
FFSSSYRRPF

SEQ ID NO: 152727 - protein, 10 aa, Artificial Sequence
  Description of Artificial Sequence: Synthetic peptide
  Seed: FPSSSYRRPV
FFSSSYRRPI

SEQ ID NO: 152728 - protein, 10 aa, Artificial Sequence
  Description of Artificial Sequence: Synthetic peptide
  Seed: FPSSSYRRPV
FFSSSYRRPL

SEQ ID NO: 152729 - protein, 10 aa, Artificial Sequence
  Description of Artificial Sequence: Synthetic peptide
  Seed: FPSSSYRRPV
FFSSSYRRPM

SEQ ID NO: 152730 - protein, 10 aa, Artificial Sequence
  Description of Artificial Sequence: Synthetic peptide
  Seed: FPSSSYRRPV
FFSSSYRRPV

SEQ ID NO: 152731 - protein, 10 aa, Artificial Sequence
  Description of Artificial Sequence: Synthetic peptide
  Seed: FPSSSYRRPV
FFSSSYRRPY

SEQ ID NO: 152732 - protein, 9 aa, Artificial Sequence
  Description of Artificial Sequence: Synthetic peptide
  Seed: FPYTGDPPY
FFYTGDPPA

SEQ ID NO: 152733 - protein, 9 aa, Artificial Sequence
  Description of Artificial Sequence: Synthetic peptide
  Seed: FPYTGDPPY
FFYTGDPPC

SEQ ID NO: 152734 - protein, 9 aa, Artificial Sequence
  Description of Artificial Sequence: Synthetic peptide
  Seed: FPYTGDPPY
FFYTGDPPF

SEQ ID NO: 152735 - protein, 9 aa, Artificial Sequence
  Description of Artificial Sequence: Synthetic peptide
  Seed: FPYTGDPPY
FFYTGDPPG

SEQ ID NO: 152736 - protein, 9 aa, Artificial Sequence
  Description of Artificial Sequence: Synthetic peptide
  Seed: FPYTGDPPY
FFYTGDPPH

SEQ ID NO: 152737 - protein, 9 aa, Artificial Sequence
  Description of Artificial Sequence: Synthetic peptide
  Seed: FPYTGDPPY
FFYTGDPPI

SEQ ID NO: 152738 - protein, 9 aa, Artificial Sequence
  Description of Artificial Sequence: Synthetic peptide
  Seed: FPYTGDPPY
FFYTGDPPL

SEQ ID NO: 152739 - protein, 9 aa, Artificial Sequence
  Description of Artificial Sequence: Synthetic peptide
  Seed: FPYTGDPPY
FFYTGDPPM

SEQ ID NO: 152740 - protein, 9 aa, Artificial Sequence
  Description of Artificial Sequence: Synthetic peptide
  Seed: FPYTGDPPY
FFYTGDPPS

SEQ ID NO: 152741 - protein, 9 aa, Artificial Sequence
  Description of Artificial Sequence: Synthetic peptide
  Seed: FPYTGDPPY
FFYTGDPPT

SEQ ID NO: 152742 - protein, 9 aa, Artificial Sequence
  Description of Artificial Sequence: Synthetic peptide
  Seed: FPYTGDPPY
FFYTGDPPV

SEQ ID NO: 152743 - protein, 9 aa, Artificial Sequence
  Description of Artificial Sequence: Synthetic peptide
  Seed: FPYTGDPPY
FFYTGDPPW

SEQ ID NO: 152744 - protein, 9 aa, Artificial Sequence
  Description of Artificial Sequence: Synthetic peptide
  Seed: FPYTGDPPY
FFYTGDPPY

SEQ ID NO: 152745 - protein, 10 aa, Artificial Sequence
  Description of Artificial Sequence: Synthetic peptide
  Seed: FPYTGDPPYS
FFYTGDPPYF

SEQ ID NO: 152746 - protein, 11 aa, Artificial Sequence
  Description of Artificial Sequence: Synthetic peptide
  Seed: FPYTGDPPYSH
FFYTGDPPYSY

SEQ ID NO: 152747 - protein, 10 aa, Artificial Sequence
  Description of Artificial Sequence: Synthetic peptide
  Seed: FPYTGDPPYS
FFYTGDPPYY

SEQ ID NO: 152748 - protein, 8 aa, Artificial Sequence
  Description of Artificial Sequence: Synthetic peptide
  Seed: FSMELPSF
FGMELPSF

SEQ ID NO: 152749 - protein, 10 aa, Artificial Sequence
  Description of Artificial Sequence: Synthetic peptide
  Seed: FSMELPSFGV
FGMELPSFGA

SEQ ID NO: 152750 - protein, 10 aa, Artificial Sequence
  Description of Artificial Sequence: Synthetic peptide
  Seed: FSMELPSFGV
FGMELPSFGI

SEQ ID NO: 152751 - protein, 10 aa, Artificial Sequence
  Description of Artificial Sequence: Synthetic peptide
  Seed: FSMELPSFGV
FGMELPSFGL

SEQ ID NO: 152752 - protein, 10 aa, Artificial Sequence
  Description of Artificial Sequence: Synthetic peptide
  Seed: FSMELPSFGV
FGMELPSFGM

SEQ ID NO: 152753 - protein, 10 aa, Artificial Sequence
  Description of Artificial Sequence: Synthetic peptide
  Seed: FSMELPSFGV
FGMELPSFGV

SEQ ID NO: 152754 - protein, 8 aa, Artificial Sequence
  Description of Artificial Sequence: Synthetic peptide
  Seed: FSMELPSF
FGMELPSM

SEQ ID NO: 152755 - protein, 8 aa, Artificial Sequence
  Description of Artificial Sequence: Synthetic peptide
  Seed: FSMELPSF
FGMELPSY

SEQ ID NO: 152756 - protein, 10 aa, Artificial Sequence
  Description of Artificial Sequence: Synthetic peptide
  Seed: FNMLSTVLGV
FGMLSTVLGA

SEQ ID NO: 152757 - protein, 10 aa, Artificial Sequence
  Description of Artificial Sequence: Synthetic peptide
  Seed: FNMLSTVLGV
FGMLSTVLGC

SEQ ID NO: 152758 - protein, 10 aa, Artificial Sequence
  Description of Artificial Sequence: Synthetic peptide
  Seed: FNMLSTVLGV
FGMLSTVLGF

SEQ ID NO: 152759 - protein, 10 aa, Artificial Sequence
  Description of Artificial Sequence: Synthetic peptide
  Seed: FNMLSTVLGV
FGMLSTVLGI

SEQ ID NO: 152760 - protein, 10 aa, Artificial Sequence
  Description of Artificial Sequence: Synthetic peptide
  Seed: FNMLSTVLGV
FGMLSTVLGL

SEQ ID NO: 152761 - protein, 10 aa, Artificial Sequence
  Description of Artificial Sequence: Synthetic peptide
  Seed: FNMLSTVLGV
FGMLSTVLGM

SEQ ID NO: 152762 - protein, 10 aa, Artificial Sequence
  Description of Artificial Sequence: Synthetic peptide
  Seed: FNMLSTVLGV
FGMLSTVLGS

SEQ ID NO: 152763 - protein, 10 aa, Artificial Sequence
  Description of Artificial Sequence: Synthetic peptide
  Seed: FNMLSTVLGV
FGMLSTVLGT

SEQ ID NO: 152764 - protein, 10 aa, Artificial Sequence
  Description of Artificial Sequence: Synthetic peptide
  Seed: FNMLSTVLGV
FGMLSTVLGV

SEQ ID NO: 152765 - protein, 11 aa, Artificial Sequence
  Description of Artificial Sequence: Synthetic peptide
  Seed: FNMLSTVLGVS
FGMLSTVLGVA

SEQ ID NO: 152766 - protein, 11 aa, Artificial Sequence
  Description of Artificial Sequence: Synthetic peptide
  Seed: FNMLSTVLGVS
FGMLSTVLGVC

SEQ ID NO: 152767 - protein, 11 aa, Artificial Sequence
  Description of Artificial Sequence: Synthetic peptide
  Seed: FNMLSTVLGVS
FGMLSTVLGVD

SEQ ID NO: 152768 - protein, 11 aa, Artificial Sequence
  Description of Artificial Sequence: Synthetic peptide
  Seed: FNMLSTVLGVS
FGMLSTVLGVE

SEQ ID NO: 152769 - protein, 11 aa, Artificial Sequence
  Description of Artificial Sequence: Synthetic peptide
  Seed: FNMLSTVLGVS
FGMLSTVLGVF

SEQ ID NO: 152770 - protein, 11 aa, Artificial Sequence
  Description of Artificial Sequence: Synthetic peptide
  Seed: FNMLSTVLGVS
FGMLSTVLGVG

SEQ ID NO: 152771 - protein, 11 aa, Artificial Sequence
  Description of Artificial Sequence: Synthetic peptide
  Seed: FNMLSTVLGVS
FGMLSTVLGVH

SEQ ID NO: 152772 - protein, 11 aa, Artificial Sequence
  Description of Artificial Sequence: Synthetic peptide
  Seed: FNMLSTVLGVS
FGMLSTVLGVI

SEQ ID NO: 152773 - protein, 11 aa, Artificial Sequence
  Description of Artificial Sequence: Synthetic peptide
  Seed: FNMLSTVLGVS
FGMLSTVLGVK

SEQ ID NO: 152774 - protein, 11 aa, Artificial Sequence
  Description of Artificial Sequence: Synthetic peptide
  Seed: FNMLSTVLGVS
FGMLSTVLGVL

SEQ ID NO: 152775 - protein, 11 aa, Artificial Sequence
  Description of Artificial Sequence: Synthetic peptide
  Seed: FNMLSTVLGVS
FGMLSTVLGVM

SEQ ID NO: 152776 - protein, 11 aa, Artificial Sequence
  Description of Artificial Sequence: Synthetic peptide
  Seed: FNMLSTVLGVS
FGMLSTVLGVN

SEQ ID NO: 152777 - protein, 11 aa, Artificial Sequence
  Description of Artificial Sequence: Synthetic peptide
  Seed: FNMLSTVLGVS
FGMLSTVLGVP

SEQ ID NO: 152778 - protein, 11 aa, Artificial Sequence
  Description of Artificial Sequence: Synthetic peptide
  Seed: FNMLSTVLGVS
FGMLSTVLGVQ

SEQ ID NO: 152779 - protein, 11 aa, Artificial Sequence
  Description of Artificial Sequence: Synthetic peptide
  Seed: FNMLSTVLGVS
FGMLSTVLGVR

SEQ ID NO: 152780 - protein, 11 aa, Artificial Sequence
  Description of Artificial Sequence: Synthetic peptide
  Seed: FNMLSTVLGVS
FGMLSTVLGVS

SEQ ID NO: 152781 - protein, 11 aa, Artificial Sequence
  Description of Artificial Sequence: Synthetic peptide
  Seed: FNMLSTVLGVS
FGMLSTVLGVT

SEQ ID NO: 152782 - protein, 11 aa, Artificial Sequence
  Description of Artificial Sequence: Synthetic peptide
  Seed: FNMLSTVLGVS
FGMLSTVLGVV

SEQ ID NO: 152783 - protein, 11 aa, Artificial Sequence
  Description of Artificial Sequence: Synthetic peptide
  Seed: FNMLSTVLGVS
FGMLSTVLGVW

SEQ ID NO: 152784 - protein, 11 aa, Artificial Sequence
  Description of Artificial Sequence: Synthetic peptide
  Seed: FNMLSTVLGVS
FGMLSTVLGVY

SEQ ID NO: 152785 - protein, 10 aa, Artificial Sequence
  Description of Artificial Sequence: Synthetic peptide
  Seed: FSNKMARLGK
FGNKMARLGR

SEQ ID NO: 152786 - protein, 9 aa, Artificial Sequence
  Description of Artificial Sequence: Synthetic peptide
  Seed: FFPSSSYRR
FGPSSSYRR

SEQ ID NO: 152787 - protein, 10 aa, Artificial Sequence
  Description of Artificial Sequence: Synthetic peptide
  Seed: FTSFFYRYGF
FGSFFYRYGA

SEQ ID NO: 152788 - protein, 10 aa, Artificial Sequence
  Description of Artificial Sequence: Synthetic peptide
  Seed: FTSFFYRYGF
FGSFFYRYGF

SEQ ID NO: 152789 - protein, 10 aa, Artificial Sequence
  Description of Artificial Sequence: Synthetic peptide
  Seed: FTSFFYRYGF
FGSFFYRYGI

SEQ ID NO: 152790 - protein, 10 aa, Artificial Sequence
  Description of Artificial Sequence: Synthetic peptide
  Seed: FTSFFYRYGF
FGSFFYRYGL

SEQ ID NO: 152791 - protein, 10 aa, Artificial Sequence
  Description of Artificial Sequence: Synthetic peptide
  Seed: FTSFFYRYGF
FGSFFYRYGM

SEQ ID NO: 152792 - protein, 10 aa, Artificial Sequence
  Description of Artificial Sequence: Synthetic peptide
  Seed: FTSFFYRYGF
FGSFFYRYGR

SEQ ID NO: 152793 - protein, 10 aa, Artificial Sequence
  Description of Artificial Sequence: Synthetic peptide
  Seed: FTSFFYRYGF
FGSFFYRYGT

SEQ ID NO: 152794 - protein, 10 aa, Artificial Sequence
  Description of Artificial Sequence: Synthetic peptide
  Seed: FTSFFYRYGF
FGSFFYRYGV

SEQ ID NO: 152795 - protein, 10 aa, Artificial Sequence
  Description of Artificial Sequence: Synthetic peptide
  Seed: FTSFFYRYGF
FGSFFYRYGW

SEQ ID NO: 152796 - protein, 10 aa, Artificial Sequence
  Description of Artificial Sequence: Synthetic peptide
  Seed: FTSFFYRYGF
FGSFFYRYGY

SEQ ID NO: 152797 - protein, 10 aa, Artificial Sequence
  Description of Artificial Sequence: Synthetic peptide
  Seed: FPSSSYRRPV
FGSSSYRRPF

SEQ ID NO: 152798 - protein, 10 aa, Artificial Sequence
  Description of Artificial Sequence: Synthetic peptide
  Seed: FPSSSYRRPV
FGSSSYRRPI

SEQ ID NO: 152799 - protein, 10 aa, Artificial Sequence
  Description of Artificial Sequence: Synthetic peptide
  Seed: FPSSSYRRPV
FGSSSYRRPL

SEQ ID NO: 152800 - protein, 10 aa, Artificial Sequence
  Description of Artificial Sequence: Synthetic peptide
  Seed: FPSSSYRRPV
FGSSSYRRPM

SEQ ID NO: 152801 - protein, 10 aa, Artificial Sequence
  Description of Artificial Sequence: Synthetic peptide
  Seed: FPSSSYRRPV
FGSSSYRRPV

SEQ ID NO: 152802 - protein, 10 aa, Artificial Sequence
  Description of Artificial Sequence: Synthetic peptide
  Seed: FPSSSYRRPV
FGSSSYRRPY

SEQ ID NO: 152803 - protein, 9 aa, Artificial Sequence
  Description of Artificial Sequence: Synthetic peptide
  Seed: FPYTGDPPY
FGYTGDPPA

SEQ ID NO: 152804 - protein, 9 aa, Artificial Sequence
  Description of Artificial Sequence: Synthetic peptide
  Seed: FPYTGDPPY
FGYTGDPPF

SEQ ID NO: 152805 - protein, 9 aa, Artificial Sequence
  Description of Artificial Sequence: Synthetic peptide
  Seed: FPYTGDPPY
FGYTGDPPI

SEQ ID NO: 152806 - protein, 9 aa, Artificial Sequence
  Description of Artificial Sequence: Synthetic peptide
  Seed: FPYTGDPPY
FGYTGDPPL

SEQ ID NO: 152807 - protein, 9 aa, Artificial Sequence
  Description of Artificial Sequence: Synthetic peptide
  Seed: FPYTGDPPY
FGYTGDPPM

SEQ ID NO: 152808 - protein, 9 aa, Artificial Sequence
  Description of Artificial Sequence: Synthetic peptide
  Seed: FPYTGDPPY
FGYTGDPPV

SEQ ID NO: 152809 - protein, 9 aa, Artificial Sequence
  Description of Artificial Sequence: Synthetic peptide
  Seed: FPYTGDPPY
FGYTGDPPW

SEQ ID NO: 152810 - protein, 9 aa, Artificial Sequence
  Description of Artificial Sequence: Synthetic peptide
  Seed: FPYTGDPPY
FGYTGDPPY

SEQ ID NO: 152811 - protein, 11 aa, Artificial Sequence
  Description of Artificial Sequence: Synthetic peptide
  Seed: FPYTGDPPYSH
FGYTGDPPYSY

SEQ ID NO: 152812 - protein, 10 aa, Artificial Sequence
  Description of Artificial Sequence: Synthetic peptide
  Seed: FPYTGDPPYS
FGYTGDPPYY

SEQ ID NO: 152813 - protein, 8 aa, Artificial Sequence
  Description of Artificial Sequence: Synthetic peptide
  Seed: FSMELPSF
FHMELPSF

SEQ ID NO: 152814 - protein, 10 aa, Artificial Sequence
  Description of Artificial Sequence: Synthetic peptide
  Seed: FSMELPSFGV
FHMELPSFGA

SEQ ID NO: 152815 - protein, 10 aa, Artificial Sequence
  Description of Artificial Sequence: Synthetic peptide
  Seed: FSMELPSFGV
FHMELPSFGI

SEQ ID NO: 152816 - protein, 10 aa, Artificial Sequence
  Description of Artificial Sequence: Synthetic peptide
  Seed: FSMELPSFGV
FHMELPSFGL

SEQ ID NO: 152817 - protein, 10 aa, Artificial Sequence
  Description of Artificial Sequence: Synthetic peptide
  Seed: FSMELPSFGV
FHMELPSFGM

SEQ ID NO: 152818 - protein, 10 aa, Artificial Sequence
  Description of Artificial Sequence: Synthetic peptide
  Seed: FSMELPSFGV
FHMELPSFGV

SEQ ID NO: 152819 - protein, 8 aa, Artificial Sequence
  Description of Artificial Sequence: Synthetic peptide
  Seed: FSMELPSF
FHMELPSM

SEQ ID NO: 152820 - protein, 8 aa, Artificial Sequence
  Description of Artificial Sequence: Synthetic peptide
  Seed: FSMELPSF
FHMELPSY

SEQ ID NO: 152821 - protein, 10 aa, Artificial Sequence
  Description of Artificial Sequence: Synthetic peptide
  Seed: FNMLSTVLGV
FHMLSTVLGA

SEQ ID NO: 152822 - protein, 10 aa, Artificial Sequence
  Description of Artificial Sequence: Synthetic peptide
  Seed: FNMLSTVLGV
FHMLSTVLGC

SEQ ID NO: 152823 - protein, 10 aa, Artificial Sequence
  Description of Artificial Sequence: Synthetic peptide
  Seed: FNMLSTVLGV
FHMLSTVLGF

SEQ ID NO: 152824 - protein, 10 aa, Artificial Sequence
  Description of Artificial Sequence: Synthetic peptide
  Seed: FNMLSTVLGV
FHMLSTVLGI

SEQ ID NO: 152825 - protein, 10 aa, Artificial Sequence
  Description of Artificial Sequence: Synthetic peptide
  Seed: FNMLSTVLGV
FHMLSTVLGL

SEQ ID NO: 152826 - protein, 10 aa, Artificial Sequence
  Description of Artificial Sequence: Synthetic peptide
  Seed: FNMLSTVLGV
FHMLSTVLGM

SEQ ID NO: 152827 - protein, 10 aa, Artificial Sequence
  Description of Artificial Sequence: Synthetic peptide
  Seed: FNMLSTVLGV
FHMLSTVLGS

SEQ ID NO: 152828 - protein, 10 aa, Artificial Sequence
  Description of Artificial Sequence: Synthetic peptide
  Seed: FNMLSTVLGV
FHMLSTVLGT

SEQ ID NO: 152829 - protein, 10 aa, Artificial Sequence
  Description of Artificial Sequence: Synthetic peptide
  Seed: FNMLSTVLGV
FHMLSTVLGV

SEQ ID NO: 152830 - protein, 11 aa, Artificial Sequence
  Description of Artificial Sequence: Synthetic peptide
  Seed: FNMLSTVLGVS
FHMLSTVLGVA

SEQ ID NO: 152831 - protein, 11 aa, Artificial Sequence
  Description of Artificial Sequence: Synthetic peptide
  Seed: FNMLSTVLGVS
FHMLSTVLGVC

SEQ ID NO: 152832 - protein, 11 aa, Artificial Sequence
  Description of Artificial Sequence: Synthetic peptide
  Seed: FNMLSTVLGVS
FHMLSTVLGVD

SEQ ID NO: 152833 - protein, 11 aa, Artificial Sequence
  Description of Artificial Sequence: Synthetic peptide
  Seed: FNMLSTVLGVS
FHMLSTVLGVE

SEQ ID NO: 152834 - protein, 11 aa, Artificial Sequence
  Description of Artificial Sequence: Synthetic peptide
  Seed: FNMLSTVLGVS
FHMLSTVLGVF

SEQ ID NO: 152835 - protein, 11 aa, Artificial Sequence
  Description of Artificial Sequence: Synthetic peptide
  Seed: FNMLSTVLGVS
FHMLSTVLGVG

SEQ ID NO: 152836 - protein, 11 aa, Artificial Sequence
  Description of Artificial Sequence: Synthetic peptide
  Seed: FNMLSTVLGVS
FHMLSTVLGVH

SEQ ID NO: 152837 - protein, 11 aa, Artificial Sequence
  Description of Artificial Sequence: Synthetic peptide
  Seed: FNMLSTVLGVS
FHMLSTVLGVI

SEQ ID NO: 152838 - protein, 11 aa, Artificial Sequence
  Description of Artificial Sequence: Synthetic peptide
  Seed: FNMLSTVLGVS
FHMLSTVLGVK

SEQ ID NO: 152839 - protein, 11 aa, Artificial Sequence
  Description of Artificial Sequence: Synthetic peptide
  Seed: FNMLSTVLGVS
FHMLSTVLGVL

SEQ ID NO: 152840 - protein, 11 aa, Artificial Sequence
  Description of Artificial Sequence: Synthetic peptide
  Seed: FNMLSTVLGVS
FHMLSTVLGVM

SEQ ID NO: 152841 - protein, 11 aa, Artificial Sequence
  Description of Artificial Sequence: Synthetic peptide
  Seed: FNMLSTVLGVS
FHMLSTVLGVN

SEQ ID NO: 152842 - protein, 11 aa, Artificial Sequence
  Description of Artificial Sequence: Synthetic peptide
  Seed: FNMLSTVLGVS
FHMLSTVLGVP

SEQ ID NO: 152843 - protein, 11 aa, Artificial Sequence
  Description of Artificial Sequence: Synthetic peptide
  Seed: FNMLSTVLGVS
FHMLSTVLGVQ

SEQ ID NO: 152844 - protein, 11 aa, Artificial Sequence
  Description of Artificial Sequence: Synthetic peptide
  Seed: FNMLSTVLGVS
FHMLSTVLGVR

SEQ ID NO: 152845 - protein, 11 aa, Artificial Sequence
  Description of Artificial Sequence: Synthetic peptide
  Seed: FNMLSTVLGVS
FHMLSTVLGVS

SEQ ID NO: 152846 - protein, 11 aa, Artificial Sequence
  Description of Artificial Sequence: Synthetic peptide
  Seed: FNMLSTVLGVS
FHMLSTVLGVT

SEQ ID NO: 152847 - protein, 11 aa, Artificial Sequence
  Description of Artificial Sequence: Synthetic peptide
  Seed: FNMLSTVLGVS
FHMLSTVLGVV

SEQ ID NO: 152848 - protein, 11 aa, Artificial Sequence
  Description of Artificial Sequence: Synthetic peptide
  Seed: FNMLSTVLGVS
FHMLSTVLGVW

SEQ ID NO: 152849 - protein, 11 aa, Artificial Sequence
  Description of Artificial Sequence: Synthetic peptide
  Seed: FNMLSTVLGVS
FHMLSTVLGVY

SEQ ID NO: 152850 - protein, 10 aa, Artificial Sequence
  Description of Artificial Sequence: Synthetic peptide
  Seed: FSNKMARLGK
FHNKMARLGR

SEQ ID NO: 152851 - protein, 10 aa, Artificial Sequence
  Description of Artificial Sequence: Synthetic peptide
  Seed: FTSFFYRYGF
FHSFFYRYGA

SEQ ID NO: 152852 - protein, 10 aa, Artificial Sequence
  Description of Artificial Sequence: Synthetic peptide
  Seed: FTSFFYRYGF
FHSFFYRYGF

SEQ ID NO: 152853 - protein, 10 aa, Artificial Sequence
  Description of Artificial Sequence: Synthetic peptide
  Seed: FTSFFYRYGF
FHSFFYRYGI

SEQ ID NO: 152854 - protein, 10 aa, Artificial Sequence
  Description of Artificial Sequence: Synthetic peptide
  Seed: FTSFFYRYGF
FHSFFYRYGL

SEQ ID NO: 152855 - protein, 10 aa, Artificial Sequence
  Description of Artificial Sequence: Synthetic peptide
  Seed: FTSFFYRYGF
FHSFFYRYGM

SEQ ID NO: 152856 - protein, 10 aa, Artificial Sequence
  Description of Artificial Sequence: Synthetic peptide
  Seed: FTSFFYRYGF
FHSFFYRYGR

SEQ ID NO: 152857 - protein, 10 aa, Artificial Sequence
  Description of Artificial Sequence: Synthetic peptide
  Seed: FTSFFYRYGF
FHSFFYRYGT

SEQ ID NO: 152858 - protein, 10 aa, Artificial Sequence
  Description of Artificial Sequence: Synthetic peptide
  Seed: FTSFFYRYGF
FHSFFYRYGV

SEQ ID NO: 152859 - protein, 10 aa, Artificial Sequence
  Description of Artificial Sequence: Synthetic peptide
  Seed: FTSFFYRYGF
FHSFFYRYGW

SEQ ID NO: 152860 - protein, 10 aa, Artificial Sequence
  Description of Artificial Sequence: Synthetic peptide
  Seed: FTSFFYRYGF
FHSFFYRYGY

SEQ ID NO: 152861 - protein, 10 aa, Artificial Sequence
  Description of Artificial Sequence: Synthetic peptide
  Seed: FPSSSYRRPV
FHSSSYRRPF

SEQ ID NO: 152862 - protein, 10 aa, Artificial Sequence
  Description of Artificial Sequence: Synthetic peptide
  Seed: FPSSSYRRPV
FHSSSYRRPI

SEQ ID NO: 152863 - protein, 10 aa, Artificial Sequence
  Description of Artificial Sequence: Synthetic peptide
  Seed: FPSSSYRRPV
FHSSSYRRPL

SEQ ID NO: 152864 - protein, 10 aa, Artificial Sequence
  Description of Artificial Sequence: Synthetic peptide
  Seed: FPSSSYRRPV
FHSSSYRRPM

SEQ ID NO: 152865 - protein, 10 aa, Artificial Sequence
  Description of Artificial Sequence: Synthetic peptide
  Seed: FPSSSYRRPV
FHSSSYRRPV

SEQ ID NO: 152866 - protein, 10 aa, Artificial Sequence
  Description of Artificial Sequence: Synthetic peptide
  Seed: FPSSSYRRPV
FHSSSYRRPY

SEQ ID NO: 152867 - protein, 9 aa, Artificial Sequence
  Description of Artificial Sequence: Synthetic peptide
  Seed: FPYTGDPPY
FHYTGDPPA

SEQ ID NO: 152868 - protein, 9 aa, Artificial Sequence
  Description of Artificial Sequence: Synthetic peptide
  Seed: FPYTGDPPY
FHYTGDPPF

SEQ ID NO: 152869 - protein, 9 aa, Artificial Sequence
  Description of Artificial Sequence: Synthetic peptide
  Seed: FPYTGDPPY
FHYTGDPPH

SEQ ID NO: 152870 - protein, 9 aa, Artificial Sequence
  Description of Artificial Sequence: Synthetic peptide
  Seed: FPYTGDPPY
FHYTGDPPI

SEQ ID NO: 152871 - protein, 9 aa, Artificial Sequence
  Description of Artificial Sequence: Synthetic peptide
  Seed: FPYTGDPPY
FHYTGDPPL

SEQ ID NO: 152872 - protein, 9 aa, Artificial Sequence
  Description of Artificial Sequence: Synthetic peptide
  Seed: FPYTGDPPY
FHYTGDPPM

SEQ ID NO: 152873 - protein, 9 aa, Artificial Sequence
  Description of Artificial Sequence: Synthetic peptide
  Seed: FPYTGDPPY
FHYTGDPPV

SEQ ID NO: 152874 - protein, 9 aa, Artificial Sequence
  Description of Artificial Sequence: Synthetic peptide
  Seed: FPYTGDPPY
FHYTGDPPW

SEQ ID NO: 152875 - protein, 9 aa, Artificial Sequence
  Description of Artificial Sequence: Synthetic peptide
  Seed: FPYTGDPPY
FHYTGDPPY

SEQ ID NO: 152876 - protein, 8 aa, Artificial Sequence
  Description of Artificial Sequence: Synthetic peptide
  Seed: FSMELPSF
FIMELPSF

SEQ ID NO: 152877 - protein, 10 aa, Artificial Sequence
  Description of Artificial Sequence: Synthetic peptide
  Seed: FSMELPSFGV
FIMELPSFGA

SEQ ID NO: 152878 - protein, 10 aa, Artificial Sequence
  Description of Artificial Sequence: Synthetic peptide
  Seed: FSMELPSFGV
FIMELPSFGC

SEQ ID NO: 152879 - protein, 10 aa, Artificial Sequence
  Description of Artificial Sequence: Synthetic peptide
  Seed: FSMELPSFGV
FIMELPSFGF

SEQ ID NO: 152880 - protein, 10 aa, Artificial Sequence
  Description of Artificial Sequence: Synthetic peptide
  Seed: FSMELPSFGV
FIMELPSFGG

SEQ ID NO: 152881 - protein, 10 aa, Artificial Sequence
  Description of Artificial Sequence: Synthetic peptide
  Seed: FSMELPSFGV
FIMELPSFGI

SEQ ID NO: 152882 - protein, 10 aa, Artificial Sequence
  Description of Artificial Sequence: Synthetic peptide
  Seed: FSMELPSFGV
FIMELPSFGL

SEQ ID NO: 152883 - protein, 10 aa, Artificial Sequence
  Description of Artificial Sequence: Synthetic peptide
  Seed: FSMELPSFGV
FIMELPSFGM

SEQ ID NO: 152884 - protein, 10 aa, Artificial Sequence
  Description of Artificial Sequence: Synthetic peptide
  Seed: FSMELPSFGV
FIMELPSFGP

SEQ ID NO: 152885 - protein, 10 aa, Artificial Sequence
  Description of Artificial Sequence: Synthetic peptide
  Seed: FSMELPSFGV
FIMELPSFGS

SEQ ID NO: 152886 - protein, 10 aa, Artificial Sequence
  Description of Artificial Sequence: Synthetic peptide
  Seed: FSMELPSFGV
FIMELPSFGT

SEQ ID NO: 152887 - protein, 10 aa, Artificial Sequence
  Description of Artificial Sequence: Synthetic peptide
  Seed: FSMELPSFGV
FIMELPSFGV

SEQ ID NO: 152888 - protein, 11 aa, Artificial Sequence
  Description of Artificial Sequence: Synthetic peptide
  Seed: FSMELPSFGVS
FIMELPSFGVA

SEQ ID NO: 152889 - protein, 11 aa, Artificial Sequence
  Description of Artificial Sequence: Synthetic peptide
  Seed: FSMELPSFGVS
FIMELPSFGVC

SEQ ID NO: 152890 - protein, 11 aa, Artificial Sequence
  Description of Artificial Sequence: Synthetic peptide
  Seed: FSMELPSFGVS
FIMELPSFGVD

SEQ ID NO: 152891 - protein, 11 aa, Artificial Sequence
  Description of Artificial Sequence: Synthetic peptide
  Seed: FSMELPSFGVS
FIMELPSFGVE

SEQ ID NO: 152892 - protein, 11 aa, Artificial Sequence
  Description of Artificial Sequence: Synthetic peptide
  Seed: FSMELPSFGVS
FIMELPSFGVF

SEQ ID NO: 152893 - protein, 11 aa, Artificial Sequence
  Description of Artificial Sequence: Synthetic peptide
  Seed: FSMELPSFGVS
FIMELPSFGVG

SEQ ID NO: 152894 - protein, 11 aa, Artificial Sequence
  Description of Artificial Sequence: Synthetic peptide
  Seed: FSMELPSFGVS
FIMELPSFGVH

SEQ ID NO: 152895 - protein, 11 aa, Artificial Sequence
  Description of Artificial Sequence: Synthetic peptide
  Seed: FSMELPSFGVS
FIMELPSFGVI

SEQ ID NO: 152896 - protein, 11 aa, Artificial Sequence
  Description of Artificial Sequence: Synthetic peptide
  Seed: FSMELPSFGVS
FIMELPSFGVK

SEQ ID NO: 152897 - protein, 11 aa, Artificial Sequence
  Description of Artificial Sequence: Synthetic peptide
  Seed: FSMELPSFGVS
FIMELPSFGVL

SEQ ID NO: 152898 - protein, 11 aa, Artificial Sequence
  Description of Artificial Sequence: Synthetic peptide
  Seed: FSMELPSFGVS
FIMELPSFGVM

SEQ ID NO: 152899 - protein, 11 aa, Artificial Sequence
  Description of Artificial Sequence: Synthetic peptide
  Seed: FSMELPSFGVS
FIMELPSFGVN

SEQ ID NO: 152900 - protein, 11 aa, Artificial Sequence
  Description of Artificial Sequence: Synthetic peptide
  Seed: FSMELPSFGVS
FIMELPSFGVP

SEQ ID NO: 152901 - protein, 11 aa, Artificial Sequence
  Description of Artificial Sequence: Synthetic peptide
  Seed: FSMELPSFGVS
FIMELPSFGVQ

SEQ ID NO: 152902 - protein, 11 aa, Artificial Sequence
  Description of Artificial Sequence: Synthetic peptide
  Seed: FSMELPSFGVS
FIMELPSFGVR

SEQ ID NO: 152903 - protein, 11 aa, Artificial Sequence
  Description of Artificial Sequence: Synthetic peptide
  Seed: FSMELPSFGVS
FIMELPSFGVS

SEQ ID NO: 152904 - protein, 11 aa, Artificial Sequence
  Description of Artificial Sequence: Synthetic peptide
  Seed: FSMELPSFGVS
FIMELPSFGVT

SEQ ID NO: 152905 - protein, 11 aa, Artificial Sequence
  Description of Artificial Sequence: Synthetic peptide
  Seed: FSMELPSFGVS
FIMELPSFGVV

SEQ ID NO: 152906 - protein, 11 aa, Artificial Sequence
  Description of Artificial Sequence: Synthetic peptide
  Seed: FSMELPSFGVS
FIMELPSFGVW

SEQ ID NO: 152907 - protein, 11 aa, Artificial Sequence
  Description of Artificial Sequence: Synthetic peptide
  Seed: FSMELPSFGVS
FIMELPSFGVY

SEQ ID NO: 152908 - protein, 10 aa, Artificial Sequence
  Description of Artificial Sequence: Synthetic peptide
  Seed: FSMELPSFGV
FIMELPSFGY

SEQ ID NO: 152909 - protein, 8 aa, Artificial Sequence
  Description of Artificial Sequence: Synthetic peptide
  Seed: FSMELPSF
FIMELPSL

SEQ ID NO: 152910 - protein, 8 aa, Artificial Sequence
  Description of Artificial Sequence: Synthetic peptide
  Seed: FSMELPSF
FIMELPSM

SEQ ID NO: 152911 - protein, 8 aa, Artificial Sequence
  Description of Artificial Sequence: Synthetic peptide
  Seed: FSMELPSF
FIMELPSY

SEQ ID NO: 152912 - protein, 10 aa, Artificial Sequence
  Description of Artificial Sequence: Synthetic peptide
  Seed: FNMLSTVLGV
FIMLSTVLGA

SEQ ID NO: 152913 - protein, 10 aa, Artificial Sequence
  Description of Artificial Sequence: Synthetic peptide
  Seed: FNMLSTVLGV
FIMLSTVLGC

SEQ ID NO: 152914 - protein, 10 aa, Artificial Sequence
  Description of Artificial Sequence: Synthetic peptide
  Seed: FNMLSTVLGV
FIMLSTVLGF

SEQ ID NO: 152915 - protein, 10 aa, Artificial Sequence
  Description of Artificial Sequence: Synthetic peptide
  Seed: FNMLSTVLGV
FIMLSTVLGI

SEQ ID NO: 152916 - protein, 10 aa, Artificial Sequence
  Description of Artificial Sequence: Synthetic peptide
  Seed: FNMLSTVLGV
FIMLSTVLGL

SEQ ID NO: 152917 - protein, 10 aa, Artificial Sequence
  Description of Artificial Sequence: Synthetic peptide
  Seed: FNMLSTVLGV
FIMLSTVLGM

SEQ ID NO: 152918 - protein, 10 aa, Artificial Sequence
  Description of Artificial Sequence: Synthetic peptide
  Seed: FNMLSTVLGV
FIMLSTVLGS

SEQ ID NO: 152919 - protein, 10 aa, Artificial Sequence
  Description of Artificial Sequence: Synthetic peptide
  Seed: FNMLSTVLGV
FIMLSTVLGT

SEQ ID NO: 152920 - protein, 10 aa, Artificial Sequence
  Description of Artificial Sequence: Synthetic peptide
  Seed: FNMLSTVLGV
FIMLSTVLGV

SEQ ID NO: 152921 - protein, 11 aa, Artificial Sequence
  Description of Artificial Sequence: Synthetic peptide
  Seed: FNMLSTVLGVS
FIMLSTVLGVA

SEQ ID NO: 152922 - protein, 11 aa, Artificial Sequence
  Description of Artificial Sequence: Synthetic peptide
  Seed: FNMLSTVLGVS
FIMLSTVLGVC

SEQ ID NO: 152923 - protein, 11 aa, Artificial Sequence
  Description of Artificial Sequence: Synthetic peptide
  Seed: FNMLSTVLGVS
FIMLSTVLGVD

SEQ ID NO: 152924 - protein, 11 aa, Artificial Sequence
  Description of Artificial Sequence: Synthetic peptide
  Seed: FNMLSTVLGVS
FIMLSTVLGVE

SEQ ID NO: 152925 - protein, 11 aa, Artificial Sequence
  Description of Artificial Sequence: Synthetic peptide
  Seed: FNMLSTVLGVS
FIMLSTVLGVF

SEQ ID NO: 152926 - protein, 11 aa, Artificial Sequence
  Description of Artificial Sequence: Synthetic peptide
  Seed: FNMLSTVLGVS
FIMLSTVLGVG

SEQ ID NO: 152927 - protein, 11 aa, Artificial Sequence
  Description of Artificial Sequence: Synthetic peptide
  Seed: FNMLSTVLGVS
FIMLSTVLGVH

SEQ ID NO: 152928 - protein, 11 aa, Artificial Sequence
  Description of Artificial Sequence: Synthetic peptide
  Seed: FNMLSTVLGVS
FIMLSTVLGVI

SEQ ID NO: 152929 - protein, 11 aa, Artificial Sequence
  Description of Artificial Sequence: Synthetic peptide
  Seed: FNMLSTVLGVS
FIMLSTVLGVK

SEQ ID NO: 152930 - protein, 11 aa, Artificial Sequence
  Description of Artificial Sequence: Synthetic peptide
  Seed: FNMLSTVLGVS
FIMLSTVLGVL

SEQ ID NO: 152931 - protein, 11 aa, Artificial Sequence
  Description of Artificial Sequence: Synthetic peptide
  Seed: FNMLSTVLGVS
FIMLSTVLGVM

SEQ ID NO: 152932 - protein, 11 aa, Artificial Sequence
  Description of Artificial Sequence: Synthetic peptide
  Seed: FNMLSTVLGVS
FIMLSTVLGVN

SEQ ID NO: 152933 - protein, 11 aa, Artificial Sequence
  Description of Artificial Sequence: Synthetic peptide
  Seed: FNMLSTVLGVS
FIMLSTVLGVP

SEQ ID NO: 152934 - protein, 11 aa, Artificial Sequence
  Description of Artificial Sequence: Synthetic peptide
  Seed: FNMLSTVLGVS
FIMLSTVLGVQ

SEQ ID NO: 152935 - protein, 11 aa, Artificial Sequence
  Description of Artificial Sequence: Synthetic peptide
  Seed: FNMLSTVLGVS
FIMLSTVLGVR

SEQ ID NO: 152936 - protein, 11 aa, Artificial Sequence
  Description of Artificial Sequence: Synthetic peptide
  Seed: FNMLSTVLGVS
FIMLSTVLGVS

SEQ ID NO: 152937 - protein, 11 aa, Artificial Sequence
  Description of Artificial Sequence: Synthetic peptide
  Seed: FNMLSTVLGVS
FIMLSTVLGVT

SEQ ID NO: 152938 - protein, 11 aa, Artificial Sequence
  Description of Artificial Sequence: Synthetic peptide
  Seed: FNMLSTVLGVS
FIMLSTVLGVV

SEQ ID NO: 152939 - protein, 11 aa, Artificial Sequence
  Description of Artificial Sequence: Synthetic peptide
  Seed: FNMLSTVLGVS
FIMLSTVLGVW

SEQ ID NO: 152940 - protein, 11 aa, Artificial Sequence
  Description of Artificial Sequence: Synthetic peptide
  Seed: FNMLSTVLGVS
FIMLSTVLGVY

SEQ ID NO: 152941 - protein, 10 aa, Artificial Sequence
  Description of Artificial Sequence: Synthetic peptide
  Seed: FSNKMARLGK
FINKMARLGK

SEQ ID NO: 152942 - protein, 10 aa, Artificial Sequence
  Description of Artificial Sequence: Synthetic peptide
  Seed: FSNKMARLGK
FINKMARLGR

SEQ ID NO: 152943 - protein, 8 aa, Artificial Sequence
  Description of Artificial Sequence: Synthetic peptide
  Seed: FFPSSSYR
FIPSSSYR

SEQ ID NO: 152944 - protein, 9 aa, Artificial Sequence
  Description of Artificial Sequence: Synthetic peptide
  Seed: FFPSSSYRR
FIPSSSYRK

SEQ ID NO: 152945 - protein, 9 aa, Artificial Sequence
  Description of Artificial Sequence: Synthetic peptide
  Seed: FFPSSSYRR
FIPSSSYRR

SEQ ID NO: 152946 - protein, 8 aa, Artificial Sequence
  Description of Artificial Sequence: Synthetic peptide
  Seed: FTSFFYRY
FISFFYRY

SEQ ID NO: 152947 - protein, 10 aa, Artificial Sequence
  Description of Artificial Sequence: Synthetic peptide
  Seed: FTSFFYRYGF
FISFFYRYGA

SEQ ID NO: 152948 - protein, 10 aa, Artificial Sequence
  Description of Artificial Sequence: Synthetic peptide
  Seed: FTSFFYRYGF
FISFFYRYGF

SEQ ID NO: 152949 - protein, 10 aa, Artificial Sequence
  Description of Artificial Sequence: Synthetic peptide
  Seed: FTSFFYRYGF
FISFFYRYGI

SEQ ID NO: 152950 - protein, 10 aa, Artificial Sequence
  Description of Artificial Sequence: Synthetic peptide
  Seed: FTSFFYRYGF
FISFFYRYGK

SEQ ID NO: 152951 - protein, 10 aa, Artificial Sequence
  Description of Artificial Sequence: Synthetic peptide
  Seed: FTSFFYRYGF
FISFFYRYGL

SEQ ID NO: 152952 - protein, 10 aa, Artificial Sequence
  Description of Artificial Sequence: Synthetic peptide
  Seed: FTSFFYRYGF
FISFFYRYGM

SEQ ID NO: 152953 - protein, 10 aa, Artificial Sequence
  Description of Artificial Sequence: Synthetic peptide
  Seed: FTSFFYRYGF
FISFFYRYGR

SEQ ID NO: 152954 - protein, 10 aa, Artificial Sequence
  Description of Artificial Sequence: Synthetic peptide
  Seed: FTSFFYRYGF
FISFFYRYGT

SEQ ID NO: 152955 - protein, 10 aa, Artificial Sequence
  Description of Artificial Sequence: Synthetic peptide
  Seed: FTSFFYRYGF
FISFFYRYGV

SEQ ID NO: 152956 - protein, 10 aa, Artificial Sequence
  Description of Artificial Sequence: Synthetic peptide
  Seed: FTSFFYRYGF
FISFFYRYGW

SEQ ID NO: 152957 - protein, 10 aa, Artificial Sequence
  Description of Artificial Sequence: Synthetic peptide
  Seed: FTSFFYRYGF
FISFFYRYGY

SEQ ID NO: 152958 - protein, 10 aa, Artificial Sequence
  Description of Artificial Sequence: Synthetic peptide
  Seed: FPSSSYRRPV
FISSSYRRPF

SEQ ID NO: 152959 - protein, 10 aa, Artificial Sequence
  Description of Artificial Sequence: Synthetic peptide
  Seed: FPSSSYRRPV
FISSSYRRPI

SEQ ID NO: 152960 - protein, 10 aa, Artificial Sequence
  Description of Artificial Sequence: Synthetic peptide
  Seed: FPSSSYRRPV
FISSSYRRPL

SEQ ID NO: 152961 - protein, 10 aa, Artificial Sequence
  Description of Artificial Sequence: Synthetic peptide
  Seed: FPSSSYRRPV
FISSSYRRPM

SEQ ID NO: 152962 - protein, 10 aa, Artificial Sequence
  Description of Artificial Sequence: Synthetic peptide
  Seed: FPSSSYRRPV
FISSSYRRPV

SEQ ID NO: 152963 - protein, 10 aa, Artificial Sequence
  Description of Artificial Sequence: Synthetic peptide
  Seed: FPSSSYRRPV
FISSSYRRPY

SEQ ID NO: 152964 - protein, 9 aa, Artificial Sequence
  Description of Artificial Sequence: Synthetic peptide
  Seed: FPYTGDPPY
FIYTGDPPA

SEQ ID NO: 152965 - protein, 9 aa, Artificial Sequence
  Description of Artificial Sequence: Synthetic peptide
  Seed: FPYTGDPPY
FIYTGDPPF

SEQ ID NO: 152966 - protein, 9 aa, Artificial Sequence
  Description of Artificial Sequence: Synthetic peptide
  Seed: FPYTGDPPY
FIYTGDPPH

SEQ ID NO: 152967 - protein, 9 aa, Artificial Sequence
  Description of Artificial Sequence: Synthetic peptide
  Seed: FPYTGDPPY
FIYTGDPPI

SEQ ID NO: 152968 - protein, 9 aa, Artificial Sequence
  Description of Artificial Sequence: Synthetic peptide
  Seed: FPYTGDPPY
FIYTGDPPL

SEQ ID NO: 152969 - protein, 9 aa, Artificial Sequence
  Description of Artificial Sequence: Synthetic peptide
  Seed: FPYTGDPPY
FIYTGDPPM

SEQ ID NO: 152970 - protein, 9 aa, Artificial Sequence
  Description of Artificial Sequence: Synthetic peptide
  Seed: FPYTGDPPY
FIYTGDPPV

SEQ ID NO: 152971 - protein, 9 aa, Artificial Sequence
  Description of Artificial Sequence: Synthetic peptide
  Seed: FPYTGDPPY
FIYTGDPPW

SEQ ID NO: 152972 - protein, 9 aa, Artificial Sequence
  Description of Artificial Sequence: Synthetic peptide
  Seed: FPYTGDPPY
FIYTGDPPY

SEQ ID NO: 152973 - protein, 10 aa, Artificial Sequence
  Description of Artificial Sequence: Synthetic peptide
  Seed: FPYTGDPPYS
FIYTGDPPYA

SEQ ID NO: 152974 - protein, 10 aa, Artificial Sequence
  Description of Artificial Sequence: Synthetic peptide
  Seed: FPYTGDPPYS
FIYTGDPPYC

SEQ ID NO: 152975 - protein, 10 aa, Artificial Sequence
  Description of Artificial Sequence: Synthetic peptide
  Seed: FPYTGDPPYS
FIYTGDPPYD

SEQ ID NO: 152976 - protein, 10 aa, Artificial Sequence
  Description of Artificial Sequence: Synthetic peptide
  Seed: FPYTGDPPYS
FIYTGDPPYE

SEQ ID NO: 152977 - protein, 10 aa, Artificial Sequence
  Description of Artificial Sequence: Synthetic peptide
  Seed: FPYTGDPPYS
FIYTGDPPYF

SEQ ID NO: 152978 - protein, 10 aa, Artificial Sequence
  Description of Artificial Sequence: Synthetic peptide
  Seed: FPYTGDPPYS
FIYTGDPPYG

SEQ ID NO: 152979 - protein, 10 aa, Artificial Sequence
  Description of Artificial Sequence: Synthetic peptide
  Seed: FPYTGDPPYS
FIYTGDPPYH

SEQ ID NO: 152980 - protein, 10 aa, Artificial Sequence
  Description of Artificial Sequence: Synthetic peptide
  Seed: FPYTGDPPYS
FIYTGDPPYI

SEQ ID NO: 152981 - protein, 10 aa, Artificial Sequence
  Description of Artificial Sequence: Synthetic peptide
  Seed: FPYTGDPPYS
FIYTGDPPYK

SEQ ID NO: 152982 - protein, 10 aa, Artificial Sequence
  Description of Artificial Sequence: Synthetic peptide
  Seed: FPYTGDPPYS
FIYTGDPPYL

SEQ ID NO: 152983 - protein, 10 aa, Artificial Sequence
  Description of Artificial Sequence: Synthetic peptide
  Seed: FPYTGDPPYS
FIYTGDPPYM

SEQ ID NO: 152984 - protein, 10 aa, Artificial Sequence
  Description of Artificial Sequence: Synthetic peptide
  Seed: FPYTGDPPYS
FIYTGDPPYN

SEQ ID NO: 152985 - protein, 10 aa, Artificial Sequence
  Description of Artificial Sequence: Synthetic peptide
  Seed: FPYTGDPPYS
FIYTGDPPYP

SEQ ID NO: 152986 - protein, 10 aa, Artificial Sequence
  Description of Artificial Sequence: Synthetic peptide
  Seed: FPYTGDPPYS
FIYTGDPPYQ

SEQ ID NO: 152987 - protein, 10 aa, Artificial Sequence
  Description of Artificial Sequence: Synthetic peptide
  Seed: FPYTGDPPYS
FIYTGDPPYR

SEQ ID NO: 152988 - protein, 10 aa, Artificial Sequence
  Description of Artificial Sequence: Synthetic peptide
  Seed: FPYTGDPPYS
FIYTGDPPYS

SEQ ID NO: 152989 - protein, 11 aa, Artificial Sequence
  Description of Artificial Sequence: Synthetic peptide
  Seed: FPYTGDPPYSH
FIYTGDPPYSF

SEQ ID NO: 152990 - protein, 11 aa, Artificial Sequence
  Description of Artificial Sequence: Synthetic peptide
  Seed: FPYTGDPPYSH
FIYTGDPPYSM

SEQ ID NO: 152991 - protein, 11 aa, Artificial Sequence
  Description of Artificial Sequence: Synthetic peptide
  Seed: FPYTGDPPYSH
FIYTGDPPYSY

SEQ ID NO: 152992 - protein, 10 aa, Artificial Sequence
  Description of Artificial Sequence: Synthetic peptide
  Seed: FPYTGDPPYS
FIYTGDPPYT

SEQ ID NO: 152993 - protein, 10 aa, Artificial Sequence
  Description of Artificial Sequence: Synthetic peptide
  Seed: FPYTGDPPYS
FIYTGDPPYV

SEQ ID NO: 152994 - protein, 10 aa, Artificial Sequence
  Description of Artificial Sequence: Synthetic peptide
  Seed: FPYTGDPPYS
FIYTGDPPYW

SEQ ID NO: 152995 - protein, 10 aa, Artificial Sequence
  Description of Artificial Sequence: Synthetic peptide
  Seed: FPYTGDPPYS
FIYTGDPPYY

SEQ ID NO: 152996 - protein, 8 aa, Artificial Sequence
  Description of Artificial Sequence: Synthetic peptide
  Seed: FSMELPSF
FKMELPSF

SEQ ID NO: 152997 - protein, 10 aa, Artificial Sequence
  Description of Artificial Sequence: Synthetic peptide
  Seed: FSMELPSFGV
FKMELPSFGA

SEQ ID NO: 152998 - protein, 10 aa, Artificial Sequence
  Description of Artificial Sequence: Synthetic peptide
  Seed: FSMELPSFGV
FKMELPSFGI

SEQ ID NO: 152999 - protein, 10 aa, Artificial Sequence
  Description of Artificial Sequence: Synthetic peptide
  Seed: FSMELPSFGV
FKMELPSFGL

SEQ ID NO: 153000 - protein, 10 aa, Artificial Sequence
  Description of Artificial Sequence: Synthetic peptide
  Seed: FSMELPSFGV
FKMELPSFGM

SEQ ID NO: 153001 - protein, 10 aa, Artificial Sequence
  Description of Artificial Sequence: Synthetic peptide
  Seed: FSMELPSFGV
FKMELPSFGV

SEQ ID NO: 153002 - protein, 8 aa, Artificial Sequence
  Description of Artificial Sequence: Synthetic peptide
  Seed: FSMELPSF
FKMELPSL

SEQ ID NO: 153003 - protein, 8 aa, Artificial Sequence
  Description of Artificial Sequence: Synthetic peptide
  Seed: FSMELPSF
FKMELPSM

SEQ ID NO: 153004 - protein, 8 aa, Artificial Sequence
  Description of Artificial Sequence: Synthetic peptide
  Seed: FSMELPSF
FKMELPSY

SEQ ID NO: 153005 - protein, 10 aa, Artificial Sequence
  Description of Artificial Sequence: Synthetic peptide
  Seed: FNMLSTVLGV
FKMLSTVLGA

SEQ ID NO: 153006 - protein, 10 aa, Artificial Sequence
  Description of Artificial Sequence: Synthetic peptide
  Seed: FNMLSTVLGV
FKMLSTVLGC

SEQ ID NO: 153007 - protein, 10 aa, Artificial Sequence
  Description of Artificial Sequence: Synthetic peptide
  Seed: FNMLSTVLGV
FKMLSTVLGF

SEQ ID NO: 153008 - protein, 10 aa, Artificial Sequence
  Description of Artificial Sequence: Synthetic peptide
  Seed: FNMLSTVLGV
FKMLSTVLGI

SEQ ID NO: 153009 - protein, 10 aa, Artificial Sequence
  Description of Artificial Sequence: Synthetic peptide
  Seed: FNMLSTVLGV
FKMLSTVLGL

SEQ ID NO: 153010 - protein, 10 aa, Artificial Sequence
  Description of Artificial Sequence: Synthetic peptide
  Seed: FNMLSTVLGV
FKMLSTVLGM

SEQ ID NO: 153011 - protein, 10 aa, Artificial Sequence
  Description of Artificial Sequence: Synthetic peptide
  Seed: FNMLSTVLGV
FKMLSTVLGS

SEQ ID NO: 153012 - protein, 10 aa, Artificial Sequence
  Description of Artificial Sequence: Synthetic peptide
  Seed: FNMLSTVLGV
FKMLSTVLGT

SEQ ID NO: 153013 - protein, 10 aa, Artificial Sequence
  Description of Artificial Sequence: Synthetic peptide
  Seed: FNMLSTVLGV
FKMLSTVLGV

SEQ ID NO: 153014 - protein, 11 aa, Artificial Sequence
  Description of Artificial Sequence: Synthetic peptide
  Seed: FNMLSTVLGVS
FKMLSTVLGVA

SEQ ID NO: 153015 - protein, 11 aa, Artificial Sequence
  Description of Artificial Sequence: Synthetic peptide
  Seed: FNMLSTVLGVS
FKMLSTVLGVC

SEQ ID NO: 153016 - protein, 11 aa, Artificial Sequence
  Description of Artificial Sequence: Synthetic peptide
  Seed: FNMLSTVLGVS
FKMLSTVLGVD

SEQ ID NO: 153017 - protein, 11 aa, Artificial Sequence
  Description of Artificial Sequence: Synthetic peptide
  Seed: FNMLSTVLGVS
FKMLSTVLGVE

SEQ ID NO: 153018 - protein, 11 aa, Artificial Sequence
  Description of Artificial Sequence: Synthetic peptide
  Seed: FNMLSTVLGVS
FKMLSTVLGVF

SEQ ID NO: 153019 - protein, 11 aa, Artificial Sequence
  Description of Artificial Sequence: Synthetic peptide
  Seed: FNMLSTVLGVS
FKMLSTVLGVG

SEQ ID NO: 153020 - protein, 11 aa, Artificial Sequence
  Description of Artificial Sequence: Synthetic peptide
  Seed: FNMLSTVLGVS
FKMLSTVLGVH

SEQ ID NO: 153021 - protein, 11 aa, Artificial Sequence
  Description of Artificial Sequence: Synthetic peptide
  Seed: FNMLSTVLGVS
FKMLSTVLGVI

SEQ ID NO: 153022 - protein, 11 aa, Artificial Sequence
  Description of Artificial Sequence: Synthetic peptide
  Seed: FNMLSTVLGVS
FKMLSTVLGVK

SEQ ID NO: 153023 - protein, 11 aa, Artificial Sequence
  Description of Artificial Sequence: Synthetic peptide
  Seed: FNMLSTVLGVS
FKMLSTVLGVL

SEQ ID NO: 153024 - protein, 11 aa, Artificial Sequence
  Description of Artificial Sequence: Synthetic peptide
  Seed: FNMLSTVLGVS
FKMLSTVLGVM

SEQ ID NO: 153025 - protein, 11 aa, Artificial Sequence
  Description of Artificial Sequence: Synthetic peptide
  Seed: FNMLSTVLGVS
FKMLSTVLGVN

SEQ ID NO: 153026 - protein, 11 aa, Artificial Sequence
  Description of Artificial Sequence: Synthetic peptide
  Seed: FNMLSTVLGVS
FKMLSTVLGVP

SEQ ID NO: 153027 - protein, 11 aa, Artificial Sequence
  Description of Artificial Sequence: Synthetic peptide
  Seed: FNMLSTVLGVS
FKMLSTVLGVQ

SEQ ID NO: 153028 - protein, 11 aa, Artificial Sequence
  Description of Artificial Sequence: Synthetic peptide
  Seed: FNMLSTVLGVS
FKMLSTVLGVR

SEQ ID NO: 153029 - protein, 11 aa, Artificial Sequence
  Description of Artificial Sequence: Synthetic peptide
  Seed: FNMLSTVLGVS
FKMLSTVLGVS

SEQ ID NO: 153030 - protein, 11 aa, Artificial Sequence
  Description of Artificial Sequence: Synthetic peptide
  Seed: FNMLSTVLGVS
FKMLSTVLGVT

SEQ ID NO: 153031 - protein, 11 aa, Artificial Sequence
  Description of Artificial Sequence: Synthetic peptide
  Seed: FNMLSTVLGVS
FKMLSTVLGVV

SEQ ID NO: 153032 - protein, 11 aa, Artificial Sequence
  Description of Artificial Sequence: Synthetic peptide
  Seed: FNMLSTVLGVS
FKMLSTVLGVW

SEQ ID NO: 153033 - protein, 11 aa, Artificial Sequence
  Description of Artificial Sequence: Synthetic peptide
  Seed: FNMLSTVLGVS
FKMLSTVLGVY

SEQ ID NO: 153034 - protein, 10 aa, Artificial Sequence
  Description of Artificial Sequence: Synthetic peptide
  Seed: FTSFFYRYGF
FKSFFYRYGA

SEQ ID NO: 153035 - protein, 10 aa, Artificial Sequence
  Description of Artificial Sequence: Synthetic peptide
  Seed: FTSFFYRYGF
FKSFFYRYGF

SEQ ID NO: 153036 - protein, 10 aa, Artificial Sequence
  Description of Artificial Sequence: Synthetic peptide
  Seed: FTSFFYRYGF
FKSFFYRYGI

SEQ ID NO: 153037 - protein, 10 aa, Artificial Sequence
  Description of Artificial Sequence: Synthetic peptide
  Seed: FTSFFYRYGF
FKSFFYRYGL

SEQ ID NO: 153038 - protein, 10 aa, Artificial Sequence
  Description of Artificial Sequence: Synthetic peptide
  Seed: FTSFFYRYGF
FKSFFYRYGM

SEQ ID NO: 153039 - protein, 10 aa, Artificial Sequence
  Description of Artificial Sequence: Synthetic peptide
  Seed: FTSFFYRYGF
FKSFFYRYGT

SEQ ID NO: 153040 - protein, 10 aa, Artificial Sequence
  Description of Artificial Sequence: Synthetic peptide
  Seed: FTSFFYRYGF
FKSFFYRYGV

SEQ ID NO: 153041 - protein, 10 aa, Artificial Sequence
  Description of Artificial Sequence: Synthetic peptide
  Seed: FTSFFYRYGF
FKSFFYRYGW

SEQ ID NO: 153042 - protein, 10 aa, Artificial Sequence
  Description of Artificial Sequence: Synthetic peptide
  Seed: FTSFFYRYGF
FKSFFYRYGY

SEQ ID NO: 153043 - protein, 10 aa, Artificial Sequence
  Description of Artificial Sequence: Synthetic peptide
  Seed: FPSSSYRRPV
FKSSSYRRPF

SEQ ID NO: 153044 - protein, 10 aa, Artificial Sequence
  Description of Artificial Sequence: Synthetic peptide
  Seed: FPSSSYRRPV
FKSSSYRRPI

SEQ ID NO: 153045 - protein, 10 aa, Artificial Sequence
  Description of Artificial Sequence: Synthetic peptide
  Seed: FPSSSYRRPV
FKSSSYRRPL

SEQ ID NO: 153046 - protein, 10 aa, Artificial Sequence
  Description of Artificial Sequence: Synthetic peptide
  Seed: FPSSSYRRPV
FKSSSYRRPM

SEQ ID NO: 153047 - protein, 10 aa, Artificial Sequence
  Description of Artificial Sequence: Synthetic peptide
  Seed: FPSSSYRRPV
FKSSSYRRPV

SEQ ID NO: 153048 - protein, 10 aa, Artificial Sequence
  Description of Artificial Sequence: Synthetic peptide
  Seed: FPSSSYRRPV
FKSSSYRRPY

SEQ ID NO: 153049 - protein, 9 aa, Artificial Sequence
  Description of Artificial Sequence: Synthetic peptide
  Seed: FPYTGDPPY
FKYTGDPPA

SEQ ID NO: 153050 - protein, 9 aa, Artificial Sequence
  Description of Artificial Sequence: Synthetic peptide
  Seed: FPYTGDPPY
FKYTGDPPF

SEQ ID NO: 153051 - protein, 9 aa, Artificial Sequence
  Description of Artificial Sequence: Synthetic peptide
  Seed: FPYTGDPPY
FKYTGDPPG

SEQ ID NO: 153052 - protein, 9 aa, Artificial Sequence
  Description of Artificial Sequence: Synthetic peptide
  Seed: FPYTGDPPY
FKYTGDPPH

SEQ ID NO: 153053 - protein, 9 aa, Artificial Sequence
  Description of Artificial Sequence: Synthetic peptide
  Seed: FPYTGDPPY
FKYTGDPPI

SEQ ID NO: 153054 - protein, 9 aa, Artificial Sequence
  Description of Artificial Sequence: Synthetic peptide
  Seed: FPYTGDPPY
FKYTGDPPL

SEQ ID NO: 153055 - protein, 9 aa, Artificial Sequence
  Description of Artificial Sequence: Synthetic peptide
  Seed: FPYTGDPPY
FKYTGDPPM

SEQ ID NO: 153056 - protein, 9 aa, Artificial Sequence
  Description of Artificial Sequence: Synthetic peptide
  Seed: FPYTGDPPY
FKYTGDPPV

SEQ ID NO: 153057 - protein, 9 aa, Artificial Sequence
  Description of Artificial Sequence: Synthetic peptide
  Seed: FPYTGDPPY
FKYTGDPPW

SEQ ID NO: 153058 - protein, 9 aa, Artificial Sequence
  Description of Artificial Sequence: Synthetic peptide
  Seed: FPYTGDPPY
FKYTGDPPY

SEQ ID NO: 153059 - protein, 8 aa, Artificial Sequence
  Description of Artificial Sequence: Synthetic peptide
  Seed: FSMELPSF
FLMELPSF

SEQ ID NO: 153060 - protein, 10 aa, Artificial Sequence
  Description of Artificial Sequence: Synthetic peptide
  Seed: FSMELPSFGV
FLMELPSFGA

SEQ ID NO: 153061 - protein, 10 aa, Artificial Sequence
  Description of Artificial Sequence: Synthetic peptide
  Seed: FSMELPSFGV
FLMELPSFGC

SEQ ID NO: 153062 - protein, 10 aa, Artificial Sequence
  Description of Artificial Sequence: Synthetic peptide
  Seed: FSMELPSFGV
FLMELPSFGD

SEQ ID NO: 153063 - protein, 10 aa, Artificial Sequence
  Description of Artificial Sequence: Synthetic peptide
  Seed: FSMELPSFGV
FLMELPSFGE

SEQ ID NO: 153064 - protein, 10 aa, Artificial Sequence
  Description of Artificial Sequence: Synthetic peptide
  Seed: FSMELPSFGV
FLMELPSFGF

SEQ ID NO: 153065 - protein, 10 aa, Artificial Sequence
  Description of Artificial Sequence: Synthetic peptide
  Seed: FSMELPSFGV
FLMELPSFGG

SEQ ID NO: 153066 - protein, 10 aa, Artificial Sequence
  Description of Artificial Sequence: Synthetic peptide
  Seed: FSMELPSFGV
FLMELPSFGH

SEQ ID NO: 153067 - protein, 10 aa, Artificial Sequence
  Description of Artificial Sequence: Synthetic peptide
  Seed: FSMELPSFGV
FLMELPSFGI

SEQ ID NO: 153068 - protein, 10 aa, Artificial Sequence
  Description of Artificial Sequence: Synthetic peptide
  Seed: FSMELPSFGV
FLMELPSFGK

SEQ ID NO: 153069 - protein, 10 aa, Artificial Sequence
  Description of Artificial Sequence: Synthetic peptide
  Seed: FSMELPSFGV
FLMELPSFGL

SEQ ID NO: 153070 - protein, 10 aa, Artificial Sequence
  Description of Artificial Sequence: Synthetic peptide
  Seed: FSMELPSFGV
FLMELPSFGM

SEQ ID NO: 153071 - protein, 10 aa, Artificial Sequence
  Description of Artificial Sequence: Synthetic peptide
  Seed: FSMELPSFGV
FLMELPSFGN

SEQ ID NO: 153072 - protein, 10 aa, Artificial Sequence
  Description of Artificial Sequence: Synthetic peptide
  Seed: FSMELPSFGV
FLMELPSFGP

SEQ ID NO: 153073 - protein, 10 aa, Artificial Sequence
  Description of Artificial Sequence: Synthetic peptide
  Seed: FSMELPSFGV
FLMELPSFGQ

SEQ ID NO: 153074 - protein, 10 aa, Artificial Sequence
  Description of Artificial Sequence: Synthetic peptide
  Seed: FSMELPSFGV
FLMELPSFGR

SEQ ID NO: 153075 - protein, 10 aa, Artificial Sequence
  Description of Artificial Sequence: Synthetic peptide
  Seed: FSMELPSFGV
FLMELPSFGS

SEQ ID NO: 153076 - protein, 10 aa, Artificial Sequence
  Description of Artificial Sequence: Synthetic peptide
  Seed: FSMELPSFGV
FLMELPSFGT

SEQ ID NO: 153077 - protein, 10 aa, Artificial Sequence
  Description of Artificial Sequence: Synthetic peptide
  Seed: FSMELPSFGV
FLMELPSFGV

SEQ ID NO: 153078 - protein, 11 aa, Artificial Sequence
  Description of Artificial Sequence: Synthetic peptide
  Seed: FSMELPSFGVS
FLMELPSFGVA

SEQ ID NO: 153079 - protein, 11 aa, Artificial Sequence
  Description of Artificial Sequence: Synthetic peptide
  Seed: FSMELPSFGVS
FLMELPSFGVC

SEQ ID NO: 153080 - protein, 11 aa, Artificial Sequence
  Description of Artificial Sequence: Synthetic peptide
  Seed: FSMELPSFGVS
FLMELPSFGVD

SEQ ID NO: 153081 - protein, 11 aa, Artificial Sequence
  Description of Artificial Sequence: Synthetic peptide
  Seed: FSMELPSFGVS
FLMELPSFGVE

SEQ ID NO: 153082 - protein, 11 aa, Artificial Sequence
  Description of Artificial Sequence: Synthetic peptide
  Seed: FSMELPSFGVS
FLMELPSFGVF

SEQ ID NO: 153083 - protein, 11 aa, Artificial Sequence
  Description of Artificial Sequence: Synthetic peptide
  Seed: FSMELPSFGVS
FLMELPSFGVG

SEQ ID NO: 153084 - protein, 11 aa, Artificial Sequence
  Description of Artificial Sequence: Synthetic peptide
  Seed: FSMELPSFGVS
FLMELPSFGVH

SEQ ID NO: 153085 - protein, 11 aa, Artificial Sequence
  Description of Artificial Sequence: Synthetic peptide
  Seed: FSMELPSFGVS
FLMELPSFGVI

SEQ ID NO: 153086 - protein, 11 aa, Artificial Sequence
  Description of Artificial Sequence: Synthetic peptide
  Seed: FSMELPSFGVS
FLMELPSFGVK

SEQ ID NO: 153087 - protein, 11 aa, Artificial Sequence
  Description of Artificial Sequence: Synthetic peptide
  Seed: FSMELPSFGVS
FLMELPSFGVL

SEQ ID NO: 153088 - protein, 11 aa, Artificial Sequence
  Description of Artificial Sequence: Synthetic peptide
  Seed: FSMELPSFGVS
FLMELPSFGVM

SEQ ID NO: 153089 - protein, 11 aa, Artificial Sequence
  Description of Artificial Sequence: Synthetic peptide
  Seed: FSMELPSFGVS
FLMELPSFGVN

SEQ ID NO: 153090 - protein, 11 aa, Artificial Sequence
  Description of Artificial Sequence: Synthetic peptide
  Seed: FSMELPSFGVS
FLMELPSFGVP

SEQ ID NO: 153091 - protein, 11 aa, Artificial Sequence
  Description of Artificial Sequence: Synthetic peptide
  Seed: FSMELPSFGVS
FLMELPSFGVQ

SEQ ID NO: 153092 - protein, 11 aa, Artificial Sequence
  Description of Artificial Sequence: Synthetic peptide
  Seed: FSMELPSFGVS
FLMELPSFGVR

SEQ ID NO: 153093 - protein, 11 aa, Artificial Sequence
  Description of Artificial Sequence: Synthetic peptide
  Seed: FSMELPSFGVS
FLMELPSFGVS

SEQ ID NO: 153094 - protein, 11 aa, Artificial Sequence
  Description of Artificial Sequence: Synthetic peptide
  Seed: FSMELPSFGVS
FLMELPSFGVT

SEQ ID NO: 153095 - protein, 11 aa, Artificial Sequence
  Description of Artificial Sequence: Synthetic peptide
  Seed: FSMELPSFGVS
FLMELPSFGVV

SEQ ID NO: 153096 - protein, 11 aa, Artificial Sequence
  Description of Artificial Sequence: Synthetic peptide
  Seed: FSMELPSFGVS
FLMELPSFGVW

SEQ ID NO: 153097 - protein, 11 aa, Artificial Sequence
  Description of Artificial Sequence: Synthetic peptide
  Seed: FSMELPSFGVS
FLMELPSFGVY

SEQ ID NO: 153098 - protein, 10 aa, Artificial Sequence
  Description of Artificial Sequence: Synthetic peptide
  Seed: FSMELPSFGV
FLMELPSFGW

SEQ ID NO: 153099 - protein, 10 aa, Artificial Sequence
  Description of Artificial Sequence: Synthetic peptide
  Seed: FSMELPSFGV
FLMELPSFGY

SEQ ID NO: 153100 - protein, 8 aa, Artificial Sequence
  Description of Artificial Sequence: Synthetic peptide
  Seed: FSMELPSF
FLMELPSL

SEQ ID NO: 153101 - protein, 8 aa, Artificial Sequence
  Description of Artificial Sequence: Synthetic peptide
  Seed: FSMELPSF
FLMELPSM

SEQ ID NO: 153102 - protein, 8 aa, Artificial Sequence
  Description of Artificial Sequence: Synthetic peptide
  Seed: FSMELPSF
FLMELPSY

SEQ ID NO: 153103 - protein, 10 aa, Artificial Sequence
  Description of Artificial Sequence: Synthetic peptide
  Seed: FNMLSTVLGV
FLMLSTVLGA

SEQ ID NO: 153104 - protein, 10 aa, Artificial Sequence
  Description of Artificial Sequence: Synthetic peptide
  Seed: FNMLSTVLGV
FLMLSTVLGC

SEQ ID NO: 153105 - protein, 10 aa, Artificial Sequence
  Description of Artificial Sequence: Synthetic peptide
  Seed: FNMLSTVLGV
FLMLSTVLGD

SEQ ID NO: 153106 - protein, 10 aa, Artificial Sequence
  Description of Artificial Sequence: Synthetic peptide
  Seed: FNMLSTVLGV
FLMLSTVLGE

SEQ ID NO: 153107 - protein, 10 aa, Artificial Sequence
  Description of Artificial Sequence: Synthetic peptide
  Seed: FNMLSTVLGV
FLMLSTVLGF

SEQ ID NO: 153108 - protein, 10 aa, Artificial Sequence
  Description of Artificial Sequence: Synthetic peptide
  Seed: FNMLSTVLGV
FLMLSTVLGG

SEQ ID NO: 153109 - protein, 10 aa, Artificial Sequence
  Description of Artificial Sequence: Synthetic peptide
  Seed: FNMLSTVLGV
FLMLSTVLGI

SEQ ID NO: 153110 - protein, 10 aa, Artificial Sequence
  Description of Artificial Sequence: Synthetic peptide
  Seed: FNMLSTVLGV
FLMLSTVLGL

SEQ ID NO: 153111 - protein, 10 aa, Artificial Sequence
  Description of Artificial Sequence: Synthetic peptide
  Seed: FNMLSTVLGV
FLMLSTVLGM

SEQ ID NO: 153112 - protein, 10 aa, Artificial Sequence
  Description of Artificial Sequence: Synthetic peptide
  Seed: FNMLSTVLGV
FLMLSTVLGP

SEQ ID NO: 153113 - protein, 10 aa, Artificial Sequence
  Description of Artificial Sequence: Synthetic peptide
  Seed: FNMLSTVLGV
FLMLSTVLGS

SEQ ID NO: 153114 - protein, 10 aa, Artificial Sequence
  Description of Artificial Sequence: Synthetic peptide
  Seed: FNMLSTVLGV
FLMLSTVLGT

SEQ ID NO: 153115 - protein, 10 aa, Artificial Sequence
  Description of Artificial Sequence: Synthetic peptide
  Seed: FNMLSTVLGV
FLMLSTVLGV

SEQ ID NO: 153116 - protein, 11 aa, Artificial Sequence
  Description of Artificial Sequence: Synthetic peptide
  Seed: FNMLSTVLGVS
FLMLSTVLGVA

SEQ ID NO: 153117 - protein, 11 aa, Artificial Sequence
  Description of Artificial Sequence: Synthetic peptide
  Seed: FNMLSTVLGVS
FLMLSTVLGVC

SEQ ID NO: 153118 - protein, 11 aa, Artificial Sequence
  Description of Artificial Sequence: Synthetic peptide
  Seed: FNMLSTVLGVS
FLMLSTVLGVD

SEQ ID NO: 153119 - protein, 11 aa, Artificial Sequence
  Description of Artificial Sequence: Synthetic peptide
  Seed: FNMLSTVLGVS
FLMLSTVLGVE

SEQ ID NO: 153120 - protein, 11 aa, Artificial Sequence
  Description of Artificial Sequence: Synthetic peptide
  Seed: FNMLSTVLGVS
FLMLSTVLGVF

SEQ ID NO: 153121 - protein, 11 aa, Artificial Sequence
  Description of Artificial Sequence: Synthetic peptide
  Seed: FNMLSTVLGVS
FLMLSTVLGVG

SEQ ID NO: 153122 - protein, 11 aa, Artificial Sequence
  Description of Artificial Sequence: Synthetic peptide
  Seed: FNMLSTVLGVS
FLMLSTVLGVH

SEQ ID NO: 153123 - protein, 11 aa, Artificial Sequence
  Description of Artificial Sequence: Synthetic peptide
  Seed: FNMLSTVLGVS
FLMLSTVLGVI

SEQ ID NO: 153124 - protein, 11 aa, Artificial Sequence
  Description of Artificial Sequence: Synthetic peptide
  Seed: FNMLSTVLGVS
FLMLSTVLGVK

SEQ ID NO: 153125 - protein, 11 aa, Artificial Sequence
  Description of Artificial Sequence: Synthetic peptide
  Seed: FNMLSTVLGVS
FLMLSTVLGVL

SEQ ID NO: 153126 - protein, 11 aa, Artificial Sequence
  Description of Artificial Sequence: Synthetic peptide
  Seed: FNMLSTVLGVS
FLMLSTVLGVM

SEQ ID NO: 153127 - protein, 11 aa, Artificial Sequence
  Description of Artificial Sequence: Synthetic peptide
  Seed: FNMLSTVLGVS
FLMLSTVLGVN

SEQ ID NO: 153128 - protein, 11 aa, Artificial Sequence
  Description of Artificial Sequence: Synthetic peptide
  Seed: FNMLSTVLGVS
FLMLSTVLGVP

SEQ ID NO: 153129 - protein, 11 aa, Artificial Sequence
  Description of Artificial Sequence: Synthetic peptide
  Seed: FNMLSTVLGVS
FLMLSTVLGVQ

SEQ ID NO: 153130 - protein, 11 aa, Artificial Sequence
  Description of Artificial Sequence: Synthetic peptide
  Seed: FNMLSTVLGVS
FLMLSTVLGVR

SEQ ID NO: 153131 - protein, 11 aa, Artificial Sequence
  Description of Artificial Sequence: Synthetic peptide
  Seed: FNMLSTVLGVS
FLMLSTVLGVS

SEQ ID NO: 153132 - protein, 11 aa, Artificial Sequence
  Description of Artificial Sequence: Synthetic peptide
  Seed: FNMLSTVLGVS
FLMLSTVLGVT

SEQ ID NO: 153133 - protein, 11 aa, Artificial Sequence
  Description of Artificial Sequence: Synthetic peptide
  Seed: FNMLSTVLGVS
FLMLSTVLGVV

SEQ ID NO: 153134 - protein, 11 aa, Artificial Sequence
  Description of Artificial Sequence: Synthetic peptide
  Seed: FNMLSTVLGVS
FLMLSTVLGVW

SEQ ID NO: 153135 - protein, 11 aa, Artificial Sequence
  Description of Artificial Sequence: Synthetic peptide
  Seed: FNMLSTVLGVS
FLMLSTVLGVY

SEQ ID NO: 153136 - protein, 10 aa, Artificial Sequence
  Description of Artificial Sequence: Synthetic peptide
  Seed: FSNKMARLGK
FLNKMARLGK

SEQ ID NO: 153137 - protein, 10 aa, Artificial Sequence
  Description of Artificial Sequence: Synthetic peptide
  Seed: FSNKMARLGK
FLNKMARLGR

SEQ ID NO: 153138 - protein, 8 aa, Artificial Sequence
  Description of Artificial Sequence: Synthetic peptide
  Seed: FFPSSSYR
FLPSSSYR

SEQ ID NO: 153139 - protein, 9 aa, Artificial Sequence
  Description of Artificial Sequence: Synthetic peptide
  Seed: FFPSSSYRR
FLPSSSYRK

SEQ ID NO: 153140 - protein, 9 aa, Artificial Sequence
  Description of Artificial Sequence: Synthetic peptide
  Seed: FFPSSSYRR
FLPSSSYRR

SEQ ID NO: 153141 - protein, 8 aa, Artificial Sequence
  Description of Artificial Sequence: Synthetic peptide
  Seed: FTSFFYRY
FLSFFYRY

SEQ ID NO: 153142 - protein, 10 aa, Artificial Sequence
  Description of Artificial Sequence: Synthetic peptide
  Seed: FTSFFYRYGF
FLSFFYRYGA

SEQ ID NO: 153143 - protein, 10 aa, Artificial Sequence
  Description of Artificial Sequence: Synthetic peptide
  Seed: FTSFFYRYGF
FLSFFYRYGF

SEQ ID NO: 153144 - protein, 10 aa, Artificial Sequence
  Description of Artificial Sequence: Synthetic peptide
  Seed: FTSFFYRYGF
FLSFFYRYGI

SEQ ID NO: 153145 - protein, 10 aa, Artificial Sequence
  Description of Artificial Sequence: Synthetic peptide
  Seed: FTSFFYRYGF
FLSFFYRYGK

SEQ ID NO: 153146 - protein, 10 aa, Artificial Sequence
  Description of Artificial Sequence: Synthetic peptide
  Seed: FTSFFYRYGF
FLSFFYRYGL

SEQ ID NO: 153147 - protein, 10 aa, Artificial Sequence
  Description of Artificial Sequence: Synthetic peptide
  Seed: FTSFFYRYGF
FLSFFYRYGM

SEQ ID NO: 153148 - protein, 10 aa, Artificial Sequence
  Description of Artificial Sequence: Synthetic peptide
  Seed: FTSFFYRYGF
FLSFFYRYGR

SEQ ID NO: 153149 - protein, 10 aa, Artificial Sequence
  Description of Artificial Sequence: Synthetic peptide
  Seed: FTSFFYRYGF
FLSFFYRYGT

SEQ ID NO: 153150 - protein, 10 aa, Artificial Sequence
  Description of Artificial Sequence: Synthetic peptide
  Seed: FTSFFYRYGF
FLSFFYRYGV

SEQ ID NO: 153151 - protein, 10 aa, Artificial Sequence
  Description of Artificial Sequence: Synthetic peptide
  Seed: FTSFFYRYGF
FLSFFYRYGW

SEQ ID NO: 153152 - protein, 10 aa, Artificial Sequence
  Description of Artificial Sequence: Synthetic peptide
  Seed: FTSFFYRYGF
FLSFFYRYGY

SEQ ID NO: 153153 - protein, 10 aa, Artificial Sequence
  Description of Artificial Sequence: Synthetic peptide
  Seed: FPSSSYRRPV
FLSSSYRRPF

SEQ ID NO: 153154 - protein, 10 aa, Artificial Sequence
  Description of Artificial Sequence: Synthetic peptide
  Seed: FPSSSYRRPV
FLSSSYRRPI

SEQ ID NO: 153155 - protein, 10 aa, Artificial Sequence
  Description of Artificial Sequence: Synthetic peptide
  Seed: FPSSSYRRPV
FLSSSYRRPL

SEQ ID NO: 153156 - protein, 10 aa, Artificial Sequence
  Description of Artificial Sequence: Synthetic peptide
  Seed: FPSSSYRRPV
FLSSSYRRPM

SEQ ID NO: 153157 - protein, 10 aa, Artificial Sequence
  Description of Artificial Sequence: Synthetic peptide
  Seed: FPSSSYRRPV
FLSSSYRRPV

SEQ ID NO: 153158 - protein, 10 aa, Artificial Sequence
  Description of Artificial Sequence: Synthetic peptide
  Seed: FPSSSYRRPV
FLSSSYRRPY

SEQ ID NO: 153159 - protein, 9 aa, Artificial Sequence
  Description of Artificial Sequence: Synthetic peptide
  Seed: FPYTGDPPY
FLYTGDPPA

SEQ ID NO: 153160 - protein, 9 aa, Artificial Sequence
  Description of Artificial Sequence: Synthetic peptide
  Seed: FPYTGDPPY
FLYTGDPPF

SEQ ID NO: 153161 - protein, 9 aa, Artificial Sequence
  Description of Artificial Sequence: Synthetic peptide
  Seed: FPYTGDPPY
FLYTGDPPG

SEQ ID NO: 153162 - protein, 9 aa, Artificial Sequence
  Description of Artificial Sequence: Synthetic peptide
  Seed: FPYTGDPPY
FLYTGDPPH

SEQ ID NO: 153163 - protein, 9 aa, Artificial Sequence
  Description of Artificial Sequence: Synthetic peptide
  Seed: FPYTGDPPY
FLYTGDPPI

SEQ ID NO: 153164 - protein, 9 aa, Artificial Sequence
  Description of Artificial Sequence: Synthetic peptide
  Seed: FPYTGDPPY
FLYTGDPPL

SEQ ID NO: 153165 - protein, 9 aa, Artificial Sequence
  Description of Artificial Sequence: Synthetic peptide
  Seed: FPYTGDPPY
FLYTGDPPM

SEQ ID NO: 153166 - protein, 9 aa, Artificial Sequence
  Description of Artificial Sequence: Synthetic peptide
  Seed: FPYTGDPPY
FLYTGDPPV

SEQ ID NO: 153167 - protein, 9 aa, Artificial Sequence
  Description of Artificial Sequence: Synthetic peptide
  Seed: FPYTGDPPY
FLYTGDPPW

SEQ ID NO: 153168 - protein, 9 aa, Artificial Sequence
  Description of Artificial Sequence: Synthetic peptide
  Seed: FPYTGDPPY
FLYTGDPPY

SEQ ID NO: 153169 - protein, 10 aa, Artificial Sequence
  Description of Artificial Sequence: Synthetic peptide
  Seed: FPYTGDPPYS
FLYTGDPPYF

SEQ ID NO: 153170 - protein, 10 aa, Artificial Sequence
  Description of Artificial Sequence: Synthetic peptide
  Seed: FPYTGDPPYS
FLYTGDPPYM

SEQ ID NO: 153171 - protein, 11 aa, Artificial Sequence
  Description of Artificial Sequence: Synthetic peptide
  Seed: FPYTGDPPYSH
FLYTGDPPYSY

SEQ ID NO: 153172 - protein, 10 aa, Artificial Sequence
  Description of Artificial Sequence: Synthetic peptide
  Seed: FPYTGDPPYS
FLYTGDPPYY

SEQ ID NO: 153173 - protein, 8 aa, Artificial Sequence
  Description of Artificial Sequence: Synthetic peptide
  Seed: FSMELPSF
FMMELPSF

SEQ ID NO: 153174 - protein, 10 aa, Artificial Sequence
  Description of Artificial Sequence: Synthetic peptide
  Seed: FSMELPSFGV
FMMELPSFGA

SEQ ID NO: 153175 - protein, 10 aa, Artificial Sequence
  Description of Artificial Sequence: Synthetic peptide
  Seed: FSMELPSFGV
FMMELPSFGC

SEQ ID NO: 153176 - protein, 10 aa, Artificial Sequence
  Description of Artificial Sequence: Synthetic peptide
  Seed: FSMELPSFGV
FMMELPSFGD

SEQ ID NO: 153177 - protein, 10 aa, Artificial Sequence
  Description of Artificial Sequence: Synthetic peptide
  Seed: FSMELPSFGV
FMMELPSFGE

SEQ ID NO: 153178 - protein, 10 aa, Artificial Sequence
  Description of Artificial Sequence: Synthetic peptide
  Seed: FSMELPSFGV
FMMELPSFGF

SEQ ID NO: 153179 - protein, 10 aa, Artificial Sequence
  Description of Artificial Sequence: Synthetic peptide
  Seed: FSMELPSFGV
FMMELPSFGG

SEQ ID NO: 153180 - protein, 10 aa, Artificial Sequence
  Description of Artificial Sequence: Synthetic peptide
  Seed: FSMELPSFGV
FMMELPSFGH

SEQ ID NO: 153181 - protein, 10 aa, Artificial Sequence
  Description of Artificial Sequence: Synthetic peptide
  Seed: FSMELPSFGV
FMMELPSFGI

SEQ ID NO: 153182 - protein, 10 aa, Artificial Sequence
  Description of Artificial Sequence: Synthetic peptide
  Seed: FSMELPSFGV
FMMELPSFGK

SEQ ID NO: 153183 - protein, 10 aa, Artificial Sequence
  Description of Artificial Sequence: Synthetic peptide
  Seed: FSMELPSFGV
FMMELPSFGL

SEQ ID NO: 153184 - protein, 10 aa, Artificial Sequence
  Description of Artificial Sequence: Synthetic peptide
  Seed: FSMELPSFGV
FMMELPSFGM

SEQ ID NO: 153185 - protein, 10 aa, Artificial Sequence
  Description of Artificial Sequence: Synthetic peptide
  Seed: FSMELPSFGV
FMMELPSFGN

SEQ ID NO: 153186 - protein, 10 aa, Artificial Sequence
  Description of Artificial Sequence: Synthetic peptide
  Seed: FSMELPSFGV
FMMELPSFGP

SEQ ID NO: 153187 - protein, 10 aa, Artificial Sequence
  Description of Artificial Sequence: Synthetic peptide
  Seed: FSMELPSFGV
FMMELPSFGQ

SEQ ID NO: 153188 - protein, 10 aa, Artificial Sequence
  Description of Artificial Sequence: Synthetic peptide
  Seed: FSMELPSFGV
FMMELPSFGR

SEQ ID NO: 153189 - protein, 10 aa, Artificial Sequence
  Description of Artificial Sequence: Synthetic peptide
  Seed: FSMELPSFGV
FMMELPSFGS

SEQ ID NO: 153190 - protein, 10 aa, Artificial Sequence
  Description of Artificial Sequence: Synthetic peptide
  Seed: FSMELPSFGV
FMMELPSFGT

SEQ ID NO: 153191 - protein, 10 aa, Artificial Sequence
  Description of Artificial Sequence: Synthetic peptide
  Seed: FSMELPSFGV
FMMELPSFGV

SEQ ID NO: 153192 - protein, 11 aa, Artificial Sequence
  Description of Artificial Sequence: Synthetic peptide
  Seed: FSMELPSFGVS
FMMELPSFGVA

SEQ ID NO: 153193 - protein, 11 aa, Artificial Sequence
  Description of Artificial Sequence: Synthetic peptide
  Seed: FSMELPSFGVS
FMMELPSFGVC

SEQ ID NO: 153194 - protein, 11 aa, Artificial Sequence
  Description of Artificial Sequence: Synthetic peptide
  Seed: FSMELPSFGVS
FMMELPSFGVD

SEQ ID NO: 153195 - protein, 11 aa, Artificial Sequence
  Description of Artificial Sequence: Synthetic peptide
  Seed: FSMELPSFGVS
FMMELPSFGVE

SEQ ID NO: 153196 - protein, 11 aa, Artificial Sequence
  Description of Artificial Sequence: Synthetic peptide
  Seed: FSMELPSFGVS
FMMELPSFGVF

SEQ ID NO: 153197 - protein, 11 aa, Artificial Sequence
  Description of Artificial Sequence: Synthetic peptide
  Seed: FSMELPSFGVS
FMMELPSFGVG

SEQ ID NO: 153198 - protein, 11 aa, Artificial Sequence
  Description of Artificial Sequence: Synthetic peptide
  Seed: FSMELPSFGVS
FMMELPSFGVH

SEQ ID NO: 153199 - protein, 11 aa, Artificial Sequence
  Description of Artificial Sequence: Synthetic peptide
  Seed: FSMELPSFGVS
FMMELPSFGVI

SEQ ID NO: 153200 - protein, 11 aa, Artificial Sequence
  Description of Artificial Sequence: Synthetic peptide
  Seed: FSMELPSFGVS
FMMELPSFGVK

SEQ ID NO: 153201 - protein, 11 aa, Artificial Sequence
  Description of Artificial Sequence: Synthetic peptide
  Seed: FSMELPSFGVS
FMMELPSFGVL

SEQ ID NO: 153202 - protein, 11 aa, Artificial Sequence
  Description of Artificial Sequence: Synthetic peptide
  Seed: FSMELPSFGVS
FMMELPSFGVM

SEQ ID NO: 153203 - protein, 11 aa, Artificial Sequence
  Description of Artificial Sequence: Synthetic peptide
  Seed: FSMELPSFGVS
FMMELPSFGVN

SEQ ID NO: 153204 - protein, 11 aa, Artificial Sequence
  Description of Artificial Sequence: Synthetic peptide
  Seed: FSMELPSFGVS
FMMELPSFGVP

SEQ ID NO: 153205 - protein, 11 aa, Artificial Sequence
  Description of Artificial Sequence: Synthetic peptide
  Seed: FSMELPSFGVS
FMMELPSFGVQ

SEQ ID NO: 153206 - protein, 11 aa, Artificial Sequence
  Description of Artificial Sequence: Synthetic peptide
  Seed: FSMELPSFGVS
FMMELPSFGVR

SEQ ID NO: 153207 - protein, 11 aa, Artificial Sequence
  Description of Artificial Sequence: Synthetic peptide
  Seed: FSMELPSFGVS
FMMELPSFGVS

SEQ ID NO: 153208 - protein, 11 aa, Artificial Sequence
  Description of Artificial Sequence: Synthetic peptide
  Seed: FSMELPSFGVS
FMMELPSFGVT

SEQ ID NO: 153209 - protein, 11 aa, Artificial Sequence
  Description of Artificial Sequence: Synthetic peptide
  Seed: FSMELPSFGVS
FMMELPSFGVV

SEQ ID NO: 153210 - protein, 11 aa, Artificial Sequence
  Description of Artificial Sequence: Synthetic peptide
  Seed: FSMELPSFGVS
FMMELPSFGVW

SEQ ID NO: 153211 - protein, 11 aa, Artificial Sequence
  Description of Artificial Sequence: Synthetic peptide
  Seed: FSMELPSFGVS
FMMELPSFGVY

SEQ ID NO: 153212 - protein, 10 aa, Artificial Sequence
  Description of Artificial Sequence: Synthetic peptide
  Seed: FSMELPSFGV
FMMELPSFGW

SEQ ID NO: 153213 - protein, 10 aa, Artificial Sequence
  Description of Artificial Sequence: Synthetic peptide
  Seed: FSMELPSFGV
FMMELPSFGY

SEQ ID NO: 153214 - protein, 8 aa, Artificial Sequence
  Description of Artificial Sequence: Synthetic peptide
  Seed: FSMELPSF
FMMELPSI

SEQ ID NO: 153215 - protein, 8 aa, Artificial Sequence
  Description of Artificial Sequence: Synthetic peptide
  Seed: FSMELPSF
FMMELPSL

SEQ ID NO: 153216 - protein, 8 aa, Artificial Sequence
  Description of Artificial Sequence: Synthetic peptide
  Seed: FSMELPSF
FMMELPSM

SEQ ID NO: 153217 - protein, 8 aa, Artificial Sequence
  Description of Artificial Sequence: Synthetic peptide
  Seed: FSMELPSF
FMMELPSW

SEQ ID NO: 153218 - protein, 8 aa, Artificial Sequence
  Description of Artificial Sequence: Synthetic peptide
  Seed: FSMELPSF
FMMELPSY

SEQ ID NO: 153219 - protein, 10 aa, Artificial Sequence
  Description of Artificial Sequence: Synthetic peptide
  Seed: FNMLSTVLGV
FMMLSTVLGA

SEQ ID NO: 153220 - protein, 10 aa, Artificial Sequence
  Description of Artificial Sequence: Synthetic peptide
  Seed: FNMLSTVLGV
FMMLSTVLGC

SEQ ID NO: 153221 - protein, 10 aa, Artificial Sequence
  Description of Artificial Sequence: Synthetic peptide
  Seed: FNMLSTVLGV
FMMLSTVLGD

SEQ ID NO: 153222 - protein, 10 aa, Artificial Sequence
  Description of Artificial Sequence: Synthetic peptide
  Seed: FNMLSTVLGV
FMMLSTVLGE

SEQ ID NO: 153223 - protein, 10 aa, Artificial Sequence
  Description of Artificial Sequence: Synthetic peptide
  Seed: FNMLSTVLGV
FMMLSTVLGF

SEQ ID NO: 153224 - protein, 10 aa, Artificial Sequence
  Description of Artificial Sequence: Synthetic peptide
  Seed: FNMLSTVLGV
FMMLSTVLGG

SEQ ID NO: 153225 - protein, 10 aa, Artificial Sequence
  Description of Artificial Sequence: Synthetic peptide
  Seed: FNMLSTVLGV
FMMLSTVLGI

SEQ ID NO: 153226 - protein, 10 aa, Artificial Sequence
  Description of Artificial Sequence: Synthetic peptide
  Seed: FNMLSTVLGV
FMMLSTVLGL

SEQ ID NO: 153227 - protein, 10 aa, Artificial Sequence
  Description of Artificial Sequence: Synthetic peptide
  Seed: FNMLSTVLGV
FMMLSTVLGM

SEQ ID NO: 153228 - protein, 10 aa, Artificial Sequence
  Description of Artificial Sequence: Synthetic peptide
  Seed: FNMLSTVLGV
FMMLSTVLGP

SEQ ID NO: 153229 - protein, 10 aa, Artificial Sequence
  Description of Artificial Sequence: Synthetic peptide
  Seed: FNMLSTVLGV
FMMLSTVLGS

SEQ ID NO: 153230 - protein, 10 aa, Artificial Sequence
  Description of Artificial Sequence: Synthetic peptide
  Seed: FNMLSTVLGV
FMMLSTVLGT

SEQ ID NO: 153231 - protein, 10 aa, Artificial Sequence
  Description of Artificial Sequence: Synthetic peptide
  Seed: FNMLSTVLGV
FMMLSTVLGV

SEQ ID NO: 153232 - protein, 11 aa, Artificial Sequence
  Description of Artificial Sequence: Synthetic peptide
  Seed: FNMLSTVLGVS
FMMLSTVLGVA

SEQ ID NO: 153233 - protein, 11 aa, Artificial Sequence
  Description of Artificial Sequence: Synthetic peptide
  Seed: FNMLSTVLGVS
FMMLSTVLGVC

SEQ ID NO: 153234 - protein, 11 aa, Artificial Sequence
  Description of Artificial Sequence: Synthetic peptide
  Seed: FNMLSTVLGVS
FMMLSTVLGVD

SEQ ID NO: 153235 - protein, 11 aa, Artificial Sequence
  Description of Artificial Sequence: Synthetic peptide
  Seed: FNMLSTVLGVS
FMMLSTVLGVE

SEQ ID NO: 153236 - protein, 11 aa, Artificial Sequence
  Description of Artificial Sequence: Synthetic peptide
  Seed: FNMLSTVLGVS
FMMLSTVLGVF

SEQ ID NO: 153237 - protein, 11 aa, Artificial Sequence
  Description of Artificial Sequence: Synthetic peptide
  Seed: FNMLSTVLGVS
FMMLSTVLGVG

SEQ ID NO: 153238 - protein, 11 aa, Artificial Sequence
  Description of Artificial Sequence: Synthetic peptide
  Seed: FNMLSTVLGVS
FMMLSTVLGVH

SEQ ID NO: 153239 - protein, 11 aa, Artificial Sequence
  Description of Artificial Sequence: Synthetic peptide
  Seed: FNMLSTVLGVS
FMMLSTVLGVI

SEQ ID NO: 153240 - protein, 11 aa, Artificial Sequence
  Description of Artificial Sequence: Synthetic peptide
  Seed: FNMLSTVLGVS
FMMLSTVLGVK

SEQ ID NO: 153241 - protein, 11 aa, Artificial Sequence
  Description of Artificial Sequence: Synthetic peptide
  Seed: FNMLSTVLGVS
FMMLSTVLGVL

SEQ ID NO: 153242 - protein, 11 aa, Artificial Sequence
  Description of Artificial Sequence: Synthetic peptide
  Seed: FNMLSTVLGVS
FMMLSTVLGVM

SEQ ID NO: 153243 - protein, 11 aa, Artificial Sequence
  Description of Artificial Sequence: Synthetic peptide
  Seed: FNMLSTVLGVS
FMMLSTVLGVN

SEQ ID NO: 153244 - protein, 11 aa, Artificial Sequence
  Description of Artificial Sequence: Synthetic peptide
  Seed: FNMLSTVLGVS
FMMLSTVLGVP

SEQ ID NO: 153245 - protein, 11 aa, Artificial Sequence
  Description of Artificial Sequence: Synthetic peptide
  Seed: FNMLSTVLGVS
FMMLSTVLGVQ

SEQ ID NO: 153246 - protein, 11 aa, Artificial Sequence
  Description of Artificial Sequence: Synthetic peptide
  Seed: FNMLSTVLGVS
FMMLSTVLGVR

SEQ ID NO: 153247 - protein, 11 aa, Artificial Sequence
  Description of Artificial Sequence: Synthetic peptide
  Seed: FNMLSTVLGVS
FMMLSTVLGVS

SEQ ID NO: 153248 - protein, 11 aa, Artificial Sequence
  Description of Artificial Sequence: Synthetic peptide
  Seed: FNMLSTVLGVS
FMMLSTVLGVT

SEQ ID NO: 153249 - protein, 11 aa, Artificial Sequence
  Description of Artificial Sequence: Synthetic peptide
  Seed: FNMLSTVLGVS
FMMLSTVLGVV

SEQ ID NO: 153250 - protein, 11 aa, Artificial Sequence
  Description of Artificial Sequence: Synthetic peptide
  Seed: FNMLSTVLGVS
FMMLSTVLGVW

SEQ ID NO: 153251 - protein, 11 aa, Artificial Sequence
  Description of Artificial Sequence: Synthetic peptide
  Seed: FNMLSTVLGVS
FMMLSTVLGVY

SEQ ID NO: 153252 - protein, 10 aa, Artificial Sequence
  Description of Artificial Sequence: Synthetic peptide
  Seed: FSNKMARLGK
FMNKMARLGK

SEQ ID NO: 153253 - protein, 10 aa, Artificial Sequence
  Description of Artificial Sequence: Synthetic peptide
  Seed: FSNKMARLGK
FMNKMARLGR

SEQ ID NO: 153254 - protein, 8 aa, Artificial Sequence
  Description of Artificial Sequence: Synthetic peptide
  Seed: FFPSSSYR
FMPSSSYR

SEQ ID NO: 153255 - protein, 9 aa, Artificial Sequence
  Description of Artificial Sequence: Synthetic peptide
  Seed: FFPSSSYRR
FMPSSSYRK

SEQ ID NO: 153256 - protein, 9 aa, Artificial Sequence
  Description of Artificial Sequence: Synthetic peptide
  Seed: FFPSSSYRR
FMPSSSYRR

SEQ ID NO: 153257 - protein, 11 aa, Artificial Sequence
  Description of Artificial Sequence: Synthetic peptide
  Seed: FFPSSSYRRPV
FMPSSSYRRPF

SEQ ID NO: 153258 - protein, 11 aa, Artificial Sequence
  Description of Artificial Sequence: Synthetic peptide
  Seed: FFPSSSYRRPV
FMPSSSYRRPL

SEQ ID NO: 153259 - protein, 11 aa, Artificial Sequence
  Description of Artificial Sequence: Synthetic peptide
  Seed: FFPSSSYRRPV
FMPSSSYRRPM

SEQ ID NO: 153260 - protein, 11 aa, Artificial Sequence
  Description of Artificial Sequence: Synthetic peptide
  Seed: FFPSSSYRRPV
FMPSSSYRRPY

SEQ ID NO: 153261 - protein, 8 aa, Artificial Sequence
  Description of Artificial Sequence: Synthetic peptide
  Seed: FTSFFYRY
FMSFFYRY

SEQ ID NO: 153262 - protein, 10 aa, Artificial Sequence
  Description of Artificial Sequence: Synthetic peptide
  Seed: FTSFFYRYGF
FMSFFYRYGA

SEQ ID NO: 153263 - protein, 10 aa, Artificial Sequence
  Description of Artificial Sequence: Synthetic peptide
  Seed: FTSFFYRYGF
FMSFFYRYGF

SEQ ID NO: 153264 - protein, 10 aa, Artificial Sequence
  Description of Artificial Sequence: Synthetic peptide
  Seed: FTSFFYRYGF
FMSFFYRYGI

SEQ ID NO: 153265 - protein, 10 aa, Artificial Sequence
  Description of Artificial Sequence: Synthetic peptide
  Seed: FTSFFYRYGF
FMSFFYRYGK

SEQ ID NO: 153266 - protein, 10 aa, Artificial Sequence
  Description of Artificial Sequence: Synthetic peptide
  Seed: FTSFFYRYGF
FMSFFYRYGL

SEQ ID NO: 153267 - protein, 10 aa, Artificial Sequence
  Description of Artificial Sequence: Synthetic peptide
  Seed: FTSFFYRYGF
FMSFFYRYGM

SEQ ID NO: 153268 - protein, 10 aa, Artificial Sequence
  Description of Artificial Sequence: Synthetic peptide
  Seed: FTSFFYRYGF
FMSFFYRYGR

SEQ ID NO: 153269 - protein, 10 aa, Artificial Sequence
  Description of Artificial Sequence: Synthetic peptide
  Seed: FTSFFYRYGF
FMSFFYRYGT

SEQ ID NO: 153270 - protein, 10 aa, Artificial Sequence
  Description of Artificial Sequence: Synthetic peptide
  Seed: FTSFFYRYGF
FMSFFYRYGV

SEQ ID NO: 153271 - protein, 10 aa, Artificial Sequence
  Description of Artificial Sequence: Synthetic peptide
  Seed: FTSFFYRYGF
FMSFFYRYGW

SEQ ID NO: 153272 - protein, 10 aa, Artificial Sequence
  Description of Artificial Sequence: Synthetic peptide
  Seed: FTSFFYRYGF
FMSFFYRYGY

SEQ ID NO: 153273 - protein, 10 aa, Artificial Sequence
  Description of Artificial Sequence: Synthetic peptide
  Seed: FPSSSYRRPV
FMSSSYRRPF

SEQ ID NO: 153274 - protein, 10 aa, Artificial Sequence
  Description of Artificial Sequence: Synthetic peptide
  Seed: FPSSSYRRPV
FMSSSYRRPI

SEQ ID NO: 153275 - protein, 10 aa, Artificial Sequence
  Description of Artificial Sequence: Synthetic peptide
  Seed: FPSSSYRRPV
FMSSSYRRPL

SEQ ID NO: 153276 - protein, 10 aa, Artificial Sequence
  Description of Artificial Sequence: Synthetic peptide
  Seed: FPSSSYRRPV
FMSSSYRRPM

SEQ ID NO: 153277 - protein, 10 aa, Artificial Sequence
  Description of Artificial Sequence: Synthetic peptide
  Seed: FPSSSYRRPV
FMSSSYRRPV

SEQ ID NO: 153278 - protein, 10 aa, Artificial Sequence
  Description of Artificial Sequence: Synthetic peptide
  Seed: FPSSSYRRPV
FMSSSYRRPY

SEQ ID NO: 153279 - protein, 9 aa, Artificial Sequence
  Description of Artificial Sequence: Synthetic peptide
  Seed: FPYTGDPPY
FMYTGDPPA

SEQ ID NO: 153280 - protein, 9 aa, Artificial Sequence
  Description of Artificial Sequence: Synthetic peptide
  Seed: FPYTGDPPY
FMYTGDPPC

SEQ ID NO: 153281 - protein, 9 aa, Artificial Sequence
  Description of Artificial Sequence: Synthetic peptide
  Seed: FPYTGDPPY
FMYTGDPPF

SEQ ID NO: 153282 - protein, 9 aa, Artificial Sequence
  Description of Artificial Sequence: Synthetic peptide
  Seed: FPYTGDPPY
FMYTGDPPG

SEQ ID NO: 153283 - protein, 9 aa, Artificial Sequence
  Description of Artificial Sequence: Synthetic peptide
  Seed: FPYTGDPPY
FMYTGDPPH

SEQ ID NO: 153284 - protein, 9 aa, Artificial Sequence
  Description of Artificial Sequence: Synthetic peptide
  Seed: FPYTGDPPY
FMYTGDPPI

SEQ ID NO: 153285 - protein, 9 aa, Artificial Sequence
  Description of Artificial Sequence: Synthetic peptide
  Seed: FPYTGDPPY
FMYTGDPPL

SEQ ID NO: 153286 - protein, 9 aa, Artificial Sequence
  Description of Artificial Sequence: Synthetic peptide
  Seed: FPYTGDPPY
FMYTGDPPM

SEQ ID NO: 153287 - protein, 9 aa, Artificial Sequence
  Description of Artificial Sequence: Synthetic peptide
  Seed: FPYTGDPPY
FMYTGDPPN

SEQ ID NO: 153288 - protein, 9 aa, Artificial Sequence
  Description of Artificial Sequence: Synthetic peptide
  Seed: FPYTGDPPY
FMYTGDPPP

SEQ ID NO: 153289 - protein, 9 aa, Artificial Sequence
  Description of Artificial Sequence: Synthetic peptide
  Seed: FPYTGDPPY
FMYTGDPPQ

SEQ ID NO: 153290 - protein, 9 aa, Artificial Sequence
  Description of Artificial Sequence: Synthetic peptide
  Seed: FPYTGDPPY
FMYTGDPPS

SEQ ID NO: 153291 - protein, 9 aa, Artificial Sequence
  Description of Artificial Sequence: Synthetic peptide
  Seed: FPYTGDPPY
FMYTGDPPT

SEQ ID NO: 153292 - protein, 9 aa, Artificial Sequence
  Description of Artificial Sequence: Synthetic peptide
  Seed: FPYTGDPPY
FMYTGDPPV

SEQ ID NO: 153293 - protein, 9 aa, Artificial Sequence
  Description of Artificial Sequence: Synthetic peptide
  Seed: FPYTGDPPY
FMYTGDPPW

SEQ ID NO: 153294 - protein, 10 aa, Artificial Sequence
  Description of Artificial Sequence: Synthetic peptide
  Seed: FPYTGDPPYS
FMYTGDPPYA

SEQ ID NO: 153295 - protein, 10 aa, Artificial Sequence
  Description of Artificial Sequence: Synthetic peptide
  Seed: FPYTGDPPYS
FMYTGDPPYC

SEQ ID NO: 153296 - protein, 10 aa, Artificial Sequence
  Description of Artificial Sequence: Synthetic peptide
  Seed: FPYTGDPPYS
FMYTGDPPYD

SEQ ID NO: 153297 - protein, 10 aa, Artificial Sequence
  Description of Artificial Sequence: Synthetic peptide
  Seed: FPYTGDPPYS
FMYTGDPPYE

SEQ ID NO: 153298 - protein, 10 aa, Artificial Sequence
  Description of Artificial Sequence: Synthetic peptide
  Seed: FPYTGDPPYS
FMYTGDPPYF

SEQ ID NO: 153299 - protein, 10 aa, Artificial Sequence
  Description of Artificial Sequence: Synthetic peptide
  Seed: FPYTGDPPYS
FMYTGDPPYG

SEQ ID NO: 153300 - protein, 10 aa, Artificial Sequence
  Description of Artificial Sequence: Synthetic peptide
  Seed: FPYTGDPPYS
FMYTGDPPYH

SEQ ID NO: 153301 - protein, 10 aa, Artificial Sequence
  Description of Artificial Sequence: Synthetic peptide
  Seed: FPYTGDPPYS
FMYTGDPPYI

SEQ ID NO: 153302 - protein, 10 aa, Artificial Sequence
  Description of Artificial Sequence: Synthetic peptide
  Seed: FPYTGDPPYS
FMYTGDPPYK

SEQ ID NO: 153303 - protein, 10 aa, Artificial Sequence
  Description of Artificial Sequence: Synthetic peptide
  Seed: FPYTGDPPYS
FMYTGDPPYL

SEQ ID NO: 153304 - protein, 10 aa, Artificial Sequence
  Description of Artificial Sequence: Synthetic peptide
  Seed: FPYTGDPPYS
FMYTGDPPYM

SEQ ID NO: 153305 - protein, 10 aa, Artificial Sequence
  Description of Artificial Sequence: Synthetic peptide
  Seed: FPYTGDPPYS
FMYTGDPPYN

SEQ ID NO: 153306 - protein, 10 aa, Artificial Sequence
  Description of Artificial Sequence: Synthetic peptide
  Seed: FPYTGDPPYS
FMYTGDPPYP

SEQ ID NO: 153307 - protein, 10 aa, Artificial Sequence
  Description of Artificial Sequence: Synthetic peptide
  Seed: FPYTGDPPYS
FMYTGDPPYQ

SEQ ID NO: 153308 - protein, 10 aa, Artificial Sequence
  Description of Artificial Sequence: Synthetic peptide
  Seed: FPYTGDPPYS
FMYTGDPPYR

SEQ ID NO: 153309 - protein, 10 aa, Artificial Sequence
  Description of Artificial Sequence: Synthetic peptide
  Seed: FPYTGDPPYS
FMYTGDPPYS

SEQ ID NO: 153310 - protein, 11 aa, Artificial Sequence
  Description of Artificial Sequence: Synthetic peptide
  Seed: FPYTGDPPYSH
FMYTGDPPYSF

SEQ ID NO: 153311 - protein, 11 aa, Artificial Sequence
  Description of Artificial Sequence: Synthetic peptide
  Seed: FPYTGDPPYSH
FMYTGDPPYSM

SEQ ID NO: 153312 - protein, 11 aa, Artificial Sequence
  Description of Artificial Sequence: Synthetic peptide
  Seed: FPYTGDPPYSH
FMYTGDPPYSY

SEQ ID NO: 153313 - protein, 10 aa, Artificial Sequence
  Description of Artificial Sequence: Synthetic peptide
  Seed: FPYTGDPPYS
FMYTGDPPYT

SEQ ID NO: 153314 - protein, 10 aa, Artificial Sequence
  Description of Artificial Sequence: Synthetic peptide
  Seed: FPYTGDPPYS
FMYTGDPPYV

SEQ ID NO: 153315 - protein, 10 aa, Artificial Sequence
  Description of Artificial Sequence: Synthetic peptide
  Seed: FPYTGDPPYS
FMYTGDPPYW

SEQ ID NO: 153316 - protein, 10 aa, Artificial Sequence
  Description of Artificial Sequence: Synthetic peptide
  Seed: FPYTGDPPYS
FMYTGDPPYY

SEQ ID NO: 153317 - protein, 10 aa, Artificial Sequence
  Description of Artificial Sequence: Synthetic peptide
  Seed: FSMELPSFGV
FNMELPSFGA

SEQ ID NO: 153318 - protein, 10 aa, Artificial Sequence
  Description of Artificial Sequence: Synthetic peptide
  Seed: FSMELPSFGV
FNMELPSFGI

SEQ ID NO: 153319 - protein, 10 aa, Artificial Sequence
  Description of Artificial Sequence: Synthetic peptide
  Seed: FSMELPSFGV
FNMELPSFGL

SEQ ID NO: 153320 - protein, 10 aa, Artificial Sequence
  Description of Artificial Sequence: Synthetic peptide
  Seed: FSMELPSFGV
FNMELPSFGM

SEQ ID NO: 153321 - protein, 10 aa, Artificial Sequence
  Description of Artificial Sequence: Synthetic peptide
  Seed: FSMELPSFGV
FNMELPSFGV

SEQ ID NO: 153322 - protein, 8 aa, Artificial Sequence
  Description of Artificial Sequence: Synthetic peptide
  Seed: FSMELPSF
FNMELPSY

SEQ ID NO: 153323 - protein, 10 aa, Artificial Sequence
  Description of Artificial Sequence: Synthetic peptide
  Seed: FNMLSTVLGV
FNMLSTVLGA

SEQ ID NO: 153324 - protein, 10 aa, Artificial Sequence
  Description of Artificial Sequence: Synthetic peptide
  Seed: FNMLSTVLGV
FNMLSTVLGC

SEQ ID NO: 153325 - protein, 10 aa, Artificial Sequence
  Description of Artificial Sequence: Synthetic peptide
  Seed: FNMLSTVLGV
FNMLSTVLGF

SEQ ID NO: 153326 - protein, 10 aa, Artificial Sequence
  Description of Artificial Sequence: Synthetic peptide
  Seed: FNMLSTVLGV
FNMLSTVLGI

SEQ ID NO: 153327 - protein, 10 aa, Artificial Sequence
  Description of Artificial Sequence: Synthetic peptide
  Seed: FNMLSTVLGV
FNMLSTVLGL

SEQ ID NO: 153328 - protein, 10 aa, Artificial Sequence
  Description of Artificial Sequence: Synthetic peptide
  Seed: FNMLSTVLGV
FNMLSTVLGM

SEQ ID NO: 153329 - protein, 10 aa, Artificial Sequence
  Description of Artificial Sequence: Synthetic peptide
  Seed: FNMLSTVLGV
FNMLSTVLGS

SEQ ID NO: 153330 - protein, 10 aa, Artificial Sequence
  Description of Artificial Sequence: Synthetic peptide
  Seed: FNMLSTVLGV
FNMLSTVLGT

SEQ ID NO: 153331 - protein, 11 aa, Artificial Sequence
  Description of Artificial Sequence: Synthetic peptide
  Seed: FNMLSTVLGVS
FNMLSTVLGVA

SEQ ID NO: 153332 - protein, 11 aa, Artificial Sequence
  Description of Artificial Sequence: Synthetic peptide
  Seed: FNMLSTVLGVS
FNMLSTVLGVC

SEQ ID NO: 153333 - protein, 11 aa, Artificial Sequence
  Description of Artificial Sequence: Synthetic peptide
  Seed: FNMLSTVLGVS
FNMLSTVLGVD

SEQ ID NO: 153334 - protein, 11 aa, Artificial Sequence
  Description of Artificial Sequence: Synthetic peptide
  Seed: FNMLSTVLGVS
FNMLSTVLGVE

SEQ ID NO: 153335 - protein, 11 aa, Artificial Sequence
  Description of Artificial Sequence: Synthetic peptide
  Seed: FNMLSTVLGVS
FNMLSTVLGVF

SEQ ID NO: 153336 - protein, 11 aa, Artificial Sequence
  Description of Artificial Sequence: Synthetic peptide
  Seed: FNMLSTVLGVS
FNMLSTVLGVG

SEQ ID NO: 153337 - protein, 11 aa, Artificial Sequence
  Description of Artificial Sequence: Synthetic peptide
  Seed: FNMLSTVLGVS
FNMLSTVLGVH

SEQ ID NO: 153338 - protein, 11 aa, Artificial Sequence
  Description of Artificial Sequence: Synthetic peptide
  Seed: FNMLSTVLGVS
FNMLSTVLGVI

SEQ ID NO: 153339 - protein, 11 aa, Artificial Sequence
  Description of Artificial Sequence: Synthetic peptide
  Seed: FNMLSTVLGVS
FNMLSTVLGVK

SEQ ID NO: 153340 - protein, 11 aa, Artificial Sequence
  Description of Artificial Sequence: Synthetic peptide
  Seed: FNMLSTVLGVS
FNMLSTVLGVL

SEQ ID NO: 153341 - protein, 11 aa, Artificial Sequence
  Description of Artificial Sequence: Synthetic peptide
  Seed: FNMLSTVLGVS
FNMLSTVLGVM

SEQ ID NO: 153342 - protein, 11 aa, Artificial Sequence
  Description of Artificial Sequence: Synthetic peptide
  Seed: FNMLSTVLGVS
FNMLSTVLGVN

SEQ ID NO: 153343 - protein, 11 aa, Artificial Sequence
  Description of Artificial Sequence: Synthetic peptide
  Seed: FNMLSTVLGVS
FNMLSTVLGVP

SEQ ID NO: 153344 - protein, 11 aa, Artificial Sequence
  Description of Artificial Sequence: Synthetic peptide
  Seed: FNMLSTVLGVS
FNMLSTVLGVQ

SEQ ID NO: 153345 - protein, 11 aa, Artificial Sequence
  Description of Artificial Sequence: Synthetic peptide
  Seed: FNMLSTVLGVS
FNMLSTVLGVR

SEQ ID NO: 153346 - protein, 11 aa, Artificial Sequence
  Description of Artificial Sequence: Synthetic peptide
  Seed: FNMLSTVLGVS
FNMLSTVLGVT

SEQ ID NO: 153347 - protein, 11 aa, Artificial Sequence
  Description of Artificial Sequence: Synthetic peptide
  Seed: FNMLSTVLGVS
FNMLSTVLGVV

SEQ ID NO: 153348 - protein, 11 aa, Artificial Sequence
  Description of Artificial Sequence: Synthetic peptide
  Seed: FNMLSTVLGVS
FNMLSTVLGVW

SEQ ID NO: 153349 - protein, 11 aa, Artificial Sequence
  Description of Artificial Sequence: Synthetic peptide
  Seed: FNMLSTVLGVS
FNMLSTVLGVY

SEQ ID NO: 153350 - protein, 10 aa, Artificial Sequence
  Description of Artificial Sequence: Synthetic peptide
  Seed: FSNKMARLGK
FNNKMARLGR

SEQ ID NO: 153351 - protein, 8 aa, Artificial Sequence
  Description of Artificial Sequence: Synthetic peptide
  Seed: FFPSSSYR
FNPSSSYR

SEQ ID NO: 153352 - protein, 9 aa, Artificial Sequence
  Description of Artificial Sequence: Synthetic peptide
  Seed: FFPSSSYRR
FNPSSSYRR

SEQ ID NO: 153353 - protein, 8 aa, Artificial Sequence
  Description of Artificial Sequence: Synthetic peptide
  Seed: FTSFFYRY
FNSFFYRY

SEQ ID NO: 153354 - protein, 10 aa, Artificial Sequence
  Description of Artificial Sequence: Synthetic peptide
  Seed: FTSFFYRYGF
FNSFFYRYGA

SEQ ID NO: 153355 - protein, 10 aa, Artificial Sequence
  Description of Artificial Sequence: Synthetic peptide
  Seed: FTSFFYRYGF
FNSFFYRYGF

SEQ ID NO: 153356 - protein, 10 aa, Artificial Sequence
  Description of Artificial Sequence: Synthetic peptide
  Seed: FTSFFYRYGF
FNSFFYRYGI

SEQ ID NO: 153357 - protein, 10 aa, Artificial Sequence
  Description of Artificial Sequence: Synthetic peptide
  Seed: FTSFFYRYGF
FNSFFYRYGL

SEQ ID NO: 153358 - protein, 10 aa, Artificial Sequence
  Description of Artificial Sequence: Synthetic peptide
  Seed: FTSFFYRYGF
FNSFFYRYGM

SEQ ID NO: 153359 - protein, 10 aa, Artificial Sequence
  Description of Artificial Sequence: Synthetic peptide
  Seed: FTSFFYRYGF
FNSFFYRYGR

SEQ ID NO: 153360 - protein, 10 aa, Artificial Sequence
  Description of Artificial Sequence: Synthetic peptide
  Seed: FTSFFYRYGF
FNSFFYRYGT

SEQ ID NO: 153361 - protein, 10 aa, Artificial Sequence
  Description of Artificial Sequence: Synthetic peptide
  Seed: FTSFFYRYGF
FNSFFYRYGV

SEQ ID NO: 153362 - protein, 10 aa, Artificial Sequence
  Description of Artificial Sequence: Synthetic peptide
  Seed: FTSFFYRYGF
FNSFFYRYGW

SEQ ID NO: 153363 - protein, 10 aa, Artificial Sequence
  Description of Artificial Sequence: Synthetic peptide
  Seed: FTSFFYRYGF
FNSFFYRYGY

SEQ ID NO: 153364 - protein, 10 aa, Artificial Sequence
  Description of Artificial Sequence: Synthetic peptide
  Seed: FPSSSYRRPV
FNSSSYRRPF

SEQ ID NO: 153365 - protein, 10 aa, Artificial Sequence
  Description of Artificial Sequence: Synthetic peptide
  Seed: FPSSSYRRPV
FNSSSYRRPI

SEQ ID NO: 153366 - protein, 10 aa, Artificial Sequence
  Description of Artificial Sequence: Synthetic peptide
  Seed: FPSSSYRRPV
FNSSSYRRPL

SEQ ID NO: 153367 - protein, 10 aa, Artificial Sequence
  Description of Artificial Sequence: Synthetic peptide
  Seed: FPSSSYRRPV
FNSSSYRRPM

SEQ ID NO: 153368 - protein, 10 aa, Artificial Sequence
  Description of Artificial Sequence: Synthetic peptide
  Seed: FPSSSYRRPV
FNSSSYRRPV

SEQ ID NO: 153369 - protein, 10 aa, Artificial Sequence
  Description of Artificial Sequence: Synthetic peptide
  Seed: FPSSSYRRPV
FNSSSYRRPY

SEQ ID NO: 153370 - protein, 9 aa, Artificial Sequence
  Description of Artificial Sequence: Synthetic peptide
  Seed: FPYTGDPPY
FNYTGDPPF

SEQ ID NO: 153371 - protein, 9 aa, Artificial Sequence
  Description of Artificial Sequence: Synthetic peptide
  Seed: FPYTGDPPY
FNYTGDPPH

SEQ ID NO: 153372 - protein, 9 aa, Artificial Sequence
  Description of Artificial Sequence: Synthetic peptide
  Seed: FPYTGDPPY
FNYTGDPPI

SEQ ID NO: 153373 - protein, 9 aa, Artificial Sequence
  Description of Artificial Sequence: Synthetic peptide
  Seed: FPYTGDPPY
FNYTGDPPL

SEQ ID NO: 153374 - protein, 9 aa, Artificial Sequence
  Description of Artificial Sequence: Synthetic peptide
  Seed: FPYTGDPPY
FNYTGDPPM

SEQ ID NO: 153375 - protein, 9 aa, Artificial Sequence
  Description of Artificial Sequence: Synthetic peptide
  Seed: FPYTGDPPY
FNYTGDPPW

SEQ ID NO: 153376 - protein, 9 aa, Artificial Sequence
  Description of Artificial Sequence: Synthetic peptide
  Seed: FPYTGDPPY
FNYTGDPPY

SEQ ID NO: 153377 - protein, 10 aa, Artificial Sequence
  Description of Artificial Sequence: Synthetic peptide
  Seed: FSMELPSFGV
FPMELPSFGA

SEQ ID NO: 153378 - protein, 10 aa, Artificial Sequence
  Description of Artificial Sequence: Synthetic peptide
  Seed: FSMELPSFGV
FPMELPSFGI

SEQ ID NO: 153379 - protein, 10 aa, Artificial Sequence
  Description of Artificial Sequence: Synthetic peptide
  Seed: FSMELPSFGV
FPMELPSFGL

SEQ ID NO: 153380 - protein, 10 aa, Artificial Sequence
  Description of Artificial Sequence: Synthetic peptide
  Seed: FSMELPSFGV
FPMELPSFGM

SEQ ID NO: 153381 - protein, 10 aa, Artificial Sequence
  Description of Artificial Sequence: Synthetic peptide
  Seed: FSMELPSFGV
FPMELPSFGV

SEQ ID NO: 153382 - protein, 10 aa, Artificial Sequence
  Description of Artificial Sequence: Synthetic peptide
  Seed: FNMLSTVLGV
FPMLSTVLGA

SEQ ID NO: 153383 - protein, 10 aa, Artificial Sequence
  Description of Artificial Sequence: Synthetic peptide
  Seed: FNMLSTVLGV
FPMLSTVLGC

SEQ ID NO: 153384 - protein, 10 aa, Artificial Sequence
  Description of Artificial Sequence: Synthetic peptide
  Seed: FNMLSTVLGV
FPMLSTVLGF

SEQ ID NO: 153385 - protein, 10 aa, Artificial Sequence
  Description of Artificial Sequence: Synthetic peptide
  Seed: FNMLSTVLGV
FPMLSTVLGI

SEQ ID NO: 153386 - protein, 10 aa, Artificial Sequence
  Description of Artificial Sequence: Synthetic peptide
  Seed: FNMLSTVLGV
FPMLSTVLGL

SEQ ID NO: 153387 - protein, 10 aa, Artificial Sequence
  Description of Artificial Sequence: Synthetic peptide
  Seed: FNMLSTVLGV
FPMLSTVLGM

SEQ ID NO: 153388 - protein, 10 aa, Artificial Sequence
  Description of Artificial Sequence: Synthetic peptide
  Seed: FNMLSTVLGV
FPMLSTVLGS

SEQ ID NO: 153389 - protein, 10 aa, Artificial Sequence
  Description of Artificial Sequence: Synthetic peptide
  Seed: FNMLSTVLGV
FPMLSTVLGT

SEQ ID NO: 153390 - protein, 10 aa, Artificial Sequence
  Description of Artificial Sequence: Synthetic peptide
  Seed: FNMLSTVLGV
FPMLSTVLGV

SEQ ID NO: 153391 - protein, 11 aa, Artificial Sequence
  Description of Artificial Sequence: Synthetic peptide
  Seed: FNMLSTVLGVS
FPMLSTVLGVA

SEQ ID NO: 153392 - protein, 11 aa, Artificial Sequence
  Description of Artificial Sequence: Synthetic peptide
  Seed: FNMLSTVLGVS
FPMLSTVLGVC

SEQ ID NO: 153393 - protein, 11 aa, Artificial Sequence
  Description of Artificial Sequence: Synthetic peptide
  Seed: FNMLSTVLGVS
FPMLSTVLGVD

SEQ ID NO: 153394 - protein, 11 aa, Artificial Sequence
  Description of Artificial Sequence: Synthetic peptide
  Seed: FNMLSTVLGVS
FPMLSTVLGVE

SEQ ID NO: 153395 - protein, 11 aa, Artificial Sequence
  Description of Artificial Sequence: Synthetic peptide
  Seed: FNMLSTVLGVS
FPMLSTVLGVF

SEQ ID NO: 153396 - protein, 11 aa, Artificial Sequence
  Description of Artificial Sequence: Synthetic peptide
  Seed: FNMLSTVLGVS
FPMLSTVLGVG

SEQ ID NO: 153397 - protein, 11 aa, Artificial Sequence
  Description of Artificial Sequence: Synthetic peptide
  Seed: FNMLSTVLGVS
FPMLSTVLGVH

SEQ ID NO: 153398 - protein, 11 aa, Artificial Sequence
  Description of Artificial Sequence: Synthetic peptide
  Seed: FNMLSTVLGVS
FPMLSTVLGVI

SEQ ID NO: 153399 - protein, 11 aa, Artificial Sequence
  Description of Artificial Sequence: Synthetic peptide
  Seed: FNMLSTVLGVS
FPMLSTVLGVK

SEQ ID NO: 153400 - protein, 11 aa, Artificial Sequence
  Description of Artificial Sequence: Synthetic peptide
  Seed: FNMLSTVLGVS
FPMLSTVLGVL

SEQ ID NO: 153401 - protein, 11 aa, Artificial Sequence
  Description of Artificial Sequence: Synthetic peptide
  Seed: FNMLSTVLGVS
FPMLSTVLGVM

SEQ ID NO: 153402 - protein, 11 aa, Artificial Sequence
  Description of Artificial Sequence: Synthetic peptide
  Seed: FNMLSTVLGVS
FPMLSTVLGVN

SEQ ID NO: 153403 - protein, 11 aa, Artificial Sequence
  Description of Artificial Sequence: Synthetic peptide
  Seed: FNMLSTVLGVS
FPMLSTVLGVP

SEQ ID NO: 153404 - protein, 11 aa, Artificial Sequence
  Description of Artificial Sequence: Synthetic peptide
  Seed: FNMLSTVLGVS
FPMLSTVLGVQ

SEQ ID NO: 153405 - protein, 11 aa, Artificial Sequence
  Description of Artificial Sequence: Synthetic peptide
  Seed: FNMLSTVLGVS
FPMLSTVLGVR

SEQ ID NO: 153406 - protein, 11 aa, Artificial Sequence
  Description of Artificial Sequence: Synthetic peptide
  Seed: FNMLSTVLGVS
FPMLSTVLGVS

SEQ ID NO: 153407 - protein, 11 aa, Artificial Sequence
  Description of Artificial Sequence: Synthetic peptide
  Seed: FNMLSTVLGVS
FPMLSTVLGVT

SEQ ID NO: 153408 - protein, 11 aa, Artificial Sequence
  Description of Artificial Sequence: Synthetic peptide
  Seed: FNMLSTVLGVS
FPMLSTVLGVV

SEQ ID NO: 153409 - protein, 11 aa, Artificial Sequence
  Description of Artificial Sequence: Synthetic peptide
  Seed: FNMLSTVLGVS
FPMLSTVLGVW

SEQ ID NO: 153410 - protein, 11 aa, Artificial Sequence
  Description of Artificial Sequence: Synthetic peptide
  Seed: FNMLSTVLGVS
FPMLSTVLGVY

SEQ ID NO: 153411 - protein, 9 aa, Artificial Sequence
  Description of Artificial Sequence: Synthetic peptide
  Seed: FFPSSSYRR
FPPSSSYRR

SEQ ID NO: 153412 - protein, 10 aa, Artificial Sequence
  Description of Artificial Sequence: Synthetic peptide
  Seed: FTSFFYRYGF
FPSFFYRYGA

SEQ ID NO: 153413 - protein, 10 aa, Artificial Sequence
  Description of Artificial Sequence: Synthetic peptide
  Seed: FTSFFYRYGF
FPSFFYRYGF

SEQ ID NO: 153414 - protein, 10 aa, Artificial Sequence
  Description of Artificial Sequence: Synthetic peptide
  Seed: FTSFFYRYGF
FPSFFYRYGI

SEQ ID NO: 153415 - protein, 10 aa, Artificial Sequence
  Description of Artificial Sequence: Synthetic peptide
  Seed: FTSFFYRYGF
FPSFFYRYGK

SEQ ID NO: 153416 - protein, 10 aa, Artificial Sequence
  Description of Artificial Sequence: Synthetic peptide
  Seed: FTSFFYRYGF
FPSFFYRYGL

SEQ ID NO: 153417 - protein, 10 aa, Artificial Sequence
  Description of Artificial Sequence: Synthetic peptide
  Seed: FTSFFYRYGF
FPSFFYRYGM

SEQ ID NO: 153418 - protein, 10 aa, Artificial Sequence
  Description of Artificial Sequence: Synthetic peptide
  Seed: FTSFFYRYGF
FPSFFYRYGR

SEQ ID NO: 153419 - protein, 10 aa, Artificial Sequence
  Description of Artificial Sequence: Synthetic peptide
  Seed: FTSFFYRYGF
FPSFFYRYGT

SEQ ID NO: 153420 - protein, 10 aa, Artificial Sequence
  Description of Artificial Sequence: Synthetic peptide
  Seed: FTSFFYRYGF
FPSFFYRYGV

SEQ ID NO: 153421 - protein, 10 aa, Artificial Sequence
  Description of Artificial Sequence: Synthetic peptide
  Seed: FTSFFYRYGF
FPSFFYRYGW

SEQ ID NO: 153422 - protein, 10 aa, Artificial Sequence
  Description of Artificial Sequence: Synthetic peptide
  Seed: FTSFFYRYGF
FPSFFYRYGY

SEQ ID NO: 153423 - protein, 9 aa, Artificial Sequence
  Description of Artificial Sequence: Synthetic peptide
  Seed: FPSSSYRRP
FPSSSYRRA

SEQ ID NO: 153424 - protein, 9 aa, Artificial Sequence
  Description of Artificial Sequence: Synthetic peptide
  Seed: FPSSSYRRP
FPSSSYRRC

SEQ ID NO: 153425 - protein, 9 aa, Artificial Sequence
  Description of Artificial Sequence: Synthetic peptide
  Seed: FPSSSYRRP
FPSSSYRRI

SEQ ID NO: 153426 - protein, 10 aa, Artificial Sequence
  Description of Artificial Sequence: Synthetic peptide
  Seed: FPSSSYRRPV
FPSSSYRRPC

SEQ ID NO: 153427 - protein, 10 aa, Artificial Sequence
  Description of Artificial Sequence: Synthetic peptide
  Seed: FPSSSYRRPV
FPSSSYRRPF

SEQ ID NO: 153428 - protein, 10 aa, Artificial Sequence
  Description of Artificial Sequence: Synthetic peptide
  Seed: FPSSSYRRPV
FPSSSYRRPG

SEQ ID NO: 153429 - protein, 10 aa, Artificial Sequence
  Description of Artificial Sequence: Synthetic peptide
  Seed: FPSSSYRRPV
FPSSSYRRPI

SEQ ID NO: 153430 - protein, 10 aa, Artificial Sequence
  Description of Artificial Sequence: Synthetic peptide
  Seed: FPSSSYRRPV
FPSSSYRRPL

SEQ ID NO: 153431 - protein, 10 aa, Artificial Sequence
  Description of Artificial Sequence: Synthetic peptide
  Seed: FPSSSYRRPV
FPSSSYRRPM

SEQ ID NO: 153432 - protein, 10 aa, Artificial Sequence
  Description of Artificial Sequence: Synthetic peptide
  Seed: FPSSSYRRPV
FPSSSYRRPP

SEQ ID NO: 153433 - protein, 10 aa, Artificial Sequence
  Description of Artificial Sequence: Synthetic peptide
  Seed: FPSSSYRRPV
FPSSSYRRPS

SEQ ID NO: 153434 - protein, 10 aa, Artificial Sequence
  Description of Artificial Sequence: Synthetic peptide
  Seed: FPSSSYRRPV
FPSSSYRRPT

SEQ ID NO: 153435 - protein, 10 aa, Artificial Sequence
  Description of Artificial Sequence: Synthetic peptide
  Seed: FPSSSYRRPV
FPSSSYRRPW

SEQ ID NO: 153436 - protein, 10 aa, Artificial Sequence
  Description of Artificial Sequence: Synthetic peptide
  Seed: FPSSSYRRPV
FPSSSYRRPY

SEQ ID NO: 153437 - protein, 9 aa, Artificial Sequence
  Description of Artificial Sequence: Synthetic peptide
  Seed: FPSSSYRRP
FPSSSYRRS

SEQ ID NO: 153438 - protein, 9 aa, Artificial Sequence
  Description of Artificial Sequence: Synthetic peptide
  Seed: FPSSSYRRP
FPSSSYRRT

SEQ ID NO: 153439 - protein, 9 aa, Artificial Sequence
  Description of Artificial Sequence: Synthetic peptide
  Seed: FPSSSYRRP
FPSSSYRRV

SEQ ID NO: 153440 - protein, 9 aa, Artificial Sequence
  Description of Artificial Sequence: Synthetic peptide
  Seed: FPYTGDPPY
FPYTGDPPA

SEQ ID NO: 153441 - protein, 9 aa, Artificial Sequence
  Description of Artificial Sequence: Synthetic peptide
  Seed: FPYTGDPPY
FPYTGDPPC

SEQ ID NO: 153442 - protein, 9 aa, Artificial Sequence
  Description of Artificial Sequence: Synthetic peptide
  Seed: FPYTGDPPY
FPYTGDPPD

SEQ ID NO: 153443 - protein, 9 aa, Artificial Sequence
  Description of Artificial Sequence: Synthetic peptide
  Seed: FPYTGDPPY
FPYTGDPPE

SEQ ID NO: 153444 - protein, 9 aa, Artificial Sequence
  Description of Artificial Sequence: Synthetic peptide
  Seed: FPYTGDPPY
FPYTGDPPF

SEQ ID NO: 153445 - protein, 9 aa, Artificial Sequence
  Description of Artificial Sequence: Synthetic peptide
  Seed: FPYTGDPPY
FPYTGDPPG

SEQ ID NO: 153446 - protein, 9 aa, Artificial Sequence
  Description of Artificial Sequence: Synthetic peptide
  Seed: FPYTGDPPY
FPYTGDPPH

SEQ ID NO: 153447 - protein, 9 aa, Artificial Sequence
  Description of Artificial Sequence: Synthetic peptide
  Seed: FPYTGDPPY
FPYTGDPPK

SEQ ID NO: 153448 - protein, 9 aa, Artificial Sequence
  Description of Artificial Sequence: Synthetic peptide
  Seed: FPYTGDPPY
FPYTGDPPL

SEQ ID NO: 153449 - protein, 9 aa, Artificial Sequence
  Description of Artificial Sequence: Synthetic peptide
  Seed: FPYTGDPPY
FPYTGDPPN

SEQ ID NO: 153450 - protein, 9 aa, Artificial Sequence
  Description of Artificial Sequence: Synthetic peptide
  Seed: FPYTGDPPY
FPYTGDPPP

SEQ ID NO: 153451 - protein, 9 aa, Artificial Sequence
  Description of Artificial Sequence: Synthetic peptide
  Seed: FPYTGDPPY
FPYTGDPPQ

SEQ ID NO: 153452 - protein, 9 aa, Artificial Sequence
  Description of Artificial Sequence: Synthetic peptide
  Seed: FPYTGDPPY
FPYTGDPPR

SEQ ID NO: 153453 - protein, 9 aa, Artificial Sequence
  Description of Artificial Sequence: Synthetic peptide
  Seed: FPYTGDPPY
FPYTGDPPS

SEQ ID NO: 153454 - protein, 9 aa, Artificial Sequence
  Description of Artificial Sequence: Synthetic peptide
  Seed: FPYTGDPPY
FPYTGDPPT

SEQ ID NO: 153455 - protein, 9 aa, Artificial Sequence
  Description of Artificial Sequence: Synthetic peptide
  Seed: FPYTGDPPY
FPYTGDPPV

SEQ ID NO: 153456 - protein, 9 aa, Artificial Sequence
  Description of Artificial Sequence: Synthetic peptide
  Seed: FPYTGDPPY
FPYTGDPPW

SEQ ID NO: 153457 - protein, 10 aa, Artificial Sequence
  Description of Artificial Sequence: Synthetic peptide
  Seed: FPYTGDPPYS
FPYTGDPPYA

SEQ ID NO: 153458 - protein, 10 aa, Artificial Sequence
  Description of Artificial Sequence: Synthetic peptide
  Seed: FPYTGDPPYS
FPYTGDPPYC

SEQ ID NO: 153459 - protein, 10 aa, Artificial Sequence
  Description of Artificial Sequence: Synthetic peptide
  Seed: FPYTGDPPYS
FPYTGDPPYD

SEQ ID NO: 153460 - protein, 10 aa, Artificial Sequence
  Description of Artificial Sequence: Synthetic peptide
  Seed: FPYTGDPPYS
FPYTGDPPYE

SEQ ID NO: 153461 - protein, 10 aa, Artificial Sequence
  Description of Artificial Sequence: Synthetic peptide
  Seed: FPYTGDPPYS
FPYTGDPPYF

SEQ ID NO: 153462 - protein, 10 aa, Artificial Sequence
  Description of Artificial Sequence: Synthetic peptide
  Seed: FPYTGDPPYS
FPYTGDPPYG

SEQ ID NO: 153463 - protein, 10 aa, Artificial Sequence
  Description of Artificial Sequence: Synthetic peptide
  Seed: FPYTGDPPYS
FPYTGDPPYH

SEQ ID NO: 153464 - protein, 10 aa, Artificial Sequence
  Description of Artificial Sequence: Synthetic peptide
  Seed: FPYTGDPPYS
FPYTGDPPYI

SEQ ID NO: 153465 - protein, 10 aa, Artificial Sequence
  Description of Artificial Sequence: Synthetic peptide
  Seed: FPYTGDPPYS
FPYTGDPPYK

SEQ ID NO: 153466 - protein, 10 aa, Artificial Sequence
  Description of Artificial Sequence: Synthetic peptide
  Seed: FPYTGDPPYS
FPYTGDPPYL

SEQ ID NO: 153467 - protein, 10 aa, Artificial Sequence
  Description of Artificial Sequence: Synthetic peptide
  Seed: FPYTGDPPYS
FPYTGDPPYM

SEQ ID NO: 153468 - protein, 10 aa, Artificial Sequence
  Description of Artificial Sequence: Synthetic peptide
  Seed: FPYTGDPPYS
FPYTGDPPYN

SEQ ID NO: 153469 - protein, 10 aa, Artificial Sequence
  Description of Artificial Sequence: Synthetic peptide
  Seed: FPYTGDPPYS
FPYTGDPPYP

SEQ ID NO: 153470 - protein, 10 aa, Artificial Sequence
  Description of Artificial Sequence: Synthetic peptide
  Seed: FPYTGDPPYS
FPYTGDPPYQ

SEQ ID NO: 153471 - protein, 10 aa, Artificial Sequence
  Description of Artificial Sequence: Synthetic peptide
  Seed: FPYTGDPPYS
FPYTGDPPYR

SEQ ID NO: 153472 - protein, 11 aa, Artificial Sequence
  Description of Artificial Sequence: Synthetic peptide
  Seed: FPYTGDPPYSH
FPYTGDPPYSA

SEQ ID NO: 153473 - protein, 11 aa, Artificial Sequence
  Description of Artificial Sequence: Synthetic peptide
  Seed: FPYTGDPPYSH
FPYTGDPPYSC

SEQ ID NO: 153474 - protein, 11 aa, Artificial Sequence
  Description of Artificial Sequence: Synthetic peptide
  Seed: FPYTGDPPYSH
FPYTGDPPYSD

SEQ ID NO: 153475 - protein, 11 aa, Artificial Sequence
  Description of Artificial Sequence: Synthetic peptide
  Seed: FPYTGDPPYSH
FPYTGDPPYSE

SEQ ID NO: 153476 - protein, 11 aa, Artificial Sequence
  Description of Artificial Sequence: Synthetic peptide
  Seed: FPYTGDPPYSH
FPYTGDPPYSF

SEQ ID NO: 153477 - protein, 11 aa, Artificial Sequence
  Description of Artificial Sequence: Synthetic peptide
  Seed: FPYTGDPPYSH
FPYTGDPPYSG

SEQ ID NO: 153478 - protein, 11 aa, Artificial Sequence
  Description of Artificial Sequence: Synthetic peptide
  Seed: FPYTGDPPYSH
FPYTGDPPYSI

SEQ ID NO: 153479 - protein, 11 aa, Artificial Sequence
  Description of Artificial Sequence: Synthetic peptide
  Seed: FPYTGDPPYSH
FPYTGDPPYSK

SEQ ID NO: 153480 - protein, 11 aa, Artificial Sequence
  Description of Artificial Sequence: Synthetic peptide
  Seed: FPYTGDPPYSH
FPYTGDPPYSL

SEQ ID NO: 153481 - protein, 11 aa, Artificial Sequence
  Description of Artificial Sequence: Synthetic peptide
  Seed: FPYTGDPPYSH
FPYTGDPPYSM

SEQ ID NO: 153482 - protein, 11 aa, Artificial Sequence
  Description of Artificial Sequence: Synthetic peptide
  Seed: FPYTGDPPYSH
FPYTGDPPYSN

SEQ ID NO: 153483 - protein, 11 aa, Artificial Sequence
  Description of Artificial Sequence: Synthetic peptide
  Seed: FPYTGDPPYSH
FPYTGDPPYSP

SEQ ID NO: 153484 - protein, 11 aa, Artificial Sequence
  Description of Artificial Sequence: Synthetic peptide
  Seed: FPYTGDPPYSH
FPYTGDPPYSQ

SEQ ID NO: 153485 - protein, 11 aa, Artificial Sequence
  Description of Artificial Sequence: Synthetic peptide
  Seed: FPYTGDPPYSH
FPYTGDPPYSR

SEQ ID NO: 153486 - protein, 11 aa, Artificial Sequence
  Description of Artificial Sequence: Synthetic peptide
  Seed: FPYTGDPPYSH
FPYTGDPPYSS

SEQ ID NO: 153487 - protein, 11 aa, Artificial Sequence
  Description of Artificial Sequence: Synthetic peptide
  Seed: FPYTGDPPYSH
FPYTGDPPYST

SEQ ID NO: 153488 - protein, 11 aa, Artificial Sequence
  Description of Artificial Sequence: Synthetic peptide
  Seed: FPYTGDPPYSH
FPYTGDPPYSV

SEQ ID NO: 153489 - protein, 11 aa, Artificial Sequence
  Description of Artificial Sequence: Synthetic peptide
  Seed: FPYTGDPPYSH
FPYTGDPPYSW

SEQ ID NO: 153490 - protein, 11 aa, Artificial Sequence
  Description of Artificial Sequence: Synthetic peptide
  Seed: FPYTGDPPYSH
FPYTGDPPYSY

SEQ ID NO: 153491 - protein, 10 aa, Artificial Sequence
  Description of Artificial Sequence: Synthetic peptide
  Seed: FPYTGDPPYS
FPYTGDPPYT

SEQ ID NO: 153492 - protein, 10 aa, Artificial Sequence
  Description of Artificial Sequence: Synthetic peptide
  Seed: FPYTGDPPYS
FPYTGDPPYV

SEQ ID NO: 153493 - protein, 10 aa, Artificial Sequence
  Description of Artificial Sequence: Synthetic peptide
  Seed: FPYTGDPPYS
FPYTGDPPYW

SEQ ID NO: 153494 - protein, 10 aa, Artificial Sequence
  Description of Artificial Sequence: Synthetic peptide
  Seed: FPYTGDPPYS
FPYTGDPPYY

SEQ ID NO: 153495 - protein, 8 aa, Artificial Sequence
  Description of Artificial Sequence: Synthetic peptide
  Seed: FSMELPSF
FQMELPSA

SEQ ID NO: 153496 - protein, 8 aa, Artificial Sequence
  Description of Artificial Sequence: Synthetic peptide
  Seed: FSMELPSF
FQMELPSF

SEQ ID NO: 153497 - protein, 10 aa, Artificial Sequence
  Description of Artificial Sequence: Synthetic peptide
  Seed: FSMELPSFGV
FQMELPSFGA

SEQ ID NO: 153498 - protein, 10 aa, Artificial Sequence
  Description of Artificial Sequence: Synthetic peptide
  Seed: FSMELPSFGV
FQMELPSFGC

SEQ ID NO: 153499 - protein, 10 aa, Artificial Sequence
  Description of Artificial Sequence: Synthetic peptide
  Seed: FSMELPSFGV
FQMELPSFGE

SEQ ID NO: 153500 - protein, 10 aa, Artificial Sequence
  Description of Artificial Sequence: Synthetic peptide
  Seed: FSMELPSFGV
FQMELPSFGF

SEQ ID NO: 153501 - protein, 10 aa, Artificial Sequence
  Description of Artificial Sequence: Synthetic peptide
  Seed: FSMELPSFGV
FQMELPSFGG

SEQ ID NO: 153502 - protein, 10 aa, Artificial Sequence
  Description of Artificial Sequence: Synthetic peptide
  Seed: FSMELPSFGV
FQMELPSFGI

SEQ ID NO: 153503 - protein, 10 aa, Artificial Sequence
  Description of Artificial Sequence: Synthetic peptide
  Seed: FSMELPSFGV
FQMELPSFGL

SEQ ID NO: 153504 - protein, 10 aa, Artificial Sequence
  Description of Artificial Sequence: Synthetic peptide
  Seed: FSMELPSFGV
FQMELPSFGM

SEQ ID NO: 153505 - protein, 10 aa, Artificial Sequence
  Description of Artificial Sequence: Synthetic peptide
  Seed: FSMELPSFGV
FQMELPSFGP

SEQ ID NO: 153506 - protein, 10 aa, Artificial Sequence
  Description of Artificial Sequence: Synthetic peptide
  Seed: FSMELPSFGV
FQMELPSFGS

SEQ ID NO: 153507 - protein, 10 aa, Artificial Sequence
  Description of Artificial Sequence: Synthetic peptide
  Seed: FSMELPSFGV
FQMELPSFGT

SEQ ID NO: 153508 - protein, 10 aa, Artificial Sequence
  Description of Artificial Sequence: Synthetic peptide
  Seed: FSMELPSFGV
FQMELPSFGV

SEQ ID NO: 153509 - protein, 11 aa, Artificial Sequence
  Description of Artificial Sequence: Synthetic peptide
  Seed: FSMELPSFGVS
FQMELPSFGVA

SEQ ID NO: 153510 - protein, 11 aa, Artificial Sequence
  Description of Artificial Sequence: Synthetic peptide
  Seed: FSMELPSFGVS
FQMELPSFGVC

SEQ ID NO: 153511 - protein, 11 aa, Artificial Sequence
  Description of Artificial Sequence: Synthetic peptide
  Seed: FSMELPSFGVS
FQMELPSFGVD

SEQ ID NO: 153512 - protein, 11 aa, Artificial Sequence
  Description of Artificial Sequence: Synthetic peptide
  Seed: FSMELPSFGVS
FQMELPSFGVE

SEQ ID NO: 153513 - protein, 11 aa, Artificial Sequence
  Description of Artificial Sequence: Synthetic peptide
  Seed: FSMELPSFGVS
FQMELPSFGVF

SEQ ID NO: 153514 - protein, 11 aa, Artificial Sequence
  Description of Artificial Sequence: Synthetic peptide
  Seed: FSMELPSFGVS
FQMELPSFGVG

SEQ ID NO: 153515 - protein, 11 aa, Artificial Sequence
  Description of Artificial Sequence: Synthetic peptide
  Seed: FSMELPSFGVS
FQMELPSFGVH

SEQ ID NO: 153516 - protein, 11 aa, Artificial Sequence
  Description of Artificial Sequence: Synthetic peptide
  Seed: FSMELPSFGVS
FQMELPSFGVI

SEQ ID NO: 153517 - protein, 11 aa, Artificial Sequence
  Description of Artificial Sequence: Synthetic peptide
  Seed: FSMELPSFGVS
FQMELPSFGVK

SEQ ID NO: 153518 - protein, 11 aa, Artificial Sequence
  Description of Artificial Sequence: Synthetic peptide
  Seed: FSMELPSFGVS
FQMELPSFGVL

SEQ ID NO: 153519 - protein, 11 aa, Artificial Sequence
  Description of Artificial Sequence: Synthetic peptide
  Seed: FSMELPSFGVS
FQMELPSFGVM

SEQ ID NO: 153520 - protein, 11 aa, Artificial Sequence
  Description of Artificial Sequence: Synthetic peptide
  Seed: FSMELPSFGVS
FQMELPSFGVN

SEQ ID NO: 153521 - protein, 11 aa, Artificial Sequence
  Description of Artificial Sequence: Synthetic peptide
  Seed: FSMELPSFGVS
FQMELPSFGVP

SEQ ID NO: 153522 - protein, 11 aa, Artificial Sequence
  Description of Artificial Sequence: Synthetic peptide
  Seed: FSMELPSFGVS
FQMELPSFGVQ

SEQ ID NO: 153523 - protein, 11 aa, Artificial Sequence
  Description of Artificial Sequence: Synthetic peptide
  Seed: FSMELPSFGVS
FQMELPSFGVR

SEQ ID NO: 153524 - protein, 11 aa, Artificial Sequence
  Description of Artificial Sequence: Synthetic peptide
  Seed: FSMELPSFGVS
FQMELPSFGVS

SEQ ID NO: 153525 - protein, 11 aa, Artificial Sequence
  Description of Artificial Sequence: Synthetic peptide
  Seed: FSMELPSFGVS
FQMELPSFGVT

SEQ ID NO: 153526 - protein, 11 aa, Artificial Sequence
  Description of Artificial Sequence: Synthetic peptide
  Seed: FSMELPSFGVS
FQMELPSFGVV

SEQ ID NO: 153527 - protein, 11 aa, Artificial Sequence
  Description of Artificial Sequence: Synthetic peptide
  Seed: FSMELPSFGVS
FQMELPSFGVW

SEQ ID NO: 153528 - protein, 11 aa, Artificial Sequence
  Description of Artificial Sequence: Synthetic peptide
  Seed: FSMELPSFGVS
FQMELPSFGVY

SEQ ID NO: 153529 - protein, 10 aa, Artificial Sequence
  Description of Artificial Sequence: Synthetic peptide
  Seed: FSMELPSFGV
FQMELPSFGW

SEQ ID NO: 153530 - protein, 10 aa, Artificial Sequence
  Description of Artificial Sequence: Synthetic peptide
  Seed: FSMELPSFGV
FQMELPSFGY

SEQ ID NO: 153531 - protein, 8 aa, Artificial Sequence
  Description of Artificial Sequence: Synthetic peptide
  Seed: FSMELPSF
FQMELPSH

SEQ ID NO: 153532 - protein, 8 aa, Artificial Sequence
  Description of Artificial Sequence: Synthetic peptide
  Seed: FSMELPSF
FQMELPSI

SEQ ID NO: 153533 - protein, 8 aa, Artificial Sequence
  Description of Artificial Sequence: Synthetic peptide
  Seed: FSMELPSF
FQMELPSL

SEQ ID NO: 153534 - protein, 8 aa, Artificial Sequence
  Description of Artificial Sequence: Synthetic peptide
  Seed: FSMELPSF
FQMELPSM

SEQ ID NO: 153535 - protein, 8 aa, Artificial Sequence
  Description of Artificial Sequence: Synthetic peptide
  Seed: FSMELPSF
FQMELPSV

SEQ ID NO: 153536 - protein, 8 aa, Artificial Sequence
  Description of Artificial Sequence: Synthetic peptide
  Seed: FSMELPSF
FQMELPSW

SEQ ID NO: 153537 - protein, 8 aa, Artificial Sequence
  Description of Artificial Sequence: Synthetic peptide
  Seed: FSMELPSF
FQMELPSY

SEQ ID NO: 153538 - protein, 10 aa, Artificial Sequence
  Description of Artificial Sequence: Synthetic peptide
  Seed: FNMLSTVLGV
FQMLSTVLGA

SEQ ID NO: 153539 - protein, 10 aa, Artificial Sequence
  Description of Artificial Sequence: Synthetic peptide
  Seed: FNMLSTVLGV
FQMLSTVLGC

SEQ ID NO: 153540 - protein, 10 aa, Artificial Sequence
  Description of Artificial Sequence: Synthetic peptide
  Seed: FNMLSTVLGV
FQMLSTVLGF

SEQ ID NO: 153541 - protein, 10 aa, Artificial Sequence
  Description of Artificial Sequence: Synthetic peptide
  Seed: FNMLSTVLGV
FQMLSTVLGG

SEQ ID NO: 153542 - protein, 10 aa, Artificial Sequence
  Description of Artificial Sequence: Synthetic peptide
  Seed: FNMLSTVLGV
FQMLSTVLGI

SEQ ID NO: 153543 - protein, 10 aa, Artificial Sequence
  Description of Artificial Sequence: Synthetic peptide
  Seed: FNMLSTVLGV
FQMLSTVLGL

SEQ ID NO: 153544 - protein, 10 aa, Artificial Sequence
  Description of Artificial Sequence: Synthetic peptide
  Seed: FNMLSTVLGV
FQMLSTVLGM

SEQ ID NO: 153545 - protein, 10 aa, Artificial Sequence
  Description of Artificial Sequence: Synthetic peptide
  Seed: FNMLSTVLGV
FQMLSTVLGP

SEQ ID NO: 153546 - protein, 10 aa, Artificial Sequence
  Description of Artificial Sequence: Synthetic peptide
  Seed: FNMLSTVLGV
FQMLSTVLGS

SEQ ID NO: 153547 - protein, 10 aa, Artificial Sequence
  Description of Artificial Sequence: Synthetic peptide
  Seed: FNMLSTVLGV
FQMLSTVLGT

SEQ ID NO: 153548 - protein, 10 aa, Artificial Sequence
  Description of Artificial Sequence: Synthetic peptide
  Seed: FNMLSTVLGV
FQMLSTVLGV

SEQ ID NO: 153549 - protein, 11 aa, Artificial Sequence
  Description of Artificial Sequence: Synthetic peptide
  Seed: FNMLSTVLGVS
FQMLSTVLGVA

SEQ ID NO: 153550 - protein, 11 aa, Artificial Sequence
  Description of Artificial Sequence: Synthetic peptide
  Seed: FNMLSTVLGVS
FQMLSTVLGVC

SEQ ID NO: 153551 - protein, 11 aa, Artificial Sequence
  Description of Artificial Sequence: Synthetic peptide
  Seed: FNMLSTVLGVS
FQMLSTVLGVD

SEQ ID NO: 153552 - protein, 11 aa, Artificial Sequence
  Description of Artificial Sequence: Synthetic peptide
  Seed: FNMLSTVLGVS
FQMLSTVLGVE

SEQ ID NO: 153553 - protein, 11 aa, Artificial Sequence
  Description of Artificial Sequence: Synthetic peptide
  Seed: FNMLSTVLGVS
FQMLSTVLGVF

SEQ ID NO: 153554 - protein, 11 aa, Artificial Sequence
  Description of Artificial Sequence: Synthetic peptide
  Seed: FNMLSTVLGVS
FQMLSTVLGVG

SEQ ID NO: 153555 - protein, 11 aa, Artificial Sequence
  Description of Artificial Sequence: Synthetic peptide
  Seed: FNMLSTVLGVS
FQMLSTVLGVH

SEQ ID NO: 153556 - protein, 11 aa, Artificial Sequence
  Description of Artificial Sequence: Synthetic peptide
  Seed: FNMLSTVLGVS
FQMLSTVLGVI

SEQ ID NO: 153557 - protein, 11 aa, Artificial Sequence
  Description of Artificial Sequence: Synthetic peptide
  Seed: FNMLSTVLGVS
FQMLSTVLGVK

SEQ ID NO: 153558 - protein, 11 aa, Artificial Sequence
  Description of Artificial Sequence: Synthetic peptide
  Seed: FNMLSTVLGVS
FQMLSTVLGVL

SEQ ID NO: 153559 - protein, 11 aa, Artificial Sequence
  Description of Artificial Sequence: Synthetic peptide
  Seed: FNMLSTVLGVS
FQMLSTVLGVM

SEQ ID NO: 153560 - protein, 11 aa, Artificial Sequence
  Description of Artificial Sequence: Synthetic peptide
  Seed: FNMLSTVLGVS
FQMLSTVLGVN

SEQ ID NO: 153561 - protein, 11 aa, Artificial Sequence
  Description of Artificial Sequence: Synthetic peptide
  Seed: FNMLSTVLGVS
FQMLSTVLGVP

SEQ ID NO: 153562 - protein, 11 aa, Artificial Sequence
  Description of Artificial Sequence: Synthetic peptide
  Seed: FNMLSTVLGVS
FQMLSTVLGVQ

SEQ ID NO: 153563 - protein, 11 aa, Artificial Sequence
  Description of Artificial Sequence: Synthetic peptide
  Seed: FNMLSTVLGVS
FQMLSTVLGVR

SEQ ID NO: 153564 - protein, 11 aa, Artificial Sequence
  Description of Artificial Sequence: Synthetic peptide
  Seed: FNMLSTVLGVS
FQMLSTVLGVS

SEQ ID NO: 153565 - protein, 11 aa, Artificial Sequence
  Description of Artificial Sequence: Synthetic peptide
  Seed: FNMLSTVLGVS
FQMLSTVLGVT

SEQ ID NO: 153566 - protein, 11 aa, Artificial Sequence
  Description of Artificial Sequence: Synthetic peptide
  Seed: FNMLSTVLGVS
FQMLSTVLGVV

SEQ ID NO: 153567 - protein, 11 aa, Artificial Sequence
  Description of Artificial Sequence: Synthetic peptide
  Seed: FNMLSTVLGVS
FQMLSTVLGVW

SEQ ID NO: 153568 - protein, 11 aa, Artificial Sequence
  Description of Artificial Sequence: Synthetic peptide
  Seed: FNMLSTVLGVS
FQMLSTVLGVY

SEQ ID NO: 153569 - protein, 10 aa, Artificial Sequence
  Description of Artificial Sequence: Synthetic peptide
  Seed: FSNKMARLGK
FQNKMARLGR

SEQ ID NO: 153570 - protein, 9 aa, Artificial Sequence
  Description of Artificial Sequence: Synthetic peptide
  Seed: FFPSSSYRR
FQPSSSYRR

SEQ ID NO: 153571 - protein, 8 aa, Artificial Sequence
  Description of Artificial Sequence: Synthetic peptide
  Seed: FTSFFYRY
FQSFFYRY

SEQ ID NO: 153572 - protein, 10 aa, Artificial Sequence
  Description of Artificial Sequence: Synthetic peptide
  Seed: FTSFFYRYGF
FQSFFYRYGA

SEQ ID NO: 153573 - protein, 10 aa, Artificial Sequence
  Description of Artificial Sequence: Synthetic peptide
  Seed: FTSFFYRYGF
FQSFFYRYGF

SEQ ID NO: 153574 - protein, 10 aa, Artificial Sequence
  Description of Artificial Sequence: Synthetic peptide
  Seed: FTSFFYRYGF
FQSFFYRYGI

SEQ ID NO: 153575 - protein, 10 aa, Artificial Sequence
  Description of Artificial Sequence: Synthetic peptide
  Seed: FTSFFYRYGF
FQSFFYRYGL

SEQ ID NO: 153576 - protein, 10 aa, Artificial Sequence
  Description of Artificial Sequence: Synthetic peptide
  Seed: FTSFFYRYGF
FQSFFYRYGM

SEQ ID NO: 153577 - protein, 10 aa, Artificial Sequence
  Description of Artificial Sequence: Synthetic peptide
  Seed: FTSFFYRYGF
FQSFFYRYGR

SEQ ID NO: 153578 - protein, 10 aa, Artificial Sequence
  Description of Artificial Sequence: Synthetic peptide
  Seed: FTSFFYRYGF
FQSFFYRYGT

SEQ ID NO: 153579 - protein, 10 aa, Artificial Sequence
  Description of Artificial Sequence: Synthetic peptide
  Seed: FTSFFYRYGF
FQSFFYRYGV

SEQ ID NO: 153580 - protein, 10 aa, Artificial Sequence
  Description of Artificial Sequence: Synthetic peptide
  Seed: FTSFFYRYGF
FQSFFYRYGW

SEQ ID NO: 153581 - protein, 10 aa, Artificial Sequence
  Description of Artificial Sequence: Synthetic peptide
  Seed: FTSFFYRYGF
FQSFFYRYGY

SEQ ID NO: 153582 - protein, 10 aa, Artificial Sequence
  Description of Artificial Sequence: Synthetic peptide
  Seed: FPSSSYRRPV
FQSSSYRRPF

SEQ ID NO: 153583 - protein, 10 aa, Artificial Sequence
  Description of Artificial Sequence: Synthetic peptide
  Seed: FPSSSYRRPV
FQSSSYRRPI

SEQ ID NO: 153584 - protein, 10 aa, Artificial Sequence
  Description of Artificial Sequence: Synthetic peptide
  Seed: FPSSSYRRPV
FQSSSYRRPL

SEQ ID NO: 153585 - protein, 10 aa, Artificial Sequence
  Description of Artificial Sequence: Synthetic peptide
  Seed: FPSSSYRRPV
FQSSSYRRPM

SEQ ID NO: 153586 - protein, 10 aa, Artificial Sequence
  Description of Artificial Sequence: Synthetic peptide
  Seed: FPSSSYRRPV
FQSSSYRRPV

SEQ ID NO: 153587 - protein, 10 aa, Artificial Sequence
  Description of Artificial Sequence: Synthetic peptide
  Seed: FPSSSYRRPV
FQSSSYRRPY

SEQ ID NO: 153588 - protein, 9 aa, Artificial Sequence
  Description of Artificial Sequence: Synthetic peptide
  Seed: FPYTGDPPY
FQYTGDPPA

SEQ ID NO: 153589 - protein, 9 aa, Artificial Sequence
  Description of Artificial Sequence: Synthetic peptide
  Seed: FPYTGDPPY
FQYTGDPPC

SEQ ID NO: 153590 - protein, 9 aa, Artificial Sequence
  Description of Artificial Sequence: Synthetic peptide
  Seed: FPYTGDPPY
FQYTGDPPE

SEQ ID NO: 153591 - protein, 9 aa, Artificial Sequence
  Description of Artificial Sequence: Synthetic peptide
  Seed: FPYTGDPPY
FQYTGDPPF

SEQ ID NO: 153592 - protein, 9 aa, Artificial Sequence
  Description of Artificial Sequence: Synthetic peptide
  Seed: FPYTGDPPY
FQYTGDPPG

SEQ ID NO: 153593 - protein, 9 aa, Artificial Sequence
  Description of Artificial Sequence: Synthetic peptide
  Seed: FPYTGDPPY
FQYTGDPPH

SEQ ID NO: 153594 - protein, 9 aa, Artificial Sequence
  Description of Artificial Sequence: Synthetic peptide
  Seed: FPYTGDPPY
FQYTGDPPI

SEQ ID NO: 153595 - protein, 9 aa, Artificial Sequence
  Description of Artificial Sequence: Synthetic peptide
  Seed: FPYTGDPPY
FQYTGDPPK

SEQ ID NO: 153596 - protein, 9 aa, Artificial Sequence
  Description of Artificial Sequence: Synthetic peptide
  Seed: FPYTGDPPY
FQYTGDPPL

SEQ ID NO: 153597 - protein, 9 aa, Artificial Sequence
  Description of Artificial Sequence: Synthetic peptide
  Seed: FPYTGDPPY
FQYTGDPPM

SEQ ID NO: 153598 - protein, 9 aa, Artificial Sequence
  Description of Artificial Sequence: Synthetic peptide
  Seed: FPYTGDPPY
FQYTGDPPN

SEQ ID NO: 153599 - protein, 9 aa, Artificial Sequence
  Description of Artificial Sequence: Synthetic peptide
  Seed: FPYTGDPPY
FQYTGDPPP

SEQ ID NO: 153600 - protein, 9 aa, Artificial Sequence
  Description of Artificial Sequence: Synthetic peptide
  Seed: FPYTGDPPY
FQYTGDPPQ

SEQ ID NO: 153601 - protein, 9 aa, Artificial Sequence
  Description of Artificial Sequence: Synthetic peptide
  Seed: FPYTGDPPY
FQYTGDPPS

SEQ ID NO: 153602 - protein, 9 aa, Artificial Sequence
  Description of Artificial Sequence: Synthetic peptide
  Seed: FPYTGDPPY
FQYTGDPPT

SEQ ID NO: 153603 - protein, 9 aa, Artificial Sequence
  Description of Artificial Sequence: Synthetic peptide
  Seed: FPYTGDPPY
FQYTGDPPV

SEQ ID NO: 153604 - protein, 9 aa, Artificial Sequence
  Description of Artificial Sequence: Synthetic peptide
  Seed: FPYTGDPPY
FQYTGDPPW

SEQ ID NO: 153605 - protein, 9 aa, Artificial Sequence
  Description of Artificial Sequence: Synthetic peptide
  Seed: FPYTGDPPY
FQYTGDPPY

SEQ ID NO: 153606 - protein, 10 aa, Artificial Sequence
  Description of Artificial Sequence: Synthetic peptide
  Seed: FPYTGDPPYS
FQYTGDPPYF

SEQ ID NO: 153607 - protein, 11 aa, Artificial Sequence
  Description of Artificial Sequence: Synthetic peptide
  Seed: FPYTGDPPYSH
FQYTGDPPYSY

SEQ ID NO: 153608 - protein, 10 aa, Artificial Sequence
  Description of Artificial Sequence: Synthetic peptide
  Seed: FPYTGDPPYS
FQYTGDPPYY

SEQ ID NO: 153609 - protein, 8 aa, Artificial Sequence
  Description of Artificial Sequence: Synthetic peptide
  Seed: FSMELPSF
FRMELPSF

SEQ ID NO: 153610 - protein, 10 aa, Artificial Sequence
  Description of Artificial Sequence: Synthetic peptide
  Seed: FSMELPSFGV
FRMELPSFGA

SEQ ID NO: 153611 - protein, 10 aa, Artificial Sequence
  Description of Artificial Sequence: Synthetic peptide
  Seed: FSMELPSFGV
FRMELPSFGI

SEQ ID NO: 153612 - protein, 10 aa, Artificial Sequence
  Description of Artificial Sequence: Synthetic peptide
  Seed: FSMELPSFGV
FRMELPSFGL

SEQ ID NO: 153613 - protein, 10 aa, Artificial Sequence
  Description of Artificial Sequence: Synthetic peptide
  Seed: FSMELPSFGV
FRMELPSFGM

SEQ ID NO: 153614 - protein, 10 aa, Artificial Sequence
  Description of Artificial Sequence: Synthetic peptide
  Seed: FSMELPSFGV
FRMELPSFGV

SEQ ID NO: 153615 - protein, 8 aa, Artificial Sequence
  Description of Artificial Sequence: Synthetic peptide
  Seed: FSMELPSF
FRMELPSY

SEQ ID NO: 153616 - protein, 10 aa, Artificial Sequence
  Description of Artificial Sequence: Synthetic peptide
  Seed: FNMLSTVLGV
FRMLSTVLGA

SEQ ID NO: 153617 - protein, 10 aa, Artificial Sequence
  Description of Artificial Sequence: Synthetic peptide
  Seed: FNMLSTVLGV
FRMLSTVLGC

SEQ ID NO: 153618 - protein, 10 aa, Artificial Sequence
  Description of Artificial Sequence: Synthetic peptide
  Seed: FNMLSTVLGV
FRMLSTVLGF

SEQ ID NO: 153619 - protein, 10 aa, Artificial Sequence
  Description of Artificial Sequence: Synthetic peptide
  Seed: FNMLSTVLGV
FRMLSTVLGI

SEQ ID NO: 153620 - protein, 10 aa, Artificial Sequence
  Description of Artificial Sequence: Synthetic peptide
  Seed: FNMLSTVLGV
FRMLSTVLGL

SEQ ID NO: 153621 - protein, 10 aa, Artificial Sequence
  Description of Artificial Sequence: Synthetic peptide
  Seed: FNMLSTVLGV
FRMLSTVLGM

SEQ ID NO: 153622 - protein, 10 aa, Artificial Sequence
  Description of Artificial Sequence: Synthetic peptide
  Seed: FNMLSTVLGV
FRMLSTVLGS

SEQ ID NO: 153623 - protein, 10 aa, Artificial Sequence
  Description of Artificial Sequence: Synthetic peptide
  Seed: FNMLSTVLGV
FRMLSTVLGT

SEQ ID NO: 153624 - protein, 10 aa, Artificial Sequence
  Description of Artificial Sequence: Synthetic peptide
  Seed: FNMLSTVLGV
FRMLSTVLGV

SEQ ID NO: 153625 - protein, 11 aa, Artificial Sequence
  Description of Artificial Sequence: Synthetic peptide
  Seed: FNMLSTVLGVS
FRMLSTVLGVA

SEQ ID NO: 153626 - protein, 11 aa, Artificial Sequence
  Description of Artificial Sequence: Synthetic peptide
  Seed: FNMLSTVLGVS
FRMLSTVLGVC

SEQ ID NO: 153627 - protein, 11 aa, Artificial Sequence
  Description of Artificial Sequence: Synthetic peptide
  Seed: FNMLSTVLGVS
FRMLSTVLGVD

SEQ ID NO: 153628 - protein, 11 aa, Artificial Sequence
  Description of Artificial Sequence: Synthetic peptide
  Seed: FNMLSTVLGVS
FRMLSTVLGVE

SEQ ID NO: 153629 - protein, 11 aa, Artificial Sequence
  Description of Artificial Sequence: Synthetic peptide
  Seed: FNMLSTVLGVS
FRMLSTVLGVF

SEQ ID NO: 153630 - protein, 11 aa, Artificial Sequence
  Description of Artificial Sequence: Synthetic peptide
  Seed: FNMLSTVLGVS
FRMLSTVLGVG

SEQ ID NO: 153631 - protein, 11 aa, Artificial Sequence
  Description of Artificial Sequence: Synthetic peptide
  Seed: FNMLSTVLGVS
FRMLSTVLGVH

SEQ ID NO: 153632 - protein, 11 aa, Artificial Sequence
  Description of Artificial Sequence: Synthetic peptide
  Seed: FNMLSTVLGVS
FRMLSTVLGVI

SEQ ID NO: 153633 - protein, 11 aa, Artificial Sequence
  Description of Artificial Sequence: Synthetic peptide
  Seed: FNMLSTVLGVS
FRMLSTVLGVK

SEQ ID NO: 153634 - protein, 11 aa, Artificial Sequence
  Description of Artificial Sequence: Synthetic peptide
  Seed: FNMLSTVLGVS
FRMLSTVLGVL

SEQ ID NO: 153635 - protein, 11 aa, Artificial Sequence
  Description of Artificial Sequence: Synthetic peptide
  Seed: FNMLSTVLGVS
FRMLSTVLGVM

SEQ ID NO: 153636 - protein, 11 aa, Artificial Sequence
  Description of Artificial Sequence: Synthetic peptide
  Seed: FNMLSTVLGVS
FRMLSTVLGVN

SEQ ID NO: 153637 - protein, 11 aa, Artificial Sequence
  Description of Artificial Sequence: Synthetic peptide
  Seed: FNMLSTVLGVS
FRMLSTVLGVP

SEQ ID NO: 153638 - protein, 11 aa, Artificial Sequence
  Description of Artificial Sequence: Synthetic peptide
  Seed: FNMLSTVLGVS
FRMLSTVLGVQ

SEQ ID NO: 153639 - protein, 11 aa, Artificial Sequence
  Description of Artificial Sequence: Synthetic peptide
  Seed: FNMLSTVLGVS
FRMLSTVLGVR

SEQ ID NO: 153640 - protein, 11 aa, Artificial Sequence
  Description of Artificial Sequence: Synthetic peptide
  Seed: FNMLSTVLGVS
FRMLSTVLGVS

SEQ ID NO: 153641 - protein, 11 aa, Artificial Sequence
  Description of Artificial Sequence: Synthetic peptide
  Seed: FNMLSTVLGVS
FRMLSTVLGVT

SEQ ID NO: 153642 - protein, 11 aa, Artificial Sequence
  Description of Artificial Sequence: Synthetic peptide
  Seed: FNMLSTVLGVS
FRMLSTVLGVV

SEQ ID NO: 153643 - protein, 11 aa, Artificial Sequence
  Description of Artificial Sequence: Synthetic peptide
  Seed: FNMLSTVLGVS
FRMLSTVLGVW

SEQ ID NO: 153644 - protein, 11 aa, Artificial Sequence
  Description of Artificial Sequence: Synthetic peptide
  Seed: FNMLSTVLGVS
FRMLSTVLGVY

SEQ ID NO: 153645 - protein, 10 aa, Artificial Sequence
  Description of Artificial Sequence: Synthetic peptide
  Seed: FTSFFYRYGF
FRSFFYRYGA

SEQ ID NO: 153646 - protein, 10 aa, Artificial Sequence
  Description of Artificial Sequence: Synthetic peptide
  Seed: FTSFFYRYGF
FRSFFYRYGF

SEQ ID NO: 153647 - protein, 10 aa, Artificial Sequence
  Description of Artificial Sequence: Synthetic peptide
  Seed: FTSFFYRYGF
FRSFFYRYGI

SEQ ID NO: 153648 - protein, 10 aa, Artificial Sequence
  Description of Artificial Sequence: Synthetic peptide
  Seed: FTSFFYRYGF
FRSFFYRYGL

SEQ ID NO: 153649 - protein, 10 aa, Artificial Sequence
  Description of Artificial Sequence: Synthetic peptide
  Seed: FTSFFYRYGF
FRSFFYRYGM

SEQ ID NO: 153650 - protein, 10 aa, Artificial Sequence
  Description of Artificial Sequence: Synthetic peptide
  Seed: FTSFFYRYGF
FRSFFYRYGR

SEQ ID NO: 153651 - protein, 10 aa, Artificial Sequence
  Description of Artificial Sequence: Synthetic peptide
  Seed: FTSFFYRYGF
FRSFFYRYGT

SEQ ID NO: 153652 - protein, 10 aa, Artificial Sequence
  Description of Artificial Sequence: Synthetic peptide
  Seed: FTSFFYRYGF
FRSFFYRYGV

SEQ ID NO: 153653 - protein, 10 aa, Artificial Sequence
  Description of Artificial Sequence: Synthetic peptide
  Seed: FTSFFYRYGF
FRSFFYRYGW

SEQ ID NO: 153654 - protein, 10 aa, Artificial Sequence
  Description of Artificial Sequence: Synthetic peptide
  Seed: FTSFFYRYGF
FRSFFYRYGY

SEQ ID NO: 153655 - protein, 10 aa, Artificial Sequence
  Description of Artificial Sequence: Synthetic peptide
  Seed: FPSSSYRRPV
FRSSSYRRPF

SEQ ID NO: 153656 - protein, 10 aa, Artificial Sequence
  Description of Artificial Sequence: Synthetic peptide
  Seed: FPSSSYRRPV
FRSSSYRRPI

SEQ ID NO: 153657 - protein, 10 aa, Artificial Sequence
  Description of Artificial Sequence: Synthetic peptide
  Seed: FPSSSYRRPV
FRSSSYRRPL

SEQ ID NO: 153658 - protein, 10 aa, Artificial Sequence
  Description of Artificial Sequence: Synthetic peptide
  Seed: FPSSSYRRPV
FRSSSYRRPM

SEQ ID NO: 153659 - protein, 10 aa, Artificial Sequence
  Description of Artificial Sequence: Synthetic peptide
  Seed: FPSSSYRRPV
FRSSSYRRPV

SEQ ID NO: 153660 - protein, 10 aa, Artificial Sequence
  Description of Artificial Sequence: Synthetic peptide
  Seed: FPSSSYRRPV
FRSSSYRRPY

SEQ ID NO: 153661 - protein, 9 aa, Artificial Sequence
  Description of Artificial Sequence: Synthetic peptide
  Seed: FPYTGDPPY
FRYTGDPPF

SEQ ID NO: 153662 - protein, 9 aa, Artificial Sequence
  Description of Artificial Sequence: Synthetic peptide
  Seed: FPYTGDPPY
FRYTGDPPH

SEQ ID NO: 153663 - protein, 9 aa, Artificial Sequence
  Description of Artificial Sequence: Synthetic peptide
  Seed: FPYTGDPPY
FRYTGDPPI

SEQ ID NO: 153664 - protein, 9 aa, Artificial Sequence
  Description of Artificial Sequence: Synthetic peptide
  Seed: FPYTGDPPY
FRYTGDPPL

SEQ ID NO: 153665 - protein, 9 aa, Artificial Sequence
  Description of Artificial Sequence: Synthetic peptide
  Seed: FPYTGDPPY
FRYTGDPPM

SEQ ID NO: 153666 - protein, 9 aa, Artificial Sequence
  Description of Artificial Sequence: Synthetic peptide
  Seed: FPYTGDPPY
FRYTGDPPV

SEQ ID NO: 153667 - protein, 9 aa, Artificial Sequence
  Description of Artificial Sequence: Synthetic peptide
  Seed: FPYTGDPPY
FRYTGDPPW

SEQ ID NO: 153668 - protein, 9 aa, Artificial Sequence
  Description of Artificial Sequence: Synthetic peptide
  Seed: FPYTGDPPY
FRYTGDPPY

SEQ ID NO: 153669 - protein, 10 aa, Artificial Sequence
  Description of Artificial Sequence: Synthetic peptide
  Seed: FSMELPSFGV
FSMELPSFGA

SEQ ID NO: 153670 - protein, 10 aa, Artificial Sequence
  Description of Artificial Sequence: Synthetic peptide
  Seed: FSMELPSFGV
FSMELPSFGC

SEQ ID NO: 153671 - protein, 10 aa, Artificial Sequence
  Description of Artificial Sequence: Synthetic peptide
  Seed: FSMELPSFGV
FSMELPSFGF

SEQ ID NO: 153672 - protein, 10 aa, Artificial Sequence
  Description of Artificial Sequence: Synthetic peptide
  Seed: FSMELPSFGV
FSMELPSFGI

SEQ ID NO: 153673 - protein, 10 aa, Artificial Sequence
  Description of Artificial Sequence: Synthetic peptide
  Seed: FSMELPSFGV
FSMELPSFGL

SEQ ID NO: 153674 - protein, 10 aa, Artificial Sequence
  Description of Artificial Sequence: Synthetic peptide
  Seed: FSMELPSFGV
FSMELPSFGM

SEQ ID NO: 153675 - protein, 10 aa, Artificial Sequence
  Description of Artificial Sequence: Synthetic peptide
  Seed: FSMELPSFGV
FSMELPSFGS

SEQ ID NO: 153676 - protein, 10 aa, Artificial Sequence
  Description of Artificial Sequence: Synthetic peptide
  Seed: FSMELPSFGV
FSMELPSFGT

SEQ ID NO: 153677 - protein, 11 aa, Artificial Sequence
  Description of Artificial Sequence: Synthetic peptide
  Seed: FSMELPSFGVS
FSMELPSFGVA

SEQ ID NO: 153678 - protein, 11 aa, Artificial Sequence
  Description of Artificial Sequence: Synthetic peptide
  Seed: FSMELPSFGVS
FSMELPSFGVC

SEQ ID NO: 153679 - protein, 11 aa, Artificial Sequence
  Description of Artificial Sequence: Synthetic peptide
  Seed: FSMELPSFGVS
FSMELPSFGVD

SEQ ID NO: 153680 - protein, 11 aa, Artificial Sequence
  Description of Artificial Sequence: Synthetic peptide
  Seed: FSMELPSFGVS
FSMELPSFGVE

SEQ ID NO: 153681 - protein, 11 aa, Artificial Sequence
  Description of Artificial Sequence: Synthetic peptide
  Seed: FSMELPSFGVS
FSMELPSFGVF

SEQ ID NO: 153682 - protein, 11 aa, Artificial Sequence
  Description of Artificial Sequence: Synthetic peptide
  Seed: FSMELPSFGVS
FSMELPSFGVG

SEQ ID NO: 153683 - protein, 11 aa, Artificial Sequence
  Description of Artificial Sequence: Synthetic peptide
  Seed: FSMELPSFGVS
FSMELPSFGVH

SEQ ID NO: 153684 - protein, 11 aa, Artificial Sequence
  Description of Artificial Sequence: Synthetic peptide
  Seed: FSMELPSFGVS
FSMELPSFGVI

SEQ ID NO: 153685 - protein, 11 aa, Artificial Sequence
  Description of Artificial Sequence: Synthetic peptide
  Seed: FSMELPSFGVS
FSMELPSFGVK

SEQ ID NO: 153686 - protein, 11 aa, Artificial Sequence
  Description of Artificial Sequence: Synthetic peptide
  Seed: FSMELPSFGVS
FSMELPSFGVL

SEQ ID NO: 153687 - protein, 11 aa, Artificial Sequence
  Description of Artificial Sequence: Synthetic peptide
  Seed: FSMELPSFGVS
FSMELPSFGVM

SEQ ID NO: 153688 - protein, 11 aa, Artificial Sequence
  Description of Artificial Sequence: Synthetic peptide
  Seed: FSMELPSFGVS
FSMELPSFGVN

SEQ ID NO: 153689 - protein, 11 aa, Artificial Sequence
  Description of Artificial Sequence: Synthetic peptide
  Seed: FSMELPSFGVS
FSMELPSFGVP

SEQ ID NO: 153690 - protein, 11 aa, Artificial Sequence
  Description of Artificial Sequence: Synthetic peptide
  Seed: FSMELPSFGVS
FSMELPSFGVQ

SEQ ID NO: 153691 - protein, 11 aa, Artificial Sequence
  Description of Artificial Sequence: Synthetic peptide
  Seed: FSMELPSFGVS
FSMELPSFGVR

SEQ ID NO: 153692 - protein, 11 aa, Artificial Sequence
  Description of Artificial Sequence: Synthetic peptide
  Seed: FSMELPSFGVS
FSMELPSFGVT

SEQ ID NO: 153693 - protein, 11 aa, Artificial Sequence
  Description of Artificial Sequence: Synthetic peptide
  Seed: FSMELPSFGVS
FSMELPSFGVV

SEQ ID NO: 153694 - protein, 11 aa, Artificial Sequence
  Description of Artificial Sequence: Synthetic peptide
  Seed: FSMELPSFGVS
FSMELPSFGVW

SEQ ID NO: 153695 - protein, 11 aa, Artificial Sequence
  Description of Artificial Sequence: Synthetic peptide
  Seed: FSMELPSFGVS
FSMELPSFGVY

SEQ ID NO: 153696 - protein, 10 aa, Artificial Sequence
  Description of Artificial Sequence: Synthetic peptide
  Seed: FSMELPSFGV
FSMELPSFGY

SEQ ID NO: 153697 - protein, 8 aa, Artificial Sequence
  Description of Artificial Sequence: Synthetic peptide
  Seed: FSMELPSF
FSMELPSI

SEQ ID NO: 153698 - protein, 8 aa, Artificial Sequence
  Description of Artificial Sequence: Synthetic peptide
  Seed: FSMELPSF
FSMELPSL

SEQ ID NO: 153699 - protein, 8 aa, Artificial Sequence
  Description of Artificial Sequence: Synthetic peptide
  Seed: FSMELPSF
FSMELPSM

SEQ ID NO: 153700 - protein, 8 aa, Artificial Sequence
  Description of Artificial Sequence: Synthetic peptide
  Seed: FSMELPSF
FSMELPSV

SEQ ID NO: 153701 - protein, 8 aa, Artificial Sequence
  Description of Artificial Sequence: Synthetic peptide
  Seed: FSMELPSF
FSMELPSW

SEQ ID NO: 153702 - protein, 8 aa, Artificial Sequence
  Description of Artificial Sequence: Synthetic peptide
  Seed: FSMELPSF
FSMELPSY

SEQ ID NO: 153703 - protein, 10 aa, Artificial Sequence
  Description of Artificial Sequence: Synthetic peptide
  Seed: FNMLSTVLGV
FSMLSTVLGA

SEQ ID NO: 153704 - protein, 10 aa, Artificial Sequence
  Description of Artificial Sequence: Synthetic peptide
  Seed: FNMLSTVLGV
FSMLSTVLGC

SEQ ID NO: 153705 - protein, 10 aa, Artificial Sequence
  Description of Artificial Sequence: Synthetic peptide
  Seed: FNMLSTVLGV
FSMLSTVLGF

SEQ ID NO: 153706 - protein, 10 aa, Artificial Sequence
  Description of Artificial Sequence: Synthetic peptide
  Seed: FNMLSTVLGV
FSMLSTVLGI

SEQ ID NO: 153707 - protein, 10 aa, Artificial Sequence
  Description of Artificial Sequence: Synthetic peptide
  Seed: FNMLSTVLGV
FSMLSTVLGL

SEQ ID NO: 153708 - protein, 10 aa, Artificial Sequence
  Description of Artificial Sequence: Synthetic peptide
  Seed: FNMLSTVLGV
FSMLSTVLGM

SEQ ID NO: 153709 - protein, 10 aa, Artificial Sequence
  Description of Artificial Sequence: Synthetic peptide
  Seed: FNMLSTVLGV
FSMLSTVLGS

SEQ ID NO: 153710 - protein, 10 aa, Artificial Sequence
  Description of Artificial Sequence: Synthetic peptide
  Seed: FNMLSTVLGV
FSMLSTVLGT

SEQ ID NO: 153711 - protein, 10 aa, Artificial Sequence
  Description of Artificial Sequence: Synthetic peptide
  Seed: FNMLSTVLGV
FSMLSTVLGV

SEQ ID NO: 153712 - protein, 11 aa, Artificial Sequence
  Description of Artificial Sequence: Synthetic peptide
  Seed: FNMLSTVLGVS
FSMLSTVLGVA

SEQ ID NO: 153713 - protein, 11 aa, Artificial Sequence
  Description of Artificial Sequence: Synthetic peptide
  Seed: FNMLSTVLGVS
FSMLSTVLGVC

SEQ ID NO: 153714 - protein, 11 aa, Artificial Sequence
  Description of Artificial Sequence: Synthetic peptide
  Seed: FNMLSTVLGVS
FSMLSTVLGVD

SEQ ID NO: 153715 - protein, 11 aa, Artificial Sequence
  Description of Artificial Sequence: Synthetic peptide
  Seed: FNMLSTVLGVS
FSMLSTVLGVE

SEQ ID NO: 153716 - protein, 11 aa, Artificial Sequence
  Description of Artificial Sequence: Synthetic peptide
  Seed: FNMLSTVLGVS
FSMLSTVLGVF

SEQ ID NO: 153717 - protein, 11 aa, Artificial Sequence
  Description of Artificial Sequence: Synthetic peptide
  Seed: FNMLSTVLGVS
FSMLSTVLGVG

SEQ ID NO: 153718 - protein, 11 aa, Artificial Sequence
  Description of Artificial Sequence: Synthetic peptide
  Seed: FNMLSTVLGVS
FSMLSTVLGVH

SEQ ID NO: 153719 - protein, 11 aa, Artificial Sequence
  Description of Artificial Sequence: Synthetic peptide
  Seed: FNMLSTVLGVS
FSMLSTVLGVI

SEQ ID NO: 153720 - protein, 11 aa, Artificial Sequence
  Description of Artificial Sequence: Synthetic peptide
  Seed: FNMLSTVLGVS
FSMLSTVLGVK

SEQ ID NO: 153721 - protein, 11 aa, Artificial Sequence
  Description of Artificial Sequence: Synthetic peptide
  Seed: FNMLSTVLGVS
FSMLSTVLGVL

SEQ ID NO: 153722 - protein, 11 aa, Artificial Sequence
  Description of Artificial Sequence: Synthetic peptide
  Seed: FNMLSTVLGVS
FSMLSTVLGVM

SEQ ID NO: 153723 - protein, 11 aa, Artificial Sequence
  Description of Artificial Sequence: Synthetic peptide
  Seed: FNMLSTVLGVS
FSMLSTVLGVN

SEQ ID NO: 153724 - protein, 11 aa, Artificial Sequence
  Description of Artificial Sequence: Synthetic peptide
  Seed: FNMLSTVLGVS
FSMLSTVLGVP

SEQ ID NO: 153725 - protein, 11 aa, Artificial Sequence
  Description of Artificial Sequence: Synthetic peptide
  Seed: FNMLSTVLGVS
FSMLSTVLGVQ

SEQ ID NO: 153726 - protein, 11 aa, Artificial Sequence
  Description of Artificial Sequence: Synthetic peptide
  Seed: FNMLSTVLGVS
FSMLSTVLGVR

SEQ ID NO: 153727 - protein, 11 aa, Artificial Sequence
  Description of Artificial Sequence: Synthetic peptide
  Seed: FNMLSTVLGVS
FSMLSTVLGVS

SEQ ID NO: 153728 - protein, 11 aa, Artificial Sequence
  Description of Artificial Sequence: Synthetic peptide
  Seed: FNMLSTVLGVS
FSMLSTVLGVT

SEQ ID NO: 153729 - protein, 11 aa, Artificial Sequence
  Description of Artificial Sequence: Synthetic peptide
  Seed: FNMLSTVLGVS
FSMLSTVLGVV

SEQ ID NO: 153730 - protein, 11 aa, Artificial Sequence
  Description of Artificial Sequence: Synthetic peptide
  Seed: FNMLSTVLGVS
FSMLSTVLGVW

SEQ ID NO: 153731 - protein, 11 aa, Artificial Sequence
  Description of Artificial Sequence: Synthetic peptide
  Seed: FNMLSTVLGVS
FSMLSTVLGVY

SEQ ID NO: 153732 - protein, 8 aa, Artificial Sequence
  Description of Artificial Sequence: Synthetic peptide
  Seed: FSNKMARL
FSNKMARF

SEQ ID NO: 153733 - protein, 10 aa, Artificial Sequence
  Description of Artificial Sequence: Synthetic peptide
  Seed: FSNKMARLGK
FSNKMARLGA

SEQ ID NO: 153734 - protein, 10 aa, Artificial Sequence
  Description of Artificial Sequence: Synthetic peptide
  Seed: FSNKMARLGK
FSNKMARLGR

SEQ ID NO: 153735 - protein, 8 aa, Artificial Sequence
  Description of Artificial Sequence: Synthetic peptide
  Seed: FSNKMARL
FSNKMARM

SEQ ID NO: 153736 - protein, 8 aa, Artificial Sequence
  Description of Artificial Sequence: Synthetic peptide
  Seed: FSNKMARL
FSNKMARY

SEQ ID NO: 153737 - protein, 9 aa, Artificial Sequence
  Description of Artificial Sequence: Synthetic peptide
  Seed: FFPSSSYRR
FSPSSSYRK

SEQ ID NO: 153738 - protein, 9 aa, Artificial Sequence
  Description of Artificial Sequence: Synthetic peptide
  Seed: FFPSSSYRR
FSPSSSYRR

SEQ ID NO: 153739 - protein, 8 aa, Artificial Sequence
  Description of Artificial Sequence: Synthetic peptide
  Seed: FTSFFYRY
FSSFFYRY

SEQ ID NO: 153740 - protein, 10 aa, Artificial Sequence
  Description of Artificial Sequence: Synthetic peptide
  Seed: FTSFFYRYGF
FSSFFYRYGA

SEQ ID NO: 153741 - protein, 10 aa, Artificial Sequence
  Description of Artificial Sequence: Synthetic peptide
  Seed: FTSFFYRYGF
FSSFFYRYGF

SEQ ID NO: 153742 - protein, 10 aa, Artificial Sequence
  Description of Artificial Sequence: Synthetic peptide
  Seed: FTSFFYRYGF
FSSFFYRYGI

SEQ ID NO: 153743 - protein, 10 aa, Artificial Sequence
  Description of Artificial Sequence: Synthetic peptide
  Seed: FTSFFYRYGF
FSSFFYRYGK

SEQ ID NO: 153744 - protein, 10 aa, Artificial Sequence
  Description of Artificial Sequence: Synthetic peptide
  Seed: FTSFFYRYGF
FSSFFYRYGL

SEQ ID NO: 153745 - protein, 10 aa, Artificial Sequence
  Description of Artificial Sequence: Synthetic peptide
  Seed: FTSFFYRYGF
FSSFFYRYGM

SEQ ID NO: 153746 - protein, 10 aa, Artificial Sequence
  Description of Artificial Sequence: Synthetic peptide
  Seed: FTSFFYRYGF
FSSFFYRYGR

SEQ ID NO: 153747 - protein, 10 aa, Artificial Sequence
  Description of Artificial Sequence: Synthetic peptide
  Seed: FTSFFYRYGF
FSSFFYRYGT

SEQ ID NO: 153748 - protein, 10 aa, Artificial Sequence
  Description of Artificial Sequence: Synthetic peptide
  Seed: FTSFFYRYGF
FSSFFYRYGV

SEQ ID NO: 153749 - protein, 10 aa, Artificial Sequence
  Description of Artificial Sequence: Synthetic peptide
  Seed: FTSFFYRYGF
FSSFFYRYGW

SEQ ID NO: 153750 - protein, 10 aa, Artificial Sequence
  Description of Artificial Sequence: Synthetic peptide
  Seed: FTSFFYRYGF
FSSFFYRYGY

SEQ ID NO: 153751 - protein, 10 aa, Artificial Sequence
  Description of Artificial Sequence: Synthetic peptide
  Seed: FPSSSYRRPV
FSSSSYRRPF

SEQ ID NO: 153752 - protein, 10 aa, Artificial Sequence
  Description of Artificial Sequence: Synthetic peptide
  Seed: FPSSSYRRPV
FSSSSYRRPI

SEQ ID NO: 153753 - protein, 10 aa, Artificial Sequence
  Description of Artificial Sequence: Synthetic peptide
  Seed: FPSSSYRRPV
FSSSSYRRPL

SEQ ID NO: 153754 - protein, 10 aa, Artificial Sequence
  Description of Artificial Sequence: Synthetic peptide
  Seed: FPSSSYRRPV
FSSSSYRRPM

SEQ ID NO: 153755 - protein, 10 aa, Artificial Sequence
  Description of Artificial Sequence: Synthetic peptide
  Seed: FPSSSYRRPV
FSSSSYRRPV

SEQ ID NO: 153756 - protein, 10 aa, Artificial Sequence
  Description of Artificial Sequence: Synthetic peptide
  Seed: FPSSSYRRPV
FSSSSYRRPY

SEQ ID NO: 153757 - protein, 9 aa, Artificial Sequence
  Description of Artificial Sequence: Synthetic peptide
  Seed: FPYTGDPPY
FSYTGDPPA

SEQ ID NO: 153758 - protein, 9 aa, Artificial Sequence
  Description of Artificial Sequence: Synthetic peptide
  Seed: FPYTGDPPY
FSYTGDPPC

SEQ ID NO: 153759 - protein, 9 aa, Artificial Sequence
  Description of Artificial Sequence: Synthetic peptide
  Seed: FPYTGDPPY
FSYTGDPPF

SEQ ID NO: 153760 - protein, 9 aa, Artificial Sequence
  Description of Artificial Sequence: Synthetic peptide
  Seed: FPYTGDPPY
FSYTGDPPH

SEQ ID NO: 153761 - protein, 9 aa, Artificial Sequence
  Description of Artificial Sequence: Synthetic peptide
  Seed: FPYTGDPPY
FSYTGDPPI

SEQ ID NO: 153762 - protein, 9 aa, Artificial Sequence
  Description of Artificial Sequence: Synthetic peptide
  Seed: FPYTGDPPY
FSYTGDPPL

SEQ ID NO: 153763 - protein, 9 aa, Artificial Sequence
  Description of Artificial Sequence: Synthetic peptide
  Seed: FPYTGDPPY
FSYTGDPPM

SEQ ID NO: 153764 - protein, 9 aa, Artificial Sequence
  Description of Artificial Sequence: Synthetic peptide
  Seed: FPYTGDPPY
FSYTGDPPS

SEQ ID NO: 153765 - protein, 9 aa, Artificial Sequence
  Description of Artificial Sequence: Synthetic peptide
  Seed: FPYTGDPPY
FSYTGDPPT

SEQ ID NO: 153766 - protein, 9 aa, Artificial Sequence
  Description of Artificial Sequence: Synthetic peptide
  Seed: FPYTGDPPY
FSYTGDPPV

SEQ ID NO: 153767 - protein, 9 aa, Artificial Sequence
  Description of Artificial Sequence: Synthetic peptide
  Seed: FPYTGDPPY
FSYTGDPPW

SEQ ID NO: 153768 - protein, 9 aa, Artificial Sequence
  Description of Artificial Sequence: Synthetic peptide
  Seed: FPYTGDPPY
FSYTGDPPY

SEQ ID NO: 153769 - protein, 10 aa, Artificial Sequence
  Description of Artificial Sequence: Synthetic peptide
  Seed: FPYTGDPPYS
FSYTGDPPYF

SEQ ID NO: 153770 - protein, 10 aa, Artificial Sequence
  Description of Artificial Sequence: Synthetic peptide
  Seed: FPYTGDPPYS
FSYTGDPPYM

SEQ ID NO: 153771 - protein, 11 aa, Artificial Sequence
  Description of Artificial Sequence: Synthetic peptide
  Seed: FPYTGDPPYSH
FSYTGDPPYSF

SEQ ID NO: 153772 - protein, 11 aa, Artificial Sequence
  Description of Artificial Sequence: Synthetic peptide
  Seed: FPYTGDPPYSH
FSYTGDPPYSY

SEQ ID NO: 153773 - protein, 10 aa, Artificial Sequence
  Description of Artificial Sequence: Synthetic peptide
  Seed: FPYTGDPPYS
FSYTGDPPYY

SEQ ID NO: 153774 - protein, 8 aa, Artificial Sequence
  Description of Artificial Sequence: Synthetic peptide
  Seed: FSMELPSF
FTMELPSF

SEQ ID NO: 153775 - protein, 10 aa, Artificial Sequence
  Description of Artificial Sequence: Synthetic peptide
  Seed: FSMELPSFGV
FTMELPSFGA

SEQ ID NO: 153776 - protein, 10 aa, Artificial Sequence
  Description of Artificial Sequence: Synthetic peptide
  Seed: FSMELPSFGV
FTMELPSFGC

SEQ ID NO: 153777 - protein, 10 aa, Artificial Sequence
  Description of Artificial Sequence: Synthetic peptide
  Seed: FSMELPSFGV
FTMELPSFGF

SEQ ID NO: 153778 - protein, 10 aa, Artificial Sequence
  Description of Artificial Sequence: Synthetic peptide
  Seed: FSMELPSFGV
FTMELPSFGG

SEQ ID NO: 153779 - protein, 10 aa, Artificial Sequence
  Description of Artificial Sequence: Synthetic peptide
  Seed: FSMELPSFGV
FTMELPSFGI

SEQ ID NO: 153780 - protein, 10 aa, Artificial Sequence
  Description of Artificial Sequence: Synthetic peptide
  Seed: FSMELPSFGV
FTMELPSFGL

SEQ ID NO: 153781 - protein, 10 aa, Artificial Sequence
  Description of Artificial Sequence: Synthetic peptide
  Seed: FSMELPSFGV
FTMELPSFGM

SEQ ID NO: 153782 - protein, 10 aa, Artificial Sequence
  Description of Artificial Sequence: Synthetic peptide
  Seed: FSMELPSFGV
FTMELPSFGP

SEQ ID NO: 153783 - protein, 10 aa, Artificial Sequence
  Description of Artificial Sequence: Synthetic peptide
  Seed: FSMELPSFGV
FTMELPSFGS

SEQ ID NO: 153784 - protein, 10 aa, Artificial Sequence
  Description of Artificial Sequence: Synthetic peptide
  Seed: FSMELPSFGV
FTMELPSFGT

SEQ ID NO: 153785 - protein, 10 aa, Artificial Sequence
  Description of Artificial Sequence: Synthetic peptide
  Seed: FSMELPSFGV
FTMELPSFGV

SEQ ID NO: 153786 - protein, 11 aa, Artificial Sequence
  Description of Artificial Sequence: Synthetic peptide
  Seed: FSMELPSFGVS
FTMELPSFGVA

SEQ ID NO: 153787 - protein, 11 aa, Artificial Sequence
  Description of Artificial Sequence: Synthetic peptide
  Seed: FSMELPSFGVS
FTMELPSFGVC

SEQ ID NO: 153788 - protein, 11 aa, Artificial Sequence
  Description of Artificial Sequence: Synthetic peptide
  Seed: FSMELPSFGVS
FTMELPSFGVD

SEQ ID NO: 153789 - protein, 11 aa, Artificial Sequence
  Description of Artificial Sequence: Synthetic peptide
  Seed: FSMELPSFGVS
FTMELPSFGVE

SEQ ID NO: 153790 - protein, 11 aa, Artificial Sequence
  Description of Artificial Sequence: Synthetic peptide
  Seed: FSMELPSFGVS
FTMELPSFGVF

SEQ ID NO: 153791 - protein, 11 aa, Artificial Sequence
  Description of Artificial Sequence: Synthetic peptide
  Seed: FSMELPSFGVS
FTMELPSFGVG

SEQ ID NO: 153792 - protein, 11 aa, Artificial Sequence
  Description of Artificial Sequence: Synthetic peptide
  Seed: FSMELPSFGVS
FTMELPSFGVH

SEQ ID NO: 153793 - protein, 11 aa, Artificial Sequence
  Description of Artificial Sequence: Synthetic peptide
  Seed: FSMELPSFGVS
FTMELPSFGVI

SEQ ID NO: 153794 - protein, 11 aa, Artificial Sequence
  Description of Artificial Sequence: Synthetic peptide
  Seed: FSMELPSFGVS
FTMELPSFGVK

SEQ ID NO: 153795 - protein, 11 aa, Artificial Sequence
  Description of Artificial Sequence: Synthetic peptide
  Seed: FSMELPSFGVS
FTMELPSFGVL

SEQ ID NO: 153796 - protein, 11 aa, Artificial Sequence
  Description of Artificial Sequence: Synthetic peptide
  Seed: FSMELPSFGVS
FTMELPSFGVM

SEQ ID NO: 153797 - protein, 11 aa, Artificial Sequence
  Description of Artificial Sequence: Synthetic peptide
  Seed: FSMELPSFGVS
FTMELPSFGVN

SEQ ID NO: 153798 - protein, 11 aa, Artificial Sequence
  Description of Artificial Sequence: Synthetic peptide
  Seed: FSMELPSFGVS
FTMELPSFGVP

SEQ ID NO: 153799 - protein, 11 aa, Artificial Sequence
  Description of Artificial Sequence: Synthetic peptide
  Seed: FSMELPSFGVS
FTMELPSFGVQ

SEQ ID NO: 153800 - protein, 11 aa, Artificial Sequence
  Description of Artificial Sequence: Synthetic peptide
  Seed: FSMELPSFGVS
FTMELPSFGVR

SEQ ID NO: 153801 - protein, 11 aa, Artificial Sequence
  Description of Artificial Sequence: Synthetic peptide
  Seed: FSMELPSFGVS
FTMELPSFGVS

SEQ ID NO: 153802 - protein, 11 aa, Artificial Sequence
  Description of Artificial Sequence: Synthetic peptide
  Seed: FSMELPSFGVS
FTMELPSFGVT

SEQ ID NO: 153803 - protein, 11 aa, Artificial Sequence
  Description of Artificial Sequence: Synthetic peptide
  Seed: FSMELPSFGVS
FTMELPSFGVV

SEQ ID NO: 153804 - protein, 11 aa, Artificial Sequence
  Description of Artificial Sequence: Synthetic peptide
  Seed: FSMELPSFGVS
FTMELPSFGVW

SEQ ID NO: 153805 - protein, 11 aa, Artificial Sequence
  Description of Artificial Sequence: Synthetic peptide
  Seed: FSMELPSFGVS
FTMELPSFGVY

SEQ ID NO: 153806 - protein, 10 aa, Artificial Sequence
  Description of Artificial Sequence: Synthetic peptide
  Seed: FSMELPSFGV
FTMELPSFGY

SEQ ID NO: 153807 - protein, 8 aa, Artificial Sequence
  Description of Artificial Sequence: Synthetic peptide
  Seed: FSMELPSF
FTMELPSI

SEQ ID NO: 153808 - protein, 8 aa, Artificial Sequence
  Description of Artificial Sequence: Synthetic peptide
  Seed: FSMELPSF
FTMELPSL

SEQ ID NO: 153809 - protein, 8 aa, Artificial Sequence
  Description of Artificial Sequence: Synthetic peptide
  Seed: FSMELPSF
FTMELPSM

SEQ ID NO: 153810 - protein, 8 aa, Artificial Sequence
  Description of Artificial Sequence: Synthetic peptide
  Seed: FSMELPSF
FTMELPSV

SEQ ID NO: 153811 - protein, 8 aa, Artificial Sequence
  Description of Artificial Sequence: Synthetic peptide
  Seed: FSMELPSF
FTMELPSW

SEQ ID NO: 153812 - protein, 8 aa, Artificial Sequence
  Description of Artificial Sequence: Synthetic peptide
  Seed: FSMELPSF
FTMELPSY

SEQ ID NO: 153813 - protein, 10 aa, Artificial Sequence
  Description of Artificial Sequence: Synthetic peptide
  Seed: FNMLSTVLGV
FTMLSTVLGA

SEQ ID NO: 153814 - protein, 10 aa, Artificial Sequence
  Description of Artificial Sequence: Synthetic peptide
  Seed: FNMLSTVLGV
FTMLSTVLGC

SEQ ID NO: 153815 - protein, 10 aa, Artificial Sequence
  Description of Artificial Sequence: Synthetic peptide
  Seed: FNMLSTVLGV
FTMLSTVLGF

SEQ ID NO: 153816 - protein, 10 aa, Artificial Sequence
  Description of Artificial Sequence: Synthetic peptide
  Seed: FNMLSTVLGV
FTMLSTVLGI

SEQ ID NO: 153817 - protein, 10 aa, Artificial Sequence
  Description of Artificial Sequence: Synthetic peptide
  Seed: FNMLSTVLGV
FTMLSTVLGL

SEQ ID NO: 153818 - protein, 10 aa, Artificial Sequence
  Description of Artificial Sequence: Synthetic peptide
  Seed: FNMLSTVLGV
FTMLSTVLGM

SEQ ID NO: 153819 - protein, 10 aa, Artificial Sequence
  Description of Artificial Sequence: Synthetic peptide
  Seed: FNMLSTVLGV
FTMLSTVLGS

SEQ ID NO: 153820 - protein, 10 aa, Artificial Sequence
  Description of Artificial Sequence: Synthetic peptide
  Seed: FNMLSTVLGV
FTMLSTVLGT

SEQ ID NO: 153821 - protein, 10 aa, Artificial Sequence
  Description of Artificial Sequence: Synthetic peptide
  Seed: FNMLSTVLGV
FTMLSTVLGV

SEQ ID NO: 153822 - protein, 11 aa, Artificial Sequence
  Description of Artificial Sequence: Synthetic peptide
  Seed: FNMLSTVLGVS
FTMLSTVLGVA

SEQ ID NO: 153823 - protein, 11 aa, Artificial Sequence
  Description of Artificial Sequence: Synthetic peptide
  Seed: FNMLSTVLGVS
FTMLSTVLGVC

SEQ ID NO: 153824 - protein, 11 aa, Artificial Sequence
  Description of Artificial Sequence: Synthetic peptide
  Seed: FNMLSTVLGVS
FTMLSTVLGVD

SEQ ID NO: 153825 - protein, 11 aa, Artificial Sequence
  Description of Artificial Sequence: Synthetic peptide
  Seed: FNMLSTVLGVS
FTMLSTVLGVE

SEQ ID NO: 153826 - protein, 11 aa, Artificial Sequence
  Description of Artificial Sequence: Synthetic peptide
  Seed: FNMLSTVLGVS
FTMLSTVLGVF

SEQ ID NO: 153827 - protein, 11 aa, Artificial Sequence
  Description of Artificial Sequence: Synthetic peptide
  Seed: FNMLSTVLGVS
FTMLSTVLGVG

SEQ ID NO: 153828 - protein, 11 aa, Artificial Sequence
  Description of Artificial Sequence: Synthetic peptide
  Seed: FNMLSTVLGVS
FTMLSTVLGVH

SEQ ID NO: 153829 - protein, 11 aa, Artificial Sequence
  Description of Artificial Sequence: Synthetic peptide
  Seed: FNMLSTVLGVS
FTMLSTVLGVI

SEQ ID NO: 153830 - protein, 11 aa, Artificial Sequence
  Description of Artificial Sequence: Synthetic peptide
  Seed: FNMLSTVLGVS
FTMLSTVLGVK

SEQ ID NO: 153831 - protein, 11 aa, Artificial Sequence
  Description of Artificial Sequence: Synthetic peptide
  Seed: FNMLSTVLGVS
FTMLSTVLGVL

SEQ ID NO: 153832 - protein, 11 aa, Artificial Sequence
  Description of Artificial Sequence: Synthetic peptide
  Seed: FNMLSTVLGVS
FTMLSTVLGVM

SEQ ID NO: 153833 - protein, 11 aa, Artificial Sequence
  Description of Artificial Sequence: Synthetic peptide
  Seed: FNMLSTVLGVS
FTMLSTVLGVN

SEQ ID NO: 153834 - protein, 11 aa, Artificial Sequence
  Description of Artificial Sequence: Synthetic peptide
  Seed: FNMLSTVLGVS
FTMLSTVLGVP

SEQ ID NO: 153835 - protein, 11 aa, Artificial Sequence
  Description of Artificial Sequence: Synthetic peptide
  Seed: FNMLSTVLGVS
FTMLSTVLGVQ

SEQ ID NO: 153836 - protein, 11 aa, Artificial Sequence
  Description of Artificial Sequence: Synthetic peptide
  Seed: FNMLSTVLGVS
FTMLSTVLGVR

SEQ ID NO: 153837 - protein, 11 aa, Artificial Sequence
  Description of Artificial Sequence: Synthetic peptide
  Seed: FNMLSTVLGVS
FTMLSTVLGVS

SEQ ID NO: 153838 - protein, 11 aa, Artificial Sequence
  Description of Artificial Sequence: Synthetic peptide
  Seed: FNMLSTVLGVS
FTMLSTVLGVT

SEQ ID NO: 153839 - protein, 11 aa, Artificial Sequence
  Description of Artificial Sequence: Synthetic peptide
  Seed: FNMLSTVLGVS
FTMLSTVLGVV

SEQ ID NO: 153840 - protein, 11 aa, Artificial Sequence
  Description of Artificial Sequence: Synthetic peptide
  Seed: FNMLSTVLGVS
FTMLSTVLGVW

SEQ ID NO: 153841 - protein, 11 aa, Artificial Sequence
  Description of Artificial Sequence: Synthetic peptide
  Seed: FNMLSTVLGVS
FTMLSTVLGVY

SEQ ID NO: 153842 - protein, 10 aa, Artificial Sequence
  Description of Artificial Sequence: Synthetic peptide
  Seed: FSNKMARLGK
FTNKMARLGK

SEQ ID NO: 153843 - protein, 10 aa, Artificial Sequence
  Description of Artificial Sequence: Synthetic peptide
  Seed: FSNKMARLGK
FTNKMARLGR

SEQ ID NO: 153844 - protein, 10 aa, Artificial Sequence
  Description of Artificial Sequence: Synthetic peptide
  Seed: FSNKMARLGK
FTNKMARLGY

SEQ ID NO: 153845 - protein, 8 aa, Artificial Sequence
  Description of Artificial Sequence: Synthetic peptide
  Seed: FFPSSSYR
FTPSSSYR

SEQ ID NO: 153846 - protein, 9 aa, Artificial Sequence
  Description of Artificial Sequence: Synthetic peptide
  Seed: FFPSSSYRR
FTPSSSYRK

SEQ ID NO: 153847 - protein, 9 aa, Artificial Sequence
  Description of Artificial Sequence: Synthetic peptide
  Seed: FFPSSSYRR
FTPSSSYRR

SEQ ID NO: 153848 - protein, 10 aa, Artificial Sequence
  Description of Artificial Sequence: Synthetic peptide
  Seed: FTSFFYRYGF
FTSFFYRYGA

SEQ ID NO: 153849 - protein, 10 aa, Artificial Sequence
  Description of Artificial Sequence: Synthetic peptide
  Seed: FTSFFYRYGF
FTSFFYRYGI

SEQ ID NO: 153850 - protein, 10 aa, Artificial Sequence
  Description of Artificial Sequence: Synthetic peptide
  Seed: FTSFFYRYGF
FTSFFYRYGK

SEQ ID NO: 153851 - protein, 10 aa, Artificial Sequence
  Description of Artificial Sequence: Synthetic peptide
  Seed: FTSFFYRYGF
FTSFFYRYGL

SEQ ID NO: 153852 - protein, 10 aa, Artificial Sequence
  Description of Artificial Sequence: Synthetic peptide
  Seed: FTSFFYRYGF
FTSFFYRYGM

SEQ ID NO: 153853 - protein, 10 aa, Artificial Sequence
  Description of Artificial Sequence: Synthetic peptide
  Seed: FTSFFYRYGF
FTSFFYRYGR

SEQ ID NO: 153854 - protein, 10 aa, Artificial Sequence
  Description of Artificial Sequence: Synthetic peptide
  Seed: FTSFFYRYGF
FTSFFYRYGS

SEQ ID NO: 153855 - protein, 10 aa, Artificial Sequence
  Description of Artificial Sequence: Synthetic peptide
  Seed: FTSFFYRYGF
FTSFFYRYGT

SEQ ID NO: 153856 - protein, 10 aa, Artificial Sequence
  Description of Artificial Sequence: Synthetic peptide
  Seed: FTSFFYRYGF
FTSFFYRYGV

SEQ ID NO: 153857 - protein, 10 aa, Artificial Sequence
  Description of Artificial Sequence: Synthetic peptide
  Seed: FTSFFYRYGF
FTSFFYRYGW

SEQ ID NO: 153858 - protein, 10 aa, Artificial Sequence
  Description of Artificial Sequence: Synthetic peptide
  Seed: FTSFFYRYGF
FTSFFYRYGY

SEQ ID NO: 153859 - protein, 10 aa, Artificial Sequence
  Description of Artificial Sequence: Synthetic peptide
  Seed: FPSSSYRRPV
FTSSSYRRPF

SEQ ID NO: 153860 - protein, 10 aa, Artificial Sequence
  Description of Artificial Sequence: Synthetic peptide
  Seed: FPSSSYRRPV
FTSSSYRRPI

SEQ ID NO: 153861 - protein, 10 aa, Artificial Sequence
  Description of Artificial Sequence: Synthetic peptide
  Seed: FPSSSYRRPV
FTSSSYRRPL

SEQ ID NO: 153862 - protein, 10 aa, Artificial Sequence
  Description of Artificial Sequence: Synthetic peptide
  Seed: FPSSSYRRPV
FTSSSYRRPM

SEQ ID NO: 153863 - protein, 10 aa, Artificial Sequence
  Description of Artificial Sequence: Synthetic peptide
  Seed: FPSSSYRRPV
FTSSSYRRPV

SEQ ID NO: 153864 - protein, 10 aa, Artificial Sequence
  Description of Artificial Sequence: Synthetic peptide
  Seed: FPSSSYRRPV
FTSSSYRRPY

SEQ ID NO: 153865 - protein, 9 aa, Artificial Sequence
  Description of Artificial Sequence: Synthetic peptide
  Seed: FPYTGDPPY
FTYTGDPPA

SEQ ID NO: 153866 - protein, 9 aa, Artificial Sequence
  Description of Artificial Sequence: Synthetic peptide
  Seed: FPYTGDPPY
FTYTGDPPC

SEQ ID NO: 153867 - protein, 9 aa, Artificial Sequence
  Description of Artificial Sequence: Synthetic peptide
  Seed: FPYTGDPPY
FTYTGDPPF

SEQ ID NO: 153868 - protein, 9 aa, Artificial Sequence
  Description of Artificial Sequence: Synthetic peptide
  Seed: FPYTGDPPY
FTYTGDPPH

SEQ ID NO: 153869 - protein, 9 aa, Artificial Sequence
  Description of Artificial Sequence: Synthetic peptide
  Seed: FPYTGDPPY
FTYTGDPPI

SEQ ID NO: 153870 - protein, 9 aa, Artificial Sequence
  Description of Artificial Sequence: Synthetic peptide
  Seed: FPYTGDPPY
FTYTGDPPL

SEQ ID NO: 153871 - protein, 9 aa, Artificial Sequence
  Description of Artificial Sequence: Synthetic peptide
  Seed: FPYTGDPPY
FTYTGDPPM

SEQ ID NO: 153872 - protein, 9 aa, Artificial Sequence
  Description of Artificial Sequence: Synthetic peptide
  Seed: FPYTGDPPY
FTYTGDPPT

SEQ ID NO: 153873 - protein, 9 aa, Artificial Sequence
  Description of Artificial Sequence: Synthetic peptide
  Seed: FPYTGDPPY
FTYTGDPPV

SEQ ID NO: 153874 - protein, 9 aa, Artificial Sequence
  Description of Artificial Sequence: Synthetic peptide
  Seed: FPYTGDPPY
FTYTGDPPW

SEQ ID NO: 153875 - protein, 9 aa, Artificial Sequence
  Description of Artificial Sequence: Synthetic peptide
  Seed: FPYTGDPPY
FTYTGDPPY

SEQ ID NO: 153876 - protein, 10 aa, Artificial Sequence
  Description of Artificial Sequence: Synthetic peptide
  Seed: FPYTGDPPYS
FTYTGDPPYF

SEQ ID NO: 153877 - protein, 10 aa, Artificial Sequence
  Description of Artificial Sequence: Synthetic peptide
  Seed: FPYTGDPPYS
FTYTGDPPYM

SEQ ID NO: 153878 - protein, 11 aa, Artificial Sequence
  Description of Artificial Sequence: Synthetic peptide
  Seed: FPYTGDPPYSH
FTYTGDPPYSF

SEQ ID NO: 153879 - protein, 11 aa, Artificial Sequence
  Description of Artificial Sequence: Synthetic peptide
  Seed: FPYTGDPPYSH
FTYTGDPPYSY

SEQ ID NO: 153880 - protein, 10 aa, Artificial Sequence
  Description of Artificial Sequence: Synthetic peptide
  Seed: FPYTGDPPYS
FTYTGDPPYY

SEQ ID NO: 153881 - protein, 8 aa, Artificial Sequence
  Description of Artificial Sequence: Synthetic peptide
  Seed: FSMELPSF
FVMELPSF

SEQ ID NO: 153882 - protein, 10 aa, Artificial Sequence
  Description of Artificial Sequence: Synthetic peptide
  Seed: FSMELPSFGV
FVMELPSFGA

SEQ ID NO: 153883 - protein, 10 aa, Artificial Sequence
  Description of Artificial Sequence: Synthetic peptide
  Seed: FSMELPSFGV
FVMELPSFGC

SEQ ID NO: 153884 - protein, 10 aa, Artificial Sequence
  Description of Artificial Sequence: Synthetic peptide
  Seed: FSMELPSFGV
FVMELPSFGF

SEQ ID NO: 153885 - protein, 10 aa, Artificial Sequence
  Description of Artificial Sequence: Synthetic peptide
  Seed: FSMELPSFGV
FVMELPSFGG

SEQ ID NO: 153886 - protein, 10 aa, Artificial Sequence
  Description of Artificial Sequence: Synthetic peptide
  Seed: FSMELPSFGV
FVMELPSFGI

SEQ ID NO: 153887 - protein, 10 aa, Artificial Sequence
  Description of Artificial Sequence: Synthetic peptide
  Seed: FSMELPSFGV
FVMELPSFGL

SEQ ID NO: 153888 - protein, 10 aa, Artificial Sequence
  Description of Artificial Sequence: Synthetic peptide
  Seed: FSMELPSFGV
FVMELPSFGM

SEQ ID NO: 153889 - protein, 10 aa, Artificial Sequence
  Description of Artificial Sequence: Synthetic peptide
  Seed: FSMELPSFGV
FVMELPSFGP

SEQ ID NO: 153890 - protein, 10 aa, Artificial Sequence
  Description of Artificial Sequence: Synthetic peptide
  Seed: FSMELPSFGV
FVMELPSFGS

SEQ ID NO: 153891 - protein, 10 aa, Artificial Sequence
  Description of Artificial Sequence: Synthetic peptide
  Seed: FSMELPSFGV
FVMELPSFGT

SEQ ID NO: 153892 - protein, 10 aa, Artificial Sequence
  Description of Artificial Sequence: Synthetic peptide
  Seed: FSMELPSFGV
FVMELPSFGV

SEQ ID NO: 153893 - protein, 11 aa, Artificial Sequence
  Description of Artificial Sequence: Synthetic peptide
  Seed: FSMELPSFGVS
FVMELPSFGVA

SEQ ID NO: 153894 - protein, 11 aa, Artificial Sequence
  Description of Artificial Sequence: Synthetic peptide
  Seed: FSMELPSFGVS
FVMELPSFGVC

SEQ ID NO: 153895 - protein, 11 aa, Artificial Sequence
  Description of Artificial Sequence: Synthetic peptide
  Seed: FSMELPSFGVS
FVMELPSFGVD

SEQ ID NO: 153896 - protein, 11 aa, Artificial Sequence
  Description of Artificial Sequence: Synthetic peptide
  Seed: FSMELPSFGVS
FVMELPSFGVE

SEQ ID NO: 153897 - protein, 11 aa, Artificial Sequence
  Description of Artificial Sequence: Synthetic peptide
  Seed: FSMELPSFGVS
FVMELPSFGVF

SEQ ID NO: 153898 - protein, 11 aa, Artificial Sequence
  Description of Artificial Sequence: Synthetic peptide
  Seed: FSMELPSFGVS
FVMELPSFGVG

SEQ ID NO: 153899 - protein, 11 aa, Artificial Sequence
  Description of Artificial Sequence: Synthetic peptide
  Seed: FSMELPSFGVS
FVMELPSFGVH

SEQ ID NO: 153900 - protein, 11 aa, Artificial Sequence
  Description of Artificial Sequence: Synthetic peptide
  Seed: FSMELPSFGVS
FVMELPSFGVI

SEQ ID NO: 153901 - protein, 11 aa, Artificial Sequence
  Description of Artificial Sequence: Synthetic peptide
  Seed: FSMELPSFGVS
FVMELPSFGVK

SEQ ID NO: 153902 - protein, 11 aa, Artificial Sequence
  Description of Artificial Sequence: Synthetic peptide
  Seed: FSMELPSFGVS
FVMELPSFGVL

SEQ ID NO: 153903 - protein, 11 aa, Artificial Sequence
  Description of Artificial Sequence: Synthetic peptide
  Seed: FSMELPSFGVS
FVMELPSFGVM

SEQ ID NO: 153904 - protein, 11 aa, Artificial Sequence
  Description of Artificial Sequence: Synthetic peptide
  Seed: FSMELPSFGVS
FVMELPSFGVN

SEQ ID NO: 153905 - protein, 11 aa, Artificial Sequence
  Description of Artificial Sequence: Synthetic peptide
  Seed: FSMELPSFGVS
FVMELPSFGVP

SEQ ID NO: 153906 - protein, 11 aa, Artificial Sequence
  Description of Artificial Sequence: Synthetic peptide
  Seed: FSMELPSFGVS
FVMELPSFGVQ

SEQ ID NO: 153907 - protein, 11 aa, Artificial Sequence
  Description of Artificial Sequence: Synthetic peptide
  Seed: FSMELPSFGVS
FVMELPSFGVR

SEQ ID NO: 153908 - protein, 11 aa, Artificial Sequence
  Description of Artificial Sequence: Synthetic peptide
  Seed: FSMELPSFGVS
FVMELPSFGVS

SEQ ID NO: 153909 - protein, 11 aa, Artificial Sequence
  Description of Artificial Sequence: Synthetic peptide
  Seed: FSMELPSFGVS
FVMELPSFGVT

SEQ ID NO: 153910 - protein, 11 aa, Artificial Sequence
  Description of Artificial Sequence: Synthetic peptide
  Seed: FSMELPSFGVS
FVMELPSFGVV

SEQ ID NO: 153911 - protein, 11 aa, Artificial Sequence
  Description of Artificial Sequence: Synthetic peptide
  Seed: FSMELPSFGVS
FVMELPSFGVW

SEQ ID NO: 153912 - protein, 11 aa, Artificial Sequence
  Description of Artificial Sequence: Synthetic peptide
  Seed: FSMELPSFGVS
FVMELPSFGVY

SEQ ID NO: 153913 - protein, 10 aa, Artificial Sequence
  Description of Artificial Sequence: Synthetic peptide
  Seed: FSMELPSFGV
FVMELPSFGY

SEQ ID NO: 153914 - protein, 8 aa, Artificial Sequence
  Description of Artificial Sequence: Synthetic peptide
  Seed: FSMELPSF
FVMELPSL

SEQ ID NO: 153915 - protein, 8 aa, Artificial Sequence
  Description of Artificial Sequence: Synthetic peptide
  Seed: FSMELPSF
FVMELPSM

SEQ ID NO: 153916 - protein, 8 aa, Artificial Sequence
  Description of Artificial Sequence: Synthetic peptide
  Seed: FSMELPSF
FVMELPSW

SEQ ID NO: 153917 - protein, 8 aa, Artificial Sequence
  Description of Artificial Sequence: Synthetic peptide
  Seed: FSMELPSF
FVMELPSY

SEQ ID NO: 153918 - protein, 10 aa, Artificial Sequence
  Description of Artificial Sequence: Synthetic peptide
  Seed: FNMLSTVLGV
FVMLSTVLGA

SEQ ID NO: 153919 - protein, 10 aa, Artificial Sequence
  Description of Artificial Sequence: Synthetic peptide
  Seed: FNMLSTVLGV
FVMLSTVLGC

SEQ ID NO: 153920 - protein, 10 aa, Artificial Sequence
  Description of Artificial Sequence: Synthetic peptide
  Seed: FNMLSTVLGV
FVMLSTVLGF

SEQ ID NO: 153921 - protein, 10 aa, Artificial Sequence
  Description of Artificial Sequence: Synthetic peptide
  Seed: FNMLSTVLGV
FVMLSTVLGI

SEQ ID NO: 153922 - protein, 10 aa, Artificial Sequence
  Description of Artificial Sequence: Synthetic peptide
  Seed: FNMLSTVLGV
FVMLSTVLGL

SEQ ID NO: 153923 - protein, 10 aa, Artificial Sequence
  Description of Artificial Sequence: Synthetic peptide
  Seed: FNMLSTVLGV
FVMLSTVLGM

SEQ ID NO: 153924 - protein, 10 aa, Artificial Sequence
  Description of Artificial Sequence: Synthetic peptide
  Seed: FNMLSTVLGV
FVMLSTVLGS

SEQ ID NO: 153925 - protein, 10 aa, Artificial Sequence
  Description of Artificial Sequence: Synthetic peptide
  Seed: FNMLSTVLGV
FVMLSTVLGT

SEQ ID NO: 153926 - protein, 10 aa, Artificial Sequence
  Description of Artificial Sequence: Synthetic peptide
  Seed: FNMLSTVLGV
FVMLSTVLGV

SEQ ID NO: 153927 - protein, 11 aa, Artificial Sequence
  Description of Artificial Sequence: Synthetic peptide
  Seed: FNMLSTVLGVS
FVMLSTVLGVA

SEQ ID NO: 153928 - protein, 11 aa, Artificial Sequence
  Description of Artificial Sequence: Synthetic peptide
  Seed: FNMLSTVLGVS
FVMLSTVLGVC

SEQ ID NO: 153929 - protein, 11 aa, Artificial Sequence
  Description of Artificial Sequence: Synthetic peptide
  Seed: FNMLSTVLGVS
FVMLSTVLGVD

SEQ ID NO: 153930 - protein, 11 aa, Artificial Sequence
  Description of Artificial Sequence: Synthetic peptide
  Seed: FNMLSTVLGVS
FVMLSTVLGVE

SEQ ID NO: 153931 - protein, 11 aa, Artificial Sequence
  Description of Artificial Sequence: Synthetic peptide
  Seed: FNMLSTVLGVS
FVMLSTVLGVF

SEQ ID NO: 153932 - protein, 11 aa, Artificial Sequence
  Description of Artificial Sequence: Synthetic peptide
  Seed: FNMLSTVLGVS
FVMLSTVLGVG

SEQ ID NO: 153933 - protein, 11 aa, Artificial Sequence
  Description of Artificial Sequence: Synthetic peptide
  Seed: FNMLSTVLGVS
FVMLSTVLGVH

SEQ ID NO: 153934 - protein, 11 aa, Artificial Sequence
  Description of Artificial Sequence: Synthetic peptide
  Seed: FNMLSTVLGVS
FVMLSTVLGVI

SEQ ID NO: 153935 - protein, 11 aa, Artificial Sequence
  Description of Artificial Sequence: Synthetic peptide
  Seed: FNMLSTVLGVS
FVMLSTVLGVK

SEQ ID NO: 153936 - protein, 11 aa, Artificial Sequence
  Description of Artificial Sequence: Synthetic peptide
  Seed: FNMLSTVLGVS
FVMLSTVLGVL

SEQ ID NO: 153937 - protein, 11 aa, Artificial Sequence
  Description of Artificial Sequence: Synthetic peptide
  Seed: FNMLSTVLGVS
FVMLSTVLGVM

SEQ ID NO: 153938 - protein, 11 aa, Artificial Sequence
  Description of Artificial Sequence: Synthetic peptide
  Seed: FNMLSTVLGVS
FVMLSTVLGVN

SEQ ID NO: 153939 - protein, 11 aa, Artificial Sequence
  Description of Artificial Sequence: Synthetic peptide
  Seed: FNMLSTVLGVS
FVMLSTVLGVP

SEQ ID NO: 153940 - protein, 11 aa, Artificial Sequence
  Description of Artificial Sequence: Synthetic peptide
  Seed: FNMLSTVLGVS
FVMLSTVLGVQ

SEQ ID NO: 153941 - protein, 11 aa, Artificial Sequence
  Description of Artificial Sequence: Synthetic peptide
  Seed: FNMLSTVLGVS
FVMLSTVLGVR

SEQ ID NO: 153942 - protein, 11 aa, Artificial Sequence
  Description of Artificial Sequence: Synthetic peptide
  Seed: FNMLSTVLGVS
FVMLSTVLGVS

SEQ ID NO: 153943 - protein, 11 aa, Artificial Sequence
  Description of Artificial Sequence: Synthetic peptide
  Seed: FNMLSTVLGVS
FVMLSTVLGVT

SEQ ID NO: 153944 - protein, 11 aa, Artificial Sequence
  Description of Artificial Sequence: Synthetic peptide
  Seed: FNMLSTVLGVS
FVMLSTVLGVV

SEQ ID NO: 153945 - protein, 11 aa, Artificial Sequence
  Description of Artificial Sequence: Synthetic peptide
  Seed: FNMLSTVLGVS
FVMLSTVLGVW

SEQ ID NO: 153946 - protein, 11 aa, Artificial Sequence
  Description of Artificial Sequence: Synthetic peptide
  Seed: FNMLSTVLGVS
FVMLSTVLGVY

SEQ ID NO: 153947 - protein, 10 aa, Artificial Sequence
  Description of Artificial Sequence: Synthetic peptide
  Seed: FSNKMARLGK
FVNKMARLGK

SEQ ID NO: 153948 - protein, 10 aa, Artificial Sequence
  Description of Artificial Sequence: Synthetic peptide
  Seed: FSNKMARLGK
FVNKMARLGR

SEQ ID NO: 153949 - protein, 10 aa, Artificial Sequence
  Description of Artificial Sequence: Synthetic peptide
  Seed: FSNKMARLGK
FVNKMARLGY

SEQ ID NO: 153950 - protein, 8 aa, Artificial Sequence
  Description of Artificial Sequence: Synthetic peptide
  Seed: FFPSSSYR
FVPSSSYR

SEQ ID NO: 153951 - protein, 9 aa, Artificial Sequence
  Description of Artificial Sequence: Synthetic peptide
  Seed: FFPSSSYRR
FVPSSSYRK

SEQ ID NO: 153952 - protein, 9 aa, Artificial Sequence
  Description of Artificial Sequence: Synthetic peptide
  Seed: FFPSSSYRR
FVPSSSYRR

SEQ ID NO: 153953 - protein, 8 aa, Artificial Sequence
  Description of Artificial Sequence: Synthetic peptide
  Seed: FTSFFYRY
FVSFFYRY

SEQ ID NO: 153954 - protein, 10 aa, Artificial Sequence
  Description of Artificial Sequence: Synthetic peptide
  Seed: FTSFFYRYGF
FVSFFYRYGA

SEQ ID NO: 153955 - protein, 10 aa, Artificial Sequence
  Description of Artificial Sequence: Synthetic peptide
  Seed: FTSFFYRYGF
FVSFFYRYGF

SEQ ID NO: 153956 - protein, 10 aa, Artificial Sequence
  Description of Artificial Sequence: Synthetic peptide
  Seed: FTSFFYRYGF
FVSFFYRYGI

SEQ ID NO: 153957 - protein, 10 aa, Artificial Sequence
  Description of Artificial Sequence: Synthetic peptide
  Seed: FTSFFYRYGF
FVSFFYRYGK

SEQ ID NO: 153958 - protein, 10 aa, Artificial Sequence
  Description of Artificial Sequence: Synthetic peptide
  Seed: FTSFFYRYGF
FVSFFYRYGL

SEQ ID NO: 153959 - protein, 10 aa, Artificial Sequence
  Description of Artificial Sequence: Synthetic peptide
  Seed: FTSFFYRYGF
FVSFFYRYGM

SEQ ID NO: 153960 - protein, 10 aa, Artificial Sequence
  Description of Artificial Sequence: Synthetic peptide
  Seed: FTSFFYRYGF
FVSFFYRYGR

SEQ ID NO: 153961 - protein, 10 aa, Artificial Sequence
  Description of Artificial Sequence: Synthetic peptide
  Seed: FTSFFYRYGF
FVSFFYRYGT

SEQ ID NO: 153962 - protein, 10 aa, Artificial Sequence
  Description of Artificial Sequence: Synthetic peptide
  Seed: FTSFFYRYGF
FVSFFYRYGV

SEQ ID NO: 153963 - protein, 10 aa, Artificial Sequence
  Description of Artificial Sequence: Synthetic peptide
  Seed: FTSFFYRYGF
FVSFFYRYGW

SEQ ID NO: 153964 - protein, 10 aa, Artificial Sequence
  Description of Artificial Sequence: Synthetic peptide
  Seed: FTSFFYRYGF
FVSFFYRYGY

SEQ ID NO: 153965 - protein, 10 aa, Artificial Sequence
  Description of Artificial Sequence: Synthetic peptide
  Seed: FPSSSYRRPV
FVSSSYRRPF

SEQ ID NO: 153966 - protein, 10 aa, Artificial Sequence
  Description of Artificial Sequence: Synthetic peptide
  Seed: FPSSSYRRPV
FVSSSYRRPI

SEQ ID NO: 153967 - protein, 10 aa, Artificial Sequence
  Description of Artificial Sequence: Synthetic peptide
  Seed: FPSSSYRRPV
FVSSSYRRPL

SEQ ID NO: 153968 - protein, 10 aa, Artificial Sequence
  Description of Artificial Sequence: Synthetic peptide
  Seed: FPSSSYRRPV
FVSSSYRRPM

SEQ ID NO: 153969 - protein, 10 aa, Artificial Sequence
  Description of Artificial Sequence: Synthetic peptide
  Seed: FPSSSYRRPV
FVSSSYRRPV

SEQ ID NO: 153970 - protein, 10 aa, Artificial Sequence
  Description of Artificial Sequence: Synthetic peptide
  Seed: FPSSSYRRPV
FVSSSYRRPY

SEQ ID NO: 153971 - protein, 9 aa, Artificial Sequence
  Description of Artificial Sequence: Synthetic peptide
  Seed: FPYTGDPPY
FVYTGDPPA

SEQ ID NO: 153972 - protein, 9 aa, Artificial Sequence
  Description of Artificial Sequence: Synthetic peptide
  Seed: FPYTGDPPY
FVYTGDPPC

SEQ ID NO: 153973 - protein, 9 aa, Artificial Sequence
  Description of Artificial Sequence: Synthetic peptide
  Seed: FPYTGDPPY
FVYTGDPPF

SEQ ID NO: 153974 - protein, 9 aa, Artificial Sequence
  Description of Artificial Sequence: Synthetic peptide
  Seed: FPYTGDPPY
FVYTGDPPH

SEQ ID NO: 153975 - protein, 9 aa, Artificial Sequence
  Description of Artificial Sequence: Synthetic peptide
  Seed: FPYTGDPPY
FVYTGDPPI

SEQ ID NO: 153976 - protein, 9 aa, Artificial Sequence
  Description of Artificial Sequence: Synthetic peptide
  Seed: FPYTGDPPY
FVYTGDPPL

SEQ ID NO: 153977 - protein, 9 aa, Artificial Sequence
  Description of Artificial Sequence: Synthetic peptide
  Seed: FPYTGDPPY
FVYTGDPPM

SEQ ID NO: 153978 - protein, 9 aa, Artificial Sequence
  Description of Artificial Sequence: Synthetic peptide
  Seed: FPYTGDPPY
FVYTGDPPT

SEQ ID NO: 153979 - protein, 9 aa, Artificial Sequence
  Description of Artificial Sequence: Synthetic peptide
  Seed: FPYTGDPPY
FVYTGDPPV

SEQ ID NO: 153980 - protein, 9 aa, Artificial Sequence
  Description of Artificial Sequence: Synthetic peptide
  Seed: FPYTGDPPY
FVYTGDPPW

SEQ ID NO: 153981 - protein, 9 aa, Artificial Sequence
  Description of Artificial Sequence: Synthetic peptide
  Seed: FPYTGDPPY
FVYTGDPPY

SEQ ID NO: 153982 - protein, 10 aa, Artificial Sequence
  Description of Artificial Sequence: Synthetic peptide
  Seed: FPYTGDPPYS
FVYTGDPPYA

SEQ ID NO: 153983 - protein, 10 aa, Artificial Sequence
  Description of Artificial Sequence: Synthetic peptide
  Seed: FPYTGDPPYS
FVYTGDPPYC

SEQ ID NO: 153984 - protein, 10 aa, Artificial Sequence
  Description of Artificial Sequence: Synthetic peptide
  Seed: FPYTGDPPYS
FVYTGDPPYD

SEQ ID NO: 153985 - protein, 10 aa, Artificial Sequence
  Description of Artificial Sequence: Synthetic peptide
  Seed: FPYTGDPPYS
FVYTGDPPYE

SEQ ID NO: 153986 - protein, 10 aa, Artificial Sequence
  Description of Artificial Sequence: Synthetic peptide
  Seed: FPYTGDPPYS
FVYTGDPPYF

SEQ ID NO: 153987 - protein, 10 aa, Artificial Sequence
  Description of Artificial Sequence: Synthetic peptide
  Seed: FPYTGDPPYS
FVYTGDPPYG

SEQ ID NO: 153988 - protein, 10 aa, Artificial Sequence
  Description of Artificial Sequence: Synthetic peptide
  Seed: FPYTGDPPYS
FVYTGDPPYH

SEQ ID NO: 153989 - protein, 10 aa, Artificial Sequence
  Description of Artificial Sequence: Synthetic peptide
  Seed: FPYTGDPPYS
FVYTGDPPYI

SEQ ID NO: 153990 - protein, 10 aa, Artificial Sequence
  Description of Artificial Sequence: Synthetic peptide
  Seed: FPYTGDPPYS
FVYTGDPPYK

SEQ ID NO: 153991 - protein, 10 aa, Artificial Sequence
  Description of Artificial Sequence: Synthetic peptide
  Seed: FPYTGDPPYS
FVYTGDPPYL

SEQ ID NO: 153992 - protein, 10 aa, Artificial Sequence
  Description of Artificial Sequence: Synthetic peptide
  Seed: FPYTGDPPYS
FVYTGDPPYM

SEQ ID NO: 153993 - protein, 10 aa, Artificial Sequence
  Description of Artificial Sequence: Synthetic peptide
  Seed: FPYTGDPPYS
FVYTGDPPYN

SEQ ID NO: 153994 - protein, 10 aa, Artificial Sequence
  Description of Artificial Sequence: Synthetic peptide
  Seed: FPYTGDPPYS
FVYTGDPPYP

SEQ ID NO: 153995 - protein, 10 aa, Artificial Sequence
  Description of Artificial Sequence: Synthetic peptide
  Seed: FPYTGDPPYS
FVYTGDPPYQ

SEQ ID NO: 153996 - protein, 10 aa, Artificial Sequence
  Description of Artificial Sequence: Synthetic peptide
  Seed: FPYTGDPPYS
FVYTGDPPYR

SEQ ID NO: 153997 - protein, 10 aa, Artificial Sequence
  Description of Artificial Sequence: Synthetic peptide
  Seed: FPYTGDPPYS
FVYTGDPPYS

SEQ ID NO: 153998 - protein, 11 aa, Artificial Sequence
  Description of Artificial Sequence: Synthetic peptide
  Seed: FPYTGDPPYSH
FVYTGDPPYSF

SEQ ID NO: 153999 - protein, 11 aa, Artificial Sequence
  Description of Artificial Sequence: Synthetic peptide
  Seed: FPYTGDPPYSH
FVYTGDPPYSM

SEQ ID NO: 154000 - protein, 11 aa, Artificial Sequence
  Description of Artificial Sequence: Synthetic peptide
  Seed: FPYTGDPPYSH
FVYTGDPPYSY

SEQ ID NO: 154001 - protein, 10 aa, Artificial Sequence
  Description of Artificial Sequence: Synthetic peptide
  Seed: FPYTGDPPYS
FVYTGDPPYT

SEQ ID NO: 154002 - protein, 10 aa, Artificial Sequence
  Description of Artificial Sequence: Synthetic peptide
  Seed: FPYTGDPPYS
FVYTGDPPYV

SEQ ID NO: 154003 - protein, 10 aa, Artificial Sequence
  Description of Artificial Sequence: Synthetic peptide
  Seed: FPYTGDPPYS
FVYTGDPPYW

SEQ ID NO: 154004 - protein, 10 aa, Artificial Sequence
  Description of Artificial Sequence: Synthetic peptide
  Seed: FPYTGDPPYS
FVYTGDPPYY

SEQ ID NO: 154005 - protein, 10 aa, Artificial Sequence
  Description of Artificial Sequence: Synthetic peptide
  Seed: FSMELPSFGV
FWMELPSFGA

SEQ ID NO: 154006 - protein, 10 aa, Artificial Sequence
  Description of Artificial Sequence: Synthetic peptide
  Seed: FSMELPSFGV
FWMELPSFGI

SEQ ID NO: 154007 - protein, 10 aa, Artificial Sequence
  Description of Artificial Sequence: Synthetic peptide
  Seed: FSMELPSFGV
FWMELPSFGL

SEQ ID NO: 154008 - protein, 10 aa, Artificial Sequence
  Description of Artificial Sequence: Synthetic peptide
  Seed: FSMELPSFGV
FWMELPSFGM

SEQ ID NO: 154009 - protein, 10 aa, Artificial Sequence
  Description of Artificial Sequence: Synthetic peptide
  Seed: FSMELPSFGV
FWMELPSFGV

SEQ ID NO: 154010 - protein, 10 aa, Artificial Sequence
  Description of Artificial Sequence: Synthetic peptide
  Seed: FNMLSTVLGV
FWMLSTVLGA

SEQ ID NO: 154011 - protein, 10 aa, Artificial Sequence
  Description of Artificial Sequence: Synthetic peptide
  Seed: FNMLSTVLGV
FWMLSTVLGC

SEQ ID NO: 154012 - protein, 10 aa, Artificial Sequence
  Description of Artificial Sequence: Synthetic peptide
  Seed: FNMLSTVLGV
FWMLSTVLGF

SEQ ID NO: 154013 - protein, 10 aa, Artificial Sequence
  Description of Artificial Sequence: Synthetic peptide
  Seed: FNMLSTVLGV
FWMLSTVLGI

SEQ ID NO: 154014 - protein, 10 aa, Artificial Sequence
  Description of Artificial Sequence: Synthetic peptide
  Seed: FNMLSTVLGV
FWMLSTVLGL

SEQ ID NO: 154015 - protein, 10 aa, Artificial Sequence
  Description of Artificial Sequence: Synthetic peptide
  Seed: FNMLSTVLGV
FWMLSTVLGM

SEQ ID NO: 154016 - protein, 10 aa, Artificial Sequence
  Description of Artificial Sequence: Synthetic peptide
  Seed: FNMLSTVLGV
FWMLSTVLGS

SEQ ID NO: 154017 - protein, 10 aa, Artificial Sequence
  Description of Artificial Sequence: Synthetic peptide
  Seed: FNMLSTVLGV
FWMLSTVLGT

SEQ ID NO: 154018 - protein, 10 aa, Artificial Sequence
  Description of Artificial Sequence: Synthetic peptide
  Seed: FNMLSTVLGV
FWMLSTVLGV

SEQ ID NO: 154019 - protein, 11 aa, Artificial Sequence
  Description of Artificial Sequence: Synthetic peptide
  Seed: FNMLSTVLGVS
FWMLSTVLGVA

SEQ ID NO: 154020 - protein, 11 aa, Artificial Sequence
  Description of Artificial Sequence: Synthetic peptide
  Seed: FNMLSTVLGVS
FWMLSTVLGVC

SEQ ID NO: 154021 - protein, 11 aa, Artificial Sequence
  Description of Artificial Sequence: Synthetic peptide
  Seed: FNMLSTVLGVS
FWMLSTVLGVD

SEQ ID NO: 154022 - protein, 11 aa, Artificial Sequence
  Description of Artificial Sequence: Synthetic peptide
  Seed: FNMLSTVLGVS
FWMLSTVLGVE

SEQ ID NO: 154023 - protein, 11 aa, Artificial Sequence
  Description of Artificial Sequence: Synthetic peptide
  Seed: FNMLSTVLGVS
FWMLSTVLGVF

SEQ ID NO: 154024 - protein, 11 aa, Artificial Sequence
  Description of Artificial Sequence: Synthetic peptide
  Seed: FNMLSTVLGVS
FWMLSTVLGVG

SEQ ID NO: 154025 - protein, 11 aa, Artificial Sequence
  Description of Artificial Sequence: Synthetic peptide
  Seed: FNMLSTVLGVS
FWMLSTVLGVH

SEQ ID NO: 154026 - protein, 11 aa, Artificial Sequence
  Description of Artificial Sequence: Synthetic peptide
  Seed: FNMLSTVLGVS
FWMLSTVLGVI

SEQ ID NO: 154027 - protein, 11 aa, Artificial Sequence
  Description of Artificial Sequence: Synthetic peptide
  Seed: FNMLSTVLGVS
FWMLSTVLGVK

SEQ ID NO: 154028 - protein, 11 aa, Artificial Sequence
  Description of Artificial Sequence: Synthetic peptide
  Seed: FNMLSTVLGVS
FWMLSTVLGVL

SEQ ID NO: 154029 - protein, 11 aa, Artificial Sequence
  Description of Artificial Sequence: Synthetic peptide
  Seed: FNMLSTVLGVS
FWMLSTVLGVM

SEQ ID NO: 154030 - protein, 11 aa, Artificial Sequence
  Description of Artificial Sequence: Synthetic peptide
  Seed: FNMLSTVLGVS
FWMLSTVLGVN

SEQ ID NO: 154031 - protein, 11 aa, Artificial Sequence
  Description of Artificial Sequence: Synthetic peptide
  Seed: FNMLSTVLGVS
FWMLSTVLGVP

SEQ ID NO: 154032 - protein, 11 aa, Artificial Sequence
  Description of Artificial Sequence: Synthetic peptide
  Seed: FNMLSTVLGVS
FWMLSTVLGVQ

SEQ ID NO: 154033 - protein, 11 aa, Artificial Sequence
  Description of Artificial Sequence: Synthetic peptide
  Seed: FNMLSTVLGVS
FWMLSTVLGVR

SEQ ID NO: 154034 - protein, 11 aa, Artificial Sequence
  Description of Artificial Sequence: Synthetic peptide
  Seed: FNMLSTVLGVS
FWMLSTVLGVS

SEQ ID NO: 154035 - protein, 11 aa, Artificial Sequence
  Description of Artificial Sequence: Synthetic peptide
  Seed: FNMLSTVLGVS
FWMLSTVLGVT

SEQ ID NO: 154036 - protein, 11 aa, Artificial Sequence
  Description of Artificial Sequence: Synthetic peptide
  Seed: FNMLSTVLGVS
FWMLSTVLGVV

SEQ ID NO: 154037 - protein, 11 aa, Artificial Sequence
  Description of Artificial Sequence: Synthetic peptide
  Seed: FNMLSTVLGVS
FWMLSTVLGVW

SEQ ID NO: 154038 - protein, 11 aa, Artificial Sequence
  Description of Artificial Sequence: Synthetic peptide
  Seed: FNMLSTVLGVS
FWMLSTVLGVY

SEQ ID NO: 154039 - protein, 10 aa, Artificial Sequence
  Description of Artificial Sequence: Synthetic peptide
  Seed: FSNKMARLGK
FWNKMARLGK

SEQ ID NO: 154040 - protein, 10 aa, Artificial Sequence
  Description of Artificial Sequence: Synthetic peptide
  Seed: FSNKMARLGK
FWNKMARLGR

SEQ ID NO: 154041 - protein, 8 aa, Artificial Sequence
  Description of Artificial Sequence: Synthetic peptide
  Seed: FFPSSSYR
FWPSSSYR

SEQ ID NO: 154042 - protein, 9 aa, Artificial Sequence
  Description of Artificial Sequence: Synthetic peptide
  Seed: FFPSSSYRR
FWPSSSYRR

SEQ ID NO: 154043 - protein, 11 aa, Artificial Sequence
  Description of Artificial Sequence: Synthetic peptide
  Seed: FFPSSSYRRPV
FWPSSSYRRPF

SEQ ID NO: 154044 - protein, 11 aa, Artificial Sequence
  Description of Artificial Sequence: Synthetic peptide
  Seed: FFPSSSYRRPV
FWPSSSYRRPL

SEQ ID NO: 154045 - protein, 11 aa, Artificial Sequence
  Description of Artificial Sequence: Synthetic peptide
  Seed: FFPSSSYRRPV
FWPSSSYRRPM

SEQ ID NO: 154046 - protein, 11 aa, Artificial Sequence
  Description of Artificial Sequence: Synthetic peptide
  Seed: FFPSSSYRRPV
FWPSSSYRRPY

SEQ ID NO: 154047 - protein, 8 aa, Artificial Sequence
  Description of Artificial Sequence: Synthetic peptide
  Seed: FTSFFYRY
FWSFFYRY

SEQ ID NO: 154048 - protein, 10 aa, Artificial Sequence
  Description of Artificial Sequence: Synthetic peptide
  Seed: FTSFFYRYGF
FWSFFYRYGA

SEQ ID NO: 154049 - protein, 10 aa, Artificial Sequence
  Description of Artificial Sequence: Synthetic peptide
  Seed: FTSFFYRYGF
FWSFFYRYGF

SEQ ID NO: 154050 - protein, 10 aa, Artificial Sequence
  Description of Artificial Sequence: Synthetic peptide
  Seed: FTSFFYRYGF
FWSFFYRYGI

SEQ ID NO: 154051 - protein, 10 aa, Artificial Sequence
  Description of Artificial Sequence: Synthetic peptide
  Seed: FTSFFYRYGF
FWSFFYRYGL

SEQ ID NO: 154052 - protein, 10 aa, Artificial Sequence
  Description of Artificial Sequence: Synthetic peptide
  Seed: FTSFFYRYGF
FWSFFYRYGM

SEQ ID NO: 154053 - protein, 10 aa, Artificial Sequence
  Description of Artificial Sequence: Synthetic peptide
  Seed: FTSFFYRYGF
FWSFFYRYGR

SEQ ID NO: 154054 - protein, 10 aa, Artificial Sequence
  Description of Artificial Sequence: Synthetic peptide
  Seed: FTSFFYRYGF
FWSFFYRYGT

SEQ ID NO: 154055 - protein, 10 aa, Artificial Sequence
  Description of Artificial Sequence: Synthetic peptide
  Seed: FTSFFYRYGF
FWSFFYRYGV

SEQ ID NO: 154056 - protein, 10 aa, Artificial Sequence
  Description of Artificial Sequence: Synthetic peptide
  Seed: FTSFFYRYGF
FWSFFYRYGW

SEQ ID NO: 154057 - protein, 10 aa, Artificial Sequence
  Description of Artificial Sequence: Synthetic peptide
  Seed: FTSFFYRYGF
FWSFFYRYGY

SEQ ID NO: 154058 - protein, 10 aa, Artificial Sequence
  Description of Artificial Sequence: Synthetic peptide
  Seed: FPSSSYRRPV
FWSSSYRRPF

SEQ ID NO: 154059 - protein, 10 aa, Artificial Sequence
  Description of Artificial Sequence: Synthetic peptide
  Seed: FPSSSYRRPV
FWSSSYRRPI

SEQ ID NO: 154060 - protein, 10 aa, Artificial Sequence
  Description of Artificial Sequence: Synthetic peptide
  Seed: FPSSSYRRPV
FWSSSYRRPL

SEQ ID NO: 154061 - protein, 10 aa, Artificial Sequence
  Description of Artificial Sequence: Synthetic peptide
  Seed: FPSSSYRRPV
FWSSSYRRPM

SEQ ID NO: 154062 - protein, 10 aa, Artificial Sequence
  Description of Artificial Sequence: Synthetic peptide
  Seed: FPSSSYRRPV
FWSSSYRRPV

SEQ ID NO: 154063 - protein, 10 aa, Artificial Sequence
  Description of Artificial Sequence: Synthetic peptide
  Seed: FPSSSYRRPV
FWSSSYRRPY

SEQ ID NO: 154064 - protein, 9 aa, Artificial Sequence
  Description of Artificial Sequence: Synthetic peptide
  Seed: FPYTGDPPY
FWYTGDPPA

SEQ ID NO: 154065 - protein, 9 aa, Artificial Sequence
  Description of Artificial Sequence: Synthetic peptide
  Seed: FPYTGDPPY
FWYTGDPPF

SEQ ID NO: 154066 - protein, 9 aa, Artificial Sequence
  Description of Artificial Sequence: Synthetic peptide
  Seed: FPYTGDPPY
FWYTGDPPH

SEQ ID NO: 154067 - protein, 9 aa, Artificial Sequence
  Description of Artificial Sequence: Synthetic peptide
  Seed: FPYTGDPPY
FWYTGDPPI

SEQ ID NO: 154068 - protein, 9 aa, Artificial Sequence
  Description of Artificial Sequence: Synthetic peptide
  Seed: FPYTGDPPY
FWYTGDPPL

SEQ ID NO: 154069 - protein, 9 aa, Artificial Sequence
  Description of Artificial Sequence: Synthetic peptide
  Seed: FPYTGDPPY
FWYTGDPPM

SEQ ID NO: 154070 - protein, 9 aa, Artificial Sequence
  Description of Artificial Sequence: Synthetic peptide
  Seed: FPYTGDPPY
FWYTGDPPV

SEQ ID NO: 154071 - protein, 9 aa, Artificial Sequence
  Description of Artificial Sequence: Synthetic peptide
  Seed: FPYTGDPPY
FWYTGDPPW

SEQ ID NO: 154072 - protein, 9 aa, Artificial Sequence
  Description of Artificial Sequence: Synthetic peptide
  Seed: FPYTGDPPY
FWYTGDPPY

SEQ ID NO: 154073 - protein, 10 aa, Artificial Sequence
  Description of Artificial Sequence: Synthetic peptide
  Seed: FSMELPSFGV
FYMELPSFGA

SEQ ID NO: 154074 - protein, 10 aa, Artificial Sequence
  Description of Artificial Sequence: Synthetic peptide
  Seed: FSMELPSFGV
FYMELPSFGI

SEQ ID NO: 154075 - protein, 10 aa, Artificial Sequence
  Description of Artificial Sequence: Synthetic peptide
  Seed: FSMELPSFGV
FYMELPSFGL

SEQ ID NO: 154076 - protein, 10 aa, Artificial Sequence
  Description of Artificial Sequence: Synthetic peptide
  Seed: FSMELPSFGV
FYMELPSFGM

SEQ ID NO: 154077 - protein, 10 aa, Artificial Sequence
  Description of Artificial Sequence: Synthetic peptide
  Seed: FSMELPSFGV
FYMELPSFGV

SEQ ID NO: 154078 - protein, 11 aa, Artificial Sequence
  Description of Artificial Sequence: Synthetic peptide
  Seed: FSMELPSFGVS
FYMELPSFGVV

SEQ ID NO: 154079 - protein, 10 aa, Artificial Sequence
  Description of Artificial Sequence: Synthetic peptide
  Seed: FNMLSTVLGV
FYMLSTVLGA

SEQ ID NO: 154080 - protein, 10 aa, Artificial Sequence
  Description of Artificial Sequence: Synthetic peptide
  Seed: FNMLSTVLGV
FYMLSTVLGC

SEQ ID NO: 154081 - protein, 10 aa, Artificial Sequence
  Description of Artificial Sequence: Synthetic peptide
  Seed: FNMLSTVLGV
FYMLSTVLGF

SEQ ID NO: 154082 - protein, 10 aa, Artificial Sequence
  Description of Artificial Sequence: Synthetic peptide
  Seed: FNMLSTVLGV
FYMLSTVLGI

SEQ ID NO: 154083 - protein, 10 aa, Artificial Sequence
  Description of Artificial Sequence: Synthetic peptide
  Seed: FNMLSTVLGV
FYMLSTVLGL

SEQ ID NO: 154084 - protein, 10 aa, Artificial Sequence
  Description of Artificial Sequence: Synthetic peptide
  Seed: FNMLSTVLGV
FYMLSTVLGM

SEQ ID NO: 154085 - protein, 10 aa, Artificial Sequence
  Description of Artificial Sequence: Synthetic peptide
  Seed: FNMLSTVLGV
FYMLSTVLGS

SEQ ID NO: 154086 - protein, 10 aa, Artificial Sequence
  Description of Artificial Sequence: Synthetic peptide
  Seed: FNMLSTVLGV
FYMLSTVLGT

SEQ ID NO: 154087 - protein, 10 aa, Artificial Sequence
  Description of Artificial Sequence: Synthetic peptide
  Seed: FNMLSTVLGV
FYMLSTVLGV

SEQ ID NO: 154088 - protein, 11 aa, Artificial Sequence
  Description of Artificial Sequence: Synthetic peptide
  Seed: FNMLSTVLGVS
FYMLSTVLGVA

SEQ ID NO: 154089 - protein, 11 aa, Artificial Sequence
  Description of Artificial Sequence: Synthetic peptide
  Seed: FNMLSTVLGVS
FYMLSTVLGVC

SEQ ID NO: 154090 - protein, 11 aa, Artificial Sequence
  Description of Artificial Sequence: Synthetic peptide
  Seed: FNMLSTVLGVS
FYMLSTVLGVD

SEQ ID NO: 154091 - protein, 11 aa, Artificial Sequence
  Description of Artificial Sequence: Synthetic peptide
  Seed: FNMLSTVLGVS
FYMLSTVLGVE

SEQ ID NO: 154092 - protein, 11 aa, Artificial Sequence
  Description of Artificial Sequence: Synthetic peptide
  Seed: FNMLSTVLGVS
FYMLSTVLGVF

SEQ ID NO: 154093 - protein, 11 aa, Artificial Sequence
  Description of Artificial Sequence: Synthetic peptide
  Seed: FNMLSTVLGVS
FYMLSTVLGVG

SEQ ID NO: 154094 - protein, 11 aa, Artificial Sequence
  Description of Artificial Sequence: Synthetic peptide
  Seed: FNMLSTVLGVS
FYMLSTVLGVH

SEQ ID NO: 154095 - protein, 11 aa, Artificial Sequence
  Description of Artificial Sequence: Synthetic peptide
  Seed: FNMLSTVLGVS
FYMLSTVLGVI

SEQ ID NO: 154096 - protein, 11 aa, Artificial Sequence
  Description of Artificial Sequence: Synthetic peptide
  Seed: FNMLSTVLGVS
FYMLSTVLGVK

SEQ ID NO: 154097 - protein, 11 aa, Artificial Sequence
  Description of Artificial Sequence: Synthetic peptide
  Seed: FNMLSTVLGVS
FYMLSTVLGVL

SEQ ID NO: 154098 - protein, 11 aa, Artificial Sequence
  Description of Artificial Sequence: Synthetic peptide
  Seed: FNMLSTVLGVS
FYMLSTVLGVM

SEQ ID NO: 154099 - protein, 11 aa, Artificial Sequence
  Description of Artificial Sequence: Synthetic peptide
  Seed: FNMLSTVLGVS
FYMLSTVLGVN

SEQ ID NO: 154100 - protein, 11 aa, Artificial Sequence
  Description of Artificial Sequence: Synthetic peptide
  Seed: FNMLSTVLGVS
FYMLSTVLGVP

SEQ ID NO: 154101 - protein, 11 aa, Artificial Sequence
  Description of Artificial Sequence: Synthetic peptide
  Seed: FNMLSTVLGVS
FYMLSTVLGVQ

SEQ ID NO: 154102 - protein, 11 aa, Artificial Sequence
  Description of Artificial Sequence: Synthetic peptide
  Seed: FNMLSTVLGVS
FYMLSTVLGVR

SEQ ID NO: 154103 - protein, 11 aa, Artificial Sequence
  Description of Artificial Sequence: Synthetic peptide
  Seed: FNMLSTVLGVS
FYMLSTVLGVS

SEQ ID NO: 154104 - protein, 11 aa, Artificial Sequence
  Description of Artificial Sequence: Synthetic peptide
  Seed: FNMLSTVLGVS
FYMLSTVLGVT

SEQ ID NO: 154105 - protein, 11 aa, Artificial Sequence
  Description of Artificial Sequence: Synthetic peptide
  Seed: FNMLSTVLGVS
FYMLSTVLGVV

SEQ ID NO: 154106 - protein, 11 aa, Artificial Sequence
  Description of Artificial Sequence: Synthetic peptide
  Seed: FNMLSTVLGVS
FYMLSTVLGVW

SEQ ID NO: 154107 - protein, 11 aa, Artificial Sequence
  Description of Artificial Sequence: Synthetic peptide
  Seed: FNMLSTVLGVS
FYMLSTVLGVY

SEQ ID NO: 154108 - protein, 10 aa, Artificial Sequence
  Description of Artificial Sequence: Synthetic peptide
  Seed: FSNKMARLGK
FYNKMARLGK

SEQ ID NO: 154109 - protein, 10 aa, Artificial Sequence
  Description of Artificial Sequence: Synthetic peptide
  Seed: FSNKMARLGK
FYNKMARLGR

SEQ ID NO: 154110 - protein, 8 aa, Artificial Sequence
  Description of Artificial Sequence: Synthetic peptide
  Seed: FFPSSSYR
FYPSSSYR

SEQ ID NO: 154111 - protein, 9 aa, Artificial Sequence
  Description of Artificial Sequence: Synthetic peptide
  Seed: FFPSSSYRR
FYPSSSYRK

SEQ ID NO: 154112 - protein, 9 aa, Artificial Sequence
  Description of Artificial Sequence: Synthetic peptide
  Seed: FFPSSSYRR
FYPSSSYRR

SEQ ID NO: 154113 - protein, 11 aa, Artificial Sequence
  Description of Artificial Sequence: Synthetic peptide
  Seed: FFPSSSYRRPV
FYPSSSYRRPF

SEQ ID NO: 154114 - protein, 11 aa, Artificial Sequence
  Description of Artificial Sequence: Synthetic peptide
  Seed: FFPSSSYRRPV
FYPSSSYRRPI

SEQ ID NO: 154115 - protein, 11 aa, Artificial Sequence
  Description of Artificial Sequence: Synthetic peptide
  Seed: FFPSSSYRRPV
FYPSSSYRRPL

SEQ ID NO: 154116 - protein, 11 aa, Artificial Sequence
  Description of Artificial Sequence: Synthetic peptide
  Seed: FFPSSSYRRPV
FYPSSSYRRPM

SEQ ID NO: 154117 - protein, 11 aa, Artificial Sequence
  Description of Artificial Sequence: Synthetic peptide
  Seed: FFPSSSYRRPV
FYPSSSYRRPV

SEQ ID NO: 154118 - protein, 11 aa, Artificial Sequence
  Description of Artificial Sequence: Synthetic peptide
  Seed: FFPSSSYRRPV
FYPSSSYRRPW

SEQ ID NO: 154119 - protein, 11 aa, Artificial Sequence
  Description of Artificial Sequence: Synthetic peptide
  Seed: FFPSSSYRRPV
FYPSSSYRRPY

SEQ ID NO: 154120 - protein, 8 aa, Artificial Sequence
  Description of Artificial Sequence: Synthetic peptide
  Seed: FTSFFYRY
FYSFFYRY

SEQ ID NO: 154121 - protein, 10 aa, Artificial Sequence
  Description of Artificial Sequence: Synthetic peptide
  Seed: FTSFFYRYGF
FYSFFYRYGA

SEQ ID NO: 154122 - protein, 10 aa, Artificial Sequence
  Description of Artificial Sequence: Synthetic peptide
  Seed: FTSFFYRYGF
FYSFFYRYGF

SEQ ID NO: 154123 - protein, 10 aa, Artificial Sequence
  Description of Artificial Sequence: Synthetic peptide
  Seed: FTSFFYRYGF
FYSFFYRYGI

SEQ ID NO: 154124 - protein, 10 aa, Artificial Sequence
  Description of Artificial Sequence: Synthetic peptide
  Seed: FTSFFYRYGF
FYSFFYRYGL

SEQ ID NO: 154125 - protein, 10 aa, Artificial Sequence
  Description of Artificial Sequence: Synthetic peptide
  Seed: FTSFFYRYGF
FYSFFYRYGM

SEQ ID NO: 154126 - protein, 10 aa, Artificial Sequence
  Description of Artificial Sequence: Synthetic peptide
  Seed: FTSFFYRYGF
FYSFFYRYGR

SEQ ID NO: 154127 - protein, 10 aa, Artificial Sequence
  Description of Artificial Sequence: Synthetic peptide
  Seed: FTSFFYRYGF
FYSFFYRYGT

SEQ ID NO: 154128 - protein, 10 aa, Artificial Sequence
  Description of Artificial Sequence: Synthetic peptide
  Seed: FTSFFYRYGF
FYSFFYRYGV

SEQ ID NO: 154129 - protein, 10 aa, Artificial Sequence
  Description of Artificial Sequence: Synthetic peptide
  Seed: FTSFFYRYGF
FYSFFYRYGW

SEQ ID NO: 154130 - protein, 10 aa, Artificial Sequence
  Description of Artificial Sequence: Synthetic peptide
  Seed: FTSFFYRYGF
FYSFFYRYGY

SEQ ID NO: 154131 - protein, 10 aa, Artificial Sequence
  Description of Artificial Sequence: Synthetic peptide
  Seed: FPSSSYRRPV
FYSSSYRRPF

SEQ ID NO: 154132 - protein, 10 aa, Artificial Sequence
  Description of Artificial Sequence: Synthetic peptide
  Seed: FPSSSYRRPV
FYSSSYRRPI

SEQ ID NO: 154133 - protein, 10 aa, Artificial Sequence
  Description of Artificial Sequence: Synthetic peptide
  Seed: FPSSSYRRPV
FYSSSYRRPL

SEQ ID NO: 154134 - protein, 10 aa, Artificial Sequence
  Description of Artificial Sequence: Synthetic peptide
  Seed: FPSSSYRRPV
FYSSSYRRPM

SEQ ID NO: 154135 - protein, 10 aa, Artificial Sequence
  Description of Artificial Sequence: Synthetic peptide
  Seed: FPSSSYRRPV
FYSSSYRRPV

SEQ ID NO: 154136 - protein, 10 aa, Artificial Sequence
  Description of Artificial Sequence: Synthetic peptide
  Seed: FPSSSYRRPV
FYSSSYRRPY

SEQ ID NO: 154137 - protein, 9 aa, Artificial Sequence
  Description of Artificial Sequence: Synthetic peptide
  Seed: FPYTGDPPY
FYYTGDPPA

SEQ ID NO: 154138 - protein, 9 aa, Artificial Sequence
  Description of Artificial Sequence: Synthetic peptide
  Seed: FPYTGDPPY
FYYTGDPPC

SEQ ID NO: 154139 - protein, 9 aa, Artificial Sequence
  Description of Artificial Sequence: Synthetic peptide
  Seed: FPYTGDPPY
FYYTGDPPE

SEQ ID NO: 154140 - protein, 9 aa, Artificial Sequence
  Description of Artificial Sequence: Synthetic peptide
  Seed: FPYTGDPPY
FYYTGDPPF

SEQ ID NO: 154141 - protein, 9 aa, Artificial Sequence
  Description of Artificial Sequence: Synthetic peptide
  Seed: FPYTGDPPY
FYYTGDPPG

SEQ ID NO: 154142 - protein, 9 aa, Artificial Sequence
  Description of Artificial Sequence: Synthetic peptide
  Seed: FPYTGDPPY
FYYTGDPPH

SEQ ID NO: 154143 - protein, 9 aa, Artificial Sequence
  Description of Artificial Sequence: Synthetic peptide
  Seed: FPYTGDPPY
FYYTGDPPI

SEQ ID NO: 154144 - protein, 9 aa, Artificial Sequence
  Description of Artificial Sequence: Synthetic peptide
  Seed: FPYTGDPPY
FYYTGDPPK

SEQ ID NO: 154145 - protein, 9 aa, Artificial Sequence
  Description of Artificial Sequence: Synthetic peptide
  Seed: FPYTGDPPY
FYYTGDPPL

SEQ ID NO: 154146 - protein, 9 aa, Artificial Sequence
  Description of Artificial Sequence: Synthetic peptide
  Seed: FPYTGDPPY
FYYTGDPPM

SEQ ID NO: 154147 - protein, 9 aa, Artificial Sequence
  Description of Artificial Sequence: Synthetic peptide
  Seed: FPYTGDPPY
FYYTGDPPQ

SEQ ID NO: 154148 - protein, 9 aa, Artificial Sequence
  Description of Artificial Sequence: Synthetic peptide
  Seed: FPYTGDPPY
FYYTGDPPR

SEQ ID NO: 154149 - protein, 9 aa, Artificial Sequence
  Description of Artificial Sequence: Synthetic peptide
  Seed: FPYTGDPPY
FYYTGDPPS

SEQ ID NO: 154150 - protein, 9 aa, Artificial Sequence
  Description of Artificial Sequence: Synthetic peptide
  Seed: FPYTGDPPY
FYYTGDPPT

SEQ ID NO: 154151 - protein, 9 aa, Artificial Sequence
  Description of Artificial Sequence: Synthetic peptide
  Seed: FPYTGDPPY
FYYTGDPPV

SEQ ID NO: 154152 - protein, 9 aa, Artificial Sequence
  Description of Artificial Sequence: Synthetic peptide
  Seed: FPYTGDPPY
FYYTGDPPW

SEQ ID NO: 154153 - protein, 9 aa, Artificial Sequence
  Description of Artificial Sequence: Synthetic peptide
  Seed: FPYTGDPPY
FYYTGDPPY

SEQ ID NO: 154154 - protein, 10 aa, Artificial Sequence
  Description of Artificial Sequence: Synthetic peptide
  Seed: FPYTGDPPYS
FYYTGDPPYY

SEQ ID NO: 154155 - protein, 9 aa, Artificial Sequence
  Description of Artificial Sequence: Synthetic peptide
  Seed: GMFNMLSTV
GAFNMLSTA

SEQ ID NO: 154156 - protein, 9 aa, Artificial Sequence
  Description of Artificial Sequence: Synthetic peptide
  Seed: GMFNMLSTV
GAFNMLSTF

SEQ ID NO: 154157 - protein, 9 aa, Artificial Sequence
  Description of Artificial Sequence: Synthetic peptide
  Seed: GMFNMLSTV
GAFNMLSTH

SEQ ID NO: 154158 - protein, 9 aa, Artificial Sequence
  Description of Artificial Sequence: Synthetic peptide
  Seed: GMFNMLSTV
GAFNMLSTI

SEQ ID NO: 154159 - protein, 9 aa, Artificial Sequence
  Description of Artificial Sequence: Synthetic peptide
  Seed: GMFNMLSTV
GAFNMLSTL

SEQ ID NO: 154160 - protein, 9 aa, Artificial Sequence
  Description of Artificial Sequence: Synthetic peptide
  Seed: GMFNMLSTV
GAFNMLSTM

SEQ ID NO: 154161 - protein, 9 aa, Artificial Sequence
  Description of Artificial Sequence: Synthetic peptide
  Seed: GMFNMLSTV
GAFNMLSTV

SEQ ID NO: 154162 - protein, 10 aa, Artificial Sequence
  Description of Artificial Sequence: Synthetic peptide
  Seed: GMFNMLSTVL
GAFNMLSTVF

SEQ ID NO: 154163 - protein, 10 aa, Artificial Sequence
  Description of Artificial Sequence: Synthetic peptide
  Seed: GMFNMLSTVL
GAFNMLSTVM

SEQ ID NO: 154164 - protein, 10 aa, Artificial Sequence
  Description of Artificial Sequence: Synthetic peptide
  Seed: GMFNMLSTVL
GAFNMLSTVV

SEQ ID NO: 154165 - protein, 10 aa, Artificial Sequence
  Description of Artificial Sequence: Synthetic peptide
  Seed: GMFNMLSTVL
GAFNMLSTVY

SEQ ID NO: 154166 - protein, 9 aa, Artificial Sequence
  Description of Artificial Sequence: Synthetic peptide
  Seed: GMFNMLSTV
GAFNMLSTW

SEQ ID NO: 154167 - protein, 9 aa, Artificial Sequence
  Description of Artificial Sequence: Synthetic peptide
  Seed: GMFNMLSTV
GAFNMLSTY

SEQ ID NO: 154168 - protein, 9 aa, Artificial Sequence
  Description of Artificial Sequence: Synthetic peptide
  Seed: GMMMGMFNM
GAMMGMFNA

SEQ ID NO: 154169 - protein, 9 aa, Artificial Sequence
  Description of Artificial Sequence: Synthetic peptide
  Seed: GMMMGMFNM
GAMMGMFNF

SEQ ID NO: 154170 - protein, 9 aa, Artificial Sequence
  Description of Artificial Sequence: Synthetic peptide
  Seed: GMMMGMFNM
GAMMGMFNI

SEQ ID NO: 154171 - protein, 9 aa, Artificial Sequence
  Description of Artificial Sequence: Synthetic peptide
  Seed: GMMMGMFNM
GAMMGMFNL

SEQ ID NO: 154172 - protein, 9 aa, Artificial Sequence
  Description of Artificial Sequence: Synthetic peptide
  Seed: GMMMGMFNM
GAMMGMFNM

SEQ ID NO: 154173 - protein, 10 aa, Artificial Sequence
  Description of Artificial Sequence: Synthetic peptide
  Seed: GMMMGMFNML
GAMMGMFNMA

SEQ ID NO: 154174 - protein, 10 aa, Artificial Sequence
  Description of Artificial Sequence: Synthetic peptide
  Seed: GMMMGMFNML
GAMMGMFNMI

SEQ ID NO: 154175 - protein, 10 aa, Artificial Sequence
  Description of Artificial Sequence: Synthetic peptide
  Seed: GMMMGMFNML
GAMMGMFNML

SEQ ID NO: 154176 - protein, 10 aa, Artificial Sequence
  Description of Artificial Sequence: Synthetic peptide
  Seed: GMMMGMFNML
GAMMGMFNMM

SEQ ID NO: 154177 - protein, 10 aa, Artificial Sequence
  Description of Artificial Sequence: Synthetic peptide
  Seed: GMMMGMFNML
GAMMGMFNMT

SEQ ID NO: 154178 - protein, 10 aa, Artificial Sequence
  Description of Artificial Sequence: Synthetic peptide
  Seed: GMMMGMFNML
GAMMGMFNMV

SEQ ID NO: 154179 - protein, 9 aa, Artificial Sequence
  Description of Artificial Sequence: Synthetic peptide
  Seed: GMMMGMFNM
GAMMGMFNT

SEQ ID NO: 154180 - protein, 9 aa, Artificial Sequence
  Description of Artificial Sequence: Synthetic peptide
  Seed: GMMMGMFNM
GAMMGMFNV

SEQ ID NO: 154181 - protein, 9 aa, Artificial Sequence
  Description of Artificial Sequence: Synthetic peptide
  Seed: GMMMGMFNM
GAMMGMFNY

SEQ ID NO: 154182 - protein, 9 aa, Artificial Sequence
  Description of Artificial Sequence: Synthetic peptide
  Seed: GMFNMLSTV
GCFNMLSTF

SEQ ID NO: 154183 - protein, 10 aa, Artificial Sequence
  Description of Artificial Sequence: Synthetic peptide
  Seed: GMFNMLSTVL
GCFNMLSTVY

SEQ ID NO: 154184 - protein, 9 aa, Artificial Sequence
  Description of Artificial Sequence: Synthetic peptide
  Seed: GMFNMLSTV
GCFNMLSTY

SEQ ID NO: 154185 - protein, 10 aa, Artificial Sequence
  Description of Artificial Sequence: Synthetic peptide
  Seed: GMMMGMFNML
GCMMGMFNMA

SEQ ID NO: 154186 - protein, 10 aa, Artificial Sequence
  Description of Artificial Sequence: Synthetic peptide
  Seed: GMMMGMFNML
GCMMGMFNMI

SEQ ID NO: 154187 - protein, 10 aa, Artificial Sequence
  Description of Artificial Sequence: Synthetic peptide
  Seed: GMMMGMFNML
GCMMGMFNML

SEQ ID NO: 154188 - protein, 10 aa, Artificial Sequence
  Description of Artificial Sequence: Synthetic peptide
  Seed: GMMMGMFNML
GCMMGMFNMM

SEQ ID NO: 154189 - protein, 10 aa, Artificial Sequence
  Description of Artificial Sequence: Synthetic peptide
  Seed: GMMMGMFNML
GCMMGMFNMT

SEQ ID NO: 154190 - protein, 10 aa, Artificial Sequence
  Description of Artificial Sequence: Synthetic peptide
  Seed: GMMMGMFNML
GCMMGMFNMV

SEQ ID NO: 154191 - protein, 9 aa, Artificial Sequence
  Description of Artificial Sequence: Synthetic peptide
  Seed: GMMMGMFNM
GCMMGMFNV

SEQ ID NO: 154192 - protein, 9 aa, Artificial Sequence
  Description of Artificial Sequence: Synthetic peptide
  Seed: GMMMGMFNM
GCMMGMFNY

SEQ ID NO: 154193 - protein, 9 aa, Artificial Sequence
  Description of Artificial Sequence: Synthetic peptide
  Seed: GMFNMLSTV
GDFNMLSTI

SEQ ID NO: 154194 - protein, 9 aa, Artificial Sequence
  Description of Artificial Sequence: Synthetic peptide
  Seed: GMMMGMFNM
GDMMGMFNI

SEQ ID NO: 154195 - protein, 10 aa, Artificial Sequence
  Description of Artificial Sequence: Synthetic peptide
  Seed: GMMMGMFNML
GDMMGMFNMA

SEQ ID NO: 154196 - protein, 10 aa, Artificial Sequence
  Description of Artificial Sequence: Synthetic peptide
  Seed: GMMMGMFNML
GDMMGMFNMI

SEQ ID NO: 154197 - protein, 10 aa, Artificial Sequence
  Description of Artificial Sequence: Synthetic peptide
  Seed: GMMMGMFNML
GDMMGMFNML

SEQ ID NO: 154198 - protein, 10 aa, Artificial Sequence
  Description of Artificial Sequence: Synthetic peptide
  Seed: GMMMGMFNML
GDMMGMFNMM

SEQ ID NO: 154199 - protein, 10 aa, Artificial Sequence
  Description of Artificial Sequence: Synthetic peptide
  Seed: GMMMGMFNML
GDMMGMFNMT

SEQ ID NO: 154200 - protein, 10 aa, Artificial Sequence
  Description of Artificial Sequence: Synthetic peptide
  Seed: GMMMGMFNML
GDMMGMFNMV

SEQ ID NO: 154201 - protein, 9 aa, Artificial Sequence
  Description of Artificial Sequence: Synthetic peptide
  Seed: GMMMGMFNM
GDMMGMFNY

SEQ ID NO: 154202 - protein, 9 aa, Artificial Sequence
  Description of Artificial Sequence: Synthetic peptide
  Seed: GMFNMLSTV
GEFNMLSTF

SEQ ID NO: 154203 - protein, 9 aa, Artificial Sequence
  Description of Artificial Sequence: Synthetic peptide
  Seed: GMFNMLSTV
GEFNMLSTH

SEQ ID NO: 154204 - protein, 9 aa, Artificial Sequence
  Description of Artificial Sequence: Synthetic peptide
  Seed: GMFNMLSTV
GEFNMLSTI

SEQ ID NO: 154205 - protein, 9 aa, Artificial Sequence
  Description of Artificial Sequence: Synthetic peptide
  Seed: GMFNMLSTV
GEFNMLSTL

SEQ ID NO: 154206 - protein, 9 aa, Artificial Sequence
  Description of Artificial Sequence: Synthetic peptide
  Seed: GMFNMLSTV
GEFNMLSTM

SEQ ID NO: 154207 - protein, 9 aa, Artificial Sequence
  Description of Artificial Sequence: Synthetic peptide
  Seed: GMFNMLSTV
GEFNMLSTV

SEQ ID NO: 154208 - protein, 10 aa, Artificial Sequence
  Description of Artificial Sequence: Synthetic peptide
  Seed: GMFNMLSTVL
GEFNMLSTVF

SEQ ID NO: 154209 - protein, 10 aa, Artificial Sequence
  Description of Artificial Sequence: Synthetic peptide
  Seed: GMFNMLSTVL
GEFNMLSTVM

SEQ ID NO: 154210 - protein, 10 aa, Artificial Sequence
  Description of Artificial Sequence: Synthetic peptide
  Seed: GMFNMLSTVL
GEFNMLSTVY

SEQ ID NO: 154211 - protein, 9 aa, Artificial Sequence
  Description of Artificial Sequence: Synthetic peptide
  Seed: GMFNMLSTV
GEFNMLSTY

SEQ ID NO: 154212 - protein, 9 aa, Artificial Sequence
  Description of Artificial Sequence: Synthetic peptide
  Seed: GMMMGMFNM
GEMMGMFNF

SEQ ID NO: 154213 - protein, 9 aa, Artificial Sequence
  Description of Artificial Sequence: Synthetic peptide
  Seed: GMMMGMFNM
GEMMGMFNI

SEQ ID NO: 154214 - protein, 9 aa, Artificial Sequence
  Description of Artificial Sequence: Synthetic peptide
  Seed: GMMMGMFNM
GEMMGMFNL

SEQ ID NO: 154215 - protein, 9 aa, Artificial Sequence
  Description of Artificial Sequence: Synthetic peptide
  Seed: GMMMGMFNM
GEMMGMFNM

SEQ ID NO: 154216 - protein, 10 aa, Artificial Sequence
  Description of Artificial Sequence: Synthetic peptide
  Seed: GMMMGMFNML
GEMMGMFNMA

SEQ ID NO: 154217 - protein, 10 aa, Artificial Sequence
  Description of Artificial Sequence: Synthetic peptide
  Seed: GMMMGMFNML
GEMMGMFNMI

SEQ ID NO: 154218 - protein, 10 aa, Artificial Sequence
  Description of Artificial Sequence: Synthetic peptide
  Seed: GMMMGMFNML
GEMMGMFNML

SEQ ID NO: 154219 - protein, 10 aa, Artificial Sequence
  Description of Artificial Sequence: Synthetic peptide
  Seed: GMMMGMFNML
GEMMGMFNMM

SEQ ID NO: 154220 - protein, 10 aa, Artificial Sequence
  Description of Artificial Sequence: Synthetic peptide
  Seed: GMMMGMFNML
GEMMGMFNMT

SEQ ID NO: 154221 - protein, 10 aa, Artificial Sequence
  Description of Artificial Sequence: Synthetic peptide
  Seed: GMMMGMFNML
GEMMGMFNMV

SEQ ID NO: 154222 - protein, 9 aa, Artificial Sequence
  Description of Artificial Sequence: Synthetic peptide
  Seed: GMMMGMFNM
GEMMGMFNV

SEQ ID NO: 154223 - protein, 9 aa, Artificial Sequence
  Description of Artificial Sequence: Synthetic peptide
  Seed: GMMMGMFNM
GEMMGMFNW

SEQ ID NO: 154224 - protein, 9 aa, Artificial Sequence
  Description of Artificial Sequence: Synthetic peptide
  Seed: GMMMGMFNM
GEMMGMFNY

SEQ ID NO: 154225 - protein, 9 aa, Artificial Sequence
  Description of Artificial Sequence: Synthetic peptide
  Seed: GMFNMLSTV
GFFNMLSTF

SEQ ID NO: 154226 - protein, 9 aa, Artificial Sequence
  Description of Artificial Sequence: Synthetic peptide
  Seed: GMFNMLSTV
GFFNMLSTM

SEQ ID NO: 154227 - protein, 9 aa, Artificial Sequence
  Description of Artificial Sequence: Synthetic peptide
  Seed: GMFNMLSTV
GFFNMLSTV

SEQ ID NO: 154228 - protein, 10 aa, Artificial Sequence
  Description of Artificial Sequence: Synthetic peptide
  Seed: GMFNMLSTVL
GFFNMLSTVF

SEQ ID NO: 154229 - protein, 10 aa, Artificial Sequence
  Description of Artificial Sequence: Synthetic peptide
  Seed: GMFNMLSTVL
GFFNMLSTVY

SEQ ID NO: 154230 - protein, 9 aa, Artificial Sequence
  Description of Artificial Sequence: Synthetic peptide
  Seed: GMFNMLSTV
GFFNMLSTY

SEQ ID NO: 154231 - protein, 9 aa, Artificial Sequence
  Description of Artificial Sequence: Synthetic peptide
  Seed: GMMMGMFNM
GFMMGMFNF

SEQ ID NO: 154232 - protein, 9 aa, Artificial Sequence
  Description of Artificial Sequence: Synthetic peptide
  Seed: GMMMGMFNM
GFMMGMFNI

SEQ ID NO: 154233 - protein, 10 aa, Artificial Sequence
  Description of Artificial Sequence: Synthetic peptide
  Seed: GMMMGMFNML
GFMMGMFNMA

SEQ ID NO: 154234 - protein, 10 aa, Artificial Sequence
  Description of Artificial Sequence: Synthetic peptide
  Seed: GMMMGMFNML
GFMMGMFNMI

SEQ ID NO: 154235 - protein, 10 aa, Artificial Sequence
  Description of Artificial Sequence: Synthetic peptide
  Seed: GMMMGMFNML
GFMMGMFNML

SEQ ID NO: 154236 - protein, 10 aa, Artificial Sequence
  Description of Artificial Sequence: Synthetic peptide
  Seed: GMMMGMFNML
GFMMGMFNMM

SEQ ID NO: 154237 - protein, 10 aa, Artificial Sequence
  Description of Artificial Sequence: Synthetic peptide
  Seed: GMMMGMFNML
GFMMGMFNMT

SEQ ID NO: 154238 - protein, 10 aa, Artificial Sequence
  Description of Artificial Sequence: Synthetic peptide
  Seed: GMMMGMFNML
GFMMGMFNMV

SEQ ID NO: 154239 - protein, 9 aa, Artificial Sequence
  Description of Artificial Sequence: Synthetic peptide
  Seed: GMMMGMFNM
GFMMGMFNV

SEQ ID NO: 154240 - protein, 9 aa, Artificial Sequence
  Description of Artificial Sequence: Synthetic peptide
  Seed: GMMMGMFNM
GFMMGMFNY

SEQ ID NO: 154241 - protein, 10 aa, Artificial Sequence
  Description of Artificial Sequence: Synthetic peptide
  Seed: GLQSSDDFAL
GFQSSDDFAL

SEQ ID NO: 154242 - protein, 11 aa, Artificial Sequence
  Description of Artificial Sequence: Synthetic peptide
  Seed: GLQSSDDFALI
GFQSSDDFALL

SEQ ID NO: 154243 - protein, 11 aa, Artificial Sequence
  Description of Artificial Sequence: Synthetic peptide
  Seed: GLQSSDDFALI
GFQSSDDFALV

SEQ ID NO: 154244 - protein, 10 aa, Artificial Sequence
  Description of Artificial Sequence: Synthetic peptide
  Seed: GLQSSDDFAL
GFQSSDDFAV

SEQ ID NO: 154245 - protein, 9 aa, Artificial Sequence
  Description of Artificial Sequence: Synthetic peptide
  Seed: GMFNMLSTV
GGFNMLSTF

SEQ ID NO: 154246 - protein, 9 aa, Artificial Sequence
  Description of Artificial Sequence: Synthetic peptide
  Seed: GMFNMLSTV
GGFNMLSTM

SEQ ID NO: 154247 - protein, 9 aa, Artificial Sequence
  Description of Artificial Sequence: Synthetic peptide
  Seed: GMFNMLSTV
GGFNMLSTV

SEQ ID NO: 154248 - protein, 10 aa, Artificial Sequence
  Description of Artificial Sequence: Synthetic peptide
  Seed: GMFNMLSTVL
GGFNMLSTVF

SEQ ID NO: 154249 - protein, 10 aa, Artificial Sequence
  Description of Artificial Sequence: Synthetic peptide
  Seed: GMFNMLSTVL
GGFNMLSTVY

SEQ ID NO: 154250 - protein, 9 aa, Artificial Sequence
  Description of Artificial Sequence: Synthetic peptide
  Seed: GMFNMLSTV
GGFNMLSTY

SEQ ID NO: 154251 - protein, 10 aa, Artificial Sequence
  Description of Artificial Sequence: Synthetic peptide
  Seed: GMMMGMFNML
GGMMGMFNMA

SEQ ID NO: 154252 - protein, 10 aa, Artificial Sequence
  Description of Artificial Sequence: Synthetic peptide
  Seed: GMMMGMFNML
GGMMGMFNMI

SEQ ID NO: 154253 - protein, 10 aa, Artificial Sequence
  Description of Artificial Sequence: Synthetic peptide
  Seed: GMMMGMFNML
GGMMGMFNML

SEQ ID NO: 154254 - protein, 10 aa, Artificial Sequence
  Description of Artificial Sequence: Synthetic peptide
  Seed: GMMMGMFNML
GGMMGMFNMM

SEQ ID NO: 154255 - protein, 10 aa, Artificial Sequence
  Description of Artificial Sequence: Synthetic peptide
  Seed: GMMMGMFNML
GGMMGMFNMT

SEQ ID NO: 154256 - protein, 10 aa, Artificial Sequence
  Description of Artificial Sequence: Synthetic peptide
  Seed: GMMMGMFNML
GGMMGMFNMV

SEQ ID NO: 154257 - protein, 9 aa, Artificial Sequence
  Description of Artificial Sequence: Synthetic peptide
  Seed: GMMMGMFNM
GGMMGMFNV

SEQ ID NO: 154258 - protein, 9 aa, Artificial Sequence
  Description of Artificial Sequence: Synthetic peptide
  Seed: GMMMGMFNM
GGMMGMFNY

SEQ ID NO: 154259 - protein, 9 aa, Artificial Sequence
  Description of Artificial Sequence: Synthetic peptide
  Seed: GMFNMLSTV
GHFNMLSTF

SEQ ID NO: 154260 - protein, 9 aa, Artificial Sequence
  Description of Artificial Sequence: Synthetic peptide
  Seed: GMFNMLSTV
GHFNMLSTH

SEQ ID NO: 154261 - protein, 9 aa, Artificial Sequence
  Description of Artificial Sequence: Synthetic peptide
  Seed: GMFNMLSTV
GHFNMLSTI

SEQ ID NO: 154262 - protein, 9 aa, Artificial Sequence
  Description of Artificial Sequence: Synthetic peptide
  Seed: GMFNMLSTV
GHFNMLSTL

SEQ ID NO: 154263 - protein, 9 aa, Artificial Sequence
  Description of Artificial Sequence: Synthetic peptide
  Seed: GMFNMLSTV
GHFNMLSTM

SEQ ID NO: 154264 - protein, 10 aa, Artificial Sequence
  Description of Artificial Sequence: Synthetic peptide
  Seed: GMFNMLSTVL
GHFNMLSTVF

SEQ ID NO: 154265 - protein, 10 aa, Artificial Sequence
  Description of Artificial Sequence: Synthetic peptide
  Seed: GMFNMLSTVL
GHFNMLSTVL

SEQ ID NO: 154266 - protein, 10 aa, Artificial Sequence
  Description of Artificial Sequence: Synthetic peptide
  Seed: GMFNMLSTVL
GHFNMLSTVM

SEQ ID NO: 154267 - protein, 10 aa, Artificial Sequence
  Description of Artificial Sequence: Synthetic peptide
  Seed: GMFNMLSTVL
GHFNMLSTVY

SEQ ID NO: 154268 - protein, 9 aa, Artificial Sequence
  Description of Artificial Sequence: Synthetic peptide
  Seed: GMFNMLSTV
GHFNMLSTY

SEQ ID NO: 154269 - protein, 9 aa, Artificial Sequence
  Description of Artificial Sequence: Synthetic peptide
  Seed: GMMMGMFNM
GHMMGMFNF

SEQ ID NO: 154270 - protein, 9 aa, Artificial Sequence
  Description of Artificial Sequence: Synthetic peptide
  Seed: GMMMGMFNM
GHMMGMFNM

SEQ ID NO: 154271 - protein, 10 aa, Artificial Sequence
  Description of Artificial Sequence: Synthetic peptide
  Seed: GMMMGMFNML
GHMMGMFNMA

SEQ ID NO: 154272 - protein, 10 aa, Artificial Sequence
  Description of Artificial Sequence: Synthetic peptide
  Seed: GMMMGMFNML
GHMMGMFNMI

SEQ ID NO: 154273 - protein, 10 aa, Artificial Sequence
  Description of Artificial Sequence: Synthetic peptide
  Seed: GMMMGMFNML
GHMMGMFNML

SEQ ID NO: 154274 - protein, 10 aa, Artificial Sequence
  Description of Artificial Sequence: Synthetic peptide
  Seed: GMMMGMFNML
GHMMGMFNMM

SEQ ID NO: 154275 - protein, 10 aa, Artificial Sequence
  Description of Artificial Sequence: Synthetic peptide
  Seed: GMMMGMFNML
GHMMGMFNMT

SEQ ID NO: 154276 - protein, 10 aa, Artificial Sequence
  Description of Artificial Sequence: Synthetic peptide
  Seed: GMMMGMFNML
GHMMGMFNMV

SEQ ID NO: 154277 - protein, 9 aa, Artificial Sequence
  Description of Artificial Sequence: Synthetic peptide
  Seed: GMMMGMFNM
GHMMGMFNY

SEQ ID NO: 154278 - protein, 9 aa, Artificial Sequence
  Description of Artificial Sequence: Synthetic peptide
  Seed: GMFNMLSTV
GIFNMLSTA

SEQ ID NO: 154279 - protein, 9 aa, Artificial Sequence
  Description of Artificial Sequence: Synthetic peptide
  Seed: GMFNMLSTV
GIFNMLSTC

SEQ ID NO: 154280 - protein, 9 aa, Artificial Sequence
  Description of Artificial Sequence: Synthetic peptide
  Seed: GMFNMLSTV
GIFNMLSTF

SEQ ID NO: 154281 - protein, 9 aa, Artificial Sequence
  Description of Artificial Sequence: Synthetic peptide
  Seed: GMFNMLSTV
GIFNMLSTI

SEQ ID NO: 154282 - protein, 9 aa, Artificial Sequence
  Description of Artificial Sequence: Synthetic peptide
  Seed: GMFNMLSTV
GIFNMLSTL

SEQ ID NO: 154283 - protein, 9 aa, Artificial Sequence
  Description of Artificial Sequence: Synthetic peptide
  Seed: GMFNMLSTV
GIFNMLSTM

SEQ ID NO: 154284 - protein, 9 aa, Artificial Sequence
  Description of Artificial Sequence: Synthetic peptide
  Seed: GMFNMLSTV
GIFNMLSTS

SEQ ID NO: 154285 - protein, 9 aa, Artificial Sequence
  Description of Artificial Sequence: Synthetic peptide
  Seed: GMFNMLSTV
GIFNMLSTT

SEQ ID NO: 154286 - protein, 9 aa, Artificial Sequence
  Description of Artificial Sequence: Synthetic peptide
  Seed: GMFNMLSTV
GIFNMLSTV

SEQ ID NO: 154287 - protein, 10 aa, Artificial Sequence
  Description of Artificial Sequence: Synthetic peptide
  Seed: GMFNMLSTVL
GIFNMLSTVA

SEQ ID NO: 154288 - protein, 10 aa, Artificial Sequence
  Description of Artificial Sequence: Synthetic peptide
  Seed: GMFNMLSTVL
GIFNMLSTVC

SEQ ID NO: 154289 - protein, 10 aa, Artificial Sequence
  Description of Artificial Sequence: Synthetic peptide
  Seed: GMFNMLSTVL
GIFNMLSTVD

SEQ ID NO: 154290 - protein, 10 aa, Artificial Sequence
  Description of Artificial Sequence: Synthetic peptide
  Seed: GMFNMLSTVL
GIFNMLSTVE

SEQ ID NO: 154291 - protein, 10 aa, Artificial Sequence
  Description of Artificial Sequence: Synthetic peptide
  Seed: GMFNMLSTVL
GIFNMLSTVF

SEQ ID NO: 154292 - protein, 10 aa, Artificial Sequence
  Description of Artificial Sequence: Synthetic peptide
  Seed: GMFNMLSTVL
GIFNMLSTVG

SEQ ID NO: 154293 - protein, 10 aa, Artificial Sequence
  Description of Artificial Sequence: Synthetic peptide
  Seed: GMFNMLSTVL
GIFNMLSTVH

SEQ ID NO: 154294 - protein, 10 aa, Artificial Sequence
  Description of Artificial Sequence: Synthetic peptide
  Seed: GMFNMLSTVL
GIFNMLSTVI

SEQ ID NO: 154295 - protein, 10 aa, Artificial Sequence
  Description of Artificial Sequence: Synthetic peptide
  Seed: GMFNMLSTVL
GIFNMLSTVK

SEQ ID NO: 154296 - protein, 10 aa, Artificial Sequence
  Description of Artificial Sequence: Synthetic peptide
  Seed: GMFNMLSTVL
GIFNMLSTVL

SEQ ID NO: 154297 - protein, 10 aa, Artificial Sequence
  Description of Artificial Sequence: Synthetic peptide
  Seed: GMFNMLSTVL
GIFNMLSTVM

SEQ ID NO: 154298 - protein, 10 aa, Artificial Sequence
  Description of Artificial Sequence: Synthetic peptide
  Seed: GMFNMLSTVL
GIFNMLSTVN

SEQ ID NO: 154299 - protein, 10 aa, Artificial Sequence
  Description of Artificial Sequence: Synthetic peptide
  Seed: GMFNMLSTVL
GIFNMLSTVP

SEQ ID NO: 154300 - protein, 10 aa, Artificial Sequence
  Description of Artificial Sequence: Synthetic peptide
  Seed: GMFNMLSTVL
GIFNMLSTVQ

SEQ ID NO: 154301 - protein, 10 aa, Artificial Sequence
  Description of Artificial Sequence: Synthetic peptide
  Seed: GMFNMLSTVL
GIFNMLSTVR

SEQ ID NO: 154302 - protein, 10 aa, Artificial Sequence
  Description of Artificial Sequence: Synthetic peptide
  Seed: GMFNMLSTVL
GIFNMLSTVS

SEQ ID NO: 154303 - protein, 10 aa, Artificial Sequence
  Description of Artificial Sequence: Synthetic peptide
  Seed: GMFNMLSTVL
GIFNMLSTVT

SEQ ID NO: 154304 - protein, 10 aa, Artificial Sequence
  Description of Artificial Sequence: Synthetic peptide
  Seed: GMFNMLSTVL
GIFNMLSTVV

SEQ ID NO: 154305 - protein, 10 aa, Artificial Sequence
  Description of Artificial Sequence: Synthetic peptide
  Seed: GMFNMLSTVL
GIFNMLSTVW

SEQ ID NO: 154306 - protein, 10 aa, Artificial Sequence
  Description of Artificial Sequence: Synthetic peptide
  Seed: GMFNMLSTVL
GIFNMLSTVY

SEQ ID NO: 154307 - protein, 9 aa, Artificial Sequence
  Description of Artificial Sequence: Synthetic peptide
  Seed: GMFNMLSTV
GIFNMLSTW

SEQ ID NO: 154308 - protein, 9 aa, Artificial Sequence
  Description of Artificial Sequence: Synthetic peptide
  Seed: GMFNMLSTV
GIFNMLSTY

SEQ ID NO: 154309 - protein, 9 aa, Artificial Sequence
  Description of Artificial Sequence: Synthetic peptide
  Seed: GMMMGMFNM
GIMMGMFNA

SEQ ID NO: 154310 - protein, 9 aa, Artificial Sequence
  Description of Artificial Sequence: Synthetic peptide
  Seed: GMMMGMFNM
GIMMGMFNF

SEQ ID NO: 154311 - protein, 9 aa, Artificial Sequence
  Description of Artificial Sequence: Synthetic peptide
  Seed: GMMMGMFNM
GIMMGMFNI

SEQ ID NO: 154312 - protein, 9 aa, Artificial Sequence
  Description of Artificial Sequence: Synthetic peptide
  Seed: GMMMGMFNM
GIMMGMFNL

SEQ ID NO: 154313 - protein, 9 aa, Artificial Sequence
  Description of Artificial Sequence: Synthetic peptide
  Seed: GMMMGMFNM
GIMMGMFNM

SEQ ID NO: 154314 - protein, 10 aa, Artificial Sequence
  Description of Artificial Sequence: Synthetic peptide
  Seed: GMMMGMFNML
GIMMGMFNMA

SEQ ID NO: 154315 - protein, 10 aa, Artificial Sequence
  Description of Artificial Sequence: Synthetic peptide
  Seed: GMMMGMFNML
GIMMGMFNMI

SEQ ID NO: 154316 - protein, 10 aa, Artificial Sequence
  Description of Artificial Sequence: Synthetic peptide
  Seed: GMMMGMFNML
GIMMGMFNML

SEQ ID NO: 154317 - protein, 10 aa, Artificial Sequence
  Description of Artificial Sequence: Synthetic peptide
  Seed: GMMMGMFNML
GIMMGMFNMM

SEQ ID NO: 154318 - protein, 10 aa, Artificial Sequence
  Description of Artificial Sequence: Synthetic peptide
  Seed: GMMMGMFNML
GIMMGMFNMT

SEQ ID NO: 154319 - protein, 10 aa, Artificial Sequence
  Description of Artificial Sequence: Synthetic peptide
  Seed: GMMMGMFNML
GIMMGMFNMV

SEQ ID NO: 154320 - protein, 9 aa, Artificial Sequence
  Description of Artificial Sequence: Synthetic peptide
  Seed: GMMMGMFNM
GIMMGMFNT

SEQ ID NO: 154321 - protein, 9 aa, Artificial Sequence
  Description of Artificial Sequence: Synthetic peptide
  Seed: GMMMGMFNM
GIMMGMFNV

SEQ ID NO: 154322 - protein, 9 aa, Artificial Sequence
  Description of Artificial Sequence: Synthetic peptide
  Seed: GMMMGMFNM
GIMMGMFNY

SEQ ID NO: 154323 - protein, 11 aa, Artificial Sequence
  Description of Artificial Sequence: Synthetic peptide
  Seed: GLQSSDDFALI
GIQSSDDFALL

SEQ ID NO: 154324 - protein, 11 aa, Artificial Sequence
  Description of Artificial Sequence: Synthetic peptide
  Seed: GLQSSDDFALI
GIQSSDDFALV

SEQ ID NO: 154325 - protein, 10 aa, Artificial Sequence
  Description of Artificial Sequence: Synthetic peptide
  Seed: GLQSSDDFAL
GIQSSDDFAV

SEQ ID NO: 154326 - protein, 9 aa, Artificial Sequence
  Description of Artificial Sequence: Synthetic peptide
  Seed: GMFNMLSTV
GKFNMLSTF

SEQ ID NO: 154327 - protein, 9 aa, Artificial Sequence
  Description of Artificial Sequence: Synthetic peptide
  Seed: GMFNMLSTV
GKFNMLSTH

SEQ ID NO: 154328 - protein, 9 aa, Artificial Sequence
  Description of Artificial Sequence: Synthetic peptide
  Seed: GMFNMLSTV
GKFNMLSTI

SEQ ID NO: 154329 - protein, 9 aa, Artificial Sequence
  Description of Artificial Sequence: Synthetic peptide
  Seed: GMFNMLSTV
GKFNMLSTL

SEQ ID NO: 154330 - protein, 9 aa, Artificial Sequence
  Description of Artificial Sequence: Synthetic peptide
  Seed: GMFNMLSTV
GKFNMLSTM

SEQ ID NO: 154331 - protein, 9 aa, Artificial Sequence
  Description of Artificial Sequence: Synthetic peptide
  Seed: GMFNMLSTV
GKFNMLSTV

SEQ ID NO: 154332 - protein, 10 aa, Artificial Sequence
  Description of Artificial Sequence: Synthetic peptide
  Seed: GMFNMLSTVL
GKFNMLSTVF

SEQ ID NO: 154333 - protein, 10 aa, Artificial Sequence
  Description of Artificial Sequence: Synthetic peptide
  Seed: GMFNMLSTVL
GKFNMLSTVI

SEQ ID NO: 154334 - protein, 10 aa, Artificial Sequence
  Description of Artificial Sequence: Synthetic peptide
  Seed: GMFNMLSTVL
GKFNMLSTVL

SEQ ID NO: 154335 - protein, 10 aa, Artificial Sequence
  Description of Artificial Sequence: Synthetic peptide
  Seed: GMFNMLSTVL
GKFNMLSTVM

SEQ ID NO: 154336 - protein, 10 aa, Artificial Sequence
  Description of Artificial Sequence: Synthetic peptide
  Seed: GMFNMLSTVL
GKFNMLSTVW

SEQ ID NO: 154337 - protein, 10 aa, Artificial Sequence
  Description of Artificial Sequence: Synthetic peptide
  Seed: GMFNMLSTVL
GKFNMLSTVY

SEQ ID NO: 154338 - protein, 9 aa, Artificial Sequence
  Description of Artificial Sequence: Synthetic peptide
  Seed: GMFNMLSTV
GKFNMLSTW

SEQ ID NO: 154339 - protein, 9 aa, Artificial Sequence
  Description of Artificial Sequence: Synthetic peptide
  Seed: GMFNMLSTV
GKFNMLSTY

SEQ ID NO: 154340 - protein, 9 aa, Artificial Sequence
  Description of Artificial Sequence: Synthetic peptide
  Seed: GMMMGMFNM
GKMMGMFNF

SEQ ID NO: 154341 - protein, 9 aa, Artificial Sequence
  Description of Artificial Sequence: Synthetic peptide
  Seed: GMMMGMFNM
GKMMGMFNI

SEQ ID NO: 154342 - protein, 9 aa, Artificial Sequence
  Description of Artificial Sequence: Synthetic peptide
  Seed: GMMMGMFNM
GKMMGMFNL

SEQ ID NO: 154343 - protein, 9 aa, Artificial Sequence
  Description of Artificial Sequence: Synthetic peptide
  Seed: GMMMGMFNM
GKMMGMFNM

SEQ ID NO: 154344 - protein, 10 aa, Artificial Sequence
  Description of Artificial Sequence: Synthetic peptide
  Seed: GMMMGMFNML
GKMMGMFNMA

SEQ ID NO: 154345 - protein, 10 aa, Artificial Sequence
  Description of Artificial Sequence: Synthetic peptide
  Seed: GMMMGMFNML
GKMMGMFNMI

SEQ ID NO: 154346 - protein, 10 aa, Artificial Sequence
  Description of Artificial Sequence: Synthetic peptide
  Seed: GMMMGMFNML
GKMMGMFNML

SEQ ID NO: 154347 - protein, 10 aa, Artificial Sequence
  Description of Artificial Sequence: Synthetic peptide
  Seed: GMMMGMFNML
GKMMGMFNMM

SEQ ID NO: 154348 - protein, 10 aa, Artificial Sequence
  Description of Artificial Sequence: Synthetic peptide
  Seed: GMMMGMFNML
GKMMGMFNMT

SEQ ID NO: 154349 - protein, 10 aa, Artificial Sequence
  Description of Artificial Sequence: Synthetic peptide
  Seed: GMMMGMFNML
GKMMGMFNMV

SEQ ID NO: 154350 - protein, 9 aa, Artificial Sequence
  Description of Artificial Sequence: Synthetic peptide
  Seed: GMMMGMFNM
GKMMGMFNV

SEQ ID NO: 154351 - protein, 9 aa, Artificial Sequence
  Description of Artificial Sequence: Synthetic peptide
  Seed: GMMMGMFNM
GKMMGMFNY

SEQ ID NO: 154352 - protein, 9 aa, Artificial Sequence
  Description of Artificial Sequence: Synthetic peptide
  Seed: GMFNMLSTV
GLFNMLSTA

SEQ ID NO: 154353 - protein, 9 aa, Artificial Sequence
  Description of Artificial Sequence: Synthetic peptide
  Seed: GMFNMLSTV
GLFNMLSTC

SEQ ID NO: 154354 - protein, 9 aa, Artificial Sequence
  Description of Artificial Sequence: Synthetic peptide
  Seed: GMFNMLSTV
GLFNMLSTF

SEQ ID NO: 154355 - protein, 9 aa, Artificial Sequence
  Description of Artificial Sequence: Synthetic peptide
  Seed: GMFNMLSTV
GLFNMLSTG

SEQ ID NO: 154356 - protein, 9 aa, Artificial Sequence
  Description of Artificial Sequence: Synthetic peptide
  Seed: GMFNMLSTV
GLFNMLSTH

SEQ ID NO: 154357 - protein, 9 aa, Artificial Sequence
  Description of Artificial Sequence: Synthetic peptide
  Seed: GMFNMLSTV
GLFNMLSTI

SEQ ID NO: 154358 - protein, 9 aa, Artificial Sequence
  Description of Artificial Sequence: Synthetic peptide
  Seed: GMFNMLSTV
GLFNMLSTL

SEQ ID NO: 154359 - protein, 9 aa, Artificial Sequence
  Description of Artificial Sequence: Synthetic peptide
  Seed: GMFNMLSTV
GLFNMLSTM

SEQ ID NO: 154360 - protein, 9 aa, Artificial Sequence
  Description of Artificial Sequence: Synthetic peptide
  Seed: GMFNMLSTV
GLFNMLSTP

SEQ ID NO: 154361 - protein, 9 aa, Artificial Sequence
  Description of Artificial Sequence: Synthetic peptide
  Seed: GMFNMLSTV
GLFNMLSTS

SEQ ID NO: 154362 - protein, 9 aa, Artificial Sequence
  Description of Artificial Sequence: Synthetic peptide
  Seed: GMFNMLSTV
GLFNMLSTT

SEQ ID NO: 154363 - protein, 9 aa, Artificial Sequence
  Description of Artificial Sequence: Synthetic peptide
  Seed: GMFNMLSTV
GLFNMLSTV

SEQ ID NO: 154364 - protein, 10 aa, Artificial Sequence
  Description of Artificial Sequence: Synthetic peptide
  Seed: GMFNMLSTVL
GLFNMLSTVA

SEQ ID NO: 154365 - protein, 10 aa, Artificial Sequence
  Description of Artificial Sequence: Synthetic peptide
  Seed: GMFNMLSTVL
GLFNMLSTVC

SEQ ID NO: 154366 - protein, 10 aa, Artificial Sequence
  Description of Artificial Sequence: Synthetic peptide
  Seed: GMFNMLSTVL
GLFNMLSTVD

SEQ ID NO: 154367 - protein, 10 aa, Artificial Sequence
  Description of Artificial Sequence: Synthetic peptide
  Seed: GMFNMLSTVL
GLFNMLSTVE

SEQ ID NO: 154368 - protein, 10 aa, Artificial Sequence
  Description of Artificial Sequence: Synthetic peptide
  Seed: GMFNMLSTVL
GLFNMLSTVF

SEQ ID NO: 154369 - protein, 10 aa, Artificial Sequence
  Description of Artificial Sequence: Synthetic peptide
  Seed: GMFNMLSTVL
GLFNMLSTVG

SEQ ID NO: 154370 - protein, 10 aa, Artificial Sequence
  Description of Artificial Sequence: Synthetic peptide
  Seed: GMFNMLSTVL
GLFNMLSTVH

SEQ ID NO: 154371 - protein, 10 aa, Artificial Sequence
  Description of Artificial Sequence: Synthetic peptide
  Seed: GMFNMLSTVL
GLFNMLSTVI

SEQ ID NO: 154372 - protein, 10 aa, Artificial Sequence
  Description of Artificial Sequence: Synthetic peptide
  Seed: GMFNMLSTVL
GLFNMLSTVK

SEQ ID NO: 154373 - protein, 10 aa, Artificial Sequence
  Description of Artificial Sequence: Synthetic peptide
  Seed: GMFNMLSTVL
GLFNMLSTVL

SEQ ID NO: 154374 - protein, 10 aa, Artificial Sequence
  Description of Artificial Sequence: Synthetic peptide
  Seed: GMFNMLSTVL
GLFNMLSTVM

SEQ ID NO: 154375 - protein, 10 aa, Artificial Sequence
  Description of Artificial Sequence: Synthetic peptide
  Seed: GMFNMLSTVL
GLFNMLSTVN

SEQ ID NO: 154376 - protein, 10 aa, Artificial Sequence
  Description of Artificial Sequence: Synthetic peptide
  Seed: GMFNMLSTVL
GLFNMLSTVP

SEQ ID NO: 154377 - protein, 10 aa, Artificial Sequence
  Description of Artificial Sequence: Synthetic peptide
  Seed: GMFNMLSTVL
GLFNMLSTVQ

SEQ ID NO: 154378 - protein, 10 aa, Artificial Sequence
  Description of Artificial Sequence: Synthetic peptide
  Seed: GMFNMLSTVL
GLFNMLSTVR

SEQ ID NO: 154379 - protein, 10 aa, Artificial Sequence
  Description of Artificial Sequence: Synthetic peptide
  Seed: GMFNMLSTVL
GLFNMLSTVS

SEQ ID NO: 154380 - protein, 10 aa, Artificial Sequence
  Description of Artificial Sequence: Synthetic peptide
  Seed: GMFNMLSTVL
GLFNMLSTVT

SEQ ID NO: 154381 - protein, 10 aa, Artificial Sequence
  Description of Artificial Sequence: Synthetic peptide
  Seed: GMFNMLSTVL
GLFNMLSTVV

SEQ ID NO: 154382 - protein, 10 aa, Artificial Sequence
  Description of Artificial Sequence: Synthetic peptide
  Seed: GMFNMLSTVL
GLFNMLSTVW

SEQ ID NO: 154383 - protein, 10 aa, Artificial Sequence
  Description of Artificial Sequence: Synthetic peptide
  Seed: GMFNMLSTVL
GLFNMLSTVY

SEQ ID NO: 154384 - protein, 9 aa, Artificial Sequence
  Description of Artificial Sequence: Synthetic peptide
  Seed: GMFNMLSTV
GLFNMLSTW

SEQ ID NO: 154385 - protein, 9 aa, Artificial Sequence
  Description of Artificial Sequence: Synthetic peptide
  Seed: GMFNMLSTV
GLFNMLSTY

SEQ ID NO: 154386 - protein, 9 aa, Artificial Sequence
  Description of Artificial Sequence: Synthetic peptide
  Seed: GMMMGMFNM
GLMMGMFNA

SEQ ID NO: 154387 - protein, 9 aa, Artificial Sequence
  Description of Artificial Sequence: Synthetic peptide
  Seed: GMMMGMFNM
GLMMGMFNC

SEQ ID NO: 154388 - protein, 9 aa, Artificial Sequence
  Description of Artificial Sequence: Synthetic peptide
  Seed: GMMMGMFNM
GLMMGMFNF

SEQ ID NO: 154389 - protein, 9 aa, Artificial Sequence
  Description of Artificial Sequence: Synthetic peptide
  Seed: GMMMGMFNM
GLMMGMFNG

SEQ ID NO: 154390 - protein, 9 aa, Artificial Sequence
  Description of Artificial Sequence: Synthetic peptide
  Seed: GMMMGMFNM
GLMMGMFNI

SEQ ID NO: 154391 - protein, 9 aa, Artificial Sequence
  Description of Artificial Sequence: Synthetic peptide
  Seed: GMMMGMFNM
GLMMGMFNL

SEQ ID NO: 154392 - protein, 9 aa, Artificial Sequence
  Description of Artificial Sequence: Synthetic peptide
  Seed: GMMMGMFNM
GLMMGMFNM

SEQ ID NO: 154393 - protein, 10 aa, Artificial Sequence
  Description of Artificial Sequence: Synthetic peptide
  Seed: GMMMGMFNML
GLMMGMFNMA

SEQ ID NO: 154394 - protein, 10 aa, Artificial Sequence
  Description of Artificial Sequence: Synthetic peptide
  Seed: GMMMGMFNML
GLMMGMFNMC

SEQ ID NO: 154395 - protein, 10 aa, Artificial Sequence
  Description of Artificial Sequence: Synthetic peptide
  Seed: GMMMGMFNML
GLMMGMFNMF

SEQ ID NO: 154396 - protein, 10 aa, Artificial Sequence
  Description of Artificial Sequence: Synthetic peptide
  Seed: GMMMGMFNML
GLMMGMFNMI

SEQ ID NO: 154397 - protein, 10 aa, Artificial Sequence
  Description of Artificial Sequence: Synthetic peptide
  Seed: GMMMGMFNML
GLMMGMFNML

SEQ ID NO: 154398 - protein, 10 aa, Artificial Sequence
  Description of Artificial Sequence: Synthetic peptide
  Seed: GMMMGMFNML
GLMMGMFNMM

SEQ ID NO: 154399 - protein, 10 aa, Artificial Sequence
  Description of Artificial Sequence: Synthetic peptide
  Seed: GMMMGMFNML
GLMMGMFNMP

SEQ ID NO: 154400 - protein, 10 aa, Artificial Sequence
  Description of Artificial Sequence: Synthetic peptide
  Seed: GMMMGMFNML
GLMMGMFNMS

SEQ ID NO: 154401 - protein, 10 aa, Artificial Sequence
  Description of Artificial Sequence: Synthetic peptide
  Seed: GMMMGMFNML
GLMMGMFNMT

SEQ ID NO: 154402 - protein, 10 aa, Artificial Sequence
  Description of Artificial Sequence: Synthetic peptide
  Seed: GMMMGMFNML
GLMMGMFNMV

SEQ ID NO: 154403 - protein, 9 aa, Artificial Sequence
  Description of Artificial Sequence: Synthetic peptide
  Seed: GMMMGMFNM
GLMMGMFNP

SEQ ID NO: 154404 - protein, 9 aa, Artificial Sequence
  Description of Artificial Sequence: Synthetic peptide
  Seed: GMMMGMFNM
GLMMGMFNS

SEQ ID NO: 154405 - protein, 9 aa, Artificial Sequence
  Description of Artificial Sequence: Synthetic peptide
  Seed: GMMMGMFNM
GLMMGMFNT

SEQ ID NO: 154406 - protein, 9 aa, Artificial Sequence
  Description of Artificial Sequence: Synthetic peptide
  Seed: GMMMGMFNM
GLMMGMFNV

SEQ ID NO: 154407 - protein, 9 aa, Artificial Sequence
  Description of Artificial Sequence: Synthetic peptide
  Seed: GMMMGMFNM
GLMMGMFNY

SEQ ID NO: 154408 - protein, 10 aa, Artificial Sequence
  Description of Artificial Sequence: Synthetic peptide
  Seed: GLQSSDDFAL
GLQSSDDFAI

SEQ ID NO: 154409 - protein, 11 aa, Artificial Sequence
  Description of Artificial Sequence: Synthetic peptide
  Seed: GLQSSDDFALI
GLQSSDDFALA

SEQ ID NO: 154410 - protein, 11 aa, Artificial Sequence
  Description of Artificial Sequence: Synthetic peptide
  Seed: GLQSSDDFALI
GLQSSDDFALL

SEQ ID NO: 154411 - protein, 11 aa, Artificial Sequence
  Description of Artificial Sequence: Synthetic peptide
  Seed: GLQSSDDFALI
GLQSSDDFALM

SEQ ID NO: 154412 - protein, 11 aa, Artificial Sequence
  Description of Artificial Sequence: Synthetic peptide
  Seed: GLQSSDDFALI
GLQSSDDFALV

SEQ ID NO: 154413 - protein, 10 aa, Artificial Sequence
  Description of Artificial Sequence: Synthetic peptide
  Seed: GLQSSDDFAL
GLQSSDDFAM

SEQ ID NO: 154414 - protein, 10 aa, Artificial Sequence
  Description of Artificial Sequence: Synthetic peptide
  Seed: GLQSSDDFAL
GLQSSDDFAV

SEQ ID NO: 154415 - protein, 9 aa, Artificial Sequence
  Description of Artificial Sequence: Synthetic peptide
  Seed: GMFNMLSTV
GMFNMLSTA

SEQ ID NO: 154416 - protein, 9 aa, Artificial Sequence
  Description of Artificial Sequence: Synthetic peptide
  Seed: GMFNMLSTV
GMFNMLSTC

SEQ ID NO: 154417 - protein, 9 aa, Artificial Sequence
  Description of Artificial Sequence: Synthetic peptide
  Seed: GMFNMLSTV
GMFNMLSTF

SEQ ID NO: 154418 - protein, 9 aa, Artificial Sequence
  Description of Artificial Sequence: Synthetic peptide
  Seed: GMFNMLSTV
GMFNMLSTG

SEQ ID NO: 154419 - protein, 9 aa, Artificial Sequence
  Description of Artificial Sequence: Synthetic peptide
  Seed: GMFNMLSTV
GMFNMLSTH

SEQ ID NO: 154420 - protein, 9 aa, Artificial Sequence
  Description of Artificial Sequence: Synthetic peptide
  Seed: GMFNMLSTV
GMFNMLSTI

SEQ ID NO: 154421 - protein, 9 aa, Artificial Sequence
  Description of Artificial Sequence: Synthetic peptide
  Seed: GMFNMLSTV
GMFNMLSTL

SEQ ID NO: 154422 - protein, 9 aa, Artificial Sequence
  Description of Artificial Sequence: Synthetic peptide
  Seed: GMFNMLSTV
GMFNMLSTM

SEQ ID NO: 154423 - protein, 9 aa, Artificial Sequence
  Description of Artificial Sequence: Synthetic peptide
  Seed: GMFNMLSTV
GMFNMLSTP

SEQ ID NO: 154424 - protein, 9 aa, Artificial Sequence
  Description of Artificial Sequence: Synthetic peptide
  Seed: GMFNMLSTV
GMFNMLSTS

SEQ ID NO: 154425 - protein, 9 aa, Artificial Sequence
  Description of Artificial Sequence: Synthetic peptide
  Seed: GMFNMLSTV
GMFNMLSTT

SEQ ID NO: 154426 - protein, 10 aa, Artificial Sequence
  Description of Artificial Sequence: Synthetic peptide
  Seed: GMFNMLSTVL
GMFNMLSTVA

SEQ ID NO: 154427 - protein, 10 aa, Artificial Sequence
  Description of Artificial Sequence: Synthetic peptide
  Seed: GMFNMLSTVL
GMFNMLSTVC

SEQ ID NO: 154428 - protein, 10 aa, Artificial Sequence
  Description of Artificial Sequence: Synthetic peptide
  Seed: GMFNMLSTVL
GMFNMLSTVD

SEQ ID NO: 154429 - protein, 10 aa, Artificial Sequence
  Description of Artificial Sequence: Synthetic peptide
  Seed: GMFNMLSTVL
GMFNMLSTVE

SEQ ID NO: 154430 - protein, 10 aa, Artificial Sequence
  Description of Artificial Sequence: Synthetic peptide
  Seed: GMFNMLSTVL
GMFNMLSTVF

SEQ ID NO: 154431 - protein, 10 aa, Artificial Sequence
  Description of Artificial Sequence: Synthetic peptide
  Seed: GMFNMLSTVL
GMFNMLSTVG

SEQ ID NO: 154432 - protein, 10 aa, Artificial Sequence
  Description of Artificial Sequence: Synthetic peptide
  Seed: GMFNMLSTVL
GMFNMLSTVH

SEQ ID NO: 154433 - protein, 10 aa, Artificial Sequence
  Description of Artificial Sequence: Synthetic peptide
  Seed: GMFNMLSTVL
GMFNMLSTVI

SEQ ID NO: 154434 - protein, 10 aa, Artificial Sequence
  Description of Artificial Sequence: Synthetic peptide
  Seed: GMFNMLSTVL
GMFNMLSTVK

SEQ ID NO: 154435 - protein, 10 aa, Artificial Sequence
  Description of Artificial Sequence: Synthetic peptide
  Seed: GMFNMLSTVL
GMFNMLSTVM

SEQ ID NO: 154436 - protein, 10 aa, Artificial Sequence
  Description of Artificial Sequence: Synthetic peptide
  Seed: GMFNMLSTVL
GMFNMLSTVN

SEQ ID NO: 154437 - protein, 10 aa, Artificial Sequence
  Description of Artificial Sequence: Synthetic peptide
  Seed: GMFNMLSTVL
GMFNMLSTVP

SEQ ID NO: 154438 - protein, 10 aa, Artificial Sequence
  Description of Artificial Sequence: Synthetic peptide
  Seed: GMFNMLSTVL
GMFNMLSTVQ

SEQ ID NO: 154439 - protein, 10 aa, Artificial Sequence
  Description of Artificial Sequence: Synthetic peptide
  Seed: GMFNMLSTVL
GMFNMLSTVR

SEQ ID NO: 154440 - protein, 10 aa, Artificial Sequence
  Description of Artificial Sequence: Synthetic peptide
  Seed: GMFNMLSTVL
GMFNMLSTVS

SEQ ID NO: 154441 - protein, 10 aa, Artificial Sequence
  Description of Artificial Sequence: Synthetic peptide
  Seed: GMFNMLSTVL
GMFNMLSTVT

SEQ ID NO: 154442 - protein, 10 aa, Artificial Sequence
  Description of Artificial Sequence: Synthetic peptide
  Seed: GMFNMLSTVL
GMFNMLSTVV

SEQ ID NO: 154443 - protein, 10 aa, Artificial Sequence
  Description of Artificial Sequence: Synthetic peptide
  Seed: GMFNMLSTVL
GMFNMLSTVW

SEQ ID NO: 154444 - protein, 10 aa, Artificial Sequence
  Description of Artificial Sequence: Synthetic peptide
  Seed: GMFNMLSTVL
GMFNMLSTVY

SEQ ID NO: 154445 - protein, 9 aa, Artificial Sequence
  Description of Artificial Sequence: Synthetic peptide
  Seed: GMFNMLSTV
GMFNMLSTW

SEQ ID NO: 154446 - protein, 9 aa, Artificial Sequence
  Description of Artificial Sequence: Synthetic peptide
  Seed: GMFNMLSTV
GMFNMLSTY

SEQ ID NO: 154447 - protein, 9 aa, Artificial Sequence
  Description of Artificial Sequence: Synthetic peptide
  Seed: GMMMGMFNM
GMMMGMFNA

SEQ ID NO: 154448 - protein, 9 aa, Artificial Sequence
  Description of Artificial Sequence: Synthetic peptide
  Seed: GMMMGMFNM
GMMMGMFNC

SEQ ID NO: 154449 - protein, 9 aa, Artificial Sequence
  Description of Artificial Sequence: Synthetic peptide
  Seed: GMMMGMFNM
GMMMGMFNF

SEQ ID NO: 154450 - protein, 9 aa, Artificial Sequence
  Description of Artificial Sequence: Synthetic peptide
  Seed: GMMMGMFNM
GMMMGMFNG

SEQ ID NO: 154451 - protein, 9 aa, Artificial Sequence
  Description of Artificial Sequence: Synthetic peptide
  Seed: GMMMGMFNM
GMMMGMFNI

SEQ ID NO: 154452 - protein, 9 aa, Artificial Sequence
  Description of Artificial Sequence: Synthetic peptide
  Seed: GMMMGMFNM
GMMMGMFNL

SEQ ID NO: 154453 - protein, 10 aa, Artificial Sequence
  Description of Artificial Sequence: Synthetic peptide
  Seed: GMMMGMFNML
GMMMGMFNMA

SEQ ID NO: 154454 - protein, 10 aa, Artificial Sequence
  Description of Artificial Sequence: Synthetic peptide
  Seed: GMMMGMFNML
GMMMGMFNMC

SEQ ID NO: 154455 - protein, 10 aa, Artificial Sequence
  Description of Artificial Sequence: Synthetic peptide
  Seed: GMMMGMFNML
GMMMGMFNMF

SEQ ID NO: 154456 - protein, 10 aa, Artificial Sequence
  Description of Artificial Sequence: Synthetic peptide
  Seed: GMMMGMFNML
GMMMGMFNMI

SEQ ID NO: 154457 - protein, 10 aa, Artificial Sequence
  Description of Artificial Sequence: Synthetic peptide
  Seed: GMMMGMFNML
GMMMGMFNMM

SEQ ID NO: 154458 - protein, 10 aa, Artificial Sequence
  Description of Artificial Sequence: Synthetic peptide
  Seed: GMMMGMFNML
GMMMGMFNMP

SEQ ID NO: 154459 - protein, 10 aa, Artificial Sequence
  Description of Artificial Sequence: Synthetic peptide
  Seed: GMMMGMFNML
GMMMGMFNMS

SEQ ID NO: 154460 - protein, 10 aa, Artificial Sequence
  Description of Artificial Sequence: Synthetic peptide
  Seed: GMMMGMFNML
GMMMGMFNMT

SEQ ID NO: 154461 - protein, 10 aa, Artificial Sequence
  Description of Artificial Sequence: Synthetic peptide
  Seed: GMMMGMFNML
GMMMGMFNMV

SEQ ID NO: 154462 - protein, 9 aa, Artificial Sequence
  Description of Artificial Sequence: Synthetic peptide
  Seed: GMMMGMFNM
GMMMGMFNP

SEQ ID NO: 154463 - protein, 9 aa, Artificial Sequence
  Description of Artificial Sequence: Synthetic peptide
  Seed: GMMMGMFNM
GMMMGMFNS

SEQ ID NO: 154464 - protein, 9 aa, Artificial Sequence
  Description of Artificial Sequence: Synthetic peptide
  Seed: GMMMGMFNM
GMMMGMFNT

SEQ ID NO: 154465 - protein, 9 aa, Artificial Sequence
  Description of Artificial Sequence: Synthetic peptide
  Seed: GMMMGMFNM
GMMMGMFNV

SEQ ID NO: 154466 - protein, 9 aa, Artificial Sequence
  Description of Artificial Sequence: Synthetic peptide
  Seed: GMMMGMFNM
GMMMGMFNY

SEQ ID NO: 154467 - protein, 10 aa, Artificial Sequence
  Description of Artificial Sequence: Synthetic peptide
  Seed: GLQSSDDFAL
GMQSSDDFAI

SEQ ID NO: 154468 - protein, 10 aa, Artificial Sequence
  Description of Artificial Sequence: Synthetic peptide
  Seed: GLQSSDDFAL
GMQSSDDFAL

SEQ ID NO: 154469 - protein, 11 aa, Artificial Sequence
  Description of Artificial Sequence: Synthetic peptide
  Seed: GLQSSDDFALI
GMQSSDDFALA

SEQ ID NO: 154470 - protein, 11 aa, Artificial Sequence
  Description of Artificial Sequence: Synthetic peptide
  Seed: GLQSSDDFALI
GMQSSDDFALI

SEQ ID NO: 154471 - protein, 11 aa, Artificial Sequence
  Description of Artificial Sequence: Synthetic peptide
  Seed: GLQSSDDFALI
GMQSSDDFALL

SEQ ID NO: 154472 - protein, 11 aa, Artificial Sequence
  Description of Artificial Sequence: Synthetic peptide
  Seed: GLQSSDDFALI
GMQSSDDFALM

SEQ ID NO: 154473 - protein, 11 aa, Artificial Sequence
  Description of Artificial Sequence: Synthetic peptide
  Seed: GLQSSDDFALI
GMQSSDDFALV

SEQ ID NO: 154474 - protein, 10 aa, Artificial Sequence
  Description of Artificial Sequence: Synthetic peptide
  Seed: GLQSSDDFAL
GMQSSDDFAM

SEQ ID NO: 154475 - protein, 10 aa, Artificial Sequence
  Description of Artificial Sequence: Synthetic peptide
  Seed: GLQSSDDFAL
GMQSSDDFAV

SEQ ID NO: 154476 - protein, 9 aa, Artificial Sequence
  Description of Artificial Sequence: Synthetic peptide
  Seed: GMFNMLSTV
GNFNMLSTF

SEQ ID NO: 154477 - protein, 9 aa, Artificial Sequence
  Description of Artificial Sequence: Synthetic peptide
  Seed: GMFNMLSTV
GNFNMLSTM

SEQ ID NO: 154478 - protein, 10 aa, Artificial Sequence
  Description of Artificial Sequence: Synthetic peptide
  Seed: GMFNMLSTVL
GNFNMLSTVF

SEQ ID NO: 154479 - protein, 10 aa, Artificial Sequence
  Description of Artificial Sequence: Synthetic peptide
  Seed: GMFNMLSTVL
GNFNMLSTVY

SEQ ID NO: 154480 - protein, 9 aa, Artificial Sequence
  Description of Artificial Sequence: Synthetic peptide
  Seed: GMFNMLSTV
GNFNMLSTY

SEQ ID NO: 154481 - protein, 9 aa, Artificial Sequence
  Description of Artificial Sequence: Synthetic peptide
  Seed: GMMMGMFNM
GNMMGMFNF

SEQ ID NO: 154482 - protein, 10 aa, Artificial Sequence
  Description of Artificial Sequence: Synthetic peptide
  Seed: GMMMGMFNML
GNMMGMFNMA

SEQ ID NO: 154483 - protein, 10 aa, Artificial Sequence
  Description of Artificial Sequence: Synthetic peptide
  Seed: GMMMGMFNML
GNMMGMFNMI

SEQ ID NO: 154484 - protein, 10 aa, Artificial Sequence
  Description of Artificial Sequence: Synthetic peptide
  Seed: GMMMGMFNML
GNMMGMFNML

SEQ ID NO: 154485 - protein, 10 aa, Artificial Sequence
  Description of Artificial Sequence: Synthetic peptide
  Seed: GMMMGMFNML
GNMMGMFNMM

SEQ ID NO: 154486 - protein, 10 aa, Artificial Sequence
  Description of Artificial Sequence: Synthetic peptide
  Seed: GMMMGMFNML
GNMMGMFNMT

SEQ ID NO: 154487 - protein, 10 aa, Artificial Sequence
  Description of Artificial Sequence: Synthetic peptide
  Seed: GMMMGMFNML
GNMMGMFNMV

SEQ ID NO: 154488 - protein, 9 aa, Artificial Sequence
  Description of Artificial Sequence: Synthetic peptide
  Seed: GMMMGMFNM
GNMMGMFNV

SEQ ID NO: 154489 - protein, 9 aa, Artificial Sequence
  Description of Artificial Sequence: Synthetic peptide
  Seed: GMMMGMFNM
GNMMGMFNY

SEQ ID NO: 154490 - protein, 9 aa, Artificial Sequence
  Description of Artificial Sequence: Synthetic peptide
  Seed: GMFNMLSTV
GPFNMLSTF

SEQ ID NO: 154491 - protein, 9 aa, Artificial Sequence
  Description of Artificial Sequence: Synthetic peptide
  Seed: GMFNMLSTV
GPFNMLSTY

SEQ ID NO: 154492 - protein, 10 aa, Artificial Sequence
  Description of Artificial Sequence: Synthetic peptide
  Seed: GMMMGMFNML
GPMMGMFNMA

SEQ ID NO: 154493 - protein, 10 aa, Artificial Sequence
  Description of Artificial Sequence: Synthetic peptide
  Seed: GMMMGMFNML
GPMMGMFNMI

SEQ ID NO: 154494 - protein, 10 aa, Artificial Sequence
  Description of Artificial Sequence: Synthetic peptide
  Seed: GMMMGMFNML
GPMMGMFNML

SEQ ID NO: 154495 - protein, 10 aa, Artificial Sequence
  Description of Artificial Sequence: Synthetic peptide
  Seed: GMMMGMFNML
GPMMGMFNMM

SEQ ID NO: 154496 - protein, 10 aa, Artificial Sequence
  Description of Artificial Sequence: Synthetic peptide
  Seed: GMMMGMFNML
GPMMGMFNMT

SEQ ID NO: 154497 - protein, 10 aa, Artificial Sequence
  Description of Artificial Sequence: Synthetic peptide
  Seed: GMMMGMFNML
GPMMGMFNMV

SEQ ID NO: 154498 - protein, 9 aa, Artificial Sequence
  Description of Artificial Sequence: Synthetic peptide
  Seed: GMMMGMFNM
GPMMGMFNY

SEQ ID NO: 154499 - protein, 9 aa, Artificial Sequence
  Description of Artificial Sequence: Synthetic peptide
  Seed: GMFNMLSTV
GQFNMLSTA

SEQ ID NO: 154500 - protein, 9 aa, Artificial Sequence
  Description of Artificial Sequence: Synthetic peptide
  Seed: GMFNMLSTV
GQFNMLSTC

SEQ ID NO: 154501 - protein, 9 aa, Artificial Sequence
  Description of Artificial Sequence: Synthetic peptide
  Seed: GMFNMLSTV
GQFNMLSTF

SEQ ID NO: 154502 - protein, 9 aa, Artificial Sequence
  Description of Artificial Sequence: Synthetic peptide
  Seed: GMFNMLSTV
GQFNMLSTG

SEQ ID NO: 154503 - protein, 9 aa, Artificial Sequence
  Description of Artificial Sequence: Synthetic peptide
  Seed: GMFNMLSTV
GQFNMLSTH

SEQ ID NO: 154504 - protein, 9 aa, Artificial Sequence
  Description of Artificial Sequence: Synthetic peptide
  Seed: GMFNMLSTV
GQFNMLSTI

SEQ ID NO: 154505 - protein, 9 aa, Artificial Sequence
  Description of Artificial Sequence: Synthetic peptide
  Seed: GMFNMLSTV
GQFNMLSTL

SEQ ID NO: 154506 - protein, 9 aa, Artificial Sequence
  Description of Artificial Sequence: Synthetic peptide
  Seed: GMFNMLSTV
GQFNMLSTM

SEQ ID NO: 154507 - protein, 9 aa, Artificial Sequence
  Description of Artificial Sequence: Synthetic peptide
  Seed: GMFNMLSTV
GQFNMLSTS

SEQ ID NO: 154508 - protein, 9 aa, Artificial Sequence
  Description of Artificial Sequence: Synthetic peptide
  Seed: GMFNMLSTV
GQFNMLSTT

SEQ ID NO: 154509 - protein, 9 aa, Artificial Sequence
  Description of Artificial Sequence: Synthetic peptide
  Seed: GMFNMLSTV
GQFNMLSTV

SEQ ID NO: 154510 - protein, 10 aa, Artificial Sequence
  Description of Artificial Sequence: Synthetic peptide
  Seed: GMFNMLSTVL
GQFNMLSTVA

SEQ ID NO: 154511 - protein, 10 aa, Artificial Sequence
  Description of Artificial Sequence: Synthetic peptide
  Seed: GMFNMLSTVL
GQFNMLSTVC

SEQ ID NO: 154512 - protein, 10 aa, Artificial Sequence
  Description of Artificial Sequence: Synthetic peptide
  Seed: GMFNMLSTVL
GQFNMLSTVD

SEQ ID NO: 154513 - protein, 10 aa, Artificial Sequence
  Description of Artificial Sequence: Synthetic peptide
  Seed: GMFNMLSTVL
GQFNMLSTVE

SEQ ID NO: 154514 - protein, 10 aa, Artificial Sequence
  Description of Artificial Sequence: Synthetic peptide
  Seed: GMFNMLSTVL
GQFNMLSTVF

SEQ ID NO: 154515 - protein, 10 aa, Artificial Sequence
  Description of Artificial Sequence: Synthetic peptide
  Seed: GMFNMLSTVL
GQFNMLSTVG

SEQ ID NO: 154516 - protein, 10 aa, Artificial Sequence
  Description of Artificial Sequence: Synthetic peptide
  Seed: GMFNMLSTVL
GQFNMLSTVH

SEQ ID NO: 154517 - protein, 10 aa, Artificial Sequence
  Description of Artificial Sequence: Synthetic peptide
  Seed: GMFNMLSTVL
GQFNMLSTVI

SEQ ID NO: 154518 - protein, 10 aa, Artificial Sequence
  Description of Artificial Sequence: Synthetic peptide
  Seed: GMFNMLSTVL
GQFNMLSTVK

SEQ ID NO: 154519 - protein, 10 aa, Artificial Sequence
  Description of Artificial Sequence: Synthetic peptide
  Seed: GMFNMLSTVL
GQFNMLSTVL

SEQ ID NO: 154520 - protein, 10 aa, Artificial Sequence
  Description of Artificial Sequence: Synthetic peptide
  Seed: GMFNMLSTVL
GQFNMLSTVM

SEQ ID NO: 154521 - protein, 10 aa, Artificial Sequence
  Description of Artificial Sequence: Synthetic peptide
  Seed: GMFNMLSTVL
GQFNMLSTVN

SEQ ID NO: 154522 - protein, 10 aa, Artificial Sequence
  Description of Artificial Sequence: Synthetic peptide
  Seed: GMFNMLSTVL
GQFNMLSTVP

SEQ ID NO: 154523 - protein, 10 aa, Artificial Sequence
  Description of Artificial Sequence: Synthetic peptide
  Seed: GMFNMLSTVL
GQFNMLSTVQ

SEQ ID NO: 154524 - protein, 10 aa, Artificial Sequence
  Description of Artificial Sequence: Synthetic peptide
  Seed: GMFNMLSTVL
GQFNMLSTVR

SEQ ID NO: 154525 - protein, 10 aa, Artificial Sequence
  Description of Artificial Sequence: Synthetic peptide
  Seed: GMFNMLSTVL
GQFNMLSTVS

SEQ ID NO: 154526 - protein, 10 aa, Artificial Sequence
  Description of Artificial Sequence: Synthetic peptide
  Seed: GMFNMLSTVL
GQFNMLSTVT

SEQ ID NO: 154527 - protein, 10 aa, Artificial Sequence
  Description of Artificial Sequence: Synthetic peptide
  Seed: GMFNMLSTVL
GQFNMLSTVV

SEQ ID NO: 154528 - protein, 10 aa, Artificial Sequence
  Description of Artificial Sequence: Synthetic peptide
  Seed: GMFNMLSTVL
GQFNMLSTVW

SEQ ID NO: 154529 - protein, 10 aa, Artificial Sequence
  Description of Artificial Sequence: Synthetic peptide
  Seed: GMFNMLSTVL
GQFNMLSTVY

SEQ ID NO: 154530 - protein, 9 aa, Artificial Sequence
  Description of Artificial Sequence: Synthetic peptide
  Seed: GMFNMLSTV
GQFNMLSTW

SEQ ID NO: 154531 - protein, 9 aa, Artificial Sequence
  Description of Artificial Sequence: Synthetic peptide
  Seed: GMFNMLSTV
GQFNMLSTY

SEQ ID NO: 154532 - protein, 9 aa, Artificial Sequence
  Description of Artificial Sequence: Synthetic peptide
  Seed: GMMMGMFNM
GQMMGMFNA

SEQ ID NO: 154533 - protein, 9 aa, Artificial Sequence
  Description of Artificial Sequence: Synthetic peptide
  Seed: GMMMGMFNM
GQMMGMFNC

SEQ ID NO: 154534 - protein, 9 aa, Artificial Sequence
  Description of Artificial Sequence: Synthetic peptide
  Seed: GMMMGMFNM
GQMMGMFNF

SEQ ID NO: 154535 - protein, 9 aa, Artificial Sequence
  Description of Artificial Sequence: Synthetic peptide
  Seed: GMMMGMFNM
GQMMGMFNH

SEQ ID NO: 154536 - protein, 9 aa, Artificial Sequence
  Description of Artificial Sequence: Synthetic peptide
  Seed: GMMMGMFNM
GQMMGMFNI

SEQ ID NO: 154537 - protein, 9 aa, Artificial Sequence
  Description of Artificial Sequence: Synthetic peptide
  Seed: GMMMGMFNM
GQMMGMFNL

SEQ ID NO: 154538 - protein, 9 aa, Artificial Sequence
  Description of Artificial Sequence: Synthetic peptide
  Seed: GMMMGMFNM
GQMMGMFNM

SEQ ID NO: 154539 - protein, 10 aa, Artificial Sequence
  Description of Artificial Sequence: Synthetic peptide
  Seed: GMMMGMFNML
GQMMGMFNMA

SEQ ID NO: 154540 - protein, 10 aa, Artificial Sequence
  Description of Artificial Sequence: Synthetic peptide
  Seed: GMMMGMFNML
GQMMGMFNMF

SEQ ID NO: 154541 - protein, 10 aa, Artificial Sequence
  Description of Artificial Sequence: Synthetic peptide
  Seed: GMMMGMFNML
GQMMGMFNMI

SEQ ID NO: 154542 - protein, 10 aa, Artificial Sequence
  Description of Artificial Sequence: Synthetic peptide
  Seed: GMMMGMFNML
GQMMGMFNML

SEQ ID NO: 154543 - protein, 10 aa, Artificial Sequence
  Description of Artificial Sequence: Synthetic peptide
  Seed: GMMMGMFNML
GQMMGMFNMM

SEQ ID NO: 154544 - protein, 10 aa, Artificial Sequence
  Description of Artificial Sequence: Synthetic peptide
  Seed: GMMMGMFNML
GQMMGMFNMT

SEQ ID NO: 154545 - protein, 10 aa, Artificial Sequence
  Description of Artificial Sequence: Synthetic peptide
  Seed: GMMMGMFNML
GQMMGMFNMV

SEQ ID NO: 154546 - protein, 9 aa, Artificial Sequence
  Description of Artificial Sequence: Synthetic peptide
  Seed: GMMMGMFNM
GQMMGMFNP

SEQ ID NO: 154547 - protein, 9 aa, Artificial Sequence
  Description of Artificial Sequence: Synthetic peptide
  Seed: GMMMGMFNM
GQMMGMFNS

SEQ ID NO: 154548 - protein, 9 aa, Artificial Sequence
  Description of Artificial Sequence: Synthetic peptide
  Seed: GMMMGMFNM
GQMMGMFNT

SEQ ID NO: 154549 - protein, 9 aa, Artificial Sequence
  Description of Artificial Sequence: Synthetic peptide
  Seed: GMMMGMFNM
GQMMGMFNV

SEQ ID NO: 154550 - protein, 9 aa, Artificial Sequence
  Description of Artificial Sequence: Synthetic peptide
  Seed: GMMMGMFNM
GQMMGMFNW

SEQ ID NO: 154551 - protein, 9 aa, Artificial Sequence
  Description of Artificial Sequence: Synthetic peptide
  Seed: GMMMGMFNM
GQMMGMFNY

SEQ ID NO: 154552 - protein, 9 aa, Artificial Sequence
  Description of Artificial Sequence: Synthetic peptide
  Seed: GMFNMLSTV
GRFNMLSTF

SEQ ID NO: 154553 - protein, 9 aa, Artificial Sequence
  Description of Artificial Sequence: Synthetic peptide
  Seed: GMFNMLSTV
GRFNMLSTL

SEQ ID NO: 154554 - protein, 9 aa, Artificial Sequence
  Description of Artificial Sequence: Synthetic peptide
  Seed: GMFNMLSTV
GRFNMLSTM

SEQ ID NO: 154555 - protein, 10 aa, Artificial Sequence
  Description of Artificial Sequence: Synthetic peptide
  Seed: GMFNMLSTVL
GRFNMLSTVF

SEQ ID NO: 154556 - protein, 10 aa, Artificial Sequence
  Description of Artificial Sequence: Synthetic peptide
  Seed: GMFNMLSTVL
GRFNMLSTVM

SEQ ID NO: 154557 - protein, 10 aa, Artificial Sequence
  Description of Artificial Sequence: Synthetic peptide
  Seed: GMFNMLSTVL
GRFNMLSTVY

SEQ ID NO: 154558 - protein, 9 aa, Artificial Sequence
  Description of Artificial Sequence: Synthetic peptide
  Seed: GMFNMLSTV
GRFNMLSTY

SEQ ID NO: 154559 - protein, 9 aa, Artificial Sequence
  Description of Artificial Sequence: Synthetic peptide
  Seed: GMMMGMFNM
GRMMGMFNF

SEQ ID NO: 154560 - protein, 9 aa, Artificial Sequence
  Description of Artificial Sequence: Synthetic peptide
  Seed: GMMMGMFNM
GRMMGMFNM

SEQ ID NO: 154561 - protein, 10 aa, Artificial Sequence
  Description of Artificial Sequence: Synthetic peptide
  Seed: GMMMGMFNML
GRMMGMFNMA

SEQ ID NO: 154562 - protein, 10 aa, Artificial Sequence
  Description of Artificial Sequence: Synthetic peptide
  Seed: GMMMGMFNML
GRMMGMFNMI

SEQ ID NO: 154563 - protein, 10 aa, Artificial Sequence
  Description of Artificial Sequence: Synthetic peptide
  Seed: GMMMGMFNML
GRMMGMFNML

SEQ ID NO: 154564 - protein, 10 aa, Artificial Sequence
  Description of Artificial Sequence: Synthetic peptide
  Seed: GMMMGMFNML
GRMMGMFNMM
